United States Patent Application Publication US 2004/0034888 A1 - sequence listing, part 16

SEQ ID NO: 35558 - DNA, 2307 bp, Zea mays
  Clone ID: UC-ZMROB73056B04_FLI
ggagagcatgtaccccttgctcaacttccttcgcgcccacaactacaaggggatgaccatgatgttgaacgacagaatccgcagtctcagtgctctgcaaggtgcgctgaggaaggctgaggagcacctgtccaccctacaagctgataccccatactctgaatttcaccacaggttccaggaacttggtctggagaagggttggggtgattgcgctaagcgtgcacaggagactatccacctcctcttggacctcctggaggccccagatccgtccaccctggagaagttccttggaacgatccccatggtgttcaatgtcgttatcctctcccctcatggttacttcgctcaagctaatgtcttgggttaccctgacaccggaggccaggttgtctacatcttggatcaagtgcgcgctatggagaacgaaatgctgctgaggatcaagcagtgtggtcttgacatcacgccgaagatccttattgtcaccaggttgctccctgatgcaactggcaccacctgtggccagcgccttgagaaggtccttggcaccgagcactgccatatccttcgcgtgccattcagaacagaaaacggaatcgttcgcaagtggatctcgcgatttgaagtctggccgtacctggagacttacactgatgacgtggcgcatgagattgctggagagcttcaggccaatcctgacctgatcatcggaaactacagtgacggaaaccttgttgcgtgtttgctcgcccacaagatgggtgttactcactgtaccattgcccatgcgcttgagaaaactaagtaccctaactccgacctctactggaagaagtttgaggatcactaccacttctcgtgccagttcaccactgacttgattgcaatgaaccatgccgacttcatcatcaccagtaccttccaagagatcgccggaaacaaggacaccgtcggccagtacgagtcacacatggcgttcacaatgcctggcctgtaccgcgttgtccacggcattgatgtgttcgaccccaagttcaacatcgtgtctcctggcgcggacctgtccatctacttcccgtacaccgagtcgcacaagaggctgacctcccttcacccggagattgaggagctcctgtacagccaaaccgagaacacggagcacaagttcgttctgaacgacaggaacaagccaatcatcttctccatggctcgtctcgaccgtgtgaagaacttgactgggctggtggagctgtacggccggaacaagcggctgcaggagctggtgaacctcgtggtcgtctgcggcgaccatggcaacccttccaaggacaaggaggagcaggccgagttcaagaagatgtttgacctcatcgagcagtacaacctgaacgggcacatccgctggatctccgcccagatgaaccgcgtccgcaacggcgagctgtaccgctacatctgcgacaccaagggcgccttcgtgcagcctgctttctacgaggctttcgggctgacggtggttgaggccatgacctgcggcctgcccacgtttgccacagcctacggcggtccggccgagatcatcgtgcacggcgtgtctggctaccacatcgacccttaccagggcgacaaggcgtcggccctgctcgtggacttcttcgacaagtgccaggcggacccgagccactggagcaagatctcccagggcgggctccagcgtatcgaggagaagtacacctggaagctctactcggagaggctgatgaccctcaccggcgtgtacgggttctggaagtacgtgtccaacctggagaggcgcgagacccggcggtacctggagatgctgtacgcgctcaagtaccgcaccatggcgagcaccgtgccgctggccgtggagggagagccctccagcaagtgatgcgcgacggcggccacagacctgatcgatcgatgagcgagagggagcactcggagtgtcgtgtcttttcccttgccatttctttctttttttcccttcccggaggcgaaaaaaagagtctgcttttgctaggcggcgggcgttcgttgctgctctttgcttcaagagttaaatttacctaccttgtcaaggtcttgttccatcattgatccgggtgtcgcttttttagtagtctgatggactgttagtagtttgcgttgcgtcggttgagagggaacgttggtggtggtggtgtgtgtgcagtcaggcgtggtgctccctttgtttcctggatgggatgttgctccttgaataataatcgtagtggccttggagcccttttcctg

SEQ ID NO: 35559 - DNA, 2755 bp, Zea mays
  Clone ID: UC-ZMROB73056B12_FLI
ctatatgccacaaaaatcatgatatatcatcaagtacaggaggaatgccccatgctgcattgagtaaaacacaactgaaaaagagtgtgaattcaaatcttttagcagatgagaagtggcatttgataggcgcttctgtgtgggttcggttgatatctgtgcttgaacatcgtctaagggaattctttgagaaagagggacttgaacatgaagctggtgttagtggttcagaattcaggggtcttatcacttctgttgctgcaaagtttgttatggattccattcattttgtgtcatcttcattagtaccactgcatgcatcgttcttgaggaagaatttaccgatgaattcaagttcaagtttgctcttctggttagagtccaagttgcctcagcaactcccagtcagtgatagctatgatcacctctcgaggatttcacagctttcaaacagtgagaatatggaggcattgtttaatattttgtgggaaatatctgttaatcctgtggatgtttgtaatgcctttgtgagtgaaggagttaattgtttttccttaagcaacacgaatgtcactagatcttggaaggacataagatgtcctgtggttgagtgtgataaaattattactgaaagaagtggagaggaacatgaacacagacttggctccaagagattgggacagggattcgctgaaaaagcctcttataatggtgaagtgttgtatgaaactaaaaggagggagttgatcatacaaaaagagtttcagagcccaagggaaattctaaggagaagcggggagcttcttgaggcggtatgtcttaactctgtcaatgagaaacaagctgctattgctactaatcgaaagggccttgttttcttcaattggagtgacaagcagcataacaagagtttttcagagtacgtctggtcaggatctgattggccattagatggctgggctggctgtcagtctacacctactccaacttctatctctcctggtgttgatcttggtcggaaaaaagggtcacaacttggttcagttggagcaactacaggtttgagttctttagcaaagccaggaagagatctaactggtggtggagcatttggaattccaggctatgctggtattggggcctctgggtttgggtggggcgaacctgaagaatttgaggatttcattgatcctccagcaacacttgagaacatacattcaagagcattatcccgccatccctcattaccattgtttcttgttggttcaagcaatacacatgtgtatctgtgggagtttggtaaagctagtgctatggctacatatggtgttctacctgctgctaatattccaccgccttatgcactggcctccatatcatctgttcaatttgactgttatggacagcggtttgccactgctgcattagatggtaccatttgtacatggcaagttgaggtgggtggaagaagcaatgtctatcctacagagtcatctatatgctttgacagccacgcctcggatgttgcctatgtgtctgcaagtagatcagttattgcttctgctggatatagttcaaatggttcaaatgttgttatatgggacacactgtctccaccagctacatctcaaacatctatcatgtgtcatgaaggaggagctcggtctatttctgtgtttgatagtgatagaggctatgggtctatctcaccgcttgttgtaactggtgggaaaaatggagatatagctttgcatgattgccgcttcctttctactggaaagtccaagcatcatagagttaccactgagcatggtgtcgaggcatcttccatgcatgacatcaaatctagtacttttggtggtactgacagtgggatggtctggcatataccaaaggctcatctaggtagtgtcacaaaggtaacgaccatcccaaataccagcttgttcttaaccggaagcaaagatggagatgtgaaactttgggatgctaaaaactcccagctagtctttcactggacaaagatgcatgaacggcacaccttttttcaaccaacctccaggggctttggcggtgttgttagagctgctgtaacagatctccaggtgttgcctaatggtttcgtttcatgtggaggtgatggttctgtgaagcttgttcagataaaagatgatctcgctgcagcatatcagcgttaaaacaagcaaagagggaagaagacatgctagaaaatgcgatggatgcagttggtcacttgatatcattctattttgctttgctcattatacttttgagatgctttactcctttcaggggtggtatagcaaggaggaagctatgatttaagagcactagagcagacatctaggcaatttgacatcagcatttatacgtcgagtttttatacgagcctggtttgtggctagtcaaactgccctcagtggtttttttgaggcctgaattttcgcactttggacagggcaatgcggaccataattttttgtacatctgtacagtcaaatatcttgttttgttggccaggatgttgatggagggtgtaaagttgtaagctagaagtagggagataccaagctacaatacctttttgttacttaatacaaaagtgctgggtttagggttaatgtacaatggcagagcaaatggaccaaacaaatattgtatttggtacgggagtatgtatgcggtttgtcaaggggaccgcagtagttcatcattcaaaacaatattttgcatt

SEQ ID NO: 35560 - DNA, 1369 bp, Zea mays
  Clone ID: UC-ZMROB73056D02_FLI
ctggaagctattcgatggactgtgaccttgataatcatgtgaactctgtttccagcaaggatgcagtagaacacgatcatgtccattcagctttacctgatgtgcataggggcaatacacatgcagatacagtaacaaatgacggagaacctattggagcaaacaacaatgggaaagtgtccaggttaacctacggtgaagataaattcagaccaggtattcaaagatctgaaaaccacacagaatctatggaaggtttaagctgtttgcaaagggcaggagattccgttggatccccagcaagtattaacaatacagaattaccaaagaacaatgtttcttctgaagctcatattgatgataatgagttgaggagaaatgatcttgtgaatgatgttgaatcaaattcgatcgatggtaaacatgacaccatgatgaatctttcagttccaaaaatttcatgtctctacaaatgttgttctccatgtttccaatctatttataagatggttcatggtattatttcaaatactctaaggcctaatctgcattgcttaacagctgatgatatgcatgacattctgtcatcatggtgcttgaatctattagggtctgttagaaagttgtacagctcacatgatgaggccagctgcacagaagtttttgttagaatgtccaataaagaaacccacttagagcattgtgcttgtcagagtgatatctatctttcaagagaatgtgtatgccacttggaaagcaatggggatgttgaaactgcaaatactgattgtcatcctctatcaggacaaagcttaagttttttctttaaagatggtgtatggatgccgttggatctcactgcggaaacaaaacttcattgcagcttcaggagattctgtgtttgctcgatattaggaacagtttctatgctcagctagatcctcagttcatgatattgtctgatgcagttgcaaaagtacatatagtactctaatgctctaagtgtggctccagttgtgcacataacacaacatcatcaggatgtctttggttgattggaacttctcatccttgatgcaacttttgggcaagcttttattgcacataaattgcctctacctgttatggtcattagtggaaaactggctgttgtagttgcttcgtagactgaatatttaaaaagaagctaagatattagtcttcattttttttccaacgaagttacccatgtaggttggactgttgttgctgctggaaatttcacggttagatgatgactgagtgactgacgccatttcagttctcattgtaatatgtattatggcccaattaagcatcaagttgaaacatgattgaatcttatactcac

SEQ ID NO: 35561 - DNA, 1841 bp, Zea mays
  Clone ID: UC-ZMROB73056F10_FLI
aaaggagattggctctgccctaagtgtgattttatgaattttgcaaaaaacactgtttgcttgcagtgtgatgctaagcgtcccaaaaggcaactcctccctggagagtgggaatgccctcggtgcaatttcttgaactataggcggaatatgtcatgtttccattgtgaacatgaccgtccttcagatgagtatgccaacagacaaatggaagcaaagcaatctgcactgcggaatagattagaaagacctccacgcaaatctgatatttctagtgcatggaactttgattttgaagataacgagtcagatggtgcagatgttgcggcgtttgaatatgctgattcatctaaggtgaggagggagagctcatcagcaggcagcatgtcgtatagaggtgtttccaagggctctgatgatgaggaatatagaatggctgaaacaatgactacaggacgggggaataagttctcagaaagagatagcttgccatcttcaagagatggttttaatgattttgatgatgaagatgatgacattgacagttatgaacttgacttgtcaaaaggtagtcacacaggtggagtgtcaaggatgagttattcggatcttgagagtgcttctgattcagaaggttttagtgaaattgataatagtagagagtccagatatggtaatagtaaagagtccagatatgataatggtagagagtccagaaatgataataatagagagtccaaatacgcagccaaggttgaggatgaatttgaggatcatcattccctgagatcgactcatcttgctgattcctggcaaaaaaccagaggtcggagtggttcgaatgactacagaagggcatcttttggatcagagagtgatgatgagatcaattcttatccggacgaggacattgacaaaggtcctagaaataatggaagccgtagtcagggaagtaccaacagagcttctgttaggcacaatgcacttgcctacagtgatgatgaaccattttctgatgatgtggattctggtatggctgatcggttcgggcctaggcagactaagtcttccacgaacatcaaggataacttccgtgacacaaggcgtaacttgaatggaagacgttctagtggggaccgttatggtagaacagaacggaatgagcgggaccgttatggtagaacagaacaacggaatgagcgggaccgctatggtagaacagaacggaatgagcggttcaacaattttgacatgcaccgtggcggttcagtcttggataagggccgtggggctaggggtaaccagttagatagtggttcaagaggtttacaaagaaacgcaagaagaaattgggatagaagtggtggctttgacggcaggcacaagggtgtttaaataataatagcaagagtggtatcttaagtaccaaatggcaaccagtgatatccttcatgtgaccttatccaatgccgagggtatttcaatccagctgagcatggctcttatgattccaccatgtgtccatgaccactcttccataatgctacttcaccctgcgacagaggctatggcgattcctctccatctgcacttccatttcaagcattgcacctctctgtctgcttgtttgttacatgtcattgcatcagtcagagcggtcgaacctgaagagctctggaactgggttcgttatttggttcactcatgccgcacaggtacaattttagactactagttagtctccatattgttttgcagagatgcatcaacaggattgtacctcgaattatgagagcaataaaactatacacttcaaacttaatgtgataccaaatgtaacg

SEQ ID NO: 35562 - DNA, 1278 bp, Zea mays
  Clone ID: UC-ZMROB73056G11_FLI
cattctcatctcatggcgacgacggagacgatggagatgggcatgggcgtcgtcgtcgacggcgtcagtagcaacggatcaggcggctgcggcgggctggtggtgacggagctgagccacatcaaggagctggtgaggcagctggaggtgcacctcggtggctccccggacctgtgcaagcacctggcctcgcagatcttctccctcaccgagcgctccatcggcctcatcacctcctcctccagctccagcggcctcgacggcgcccgccggaagcgctccgcgggcgacgccggcctcgcctcgccgctctcggccacgcccaccagcggcgtcaccgacgggccgttcaagaacaccaagaagaggaaggcgatggaacagcggaggcagagggtgagctcggccggcggcgagaacccggtcgacgacggccgtagctggaggaagtacggccagaaggagattctcggagccaagcacccaaggggctactaccgctgctcgcaccgctactcgcaggggtgccaggcgacgaagcaggtgcagcgcaccgacgaggacccgacgctgtacgacgtcatctaccacggcgaacacacctgcgccccccacaggccggcggcggcggagcacaacccggacgcgcgcggccacctgcagaccctgagcgccggcctcacggtgaagaccgagggactgccggacccgccgcggggccggggcgccgccacgcccttgtacctctccgcctcctccacgccgccgtccacgtcggagaactggggcgtgtcgcccgcgacctcgggctccacccacgtcgcctccttccggccgttcgaggccgccgagtggcgggggcaggccgagcaccaggaagtggtgtccgcgctcgtggccgccatcgcgccgccgcccgccgtcgacagcctcgacgacctgctcatcgacatagatctagacgacatcgcgagcttcttcgcgtgacccgcgcgttgtagcagccgatgtggcgtagtatgtgaccgagccctctggctctgcttcctgaaactggaacagaacagaggagggaagagcaccaaagctctgcttcctggggtccatgcagatgcaggatgcaggcgtaaaaacctaggagatgaacaagagtagagactgcatttttttacccctctttttttgttaatctttttcctctttcagaggactgagggtagtgtttgtattgtattattgatttttaatgccaatgggaaaaataagatccttcgtgcc

SEQ ID NO: 35563 - DNA, 1128 bp, Zea mays
  Clone ID: UC-ZMROB73057C11_FLI
ctttctcgcttctcagaccatcgtcaccatccctcccctcggcctcgcgttcgcagcggtcagcgcctccgagatggagctccacctctgcctccgtctccacgtgcgcctcactcctgccgcgaagccaccgccggcgcccgcggtgcttccagttccagcctcccgccgccttcggatgggtggaagctacggggttgctcttaggcggcacacaaggcgttcgaatcgggcaatccacacttccctagccgacggcgagcagggtgtcgctgtcgacgctgtgaaggagaggagcgtctcggtgatcctgttgtctggaggccagggaaagagaatgggggcaagtatgccaaagcagtatctacctctactgggactaccaattgcattgcacagtttaaaaacattctgtcaactgaaggaagtcaaagaagtcgtggtggtgtgtgatccagactacattgatgtatttgaaggttctattaagaacttgcaactacctcttaaatttgcacgcccgggaaaagagagacaggactccgtttttaatggacttcaggaaattgatggggattcggaactagtttgtgtccatgattctgcaaggcccttagtttcttctgaagatgtaaaaaaggtcttagaagatgctgcagtacatggagcagctgttcttggtgtgcctgttaaagctacaataaaggaggccaatagtgattcttttgtcataaaaactcttgaccggaaaactctatgggaaatgcaaactccacaggtcatgaagccaaatttactcaaagatggttttgagcttgttaaacgggataaccatgaagtcactgatgatgtatccattgtagaatatctaaaacaccctgtctatatcacggaaggctcctatacaaacattaaggtcactactcctgaagacttgctactggctgagcgcctgatgaatgagaaatagagctgacatgcaaaattaactgtttgcttgattttatagacatacgattttgtagcagtacagcattcacccgcacttctacaggttttgaaaaccctcatgcacgagataactgactgctttgtaaactttctgtcattctttctagatatatcaat

SEQ ID NO: 35564 - DNA, 959 bp, Zea mays
  Clone ID: UC-ZMROB73057E05_FLI
aatatcaaactctatttttatttatttttttatttagagctctaataaattgtaaagaagcaaatcacgccgattctgttgccgcatctgaaatggaaactgtcaactggccactataatctctcagatcgtcaatggcgcacgcgaaagccggagcgtctctgccggtgcccaacgtgcaggcactagctcagacttggcatggatcaggcgagccggtgcctttccggtacgtcaggacagaagagatcgtcgccggcgaagtcgtcgccggctgcgccatcccggtcgtggatctcagcaggttgcttgacccgcggtcgtccgaagaggagctcgcaaacctcggctctgcctgtcagcactggggtttctttcaggtacgtatccgtacatgattcgccatgttctgaccagattgattagacactgtacagcgcacgcgctgcttgtgcgcagcttatcaaccatggggtgccggacgaggtgatccaggacacgaagaaagacatggtggagttcttcaagctccctgtggaagccaagaaggtgcacgcgcaggtaccgggcggcatcgagggctacggccaggccttcgtcttctccgagacccagaagctggattgggcggacatgatctacctcatgattagccccaaggagtcgcgggacctgaggttctggcccacccggcctccctccttcagggactctatcgaaaggtactcggccgagacggcgaaggtgacggcgtgcctgctgcggttcatggccaaggacttgggcgtggagccggagcgcctcctggaggagttccggggattgccgcagagcatgcggacgacctactacccgccgtgcaggctggccgccgatgtgcttggcctgtcgccgcacaccgacgccaccggcctgacgctgctgctccacgtcaacgacgtgcagggcctgcagatcag

SEQ ID NO: 35565 - DNA, 870 bp, Zea mays
  Clone ID: UC-ZMROB73057E10_FLI
gcccccaagggacagaagacgcactgggtcatgcacgagtaccgcctcgagggcgcctacgcctaccatttcctccccagctccacaagggacgagtgggtgatcgcgagggtgttccagaagcccggcgaggtcccacctgcagcccgcaagcaccgcctcggcgcccttagcagcactaccggcaccgccgcgggcgattcctgcttctcggactctacctcggcctccatcggcggcgcgtcgtcgtcatccacgcctggcccgctgttcgcgtcggcggccgccgccgtggccaatgccggcgccgccgacggcgacaccagctcctactgcggcggcgctgccaaccatggcaacctggtcaccggccgtgagctcgtgccctgcttctccactgccaccattaacggccccctagttgccgccgcgctcggcatcgggcagccgtacaacgcagccccgctgccgttcgagcagcagccgccgcctccggccttcctgccgagcctgcgttcccttcaggacaacctccagcttccaccgttcctctcagcaggcggtctgggcggcggcggggctctccactggctccccgccggcggcatggaggtcaaggtcgagggccgctcggcgccaccgcagatggctgtcggccccggccagctcgatggcgctttcggctggagcttctagttcttcgctgcactacatggttgtgcccatctatctagctagtagtggtttcttcatgcgttgtacgttaagcttggttaatcaactgctagtaagtgactgggtcgtcgttctaagtaatgtagtaactgtgttgtagtctctcatctaactgcagtagcagctttatttgtt

SEQ ID NO: 35566 - DNA, 1221 bp, Zea mays
  Clone ID: UC-ZMROB73057F08_FLI
cgtcgctctgctggctatcttgatcagagatgggaaatcgaacaagcagaaggactatgacgtccatgccggatcccaagccgagaaggtgttcaacgcgttgggcgccgtcgctgccatcctcgtctgcaacacgtccgggctgctcccggagatacagtcgacggtgcgggagccggcggttcgcggcatgaggcgggcgctgctgctgcagtacaccgccggcgccgcggggtactacggcatcagcgtggcggggtactgggcgtacgggtcagcggtgtcggagtacctccccaacgagctcggcggcccgaggtgggccgccgtcctcatcaacgccaccgccttcctgcagagcattgtgtcccaacacctgttcacggtgccgatccacgaggcgatggacacgcggctgcagcggctggacgaaggcatgttctcccgctacaacctcacgcgccgcgtctgcgcgcgggggctcgtcttcggcttcaacgtcttcgtcaccgcgctgttcccgttcatgggggacttcgtcaacctcgtcggctccttagcgctcgtcccgctcaccttcacgttccccagcatggccgtcctcaagatcaaaggcaagagcggtgggagatgtaacagactttggcattggggcatcatagttctgtcctcggctctctgcgttgctaccaccgccgccgccgttcgtttgatcttcaacaatgctaggatctaccacttcttcgccgacatgtagcgagcgagtagtagtgggattgacatgtgtatcgtcaccacgaggtgatagtatggccacttcgttctcaattttttgcttggttcaagagtggaagggtacggtggtcacttagctcatgtttgataagggcactacatgattaataagcatgcatcatgtacgtagtcatcctatcaaaatttagaaaaatgagcttattgtgatcgatggaccacctccctctaaccaaacatctctgttttccgtgaaagcttaaaaggcaactcgtgaatgtgttcttttagacacctcatgcctattatttcttggaagtatagaataatgttgagagttgtaaacatacatgcatgtcgcatctagcccttttgtctatcacacgtgtgctacctgtagactaattgcattatagtgtgactcttgggactcagactcatgattatatataaaaagtattgaaattg

SEQ ID NO: 35567 - DNA, 1898 bp, Zea mays
  Clone ID: UC-ZMROB73057G04_FLI
ccatcctctctcctccagtgacagcctccggcgcctcctcgggctgccatccagcccgtgccactgccactgccactgcacttgctgtgccgacccgagctgcggtcgagtgagcaatggagcggcggcggcggcggccaccgaggctgccgctccttgtgttcgtcttagttgccaccacttgccccctcgggagctcagggattggaagcttcggagtcggtgcggagagcaatggagcttcgtctagttttaggaccaggagtctgctgcagattggagacagaaacgaagatggcctatttcatctgccacatacacgggctctcacgcacaagagcagatctcatagaaaagttccaacacccgcaccagcaccagagtccgctccagcaccctcaccatccatgtctccaccggacagctcaccgtctccgtcaccacatggttcacacccaatgccacgccaatcaacttcacatcgtcatccatccataacacctccacatttggtcaggcctgggcctaggcaagatggaaatgatcctttggtttatactccagctcattctcggcataaacatttttggacaacctatggtttagttgcagcagggattgcggttttccttttggtatcagcagctagtattctctgcttccgagctaagaaaatgggaaccgtaaggccatgggcgacaggtctaagtggacaattgcagaaagcttttgtaactggtgtaccttcgctgaaacgatcagagctggaaacggcatgcgaggatttcagcaacataattggttctacctctacctgcatgctgtacaagggaactttatctagtggagttgaaatcgcagtggcctcaagcttggtaacatctgcaaaggattggtcgaaagaaaatgaatcgcagtacaggaaaaagataacaaacttgtccaaagtaagtcacaagaattttatgaacttgcttggctactgtgaggaagagcatccctttaccagagtgatggtatttgaatatgctccaaatgggacactttttgagcatctccatgtcagggaagcagagaagcttgactggatggcacggctcaggatatccatgggcattgcttactgtcttgagcacatgcatcagctgcaaacaccagctgcgctgaggaactttgactcgactacagtataccttactgatgacttcgccgcaaaggtctcggatcttgaattttggaatgacgcaaagggacataattctactacaaacaatgaactggctttctccctagacatggaggacattgtgcgcaagtacggcatggtgttgttggagatattgaccggaagagttccttcctccgaggatgacggaccactggaaaattgggtgtctcgctattttgaaggcgggatgcgtcttgaggagctgattgaccctagcatcggcttcttccccgaggacactgcacgagccctttgtgaggttgtgaggtcctgcatcgatcgggatccaaagaagagaccgcagatgaaagaggtcgcagctcggatgagagagatcaccgcgctagggcctgatggggcaactccgaaggtgtcaccgctctggtgggctgagcttgagattatgacttctgagagctgagttcgacgcatgccagatgatattgtttctcctagtgtgactgagaattctttgagctactactggctgctgctaatcttgtttgtggaagtggtgattaggtagaatttgttatgtgtgcagaattgcatatagggattggtattgtacttgtacatgtcaagaaggtttaacacacaacatactgatacgcaggcattccagccaggtgagcaatagaaagcatgtgtggcttgtttttgctgcaat

SEQ ID NO: 35568 - DNA, 1234 bp, Zea mays
  Clone ID: UC-ZMROB73057G08_FLI
ccaaatttacagctagttagctgaattcgatcgatatccaggaactaataatccaccgacccccctcatggcggcttcgtcgcgaatgggcttatccgtctacctcgccatcatggcggcggtgctcgcctcggcgctcggagcggagctcaccgcggactactatagcgagacgtgcccgcaagcgctgaccaccatcaagctcctcgtcggcgccgccatcctgagggagcccaggatgggggcgtcgctggtccgcctccacttccacgattgcttcgtcaatggctgcgacggctccatcctgctggacgacaccgacgacatggtcggcgagaagacggcgaagcctaacaacaactccgtgagaggctacgatgtcatagacaccatcaagtcggcggtgaacacgatatgcttgggcaacgtcgtctcctgcgccgatatcttggccgtggccgctcgcgattccattgtcgctctgggaggaacctcgtacgacgtgctcctggggcggcgcgacgcgacgacggcaagcatggacgacgcgaacaacgacatcccgacgccgttcatggacctgccggcgctgcaggacagcttcgagtcccacggcctgtccctgcacgacctggtggtgctctccggcggccacacgctgggctactcccgctgcctcttcttccgcggccgcctgtacaacgagaccggcacgctggacccggcgtacgccgggtcgctggacgagcgctgcccgctgacgggcgacgacgacgcgctgtcggcgctggacgacacccccaccaccgtcgacgcggactactaccagggcctcatgcagggccgcgcgctgctgcactcggaccagcagctttaccaggcaggcggcgccgctggcgatctggtggagtactacgccgagaacccgaccaagttctgggaggacttcggcgcggccatgctcaagctgggcagcctgagcccgctcaccgccgacgaaggggaggtcagggagaactgccgggtcgtcaaccaggtgtgagtgtgacttcgccgccatcgccgtcgaatgaacgaggcatcagcttcgttccgtacgcacactgtggctgctagctgcaccggcaagctatgcagcaagattctgtagcgtgtgtcttatatttgtattcgcgtgcctacttaattttgtgagaaattggtcttatatgtttggttaacatatttttgatcg

SEQ ID NO: 35569 - DNA, 1618 bp, Zea mays
  Clone ID: UC-ZMROB73057G11_FLI
cagataagcacgatccgatgatggccccaccgatatccgccgatgccttggtggaggctgcctcggccgtcgccgcgtacccagccatcgcgccgaacagaatgctttgcaaggacgcgccggcgccggccatctctgtcgtctcgaagcagacggtccggcccgccggcgcgtcggcggcggtcggcagtggagacctcaggctctcggtgtcggacatgccgatgctatcgtgccactacatccagaaggggctgttcttcccgccgcctcctcccggcgtgctggcggcctcgctggtgtcgtcgctcgtggcggcgctctcccgcgcgctcggcgtcttccccgcgctcgccggccgcctcgtcacgctccacgacgacagcatcgtgatacggtgcggcggcgacgacgccgccgtcgagttctaccacgcggtggcgccgtctctgtcgctcggcgacttcctggtgcccggcgccgacgtgccgacccgtttgacgaacggcctgttccccatggaccggacggtgagctacggcggccacggccgcccgctcacggcgttccagctcaccgtgctcggcgacggcgccgtgttcgtcggcttcgtcgccaaccacgccgtcgtggacggcacctccttctggcacttcttcaacacgtgggcggggctgtgccgcggcgcgccggtccgggagcccgacttccgccgcaacttcttcggcgactccaccgccgtcctacgcttccccggaggcgcgagccccgccgtgacgttcgacgccgacgcgccgctccgcgagcggatcctccacttcagtgctgccgcaatcagcgagctgaaggcgacggccaaccgctcgaaaagagcaggtcaggaagccgaggctaacggcaagctcgcgcacgacgactccagacttgaagggcgttccggtgaaatctcgtcgtttcagtcgctgtgcgcgcacatctggagggcggtgacgcgcgcgcgccggctgctggctgccgacaagacgacgacgttccgcatggccgtgaactgccggcaccgtctgcgcccggcgatctccccgctctacttcggcaacgcgatccagagcgtggcgacgacggccaccgtagccgagctggcgtccaacgacctgggctgggcggccgcccggctgaacgccaccgtggcgtcgcacaaggacggcgcgatccggcgcgccgcggcggagtgggaggccgcgccccgttgcttcccgctaggcaaccccgacggggcggccctcacgatggggagctcgcctcggttcccgatgtacgacgggaacgacttcgggtggggccgcgcgctcgccgtgcggagcggccgcgcgaacaaattcgacggcaagatgtcttcgttccccggacaggctggggacggtagcatcgacgtggaggtgtgcctcgcgccagacaccatggcgcatctcctcctcgacaaggagttcttgcagtacgtgtcctcccctgcaccgtgaggcggtgacagagtgaatgtgtggcttgttgctgcgcagctacatatagtaactggatttgtaccctttcagcagatatcaagtgcttgccaactttaatg

SEQ ID NO: 35570 - DNA, 1413 bp, Zea mays
  Clone ID: UC-ZMROB73057H03_FLI
tgccccactacactgaagagaatatgcaggcagcatggaattaatcgttggccatcacggaagattaagaaagttgggcactccctgaagaaattgcaaatggtgatcgattcagtacatggtagcgaaggaacggttcagctcagctcgctctatgaaaactttaccaagaccacatggtcagaaagagagttacaaggggatgccacttatccattgtcagaggaaaaaggtcccttggaaccttctgttcctgatcggtattgcgagggcagattcacctcgcatacttctggttctaattccctctcaccctcttgtagccaaagctcaaattccagccatggttgttccagtggttcgaaatcacaacaacatgtcagtgctcctcaacttgcagtaaagaaagaagttttcatggaggagaatcagagctccacactactcaaagctgcaagccatgctgaactgcagatgcttcctgaagaaagacttgtcaccctgcctaggtctcatagccaagtgcttttaagtgaacaaaagccagtggaaaatataacaggtatgcaaatgtctaagcctgattctctcaagataaaagccatgtacggcgaagaaagatgtatattccgactgcagcctagttggggatttgaaaagctaaaagaagaaattctaaagcggtttggcattgctcgggaggtgtatgtggacctcaagtatttggatgatgaatctgagtgggttcttctaacatgcaacgcagacctgcttgagtgtattgatgtgtacaagtcatcaagtactcaaacagtaaggatcttggtacattctagtgaccagtaagtgcctgttcctttggtcaaactggtttgtcctgacaatggcgcaaagctcatcaggatgctgaagaaagcatacaatctctctttgaagtaaagtgcttgttgacatcgcgctcagtttcaagtcataatcatatatgcaaaagcagcatctgtaaatacctacactcgtgttgtcatcccgtggtcaagtgcctagtaagttctgtatgttgctgtttggtggctgtgtggcagaattggagagaaagtgattgttggtgttccctgtcagctcttgggattggtttgtatgcagtaagctgcatacagtctttgatataacagaagatgggacttctgtacctctagttcagtttgttaacagtacaggtagttcgttgaatgtaacaaactagtgtacaatattgtaggccggagggtggaatcagtaggaatttgtcgatatgaagctttggattaggttaagtaatcacgaccaagttgcatcgcgcttgtaagttcttttggattaggttttgaaattcaaaaactcgccaaaaaaccacaagctgtggaaagtggaatc

SEQ ID NO: 35571 - DNA, 1418 bp, Zea mays
  Clone ID: UC-ZMROB73057H05_FLI
gtcccggtggctggccgccaacgtgctgcccttcgtcccggcgaccaccatctccgccgtggccgtcggcaacgaggtgctggagtccggggacgccaccctgggcgccgcgctgctcccggccatgcagaacctccgcgccgccgccgcggcggcggggggcggcgccgcggggatcaggttctccaccgtgaacaccatgggcgtgatggcgcagtcggacccgccgtcgacgggcgcgttccacccggacgtggctccgcagctgcagcagatcctggggttcctcagcaggaccggcgcgccgttcatgatcaacccgtacccgtggttcgcgtaccagtcggacccgcggccggacacgctggccttctgcctgttccagcccaacgcggggcgcgtggacggcgggtccaagatcaggtacaccaacatgttcgacgcgcagctggacgccgtgaagtcggcgctggtgcgcgccgggtacggggacgtggacgtcgtggtggcggagacggggtggccgaccaggggcgacgccggggagcccggcgccacggcggagaacgccagggcgtacgtgtccaacctggtggcgcacctgcggtccggcgccggcacgccgctgatgcctgggaaggcggtggagacgtacctgttcgcgctgtacgacgaggacctcaagcccgggcccacgtcggagcgctcgttcgggctgtaccacacggacctcagcatggcctacgacgccgggctggcctcctccgcggcggcggggggtcggggcgggggcgggggcggcgcggcgcagcccaggggcggcgggtggtgcgtggcgcgggccggcgcctcggacgcggagctgcaggcggacctggactacgcgtgctcgcaggtgggcgtcgactgcagcgccatccagcccggcggcgcctgcttcgagcccaacacggtgcgcgcgcacgccgcgtacgccgtgaaccagctgtaccaggcggccgggcggcacccgtggaactgcgacttccgggcgtccgccacgctcacctccgacgacccaagctacggggcatgcgtgtacaccgggggaggccaataatgcacggcgcactggaagaaatttcccgttccttttcagctgcaggctacggggcatgcagtgcagatcctcttgtttgtttcgtcgtaccggaagaaatttcccgttccttttcagctgccctgactgcctgcctgccttgggacaggctgggatgtgtcatgtgtgagtgtgacttcgtgtaaaagaactattggacgctgtcagtgtcgccgtgagctctgtggacggtagtagtacatgtgtctaatgtacaagtagagtgagattgtatctatatatgtattttttccctaaaaataaaacttcattcggctct

SEQ ID NO: 35572 - DNA, 3088 bp, Zea mays
  Clone ID: UC-ZMROB73058A09_FLI
caaaactaaaccctcgcttcggaggcgcgtgaacccaagaccgacaggcgaacgaagcgagggtcctcacaaccaccatcccctgctgcaacgacgccgccggcgatggcgtccatctccggcgcggcggcgccgccatcttccgccgtgtgccggcttcggctgcgccggcaccttctgctccggccctcccacctccgcctccgcgcgccccactccatcgccgacctctcccgctcctccaattccgccccgagcccggcccgcccagcgctgggctccggcccggagaacggcagcggcggcgtccgcgcggtggagaaggacccgatcaagctgtgggagcgctacgtcgagtggctctaccagcacaaggagctcggcatcttcgtcgacgtcagccggatggggttcacggaggagttcctgcggcagatggagccgcggatgcagcaggccttcgtcgacatgcgggagctcgagaagggcgccatcgccaaccccgacgagggtcgcatggtgggccactactggctccgcgacccggccctcgctcccaactccttcctccggaacaagatcgagaccgcactcgacagaatcctcgccttctctcaagatgtcgtctctggaaaggaatcggagggtcagctttgggccctcaatttgttgctgaggcacttgcgcctgataaccctccactgaagataagatttattgacaacaccgatcctgctgggattgatcatcaaattgctcaactaggacctgaactggcaactactcttgtaattgtcatttctaagagcggaggcacacctgaaacccgcaatgggctactggaagtacagaaagccttcagagatgcaggtctgcaattctcgaaacagggtgttgcaatcactcaagaaaattctctgttggataacactgccagaatagagggatggttagctcggtttcctatgtttgactgggttggtggtaggacttcagaaatgtcagctgttggtttacttccagctgcattgcagggtattgatatcaaggaaatgctagttggtgcagctttaatggatgaggaaacccggaacactgtggtatcacattattaataacacggacaacttgcagtgatggcatgattatctatattgtgtcatgtcaaacatgtttatctttttattaacaggttaaagcaaatccagcagcattgcttgcattatgttggtattgggcatcggaagggataggcaaaaaggatatggttgtgcttccttacaaggatagtttattacttttgagtagatatttgcaacaacttgtcatggaatctcttggaaaagaattcgacctggatggcaaccgtgttaatcaagggctaactgtatatggtaacaaaggaagcactgaccagcatgcttacattcagcagctgagagaaggtgtacaaaacttctttgttacgtttattgaggtcttgcgtgacaggcctgctggacatgattgggagcttgaacctggagtcacgtgtggtgactatttgtttgggatgttgcagggaacccgttctgctctttatgcaaatgaccgggagtctatctctgttactgtgcaagaggtaactcctagagctgttggagcactgattgcactttatgaacgtgctgtggggatttatgcttctttggtaaatatcaatgcctatcatcagcctggtgttgaggctgggaaaaaggcagcaggagaagtattggcccttcagaaaagggttctgactgtattaaaggaggccatgtatggaacttctgacctgtgttctttctgtttctctgtgaagtgattggttatgcatagtatttttggggcatatttctagttgtgatgctttgaaaatgcatttcgttgtatcactaggtgggactttgttttgaggaatggtgtggttcatcatattctcaccctcacttttttgtttggtttatggagttgaataggttcatctgccaccaccctatcccttgcaaagtaataattagtacaaacatgagggatgtactcatgggttggttcctcaaaatacattcgaagtgcacccaccccaatagctgtggcaatgcccatttctcctttgagactctctaagaaggcatttttagatgttcgaactgatataggtttgaaaagttttcctagctgaaaattacaattgacggcttattgacagttatcatgtgcgcatggggctgcaaaattacagatagcgtcctgctggttttacagttacatgtctttagagtctaaagtcaatattcttacaaagaaagaaacatgtgtattatactaaagtataataactcaacctttccttgttcatgaaataatttttatttttcgaagttccaattcctgtacaagtaaactcaaagaatgggggcacaagagaggacactaatgtgtatgaaaagaaccattttttcccttacgcaccggagagctgcgtatctatataagaactacaaggggcaataacccttaaccccccccccccccccccacacacacacttggtttacacataactgcaatttactccccaattgattctcactcattaatgttatattggagttattggattgcttgttgattcatgtacttgttgtctcccagctgcgagaaccctactgagccattgactctagatgaaattgcagatcgctgccattgccctgaagatattgagatgatctacaaaataatccagcacatggctgctaacgacagagcacttatagcagaaggcagctgcggctctcctcgcagtgttaaggtgtacctcggtgaatgcagtgtggacgaagatatgcaggccgcatagattctgtgtctggatccgtgtaacattgttggaataaatcagaagcaacacaatagcgatgctatgcatgggtgtcgctgatgctgatgtctcattagtttcttgtttggtggtgcttgcacacgattgccggaacgatgtaattttagaatttgattttttttggccccttaaatataaaatacaaagatagaaggtggtgtccgc

SEQ ID NO: 35573 - DNA, 1275 bp, Zea mays
  Clone ID: UC-ZMROB73058D01_FLI
atcatccacggcgagggctcgtgggaggtgacactgtaccagaagctcgacatcaccatggacgacgtgctccgagggctgacgtccgcgaacatgatcggcaccggcagctcaggggccgtgtacaaggtggacacccccaacggctacaccctcgccgtgaagaagatgtggtcgtcggacgaggtgacgtcggcggcgttccgcagcgagatcgcggcgctgggctccatccgccaccgcaacatcgtgcgcctcctcgggtgggccgcgaacggcggcacgaggctgctcttctacagctacctccccaacggcagcctgagcggcctcctgcacggcggccgcgccgccaagggctcgcccgcggacgagtggggcgcgcgctacgagatcgcgctcggcgtcgcccacgccgtggcgtacctgcaccacgactgcgtgccggccatcctgcacggcgacgtcaagtccatgaacgtgctgctcggcgcgtcctacgagccgtacctcgctgacttcggcctcgcccgcgtcctggccgccgcgagctccatgctcgacaccggcaagcagccccgcatcgccggctcgtacggctacatggcaccagagtacgcgtcgatgcagcggatcagcgagaagagcgacgtgtacagcttcggcgtcgtgttgctggagatcttgacggggcggcacccgctggacccgacgctgtccggcggcgcgcacctggtgcagtggctgcgcgagcacgtgcaggcgaagcgtgacgcgtccgagctactggacgcgcggctccgggccagggcgggcgaggcggacgtgcacgagatgcggcaggtgctgtccgtggccacgctgtgcgtgtcgcgccgcgcggacgaccggcccgccatgaaggacgtggtggcgctgctcaaggagatccggcgccccgcggcggtggacgacgcgaagcagcggccacccacggccgccgcgccggtgtcgccggtgagcgcgcactcgaggggccaatcgtcgagctgctccttcgccgtgtcggagtactctgcctgacgggacgcgaatttttgcgagtgtagtgaacctagtaaattactactaacatcttagcgagccgtaaacagtgttgattagccaaagatgtactactggtaatgttgtacttaggtgtaatctgccattgtacattactctcgagaatgtcggtttttgtagcagccttttggcctaacacatctgccaaatctcaacctgtgtgttgatatg

SEQ ID NO: 35574 - DNA, 1037 bp, Zea mays
  Clone ID: UC-ZMROB73058D05_FLI
ctccagcgttgagccaactccgccgccctgtcgttttcgcctctccctagcatttaccggaagaaacgagcgtgaccgccgccttctcccgctcccgctcccgctctgcatctctccatgggccagatcgagagccaggtcactcctccagcggaggagccttctccacccaccgtggagccgtcgccgtcgtctcctgccccgcctccgtcttcccttgaggcgattgctgcagaagccatgtcatttgatgaggatgacactgaggagtcaatcgatgtgaaggtacagaaagctctggactgtccatgtgttgctgatttgaaaaatggtccttgtggaggtcaattcgtcgatgcattttcctgctttctcaggagcagagaagaagagaagggatcagattgcgtgaaacccttcatcacattgcaggactgcatcaaagcaaatccagaggcattctctaaggagattctggaggaagaggaaaatgatgaggaggcagataagtccaacctgaaagttagagctccatcatggtccagagaatccaaacctaaggtttgagattgcttggtattaactgatagtgatattcatccagtgtgcagactcaccttattcaactataagggcttgttcgctttcctctcaatccatgtgatctcaatccatgtggattgggtgggattggatgagtttaaatcctgaacaagtcaaaatccttcatattttttctaatctcatccaatccacatgggacaggaataaccgaacaagccctaagtttgccagtagtagactgatttcagagagcgaggtatcataaattgattaacagaaatacccatattttgtgtataagaaatgcttcatggtatccacaattttagaatgtacatgtcatttcaagtatcaatcgagaactgatgaacttgtaattcgattcctagatacagggcatatttgatcaccactgtattattatactatgaaatatacatatgattatcataatctaggttatgaactataat

SEQ ID NO: 35575 - DNA, 959 bp, Zea mays
  Clone ID: UC-ZMROB73058F10_FLI
caagagcttgtcgactgtgacacttcgtacaatcaggggtgcaatggaggtctgatggactatgcatttgagttcatcatcaacaatggcggaatcgacaccgagaaggattacccttacaagggcacggacggacggtgtgatgtcaacaggaaaaacgcgaaggttgtcactattgacagctacgaagatgtaccagcgaacgatgagaagagtctgcagaaggcagttgcaaaccagcctgtcagtgtcgcaattgaggctgctggcacagcatttcagctctacagctcgggtatcttcactggaagctgtggaacagcgctggaccatggtgtcacggccgtcggctacgggacagagaacggcaaggactactggatcgtgaagaactcatggggcagcagctggggcgagtccgggtacgtgaggatggagcgcaacatcaaggcgtccagcggcaagtgcggtatcgcggttgagccgtcatacccgttgaaggagggcgccaacccgccgaaccctggccccagcccgccgtccccgaccccggcgcccgccgtgtgcgacaactactactcgtgccctgacagcaccacctgctgctgcatctacgagtacggcaagtactgcttcgcctggggctgctgcccgctcgagggcgccacctgctgcgacgatcactacagctgctgcccccatgactaccccatctgcaacgtcaggcagggaacctgcctcatgggcaaggacagcccactgtcactgtcagtgaaggctacgaagcgaaccctggccaagccgcactgggctttctccggcaacacagctgacggaatgaagagcagcgcatgagaaaacgcagcgtggcattaggtcgtcagcaacctgggtggtcgattagagcccctgcgtgggaaatggtcacctggccccctgattgacgacggaagcatggc

SEQ ID NO: 35576 - DNA, 3113 bp, Zea mays
  Clone ID: UC-ZMROB73058H07_FLI
atggtcttcttcgagggcccggcgctggcgttcgacctggaggatctgctccgcgcctccgccgaggtcctcggcaagggcgcgttcgggacggcgtaccgggccgtgctggaggacgccaccacggtcgtcgtcaagcggctcagcaaggaggtgagcgccgggcgccgcgacttcgagcagcagatggagctggttggccggattcgccatcgcaacgtcgtcgagctccgcgcctactactactccaaggacgagaagctgcttgtgtacgattactacgccagcggaagtgtatccaacatgcttcatggtatgtatgatcctttgaccatctcctcctctgtctcttcttcgtcctgtcactttgatcgttttcagtgctcaaattggaattacgggcttcataactacaagcgtcggcctgtttgtgcgttacaattttagcaatcatgatagcgagacagacgtggcgattttgaaaggaaaggaagaaactttgtgacgtctgattgatatcatggtgacctggagatgcaatgttgcttgttgtttggaaagatgctcatgggttgatatgctaactggttgtttagtgcaagcaacaacctttgcttggcttttatcggattgctataggtaggagtttaggattcggggtaaataaaggcaatgcaggacctgaaggctactaaatattggaaaaggcccttgtttcttgtttgtgccctgtttcttgtctagcttcacattttaatctcttctgatggctgtcacactaggcttttcaaccgatatatatttgaaaacttctcatctcccggcttcctatctttacgccataccagtcaatatctgatcgcttttctgctttgacaaaaaaaaatcctcatgtggagtaacagactggtgagcatgccacttttgacctcttcttaaggagaagatgaactttagcgctctgtgcatgtctcaccggaagtccggaagtagcatgtgctgcccatttcttgcttatttttttgtttgctaacttgctgtcatgtattgaatctcatgcgtttcatttaagttgtctagctgcttggtgtgatgtgcttattagctgtcttcacttgcgacgcgtcttcaaacattatgccgtttcaattcaagttcacatggcatgcttgatgtgtggtggtcactggtcagctctgatcacatcagtgccgtcttagcagcaagataatctgtttcccatctcatcctatgaggttaagcgggccatgctaacaaaagcatacttaaatcatatgatgtcatggaatttgaatagcaaactgcatagttagttaactactccctccatttctttttatttgtcgctggatagtgcaaaattacactatctagtgacaaataaaaagaaacggagggagtactaattaatttgtagccatcagccatgtgacgttgtgaatatgctaaataaaggtaaaatagggagctataagtggtggtaggtatagagaaatggctggcggttgtgaaagagaactgcatgacaggtccattagtaagcagacagtagttgagtgttgtcacctagtagtaccataaagtttgaagtcttttcagattgaattggtaaaacccttggatctgttagcgctggtgttcactgtcatggccccgctcctccatttcagtgtcagaatctggaccataggaggaccgccgccagatttttcggtactatgcatcagctatctgcattcatgttaactctgaatctgtctgtaccatgatgtagcattacatctaaacagtactacaagcttgcactgtgcagggaacacctggttataaatgtttttttggccatacagagaacaaatttggtattaattgtgctgtggtctgatggttaatatctgacgttctaatctaaactcttcacgtgatcgaatgaagtagacatactgcctgtgctcctttcagggaagaggggagaggagcgaacgccattggactgggaaaccaggtggaagatcgctctgggtgcagcaagaggagtggcacacgtccacgccgagaacaacggcagatttgtccacggcaacatcaaggcctccaacgtgttcgtcaacagggacggatacggctgcatctcggacctcggcctggcacagctggcgaacccgatcgcggcgaggtcccgctccctcgggtactgcgcgccggaggtcgccgacacgaggaaggcgtcgcaggcttcagacgtgtacagcctcggcgtcctcgtgctggagctgctcacggggaggtcgcccgtccaggtatccggcgggcgcggcagcgaggtcgtccacctcgtgaggtgggtgcagtcggtcgtccgcgaggagtggaccgccgaggtgttcgacggcgcgctgctgcgggtccctgacatcgaggaggagatggtggagatgctccagatcgcgatggcgtgcgtgtccaggacccccgaccggcggcccaaggtggcggacgtggtcaggacggtcgaggaggtgcgccggagcggcaccggcacacggccgccctccccgccggccaccgccgcggatgcagaccagagtgagatggagagctcctcctcggcggcggcggcggcggcgcagtgacggcgggagttgatgcttcgcagccgcatctggtgatccgttcgtcgccctttgtgttgtgctcttccaaatccacggccattccattcttttggcgggtgctgtaccattccattctttttttctctctctcttgtgttaagaagattccgtgttacgaaattgtaacacagtgtcacgtggagacggtggtccgtccgatgctcatggcagcagttgctcactccttgccgatgagatgagagtgtcagcgcatgaagacaagcaattaacattcggtgctgctttgctctgttgcttcttcagcttcggatcagatgcccttgagggcatggcaatggtttgcatcgtttgagtactcaacttgggcttgttcggttagctcttaatctacgtgtattgagtgagattagatgagtttgaatcccaaataagttaaaattattcttaattttttgg

SEQ ID NO: 35577 - DNA, 1351 bp, Zea mays
  Clone ID: UC-ZMROB73059A10_FLI
cccggtgattcttacagctgcgagacgacggcgaagcgaatcgagaagttcgaggtgcgtcatgactccacctacatgctgcggattatcaacgctgcgctcaacacggcgttcttcctcaaggtggcagggcacacgttcaccgtcgtggcggcggacgccagctacaccacgcagtacgagacggacgtgatcgtcatcgcgccgggacagaccgtcgacgcgctcatggtggccaacgcgtcccctggccctggccgctactacatggcgatctcctcgtaccagagcgcggcccccctgcgcccagggagctacaacgctaacatcaccacggccgtcgtggagtacgtcggagcggcggcgtcggccggccagcaggcgccgacgccggcgctgcccgagatgccggaggtgaacgacacggccacggccaaccggttctacaccggcatgacggcgctcgtccgcccaggcaggcggaccgtgccgctcgccgtcgacacccgcatgttcgtcacgatcgggctgggcttcgtctcctgcgaccaggaccaggctccgtgcccggtcgtcgcgagcatgaacaaccagtctttcaagctcccagacgcagacaccatgtcgatgctggacgcgcggtaccgggacacgccggacggcgtgtacacgagggacttccccgaccagccgcccgtggcgttcgactacacgaaccagacggagcggctgctgctgggcggcgtcgccgcggcgctgctgttcccgggaccgcagtccacgaaggtgaggacgctggcgtacaacgcgacggtggaggtggtgctgcagaacacggcgctggtggggcgcgagagccacccgatgcacctgcacgggttcaatttcttcgtcgtcgcgcaggggttcggcaactacgacacggccgcgaagcagcacttcaacctcgtcaacccgcaggagcggaacaccatcgcggtgccgaccggcgggtgggccgtgatccgcttcgtagcggataacccaggaatgtggttcatgcactgccacatcgacgctcacctttccatcggcctggcgatggtgttcgaggtggaggacgggccgaacacaacgctgccggcgccaccgccggacctcccgcgatgctgatgagcctgtcccggtgtggcgcgcggtgcacgtacgtgtgccgtttatgtttcagccacggaaccaactgcatattatcacgatttgagtttgcgattgttcgagtgatgaaagtgtaaactacagccagtacgatgttcttttgcagcaccgttttgttttctattaattgaatgtgaaaaaaataaaaaagaaaatg

SEQ ID NO: 35578 - DNA, 1386 bp, Zea mays
  Clone ID: UC-ZMROB73059C05_FLI
ctccaatccgttggtcgagcggcggcgatggaggggaaggaggaaggtcggatcttcgtgggcggcctgtcgtggcaaacggacgagcgcaagcttcaggacgcctttggtcgcttcggcaaggtcgtcgatgttcagatcatgctggagagacacacataccgccacaggggctttggcttcgtgacattcgaagatcgaagggcagttgacagcgctatcaaagagatgcgtggccaagagttagatggtcgtaccatctcagtgaacaaggctgagcctaagatgaatacagatgacacaaggttcgacagtggcggtggacgaggagaatatcgaggtggtagaggtgatggtccaccccctggcaattgctatgagtgtggccgtcctggtcattgggtccgtgactgccctagtgctgctggtggtcgttctggcagattcccatccaagttcagtggtggtggcagaggagaccgcttttctggatcagataggtttaatgatcgttacatggatgatcgttatgatggtggtcgttatgggtaccgtgatcaagttgatgcaagggacaagtatggtgggggccgagatcgttatgccaatgatcgctaccccgctggtggcgatcactttgacggagacaggtatggaggtggcctggatcggtacgcaccgaatggttatgggagggaacgagaaagaagttacgagagagatggagttcgtggcggcggtggctatgataggagtggctcaagaggtggtggaagctatgacagggatggccctagaggcggcaagggtggtggctatgtcagggatggcccacgcggtggtgttgctgatcgttatggtggtggaggacctgcacgctatgatggtggaagttacagggagaggcctgggccatatgatcgccctagcaggggaggaggtcgttttgatgaacgccactgatgaactgcctctagactcgagcccctggtcttgtagtttagccttttgcagttctgcatagcttaatgtttaatgggctatggaagatgcctaatttacccccctctttggcacttcaatgtctgctctgtatttcaaccagtacttgggcgccgttgttgccttctcgataagtttatcaagctgactgtttttgcatgagacgggtcatcctttgggctactactctgcctgttggtccggatgtttcagttgtgcatgccgtgcgtcctgcagttatagtggagtcgaggttctcagtgattgtttgtcattgttgatctgaatatctggtatgcatggactgactatgttttcagtgattgcctgtcaccgttggtctgaatatctggtgaacatatatgctcagtgacggtgcttgtc

SEQ ID NO: 35579 - DNA, 1370 bp, Zea mays
  Clone ID: UC-ZMROB73059F04_FLI
gccaacccagcaccacagcctccacgcccatccccgcacccaacccgccacctccgtccctctcctcctcccttcgctccctctccctctcctccccgcgcggccgcggccgcggcgcagtcggacgccacccgctcgcttctacaaagattttccgcgctgccggctgcatctcccgttggttccctctacctcccttctcccctgccggcgacggcgaggagtacaccctacgcctcgagcccttcccttgttcccccatcgagcacaggaccggcgccaaaccccttgcccttgtcgtcgcctccaccccaggacaaggctcttccggctccactgcggcggcagtcacctccatcgccgagcagtttcttcccgatctccttgccgccgcggagagggccaaggcagaaggcgcgcctaaggatgagttggtgaaactgagtctcgttgcaagactgggaacggtgctcttcgagtgccagccaggtggatcgcccgtttcactggacgaactccgccaggccgctaaagcaggggaagatggttccaggagccagttgcgtaaaacgttctacaccagtttgtctagtgagtgtctggatgatatggagcgaaccatggtgaagaggattgggctggattttgattcgtccaagaagcactatcatgtgaaggtttctgataagaatcgaagtgattctacaatatcttgcaaatgcaccgtggaggaagatgggagtcttgctatccataaggttgaattgaatcaggtacggcacttggtggaagacatatcctgtcttttcaaaggtcttgatctaaggttgatgttgagtaagaaaaggatcctgaaaaacctagattctgaagtggaaaatgctgtaaagagcttggtgtctactgctattattgatcctaatgtgaaagggggagttagatggccacttggaaaggaatcaattggcgagaggttcagcatagttggggtgtggcacacgggctacaaagctttcagaaacgagaccatgaggctcaagctaaggcatgctgacagattcgatcaccgtacctcgactgggggagtttctgatgaagttacattcaaactaactgctatatcttgcaaactggaggaagatgatctggcggagagcgctgtgaaagagatgctggagtctgcggtccaaatgctatgggacaatgcgctcaattaccgggtcgtgccttgagctccggttatgcagacaatatttcttccttgaagatgcaaagcgacatgatttctttgagcccctcctgtcctgtatatacatctgcgatggtgagactcaagttgtacttcaagtgtggcaacaattactagtact

SEQ ID NO: 35580 - DNA, 1251 bp, Zea mays
  Clone ID: UC-ZMROB73059F10_FLI
tccaccctgccgcctcaccgcctctctcaatctgataccgcagatccgtcgtccggtgagtggaagccgcacgaacccatggcctccggcgagcttgcctgcacctacgccgctctcatcctcagcgacgatggcatcgccatcaccgtgcgtccttctccctcgccgccggctcttttaaatctccccgcttattctttttgagcgggtgaggagatgcgtgattgttcctcttcttggcaggccgagaagatcgccacgatcgtgaaggcggccaacatcaaggtcgagtcctactggccggccctcttcgccaagctcctggagaagcgcaacgtcgaggacctcatcctctccgttggatctggtatgcatcccccctttgcccctcaagatattatgcccggggtttgcaatgtgtgggtagttcgtggtggcgacgttgtagatttagcttatttcgttatgttgcttgtcttttattgatcttaaacttgttcgagacgtattgaaacagtttttatcacccaaccatgtgacattgtcagttctagaaattcaacttgaatgattataagtcgtcatattcactgtaattgaacctttgattcgacagtaggctcaattggacgatagtgtgtatttatatacttacaataaactgagaagcaagtatctgtctctttacctgaattggaccttagggtttcaatgtttaatttgacactgtacatggcgcatatgtttgaatcttcattgcattactgaaatgcaagacaatgccctgggtattttcagaatgcaggagtatgggacctttaatttgtgccaaccttagctgcactgaagattgtaacagtgcatgtttatacttgaattggatggtggattgtgttgaatttgtcaccctttgctttgatataagaacctctagttatatgctagaaggactaatcgttttggtgtgttgaaatggttttgtaggtggcggagctgctccagttgctgctgccgcacctgctggtggtgctgcggctgctgctgccccggctgtcgaggagaagaaggaagaggccaaggaggagtctgatgacgacatgggcttcagcctgttcgactgaggagaccccctcacccagccattagcaaatttcacttgtgctgtcaaagactatcttgtcttatgttatgtctctaggcttttgttacaactacccaagttttgagtttttgagatgtggctatggcatg

SEQ ID NO: 35581 - DNA, 2433 bp, Zea mays
  Clone ID: UC-ZMROB73059G11_FLI
ggatgacttggtggtgccaaggtcgccctacttcccagtggagtccgcggcggggcaggagcgtgggccgtcgcccatggtgatggagcggttccagagcgtcgtcagtcagcttttccagcacgtacgacggcactggattgtgtaaagtgtttgacctccttagggcttgtttggttggatacttggatctggattggaggggattccctccctagtcaaaattgaatagaaggggatttaatctcccctcaaccgaacaaagccttaccaggaagggttttactggattgtattgtgaggtttgtgtgactatatatctgtctctatgcagagaattattcggtgcggaggccccgttgaggatgatatggccaacatcattgtagcacaactgctctacctcgacgctattgatcccaataaggtgaaaacgaacgggacaaccgtttgctgctgtaattcccatgtgaatagaacatgcttgcgctttaaataaacctttgtttgttgataccagacagtgaaccaacattgtagtactaaactttgtacagtgcttctttaactttctgtgttgcggaattgggttatacaattgtaaccactgaacttgtaggtttatccaatgttgccatttcatctagctagggactcgaatacatggcaattatatattcaaaacgtggtttcttccatctagtgcatgatccttgtcaaccttcctgtaggatatcattatgtatgtgaattcgccaggagggtcagtgacagctggtaatagctcatctaacatagtatgtctgcgttagctgcttcaattaatactaatgcattttcgttttctgttaggaatggctatatttgatacaatgaagcatatcaggcctgatgtatccactgtttgtattggactagctgcaaggtactgaacacaaattctgctgaacgatcatcaattgattcagttctttgcatgttataggatcttaatgttcatgtttgactttcagtctgggtttattttccctatgtagtccattctgttctcaatgtgggaagcgcaattgatcctttgtgtttgcagtaattggaaggttcagttcatgtaacctatagtctgggatttgggattgtagtaactagatttttttttggctttggttgtgctagtatagttcttgtttgcagacaggacttgcatggcatgagtttttaaaactaccgtagtaccatagtttcagttaacaaattacacaattgtcaactccagatggatgccaaaagcagcaatgtccttttactttgcatacttgccctgtgttggggttattattcagcaaattcaccttttgcagcgagcttgctcaatgattatctgcacagaaatgcctacttgcctagtaatttaattttcgttataacttggtacatgtagttctgctatgaatgaaaggtaggaattaagtatgctttcacgaaataagaattatgtattcctgcttttcgtatttaatattttagtgtaactagccatacataattaaataaaggatgttagagatctaatttgtgtttcagttttacagtttgttagtgtgaacatgtttattatttattactgagattctgtggccatttcttgttattgtttaactccaaattatgtcatgcctcatgcaatgttatcttttattacctggatgattctgacactctttctgctgtttgatgtttctgtttgacagcatgggagcttttctacttagtgctgggaccaaaggtaccagtagtgattgctaataaaatacatgtaggtgtagcttacatatccaagcttcgttaatagaagtcataaaaccggtgaaaatataatgcaggaaagcgatacagcttaccaaactcaaggataatgatccatcaacctcttggaggggcccaaggacaggagactgatcttgagattcaggtaaactcgcaatgtggggctatggaaagtatcatgctttctagaccagtacagtatcttaaccaaagatattctcagttctcgtttcttctcaacaaagatccttattttctgattttcatactcagctgagcttacggttgttatattttgcatattatttttttatctctacatattgcgtattgttacaagccaatgagcccctcttttggcaaccgagtaagaattacagttgtttacaccagcagttgctgatcctcaagttctgattattttattcaggccaatgagatgctgcaccacaaggcgaacttaaatggataccttgcataccacactgggcagcccctggataagatcaacgtagatactgaccgtgactacttcatgagcgcgaaagaagcaaaggagtatggccttattgatggagtaatcatgaatcccctcaaggcccttcaacc

SEQ ID NO: 35582 - DNA, 1010 bp, Zea mays
  Clone ID: UC-ZMROB73059G12_FLI
cagcagctcgtccacgacgacctgctcttccactactccgaccaggacctcgccgacgacctagccagctccgaggagtcggtccgggacgcccggcgcggcgtgttcgacgacgcccagccgtggcggcgcaagatccagcgcctcctcccggcggacggcatcacggtcaagcacatcaggacaggggaggatgtgtcactgtccaggcgcatcgcagcgacgttcctcctgatgaccatagccgacttcagcgaccagctgttcgactggcaggaccgcctcttcgacaacagcaacggccgcctcgagttcagcggcaacacctggacctccctctggcccggcaccggcaagcctggcctctgggtcacctctagctcccgcatggccgcgctctacaccctcatcgtccgcgaggaggagatacacatcacgcagcgagcgcgagatacacatggccgggacgaggacatggacctggtgatccccccggtgttcaacggctgcacccgattgctcaacgccgaggaccagaaggtggcacgagacctctactgggaggcggtatgcggcgaggaggcgtcggactggctcaaggtggagcagctcctccagcagagcattgccaagaacccgtttgtgggggaaccacacctggtgcttgcccaggtgtaccttaacatggagaggtacggcgaggcgcagatgcaggcagaggaaggtctgaggctgttgctggagtggggcagcagctgggacaagaggatgccatgggagggctgggtgtcctggggcagggcgatgctgaccaaggccaccgacaaggattggccgcatacctcattcgggatcctcagccttgggcttgtcaaatgatacatatattctcaccgtatgcatatgtatgtatttgtacgaaataataaacccaaggccagggggtcaagccaaacaataatttgatgtacttggaattcagatgtgttatcaaacacaacttgtctgcc

SEQ ID NO: 35583 - DNA, 850 bp, Zea mays
  Clone ID: UC-ZMROB73060B03_FLI
ctccaaccacgtcgcgttcggcgagcccacggcgctgctcgccggcgacgcgctgctggcgctcgctttcgagcacgtcgcccgcggcagcgcgggcgccggcgtccccgcggaccgcgctctccgcgccgtcgtggagctcgggagcgtagctggcgtcggcggcatcgccgcggggcaggtcgccgacatggcgagcgagggagccccctccggctccgtgagcctgggcgcgctggagtacatccatgtgcacaagactgcgcggctcgtggaggccgcggccgtgtcgggcgccgtcgtcgggggcgggggcgacggcgaggtcgagcgcgtccgtcggtacgcgcacttcttagggctcctgggccaggtggtggacgacgttctggacgtgacgggcacgtcggagcagctcgggaagacggcgggcaaggacgttgccgccggcaaggccacgtacccacggctgatgggcttaaagggagcgcgcgcatacatgggcgagctcctggcgaaggccgaggcggagctcgacgggttggacgccgcgcgcacggcgccgctgcggcacctcgcgcggttcatggcgcacagacagcattgagatggggtggaagtggaactatggaagtggatctggccggctcatccggaacacttgataaaagtgatgcgttgactattagtttctcagacctcaacatcgagtgattactttgccccggcccaaaaggatttatgggcttccgagttgagtgacactgcagtttgccagtggcatgtggcaacctacctaatgggccgttcacgccttcacggacaagtagcctttataagtgcggttctt

SEQ ID NO: 35584 - DNA, 929 bp, Zea mays
  Clone ID: UC-ZMROB73060C08_FLI
ggttgacaggattctggacaagactgggatgaaggggaccgggaaatggaccgtgcagcaggcggcggagcttgcggtggcagcgcccacgattgccgcgtcgctggacgggaggtacctgtcagggttgaaggacgaacgggtcgcagccgctggggtgctggaggaagaggggatgccggcgggcctgttggagacggttaatgtcgacaagaaggtgctggtggatagggtcaggcaagcgctctacgcctccaagatttgcagctatgcgcagggcatgaatctgctgcgagccaagagcgtggagaagggatggaaccttaacctcgcagagcttgccaggatctggaagggcggctgcattatccgtgcgaggttccttgataggatcaagagcgcgtacgacaggaatcctgagctcgccaatttgattgttgacagagagtttgcaagggagatggtgcagcggcagaacgcgtggaggtgggttgtggcacgcgcggtggaggctggcattagcacgccaggaatgactgctagcctttcgtacttcgatacctacagatcaagtcgattgcctgcaaatctgatccaagcgcagagggatctgtttggtgcacacacctatgagcgcattgactgtccgggttcattccacaccgaatggaccaagctggcgaggaggagcaatggcgcagccatttgaggaattgatccaagtcgagtacttcaaataatgctgtactgtatggttggcaggtgaagaacattgtgtagcttcagttttactgtgatgtaggtacacacagtttgattctcttaattttggtatgcaattgctatgatgcctctcaaactccaatgttgtgtgtttaaagagttatctgaaatgtgttgaaactgctactaagagtagcgagttttgc

SEQ ID NO: 35585 - DNA, 1563 bp, Zea mays
  Clone ID: UC-ZMROB73060E06_FLI
cacggagcctgatttggtttgctttttgttgcccagactcggagggagttggtgcctctgtgtctctgtgtgtgtggagatggaccccaagttccccccacccccaccgctaaacaaaacggagcccaccaccgcgacgaccaccaccacctcgaccgcgcagcagcagcagcagcagctggatcctaaggactaccagcagcagcagcagcagccggcgcagcacctgcaaatccaaatccaccagtcgcagcaggacggaggcggcggagggaaggagcagcagcagctgcaggtggtggcgcagcccggggagaggaggcagcaggcgctcgcgcccaagcggagctccaacaaggaccgacacaccaaggtcgacggcaggggccggcggatccggatgcccgcgctctgcgccgcgcggatcttccagctcacgcgggaactcggccacaagtccgacggcgagaccgtccagtggctgctgcagcaggccgagccggccatcgtcgccgccaccggcacgggcaccataccggcgtccgcgctcgcctccgtcgcgccctcgctcccgtcgcccacctccgggctcgccaggccgcaccaccacatgtgggcgccgtccgccggcttctcctcgccctccttcctgaactctgccgccgcgggcacgggcgatgccgccggtatcatgcagcggatggggatccccgcgggcttcgagctgccgggagcctccgccgccggagccaccctcggcgccggcggccacatcggctttgcgcccatgttcgctggacacgccgccgccatgccggggctcgagctcgggctatcgcaggacggccacatcggcgtgctcgccgcgcagtcgatcagccagttctaccaccaggtgggtgctgccgccggcggcggcggccagatgcatcacgcgcacgggcaccatcatcaccatcaccagcagcaggaggacggggaggacgaccgcgaggacggcgagtccgatgacgagtctgggcagtagtagtgtaaccgttcaaccttttgcgttgctgaatcttccctcaagttggaaggagagaaaagtgtatgcgtgcagccacgggatgcttctgctactcttggactgttgttggtcgagttctgatggatttttgtgttcatttttttctcgtgtggtatccaaactcaacggaggcctctcttgctgtgaggacttgcggattcgagatcatcctcagttcttcctacaatctcatggagtggatgatcgccacagccttctctccgacttccaggtgtatactagctgagaaaatgatggattggatcgatcacccttgagtgagtgccttatttgttattgcagtgtgtagatattcaggtaattttgcagttagagaggtgttctttttattgtagtagtgatccacgttttaaaacaatcaaggtattctcctccacaggctgtctatgcaatgcaagtatagtacaattctagttcatgaccacgcataccacttttctccttctctgatatgtctgtgatctgtttctgac

SEQ ID NO: 35586 - DNA, 1598 bp, Zea mays
  Clone ID: UC-ZMROB73060E11_FLI
gcgggtggtgtgggtaaccgcggcgcgagaagctgctcgatcttgcagctcgtgccgggcgccgggggtgtgcggtgcgggtgctgcggacatgagctgcctgtgctggttcaagcggaggtccaggaaagggcgatcgtcgtcgtcggggaagcgaggggcgtcgtcgacggcgacggtgtcggtgtcgggccccgcgaccgcgaccgcgaccacgaccacgacggcgtcggcggagagcacgagccggtcggacgactcgggcgcggtgcggccggtgagcaagtcggcgggctcgtcgcagtcgcagcggagcatctcgtcgctctacgaggagcggggccacggccagctgcgcgtgttcgactacgacgagctccagggcgccacggccgagttcggccgcgcgcagaagctcggcgagggcggcttcggcagcgtctacaagggcttcatccgcgccgccgacggcaagggggaccgcgtccccgtcgccgtcaagaagctcaaccagcgtggcatgcagggacataagcaatggctggcagaagtacagttccttggtgttctggagcacccaaatcttgtaaagctacttggatattgtgctgttgatagcgaaagaggggcacagagattgttggtctacgagtttatgcccaataagagcttggaagaccacttgttcaggcgagctaatcctcctctaccgtggaacagaaggcttcaggttatcttgggagctgcagaaggattggcgtacctgcatgaaggggaagttcaggtgatctaccgggacttcaaaacgtccaacattttactggacaaggacttcagagcaaagctatcagacttcggcctagccagggaggggccaactggagcaaacactcacgtctcgactgcggtcgtcgggacgcaagggtacgccgcaccggagtacatggacacggggcacctgacgacgaagagcgacgtgtggagcttcggtgtggtgctttacgagatcctgacggggcggcggtcgctggaccggaacaggccggcggcggagcagaagctgctggagtgggtggcccagttcccgccggacagccgcaactttcggatgatcatggaccccaggctccgcggcgagtactcggtgaaggccgcccgggagatcgccaagctggccgacagctgcctgctcaagaacgccaaggagcgccccaccatgagcgaggtggtcgaggtcctcggccgggccgtgcaggcgcacgccgagcctgacagcggggctcccggccccggcgccaaggggaagaagaccgacgctgccacaccgtcccggcggcggcgtgactgactgctacatgtcgtcatcggtaaaggcgcttaccgagtccattggttagtctagtcgtgagctgtgacagcacaaaaggagtgagtgttgtgcttggggccctacatataattttttttggacatacagcattacttagacgtacgtagagacgagctggcggattgaactttgtgtagctttcgaaagtgagcattttgaaaagaaaaaaaagagtagaggtctcaagggtttcgaaagggggcatttc

SEQ ID NO: 35587 - DNA, 1525 bp, Zea mays
  Clone ID: UC-ZMROB73060F04_FLI
gtccaacaccaccacgtcactccaaagcctcgtcgccgaagtgtcgcagtggcgggaaatccacctgggcggcggcgcggcggcggcgcatggcgtccggccgagcaccgtcgtggcgtgggcgctctccttcctggccgcgtccgtgtcgagcgccggcggcgtgggcggcgggtcgctgttcctgcccatcctgaacctggtggcggggctgagcctgaagcgcgccactgcctactcgtccttcatggtcaccggcggcgcggcctcgaacgtgctctacaacctcgcctgcacgggcggcggcgggagagggaggctgatcgactacgacatcgcgctactgttccagccgtgcctgctcctgggcgtgagcatcggggtggtgtgcaacgtcatgttcccggagtggctcatcaccctgctcttctccctgttcctcgccttctgcacagccaagacgtgccgcgcgggggtcaagatctggcggtccgagagcagcgggtgcgggtccggggctaggtcctcgcgcggtggacacagccacagcaaggagcccctgctgccccgcggcaccagcgacggcgacgccgagggcggcggcggaaatggcgcggggttcccgtggggagacgtggctctgcttgtcatcatctggctctgcttcttcgccctccatgtcctcattggcgataagcacgggaagggcgtgatcaggattaggccctgcggcgtcgcgtactggctgatcaccttcttccagctacctgccgctgtggctttcacagggtatattgtatacgccaagaggaagaaacgcgctgttcatagcgaaagccaagaggacggcagcaaggcagaccttgcggacgcaggagtggaagccttgccactacctacactacctctcgccgctttcgtcaccggggctctgagcggcctcttcggcatcggaggagggctgcttctgaaccctgtccttcttcagatcggaattcccccgcagaccgcggcagcgacgtcttcgttcatggtcctgttctgtgcgtccatgtccatggtccagttcatcctgctgggcgtggaaggcgtcgggcaggcctgcgtttacgccggggtatgcttcgccggctcggtcgcgggggtcgtcgtgatcgagcgagccgtcagcaagtctggccgggtctcgctcatcgtgttcctcgtcaccgccatcatggcgctcagcgctgtcatcgtcacctgcttcggagcgttagacgtctggatgcagtacaccaccggggaatacatgggcttcaagctaccttgctgacatcttgctcggtgttatgggcttcgttttggttttgcgtttgtgctcttcaccttgtaatgtctggaaagagaggccggagtaggactggttgtgcatgggcactcattgtaatttccaattttcaggttttatatagtgtgaattgtcatcttcacttgtttatttactcccacggggaaaaatatatatgttcatgagtgcatccac

SEQ ID NO: 35588 - DNA, 1724 bp, Zea mays
  Clone ID: UC-ZMROB73060H07_FLI
ctttctccggccagattccggcgaccttggggaatctggcgtggctagaggcattgtccatacccaggaacagactcactggtcgcctttctcgtgagctcttccagctgggaaacctgacgttcctggacctatccgagaacaacctcaccggagagatccctccggccgtcggcaatttgttggctctccacagtttaaatttgagcggcaatgccctttttggccgcattccaacgaccattggcaacctccagaacctgcgagttcttgatctctccgggcagaagaacctctctggcaatgtcccggcggagcttttcggcctaccgcagctgcagtacgtgtcgttctcggacaactccttctctggcgatgttcctgaaggtttcagcagtctctggagtctgcgcaatctcaatctctccggcaattctttcactgggtcaataccggcgacgtatgggtacttgccgtcacttcaagtgttgtcagccgcacacaaccatatttctggcgagctaccagccgagctcgccaattgttccaacctcactgtgcttgagctcagtggcaaccagctgaccggctccatcccgagggacatctcacgccttggtgaattggaggagcttgacctcagctacaatcagctttcaggcaagataccaccagagatctccaactgctcatcactcacccttctcaagcttgacgacaatcattttggcggagacataccagcctctgttgccagcctctcgaagctacagacgcttgacctgtcgtccaacaatcttaccggcagcatccctgcttcattggctcagattcctggccttttatcattcaacgtgtcacacaacaagctttccggcgagataccggcgatgctcggctcccgctttggctcttcgtcagcatatgcttcgaactcagacttgtgcggtccgccgtcggagagcgagtgcggcgtgtaccggcgacggcggaggcggcagagggtgcagcgcctggctctgcttatcggtgtggtggctgctgcggcgttgctcgttgcgctgttctgctgttgctgcgtgttcagcttgatgggatggaggcgtcggttcgttgagagccgtgacggtgtcaagaagagaagacgcagcccaggacgcggcagcgggtcgagcggcacgagcacggagaacggcgtcagccagccgaagctgatcatgttcaattcaaggatcacttacgctgacacggttgaggcgacccaccagttcgacgaggagaacgtgctcagccgaggccgccacggcctcgtgttcaaggcttgttacagtgacggcaccgtgctggcgattctgcggctcccgtccaggtctgccgatggcgccgtggtgatcgacgagggatcgttcaggaaggaggccgagtctctcgggaaggtgaagcacaggaacctcacggtgctccgtggctactatgccgggcctccgccggacgtccggctgctggtctatgactacatgcccaacggcaacctcgccacgctgctgcaggaagcgtcacaccgggacggccacattctcaactggccgatgaggcacctcatcgcgctcggcgtctcgcgcggtcttgcgttcctgcaccagtccggggtggtgcacggcgacgtcaagccgcagaacattctcttcgacgccgacttcgagccgcacctgtctgatttcggc

SEQ ID NO: 35589 - DNA, 1339 bp, Zea mays
  Clone ID: UC-ZMROB73061A07_FLI
aaacgagagcttaactgaagcatcaaattcacataatggtatgtcgagctcaagcagcaattaatggcagtacatgtacatatgaagctagcgctagctggctcaccaagcgcccaaattaactaatcaacccgtaaaaccccccacgcactgcattgctgacgcagatgcaggcccccttaatctacccccatttcattaatcctatcagtaatcatgctactgctaatgacacaatcagagtagggtaccagtactatgtacagagaccaatacaaaggaacctaggattaattaattaacaaggaagccctaatcccctggcggtctggacggataataatctagtcagacccgaggtcagtagaggccggacctggcggaggtgacgaacgaggacgcatcagcgaaccggtcaccaaccccagatcccacaagagaccaagataatcaatcaaatcaagcaaattaaccaaccagaccacgtgaccggggcgggtgggcggcccagccaccggtcgatcgtcgcccaggcttcagtacttccagaggtcggcgaggttgagggccgggtcgtcgagctcgggcaggaactggtgcgacgacgacggggtcgccgccgacgagatctccgcgtagccgcccgccgcgttggggtcggtgctgagcccggtctcgcgggacgggctgatcaccgacgccgtctgcgccgagaccacctgctgctccgccttgcagtacctccggatcgccggggggaggtggccggagttcatcgccggaagagagaagtactggctcgggtagaacatcgggggcggcggctggtactggcactgctgcatctgcagcagcgcgtgctcctccatcttgaccgggaggtagctcgcgtccggaacggacgcgggggcggggcccttgaagtcgatcacctcgtccacgtcggctccgacgagggccggcagctccgcggagtcgaggagctcgttgaggaagcccagcgagcccacgcgctcgagctccgccgcgccggccgccgccaataatggctcgctcctcgccgcctgcagctccttgttgaacaccttgcacacggcccactcgtcctgcaccgcacgcaacaaaaaggacaaggcggcaagaaaaagaagagaggggacttgttagcccacgcccaccggccggaaattaagggcaggagacttgcttgcaacgccgaacgacggaacgagtaagtacacgagggccggaccttggcggagcgcgggagcggctggggaagcctgccctcgaggcggaactcgtgcatgacccatccggtcttctccccgcgcggcgc

SEQ ID NO: 35590 - DNA, 2109 bp, Zea mays
  Clone ID: UC-ZMROB73061A09_FLI
gtacggtttggtggttggatggaatctgatggcgatgcgtccatgtgcgacaggtgttcgacacgtacctcagcgaggcgcgggcggctctcgctgcggccgcgcaggacaccgacgacgcggcggcggcggcggcggcgctcggcctggtcacggccgccctggagatgtcgccgcgggccgaggcggcgctggagctccgggcgcgcgcgctcctcgcgctcaggcgctaccgcgacgtcgccgacatgctccgcgactacatccccagttacgccaggtcgtgctcgggcgacgatgacgccacctgcgcctcgtcatcctcgtcctgctcgtctgcctccggggaccgcgaccgttccgacgcctgcgccggcgccgcccgcttcctctgctgcctccacgtgtccgacctcaagcgccgcctcgtcgccagcttctgcaggagctcgagcaccgaggcgcagtggaggtacctggtcctgggcagagcctgcttccacctcggcctgatggaagacgcggtggtgctcctccaaaccgcccgccgcctcgccaccgcggcgttccggcgcgagagcgtgtgctggtcggaggacagcttctcgccgtcgaacccgctgacggccaacagcgccgcagcgtccgaggcggagtccgtgtcgcagctgctcgcgcacgtgaagctcctcctccggcggcgcgcggcggcggtggcggcgctggacgccgggctccccggcgaggcagtgcggcatttcaacaaggtgctggacacgcgccgcagcgtgctgccgcaccccttcgccacggcctgcctggtgggccgcgccgccgcgttccggtcggcggggcgccccgcggacgccatcgcggactgcaaccgcgcgctggcgctggacccggcctccatcccggcgctgcgagcgcgcgccgacctgctggagtcggtcggggcgctcccggactgcctccgggacctggaccacctcaagctcctgtacgacgccgcgctccggggcggcaagctgcggccgcagggcggcgtccagttcggggagatcgccggcgcgcaccgcacgctcacggcgcgcatccagctgctccgcggccgcgtcgccgccggcgaggggtgcggcgtcgactactacgccctcctcggggtgcggcgcgggtgcacgcggtcggagctggagcgcgcgcacctggtgctgacgctgaagctgaagcccgagcggtcggcgtcgttcgcggagaggcttgagctcgtggacgaacaccgcgacctggaggccgtgcgcgaccaggcgcgcatgtcggcgctgttcctgtaccggatgctgcagaagggctactcgtgcatcatgtcggcggtgctggacgcggagaggcagagggccaaggacgcggcggctgccattgcagagcaagaagaagaagtggcaacagtgcaagagaatgccactcgaaaagacggtggcaacgttgtggtcaccacgaagccggaagcgattccaatgcctagaacggcagtggctgcagcgacaccattgagccaaccgttcgtgttctgccgcgacaccctgctgtcccgaggggggttcgaccggccgattccggtgaagtgcgaggcgatgagctgctgatgtcgcgaggcgggtccaatggaaggtgaagcagcagcagcagaacctggagttggcgggactggagtggaggttcgaatttgcttgtagtagtagcaagcgctgtacagtttgggaataagagatgcatgagcacaaaataggaatgaacgcgagtgcaagaagcgtcagggagattgcagttttttttgtatttgcagcttgttcgctgcggcttgctgcggctgcaatccggctgcggctgcggcttctacagtatttttctctctatggattgcagctgcagcagtccaaacagctgcaacagtgtcggcttgtagccagccgaacacgcccttggtttccgagttcgtttttagtgcagtactgggtcagcttctcgtcatctcttggccatgtactctagatgctccttggtagtgcaaattttgtacagttgtccttgtatagtgaagttttcctc

SEQ ID NO: 35591 - DNA, 1951 bp, Zea mays
  Clone ID: UC-ZMROB73061B04_FLI
cacctccccgaagctgccgcgaccgatcgagcgaagcgtcgctccccgcgccgccgccaaaaccctagcttctcctactccatggccactgtctcgctcaccccgcaggctgtcttctccacggagtccggtggcgccctggcctctgctaccatcctccgctttccgccaaactttgtccgccagcttagcaccaaggcacgccgcaactgcagcaacatcggcgtcgcgcagatcgtcgccgccgcgtggtccgactgccccgccgctcgcccccacttaggcggcggcggacgccgcgcccgcggcgtggcctcctcccacgccgcggctgcatcggccgccgccgccgcctccgcggcggcggaggtcagcgcaattcccaacgctaaggttgcgcaaccgtccgccgtcgtcttggccgagcgtaacctgctcggctccgacgccagcctcgccgtccacgcgggggagaggctgggaagaaggatcgccacggatgcgatcaccacaccggtagtgaacacgtcggcctactggttcaacaactcgcaagagctaatcgactttaaggaggggaggcatgctagcttcgagtatgggaggtatgggaacccgaccacggaggcattagagaagaagatgagcgcactggagaaagcagagtccacagtgttcgtggcatcggggatgtatgcagctgtggctatgctcagtgcacttgttccggctggtgggcacattgtgaccaccacggattgctaccggaaaacaaggatttacatggaaactgagctccccaagaggggaatttcgatgactgtcattaggcctgctgacatggatgctctacaaaatgcgttggacaacaataatgtatctcttttcttcacggagactcccacaaatccatttctcagatgcattgatattgaacatgtatcaaatatgtgccatagcaagggagcgttgctttgtatcgacagtacttttgcctcccctatcaatcagaaggcactgactttaggcgctgacctagttattcattctgcaacaaagtacattgctggacacaacgatgttattggaggatgcgtcagtggcagagatgagttggtttccaaagtccgtatttatcaccatgtggttggtggtgttctaaacccgaatgctgcgtaccttatccttcgaggcatgaaaacacttcatctccgtgtgcaatgtcagaataacactgctcttcggatggcccagtttttagaggaacatctaaagattgcccgtgtctactatcctggcttgcctagccaccctgaacatcacattgccaagagtcaaatgactggctttggtggtgtggttagttttgaggtaaatttaattcttgaattaattgtactttgtactaagttgttgagaacatgacatagttcagtgatatacatattccttctgtaggttgctggagactttgatgccacaaggaaattcatcgattctgttaagataccctatcatgccccttctttcggaggctgtgagagcataattgatcagcctgctatcatgtcctactgggattcaaaggagcagagggacatctatgggatcaaggacaacctgatcaggttcagcattggagtggaggattttgaggaccttaagaatgatcttgttcaggccctcgagaagatataagctccaatccatttgcattaataaagttatgaggtgatggttgtctggatcttgtagagatttgtgatgatacatgagctgttgactgcgattaagttctcttgtgcttattttattctttgaattcaataagctgtggttgctgcatcttgcatgtagtgttggacttaattttacttgtcaaattacaatagtttggtcccatgtacttgtgtccgcgcctccgcggttgtgcccctagtgtttttgtgtc

SEQ ID NO: 35592 - DNA, 2014 bp, Zea mays
  Clone ID: UC-ZMROB73061E03_FLI
cccacgcccccctgctgtggcctctgctctctcctgccagttcacctgctgcctccggtgcccgctgctgtgcctcgctcgctcaccaccaccaatcgccaccccgtgcggcagccgcgctgccatcccgcggaggactggaggagcacgcatatccgagccttccctgccgcgtcgcatggactcatgctgtcgcgggccgcctcccgcatcgcctccaaccgggtgcctgcctaactggccgattttcttcctcgcgtagccccattccgcagcacaaatagcgcgtcactttcccaatttctatcgcgtgccccccttccgatcctgccatttcgtgcatcctgtagcgtctggcagtgcgggggtcatcggggatggagtgggtggacaggaccaaggcctccgccgccgccgccgcagcggcggcggacgagagggctgggggagcggaagggctcgcgggatacgtcaaggtcatgaccgacgaacagatggaggtgctccgcaagcagatctccatctacgccaccatctgcgagcagcttgtcgagatgcaccgcgccctcaccgagcaccaggacaccattgcaggagagctgcgtatcattgcattaagaagaaaagccgaatacaaatggcctgcgaggctgcaaccccgggcaaaggagtccgaagaggaaacccaaagaaaatataaagaaactactaaaaaagagaaggccaggtcacaaccactaactacaacttcctaagaatttcctgatccaagagcacgcaaaccagctgctccaacaaaacaccaaagattgcgctcatccataagggaccggagatttgcataaactttttttagctttcattaggtcattttttaaatattccgtattccaatgattcaccctaattacttacattgatggccgcacaacatcccacctgtccctttttagaataatctttaaaacagacttcactgaatttgcccttcctcctgtacaagtgttttaatgctcctttgtaatgtatgcattgtcgatggaatatagtcccttcttttttttcccgatcaactgggtttttgtttcttcttcaggaattaggtttagtaatctgtactgtgatcctcaaattatccctggaggccacaagatcacagcaaggcaacgatggcaaccaacaccaatgcagctgcagatcttggagaacatctttgaccaaggcaatggaacaccaagcaagcagaggataaaggagataacggcagagctctcgcaccatggccaaatctcggagacaaatgtgtacaactggttccagaacagacgggcacggtcaaagcggaagcaggccgcttctttaccgaacaatgctgaatctgaagctgaggtggacgaggagtctctcaccgataagaagccgaagtcagatcggtcgctccaggacaacaaggctatgggcgctcacaacgctgacaggatatctgggatgcatcacttggacactgatcatgaccaaatcggtggcatgatgtatggatgcaatgacaacggcttgagatcgtctggcagttctggccagatgtccttctacgggaacatcatgccgaatccaagaatcgatcatttcccggggaaggtggagagctcccggagcttctcccatctccaacacggggaaggctttgacatgtttggatgacatgatgcggcgctgagttaccgtgtaaaatgtgatggttgacacatcgtgcgttcaatttgctgacatgaaagttgatgttggatgtccgtgttgcttatcacgttctggttaaccacctccgcggatggtagctagcttgaatgaacctactctttgggatagctgtaagaggttgatattatagtttgcccgtagtctatatacgctgaactatcagcatgtaattctccacgtttgcaaatttagcacgggtatgcagcagcctgtggttaaaccttcgtgtgtgtgaaaccatttcttgcttgctttt

SEQ ID NO: 35593 - DNA, 521 bp, Zea mays
  Clone ID: UC-ZMROB73061F06_FLI
ccgacgcaaagaccactctcagccagcctcaaggcgcgcgcaacgccgctcctgcgcttgcgtgggtcgtcggcatggacaagcaggatgagaggaagaagccccacgggaaaacagaccccaagaggggcgacatcatgaagcggatcataaaggacctcaccggcggcggcaacgacggcggcggcggtgccagtgacggtggtggtaacagcggctccggctccacccccgctggcgccgactgacgcacatggcgcgtgcgtacccagttacgacggcaggggcgagcggtgagcccccgtgaatccgtgatggtttgtgtagttgttgctttctcgaatctggttatctggcaaggctagctgccggctgcgtatcgtacgttagtgtagggggcggtcagcgttcggatggcgggatgggtggtgtgcaatttaagactgtgctgtgtaacacttgtgctcaataattgtggatgatcaaatcgatggggccgcacgcccgcacctatttgcgtc

SEQ ID NO: 35594 - DNA, 1174 bp, Zea mays
  Clone ID: UC-ZMROB73061G10_FLI
catgccctcgcctgtggcggcgcaggacccgtcgaagctgagcctgcagtactactccaagacgtgccccaacgtggagcacgtcgtccggacggagatggagtgcgcggtgcgcgccgacacgcgcaacgccgcgctcatgctccgcctccatttccatgactgcttcgtgcagggctgcgacgggtcggtgctgctcgacgacacggcaaccatgatcggagagaagcaggcggagcagaacgtcaactcgctgaaagggttcgatctggttgacaagatcaaggagaagctggaagccgagtgccctggaaccgtctcctgcgcagacctgctggcgattgcagctagggatgcggttgtgctggttggtgggccttactgggatgtcccagtaggaagactggactccaagaaggcgagcctggacctagcaaacagcgacatccctacggcccagcaaggcctcctcacgctcattgccaagttctgggagaagggccttgatgccactgacatggtggccctcgtcggatcccacacgatcggattcgctaggtgcgagaatttccgggacagaatctacggcgacttcgagatgacgtccaagtacaacccgtcgtccgaggcctacctgagcaagctgaaggaggtgtgcccgcgggacggcggcgacgacaacatcagcgccatggacagccacacctccgacgtgttcgacaacgcctacttcgagaccctcatcaagggcgagggcctgctcaactccgaccaggcgatgtggtccagcatcgcgggctactccacctccgacacagtcaacaagtactgggccgaccccgaggccttcttcaagcagttctccgactccatggtgaagatgggcaacatcaccaaccctgccggcggcgaggtcaggaagacctgcagatttgtcaacacataggatatgataatatatataggatgctcgagactgcaggagaaactcggtggttgtgattgtactttacgcctgcaccttctttcgatggcttgtttagggtggcttggaaaataaaaaacccctttgctgagactattgtattatacatatgtagcatattatatgttcttgtcactgttaaccatatatatggttggctatgtgaagatacatacacatctttgtctg

SEQ ID NO: 35595 - DNA, 1299 bp, Zea mays
  Clone ID: UC-ZMROB73061G12_FLI
ggaggcgctggggctgctgggctgcgtcaatgaggtggtggcggcggtggcagccacgtgggggcccatgaccgacggcgcgcgcgtcgagacggcgcccaggctcgcccaatggcgcgtcgacccgctcccctgctacacctaccgcaagtcactccccttcctcatcggcctctggaactggtgcatatctgtggagagaaataacaagcaaacctgtgttaagctctttgcagagaatacaagttctctcaagaacggttcctcagccccaatagcttcctttatcgccaaacttattgtatctcttccacctaatcagcagaccatagtccacccaggaatttttgacaaacagctgaaatacgacggttttgtgtggacaatcgatagcaccgtcactgggaggtttgtgattgagatagagtttcttgacctgaaggtcgctgatccgtctggcggggagccggcctcgatttgggcctcccgccaggtcaagcagtgctcggacagcacggccctgtcgtccctggctcggatgctgcacgaggacgtcctcaccgacatcaccatcaacgcggcggacggcagcgtgggcgcgcaccgcgcggtcctggcgacgcggtcgccggtgttccggagcatgttctcgcacgacctgagggagaaggagctctccaccgtggacatcaccgacatgtccctggacgcgtgccgcgccttcctcagctacatctacggcgacgtgcgcggcggcgaggagttcctggcgaaccggctggcgctcctccgcgccgccgacaagtacgacatcggcgacctcagggaggcctgccacgagagcctgctggaagacatcgacgcgcgcaacgtgctggagcggctgcagacggcgcacctgtaccggctgccgaggctcaagggcggctgcctgaggttccttgtggacttcaggaaggtgtacgagatgcacgacgacgacctcaacgcgttcctgcagacggccgacagggaactcgtggccgaggtgttccatggcgttcttgccgcgtggagcgggcggtaagccgggcgcatgccatggcactgccgctctgctgcaggtgttgcacatctggttggttcagttcgtcacaactcagaagcgttgtttgcaactggaggattcttgctgggaaagcgtgtaaatatttgcaaactgtacatgcgtgccagtggttggtctaaaatttactgtgcatgccttgattggattttgttcctatgatgtggaaatcagctcatatgctgctcatattc

SEQ ID NO: 35596 - DNA, 1670 bp, Zea mays
  Clone ID: UC-ZMROB73061H08_FLI
gccggcgacgagcggaagccttcctccatcttcaggctgctagtactcagtagtcagtacagtacagtggtgccgacgacatgacgaagatctcccgctcgttgctcgtcgtcatcgcgctggtcctcctcggccctcacctcccgccatccgaggcgctgacgcccaagcagggcgtcaggtccaagaccttcctgtccccgcccatcctgcttcgcccgggcgacgtggccgacaagttctactacgacatccccttcccccggggccacctggcgctcaagagcttcaacggcgaggtggtggacgagcgcggcgcccccgtgccgctccacgagacgtacctccaccactgggtcgtgcagccctactacgccctggtagtatcggcggagggcggcagcagccggccgcggaccatcccggcgcgcaacgccggcgtgtgcagcggccacacgctgggccagtactacgggctggggtccgagacccggcgcacggccacgtgggtgcccgacccgtacggcatcgagatcggcgacccggccgcggcgcccgccgagggctacgagcagcgctggctgctcaacgtgcacgccatcgacacgcgcggcgccgccgaccggacgatggcgtgcaccgagtgccgctgcgacgtgtacaacgtgacggcggactggcgcgggcacgccatcgagcccgggtacgccggcggcctgcgctgctgctacgacggcacgcggtgcggcgccgcggcggagggggctgaggggaaggccaggactgtgttcctgcgctacacggtgatgtggcgcgactggagccccgcggcggtgctgcccgtgcggatctacatcttcgacgtggccggctgcggcgtggagtacgacgtggaggagcagtgcagcggcggcgcgggcggggagtgcgtgcacgtgaagacggccacgcaggcgctgccgcggggcggcgacgtggtgttcggcgtggcgcaccagcacgcgggcggcgccggcgcgtcgctgcacggcgccgacggccgcctgctgtgcgagtccgcggccacgtacgggggcgggcgggaggccggggacgaggcgggctacatcgtcggcatgtccacgtgctacccgcgcccgggcgccgtcacggtgcgcgacggcgagccgctcaccgtcgtgtccaggtacagcagcgaccggcgccacacgggcgtcatgggcctcttctacatcctcgtggccgaccacgcccggcagctgccgccgcaggagggcctgtgcttcagcttcccggtcccatggtgcctaccgtcatggctgtcgagcaacctgtgagatcttttggtgttgaaagctggtgctatgttctaattagctgcttggttagggttcggttcggggctggtgatggtagggcaaagcaaggaaggccgcgtgggtccttgcgttactcatacagtagtagtaatgtaaaaatatagaagcagcggtcagtctactctgctgttgctgtattatacaataaccacgtcgctccctccgtttgacttctccacgtgctgccgttgttgctcaggagtcaggagtctggacatgttcggttacatcggaactattctgaaactattctaaatgatcaattattatataaactaaattatcattctg

SEQ ID NO: 35597 - DNA, 1714 bp, Zea mays
  Clone ID: UC-ZMROB73062A04_FLI
tgtagccttaacaattccagtgagtgtgagaatcatacacccagcaacgacgaaatatcggaaccagagtccaatttggagatggccaagactgatcagggcggcgatgtgccgagcggagagaaggtcctgaagaagccagacaagatcctgccgtgccctcgctgcaacagcatggacacgaagttctgctactacaacaactacaacatcaagcagccaaggcatttctgcaagagctgtcagaggtactggaccgcaggcggaagcatgagaaacatccccgttggtgctgggaggcgcaagagcaagagctccagcgcgagttgccgcagcgtgttgattcccgttccaggcagcagtagtgtagctaatcctggcggagaggcttccctgtttccgttgtccgtaaaagcaaaccaagcagcagttagcttcgggcctgattcccccctctgcacctccatggcctccgtgctgaagatcggaggaggaggagagcaggttaagagctgcagccctgcctcagcagcagcacagcccaggaacggagaaacccagacccagacgtgcgcaccttcttctgctgctacaacaccatcagatggtccagggaatggattgcagaaaggagcagagagcgcacaccaaaaccaaaaccaaaaccaaaacggaatcattgggcacagcaacggagtcactccagtgcatcctataccgttcttccccggaccgcctttcgtgtacccctggagtccagcatggaacggcattcccgccatggcagcggcggtgtgcgcagccccagcgacagccgaagcagcgatttcatcagaacacggcaccgcgagcagcaccgtccagtggaacgtgccaccagcgatcgtgcccgtgctgccaccgggattctgcggcccgatcccagtcccggtaatcccgccgccttccgtctggccactgatcactccctggcccaacgcagcatggagcgcgccgtggctcgggcctagcgctagcgtgccgccggggtcatctcggagcagcggcagcagcacgtgctccgacagcggctgcggctccggctcccccgtcctgggaaagcactcgagggagtcgaggccgcagggcgacgagaaggcggaacgacggtgcctgtggatccccaagacgctccggatcgacgaccctgtcgaggccgccaagagctcgatctggacgacgctcgggatcgagcctggcgaccggggcatgttcaggccgttccagtcgaagcatggacggcagcaggagctgcaagcgtccggcgccgctcgcgccctgcaggccaacccggcggctctgtcgcgctcgcagtcttttcaggagacgacgtgattactacactacagagcagagcgttgctgaaacctgtgtggcattactattcagagacgattgtatttcaacttcaaggggggaaatgagagagagagcgcgagagagagattggcctgtttggttcactacctcagttgccacactttgcctaacttttctgactaaggttagttattcaattcgaacgactaacattaggcaaagtgtggcatatttagtcataaaccaaacatgccatatatgttctgtacaatatgattggcaacataggtgctgctgctgtacaaggcagcggacaccgttactgtaactgtaaccattggaagagtgcatcctc

SEQ ID NO: 35598 - DNA, 712 bp, Zea mays
  Clone ID: UC-ZMROB73062A06_FLI
acggcgatgatggtgacgccgggaaccgtgaaggccggcgaccccgtcctgcacgagcccgcgcaggaggtggcgccgggggacgtgctgtccgagaaggtgcagggcgtcatcgaccggatggtcgacgtcatgcgcagggccccaggcgtcggcctcgccgccccgcagatcggcgtcccgctcaggattattgttctcgaggatacgcaggagtacatcagctatgcacccaagaaggacatcgaagcacaagaccgccgcccctttgatcttctcgtcggtcattatcaatccaaagattaagagcacgagtaaaagaaccgcgctgttctttgagggatgtctcagtgttgatggatacagggcggtcgtggagcggcatctggacgttgaagtttcaggtctggaccggaatgggagcaccatgaaggtacgggcttcaggatggcaagcgcgcatcctccagcatgaatgtgatcatcttgaaggcacgctgtatgttgacaagatggtagcaaggacattcagggtcgtcgagaacttggatttgccccttcccactggatgccctcaactaggtgcaagataatggggatagctttccatttttcctcgtcgaatagatgtgattctctctctctttttgaaaattacaacgtctcatgtacagtattgcattttgcttcccgtctaattgctgtgtttgttc

SEQ ID NO: 35599 - DNA, 1473 bp, Zea mays
  Clone ID: UC-ZMROB73062A12_FLI
cgacggaggccgcctcggcctcggtgacgagtcttccgccttcgtgccccactctaaccccaatctccgcgatctccgcctccttgcgcttggcggcatccactccgccgcgctgaccacttccggtgacgtcttcacctggggttatggtggatttggagctctgggtcaccatgtataccatagggagcttttgccaaggcaagtgaatggcccttgggaagggaagataacacacatttctactagtggagcgcatactgcagcaatcactgactcaggtgaactttacacttggggtcgtgatgaaggtgatggtaggctggggcttgggagtggaggtggtccaggtgaagctggctccctcagcgttccttccaaggtgaatgcactgcctgttccagttgctgctgtagcttgtggtggcttcttcacaatggctcttacttcagatggacagttatggagttggggagcaaattcaaacttcgaactgggtagaggaagcaatttcagtgattggaggccacagcttgtccctagtctgaaaagcacccgtgtaatccaagtagcatgtggtggatatcattctttagctttgactgatgaaggcaaagttctctcttgggggcatggtgggcatggtcaacttgggcatcccacccttcaaaatcatagagtcccacttgccatcaaagctttatcagatgagcgaattgtccatatagcctgtggaggatcaacctctgctgctatatcagagaaaggtgacttgtacatgtggggaaatgcaagagactgccagctaggcatccctggtctgccagaagttcagccactcccagtcaaggtgattttcctcagagacgatgatgaagggttgggcccttctcgtgtcatctccgttgcaataggagcctcccatgccatgtgcttggtctccacgcaacaaaccgagaagtagggcagtctgggtttctgctttgtgaaggcacttatgtttcggtattcatacgtctgagtcagttcgaagcggaccctgttctcttttgatttgatccagctgttcctgttggtggaaactggaatccctgctcggttaagctgaacacatctggaagaaagaataaaaaaactgccacacgctgatagaaagcaggaaaggccccctgtggctggctccgggtaggcatagctgtagtagattcgaatccttgaatttcatctgtggaagttcttatgagtgtagacattgttcttgctttttctgtagcactgtaatacgagggacgaaactgcgagaagcgcggatgtaagacatgcgcccttgtgcgttctcaccaaagatttgtagattctgtctgtagttgagatggctagaattttgtagcgctaattttattgtgactctgtcaggaggcctggcctgattttagttgctgttcaataaaggcaaccgttggtgttttattc

SEQ ID NO: 35600 - DNA, 2533 bp, Zea mays
  Clone ID: UC-ZMROB73062E05_FLI
ctctttcccagttgatgcgcgtcggatttgcttgtccgctatgggacgctggttcaagcccctttctcacccgccacactccatcacttgtcgctactcaccagattgccccgcgcccatgctgctgtggccgcctagctcgtgatcctgttctcctacccacaagttgcgattcgcagatctctggcgcagccatcgaatccatcctttgtccttgactcatacttctgttgcaatttgcgtgctggttcctccggtggtgcatgtgcacgggccatgttcgacgaggtgggtttgagaagttctgttacatggtaatccccgtccttgggcttgtcatggtcgattgggaacagtaggattggttgctgagcatggctggaccggagaagactgttgtttggttcaggagagacctcaggatccaggacaacccggccttggcagcggcggcgaaagggggctctgtcctccctatcttcatatggtgcccctcagactacgggcagtactaccctggaaggtgctcccggtggtggctcaagcagtctcttgtccaccttgggaagtcattagagctgctcgggtgcccactcgtgctgatccgtgcggaggacagcactcttgcagctcttttggagtgcgttcgttccatcagtgccactagagtggtttacaatcgtctctacgaccctatttcacttgtgcttgacaacaaaatcaagaatgagcttccagcccatggaatttctatccaaagtttcaatggtgatttactttacgagccgtgggatgtttatgatgagaatgggcaggcatttacaacctttaacaagtactgggagaaatgtatgagcctacctattgagatatcacaatatcttgcacctacaaggctggtggcagcgccaggtctagcaaatgttcgctgttgttcgattgatgatctaggtcttgaatctagtaaggatgtggaatcaagcaatgctttgctaagcagggcctggtctcctggctggcgcaatgcagagaacatgcttgaggaatttgtgtcttatggtcttctagaatattcagaacatggtatgaaggttgggggaagtactacgtcattattgtcaccgtatctccatttcggggagttgagtgtaaggatgatttatcaacttgttaaaatgcgtcaagtcaagtggcaaaatgaaggaaaatctgaagctgaggagagtgttcgattgttcctacgatcaattggttttcgagaatattcacggtacttatgctttaactacccattcacacatgagagatcatttttaggtaacttgaagcattatccttggctattggatgagggccgtttcaaatcttggagacagggaatgactggatacccattagtagatgctggcatgagggaactctgggctactggttggacacataatcggataagagtgattgtctcaagtttcgctgtaaaatttctacagataccctggatttggggaatgaagtacttttgggatgtgcttctggatgcagacctagaaagtgatattcttggttggcagtacatatctgggagtttgcctgatggacatgagctcagtcgtcttgataatccagaggttcagggtcaaaagtacgatccggacggtgaatatgtaagaacttggattcctgaacttgctagaatgccaacagaatggatccatagtccatgggctgcgccaaactctatattacaagttgctggagttgagctgggctttaactacccaaagcccatagtagaacttcatatggcgcgggaatgtttagatgacgccatctccacaatgtggcaattggacacagctgcaaaacttgctgaactagatggtgaagttgttgacgacaatctgaataatatcaggaattttgatatcccaaaggtggttttgaacaagaaattatcaccaagcacttcatccatggagcacagggtgttgtctactaatggcaaggacgaaaagtcgcagcctactgaagtgaaggccctgtacaaacagattattcgagatgatatgatgaatgactcaaacatggatgacacatgctctactgctaacttgaaagtgacaaggaaaagatctagcagtgatagctacttccagaagacagcagacagagatggcactagtaaggttgaagataatgacagtgaagatagtggtacgagcatctctaggccatccaagaaagctgcttagcattagcgcattgaagatgttgcaaatcttcaatgagaaatatttaccgtcacatgtaatttagctggtgcgtttgtagtgatcatgcaaaagctgttctgtgaattataattagttttacacggcctatccttattccgatagaaggcaatttttgtttggtgaaaaaacatcgctcacggacaggccatagtttgctgtcgctgctgaacagcctaatgcctggtgtaaatgactcatcaacgttacgacactattagcgctggttggttttgctatcc

SEQ ID NO: 35601 - DNA, 1249 bp, Zea mays
  Clone ID: UC-ZMROB73064C12_FLI
ttcagaggcatccaatttcagtgtgtactgcaatacttgggtccacctgtttaagaagcgctacgcggacttccacggccgcgctgccgatctcgtccacggcctccggggcacggcgatgcccaggagacaggccctcgaggaagagcaatgtacagaagagaaaggtatctcgactattccaaagcacaagtatgcatccaaagcctgttccccaaaaggaacctttatctgcagctctctctgcgcttactcttgttgtgcaatttaatgggtggctatcatttttcctcttgctttattataaacttcctctgcggccagaaactcacaagacatactatgaatacactggcttgtggcacatctatgggctccttgccatgaattcatggttctggagtgccatatatcacagttgtgacacaatttggacagaaaaagctatatttttcatcagatgctgcctttctagggtattccctcattttgacgatagttggtgagcatgtagtagcaagtttcatgggctctggtagattaactgacctttgtgtgttccattagcctgtgaagttcgaaactggtcatattgctaagaattctaggaggttactattagggcctagagtaaatgactacgtgctgatgaaaatctgttcagattaatcattctggaacttgtactaacaattgaagcaagtggaggcatagcaccaattgtgtctgtgctgcagctctggatgtcagtagacaagaggtgtatcagagagaagcacttcaaggttaatttgttgagcaaattggagatgctggattttgtattttggtaggtgatgtatgcttttcagcatggcgtattttattgaactggtcaagtcctgcagaagctgaaactgatcatggataagactttgccttgtgtcacaatgggtgcatttgctggtggtccttggatcaggttgctcatgggtggtgaatgatctgacgacttcagaagaggatagatctgagattacctttcatgcatgtcaaggaagttaagtagctgatgccatcaaagcaatggagaaacgtcaggtgaaccgcgagcagaattctgtggcgcatttgttagcgcagttagttaggactctgttcatacaactgttcgattaagccaaatacctaatttagttttatattggttgttgtcaaagaatttgtgaaatattgaggttgataatatatgtggcgttcgtttttatgt

SEQ ID NO: 35602 - DNA, 769 bp, Zea mays
  Clone ID: UC-ZMROB73064D01_FLI
atcttccaccgcgacgtcaagtccagcaacatcttgctcgacgccgcgctgcgccccaagctggccgacttcggcctgtcccgcgccgtggaccgcctggaggccgcgcgctcgcacgtgtccaccgcgccgcagggcacacccgggtacgtggacccggagtaccaccagaacttccacctctccgacaagagcgacgtgtacagcttcggcgtcgtgctgctagagctcgtcaccgctatgaaggtcgtcgacttcgaccgcccgcccgccgaggtcaacctcgcctccctcgcgctcgaccgcatcggcaagggccaggtcgccgagatcgtcgacccggccctccttggcgccggcgaggactgggtcatgggctccgtccgccacgtcagcgagctagccttccggtgcctggcgttccagaaggacgtccggccgtccatgcgcgaggtggccgccgagctgcagcggatccggtccgccgccccggacggcgccgatcccgaggagcccgcggggtctaggctccggcctgtgagtatgatggacatccagatcgacgtgagcttgggcggcccggacacggcggcaaagaaggcggcttcgcccgtgtcggtgcaggaggtgtgggtcagcgaccggagctcgccgtccaccaacggctccatgccgcgctttgctgcgtagcttaagctagctagctcttgtacactgatgagaaaaaccaatgtaatttagcaaaaaaaaagaacattttttgtctagt

SEQ ID NO: 35603 - DNA, 1344 bp, Zea mays
  Clone ID: UC-ZMROB73064D09_FLI
atgctcacttcctagccctagcaatttgtaggctggaaagcttttgctgatacattgttgtcctggtgtatatagaaatgttaataggattacaagtatattgacctgcaacgtatggatgtttctggaaaagtagtgcagacatcctggtggcatctccacgctgttcttggcagtcgtggtgtttgcattcgttgcgctacaggcaaacgtagctggtataatataatcatgcaataatgccacatgtggtttattactaccatccaattccatagtgtgctgtgccccctgaaacggtgcactgcaatcctttcaggcatggcgctctacccaagttccgcgctgtaataaaaacagcaggcctgaagcgcgtctggctgacaggcggcaggcaggcccaggcagagggcctctgtctgtgcacctgctgctgcaaacggcgagaagatgctggcgcttgcgttgggcccggtccgagagcccgatggacgacgggacggcgacggcgacggctgctgctccggccggctgtttctgctagagcgctcgccccgccgcaagccctcgcgcgacacgtccagcccggcgtccgcgtcgcgtggacacgtcctgatgcatgtcagcggctgccagagcagcgctcatcattgcatgcgttcctgtgcgtgcgtacaatggcccgggggccaccgtacgtacgccggcttgtagcaactagcaactcgtggagttctccggccagctactgtggctggcgactggcaaggctgcgactgcgagcaagatgccactgtgctgcggcatggtggtccgttcacggtggcgcaggcaggcaggcaagcaagggcaatcatcgttttcccggttcacggaggagcagggtttaccataccagggctgtctgttgacactgtgctcgcaaagccacaactggccggaccgtggtccacccgtacgtccccggctcctcgcccgtggtggggatgtgctactgctgtggctgtgataactgataagacgacgcaacgcaatgcaagaaggtagaaccgtagaagtaggactgaccaagtctcctctattggatgaggccgctgatcatagtaccaacgattttttgtactactgatgccatgtttggtttcaattagtcctaggactaaattttagtcctaggactaaactttagtccctacatgtttggttctagggactaaacatattctaaagtcattaggtaggtgcccgtgcgttgcgacggcatacaaaatattaaataaaatagtaatgtacaactaaattagttcaaaaagatatgtaatgctcaaaggatagtgtttgtgg

SEQ ID NO: 35604 - DNA, 1256 bp, Zea mays
  Clone ID: UC-ZMROB73064G02_FLI
aagggcatcctgaaggcgcaggcggcgtcgagcctggcgcggtcgccgagcaggccgcgcgtgtccatcaacgtccaggacaacgagatctccctggagcggacccggctgtggcgcggcgtcggcggcaacggcaagaggcagcagcagcagcagcagcagcaggcggggccgcggaggcggagcgtggaggaggtgctgcgcgaggccggcgccgacatcatcgggctgcagaacgtgcgcgccgaggaggagcgcgggatgcggccgctgtcggagctggccgagggcctgggcatgcgctacgtgttcgccgagagctgggcgccccagtacggcaacgccgtgctctcccgctggcccatcaagcgctggaaggcgcaccgcgtcgccgaccagtcggacttccggaacgtgctgcgcgtgacgatcgaggtgccggacgccggcgaggtgaacttccactgcacgcacctggaccacctggacgaggggtggaggatgaagcaggtggacgccatcatgcgctccggcggcgacggcccgcacatcctcgccggcggcctcaacgcgctcgacggcaccgactactccgccgaccgatgggccgacatcgtcaagtactacgaggagatcggcaagccgacgcccaaggtggaggtgatgcagtacctcaaggcgaagcagtacgtcgacgccaaggacttcgcgggagaatgcgaggcggtggtggtcgtggccaaagggcaagacgtgcaggggacgtgcaagtacggcacgagggtggactacatcatggcgtcgcccaactgcccctacaagttcgtgcccggatcctacacggtcgtctcctccaaagggacgtcggaccatcacgtcgtccgggtcgacgtcgccgtacctcacgccagagagcccgatgacgccgaggccaccgcgaacgggcagcgcagcagagtggtcaagatgaccaagaagagctcgagaaaggggatatggggagctaaatgaatgaacagggtagttttgtgtgtgtgtgtgtttttttctctcaaagtttcttttggccgcgttctttctttttttatctgggggtgatgtggagggtgggttgcttggaattgtgtatatgcctgtggtggttgctttgaggccgaaggtgcctggtttgcagtggctgctgcgatagatgtggccaacgagtggaaactggaaagcaacgtatttttggcccggtttcacttttacctactact

SEQ ID NO: 35605 - DNA, 1228 bp, Zea mays
  Clone ID: UC-ZMROB73066A07_FLI
gctgcgggacctgcgcctgggcctgccggacgagagcgtcgagccgctcgtgcccaagaagaaggccggcgtcatgtccgtgcaggtgaccaagttcaagtgcggcggcgccgtggttgggtgcaccttcgaccaccgcgtgtgcgacgcctactcgttcaacatgttcctcgtcgcgtgggccgcagccgccagcggcagctcagcgcctccggccccgtgcttccaccgctcgttcctcgcgccgcgtgaaccagctgcggcaccgctccgcaccgccggcagcctcgcggaccgcctcttcgtccccgtgagccgcgcgccggccttgccggacacagccaccgccaaccgcatctaccgcgtgtccgccgccgacgtcgcggcgcttcaagcctcggcgggggccgggcgcacgaagctggaggcgttcacggcccacctgtgggggctccacgccaaggccgcagcggcctcgcggcgccagcagccgcgttcgtgctgcatgggcgtggtggtggacgggcgcagtcgcctccgccgcgacggcgccatgggggcctacttcggcaacgtgctgaccatcccctacggcgtcatgggcaccggcgccctgggcgaaatggcgctcgcggacgtggccggcgacgtgcaccggtgggtggcggaggccgcgaccggcgagcacttccgcgagctcgtcgactgggtggaggcgcagcggccggagcccacggtggcgagagcgtacctgggccgcggccacggcggcgaggacgcgatggcctgcgtggtgtcgtcggggatgcggcttcccctcggcgaggtggacttcgggtggggccggccggcgttcgcgtcgtatcagttcccctggcccggcggcgccgggtacgtgatgccgatgccgagcgcgcgcggggacggtgactgggtggtgtacgtgcacgcggcgctggaggtggtggaggtgatggaggcggagccgacggtgttcagagcgctggagagtagctacgtgttcgatcgatcgggtgagttgaattaagcgcgcgcctggtcggctgctgctggaacgtgatggcgccatcgtgacatcatcgtccgtgcatatatcgtgtgtgtgtacgtgtctgattcgtggtttaccttgtgttgtgggttccatccatgttatcgtgcacgtgtgtgccgtgtaacacgtacgaaatactaccgatatacccat

SEQ ID NO: 35606 - DNA, 1312 bp, Zea mays
  Clone ID: UC-ZMROB73066A10_FLI
ccgacatgtcggtggcgtacagcctggaggagtacgcgggcgccgtggtggccgccgtgggccgcgtgtgtgaccgcaagggggtgcagcaccccatcatctgcagcgagagcggccgcgcgctggtgtcgcaccactcggtcctggtgttcgaggccttctcggctacggcgccgggacgcctggacgcggccacggcctacctcctcgacgagctcacggacgactgccgcgccgactaccgcaacgtgatggccgccgccgtgcgcggcgactacgacacgtgcggcctgtacgccgaccagctgaagcggcggtccgcggagcagttcaaggagggggtccttggcctggagcacctcgccgcggtggacgccttctgcgagctcgtcgcccgcggcatgggcgcgcccgagccgccgcgcacctaccacatcaacctgtccgtgttcacctccctgccggacatgtgggccatcgggcagcagttccccatcatcccgatccagcggctgcaggagcggcccgccgtcgacggcgtgctctcggacctcacctgcgacagcgacggcaaggtgagcgagttcatcggcgggaggcacagcctgccgctgcacgagctgcccacccacgccactcgcggctactacctgggcatgttcctcgggggcgcctaccaggaggccctcggcgggctgcacaaccttttcggcgggcccagcgtggtgcgcgtgtcccagtgcgacgggccccactgctttgccgtgacgcgcgccgccgcgggcccgtcctgcgccgacgtgctccgcgcgatgcagcacgagcccgaggtgatgtacgaggtgctgaagcagaggaccgacggcgccacggccgccgccctcgcccgggccttcggcgcaatgccgtacctggtgttcgaccccgaggccgccgtgatgtccggcggcgagagcagcgactcggagcggtcggccgccggcgccgccgaggaggaagacgatgaggagtgggagttcatgcgcgggctcaccgtctgatgacgtgcccgcccgcccgccccgggtgaaacaaggcgagtccgtcgccaggaagttgtcagtggccggccggcgttggtttacataataacccccaccgcccggtgttgtatcgtgtcgtggtcgtagtcgtcgggtgtctcgtcgtcgccggagttgtttggcgccacctttttattccgaacgcgtcagtgtccactgttcgcctttccttttttttctctctctttcatgggaataatctgaaggaaactaatagcaagtttctcttt

SEQ ID NO: 35607 - DNA, 1016 bp, Zea mays
  Clone ID: UC-ZMROB73066B05_FLI
ctcctgcgatgcccccatctctcctctcctcccctcccctcccctcccctccccatctcgctcttgcggagatcgaagagaagctgaggcctagcgccgcacccgccgccgcatcagccatcagccatggcgctggccgctcgcctcgtctcgcgctcccgtcagctacattcggttcaagcagcttttgcgaatggaggtgccactcaagttcgctcctttgccaaggatgcagctccagctgaccgtcctcctgttagtggggatgatctcctgaagggcatattctttgaggtaaagaagaagtttgagacagctcttggcgtccttaaaaaggaaaagattactattgatccagatgacccagcggcagtttctcgatatgctcaagtcatgaagactgtaagggaaaaggcggatcttctttctgattctcaaaggattaaatataccattgagaccttcaccaagggcatccctgatgcacggacttacttgaatactcttcaacagctcagaataaagagtggtcttatagatcatattggaatcgaacctttgatgatggaagctcttgagaagattgagaaggatattaagaaaccacttttaaggagtgacaagaagaacatggccacccttatggcagagtttgacaagattaacgcaaagcttggcattcggaaggaggatcttcctaagatcgagaaagaacttgaattggagattgccaaaagtgagctgactgaacttaagaaggaatgtgttgaggcaatggagactcaactcaagagggaggagttccaagatgaggagatgcctgatgtcaggaaactggacatccgaaacttcctgtaggcctgatcgacgataacctttgaggcattgcaaatcacccagcccacctgtgattttttttttctttggttttggtttcaagttgatcggtgctgtaagctacacctatgaatgctgctccttcctttttttgtaataaaaaaactgcaccgaggtac

SEQ ID NO: 35608 - DNA, 2099 bp, Zea mays
  Clone ID: UC-ZMROB73066B08_FLI
cacccacccgcccacccctcgtttcctgcaattcgccgccatcgttcgctgaacttgagcgcgtctgccgcctgccaccaccgctctctgcctctctgctgctctgttctttctcccgccggggcagaggagggcggggaggcccgttgagcgagcctcggtcggtatggggatctgcgcctcgtccaagcgcgtgcggcaggaggagcaggactccgacgagaacgtggtgtacgtgatggacgagcagggcggcgggggagaaggcgaggacggccgtggcgcccgcgcggcggcatcccgcaaggtggcctccctcttctcgcagaagggcaagaaggggcccaaccaggacgccgtcatactctgccaggtccgcgctcgcaccaccacccctcctgctgctgccttgcccgaggaattctctcgatgtctcagctttttcttcttcttcttctctcctatatctgtttgtttatttattttgctacacagcgctggtagatgtagatctgtactgatacagattttgtttggtactccaccgactgtactgcactgctccgtatagtctcttgcagaggaaaaccactagttttttttcctcctgggtactctgtccttgcaagggactttgacgtggtgggaggtcatgaaattccaggaactgtcctctgtattctgcaattattatcaggacatacgtacacagctgccaccccaccacaaccaattcaccatacagcgggggggaaatcgtgatggttcactttccaaaccacggaaacgagtttcgtcgtcctacggatttcctcgcggttttggtttgctacgacagcggaacagatcagaattatcattagttccctgttcttgccccctttattttcagaccctttttttaaaattcccccaagaaccaaccagtctcatctgccgtttgggctcaattgtcaacgatggccactgatgctatcatttgatattcatcacaagctgtcggcttgttgctcgagtccatgcaatctgaatgcgtgtaatcaagctattcggttcggaccacgattctgacgcccaccgtgcgctccacgtctccagggattcggcatggaggacggcgtgttctgcggcgtgttcgacgggcacggccggtgcgggcagttcatcagcaagctggtgagggactacctcccgttcatgatcctgagccaccggaacgcgctcctcatgggctccgacgacgacgacgatgatccggccttcagcgacgcgtcggcgtcggcgtcggcgtcgtccacggacggcagcgggcagtcgtcgccggcgccggcgcagctgctggaggagtggcgggaggcctgcgccaacgcgttcgaggccatggacaaggagctcaagctccaggccaacgtggactgcaacttcagcggcaccaccgccgtgtgcgccatcaagcaggggaaggacctcatcgtcgccaacctcggcgactccagggccgtgctggcgaccatgtcggacacgggctacctcaaggccgtgcagctcaccaccgaccagaagcccaacgtgccccgtgagtgtgtccgtcatagtcgatcgtcggatgattggatcgtatccctactccctagcggatggataactaaaccgtatcatgcactacgcagaggaggctgagcgtatcaagcgctgcaacggccgcgtgttcgcgctcaaggacgagccgtcggtgctgcgcgtgtggcttcccgacgaggactgcccgggcctcgccatggcgcgctctctgggcgactaccgcctcaagcgccacggcgtggtgtcggagccggaggtgacgcaccgccgcgtcgcgccgggggacctgttcatcatcctggccacggacggcgtgtgggacgtgctcagcaacgaggaggtcgtgtccatcgtctgcgccacgccgcggaagcagcacgcgtccaaggccgtcgccgaggccgcggcgcagcgctggcggaccaggtacccgacgtcccgcgtcgacgactgctccgccgtctgcctcttcctgcgggaccaggactgggccagcagcgtcgccgcggccagggcca

SEQ ID NO: 35609 - DNA, 2505 bp, Zea mays
  Clone ID: UC-ZMROB73066C10_FLI
ctgttgaggagctgagagttcctgagtacctgcagttcaaggaacagcttgtggaagaaggccccaacaacaactttgttcttgagctggactttgagccattcaatgcctccttcccccgtccttctctgtcaaagtccattggcaatggcgtgcagttcctcaacaggcacctgtcatcaaagctcttccatgacaaggagagcatgtaccccttgctcaacttccttcgcgcccacaactacaaggggatgaccatgatgttgaacgacagaatccgcagtctcagtgctctgcaaggtgcgctgaggaaggctgaggagcacctgtccaccctacaagctgataccccatactctgaatttcaccacaggttccaggaacttggtctggagaagggttggggtgattgcgctaagcgtgcacaggagactatccacctcctcttggacctcctggaggccccagatccgtccaccctggagaagttccttggaacgatccccatggtgttcaatgtcgttatcctctcccctcatggttacttcgctcaagctaatgtcttgggttaccctgacaccggaggccaggttgtctacatcttggatcaagtgcgcgctatggagaacgaaatgctgctgaggatcaagcagtgtggtcttgacatcacgccgaagatccttattgtcaccaggttgctccctgatgcaactggcaccacctgtggccagcgccttgagaaggtccttggcaccgagcactgccatatccttcgcgtgccattcagaacagaaaacggaatcgttcgcaagtggatctcgcgatttgaagtctggccgtacctggagacttacactgatgacgtggcgcatgagattgctggagagcttcaggccaatcctgacctgatcatcggaaactacagtgacggaaaccttgttgcgtgtttgctcgcccacaagatgggtgttactcactgtaccattgcccatgcgcttgagaaaactaagtaccctaactccgacctctactggaagaagtttgaggatcactaccacttctcgtgccagttcaccactgacttgattgcaatgaaccatgccgacttcatcatcaccagtaccttccaagagatcgccggaaacaaggacaccgtcggccagtacgagtcacacatggcgttcacaatgcctggcctgtaccgcgttgtccacggcattgatgtgttcgaccccaagttcaacatcgtgtctcctggcgcggacctgtccatctacttcccgtacaccgagtcgcacaagaggctgacctcccttcacccggagattgaggagctcctgtacagccaaaccgagaacacggagcacaagttcgttctgaacgacaggaacaagccaatcatcttctccatggctcgtctcgaccgtgtgaagaacttgactgggctggtggagctgtacggccggaacaagcggctgcaggagctggtgaacctcgtggtcgtctgcggcgaccatggcaacccttccaaggacaaggaggagcaggccgagttcaagaagatgtttgacctcatcgagcagtacaacctgaacgggcacatccgctggatctccgcccagatgaaccgcgtccgcaacggcgagctgtaccgctacatctgcgacaccaaggcgccttcgtgcagcctgctttctacgaggctttcgggctgacggtggttgaggccatgacctgcggcctgcccacgtttgccacagcctacggcggtccggccgagatcatcgtgcacggcgtgtctggctaccacatcgacccttaccagggcgacaaggcgtcggccctgctcgtggacttcttcgacaagtgccaggcggacccgagccactggagcaagatctcccagggcgggctccagcgtatcgaggagaagtacacctggaagctctactcggagaggctgatgaccctcaccggcgtgtacgggttctggaagtacgtgtccaacctggagaggcgcgagacccggcggtacctggagatgctgtacgcgctcaagtaccgcaccatggcgagcaccgtgccgctggccgtggagggagagccctccagcaagtgatgcgcgacggcggccacagacctgatcgatcgatgagcgagagggagcactcggagtgtcgtgtcttttcccttgccatttctttctttttttcccttcccggaggcgaaaaaaagagtctgcttttgctaggcggcgggcgttcgttgctgctctttgcttcaagagttaaatttacctaccttgtcaaggtcttgttccatcattgatccgggtgtcgcttttttagtagtctgatggactgttagtagtttgcgttgcgtcggttgagagggaacgttggtggtggtggtgtgtgtgcagtcaggcgtggtgctccctttgtttcctggatgggatgttgctccttgaataataatcgtagtggccttggagcccttttcctg

SEQ ID NO: 35610 - DNA, 1756 bp, Zea mays
  Clone ID: UC-ZMROB73066D04_FLI
cctctctctcgttcagttctttctcccttcccatgtcttcctctgattccccacgctaacaattggtatcagattcgccgttccttggcgattctcaatctggagcacggctacttcacgcgttcgcagcgacgcgcgggtgtgatggatcccaatgtcctgttcatcgttgatgagatggagaagtttgcatctatggatgtcaagtgggagaagcgcttgtcggagctggtggcagctaaggaggagcgcctgatctccctcgagcgcgtcagcggggagttggaagcatggtagcccacggtggatgtagcgatggatgataccaagttgcagctccgcaaggtgaatctgcagttggatcatgccgttctggaggcggctggcggagattctagtctgttggggaaaccggatccatccttcggcaaatcggggtcgatcctgcatcaggaggatccgatcagtgaggatttcactctaggcgctccgattccgggtacttctggtgccgcgaagggtatgaattcgtttaccttgcctcatccgcccccaaagtttcacggttctctgtatgatggtcatccatttcatccgattgctcctgaattattggggaagttgccgaagctgccgtttccagtcttcgatggcgataatccacgtctgtggatctcgcgttgtgaaacatatttttaacatgtattttgttgatcatgtggcttgggtgcgtgtggcttttatgcatttgtcacctgttgttgcctgttggtttcaatttgtctagcgcaagtatatggatgtgtcctagccactgttgtgtaagttgctgaatgagtgttttgggagggatcagtatcagtttttgcttcgtcagttgtttcgcatcagacagagtggcacagtggcagaatatattgagcgattttccactttggttgatcagttgacagcttatgaagcagcgcatgatcctttgtactttaccacacgatttgtggatgggctccgaggtgacatacgtgccgttgtggtgattcattgaccaacagatttagacacagcatgcactttagcattgttgtaggaagaagtatctgaaccagcccatcggaaagaggtgcgcaagtttgagatgactccttggagcaaaaccacaacatctggcccactgtcgttaccgatgccactaggggttgacaagggtgttcggtctccatctcagcttgagaaacctgtggggagacctcaacgtcctgccgaagataagatgggagcacttcgagcttatcgtcgtgctaggggtctgtgtgataggtgtgccgagaagtgtgtcacacccggttttggaaggcaaaccgaatgtgaaacatgtacgtgacaggatcagaaactcacgtacacagtgattatataattggacgtcatcacacaatgctcaaagtaaatagcggaagagtattttattacaacaagatgtctgttgggggtatgcttcgtagccgaagatcctgaagaaagaaacaccttcagcagatcctctcaaaagcagtgctgaagctatcacctataaagctttggcatagcgacatgtctcaagacgaaggagtgaaccgacttaaagatgaaatgaccaataaacccatgatagtttgtgtcatgactgtaatcgattgtaaagggcttaaatgtaatttcacacaggctacgccctgtgcttataaatagatgaacagtacacccgtactgttcacgc

SEQ ID NO: 35611 - DNA, 1369 bp, Zea mays
  Clone ID: UC-ZMROB73066E09_FLI
gggaggttcttgatttggcacgcgaagaattctggcaagagtcagaactaccttgggctagaaatccgccaaaagttggtggagcgggcacagttctgggtgaatgaattggagcttatgaacgtctattttatgtttgcaaatgcaacagtgtcttttgagaaaatcatatcgtcataccctggtcccttgtcacttgtttcaatactgtgtcctgatccacacttcaaaaagaggcatcacaaaagaagagttctgcagcaaccattggtcgattcaatcataaataatctctgtttaggcggacaggttttcatacaatctgatgtactggaagtatctgtagacatgagggaaaggtttgatgggtactctggtattttggcacatgttaattatgttgatcaagatcttcagtgtgacaatgaaggatggcttctggacaacccaatgggaatccggacagagcgagaaatccatgcagagcttgaaggagcaacgatatacaggagggtgtaccaaaaggttagagatgcttctttctagctgtttatcagctacagaagttgtccaaggagtaaggtttccaagaatgttcattgcatgtattccattaagagaagttgggaaaaaaaacaaagcatccaagtacaaagcctggcgaaccaaaacaaagagaagcccaagcagtaacacctgatgtcttcctgcttgaaccatgccacaagttgcctttactacatcaagctgcattacatttctgacagtgcgcttgtgcacatctaatcttttttttcacctgatgcaatgagtcagattagccaatgcttttgatgaagatgacaactggcataagtgttcctttgttggtcagattgtacttatggtgtttagcatcgggtgctgtcttcgttctgtccagaattcaggtctggaattgctcaccatctatcggtatgcagactgtttgtagaggcaatccagatgaggcaatttgatgtgcgctaggattgttcaaactttggtccgctcaacgttcccttgacttggtagatatacaagaatggacaacgttttcttgacttggtaaagtttggtcattagtttgtgaaacagaatgctgcattgctcttggcatttgataagtgacaggtgaataagacgacaccgaggtgcatgtgggcactttttagtgtttgatgtttgctaagtcctctaccaacaggtcaatacatatgttaatcaatttgaataactcattaattgaaattttgttgctaatggtatcgaattaactcaccattgtattcggcttttcgctgagaaacagtttagtatcagaatcatttatcgaataatttttcgtcgc

SEQ ID NO: 35612 - DNA, 730 bp, Zea mays
  Clone ID: UC-ZMROB73066F08_FLI
cgcctcgcggccgcctgccgctccgctcgaaagtttttagtgaagattttttgaagccgagaagatggtgctgaagacggaactctgccgcttcagtggccagaagatctatcctgggaaaggcatccggtttattcgtgctgattctcaggttttcctttttgccaactcgaaatgcaagcgctacttccacaaccgcctgaagcctgcaaagcttacctggacagcaatgtacaggaagcagcacaagaaggacatccatgctgaagctgtcaagaagaggcgccgcgccaccaagaagccatactcgaggtccattgtgggtgcttccttggaagtgatccagaagaagagagctgagaagcctgaagtccgagatgctgctagagaagctgctcttcgtgagatcaaggagcgcatcaagaagaccaaggatgagaagaaggcgaagaaggctgaggtgtccaagtcccagaaggcgcagacgaagggtgctgttcagaagggttccaaaggccccaagttgggtggcggcggtggcaaacgctgaaaaggaactaagtgtcattccgagacctcatcaaagccacctttgtagtaccttggttaattttgtattttctttcagagttacttgtgactcttaattttgcatctttatatattgggagaaatgatcgccgttcgttcatatgatttcctcatctttgtttctcaaccgaataaaaac

SEQ ID NO: 35613 - DNA, 1982 bp, Zea mays
  Clone ID: UC-ZMROB73066F09_FLI
gtgccaaattcccacgcccctgcccaccctgcccgaatcctctcgccctttacccccgcccgcgaccccattcacactctcgctgctccactccgctccgctcagctcgtcgggacgcgcccccgcctcccatcccatgcccgcccccgcgctcgtcggaggccgctcgcggcggcctcccatcccgccgcgctgacgagagggcctctcggtgggggcgcttcgggtgttcattttgtccgttcggggaaggggagtgcggcgatggggaagcagcaggaggggaagcggcggcgcggggagaaggacgggaagcggaaggggagggggaagacagctgcagcggcggtgccggaggacgcggcgccagtggccgggtgctggatccgcttcccgcgcctccgcggctgcatgccgtcgcgcgccaaggtcgactcctccaccagcgcgcgtggcggcggccgggaaaccaaaccatctactgatgatgcttgccaggaccaatcagtaccaccagcctctggttccgcaacaaccagtaacactggaagtatctcaccttcttccatagttggagaggagctaaaactagctttccaactgcgtagatttacttttagtgaactgaaatgtgccacgagaaacttccgacctgagagtcttcttggcgagggaggttttggctgtgtctttaaaggatggattgaggagaatggaactgctcctgttaagccaggcaccggattaactgttgctgtcaagacactcaaccatgatgggttgcaggggcataaagagcagaagttgattttcttggaaaccttcagcatccacatctagtgaaattggttggctactgcattgaagatgaccagaggttgcttgtgtatgaatttatgccccgtggaagtttggagaatcatctttttagaaagtcattgcctctaccatgggccattagaatgaaaattgctcttggtgctgcgaaaggcctcgcttttcttcatgaagaagctgaaagaccagtaatctatcgggacttcaaaacctccaatattcttttagatgcggactataacgcaaaactctctgattttggacttgctaaagatggccctgagggtgataaaacacatgtgtcaactagggtcatgggaacatatggatatgctgcacctgaatatgtaatgacaggtcacctgacatcgaagagtgacgtatatagctttggagttgtactactagagatgatgactggtagaaggtcaatggacaagaacaggccaaacggagaacacaacctggttgaatgggcacgcccttatctgggagaaagacgcagattctataagcttgtagaccctcgtttggatgggaacttctccataaaaggcgcccagaagacggctcagctggcccatgcctgcctcagccgtgaccccaaggctaggcctctgatgagccaggtggtggaggtgctgaagcctctccagaacctcaaggacatggccagctcttcctactacttccagtccatgcaacatgagcgtcgcacagcacttgccaacccatatggcagtcaaagcatgaaagcgcagagcacctttgcgcggaacgggcagcagcccatgaggagcctctcgtatggccctcatgcttccccgtatcgccagtcgccaagacttgacagcaagcggcaatgagtcatggtgcttgtctgtcgaccataacatattttcaagactgaagttgtaaccagaactggtgtatgaactcagccatccaacaagcatctgagctatctattattgtggatgaagcagcaacattgattcgaatttgcatatcatctgcgagtgaatttttctctcttgttatcgcttacattttagctgtactgtctttacggctctagataccttgacttgaaaggtggaactaaacagggttttgatcggtctttgaaacaatgctcaggcagc

SEQ ID NO: 35614 - DNA, 2169 bp, Zea mays
  Clone ID: UC-ZMROB73066G09_FLI
gcgtgggctttttttagatatttattcctatcattcatgccggtcactggtcccttgttattctttccactgccaaacaagagacatatatccttgactcctacccaaggcacagtggggtggccaaggatgttttaactcaactgcagaagtatttggataataaacacaactttgacatgtctaactacactgaccatgtgccacctgttcagcatcaaaaaaacaattacgattgtggctttcatgttttattgtatattgaagaattcatgaaggagaagatgtataaaatcaacaaaaaaatggtgttgaaattcagaaagcagctttgcatgaatctcttgtaccatcctttgaacagaataaatcttgtggaattcagaaagaagctgggtattacattgaaaagaaaacttcctggtatacttgatcttactattgaaggtgagaggagtgaatctgaggctgcagtgataattgaaatagagaacagagatgataagactctagaggatgaacatatttcagttgagaaagagtaaggtaaaaaagaagagcatgtactatcaactgacacaaagaatgacgaagcttcatccccatctgacgaagagcctgagcagagtgagtcatctgagcagactgtgtatgaaagatggatgattccaaaggatcattatcacctgagaaagagcaagctggagaaaaatatcctcaaacgaaaaaagaggttgggcaaagacaacatgtcctctcaggatatgatttctccagtgtttggcaagaggcttgtgcctgcaaacacacattttacctctcttaggaagttgcgaaaacacaagtttacgtctgataagatcaacgatgagatctgcaaacatatcttgaactacaatgaacgggagttgttaagtgtggggcagactaccatgactgggggtcagctggaaaagtacgtaaatgaaggtgacaatggtgataaaatactcagagcattcatcacatgcttcacttgtgatgaaaagttcaatcaagggaacatcacaaccgtcatcccgccacatgaagtatccgaagagggtgaactctccaaagttgatgctgcacaacttgtagaagaaatcaaagctgtactcaaaggcaccaatgttgcacgtgtacgcaaagacaccgaatccaccaaagatcccaaagtgaaagtctttcgaaacatgaggaggacatttatattttttcctttctacaagaatgaagaattgtttgtatttcatgtcgatacgaaaagactacccatcattgatgctctgttttgcaagatgtcatcattgtcgtttgaagatagatcctgactaggaaagtctatcatgggctgtctactcaaagccatgaaggattccggcttcatggtgaaaaaatatggtgattgtaggttcacagttactgtaactgaactcgaattcaaagatagtgcctcagcgctcataagttttattgagaacttcacttctaagttggacgacaatgccaagaaactgaaaaagggtgacaaggactggctggaaccttacaagaagtcgacagtggcataccttgtttgtcacactgaaaataaggtggtgttgcctgacgatattgtgaagtacaagcaaaacaagtgaggtggttgagtcgttaatgggtccagtggctgtgttttaagacttgtatcacactacttgtatggctttattctctgaagctgttccattgttgccgttagtaacaggtgttgcttttgtctctgctcagtgggtgattcatttcatccagagttgctgcaactttaatcagtctatagtgttgggttcctagctcagtgttgagttctaaatgatcgtgttgtgttcctaccaagtgttgagctgcacgacggcgtgcgcagccgcagccgcaccggcgaggagcgtttagaactctgttgatctacatagtgtttacaccggctcaacagagttctcatgttgatttttgaaggacccacgtgttgggttcctgctcagtgttgagttctgaacgatagtgttatgttccatgggcccttgttgatttcgagaggacccacgggccgaacggcgtgtcactttcatgcgtctatagtgttgggttcctgtctagtgttgagttctc

SEQ ID NO: 35615 - DNA, 1360 bp, Zea mays
  Clone ID: UC-ZMROB73066H05_FLI
ttcgtggttagtgattacgaccagcatactagtcacaagtgagggcgggagaggttgaggttgaggaagagcacaggaatccaatccaggagtgtttaatggcgggaggcaaggaggcgcacgggtgggcagccagggatgtctctggtcacctctccccttaccacttctcacggagggttcagagagacgacgacgtcaccatcaaggtgctcttctgcgggctttgccacactgacctccatgtcatcaagaacgagtttggcaacgccaagtaccccgtcgttcccgggcacgagatcgtcggcgtcgtcacggacgtcggctccggcgtcacaagcttcaagcccggcgacacggtgggcgtgggctacttcgtcgactcctgccgcagctgcaacagctgcagcaaggggtacgagagctactgcccgcagctcgtggagacgtccaacggcgtgagcctggacgacgacggcggcgccaccaccaagggcggcttctccgacgccctcgtcgtccaccagcgctacgtggtgcgggtcccggccagcctgccgcccgccggggccgcgccgctgctgtgcgccggcgtcaccgtgttcagccccatggtgcagtacggcctgaacgcgccggggaagcacctgggcgtcgtcggcctcggcggcctcggccacctggccgtccgcttcggcaaggcgttcgggatgaaggtcaccgtcatcagcacgtcgctgggcaagcgggacgaggccctcggccgcctcggcgccgacgcgttcctggtcagccgcgaccccgagcagatgagggcggcggcgggcaccttggacggcgtcatcgacacggtgtcggccgaccaccctgtcgtgccgctgctggacctgctcaagccgatgggccagatggtcgtcgtcggcctgcccaccaagccgctccaggtgcctgccttcagcctcgtcgccggcgggaagcgcgtggccgggagtgccggcggcggcgtcggggagtgccaggccatgctcgactttgccggcgagcacgggatcaccgcggatgtggaggtcgtcgggatggactacgtcaataccgccatccagcgcctagagaggaacgatgtcaggtaccgcttcgttgtcgacgtcgcgggcagcaagattggaggctaggcatcaccatttctagtgttctgtcgatcgacgtgtgatttgcttcctcgagcgtgtcttattgttctggttggagcacgtacgcggccatcacacgcaggcgtggataataaacaagagttttgggttgtgtcgtttctgtatgtatggtccggtggataataaacaagcttggcgtggtcgaagtg

SEQ ID NO: 35616 - DNA, 2357 bp, Zea mays
  Clone ID: UC-ZMROB73066H11_FLI
gctgaccctacagaagagatgacagaggaagagaagaagctgcatgacaaggttgagttgattagagtaaagtttctgcgtctggtttacagattgggagctactcctgaagaaacggttgcagcacaagtgctgtaccgtctgagccttgctgagggtatccgacatggcaggcagacgaaccgagcattcagccttgataatgcacggaggaaggccttacttcttgaagcagagggaaaagaggatctgaacttctcatgcaacatacttgttctaggaaaaactggagtcggcaaaagtgcaactatcaattctatatttggtgaagagaagtccagaactgacgcctttagctcagcaaccacaaatgtgcgggaaattgttggtgatgtggatggtgtcaagattagaatcattgatacacctggccttcgacctaacgtgatggaccagggatcaaacagaaagattcttgctgctgtcaagaactataccaagaaatgtccgccagatattgttctatatgtggatcgtctggatagtctgagccgtgatctcaatgatttgcctcttctgaagactattactgctgttcttggctcatccatatggttcaatgccattgttgcactgacacatgctgcctcagctcctcctgaaggcctcaatggtgctcccatgacatatgaggtcttgatggctcagagatcccacatcatccagcagtccatcaggcaggctgctggagatatgcggttgatgaacccagtagcacttgttgagaaccatccttcgtgcaggaaaaaccgggagggccagaaagtgcttccgaatggccaaagctggaggcatcagatgttacttttgtgctactcctcaaagatattatcagaagccaactcactcctgaagcttcaggatcctaatcctggaaagctttttggtttccgtttccgctccccgtctcttcctttcttgttgtcctcactcttgcagtctagagcccaccccaaactttctgctgagcagggtggcaatgaaggtgattctgatgttgaattggatgactattctgatgtagaacaagatgatgacgaagaagaatatgatcagcttccacccttcaagcccttgaccaaagctcagcttgcaaggctcacaaaggagcagaagaatgcttattttgacgagtatgactacagggtcaagcttctccagaagaaacaatggaaggatgagatccgcaggttgaaggagatgaagaagagggggaaaactgatctggatgattatgggtatgctaatatcgctggtgagaacgatcaggatcctcctccagagaatgtatcggttcccttgcctgacatggtgcttcccccttcatttgattgtgacaatcccacataccggtaccgctttttggagtcaacctcgactgtcctagcaaggcctgttttggatgcgcatggatgggatcatgactgtggttatgatggagtgagcgttgaagagacactggctatccttagcaggttcccggcaaatgtagcagttcaggtcaccaaggacaagaaggaattcagcatccatttggactcttccatcgcagcaaagcatggagagaatgcatcatcacttgctggttttgatatccagactgttgggcgccagcttgcctatattctccgcggcgaggcaaaaatcaagaacatcaagaagaacaagaccacaggaggcttctcggtaactttcctgggtgacattgtggcaactggactgaaggtcgaggaccagctctcccttgggaagaggctgtcgctagttgccagcactggcgcgatgcgagcccaaggggaaactgcatatggagctaacttggaggcacgcctgaaggacaaagactatccgattggccagtccctctcaacgctgggtctctctctgatgaagtggcgccgggaccttgctctgggcgcgaacttgcagtcccagttctccatcggaagggggtcgaagatggcagtgcgacttggtctgaacaacaagctgagcgggcagatcacggtcaggacaagcacctcggagcaggtccagatcgcacttctgggtctcgtaccggttgcagcctccatctacaggagcttccggcccagtgaaccgtccttcgcttattagcctgtcaggagtctcagtccaattacttcataaccatgtggtttctcttggcaattttcttcttcacatgaaccatgtttcttgctgtttcagtttactcccttgtaattggcagatcgtttcctaccataattttggctgaagagggttgtgcgatttatctggaactgtagctgaat

SEQ ID NO: 35617 - DNA, 924 bp, Zea mays
  Clone ID: UC-ZMROB73068A03_FLI
ggcccgaggctataacccggactcctcgccctcgtacctcgttgctggcgaagagcgtcatcaatggcgagtggaggttcactacacagccgccggatcttggagcatcattcgcggtcttggcgcgtctacgcaactgtatcctaagggcgtcgaagaggagagacggtacgccggtggcgacaaggtacgatagatttgaactggagtgtggaggtatcgtcggccagtgccatcagcgatgggtggaggtttccgtcgagtcgaggaaggagcgcttcgtgtaaagatgttgtttgtttattgttattatcttatcggaagtgccgtcaaggaagatgacgatggtggtagggatcgacgatagcgagcacaacttctacacgctgaagtgggcgcactgcagcacttcttcccgccgaccaagctgcaacactactgccttgttgtcgtcaccgccaagccctctgtcgcctccattgttcgccctgccaacctaggaaatcataagtggagattgaagttgatcaacttgacactcgaataaaagaatcaacaaatattgcaagtgctgaaagttgtgactgctcaagtccaattgctttatcacacaagttctggtggagatacttattctagaatcttcaaaagcatcaacgttagtgttcaagggactgattctggactttcaacttaatgcttctctacctgttgtcatactgaagctactgctcctggaagagcatcaccaacatatccctgatggccctctctgcttcatgctccaagcacttggatgttcaccttgaaatataattattaatagggactgtccaaatacttcagctaagcaaaatagcgacctccataaaaaagcaacctgtaactatctctgaaaattttgaaaaaaactgatggtaactg

SEQ ID NO: 35618 - DNA, 1223 bp, Zea mays
  Clone ID: UC-ZMROB73068B07_FLI
gaagttggttgtttctggtggctgtgctgattcaggtgtactcctcagtgacacatatcttcttgatgtagccatggataggccagtttggagagaagttcctgcatcctggaaaccaccttctaggctggggcactcaatgtctgtttatggtggcaggaagatcctgatgtttggtggtcttgctaagagcggccctctgcggctccggtctagtgatgtgtacacaatggacttgagtgaagaagagttttgctggcgatgcctcactggtagtggaatgcctggggctggaaatccagctggtgcaggcccacctcctcgcctcgatcatgttgctgtgagcctgccaggcggaagaattttgatatttggcggctcagtggcaggtcttcactcagcgtcacagctttatctgttggatccaactgaagaaaagccgacctggagaatattgaatattcctggtcgtcctccccgtttcgcctggggccacagcacctgtgttgttggaggaacaaaggcgatagtgcttggtggacaaactggagaagagtggatgcttacagaaatacatgagctttctttggtcagccgctcagtttgagttctggaatggtttgtagtcatgttccttgcaaattagatgcggcttcttatgcaacctgaagtttgattgccgtcttcagaagaactagaagaatgaatgctgggcatactgaatcttctggcagctacctggcggacttggaagatgaaatggcatcgactggtttgctcgctttgtgtagaaaaggggtagtgatatgttcatttttattgccgtttgtttggccttttttaccagataattacaattcataagctactactgttgtggaatgagtagcaaattttatatgtattctcagaagttcaagacttgcaatatgttaggaaaacaaaagactgcactgtatatagtttaatcttttgatgtacggtacgtggacaacttgatgctgctgtcttgtggcacaggcacacagctagatggcattatgtatggtgatcactgatcaaccatgtttttttttgtagaacttgtataatatgtagaagtttcaatctggtgagcttagctcagaatcggtttacttgtcttctgtttcacatgtttgcattatcatggacatgattatgaacagcggttatgtttatgcaacaatgccaaacttcgatgt

SEQ ID NO: 35619 - DNA, 1273 bp, Zea mays
  Clone ID: UC-ZMROB73068C09_FLI
ctcacttagggaaacctgaaaaatggcactccaattgcaattaaaaaacttgcagctgagtcaaaacaaggaattagtgaattcttgacagagattaatgtcatatcaaatgttaggcacccaaaccttatcaagctgattggttgctgtgttgaagggagtaacagactattggtgtacgaatatgcagagaataatagtttggcgaatgctttgcttggaccaaagaacaaatgtatcccattggactggcagaaaagagttgctatatgtattggaactgcttctggccttgcttttcttcatgaggaagcacaaccacggattgtccaccgtgatatcaaggctagcaacattttacttgataagaagctgctgccgaaaattggagattttggattggcgaaactctttcctgatactgtcactcacattagcacgcgtgttgcaggaacaatgggttatttggcaccagagtatgccttgttgggacaattgaccaagaaagcagacatatatagttttggggtgcttcttcttgaaatgataagtggtgaaagcagcagcaagtcgacttggggacctaatatgcatgttctcgtggaatggacatggaagctgcgggaagaaggaaggctcttggaaattgttgatccagaactggaaaagtacccagaggagcaaatgcttcgtttcattaaagtggcactgctgtgtacgcaagccacgtcccagcagaggccgtccatgaagcaggtcgttaatatgctatctaaccaaacagaaattgatctgcaaaatgtagctccaccaggtgtgctgaaagaacctcggcagcgtaccggtggctttgggggtttgatagcagacacgtcctcaagccaaagcactaaaggcaacccagctgaatcatacagcacacagaccaacatgaacagctctcagtttagcacaactgatgtatcaccacggtgacgttgtcgactattgtttgacgtcttcagaggtgtctcgcgcctcccacaaggtttattgtgctgagcccggacaaaatcgcttgatatggaaggcctgatccattttcatcctgttttagagctacgtaggatgcgaaggccgctgtgaattgctgatgtacaggaattgtagctcatctgtttttcttttctgcggaggatgatttgcagttaaatttgacattttttttatgttctccattaaagcctgttgtaggtatacattgcaagagtacaagacatgtattcgaaatttc

SEQ ID NO: 35620 - DNA, 2402 bp, Zea mays
  Clone ID: UC-ZMROB73068G10_FLI
agagaggagagaggacttgaggaataggcaggaggctttgtggtggagcaatggcgacagcggcctgggccgcatggctgctcatcctcacgtgcttcggcgcttggaccccgcggcaaatcttggttgctgcagccaccgacgcgaatgatgttactgccctcaacacgctgtttaccagcatgaattcgccgggacagctgcagggctggaaggtgagtggtggcgacccatgcggcgaatcgtggcagggcatcacttgctctgggtcctctgttactgcaattaaattgccgaacttgggcctctcgggaaatctggcctacaacatgaacaccatggattcattagttgagctagacatgagccacaacaatctcggtggtggccaacagattccatacaatcttccaaataagaagcttgaaagactcaatctggcagaaaaccagttctctggatctgtgccatactcaatttcaacgatgcctaatattaagtacctaaaccttaatcataaccagctatcaggagatatcacggacatattttccaacctcccaagtttaaccacagtagacctttcctccaattctcttactggcaatctaccacaaagtttcacttctttgtcaagcctgaaaacactgtatttgcagaacaatcaacttactggttcaatcaatgtacttgcaaatcttccccttgatgatctgaatgttgcaaacaaccgcttcactggttggattcctgaggagttaaagaagataaatagtctgcaaactgacggcaactcttggagcacaggctcagcaccaccaccaccaccatttacagctcctccacgttcgcgcaaccgtcgaaagagcccaggccagcactccaatggaagtaacaactcgagttcaggtggaagctctagcataggtgctggagccatagcaggcattatcatatctgttcttgttgttggagcacttgttgcattcttcctgataaagagaaataaaagaaaaagtgcaatgccagaacactatgaacaacgccagcctttcaattcgttcccttcaaatgaagttaaaaatatgaagccaattgaagaggctaccactgtagaggtggagtctttgccttctcctgctgcagttaacctgaaaccacctcccaagattgagcggaatcaatcatttgatgatgatgattttgcaaacaagcctgttgccatgaaaagtaatgcagcagcagcaccagttaaggcaactgtttattcagttgctgacctacagatggcaacagatagcttcaacatggacaaccttattggagagggtactttaggacgtgtgtacaaggcacaatttagtgatggaaaggttctagctgtgaagaaattaaacagtacaacactgccaaggcaatcatcagatgatttctatgagctggtgtcgaacatttcgaaattgcaccatcccaatctcagtgagcttgtgggctactgcatggagcacggacagcacttgcttgtttatgatttccacaggaatggttcactgcatgatatgctccatctctcagatgattataacaaaccacttagttggaattctcgtgttaagattgcgttgggctctgcacgtgcactagagcatcttcatgaaatttgttctccatctataattcacaagaactttaagtcgtccaatattttactggacaccgagctcaatcctcacatttctgatgctggacattcaagttttgttccagatgctgaattccaggcttcagatcaggggtctgggtatagtgcccctgaggtcgagatgtccggtcagtataccctcaagagtgatgtctacagctttggggtcgtcatgctggaactcttgacaggccgtaaaccatttgacagttctaggccccggtcagagcaatcacttgtccggtgggcaactccccagctgcatgacattgacgccttggaccagatggttgatccggcgctcaagggtctttaccccgccaaatccctttcccgttttgcggatgttattgctctgtgtgtccagcctgagccagagttcagacctccaatgtctgaggtggtgcaagcgctggtgcggctcgttcagagggccaacatgaccaggagaatgctagatggcgaggaggcttctcggcggccggatgaccaggaacaggaattcgtctaacaagctactgaaacaatatacacatcatgtgctgtacctgcaccatcttaatgttgtgactgttgataaaacagggaaaacagctttgtcgacttccattcagtatatattacaggttttatttcatataacgaaatatatatgttattttttagataatgggaattgaaagtttctggcctttgtttc

SEQ ID NO: 35621 - DNA, 1788 bp, Zea mays
  Clone ID: UC-ZMROB73070B01_FLI
ccaaaagcaagcggaggttctctggccgcggctggtggccaacaagctcttccggaagacctcgggcagccacgccttcgtcgccgatttcccggccaccgatggcgacggcgatgtcgtctttggtggaacggagttcgacggcggcgggtgcagccccgaccccgacgacgcggacgccagccgctgcgtgaagcgggcgcggccgcagccgcagccgcaggagcgcaacaagaagaccctcaagtacaagctgttcgcgagcacgtggaacgtcggcggcgtggcgccaccggacgagctggacctgtcggactggctggacggcggcggcggcgacgacgacgacgggccctacgacatgtacgtgctggggttccaggaggtggtgccgctgcgcgcgcgcaacgtgctgggtgccgacaagaagcgcgtcgggatgcggtggatcgagctcacccgcgccgcgctcaaccggtcgtcgtcatcgcacgcgcagcgcgggggagggagcggcggcggatcaggctcaggcgacggcggcggcggcggcaggcagaaggtgcacccggtgcgggacggcggcggcggcggcgggctggcctgcagggactaccggtgcgtggtgagcaagcagatggtgggcgtcctgctcacggtgtgggtgcgctccgacctccgccgcttcgtccgccgcgccagcgtctcctgcgtcggctgcggcgtcatgggctgccttggcaacaagggtgccgtgtccgtccggttctggctgcatgaaacgagcttctgcttcgtgtgctgtcacctcgcgtcgggcgggcgcgacggcgacgaggcgcaccgcaacgccgacgccacggagatcctctcccggacggccttcccgcggggccaagcgctcaacttgcccttgccgcacaagattctagaccacgaccgggtgatccttctcggggacctcaactacaggatctcgctgccggaggccaagacgaggctgctggtggagcggcaggactggaagacgctgctggagaacgaccagctgcgcgccgaggtgcgccgcggcggcgcgttccagggctggagcgaggggcccatcgccttctccccgacctacaagtactgccccaactccgacgcctactacggctgcgccaccgccagcgccaccgccgacgcccgccggcacaagcggcgcgcgccggcgtggtgcgaccgcatcctgtggcgcggcgaggggatccggcaggcccggtacggccgctgcgagtcccggctgtcggaccaccgccccgtgcgcgccgtcttcacggtggaggtgggcgcgcccgcgcccgggagtaacctcaactcgctcaggagcttcttcatgtccgagaggttcgacggggctggcagcaggagccccgccgccgaccagctactccgcagggacgacgacgtcaacagcgccagattcagcgacgcgctttgagacacgcatgggatgggagggtggagatggaattgtcactccacttctccggttgcggattgtacttgcgcacagacagaagatcgtatctacaacatgctgctaagatacagagatggtttttttctttttttttaaaaaaaaatccaccctgttcccaacgttctgtaactactatacatttgtactcttgttgatccagtgagtatgattgggcctcaagtcaagtttgttgccatgggcaaccatgaatgacaacagaaatcacagagaaaactatatatattcagagacagcagaattcattt

SEQ ID NO: 35622 - DNA, 639 bp, Zea mays
  Clone ID: UC-ZMROB73070C07_FLI
gcgagcgagcgaagtagacagacgctggctgagatacacacacacacacacatcaactgaaaacgaggagtttttgttcatcatgggggtacagagcagcgagggccagatgatgttctcctccatcgccctgctgcagcagaggttcagggagctggagaggatcagggagaagcgggaggagaggctactccacgtgctcgccccgcgccctgtggccaccacctccccgagggagatgcccgtgaagtggttcttccatccggagctgctctacccgtgcaggccactgcgggacaccgctgccgcctccttattcccggcctgtgaatgcaaaagcttccagctccacggcgataacgaccccatcacggtggagctgtggcccagtaagacttacaactacaaacatgtctctggtgaagtcgacgtcgacacctcgctgcacctctagactgctactgctactaaaaaatgttccaatgccctataaacttctgttaaccacttggtgttgctctcgcagttttttttttggtagcctactactatgttctcttcttctgttgtaacaaggggtattaggaggggtgacggtgtgctgtaattattaccagtagtacgatggtcttgcagttc

SEQ ID NO: 35623 - DNA, 1303 bp, Zea mays
  Clone ID: UC-ZMROB73070G05_FLI
ggacattcggcgttcctaggtaccccgctgcttccgtgctcacctcgcctgcagggccgcagccgctggaagaacacgaagacgacgggagtgcggggtggcgtcgccgctggagcaccagctgtagccgccggctaggcctccgcgccgctctccgtggccaacgcgccgtcatgcttgcggcgtcggcgcggcggctgtccgccgccgcctcgttttcctcttcttccatgcgctccagccagctcgccgccgtactgaaccaacagaggtggatgcacgacaggaacaagaaggcgatggagctggtggccaagggatggagtgcgctccaggaggtcgaccgcgtcatcgactacgccgatctcaacgacaagcgcctcatcccgcttctaaggggcgctaaggaaaactttgagctggctttggagattgacaatggtaatacacatgcgaggtattggctgggaaaaatgcatttcaagtatcatgttcctggtgcttgcaaggcagttggtgctgctttgttggttgaagctgcaaatatgggtgatccagatgcacagtatgaacttggatgtcgactaagaattgagaatgactatgttcagtcggatcaacaggctttccattacattgagcaagctgttgatcagctgcaccctggtgctttatatcttctcggtgctgtatatctaactggggactgtgttaagagagatatggcttccgcgttgtggtgttttcatagagcttcagaaaagggacatgctggtgcagctatcgcatatggatccttgcttcttaaaggtgctgaaatacctgaagttattacaaggttcaactcaggcaagagtccatcaactgggaaaatgcggaaaaggacccaacagcaggatccagtaaagctagcgaaagaacagtttcaaattgcagctgaggcaggctgtgatctcggtctgcggtggttgaagaggcttgaagcttatgaaaaccaagaagaaaagctaaagcaggttcagcaatgatatccactgaaagaatcccattgcatttgtcgcatacaagtatggtatatggcagcatggttgctgcacataggtataccaataatttcctttcctgccttcattatgttggaggctattcgatcctcggatgttcgggtcaactttgcaggaagatatactgaaatttggatatttagactaacttcttggattataggcgattggatgttcactttgtacgatgtattagcgttgacattactggaagccctaattgtgagaagtagaaacat

SEQ ID NO: 35624 - DNA, 2184 bp, Zea mays
  Clone ID: UC-ZMROB73070H02_FLI
aagcgaaagggaggagagagaggggcagggcagagcaggagagagaaattcgatagggttcccatgccccttccccaccggccaccacttgccaagcgaaagcgggagtgaaggaggggagagtcccatttccccaagccctacacgagagaaagagagagaggggggagcagaggagcacgctacgagagagggaggtcgagggagacagcagaggctgcagcagaggccagaagcattagaagcggcagttgtaaccaagtggcatcagaagatagagccagccatccgtctatccatctatctagctctacaggtataaatcctcgcgcatcggtagggggcgaggggaggaccgggaaccggaggggatttctcgggggtggagtggcggccaggacctctgattgggctccagtgcgcgatctttgaacgcagatttggtgcccgcaatctgccatggatttggtttaagatttggtgagatcggtcgggttcgcgctgcaagattagatttttgtgcctgttttattcacgagatcgcaacaacgatattgctaagcaagataagatttcaactttttttcccctggatcgatctcagattaggaggagcaaataaagcaagaatagaaagatttttgggggagaaggcatgatgctggaagggaagtcctaccttgtgtcacgctccgtgccgagctcctgcgagccggaggcggagtgggagtacctcgcccacgcggtcctcagcggcaagcgcccggcgccggaagatgacgtcgaggtcgaagacccggacgaaactggcagcggcggcaagcgcagcaagccgccatctccgcagccgcacacgccggacatctgcgagggccacggctccaaccgccacgcaaccggttccggagagcagcggatcaccgggagcaaccccatgacttcgatcggtcgtgacctgaccctcaattgcctcctccggctatctcggtccgactacggctcggtggcctccctcagccgggacttccgctccatggtccgcagcggggagatctaccggctgcggcgccagaacggggtggccgagcattgggtctacttctcctgcaacgttctcgaatgggatgcctacgacccataccgggagcggtggatccaagtgcccaagatgccgcctgatgaatgcttcaagtgctccgacaaggaatcgcttgcggtgggcactgagctgcttgtgttcgggatggcgcgtatcgtcttccgatacagcatcctgaccaactcatggagcagggctgatccgatgaactctccgcggtgcctgttcgggtcaacgagtgtcggcgggaaggccttcgtcgccggaggcactgattgtgtcggcaacatactgagctctgcagagatgtatgactctgagacacatacctggacgcccctcccgagcatgaacacggcgaggaagatgtgttctggggtgttcatggatggcaagttctacgtgataggtggtgtggccaacagcaacagagtgctgacctgcggggaggagtacgacttgaagaggggttcttggaggacaatcgagaacatgtctggaggcctcaatggagtgaccggtgctcctccccttattgcggttgtcagcaacgagctctacgccgccgattacggcgagaaggatctcaagaagtatgacaagaagaacaacaggtggatcaccctcggaaaactgcctgagcggtccgtgtcaatgaatgggtgggggcttgccttccgagcgtgcggtgaccgcttgattgtcatcggaggtccgaggacctataccggtggtaccatcgagctcaactcgtggatcccagatgagcggccgcccgtgtggaatttgattgccaggcggccatctgggaacttcgtgtataactgcgccgtgatgggttgctgagtccactgaataaagatacaagtgaagtggacttcctcgtatttatgaaggatgctatctatgcacagaggcagcagcctgtccaattgcttcagcccttattcttcttcatagcgatttctgccgtctgcgcggttccggaattaactggacatcggctgattgtcagcagtctcatgtaaccattacgttctaatactcctgtttccctgctaatccattcctacattttgcatttt

SEQ ID NO: 35625 - DNA, 778 bp, Zea mays
  Clone ID: UC-ZMROB73070H09_FLI
cgcttggctgcaggaacgctcagtgatgcaggagcttattcgtcagcatcttctgcgcgcccagtccagaatgaaacgacatgctgataaacacaggtcagagcgtacatttcaagagggcgattgggtatatctccggctccaaccatatgtccaagcttctgttatgccacgtgcacatcacaaactgagttacaagtttttcggtccctacaaaattctggacagaattggacaggtggcatatcgactggcattacctgcttccagtcgcattcatccggtggtgcatgtgtctcaacttaagctcgctaaaggattcaaagatccagaacctcttccactacctgatgatatcccagagatcagcgttccattgcagattattcagtcccgaggcatcaccaagggcagtcggctcgtgcaacaggtcctggtgtcatggtccgggcttcctgctgaattggcgacatgggaagatcgcgaagcacttcaacaatgttttccctttgctcctgcttggggacaagcaggtcttccagagggagggaatgtcaaggacttcgatatgtcggcccagcaacaggagaccaatgtgcctgaaggacgcacacatcgtgttcgacgcagcaaccctcgcgtgtatgggccggagtgggtctagagtccagttggtctggtgtaggcacgacctgggatatataatccttgtactgtgcctgaggacggcaagcaaaaacatattccggtaataatagactgcctagcctcctccgtc

SEQ ID NO: 35626 - DNA, 1484 bp, Zea mays
  Clone ID: UC-ZMROB73071C12_FLI
ccctactctcctgctcctcttcttcctcctcctctcgctctcaagcgcgtcttcactccggcctagctcggacggatcgacatcgaggggaaagggaataagtgggggcgccagcagatggatccatggatcagcagccagccttctctgagccttgacctgcgcgtcggcctgccgccgctcagcctccaccaggcgccggtggccgtcgccttggccaggcccaaggtgctcgtcgaggagaacttcctgctgcctcccaagaaagaaccagaggtggcggccgctctcgagtcggagctacggcggatgagcgaggagaaccggcgcctggcggaggcgctggccgcggtggtctccaagtacgaggcgctgcgcagccagcacacggagatggtggccgcgtcgtccgcgtcggagggcgggtccgtgtcgccgtcgcggaagcgcaagagcgagagcgcggacacggcgccggtgcagcgccttcaccagcagcacgcggcggcggacctgtcggagtgcacctccggcggcgagccgccgtgcaagcgcgtcgtgcgtgaccgggcggaggaggtggaggaggaggaggagtgcaggcccagggtgtcgaagctgtacgtgcgcgccgacccggccgacctgagcctggcggtgagggacgggtaccagtggcgcaagtacgggcagaaggtgaccaaggacaacccctgcccgcgggcctacttccgctgctccttcgccccggcctgccccgtcaagaagaaggtgcagcgcagcgcccacgacgcctccgtcctcgtggccacgtacgagggcgaccacacccacggcccgcccccctcgggctcgggctcgggttcgggcgccagcagcaagaacgccgcgaagccgccgtcgccgccgcgccgccaggaggctgctgtcgcggtgactgcggccgcggcggcgtcggagatggtccggcggaacctggcggagcagatggcggtgacgctggcgcgggaccccagcttcaaggcggcgctcgtgtccgcgctgtccggccggatcctcgagctgtcgccgaccaaggactgacggaccgcagacggatcggatcgagcggcgtgacacgagattctcgcctcagggctcagggtgtcttcgcacgcacgcggcaatggtcggccgaacaggagacgaggatctgcagcccagcaccagggacgagcagaccggggctgctcgcgcggccggacatggcgtggaccggtgtccagactccggagatcgtcatgccgacgacgtaacatgcgaaacgctactagtacaagaaacaacatccaagtgtacaatcccctgtactttgtagtcttgtttaggcaaactgttctctgtccatccaatcgatgaaacgagaacgttacaaattttttttactccgttcgataagatggcaatgggtacccgctacccaaaacccggtgggtttttgcttt

SEQ ID NO: 35627 - DNA, 737 bp, Zea mays
  Clone ID: UC-ZMROB73071D11_FLI
ttgctctagatccgttcatcctggtggttttgtgaggtcgaaagcggcgagcgaattagaagatgctggacaagctgtgggacgacgtggtggccgggcctcgcccggagacgggcctcgagaagctccgcaaggccaccaccgcccgcccgctcgtcatcaacaaagacgcggacggcggcagctacaagcgggcgcagtcgatgccgtcgaccccgacgacgccggtgacgccgtcgtcgtcgtcgtcgtcgacgacgccgcgcggcgccggcaacgtgtggcgcagcgtcttccacccggggagcaacctggccaccaagggcatgggcgccaacctcttcgaccggccgcagcccaactcccccaccgtctacgactggctctacagcgacgagaccaggagcaaccaccgctagatcgggcgagatggatggacagtgaagaggccatgtttgctggtccttgtggttatctaaaacgcacgcatgctctattatagctagtcatcactatatatatacttgtgtttgtgtattgttgttcttgttctgctggtgtctccgccgtttaatttgacctatgttatggagtgagtgatatatgtgccgtcactcctagtatatagtagtgagtgactagttggtatgtgtagtactgtactatcttttctccatatgcatgttttgccagcgcgtaatgaatgtaatgtcagtactgctactacgtgctctgct

SEQ ID NO: 35628 - DNA, 565 bp, Zea mays
  Clone ID: UC-ZMROB73071D12_FLI
ctcgatctcaccgacaccgaggaagaagagatcaatggcgtccgagcagggagtcgtgatcgcgtgccacagcaaggctgagttcgacgcccacatgaccaaggcccaggaagccggcaagctggtggtcatcgacttcactgccgcctggtgcggtccatgccgcgccatcgccccactgttcgtcgaacacgccaagaagttcactcaggtcgtcttcctgaaggtggacgtggacgaagtgaaggaagtcaccgcggcctacgaggtcgaggcgatgccgaccttccacttcgtcaagaacggcaagacggtcgcgaccatcgtgggtgccaggaaggacgagctcctggcccagatcgagaagcatgccgcgcctgcgcctgcgtctgcgtctgcctaaaggagatcagtcgtcgccgtcaataagggccagcacgtatggctgtaaatgttgtcgttatcagttctggctttgtcgtttgtgggcgattgtgaactagtagtatgtttgtttctatccgagccggaggcgatacttaaccatggatacttgttgtgagtt

SEQ ID NO: 35629 - DNA, 2473 bp, Zea mays
  Clone ID: UC-ZMROB73075B04_FLI
atccaaggacatcgacatggagaagatatcttctcagatatcttcagtaacattaggtggcaacgataagattcagagtatggcaggaaatcagcaaccagatgtaatgccatgcacatctattgatgtgcccatggatcagaattttggcagagaccgatctcatctcaatcttaacgagcttttattgccttcagaaaataaggatagtagtctttcttgtcaatatagttctgataagcgtcttgcttggagtttgaagatgcaaaattgtagcgttactcctttaaatgatacaatagactctgcaatgctcactgacaaaccttatagtatactgctggaaggttcagagaaaccatcatatccaccatttgttgaatttcctagtacatgggatacctcattgtggaatgatacaaaaaataacgctgcatcgacgattgacactataacttcttcacagatgcagacagggttttcttcaatcgataacacttatgccttgctaaatggaggtcaagatgggctaggtactgtatatacacatgataatgtttctgtatatacacgtggacgtggtaatgtttctggacatcctggaatgggaagtcatcagcatagagcaatgggttcagtaagaactgatagtataggaagttttgacaagaccataagcgtaaataaggatgagagcagaataatttctgatacgttgtcagagtttaatccatgggatgattcatattcgactgctaacaattttgttaggatgcttagggaatctgaaaataatgatgttcagtgcactgcgccttcatggaaatcaggaaccgggagcaaacagtccagattttcatttgctagacaggataaccaaggaaacttgttggattcatctctcagaaactgtggtattggtactgagcagaatttcagtttgctaccccagaattctcgaagaaatatttaccagaatggtcttgcattccaatctctagagaatgaattttcaaatagtaactttcctggtctattagatatggcaactactggtacatcaatgtctaaaatatctgctcccccaggattttcagcaccaacaagagtaccccctcctggattttctactgcatttccatcccaggatagtttgaaccccactcctgggtttccttctgggattttgtctcatgatgggtctatccccctttctagattcccttcattttcttctggagtttcagctcaggaagtgtctaagctccctactagactgccttctccattttcttctagattttcatcacaggatggtcctgatcccccttctagattccctttttcttctgggttcacatcacaggatgggtctaatcagttgtatggctcaacaaacccagaaaatcttctcgggggtactgttctgggtgtcgacggtaatcattatcaatctcagtttggaaggcactcaagtgacatggagtttgatgatcctgctatattagctgtgggcaaagggctgatgcctggaattggcgattcagggctggagatgaaaaatactcgtgcttcacagttgcaaccagcaagtagtgatccaagatttcagctacatgtacagccaaatgtgcagtctcatcaaaacatgagattcacagaccctgtgcaagatggtttgaaccatatgaatgataattacctggcatccagatttttagctcagaaccatggtcctctatctccttatgtgcagattccgcaacaacccagaaactcgcaggttacaaatggtcactgggacgggtggagtgaatcgagacaagggaataacattcctatgtcagacatgtccaggatattatatccaagtgaagtgaacaagttgcacatgctgggttcaaacgatatccataacagagcctttggaatgtgattgtctcctgggataatgtgtgactttgagctgacatattcgcttggggcgttttgtggaagtaactggttgcacaaaacatagtatacctgaggtggttaatggtgttgtgcttatgagctggcacacaatatttattgctattggagttgaccaaaatgaaccttagttttggtccagccagttgaaattaccaggttcattctcgtctatgatttgtgacgcttgaatgaaaagaacgagaagaacaaggcagctgaagttgaaatagatatagagatatgtctatcatgggatttggggcgacctgtgagtgaaagaagcttaggtgtggcagtttgtttttcttgtgtctgtacatgatgatattggtcggtggttgtagtataatttggtgatcggcggtggctgtattaacttgtagtggttgctcttgctccctcttgcttgtttatgttaattaagggaattgaggtgaaggtctagtgttacccatagcataataatatacgatacataactggtttctttgctagc

SEQ ID NO: 35630 - DNA, 1796 bp, Zea mays
  Clone ID: UC-ZMROB73075C08_FLI
tataaatcagcccccttcctccacggtcgcgtttcacgggcgtagagagagagagagagagagagagcgcgagcgagcgaagagggcgtgagagaggagggaggccaagccgtacgcgtcgtctcctgctgtttctccccatccctttcctgcctcggcttgcaccttcaaccttacttaaagctctgacctcaaactgaaagggacctgcgaagagttttttttgcggcagtacaatggaggtatttggcaaatctgtgattgctgagcccagcaatgtgattttcttgtccgcgatccttaacacagaagggtcaaaccctagtcacaagtgtgacaagaggtgccagagcgagcgcattttggggaacatgtaccgttgcaaactgactgaaaccactcacatctgtgacaaaaactgtaaccagaggattctatatgacaaccataactcgctctgccgagtgagtgggcagctttttccgctctctccactggagcagcaagcagtgaggggcatccgcaggaagcatgaagtggacagcagtgaaggttgctgctttaagcgcaggcgcggcgcacagctgcatccttcccccttcgagaggtcctactctgctgtgtatccaatcccgagccaggttggagatggcatggacatgagctagagctaatgagacttccttttcttcggccagccacctaatttcgttctgtctaccctttttccctacgattacaagatggaactataagagcttccttctttttagacttatatgagactccttagatgcaccgaataaatgttcatgtagtatctattctgtttcatgggaccttgttgtaactcgtgaactttgattgaacgcctattttgatttagtggtactttcagataatcattagattcttctcttttttttgtcacacttccaatttagttattttatgtgctttactttttgttcaactaatttgccttctaattttaatcctttgatgcaatttaatataattgagaggtttacatttgtccgccaatgtaagtaagtgaaggattctttggtcctgtaatccaggcacagggaactgacatgcctttgctgactgaagtttttgtacagctgttactagtgttttgcttgacaagttcctaatcaagcttgaatcatttacggtttgttcccatatagctcaattctatctgttgcttaactcttttttttacaggttatgtttctaacgcttaatgttttcctatgttcttttttgtcttaacatttgttgtatgcaggaccatccaggttctaatcgttttttgggaaatgttttgttcttttttatataactatattgctaacttaatttaatttgttgattaatttgcctttctttgtttttgcaggtgaacatctctgattccattttcatctgttgggtggcaagaaactaatcaaggagtctctctcttctcattctctgcgtggaggactgtttagctgtagctgagtggcatgctttccagaacataaattggtggaagagaagtttgatgctaccactttgcgagaaggaccgaaccaacacaataacatcaaacttagatactgcagtttaccaactttttcaatattgaagattgaagagcagcaagatcagcctcttccatatgcagtttgaagaaatcctttttaaggtctattagactagaatccttccggcaatcttgccttcaccccaagcatgctgcataccttgtaatgagtgtggtacttgacgactgttaccaaagt

SEQ ID NO: 35631 - DNA, 750 bp, Zea mays
  Clone ID: UC-ZMROB73075D01_FLI
agcaacctcgtccccaaacaagcaaccaccgcctccccgatctcgtcgagaggaagcccaatcccgaaaccgccgccctattccaatggcgcccaaggccgagaagaagcccgccgccaagaagcctgcggaggaggagccggcggcggagaaggccacggcggggaagaagcccaaggctgagaagcggctccccgcgggcaagtccgcaggcaaggagggtggcgagaagaaggggaagaagaaggcaaagaagtcggtggagacgtacaagatctacatcttcaaggtgctgaagcaggtgcacccggacattggcatctcgtccaaggccatgtccatcatgaactccttcatcaacgacatcttcgagaagctggcggcggaggcggccaagctggcgcggtacaacaagaagcctaccattacgtcccgcgagatccagacctccgttcgcctcgtcctccccggcgagctcgccaagcacgccgtctccgagggcaccaaagccgtcaccaagttcaccagctcctaggcgagcgatgcgacgtgcactcgtctcctcttcttgcaggagtacaatagtagtacggttaggtgtgttgccgcggtggtagttgccgctgcgtttgctttctgggctcggttgatgtcttttatgtaagaaagtaactgtattgtgtctgcagtaccttaccgtgcatgttttaagtagcatcccataatctataaggccccgtttgtttcgtt

SEQ ID NO: 35632 - DNA, 828 bp, Zea mays
  Clone ID: UC-ZMROB73075E02_FLI
gtttggaaagcacatatctcttccaaatgtagaatatgtaaaggtgaaatctgtgaggctcaaagcaggcccaaatacacacgacggatgtggtatcgatggcgaactactccatgtcaaggggcaagttcgctgtagtttgttgcctcaacaatgtcaattgatgggcaggccagtgaaaaaccctgtacagtagctgtaaatacactatgcggactgtctgcagctctgaggtcagcccagaatcttgcacctgtggtgtgtacaagcggcgaaccatggattttcgtctgcatccacatgtcagtaattatattcagaagtgagaacatgaacatcctagctggcactcagctccagagatgtacatttgtggttgacgagcagaaggtgctgagtgggtgctgtttcatccatatgtaaagccaaagcctatctcggacagcagcttgttgcgcacctcttgcttttgcctttttctcgtccgatagaatgcatctactatacagccatcctgatgagtgtacttggttgctccagaacatagtgtccacctccaccagccgggtgtctttggaggttccctgatgccggccacttgatactcattgtagggacaacaccccagtgcccgtgtccttgatcagtctgttgtgtttgcgaagtgtgaataagatataggactgtttgattcccggtacagcgcagggtttcagcagaaagggctggatggatgatgttttgtggcgatgctgcctcgttgagtctttaaaacgggtgtaactcttcttcttttgtgagtcgtgatgatgtatgaaccgtgtactg

SEQ ID NO: 35633 - DNA, 1785 bp, Zea mays
  Clone ID: UC-ZMROB73075E07_FLI
gtggagtatcatctagtaatctttcatctacttctagtagtagcgttagtggttcttctgtaagtgcatcggatgattcttaccaaaggcctgctgttcctgcttgggaatttttagaagctgttccttttgtacttgaagctgttctgacagcatgtgctcatgggcggctttccagccgtgacttgactacaagcttaagggatcttgtggactttttgcctgcttctcttgctgcaattgtaagctacttctcagcagaaattacacggggaatctggaaacctgttccaatgaatggaactgaatggcctagtcctggtgcttctcttcattccattgaagctgaagtaaaggaaattcttgcatctgctggtgttcagattaacagctgctatccacgtggtgtgccgccaatgcttcctttgcctatggctgcacttgtcagcttgacaattacatttaagctagataggagtttggagtacattcaaggggtcattggacatgcactagagaactgcgcagggggaagttcctggccaagcatgcccattatcggggcattgtggacacagaaagtgcgaagatggcatgacttcattgtcctctcttgtatgcgttctccatttggcagagacaaagatgcagttgcgcagctcatccaaagctgcttttcgtcctttctgcagtcatcatccagtggttctgacataattgcaaaccgtggagttggggctttattaggggactcaatcacggatcaaggtcttaggctcccaatggcacctggtttcgtctacctgagaacatgtcgaactttccatgacacatacttcgttagtgaagtgatcctcaagcaagtgattgaatgggctcacaaacttgcaaatggatggtctttcaatgggcctccacagttgaaatcaggccggacaccactatcttgtgcagcatccatggcgcatcaggtcgcgatgcttggtggtggtctcctatgcatagcaggtggaccacttgtggtccaggtgttgtatgaagacacactaccgacactgctgctgtcagcgagagaacagagtttgaaagaccctgggccagtttctagcacactccaaggttacgccatggccaacatgctcttttactgtggtagcctactttggggagcggacaggagttctcctgtcatgaaattgtctttcctctcgaggcggccacgggtggtgagaaaccacatggatttcatagctggtgtactggacggacacattcttctgggctgtgacccgggtacctggaaagcgtatgtgtctcagtttatgttcctggtggtgaagtttgttccatcatggttgcgggacataaagctggacacgctaaagaagatagcagctggacttcggagttggcatgaacatgaccttgctctatcccttcttgagcgaggaggaccacaagcaatctctgttgtagtcgagacctttctgtgatcctgccatttggacattttgccccccacctgacatcgcagccgctgttagggtttgaagtcggtggtctgaggtctagctgaagtaatcaggatgacccttccagaattccacttgagccaggataactgatgtttttctcatgtatggcgaacccattttgtttttgtgaattcaatacggaagaacattcaacctactagagtctagagtgtattgacttcagccctaacatgtaacctatgggaatttcattaactttattgcactgacttcagccctaacttgtaac

SEQ ID NO: 35634 - DNA, 1377 bp, Zea mays
  Clone ID: UC-ZMROB73075E11_FLI
cgcgtctccctccttcgcgtgctcctcccccgaaccccatccccctcccacccaccgagtcgagggtgcgcgcgagatccagatccgcgtctagatccatcgcccggggttcgccatgatcccgacgcggcccgcgcaggcgtcgttccgcgaccgcaccaacgagttccgcgccgccgtcgagagcgcgcgccgccacgccgtaccttcctcgtcgtcagccgccgccgcgccgagtagcagctctaccaggcccctcgatgggttgatcgcagccacgtcggctcgctcggagttcaacaaccgcgcgtccaagatcgggctcgggatccaccagacctcacagaagctaacccgccttgcgaaattggcaaagagaacatctgtttttgatgaccctacagtggagattcaagagttgactgcagtcattaagaaggatatcacggctttgaataacgctgttgtagacctacaagctctctgcaattcacaaaatgagagtggcagtctctccaaggacacatcaaatcattccactacagtcgtggacaacctaaaaaatcgtctgatgagtgcaacaaaagaatttaaagaagttcttaccatgcgaacagagaatttgaaggttcatgaaaatagaaggcaaatgttctcttcgtcggctgcaaaggacgcgtcaaatccattcatccgtcaacgaccccttgttgctagggatccatcagagtcatctgtgcccccagcaccatgggccagcgactctgcatctaccccattattccagaggaagaagactaatggagaccatggggcatcatcatctcagcctttcgcacagcagcaacaattggcagtacagcaggacagttacatgcagagcagagctgaggcccttcaaaatgtggaatcaacaatccatgagctgagcaacatatttacacagttggcaaccatggtttctcaacagggagagctagcaatcagaattgacgagaacatggaggaaacagtggctaacgtggagggagcgcagggccagctcctgaagtatctcaacagcatttcgtccaacaggtggctgatgatgaagatattctttgtgctgatggtgttcctcatgatcttcatattcttcgtggcttgaccttctgtaacattctgcccgaggtgctctggccgctatgcgtagtattcttttatttttacgcatactacaccgtgtacacaattttcaccctggacgataagccatcgttcacccttttgtggccatgtaaattgggaggagttcgagtcctgttacgttactcttgatcggcaatatctccactgtatttgatgtatcaactcgccagacagtaataggcaggtggc

SEQ ID NO: 35635 - DNA, 1361 bp, Zea mays
  Clone ID: UC-ZMROB73075E12_FLI
aagatccctccctaattacaatcttcctcaacgccgccgctcccagacaccgagcccgactgcccgaccccgatccggcgatccgtctccttcctttccttcgttctgccggccccgatcactcgtcaaccatggcggcggcagcaggcggaggagcggtgcgtgctctgtcccagaaggagcaggacatacagatgatgctcgccgccgacgtccaccttggcaccaagaactgcgatttccagacggagcgctatgtctttaagcgccgttccgacggcatctacatcatcaatcttggcaagacatgggataaactccagcttgcagcgagggttatcgttgccatcgagaacccgcaggacatcatcgtccagtctgcccgcccatatggccagcgtgctgtcctcaagttcgctcagtacactggcgcccatgccatcgctgggaggcacacccctggtacattcactaatcagctccagacctccttcagcgagcctcgactgctcatccttactgacccaaggactgaccatcagccaatcaaggagtctgctctggggaacatcccgaccattgccttttgtgacactgactctcccatgcggtacgtcgatatcggcatcccagcgaacaacaaggggaggaacagcattggatgtctgttctggcttctgtccaggatggttctgcaaatgaggggcactatccttcctgggcacaagtgggaagtcatggtcgatctgttcttctacagagacccagaggaagcaaaggagcaggaggaggaagctgccgcggcccctgagtttgccgcaatcactgattaccaaggaactgatcagtggggtggtgatcagtggacctctgatgtggctgcgccgcctgttgctcctactggtgctgattggggtgctgctctggctccagttcctaccggtgaaggctgggatcaagccggggcccctgtacctgcggacggtactgtacatccagtggttgctcctactggttgggaccaagcagccccgccgacagcccaaggctgggagtaggcatagtctactatgagacctgtcttatgcagcttaagttcagtattttttgtgaagtctagtcttctgcagcttaagttcagtattttttgtgaagtctagatgtccagaatcttttggcatctgctatagctatgctttgctttgctttgagcacttctgttttggggctttctagctgaccctgttgtccaacgttgctggcatggaaatttttggttaatcttaaaactgggaagagcgtgtgaaacgatccttgtgactctgttattccctgagtatgtgcaagtataaatcctgatc

SEQ ID NO: 35636 - DNA, 3388 bp, Zea mays
  Clone ID: UC-ZMROB73075F01_FLI
ggaagggaaaaggggagcaggcaccgtcgtctccgctcagctgcgacatcgttgacgtcggctacagcgaccatggtggcagccattcctctgtgtccgcacctcccccgtttgctttgtcgtcgtctctccgattgccataggtacgaacaatctttttcaccgtaacttcacagatctgcgtcccctcagtgttagggttgtcttccagcctgccgcaatgtgcgctcccataccattactacacatcgagtagcaatcgccttcctcgcatttttccatcgctcgctccccctgtaatgtagagtttgcttaggtattgcccaacccgcaggacggacaggccacaccatcatactatgaatcttctcctcgtcaaaaaagctaagtcacatcagagcagatagcagccacatatacgttgtggatcggtcgcctgctccatgtcctcccccttgcttttacggaattgaggataagttcttggttttgctgcgcaggagtattactacagtctaagccaggaatgcaggtcctgatgaatctgtggaacctgtggttcctattttagtgtggggtagcagagtcttgattactgggttccaagctaaattactgtgtccgaagcttgattactgtgttcgatgctgaatcctgttagatctagattcgaaattgcagagtcccagagtctcgattacttggttatctacaatactattgatccttggttccgtagtcagtttttgttatttaaaactaaatatcccgtggagcctgattagagattagaattactcttatttattctgttatattcatgccattgttccattataaatggtctaatttattggaagttgtttttggctgattgcgctacaggctgaccttgctttggttagcaaattcacttgctaagtttgtactatgttcactctaattacgttatggtggtgttgaccggtgagacaactaaggcaacacatattgtttactttgtttcgtagttaatttttaaattaaaaccaagtatccgttataaatggtctggtttataaatgctatctattttcccaaaaaaaatatttttgggtgactacgctacagcttgatcctgctttgattagtagattcacttgctaagtttattctatgttcactctcattacgttatggtgagatgttgacataatgacatgtgaccacaattatggcagcacatattgtttcagttactaaagtaccaactgctgatacatagggatcttaaataggaaaaaacaattacacatggtttcttaggcatgtcatcaagttataaacttttccccaaaaaatgtttatgtacattactttgcaattgctaacctgttgtgcatttgattttgcaatcgtaaccatcgcgctatccaaatatacctccaatcaacaggatcgagctacgcaaattgctcctacattctcacatacacttaggggtgacaatgggctctaaattttaaactataatatttaaggttctgatcggattaggatcaggctctatttctattcatttttgaactagatttttatttagggagctaagaaattatgaagaaacatttggatcgcgatccattaccacccctttatacactccattgtaagcatacctgtccatgccttatttacattacttgtttacgcacagcagttagttttctattatttgcacccctcctcagcctacatgccacaaatctcatttgtttcttactgttttcgcatggtcacttactaacaagctgatttgcacaacatataacttctatctggaacaggtatgctttctccggtaagcaaaatataacatgccttttccatattcacaacaaaaatacacaggttcattttttttccatcgtgtcccctaactgggaaaaaataagaaaaggtacaagccatcgcccatgttttattgaacaccatgtatatgtccacgcatatatgaccatgttctacaggttggtttacattgtatatgaccatgttatgttgcatggcagatatgtgaacaccaaaaggggatgcaactgcgaactgtgagaaattttccacatactacgctcacattgtctggggcaatgggtgagtgattttgttatgttctacaactatttatcttaatgttgttcaacaaaccatttagttagtcaccactgattgtcacaatgatataaaagttcattgtcagttggtttctatgtaagtgtgggcttcaactcgttatgataaaaatctcaaccttaactgttgtcatggttcatctttctccaaattatgttggctttgaatggagtgcatgggatctgtctgttcttaatttgtgcaatgagatggatgttgaattgtgtagtaacctttgtttaattctagtgccctggctagcttgaaataaatttatactgttatctagttcgattccttaaagctagcagtagtggtcactagcccttgaaaataaattttggacaaccagaatttcgtagcagctttgactactattgacgttgatctttttactattgtagattgtcattgatgtaaatgttattagtggcactttaagacgactaaggatcgatatctatcataagatttgtcttttctttataagtgaggagattgtgtgaagttctaacctatgatatatggtccagatctttgatgagtaccttaacttgcaggatatcatactcatacagtaatactgctgcctgtcgatcttaacaaatttcattcaagaactagggcatgctaatgttcaaaagagttgtcagcgattcatgacacctggtatttattatatcttcttttgtagagggctagtgtggtctgcttagcagttggtaattttgctattgaaagattaatctattactgtaaacttggtgacttaggtagacatctgatttatacttaatctaattgtttctctatgtgaatggatacatataataactcaggtagcactacaaccagcaatgtatggatgaattgaaggaagtaaagaaggcagacaatcttacagaaactttacagaaactctgcatcttgaaactgccatgattgacaaagaagctggatgcatcatgtgcattggtgtcttcttatcaccatgcattaatgtgaagcaagttcatttgttgactaagaatggatgaacacaaatcagtggagttcgttgcactagagatggaggttggagaggtgtggtaggtgtcaatatggctttgatacaattttgccctacaatctttgtacggaacaagaaaaatgacattgtacgtggatactatattgtaattcaataattttttctaaataataaatatatttgttt

SEQ ID NO: 35637 - DNA, 1441 bp, Zea mays
  Clone ID: UC-ZMROB73075F06_FLI
ttctaatccggtaatcccccctcccgagtccaaaccctaaacctaaacctctcacccggcgccgccgccgccaccgccgccgccccgaggccccatcccagcgcaaccgacttccgcctcggattgaagcaatgtcgtcggacgacgaggtcagggaggagaaggagctcgacctctcctccaacgatgtcgtcaccaagtacaagactgccgccgaaatcctgaacaacgctctgaagctggttgtgtctgagtgcaagccaaaagcaaagattgttgacctttgtgagaagggtgactctttcataagagagtaatagatctttctgtgtcttagtgctcttggttgcttctttcttgctaatttgcatccttacttgggcttattgtttggaataggcaaactgggaatgtctacaagaatgcaaagaggaagattgaaaggggcattgctttcccaacctgtgtttctgtgaacaacacagtctgccacttctccccgcttaccacagatgatgcagttctggaagaaaatgatatggttaaaattgacatggggtgtcatattgatggctttattgctgtggtggcacatacacatgtaattgcaaatgggcctgtcacaggaagagcagctgatgttcttgctgctgccaacacagcagcagaagttgcaatgaggcttgtcagacctgggaagaagaataaggatgttactgaagcaattcagaaagttgctgctgtttatgattgcaaaattgtggaaggtgttcttagccatcaactgaagcaatttgtgattgatggtaacaaagttgtgctaagtgtctccaatgctgatacaaaggttgatgatgctgaatttgaagaaaatgaagtctatgcaatcgatattgtcaccagcactggggaggggaagcccaagttattggatgagaagcagaccaccatctacaaaagggctgtagacaagaattataacctgaagatgaaagcgtcaagatttattttcagtgaaatcagccagaagttcccaatcatgcccttcactgctaggtgaccttgttgcacacataaagttcactgtgctgctaatgcccaatggatcggataggattacatcatatccgctacaggagttaaagccaacaaaatccattgaagacaatgctgagataaaggcatggcttgctttggggacgaaatcaaagaagaagggtggtggaaagaagaagaaaggcaagaaaggagatgcagcaggagatcccatggaggcgacaaacgatgctacaagccaagaataattctgatttttggaattactgcacccagcattttctctcttgtttcttcgctgcatctgatggtgttatattacattcagttgcgaaaaaatgaatacttttttctagtgtctaagaaacgaagcatcctgttgcac

SEQ ID NO: 35638 - DNA, 1156 bp, Zea mays
  Clone ID: UC-ZMROB73075F12_FLI
gccgagtcgtctttcccgacgcaaaagtcgacgacgcgtgcgccttgctcgctcgctcgccgtctgccgtcgttctaggtttagagccaggtcaccagcgctaggagggcgcgaagtcgagtagacggccgggcctctcccgttctccacggacggctagcgctactggaggcgacgcctggacggcgaccccgcacactcacagccacaccctccacctgtgtgactattcaagggcttaggccgagccgcccggccaatcgccgtccgccggaccgctgaggaatttttctttctcgtcaaaagttactgcattcattttacagtaatggctatggggttgattaatgctaatcctataatccatgagaaaaaagagaggcgtgccagacaggcaccagagaccacagatgaaaatgcagcagagcccatagatcagctggaaatatttgatatccttcttaatgatttcttcaaatgtagtgaagattgctgttctatttatctgagttctctatcctagccatttaattgtggtccttattgttcttacatcacattagagatataaaggatccagagcacccgtactcactggaacagctgaatgtggtgactgaagattcaattgaactcaatgatgaaagtaattatgtcagggttacattcaccccaacagtggagcactgcagtatggcaactattattggcctttgcatacgcgtgaaacttgtacggagtctccctcctcgttacaaggtggacataagggttgcccctggatcacatgcaactgaagctgctgtgaataagcaactgaacgacaaagaacgtgttgcggctgcattggagaacccaaacctactggacatggtcgaagagtgcttatcaccaacatttgattgaggcctgaatatcaatatatcggtgtgacatggtgttgatgttcaggagccacacatgctcattgccaatggagttcactcctgtctttcgagaaccaaaatgccttgggtgttaagtgacgtgttgcatgatttttttcctccgccccgttcagttattatatatgctactatggcgctaccctttttggacgtttttggtgcttgtgacctcactgatcaatgcgagatgtaatcagctcttgtgctgt

SEQ ID NO: 35639 - DNA, 1659 bp, Zea mays
  Clone ID: UC-ZMROB73075G02_FLI
gacggcgcactgccccccgccgcgcatcgggctcgcgggcctcgccaccatgggccagaacctggccctgaacatcgccgagaaagggttcccgatctccgtctacaaccgcaccgccgccaaggtggactccacgctgtcccgcgcgcgggacgagggctcgctgccggtgctgggccaccgcgacccgcgcgggttcgtgctgtccctcgcgcgcccgcgcgccgtcgtgctgctcgtccaggccggccccgccgtcgacgccaccatccaggccctctccccctacctcgagcccggggacgccatcgtcgacggcggcaacgagtggtaccagaacacggagcgccgcatccaggaggcggcggcgcgcggcgtcctgtacctcgggatgggcgtctccggcggcgaggagggcgcgcggaacgggccctcgctcatgcccggcggcagcgccgacgcctacgccaacatcagggacatcctccagaaggccgccgcgcagacggaggacggcgcctgcgtcaccttcgtcgggcccggcggcgccggcaacttcgtcaagatggtgcacaacgggatcgagtacggcgacatgcagctcatcgccgaggcgtacgacgtgctccgcaggctcgggggcctgtccaactccgagatcgccgatgtcttcgctgagtggaacaggggggagctcgagagcttcctggtccagatcaccgccgacattttcaccgtggctgacccgttggacgggagcgggagtggcggcggggcgctggttgacaggattctggacaagactgggatgaaggggaccgggaaatggaccgtgcagcaggcggcggagcttgcggtggcagcgcccacgattgccgcgtcgctggacgggaggtacctgtcagggttgaaggacgaacgggtcgcagccgctggggtgctggaggaagaggggatgccggcgggcctgttggagacggttaatgtcgacaagaaggtgctggtggatagggtcaggcaagcgctctacgcctccaagatttgcagctatgcgcagggcatgaatctgctgcgagccaagagcgtggagaagggatggaaccttaacctcgcagagcttgccaggatctggaagggcggctgcattatccgtgcgaggttccttgataggatcaagagcgcgtacgacaggaatcctgagctcgccaatttgattgttgacagagagtttgcaagggagatggtgcagcggcagaacgcgtggaggtgggttgtggcacgcgcggtggaggctggcattagcacgccaggaatgactgctagcctttcgtacttcgatacctacagatcaagtcgattgcctgcaaatctgatccaagcgcagagggatctgtttggtgcacacacctatgagcgcattgactgtccgggttcattccacaccgaatggaccaagctggcgaggaggagcaatggcgcagccatttgaggaattggttggtatgagaagggatgttttctgctttgtgtgatttctctctgtgggttatcttttgttttactattgttatctttatgcttctagatccaagtcgagtacttcaaataatgctgtactgtatggttggcaagtgaagaacattgtgtagcttcagtttt

SEQ ID NO: 35640 - DNA, 2617 bp, Zea mays
  Clone ID: UC-ZMROB73075G09_FLI
cttccacccaaacaaactcccctcgctgaaactcgccgccgtctcctcgccttccgcctcagcacaggccccgtcgcggtctcctaggccacgcttccgcctctcctcgtcggctgcccgcctccgcccggcggccggagcaggctaggttaccagcgccccccacttcgcggtcgagctggaggacacgcgtagcaacgccgggttcttctgcggcgacctgtggtgtggcctcatggagcccaagggcgagtcaggccagaagcctattgaagaagcaatcgacagcttgaagactgatgctagcatgaaggcaaacaatgtcaacttgcctgctaagaaagacgcaagttcttctgatgcagtatcttgcatttcctccggcgatgcagctagtactgtgaaggatagagaaatgaaccaagaaacttcttttggcgaccaagggatgcattactatggatattattatcctggtgcatacggaggatgggatgagaatggctactttgttggatataatggcctagaggtgcacccagcagtggttcaagctgacaatggttcatatctgtgttatcctctggggtatgaaaatggatatgcttcttatattccggttgttcctggaggcattgccagtgtggatggtcagtatgtcagcaaagaaccatattactccagtgcacttccaattcaggatcctagcacacctggcatttttgctcagccaattgcatatggaactgaactagtacctgcctactcatgggacccttttgttcttctggatggggttcagggacatccagttggtgtgcatcatacaaattatgctccaagaccaaaatattcttctaataagcatgttgttccttctttgaaagcttcccacagtgcaaaatccacagcagatactgtcaaaggatcatcatcagctctagaaactgtaccaaatgctgccaatagcagcacatcatcaaagggtgcaaataaggcacctggtgcttccataacaaaaggatatcttccatctagcaagtttgtgatgcacagtaataaccaagcaaaaagcagtgtttatcaaagcaaaggcatcaatctgaaagaaagtggtagaagctggcacagcagtgagaagcttaaagcgagaagtaagctaaatggacatggcgattctgaatctaatgagaacaaccacactgataactcgaaatatagtttgagctctcaatctgatgttgttggattgtcaagtgtaggggatgctaacgccagcataccttcacctgtcgtaataagaaaaactgcatacaatctttcagattttgttacaaagtatgagcaagctctattctttgtaattaagtcctacagtgaagatgatattcacaagagtattaagtacaatgtttgggcaagtactcctaatggaaataaaaggcttgacaatgcctataggcttgcacaggaaaggatggcagaaaaaggaaccaaatgtcctgttttccttttcttctcagttaatgcaagtggtcagttctgtggcgtggctgagatggttggcccagtagatttcaacaggaacatgaacttctggcaacaggacaagtggaatggtttcttctctgtaaaatggcacattattaaggatgttcccaatccacaatttcgccatataattttggagaataatgagaataaacctgtgacaaacagcagggacacgcaagaggtcaaattttcacaaggtacagagatgttgaacattttcaagaacttcacgtgtaaagcatcaatactggatgactttgacttctacgaaaatcggcagaaagtaatgcaggatagaagaggcaagccacttacatcgtttggtcacccattgccaaaagctgaaaaaactgcagaagttaaaaggcaaacacaattgataagtgccacggaagttggtagagccgatacaaccaaggaaaatgaggagaagagcagcagtgttccagaaatactcaacgcagcatgtagtaacaaggagaaacccaacaaaatcgcaacagacggatgatgccttggctagttgactgggaaaatgagatagcttctggaacggacttcaacttgaattcctgaaatcataagttcgatgtgcgcaatgtcaagaaaccacaattggtcatgggttctcttgcattttctcatggaagtgaagaaacgaaaaaagtgaagcaacggaactgtcttcccacgagaaatgttcaatgactgggaaaaaggttctaggacgcatttaggttgaggcccctggtgctaaggcattagagcgccctccttgtctgtttttcccccatattggagggtcgtttcttttcttttgtcgtgcccctttttcccctcttcttttgcctattattctgcagctgagattttgggaagcagtttgcacttaggtccaaagaaagggaatgtctgttgctttgtgggttgtcctctaggatgtggtaggtgttgactgttttttagaatctgtgcacgttctagaaactgacagaaaaaaagagaaaaaaggattgtgagggattagaaataaaaaggatcttaaaaagatacatggtatctt

SEQ ID NO: 35641 - DNA, 1575 bp, Zea mays
  Clone ID: UC-ZMROB73075G10_FLI
gcacaactgcacaacaccctagaacagtagtgtgatatgtagctcaataggttggttggttgtgtatcacaagagcaggggtagagacacagagagctaaaagaacattggacgcgagagagcagagtagaactgtagaagggagtggtgtacgtgcgctagactgccagtggcagctgctgcaagctagctaaggtgaaggatggatatcgagtcgaggcaagtttccaaaggggacgccatagctgctgctgtctctgttgactggaagggaaggccctgcgaccccctcaagcacggcggcatgaaagccgcggtcttcgtcctagggatccaggcgttcgaaatgatggcggttgcggcggtggggaacaacctgatcacgtacgtgttcggggagatgcatttcccgctgtcgcaggcggcgaacatcgtgaccaacttcatcggcaccgtcttcctcatctccctccttggtggcttcctctccgactcctacctgggcagcttctggaccatgctcatctttggattcgtcgagctctcgggtttcatcctgctggcggttcaggcgcacctgccgcagcttcgaccgccgccatgcgacatgatggcgccggggcaggcgtgcgaggaggcgagaggcttgaaggccggcatcttcttcgctgcgctctaccttgtggcgctaggcagcggctgcctcaagcctaacatcatcgcgcacggggccgaccagttccggcggggcagcggcagcgacgccgcccgccggctgtcgagctacttcaatgcagcctacttgagcttctgcgtgggcgagctggtggcgctcaccgtgctcgtctgggtgcagacccgctccgggatggacgtcggatttggggtctcggccgccgccatggccgtcggcctgctcagcctcgtcgctggcgtcgccttctaccgcaacaagccgccacagggcagcatcttcactcccatagctaaggtatttgtcgccgcagtgagcaagaggaagcaagtgtgcccgtcgacggcctccacgcaggcggtcgcaggttctaccgtccatgagatgtccgttaacaccacagacatttgccacatcaacaagttcaggtttttggacaaggcatgcatgaaggcgcaggacggccccggcggatcgtcggcggggaagaagagcccgtggattatgtgcacgccagcagaagtggagcaggtgaagctgctgctgtgcgtggtgcccatcttcgcgtgcaccatcatcttcaacaccatcctagcgcagctgcagaccttctccgtgcagcagggaagcgccatggacacccgcctggccgcctccttccacgtcccgccggcctcgctgcaggcgatcccctacatcatgctcgtcgcgctcgtcccggcctacgaggccgccttcgtgccggccatgcgccgcctcacgggcgtccccacggggatcacgccgctccagcgcatcggcgtcggcctcttcgccgtcaccttctccatggtcgccgccgcgctcgtcgaggcccggcgccgccacgccgctgccacgga

SEQ ID NO: 35642 - DNA, 823 bp, Zea mays
  Clone ID: UC-ZMROB73075G11_FLI
aacggccaaaggcatagcgtacctgcacgaaggcctggaaccgaaggtggtgcaccgcgacatcaagtcgagcaacatcctgctggacaagaagtggagccccagggtgtcggacttcggcatggccaaggtgctggggtccgggtccagctacgtgacgacccgcgtgatgggcacgttcgggtacgtggcccccgagtacgcgtccacgggcatgctgaacgagagcagcgacatctacagcttcggcgtgctgctcatggagctcatctccgggcgcagccccgtggactacaaccgccccgccggcgaggtcaacctggtggagtggttcaggggcatggtgggcagccggcgcgtggaggacctggtggacccgcgcatcgccgcgccgccgccgccgcgggtgctcaaccgggtgctgctcgtctgcctccgctgcatcgacgccgacgcgcacaagcggcccaagatggggcagatcgtgcacatgctcgagggcgacgagttccccttccgcacggagcaccgctcgccgagggcgtctcaccggacgtcgatggccacgcggccgtcgcttctgtcggagaacgtaggtgccactgacgactcagacaagtccatgtggagatgaaggatctaaccctgcacgaacacacctggcgcggcatgcgaggagccggagctggggcttgggggatggactgacttttctcaactggtgtaattttttgttgttgatccacggcgggatgagcgttctaatttgctatgctgctcgtttggtttgatggtgtttaccgtaatgtatgatttggcacag

SEQ ID NO: 35643 - DNA, 659 bp, Zea mays
  Clone ID: UC-ZMROB73075H04_FLI
taccttggttgagcctgctcggaagcagctgaatcgcaagaggaggagctgcatggaagacggctgttcgtacatgggcacatacagagagctctgcaagcatgtccaaaagaagcaccctactgcaaacccacgagctgtggaccccttgcatgcttacagatggaagcggcttctatttcgaagttcattgcatgatatgatttgttcaactacttcagaggctatgcgaaggttttgttctcacatgctgcagattgaagaggttgtggctgctttgcgagagggtggtgatcatcgtggcgctaccaatgacgatcaactgatccatgatctcttgacctctcgctgaaatgtgagaacctgtgttgatcctgcaggcaatctttgcatgaatccccaacttggcacccctgccgattcacattttctgacccgacaaagcaaactagtcttcatctgtcctcaatgaaacagactgttaaagctttgatggatttattcattcacagtgataatggctggttgaatggcacggggctttttttcgtactcatctagcctctagtgtgtcatgcgatgcactgttcctgtgcaccctcccactgtatgactatgacataactgtttcttatggaacgcaatgtgttcctgttcat

SEQ ID NO: 35644 - DNA, 940 bp, Zea mays
  Clone ID: UC-ZMROB73076A08_FLI
gttcctatgtatttacagaagaatttatttacaaatattttgaatgaggaagagttttggacacacacagatagagcgattataaaagcgtatgaaaaaacagaccaagctattctgtcacatactccagatctgggacaaggtggctccactgctgtaaccgccattcttgtgaacggcaggaagttatgggtagctaatgttggcgattcaagagctgttcttttgaaaggtggtgagcccatacagatgtcgatagaccatgatccgaatgttgagcggagtgtaatcgaaaataggggtggttttgtttcaaatatgccaggagatgttccccgagtatgtggtcagttggctgtctccagagcttttggagacaggaatctaaaatcactattgagatcagagcctgatataaaaatcgaagacatagatcacactgccgagctacttgttcttgcgagtgacggtctttggaaggtgatgaacaatcaagaggttgtcgatttggccaaaaggtacaaggatccctatgctgctgccaagcaattaaccgtcgaagcacaaaaaagagatagtaaggatgatatatcatgcatcgttgttcggttcaaggcgtaagtcggtctcgaaggattttcatcgagagcaaaaaaacaagtgaattaggctgcctgacgatggtagtgataatctgatggttgaataatgactggggtgttggatgtaaatgatttgtctgctccaatgtaaagttcatatataagtatgctaggattatttggtttggcgatttcaaaggtacaggtgcgagggcccgagagctactaaatagctaccatctgtaaataatggttatattggatgttgaatttgtaagagtagactgagcaaaagacatctggatagttcctaaaagaacaaggtactctttatgttc

SEQ ID NO: 35645 - DNA, 1127 bp, Zea mays
  Clone ID: UC-ZMROB73076B04_FLI
cggtggtcgcgttcctggagagcacggccggcggggtctcgtacacgggggacggctggctgcacgagtgcgccaagtgggacgccgagggcggccggttcctggcgtccaccttcttcggcggcggcgtggcggaggtgcgcgccggcgagggcgaggagcgggtggtcgtggcggaccccgacgcggccggccgggtcgcgctggggctcgcggtcgacgcgcccaggcgccgcctgctcctggtgtactgcgatcgcccaccgcgcttcggatacgccgcgctcgccgcctacgacctcggatcgtggcgccgcctcttcctcacacgcctcgacgtgccaggcgagtcaacgttccccgacgacgtcgccgccgacgaggaaggcaacgcctacgtgaccgacgccagtggaaacaagatctggaaggtcagcccgagcggcgtgctgctgggcgtcatcaagaactccacgttcgtgcagcgaccagggctgcggcacaacctcgtcggcctcaacggcatcgtgtaccacccgaacggctacctcctcgtcgtccacaccttcggcggcgacctcttcaaggtcgacccgaagacggaggccgtgcacgccgtcaaggtgcaggggtcgctgggccgaggggacgggatggagctgctctccccgacgaggctggtcgtcgccggcacgccgagtagccggctggtggagagctccgacgactgggagaccgcgcgcgtcaccgggcagtacgtcgggccggtccaccgggtcgggtcgtcggcgacggtgaaggacggggacgtgtacatcaaccacattgtcgggtttgggctcggcaagaagaagacgcatgtccttgcgagggcggtgttctcgccgttggccgcagagagttgacggcggccggccggaccctccgtcgcgggatcaccaatcgctttttgcttaaacggcagttcatagttccactcaactccatgagagttacaggctatatatacgtatttcggtgtgattctgtgatatatagatgcttatgcttttgtattgacacgttgctcgaagctgcacgcttcttctgtttgatgcaagcaaaacatgtactacatggtttcgatc

SEQ ID NO: 35646 - DNA, 982 bp, Zea mays
  Clone ID: UC-ZMROB73076C03_FLI
cgcagcgcaggcgtcgtcgtcgtcctccgcggatcccgcgcgcctcctccgccgatagtccttgtggcgaacacgcgaaggcaaagcaacaccgcaaatctctccccctccctggattggattgattgagctgctcgcgtccacctccgctcgaattgccattcccccctctctcttggtttctcttggatcgaattgttagtttattagagtgaagttgtcgggggagggaggctaggcgttaggtgggcgcctgcgtgctacgcctcgggagaaggtcaaaagaaaccgccccaccaccaacccaggcgactccccctcaacccaacccaacccaacctgccattgctcttctttccctccccgtcgccagctggccagagccgccccgcccggagcccaaaggcgccgcctttcctgaaccccgtccgcggcagattgatcgattggttgttcggttccttggtcgggaatcagaggaggcagcaagagaagagatgtgcccgctgcgggtgatcctcatcttcctctccgccaccgttgccggcttcttcctcatcaggggcctcaacgctgagcccgaccagttcgacgccgacgccgacgactcgggatcccccagggcacccctgccccttcattccaaggttggatcggccgtgaaagcagggttctggacgatggtggacatggcgagcgggcggtacctctggcgcaccctcgctgcccaagcccagccttccaagtcggcgcggtgaaagtgaaagtgaaaccatctcgtcctgccgatgcagtggagactggtacagtcagtcatgttgttgtaatgctgttacgtattggtatatattcaagtaaatttgcaaaaacaaaaactattcttgtgctgagctgagccttgtgttgtgtgtaaagctggaagtggttgctgtcctgcaagtgtatactttggccatgagatttgggtccaagtttcgtcggt

SEQ ID NO: 35647 - DNA, 1232 bp, Zea mays
  Clone ID: UC-ZMROB73076D07_FLI
gctcagtccctctctctcgctctcggcgacgactgggcgaccgccgccgccgctgcgccgcccttgtccaggtgcccaggtcttcgcaggcgccttcgccaggtcttcgacggtaacgagcaccaaccggattcagggaatataagtaaaatgaggccagttttttgtgggaaccttgactatgatgttcgcatctcagaggttgagcgcctttttgggaagtatggaagggtggaacgagtggatctaaagacagggtttgcatttgtctacatggaagatgaacgcgatgctgaagatgctatcagtagacttgatggaattgattttggcagaaaaggaaggaggatcagggttgagtggacaaaggaggatcgcactgttggccgaaaaagcagctcaaggaggtctccaaccaatacaaaaccgaccaaaaccttgtttgtgatcaactttgacccgatcaacacaagaatccgagatctggagaggcacttcgataaatatggcagggtcgcaaatgtaagaatcaaaaagaactttgcctttatccagtttgagatacaggaggatgctacaagagcattggagggtactaatggaagccatttcatggacagggtgatctctgttgagtatgcacttcgtgatgacgatgaaaaaggtgaaagagggaacgggtacagcccagacaggagaggtcgtgaaagatccccaggtagaaggcgttctcctagtccctacggtagaggacgggagagaggtagcccagattacgggagaagcaaggagagggggagcccagactatggcaggggaggacgcagccctgataatggcaggggagtaagcccagctggtggtggcagaggcgatcatgccaggggtggagggcgcagtcctgactatgatcgccagcgccgggaagctagtcctccaggttatgacaggtcccccagccgctcacctgggagggaggcgagagagtagaagcagcgttccattccatgcctgtgttcaagcatcagatgaatgtgcaagttggtaatgttagccagcaggaaacttgtctactatgcgcgttagctcgtgtttgactttccacccatttcagtatgaagcgacctcagaatgtaactcatgtagtagtattttttcaatggtagctttcagcactggtttgaacctgttgttggctttattttctgagtaaaatgcaccactcgaacttt

SEQ ID NO: 35648 - DNA, 1470 bp, Zea mays
  Clone ID: UC-ZMROB73076E12_FLI
cgcctgagacgagacgagttaccatctcatcccaactccggaacgaacaagttaccatctcatcccaactccgcctcgaccggatctcgtcggactcggatccgcccgaccaccccgcgccgccgcagatcaaagaagatggcagctgtcgacacattcctcttcacctcggagtctgtgaacgagggacaccctgacaagctctgtgaccaggtctcagatgccgttcttgacgcttgccttgctgaggaccctgacagcaaggttgcttgtgagacctgcaccaagaccaacatggtcatggtctttggtgagatcaccaccaaggccaatgttgactacgagaagattgtcagggagacctgccgcaacattggttttgtgtcaaacgatgttgggcttgacgccgaccactgcaaggtgctcgtgaacattgagcagcagtcccctgatattgctcagggtgtgcatggccacttcaccaagcgccccgaggagattggagctggtgaccagggacacatgttcgggtatgcgaccgatgagacccctgagttgatgcccctcagccatgtccttgccaccaagctaggtgctcgtctcaccgaggtccgcaagaacggaacctgcccctggctcaggcctgatgggaagacccaggtgacagtcgagtaccgcaatgagggtggtgccatggtccccatccgtgtccacaccgtcctcatctccacccagcacgacgagacagtgaccaatgatgagatcgctgctgacctgaaggagcatgtcatcaagcctgtcatccctgagcagtaccttgacgagaagaccatcttccaccttaacccatctggccgctttgtcattggtggacctcacggcgatgctggcctcactggccgcaagatcatcattgacacctacggtggctggggagcccatggtggtggcgctttctccggcaaggacccaaccaaggttgaccgcagcggagcctatgtcgcaaggcaggctgccaagagcatcgtcgccagcggccttgctcgccgcgccatcgtccaggtgtcttacgccatcggcgtgcccgagcctctctccgtgttcgtcgacacgtacggcaccggcgcgatccccgacaaggagatcctcaagattgtcaaggagaacttcgatttcaggcctggcatgatcatcatcaaccttgacctcaagaaaggcggcaacgggcgctacctcaagacggcggcctacggccactttggaagggacgaccctgacttcacctgggaggtggtgaagccactcaagtcggagaaaccttctgcctaaggcggcctttttttcagtaagaagcttttggtggtctgctgtgcttaatcatgcttttatatggcttctacatgttgtggttctttcttgatctgcaccgcgcttatcgtttgtgttgtactgccctaataagtggtgctt

SEQ ID NO: 35649 - DNA, 1801 bp, Zea mays
  Clone ID: UC-ZMROB73076F11_FLI
ctccatcgagttggtctttggtcgtgcttcgtgctgacgcttcgcgcgggtccgaggtcaggcggcagcagcacggagtagcaccagggcgaccgcccaggttatcgtcggccgccggcggcgacctgtaccccggcgagaagatgcatctgagcgcgaacgaggggatcgagggtctgcgattcgcggtgacgggcgggcagggcttcgtcggagctgccctcagcctcgagctgctccgccgcggtgcccgcgaggtccggtccctcgatctccgcgcctcctcctcctggtcccagcagctcctcgacgccggcgtccgaattatccaaggggacataagaaagaaggatgatgtgcgaagggctttccgtggagtggactgtgttttccaccttgcttcttatggcatgtcagggaaggagatggtgcagactgggagatctgacgaggttaatataaatgggacctgcaatgtactggacgcttgccatgagcaaggtgtcagaaggcttgtgtatgtaagcacatacaatgtggtatttggaggaaagccgattgtcaacggaaatgaggcgttgccttattttccaattgaagaccatgttgatgcttatgggcgcagcaaatcagtttctgaacagctggtactgaagagtaacgggcggccagctaagagtgataaaagtactcgtctttatacatgtgcaattcgccctgctgctatatatggaccaggtgaagagcgtcattttccaagaatcctgtcccttgcaaagttgggattagctttcttcaaaattggggacccaggtgtcaagacagattgggtttatatagataatctagttcttgctctgatattggcaagcatgggacttttagatgacattcctgacaggaagggaactcctgtagcagctggtcaggcgtatttcatatgcgatggatcaccatgcaatacttttgaatttatcatcaagcccctttttcaaagtttgggttattccgttcctcaagtggtgctggatacctccgttgcccttgccgtttcaagaatatttttattcatatctacactgttctacccatggcttgatagtaaatggatgccccagcctctaattctccccgctgaagtttacaaggttggtgtcacacactacttttcgttcttgaaagctagggaggagctcggctacgtgcccatggtgaggccccacgaaggcttagccgcaacgatctcgtactggcaagaacggaagagaagggagctggatggtccgaccatattcacttggctggccgtaacgatcgggatgctggccgtgttttctgccgcctgcctcccgcccgtcggcccgttgaaatgggtgctcgacgtccacctgtttgttttccgctcgatgctcgtgatccggctggtcttggcggtagcgatcgcactgcatgctggcgaagccgtgtacgcctggttcttggcgagaagggttgacccgaggaacgctgccgggtggttctggcagaccttcgctctggggtacttctccctccggtaccttctcaagagaggcagagcgtgaattcgtgtgtgattcacatgtacgtacactgcggatcctgtaacagtggttccaacttccaagcttcatgcttggtttttattgaggaggaggcgtcaggcgtatgagcatccccagatcgtatccctcctgacatgcaactgagaggcctgtggtcggatgtactttgtggtgatgctgtgaactggtgaaagtttaacaggtcgctttcttggatg

SEQ ID NO: 35650 - DNA, 997 bp, Zea mays
  Clone ID: UC-ZMROB73076G11_FLI
gccattgcatccatttccgggggacggagtggaggaggagggcgtcgcctgcgttgcttcgcgtgggaagcgtagcgtgcttcgtttaggcctctcgccaatatccgagggttaatctagagaggcctttggctttgccagacgcgcctgtacgcgcctttctgggaggcagccgcttgctctcgcctccaatggccgagatctgctgcgaagaagccaagtccacgccggcgaccgccgtggctgcggcttcagtctccgccacggccgctgcggccgccgccgtggcagtggcctcctcggcgttagagaggaggcgacgcaggttggagatgaggaggttccgcgtcgcgggcgatcccgaggcgccggtcgcggaggacgtccgcgccgccaagcggcagaggctggcgcgcacgctgtccagcacctgccccgacgcgggctcaggctcgggctcggactccgacaggcctgccctaccggagcggttgcccaggtacggggtcacctccgtctgcggccgacgccgcgagatggaggacacggtctccgttaggccggactttgtgcccggcaccagcaaacagcacttcttcggcgtcttcgacggccacggctgctcccaccaaccatgtgccagaacatgatgcacgaggtggtcgcggacgagcacaggaaggcagattgttctggcgaagagacggcgtggaaggccgtgatggagaggagcttcgcgcgactggacgagcaggccgccagctgggcgaccagccgcagccgcgacgagccctcctgcaggtgcgagcagcagaagcccttgcgttgcgatcacgtggggtccaccgccgtggtcgccgtcgtcagccccacccacgttgtcgtcgccaacgccggcgactcccgcgccgtcctatcccgcgccggcgtccccgttccgctgtccgtcgaccacaagcctgaccggcctgacgagctggcgcgcatcaaggcggcg

SEQ ID NO: 35651 - DNA, 1819 bp, Zea mays
  Clone ID: UC-ZMROB73076H11_FLI
gcaaacagtctcccgtgccacctcagcccgctgcctgcgaggctgcgaccttctcccttcactcccctcgccgacggagcaaacggcgatcggaagtcgagcgccgtcacctgagggacagatggcggcggcggaggggcaggtgaggcgggacatgtgggggcaggagtatcggacgtcatccgccgactgcgcggcggcgctcgacgcctactacgccgccttcatgtccttcggccgcggccgcgtggcggccgtcctccgcgccgccgcggccgacccgacctgcgccctcgccgccgcgcacgccgcgcaatcagtcgcccccagggaccccgcgggggccgccgccttcctcaacgccgccgcggacaacctcgggaaagcaacggagtacgagagggccgttttcgggacgctctccgtgctggtgggcgagaagagggacgaggaggtggcgatcgagcggcacttcgagcttctcgagcaattccccagggatctcctgtctctcaagagagcgcagctcatctgtttctatatgggaaagccagatttgtccctgaaattcgttcaacaagttttgccgaagaatcaagatcagaatttcatatatggcatgcttgccttccctttgcttgagcttggacggatggatgaagctgagagagctgctcgaagaggcttggctataaacaagaatgacttctggtcacagcataatttgtgccatgtttttcagcaggaatgtcgtttcagagaagctactgagttcatggaatcatgttctccgtcatgggaggcatgcacatcatttctgttaactcacaactggtggcatgtagctgtttgttacttagaagctgagtcccctttgtgtaaagttctggagatatatgatcacaacatcatgaaggaacttgagaaaagtgattgtgagacagcagaggtgtatttgaatggtctagggttgctgctgcgattattcatacgcggtcatatagattcagctaaagagaggttaacgacattgctagatgcactaaagaatgagtctatatggcatgtggaatggctccttgacttgcttatattgtgggcactatcaagtatgggtgagctaaaaagtgcacataatatgttggaatcattgaagtcaagggtacgtttaatggacaggaatcggcagcaagcgatgcagaaggcaatcaagctggcggaggctgcttatgaatatgggaaaggagatcacatgaaagtctatgacactctgggtccagactttgatgcgcttggttataaagtaggatctggaacctttttattactttaggataagtaattataaaatatgtttgtgtttgctaaagataaacaaatggtacaattagatgattggtgcatcagatgaacaagtggatgtcttcaatgaagtttggtacactgttctaataaatgctggagagacttccaaagcaattgagattcttggcaaacaaattaggaaacgagagggtgcacctttcttgtggcgcttgctggagaaatcatactcattggctggcagaagcgcagatgcttcagtagcatctaaaaaggcaaatgctctacaatcctcttacttccattagctcatatcttgttgaataatgaataaccttgtttctggaaggtcttgtaactttttttttactgatggaagttaccagtatgcaccataggaagtctacagtcagtatatataccgcataatcaacagttcagaatactggaacatgtgcagtgtatcaatatgtgcgtacatggaagttttatgttc

SEQ ID NO: 35652 - DNA, 1049 bp, Zea mays
  Clone ID: UC-ZMROB73077A01_FLI
ggcgaccaagtgactccaacgtggtacgccatgtcggcatctggttcgaaaaaaactagttttagatggttttgaatggactaccaagtcgttttttctggtttagagttcagacttcagagacgtaagtgacaccatatacaaagttcgaggaccgcacacagaaatatttgagctttaatttgtatatgggttgcaaattaagcctagctttggttatgtgatcattggagccacgtcatcagctggactaaccaagctaactaagcctcttttttcgcgcaggacctaatcatcgcaggcacggatagtaatgcaaacacgctggagtgggctgtctcggagctcctcaagaaccctaagatcttagccaaggccatggaggagctgaaccatgtcatagggccggaccgactggtgacggaaagcgacctccctcgcctcccctacatcgaggctgtgctcaaggagaccatgcgcgtgcaccctgccgcgccgatgctggcaccccacgtggcccgcgaggacacatccgtggacggatacgacgtgctcgctggcacggtcttgttcatcaacgtgtgggcaatcggccgcgaccctggactgtgggacgcgccggaggagttccggccggagcggttcgtcgagagcaagatcgacgtgaggggccatgacttccagctgctgccgttcggctctggccggcgaatgtgccccgggatcaacctcgcgctaaaggtgatggctttgagtcttgccaatctgctacacggcttcgagtggaggcttccggacggcgtgacggcagaggagctgagcatggatgaggccttcaagctcgcggtaccgcgtaaattcccgctcatggtcgtggccgagcccaggttgccagctcgcctgtatactggcgcttgatgcccgtacgtgtcttcggttgttggcatgcgtggagtatagcacatgattttcagctcttggaactttgttttaataaaacacaaatatatgtgttatgttggttagatgaatgtgaatataaagttgac

SEQ ID NO: 35653 - DNA, 847 bp, Zea mays
  Clone ID: UC-ZMROB73077A03_FLI
cagcagcccatccccccagtctgcggtctccccctcccctgcctcctcgtctcctcggtctcccctccctgtcttccagagacacagagcagggcgctcttcggtcggaggagaagcgcgaccacgaccatgggctttatctcgttcgtcggccgggttctcttcgcctccctcttcctcctctcggcctaccaagagttcattgaatttggaaatgacggtggacctgcagcgaagaccttgaagccaaagttcaatttgttcgtcaagctagtgtccaagaatactggattgggggtgccgcatattgatataaaaactgtcattgcagctaccatgtttcttaaaggctttggtggtcttctgttcatagtcagcagctcatttggagcattcctcctgctcatttacttggcgtttataacccctattgtgtatgacttctacaaccatgaaatggagtcaacactgtttgtcgatctttttttcaagttcatacagaacttggcgtttatgggtgccctgcttttcttccttgggatgaagaactcaattccaaaacgtcgctccaagggaaggacaacaaaaaccaagacaaactgatgtcagtggttgtaggaggggaagcaattgggctcattatgtttgcatactatacaggaatagatgtcccacttttgttcttggtgcgccaattgaattgtgaattgggacttacagaacttagcatgtaggatatttaagttatcttgcgcaattttattttcttatgttgcgatgtgttcttatgtcacatttcattttgctacaagaactgctttgacagtaaaaaaatattaagtcgcat

SEQ ID NO: 35654 - DNA, 2069 bp, Zea mays
  Clone ID: UC-ZMROB73077A05_FLI
tgtcgtgtcggaccccaccacaaccctcttctccgtttcgtttcccgaccaggcctcgccggctcaccgcccccgccgcgcccgccatggacttctcggaacaggacgtcgacgtcttcggcgaggactacgacgtccacgacggcggcgccgaggccgaggccgaggccgacggcggcggggactcgtcgggctcctcctccccatcatcgtcctcgtcgtcctctgccgccgcgtcctcctcatcctcaagtggcggctcaagcctcagcagcagcggcggcgctgccggtgagggcgaggatggcgccgatgcgggggacggggaggaatacgattcgtccaacctcatagccacaaggagcgccggcgccgccggctatctggacgatgagaggagggaatatgagaaccaggaggtagaggaggagagagatttgttcggctcagataacgaagagtacgtcagaactccggcgcgcagccactacctagtcccagtgcttcctccaattcggaacactaataatcattctcgaggaggctttggaggacgaggtggtagaggcccaccacttcttccaaggccaggaggccatccagggcgacataactttggttacgggagattcgggaatgggcgtcatgttgaaggtttagtttcagatatgaagcttaataagagcgaagaaacattgtctagaaaagctgttacttttcaggagccttgtgagattgcatgcttaagccgtgttgagggtggagaggtgtattttgatgatcgcagcttgaggctcttcaaacgtgaaatctgtgaataccgcggtgcagatctcaataaaggattcgagtcatatatagagaagagagatttgggttctgaaggatttggcgatctactcgcatgcatacgaaattccaacatacttcttcagaatactatacattttgtgacataccgcaacaatcttaataagatattggccactgcttacctaagagaaccatggaagatgggcgttcataaaagaaggggtgttgtatatcttgatgttcataagctccctgaaagaccaaaaagtgaagttgagcgtaagagatgttattggggctattcttttgaaaaccttgccactgagaactcattcagcgacgatggaaggggtatcgatgcaaatgtagagttttgttctgtaataaagacaaaattgggtgcccatcggattgtcatgggtgctgagatggactgctgtgatgcaactgatgatggcaggaggttctatgtggagctgaaaacaagcagagagctggaataccatacagtggaagcatatgaaaaagaaaagctacttagattttggattcaatcgtttcttgccggtgttccttatgttgttgtgggattcaggaatgatgctggcatacttgtacggacggaaagactaagaaccaaagatattacacaaaaggtgaaggcaaagaactactggcagggtggcgtttgccttgcctttgccgatgaagtcttatgttggttgtatgggactgtcaaagagaatgaagactatgttcttcaatttgtacatccatttaaccgcctcgaacttctgcgtgcccagtccccctgtccggaagccataacgttgcatgtgcagcagctctcaggtgcagcggactagattctagcagtgacctcggcggggactacttgccttggagaaaaacccaattctagcagcagcactgaacaatggttgatctggcaacttactcaaccccaattaccaagcagatgtgctaatgcatcaaagaactgatgagatcgatcactggtctagctacatccatggtttacactcttgaatggccaaagagattttgaatccatcaaacatgtatttccattgtaacattattacataataaacaatacagacagagctactagtgctgtgctactgtaacattattgcatcaaatcctgtaaacttcagcaagggatggatgtttttaaacatccgaattgtcagcctttataagtcataatatgtaagcagaactttttcgtt

SEQ ID NO: 35655 - DNA, 2492 bp, Zea mays
  Clone ID: UC-ZMROB73077B03_FLI
gatggtctgcgtgccggcgacggcgcgggcgccgcgggagatggcggcggagctggccgccgccgccgcgctcggcgctgacgtggcggagcttcgcctcgactgcctcgccgggttcgcgccgcgcagggacctgcccgtcatcctcgccaagccccgcccgctccccgccctcgtcacctacaggcccaagtgggaaggaggcgaatacgaaggcgatgacgaatcacggtttgaggctctgctattggcaatggagctgggagctgaatatgtggatgtcgagcttaaggtggctgacaaatttatgaaacttatttctgggaggaaacctgataactgtaaacttatagtttcatcccacaactatgagaccactccatcgtccgaggaacttgcaaatttggtggctcagattcaagcaacgggggctgatatcgtgaaaatagctacaaccgctactgaaattgttgatgtggcaaaaatgtttcaaatacttgttcactgccagcgggctgtcactgcccactctgcgacgatccagccggagggaggcgcgcaagacgtaacccgggagcgggcggcgtacaacgagggaatttttttaaccaagccagaaatttgcccccgactgggatcgaatctaggacctgaaagtgctactcagaagccttaaccattatgctagaggtcctttcgcaagaaaagcaggtgccaatcattgggctggtgatgaacgacagaggttttatttctcgggttctttgcccaaaatatggtggattccttacttttgggtcactcaagaaaggaaaagagtctgcacctgcacagccaactgctgcagacttgataaatctgtacaatattaggcagatagggccagacactaaggtctttggtataattggtaaaccagttggccatagcaaaagcccaattttgcataatgaagctttcagatctgtgggtttcaacgctgtgtatgtgccatttttggtggatgacttggctaaatttcttgatacatactcttcaccagactttgctggcttcagttgcacaattccacacaaagaagctgctgttaggtgctgtgacgaggtcgatcccgttgccagggacattggagctgttaacacaattgttagaagacctgatggaaagcttgttggctataatactgactatgttggtgctatatctgctattgaggatggaataaaagaatcagaaccaacagatccagacaaatcaccactggctggaaggctttttgttgttataggggctggtggtgcgggaaaagcactagcatatggggcaaaagagaaaggagcaagagttgtaattgcaaaccgtacctttgcacgagcacaagaacttgccaacttaattggtgggcctgcattgactcttgcggatttggaaaactaccatccagaggaagggatgattcttgcaaatacaacagccattggaatgcatccaaatgtgaatgaaactcctctatctaagcaagcactcagatcttatgctgttgtgtttgatgcggtctacacaccaaaagagaccagacttctccgagaagctgcagaatgtggagccacagttgttagtggtctggagatgtttatacgccaagctatgggccagtttgagcatttcacgggcatgccaggtactttgattggccttttcatatttcatttcattattaagcgatagtcataagtacatcttacaccatttctcacgtggctcgccgtacagctccagatagcttgatgcgtgatattgttctgacaaagacatagtgaggtttgtccaaagagcaagcttcccttccatcgtaatttctgcgcaattgattccagttgtgtcccctcctcgtccttcccgcatcttcctcaacctgtagaatccacatttttttttatctcaggtgtggacataggtttcatcttataacatgtttcttattacctaccaagattcagtttcattctctttgaagtatttgaatgttgtttattcagcaaacaatacaccatttcaacaatgtttaagagttcttactcctctcatcaaggctgcaaggattgttagatctttgatttgtgcaaacagtgtgtgacgcagtcagttttacgtggccaaagtatgcgcatccactgactaatcataatgaatggcagctacttctacttaatagttcttcccttactttcagtggacgattacaaattccgagcaattgcaagttcattggacaatcctaacaccatgaagcctcgtctgtgagagattcatccatgcccacaaacttccttgtttttcctttttagattcggattcagtgatcagtttgcctctcagccattgtaaattaatttgatgttccgagctgaaacattttggtgtgccttatttgtatcagcatgaacagcagtcatcgtgggtttgaatcagtctcttagcatttgcgttcc

SEQ ID NO: 35656 - DNA, 1742 bp, Zea mays
  Clone ID: UC-ZMROB73077C01_FLI
ccgccgcagtttccagacgctcaccaaaactggttgatcgcttccagattcgccagccggctgaccgggatcaaggagaacaccaagttccagaccaagcccgacggcgacggcgacggcgagcaggcgccgggcgggctgaagcgactggtggccgagaccaaggacgcgcacggcgtgaagcaggtgtacgtgtggcacgccatggccgggtactggggcggcgtgacgccgacggcggggacggcgatggagcgctacgagccggcgctggcgtaccccgtgcagtccccgggcgtgacgggcaaccagccggacatcgtcatggactcgctgtccgtcctggggctgggcctggtgcacccgcgccgggtgcgggacttctacggcgagctccacgcgtacctcgcctcctgcggcgtcgacggcgtcaaggtggacgtgcagaacatcatcgagacgctgggcgccggccacggcggccgcgtcgccatcacccgcgcctaccaccgcgcgctcgaggcctccgtggcgcgcagcttcccggacaacggctgcatctcctgcatgtgccacaactccgacatgctctacagcgccaggcagactgccgtcgtgcgcgcctccgacgacttctacccgcgcgacccggcatcgcacaccgtccacgtcgcctccgtcgcgtacaacaccgtcttcctcggcgagttcatgcagcccgattgggacatgttccatagcttgcatccggcggcggagtaccacggcgcggcgagggccatcggtggctgcccgatatacgtcagcgacaagccggggaaccacaacttcgagctgctcaggaagctcgtgctccccgacggcaccgtgctacgcgcgcagcttcccggccggcccacacgggactgcctcttctccgacccggcgcgcgacggcgcgagtttgctcaagatttggaacctgaacaagtgcggtggcgtggtgggtgtgttcaactgccagggagccgggtggtgccgcgtgaccaagcggacgcgcgtgcacgacgcgtcgccgggcacgctgaccggcaccgtgcgtgccgacgacgtcgacgccatagcgcgcgtcgctggtgacggcggcgggtgggacggcgagaccgtggtgtatgcgcaccgcacgcgggagctagtgcgactgccccggggcgtcgcgctgcctgtgacgctaggcccgctccagtatgaggtgttccatgtgtgcccgctccgcgccgtcgtgccggggttctcgttcgcgcccgtcgggctgctcgatatgttcaacgctgggggcgccgttgaggagtgcgacgtgatcagcaatgtcggcggcaaggccatggctctcagggttcgcgggtgcggtcggttcggcgcttactgctcgcgggagccggcgaggtgtctattggactcggcggaagtggagttcagctacgatgccgacaccggcctcgtgtccgtcgacctgcccgtgccggagcaggagctatatcggtggacgctggagattatggtctaggccgtgacgctgtgcgctgacgccattctgagccggacgacattgtcatttgctatgtgcacgagagatagatgtattgtggtgttgttgtataattggtatggagagagtatgcttttgttatgtctgtatctgcataccctgcgtgctttgaatgttatataatacttgatagataataaaggatggtgttcctg

SEQ ID NO: 35657 - DNA, 1474 bp, Zea mays
  Clone ID: UC-ZMROB73077C05_FLI
cgcgccgcgggccggtacgctgctggtgctggaccgctcgactctcgcctaccagctgctgctttggctggcgcgccggcgagagagagagagagagagggacgcgacggcgatggaccgggcggcgctcaccgtgggcccggggatggacatgcccataatgcacgacggcgaccgctacgagcttgtccgcgacatcggctccggcaacttcggcgtcgcgcgcctcatgcgcaaccgcgccgacggccagctcgtcgccgtcaagtacatcgaccgaggcgagaagattgacgagaacgtgcagcgggagatcatcaaccaccgctcgctgcgccaccccaacatcatccgcttcaaggaggtcatcctcaccccgacgcacctggccatcgtcatggagtacgcctccggcggcgagctcttcgagcgcatctgcaacgccggcagattcagcgaggacgaggcgcgtttctttttccaacaactcatatcaggggtcagctactgccattccatgcaagtatgccatcgtgacttgaagctagagaacaccctgttggacggcagcaccgcgcctcgcgtcaagatatgtgatttcggctactcaaagtcatcagttctacactctcagcccaaatctaccgtgggaactccagcatacattgctcctgaggttcttctgaagaaggaatacgatgggaaggttgccgacgtgtggtcgtgtggggtaaccctctacgtgatgctggtcggcgcgtatccattcgaggacccagacgagcctaagaatttcaggaagacgatccagagaatactgggcgtgcagtactcggttccagactacgtccacatatctccggaatgccaggacctaatctccaggatcttcgtcgccaacccgtccaccaggatcaccatgcccgagatacggagccacccttggttcctgaagaacctcccggccgacctggtggacgacagcgcgacgacgacgagcaagcagtacgaggagcccgagcagccgatgcagggcatggacgagatcatgcagatcctgggcgaggccaccattccggcggcggggtcccgcgggctcaaccagttcctgaacgacggcctggacctcgacgacgacatggaggacctggactcggacgccgacctcgacctggagagcagcggggagatcgtgtacgctatgtgacggcgccgagtgctcagcgacgaggcaatgtctcgttgcgctcgcaggttgccgagataactagagagacggagagggtgggtgtgtgctgctgctgcctgcagcctgcgtgtagttgtgtgctttcaggtctctgctgctcatgcctgatgccgtcgttcgtgatggcccctttttaccgtcctgttgtgtttggccgttgttatttggtgcgccttcagtgcagtgttttgcaacggtttagccatttggaatcgctactgctac

SEQ ID NO: 35658 - DNA, 1101 bp, Zea mays
  Clone ID: UC-ZMROB73077D04_FLI
gggacttctcgatgagcaacttcgtcggcgagggcgggttcgggcccgtgtacaagggccgcgtcgacgagcgggtcaggcccggcttgcggcagccgcaggccgtcgccgtcaagctgctcgacctcgagggctcccagggccacaaggagtggctggctgaggtcattttccttgggcagctgaggcatccgcaccttgtcaagctcatcggctactgctaccaggacgagcacaggcttctcgtgtacgagttcatggccaggggcagcttggagaagcatctcttcaaaaggcactctgcttcccttccgtggtcaacgcgaatgaggatcgccattggagccgccaaaggtttggctttcctccacgacgctgccaaacccgtcatctaccgcgacttcaagacgtccaacatcctgctggactcggactacacggcgaagctgtcggatttcgggctagcgaaggctggacctggagaagacgagacccacgtgtcgacccgagtcatgggcacgcagggctacgccgcacccgagtacatcatgacagggcatctaacgaccaagagcgacgtgtacagcttcggcgtcgtgctcctggagctgctaacggggcggaaggcgttggacaagaaccggccgccgcgagagcagagcctggtggaatgggcgcggccatgcctgcgcgacgctcgccggctggagcgcgtcatggaccggaggctgccgcgccccaccacgcccacccgagcagcccaaaaggccgccgggatagcccaccagtgcctcagtgtcagccccaaatcccggccccaaatgtcccacgttgtacaggccctggagtcgctgcttgctctagacgatgccgccgtggagccgtttgtgtacacggcgccgccggagagcagatgacctgtgtcatcttgtgtaaaaagcaagcgccggtgagtcaacaatccgaaggtgttttgcccacagtagtccactatatatatattttctattgtaaaaaacattagttcacgcgtgagacgcgtacctctgtttttctcgcccctgggaaacttggtggctgcctctatatttacactgatct

SEQ ID NO: 35659 - DNA, 1976 bp, Zea mays
  Clone ID: UC-ZMROB73077D07_FLI
cttttctactcgacccataatactgatagagtcagattaaatcatcttatcgatgtatcctttgaatttgttaattattatcatggcagtgttcgagattgcctgtgctgtgaacacttgaatgtagctaacattagttttgtccttgagtgtatcttggcaagcatttttattttttcagatgtttttaaaatattaaaatgatgtattttttgttgtaatgatggtccatcgattgagtgacaatatttatatgtttaagaaaaagaaagtgaaagagcctctagctaagttggttaggtggtctgagtagcactccctaggtcctgactttgaatcctagtgggagcgaagtttaggcagaggttaaaaaaaaggttactcgatggttcccctggttgtgtgcacacgagatggactggcctatggagggaggatcctcgtgtaggggctgggagggctcaaagcacgattgtacgagtaaagatctggtctataggggcggtctttcccctatcggtcgagttgttttattagagtttgtgcccatgtaatgcacacacatatatctgtaggtgatatttttctattcccatgggccgaattttttttgtttatgtgtaagtaatattttattggttgtaaaggtctaactattagtatttttggtgtctctttgcaggaatcatggttctgaagtcgcacacaaatctgctagatatgtgttgtgaagatgtgtttgacttccaacaacctttaagatctcctcgtcatgtggtgaactctcctggcatcatatctgaccctgattgggaaagtagtaatgatggcaactcagttggttctatgcctttttgttttaagagaaagattattgttgcaaatttccttcctgtgatctgtgcaaaaaatgaagctaccggagaatggtcctttgccatggatgataatcaactgcttgttcaactcaaagatggttttccaattggtaatgaagttatttatgtgggtagtttgaatgttcaagttgatcctattgagcaagatcgagtttctcagaagctcttcaaggaacacagatgcgtacctacctttctcccagctgaactccagcatcaattctatcacatattctgcaaacagcacttatggccacttttccattatatgcttcctgtttgtcatgacaaagatgagctctttgaccgttccctttttcaagcctacgtgcgggccaacaaaatttttgctgacaaaattgtggaggcagtcaattcggatgatgattgtgtgtgggttcatgattatcacctcatgcttatcccaacccttttaagaaagaaactgcaccggatcaaagttggtttcttcctccacagcccatttccctcgtctgagatctataggacactgccagtgcgggatgaaattctaaaatcacttcttaatgctgacctcattggctttcaaacttttgactatgcccgccacttcctttcatgttgcagcaggcttttaggccttaattatgagtccaaacgtggccacataggtatagagtacttcggccgaacagtgagcctcaagattcttgctgcaggtgtacatgttggccggcttgaggctacattgaggttgcctgctacaattaaaaaggttcaagaaattgagagtagatatagtggcaagttggtaatattaggtgtagatgacatggacatctttaaaggtatcagtctaaaactgcttggcttggagcttcttctggaaagaacacctaagcttcgaggcaaggttgtccttgtacagattgttaatcctgcaagaagcatcggaaaagacattgaggaagcgaaatatgaagctgaatctgtagctcaaaggataaatgataaatatggttctgctaattacaagcctgttgtcctcattgactactcaatacctttctatgaaaagatcgcattttatgctgc

SEQ ID NO: 35660 - DNA, 1149 bp, Zea mays
  Clone ID: UC-ZMROB73077D10_FLI
ggaagtacacttgctgtcatgaagaagtcatccaagttccttccagttattggctggtcaatgtggtttgcagagtacctctttttggaaaggagctgggccaaggatgaaaagacactaaagtggggtctccaaaggttgaaagacttccctagaccattttggctagctcttttcgtcgagggtactcgctttactccagcaaagcttctcgcagctcaggaatatgcggcctcccagggcttaccggctcctagaaatgtacttattccacgtaccaagggatttgtatctgctgtaagtattatgcgagattttgttccagccatttatgatacaactgtaatagtccctaaagattcccctcaaccaacaatgctgcggattttgaaagggcaatcatcagtgatacatgtccgcatgaaacgtcatgcaatgagtgagatgccaaaatcagatgaggatgtttcaaaatggtgtaaagacatttttgtggcaaaggatgccttactggacaagcatttggcaacaggcactttcgatgaggagattagacctattggccgtccagtgaaatcattgctggtgaccctgttctggtcgtgcctcctgctgtttggcgccatcgagttcttcaagtggacacagcttctgtcgacgtggaggggtgtggcgttcactgccgcagggatggcgcttgtgacgggtgtcatgcatgtcttcatcatgttctcccaggctgagcggtcgagctcagccagggcggcacggaaccgggtcaagaaggaatgaaaaatggagggtggagatgaggttctcgtggggtttgttatgggcaaccttcaaaaggactctccattcatattagtattaattcatatatatgcagcgccaaattccagacattgatatgctctcaaataggatgttctgctcccctcttgtatttgtatgcaggaaagggtttgtagggagtttaccccccccccccccccgcctttcttttgggcagaaagacatattctggaagcctttcagtagttcatttatcagcaacaattgcatctttcttccattgctgtgcaccttgtatcacctatcagaatgtggtcatatggggattgtacggcagcactgctgtgtgtgttg

SEQ ID NO: 35661 - DNA, 1741 bp, Zea mays
  Clone ID: UC-ZMROB73077D12_FLI
cgttccccgctctacgggcctaaacctcacctcgccggcggccaaaaatcgaagcaccgaaccagcggctgcggcggcggcggtgcggcaagtgttgaccatggcggagctaaagcggttgtcggagagccgtgacctgacgcggattgagcgcatcggcgcgcactcccacatccgggggctagggttggactcgtccatggaggcgcgcgatacctcggagggcatggtcgggcagctccacgcgcgccgcgcctcggggctcatactccagctcatccgccagggcaagatcgccggccgcgctgtgctccttgcgggccagcccggcactggcaagaccgcgctcgccatgggtatcgccaagtcgcttggtgcggagacgcccttcgcctccgtcgctgcctcggagctcttctcgctcgacctctccaagacggaggcgctgacgcaggccttccgccgcgccataggcgtccgcatcaaggaggaggccgagatcattgagggcgaggtcgtggagatctcaatcgaccgccctttgtcggcctctggcgttggcggcagctcagttgctccttctggtgcaactgccgctggtaagtcagggcggctcacgctgaagaccacggacatggagactgtgtacgagctcgggggaaagatgattgaggctcttgtgaaggagaaggtgcagagtggagatgtaattgcgcttgacatggcctccgggaaggtcaccaagcttggccgctccattgggaggtcgcgggattatgatgccgtaggtccacacaccaagtttgtcaagtgtcctgatggtgagctccagaagcgcaaggaggtcgtgcactgtgttaccttacatgagattgatgtcatcaatagcaggacacagggttttcttgcactgttcactggtgacactggtgaaattcgtgcagaggttcgggagcagattgacacaaaagttgcagagtggagagaggaaggaaaagctgatattgtccctggtgttctgttcatcgatgaagtccacatgctagacatcgagtgcttctccttcctgaaccgcgcgttggaaaacgacatggcgccgatcttagtaatcgcaacgaaccgagggatcacgtctatccgcgggacaaactaccgctcgccgcatgggatcccgccagacttccttgaccggctactgattatcacgacgcatccctacacggaggatgagatccggaagatcctggatatccggtgcgacgaggaagacgtggagatgtccgcggacgccaaggttctgctcaccaagatcggtgtggagacctctctgcggtatgccatcaaccttatcacatctgccgcgctagcctgccagaggcgcaaggggaaggtggtcgagatggaggacattagccgggtgtaccagctgttcctggacgtgaagcgatcgacgcagtacctgatggagtaccagagccagtacatgttcaacgaagtgccggggcaagcagatggagaggacgccatgcaatcgtagatgaactttcctttacatggtgtgtgtgggttatagtatgtaccgcgtggcgtatatttatgatgcgtctttcttgttcaggttgctgttaccctgacccaaggcgcggtgtgtgcggtggactgtttgttagcttgatgtaggtgactatgcaactcaatctatcttattaaattcaccccggttggaaaccgtggtttgttt

SEQ ID NO: 35662 - DNA, 1404 bp, Zea mays
  Clone ID: UC-ZMROB73077E01_FLI
gacaccgcatccgcctcgtgtgcgccgccgagcagcccaacggtgccgcctctcctggctctggctctggaggcgacgccacggcaaacccaaccaacaacggactgcccaagaacaggagggttattctcctcgaatacgtcaaaaatgtccagccagagtttatggagctcttcataaaaagagctccagcacaggttgtcgaggccatgcgccaaacagtgactaatatgatgggcactttaccaccacaatttttcgctgtaactgtctcaacggtcgctgaaaatctggctcagcttatgtacagtgtcctaatgactggatacatgtttaggaatgcacagtaccgtctggaactgcaacagagtttggagcagattgctcttcctgaaccaaaagaagaaaaggattacgctcctggaactcagaaaaaggtaaccggggaagttatccgttggaacaaggccactggacctgagaaaattgatgctgtaaaatatatagaattacttgaagcagaaatcgatgagctgagccgtcaagttgctaggaaaacatcacaaggaagtaatgagctgttggaatatctgaagagtctagagcctcagaatttgaaggaactcacgagtactgctggcgaggatgtcgtctttgccatgaatgcgttcataaagcgcctgttggcggtctctgactcagagcagatgaagacagcagtctcggaaacaagtgcaagtcagctggccaacttgctgttctggctgatgatcgttgggtacagcatgcgcaacattgaggtgcggttggacatggagcgagtgctgggtgctcccccaaaggtcgccgagctaccaccaccaccatctggaggagagaacatataatacgcagttagaagaatagagccaacaaaccaacctggaattgtagatgtagccatgtaagaatgggctctgaaagatgttgattgaatcaacgattggctggtggcattccattgccttgctttgtactaatatacagcagcactagtaccataggtgtttgacttgtcatggctgagtgaggaggcaaagatgcatatccttgaattgatactcttgtgtgcaaagaaatggcaatgcaaattggggaggaagctgttgtttgagctgaaattccagttccagtccgcccagacagacacgcagcagttccgagctcccctccgtcaagtggctgatccgcaaccacctgttggtgcataggctaaggttgagttgtctgtcttgttgattctacttgtcttccttctactccatgttggttaccaggagcgagggagggaaggaaggggaatcgataggattagggtgctgtttggttcacgtatttgtaatgtgataaataactgataatgtt

SEQ ID NO: 35663 - DNA, 517 bp, Zea mays
  Clone ID: UC-ZMROB73077E08_FLI
gtttatggaggaagtctggtactaatagtggagtcgcatcgtgttgttgtgatcatggaacttcagtttctagaatcttgaggccatgtgtctgtgatgcaaccttcctcagaagcttaacctgcacccatctcccgactttacattttcctcgaatcaccaggcgttgataattcagcagtgctgtaactgtagttcaacaatctcactgcattgaaacatgcttctgctggtattttatatgtaagtgttagtgggttgtttcaaagggagctgatttgttaggccgtggttcctccgcagacatggcatccaaaggaatgatgctctagagttacatttttgtagctgtattggatagagatgtttgtacaaaagctaactttattcttctgaccaagactggccacagacagggttgatatacctagtgggttactctaaagagccagcttctgtgtgcagtatgttggtctaatactgcaataagaccccccacactattgctgtgtttggg

SEQ ID NO: 35664 - DNA, 780 bp, Zea mays
  Clone ID: UC-ZMROB73077H09_FLI
ggcgagccgcagggctcgggcagcaaggcggacctgtacgaagccggcgtccgcgagggcgccatcggcctcctcttctgctccgtcgcgctcggcgtcacctccttcttcatccccaggctgtgccggaagctcacgtctcgggtcgtctggtccgtcagcagcctgatggtgttcgtcctcatgacggccatggtcgtcctcggcatggtctccatgaagggctacaggccctcgctcgccgcctccctctctggccccgaccactcgttcaagggcggcgccctcgccatcttcgcgctcatcggcatccctcaggccgtgctctacagcgtgccttgggccgtggcgtctgaggttgccaccgaggacggcggtggtcaaggtctcaccattggcgtcctcaacattgcaatcgtccttccacagctggtgatcgcgctgggcgcaggccccatcgacggcgccttcaacaaaggaaacaccccggccttcggcatcggcgccgccttcgcccttatctgcgcggtcctggcgctcatcctcctcccaaagacgagaggcgtctccaacgccaccgtcatggccggcgggcactgatccatctatctccaggcaggcttgtcgcagcggctgaccggctgagagtagatcagaaattcagaatctgcttcttggtttcagccccacccgattaaggaggtgtttggatcatccggagtccaggttttagatgccaattaagactataattataaagctaattgataagccatggtt

SEQ ID NO: 35665 - DNA, 1507 bp, Zea mays
  Clone ID: UC-ZMROB73077H12_FLI
tttgtgtccctgttcatcatatactcggtcctagcccatgtcgccggcattttctcttcgaccggaaacacagcctacatggagatcgtttaccatgtcctcagcatgtttgcgctcatcagcctgcacgtcttcctgtacgggtgcaacctctccatgtggaagggcaccaggatcaaccacaacttcatcttcgacttctccagcaccgccctgacgcaccgggacgccttcctcatgtcggcgtccatcatgtgcaccgtcgtcgcggcgctggtcgtcaacctgttcctcaggaacgccggggcgacctacgccaacgcgctgcccggggcacttctgctgctgtcagcaggggttctgttctgcccattcaacattttctaccgctccacgcgcttctgcttcatgcgcgtcatgcgcaacatcgtgctgtcgccattctacaaggttctgatggcggatttcttcatggctgaccagctaaccagccagatcccactgctaagacacctcgagttcacggggtgctacttcatggctgaaacattcagaactcacgcgtatggaagctgtaccagcagctcccaatacaagaacctggcatacgtgctctctttcctgccatactactggcgagcgatgcagtgtctgagaaggtacctggaagaaggccacgacatgaaccagcttgctaacgccggcaagtacgtatcagcgatggtggcagctgcggttaggttcaagtacgccgcgacgcctacgccgttctggatgtggatggtcattgcatcatctaccggcgccaccatctaccagctctactgggatttcgtcatggactggggcttcctgaacccaaaatccaagaacttttggctccgggatcagctcatcctcaagaacaagtcgatctactatgcttccatgatgctcaacctcgtgctgcgcctagcctgggccgagagcgtgatgaaactccgtctcggtatggtggagtctcgcctgctggatttctcgctcgcttcgctggaaatcatccgacgagggcactggaacttctacaggctggagaatgagcacttgaacaacgctggaaagttcagagcagtgaagactgtcccattaccgttccgtgagcttgaaactgactgatgaagacggagctccatgttgaacagcaggaatttagggggaagaattccaggaatggatacactgtcccctgcaagaactggtgtttaagtggtaataaaacgaatcggagagcgtaactgcacaagaccgagacgctgcagattttaggatggaataagctcaggcgggtgcgccagggtataacatgaggcgttctggtcaggagagatgatgtgcatttaactagctagtggtcgattgagaattgttgcatgtcaatcgactaacaagatcttaattttgtcgatcgtttaagttgtgaaaatgtatctgggaattggtgactgaaaaaaattgcatggaacgaaac

SEQ ID NO: 35666 - DNA, 1998 bp, Zea mays
  Clone ID: UC-ZMROB73078A02_FLI
caacgccgcgttcctcgccttcttcctcttcgcctacgtggcgctcctcctccaccccaagtactcgggcctcctcgaccgcggcgccacctccctcgtccgctgcaccttccgcgactcctgcccgccgccgtcgccgtcgaaccagcagctctcacggaagctgggaggcgtggcggcgaacaaggtggcggaggaggagcgcatcgtgaacgcggggcgcgcggcggccatgttcgacgagctccggggccggctgcggatggggctggtgaacatcgggcgcgacgagctgctggcgctgggcgtggagggcgacgcggtgcgcgtggacttcgagcgcgtgtcggacgcgttccggtggtcggacctgttcccggagtggatcgacgaggaggaggacgacgagggcccgtcctgcccggagctgcccatgccggactgggcccggtacggcggcgacgtggacgtggtggtggcgtcgctgccgtgcaaccgcagcgcgcccgggtggaaccgcgacgtgttcaggctgcaggtgcacctggtggcggcgcaggtggcggcgcgcaagggccggcgcgacggcgccggggcggtgcgcgtggtgctgcggagccagtgcgagcccatgatggacctgttccgctgcgacgaggaggtggggcgggagggggactggtacatgtacaaggtcgacgtgccgcgcctggaggagaagctccgcctgcccgtgggatcgtgcaacctcgctatgccgctgtggggatcaggaggtcgagggatccatgaggtgttgaacgcgacgtcgtggtcgggcgggcgtcgtccccggcgcgaggcgtacgcgacggttctgcactcgtcggacacgtacctgtgcggcgcgatcgtgctggcgcagagcatccggcgcgcggggtcgacccgcgacctggtcctcctgcacgaccacacggtgtcgaggccggcgctgcgcgcgctgtcggcggccgggtggacgccccggcggatcaagcgcatccgcaacccgcgcgcggcgcggggcacctacaacgagtacaactacagcaagttccggctgtggcagctggccgactacgaccgcgtggtgttcgtggacgccgacatcctggtgctgcgcgacctggacgcgctgttcgcgttcccgcagctggcggcggtgggcaacgacggctcgctcttcaactcgggcgtgatggtgatcgaaccgtcggcgtgcacgttcgacgcgctcatgcgggggcgccggaccgtccgctcgtacaacggcggcgaccaggggttcctcaacgaggtgttcgtgtggtggcaccgcctgccgcgccgggtcaactacctcaagaacttctgggccaacaccacgggggagcgcgcgctcaaggagaggctgttccgggcggacccgcccgaggtctggtccgtccactacctggggatgaagccatggacgtgctacagggactacgactgcaactggaacgtggcggaccagagggtgtacgccagcgacgaggcgcacgcgcgctggtggcaggtgtacgaccagatgggggaccacatgcgcgggccctgccgcctctccgagcggaggaaggtggagatcgcatgggacaggcacgtcgccgaggagctcgggtacaccgaccagcactggaagatcaacatcacggacccgcggaaatgggactgatccacgactactccgtccgtcgcctgctgcattttcgtacataataccccacacgtagctggtcgagagccagatcgctaggcgcgcagcattttggttcgtgggtacatttaggccagctcagtttcataagtggagctgttgttccgaggtttttagcttcacgtacgaacagcttttccgatgaagctgaggggttttcgtgatcttatttggcaaatcagctttgcattggacaataaacaaataaaatgaccgtaatgctctctgcttttgtttccttc

SEQ ID NO: 35667 - DNA, 712 bp, Zea mays
  Clone ID: UC-ZMROB73078A08_FLI
cttctcgatggcaacttcacagcaaagatctctgacttcggcttagccaaactgctccgaaccaaccagacacaaacaaatacaggtattcggggtacacgaggatatgttgctcctgagtggtttaagaacatcggtatcactgccaaggtggatgtttacagctttggggtcatcctgttggagcttgtttgttgtcggcggaatgttgaattggaggccacagatgaggatcaaaaaatactgactgactgggcaaacgactgttataggtgtggcagaattgattttctggtggagggtgatgaagaagcaatttctgatttgaagaacgtggaaaggtttgttgcagtggcattgtggtgtcttcaggaggacccaactatgagacctacaatgctgaaggtgacacaaatgcttgatgaagcagctgcagtccccagccctcctgaacctacttcctttgtcagtgcacttgcatagcatcacacctgcatattgtcatattagtatatgtatgaacatgcgtgttcgaggaaaaaaaaagtatatgtatgaaccaacaaaatggtgtgggaaattaggtatagctatctactgaaaattacctatgctgatattgtagtgtgttcatatgtactgtaaagagcacagcattactgtctgcagccataacgtactgtagtaaatattaggaagtcttcattttccc

SEQ ID NO: 35668 - DNA, 1885 bp, Zea mays
  Clone ID: UC-ZMROB73078A09_FLI
gcaacgcgacgcaccaagctctgagagtcgcaatggagagatcagctgagagctggtgggtgcttcccatgaccttgataccggccatctccggcgagcaacacggtaacatggcaaccgtagccactagcttcgcctacctcgccatcttcgcatgcctcgcatgggtgggcgcgtccctgctctactgggctcacccaggcggccctgcgtggggcaagtactggagggcgagggggaagaagccgtcggcggcgatcccggggcctaaggggctcccggtggtcggcagcctcggcctcatgtccgggctggcgcaccgctcgctggccgacgaggcgtcgcgccgcccgggggccaagcggctcatggcgctgtcgctcggccccgtccgcgcggtcgtcacgtcccacccggacgtggccaaggagatccttgatagcccggcgttcgccgcccgccccctgaaccacgccgcgtacggcctcatgttccaccgctccatcggcttcgccgagcacggcccgtactggcgcgcgctccggcgcgtcgccgcgggccacctgttcggcccgaggcaggtcgaagccttcgcgccgtaccgcgcggccgtcgccgagggcatcgtcgcggccctgctgcgcgccggctccggcggcgccgtcgtccaggtgcgcggcctcctgcggcgggcgtcgctctactacatcatgcggttcgtgttcggcaaggagtacgacgtgtcacgcgtggtgccgccgtccggcggggaggaggtggaggagctgctcgagatggtgcacgaggggtacgagctcctgggcatggagaacctgtgcgactacttcccggggctcgccgccctcgacccgcagggcgtgggcgcacgatgcgccgagctcatgccgcgggtgaaccggttcgtgcacggcgtcatccaggagcaccgtgccaaggcggtcgccggtggagacgcgcgtgacttcgtcgacatcttgctctccctgcaggagagtgaggggctcgccgacgccgacatagcctctgtgctctgggagatgatcttcagaggaacggacgccatggcggtgctcatggagtggaccctagctcgcctcgtcctccaccgcgacgtccaagccaaggcgcaccgtgagctcgacaaggtcgtcggcgcggacagccagaccaccgagtccgcggcgccgtacctgcaggcgttgctaaaggaggctctccggatgcacccgccggggcccctcctgtcgtggcgccacagggccatatccgacacgtacgtcgacggccacctcgtcccggcgggcaccacggccatggtgaaccagtgggccatcagccgcgaccccgaggtgtgggacgcgccgctcgagttccggcccgagcggttcctccccggcggcgagggccaggacgtgtccgtgctcggcgccgacggccgcctcgtgccgttcgggtccggcaggaggagctgccccggaaagtccctggccatgaccaccgtgacctcctggatggccacgctgctgcacgagttcgagtggctgccagcgtcagacgacacaggcgacgtcgacctctcggaggtgctccgtctgtcctgcgagatggcagtgccgctggaggtccgcgtgcgcccgaggagcagcgtgtgaatgaagtgctgcctgccgatagccatgacacacccccattgtgcaatgtgtagcagtgagcctaagcgttctgttagtgaactgtgaataagcagctggtgaggactgtgcacaccagctcagctcagcctttggttcagggtttcaacttgcccgtgtatatcgtatatttagtgtgaccgtgagtattaagttatccgcaaaaggtgtac

SEQ ID NO: 35669 - DNA, 1374 bp, Zea mays
  Clone ID: UC-ZMROB73078A10_FLI
ggcggagacgccgcctccgccggcggtgcagctcgccaaggccgtggcggagccgaagacgcctcctccgccgccgccgccgcagcacaggcagccggcgcggaagacgcccggcagcggcgggagcgaacgggacggggccacgcctaggagcacgggaagcgcggggatgccggaggtttcgcatctcgggtggggccactggttcacgctccgtgagctggaggaggccaccgacggcctcaccgaggagaatgtcatcggggagggtggctacgggatcgtgtacaagggcacgctgcacgactccactttgatcgccgtcaagaatctcctcaataataggggccaggccgagaaggagttcaaggtggaggtcgaagcaattggtcgtgttcggcacaaaaatctcgtcaggttgcttggttactgcgtagaaggtgcttacaggatgcttgtgtacgagtatgtggacaatggtaatcttgaccagtggcttcatggtgatgttggagaagtaagcccactaacatgggacgtcaggatgaacattatgcttggaaccgccaaagggttggcttatcttcacgaggggctggaaccgaaggttgttcaccgtgacatcaaagctagcaacattcttcttgaccagcagtggaacgctagagtatccgattttgggcttgcaaagctattgtggtcagagaaaagctatgttacaacccgtgttatgggaacatttgggtacgtggcgcctgaatatgccagcaccggaatgctgaacgagaggagtgatgtatatagctttggcgtactcataatggagatcatcactggtagatctcctgtagactacacaagagcagctggagaggtcaacttggttgagtggctcaagaccatggttgccgagaggaaagcggaggaagttctggacccaaagatggctgaaaagccttctcccaaaacgctgaaacgggcgctcctggtcgcgcttcgctgtgtcgaccctgatgcgaacaagaggcctaaaatggggcatgtgattcacatgctcgagatggacgatctcctcttccgagatgataagaagcccgggagagacgttcatcctcacggttcagacagatacagctccaaggaggaagggagcatcagcaagcgcgagcaccaccaccaccaccaccatcggcacagatgatacacagcaagcgcgagcatatgaggattgccattagagagtagcgacattaaccatgttccccacttctttcccctcccgttcaatctcactggtctttgattgtattatatgtgagcatccatcattctgtgacgatacttgatacttgaatcgcacacacagacacaatg

SEQ ID NO: 35670 - DNA, 1255 bp, Zea mays
  Clone ID: UC-ZMROB73078B09_FLI
tgcaagtatagtctctctgctaagcgaagcgaagcttcaagctagtctcggcggctctagaagacgatgggcaaggacgacgtgatcgagagcggcgctggcggcggcgagttcgctgccaaggactacacggaccctcccccggcgccgctgatcgacgcggcggagctggggtcctggtcgctgtaccgcgccgtgatcgccgagttcatcgccacgctgctgttcctgtacatcacggtggccaccgtgatcgggtacaagcaccagacggacgcgtcggcgtcgggcgccgacgcggcgtgcggcggcgtgggcgtgctgggcatcgcctgggccttcggcggcatgatcttcgtcctcgtctactgcaccgccggcatctcggggggccacatcaaccccgccgtcaccttcggcctcttcctggcgcgcaaggtctccctggtgcgcgcgctgctctacatcgtggcgcagtgcctcggcgccatctgcggcgtcggcctcgtcaaggcgttccagagcgcctacttcgacaggtacggcggcggcgccaactcgctcgcctccggctactcccgcggcaccggcctcggcgccgagatcatcggcaccttcgtgctcgtctacaccgtcttctccgccaccgaccccaagcgcaacgcccgcgactcccacgtcccggttctggctcccctccccatcggcttcgccgtgttcatggtgcacctggccaccatccccgtcaccggcaccggcatcaacccggccaggagcctgggcgccgccgtcatctacaacaaggacaagccctgggacgaccactggatcttctgggtgggccctctcgtgggcgctgccatcgcggccttctaccaccagtacatcctccgggctggcgccatcaaggccctcggctccttcaggagcaacgcgtgatgagcggggcttggctgtggagcaatggcgggcgacctacgggcggggggccgtgagcgaggagaatgccatcattcatcgatcgacttgggtgccggtggttggttcgggtcgcctttttttttgtttcagcagctgctgcgttgcgcgcgtgcgtgagatttggtttggtttcgttcccctgcaatgtaatcatgtcgtgactctcaagggattattccgctctgctcttatggtctctgttttctatttaatgattgttattaccatgtagcagtaaccatcgtcatcagtgagaaccttgttgcttctgtct

SEQ ID NO: 35671 - DNA, 1880 bp, Zea mays
  Clone ID: UC-ZMROB73078C07_FLI
ctctcctcctcttctatagtcaaaccacccccctccttccacaaaccttcgcagaaggggcacaccggcaaggacgcagctttttcccgtctccttctgggttctacacttctacttctttccccacctcgccttcgttccgcccgccaccaaatcgcgaggcagcggagccagcgacgccgttcctttcgttgtgcttccttgggttcttgctgccggccgccggcgatttggcgaggtccgtttgggcggcaggtagaggtaggtagaggcgatcgtttcttggcggctggtggaatggatagccacgccgctgtgtcgagttccgtcggatccggggatggcgccgcgcagcccaggaggaactccaggaagcccaagtattccaagtttacgcagcaggagcttccagcttgcaagccgattcttactccaaaatgggttatttcagtatttgttcttgttggtgtgatttttgtcccgatcggtattgtttcgctgcgagcttcacatcaagttgtcgagatcgttgatcggtatgatgacgcatgcatccctgctaatgtcactgagaagcttgcttacatccagaatgatagtataccaaaaacctgcacaagaaatctgacggtaatgaaattatctagatgtattcttctaacctgaaattttgggaatggaaaaactatagtagaaacaacattgactagcgacagtatacatgtcagttactttacaagtatgcatcttggcataagatcaaatgaataattggctgaaatatttgatcacatggtcttcagattacaaaggatatgaaacaaccgatttttgtatattatcagctggataacttttaccagaatcataggaggtatgtaacctttagccaatgctctctctctctcattgttttaaactttgtcagtgagaagtcttcttgctctttaagatgtatttttttcctacttaactgaaacattaatcacattcaggtatgtcaagagccgtaacgacgcacaactaagagataaaagtaaggcgagtgacactaccaattgtgatcccgaggccaaaacagtagatggaaagccaattgtgccttgcggtcttattgcatggagcctgttcaatgatacatataccctcatccacaacaataaaaccttgagagtggacaagaaagacatctcttggaagagtgacagagaccacaagtttgggagtgatgtcttccccacgaacttccagaaaggacctcttcaaggtggaaaaatacttaatccaaaaatcccgttgagtgaacaagaggaccttattgtttggatgcggactgcagcgcttccaacattcagaaagctgtatggtaggatacatgttgatctcaaggaaaacgatacaattacagttcagttggagaacaactacaacacctatagcttcagtggcaagaagaagctggtgctttctactgcaacctggattggtggaaagaacgattttctgggccttgcatatctcactgttggtggaatctgcttcgttttggcatttgcattcaccttgctatacttgataaaaccaaggaaaatgggagataacaactacttgtcatggaacagacccactttaggtcgctgatatggttttgaagttaaatgtttacacggacaacaaattcatttatggttcagatgtatcttgtaccacatcgaatttttattcatgagcattggtgtagaatacatacagagtaggcatgtgtatacgtgcgacaactttggatccatccttgcacagattgtacattaaactgaaacagatagctttatgttctccaaaattgtataatcagaagttaatgtcagtttcgatgtttt

SEQ ID NO: 35672 - DNA, 2120 bp, Zea mays
  Clone ID: UC-ZMROB73078C08_FLI
cggacaggagctccaccaccaccgcctcctccaggagctccacctcccccacccccacctggaggtggtggaagaggacctccaccacctcctgcacctagagggcatcttggtggtcctcctccacctccaccaccaagtggacgtgcaccaggtgtgccacctccacctagagcaccaggtgtgccgccaccaccaggaaataatccatccttaggcagaggacgtggggctgtacgccctctgggatcagcttatggggctgctgcctcacgtaagtcaacattgaagccattacactgggttaaagtgacaagggcccttcaaggtagtctgtgggaagaattgcagcgcaacgatgactcacagagtgtttcagagtttgatatatcagaacttgagagcctttttcctgcagctgttccgaagtccgatgacagctcaaaatctgaacgtagaaaatcacttggatcaaaaccagaaaaagtgcacctaattgagttgaggagggcgaataacacagagatcatgctaacaaaagttaagatgccactctcggatttggtgagtgcagctctggcgcttgatcaatctaccttggatgttgatcaagtggagaatctcataaagttctgtcctacaaaagaagaaatggaacttctcaagaattacaccggagacaaacaaaatcttgggaaatgtgaacagttcttcttagaattgatgaaagtgcctagaatggagtcaaaactgcgagtattctccttcaagatccagtttggttcacaagttgctgatcttagaagaagcttgaatatcatcgactcttcatgtaatgagatccgaacttctctcaagttgaaagaaataatgaagaaaatccttctccttgggaataccctgaaccagggaactgctagaggtgctgcagttggcttccggttggacagtcttctaaaacttacagatacccgggcaacaaataataagatgacactaatgcactacctctgcaaggtacttgctgcaagatctccacagcttttaaacttctatgtggatcttgttagcttagatgctgcatcaaagatacaactaaaaatgttggctgaggaaatgcaagcagttagtaaagggctggaaaaagttcaccttgagtatgatgcttcagaaagggatggtccagtatctgaaatttttcgtgagaaactgaaagagttcaccgacaatgctggagctgatgtgcagtcgttatcttcattgttttctgaagtgggtaaaaaggctgatgcgttgattaagtattttggtgaggatcctgttcgctgcccctttgaacaagtaatctctaccctcttaacatttgtaacaacatttcgaaaagcacatgaggagaacctgaagcaagctgagcttgagaagaaaaaagctgaaaaagaggcagaagcagagaaggccaagaacgcacaattaactggcaaaaatgactctaaaccatcaaatccaagacggcaagctaaacaaaccttagagaggacaaggtctgcaagcagacgaggaagagatgttgggtgataacccgaatggtcagtaattttctgtgcttctgatctgctcgcgaggctaatggacgaccgctgggcaagagaagtttcatggacggacgctggcatccgtcgggtgcagcgcgatcgcatcaaagaaaactctacaggccacccttcaacggtctcactggagaatgccgacgtctgtttttatccatgtcggccatcagggtccagtgctaacttctgactgctgtaaagaattgctaacactgacgctaactccattctttcttttcttttttcatgttacttttccattctttctaacaacggtggccaagtacagccatggcttcgaaaaactaccgcctggtgcttaggtggaaaattgtaaaaaataggcatctgggtgaaaaaaaggtatggagataatctaggtggcaaagagtatcaggagtaaatatgtgatgcaaactcagccagtagtttagctgtaaagttttgtagtgagtgtgtattgccgccactttgtattctatgatcatgaagcagtgaaggcggcgttttctt

SEQ ID NO: 35673 - DNA, 1676 bp, Zea mays
  Clone ID: UC-ZMROB73078D04_FLI
ccgtcgtcttctgcggttctgccgtctacgcctccaatttggcctctctcccttgcaagtttaagcttcaccttcaaccatgggtaaggagaagtcccacatcaacattgtggtcattggccacgtcgactctggcaagtcgaccaccaccggccacctgatctacaagcttggaggcattgacaagcgtgtaatagagaggtttgagaaggaggctgctgagatgaacaagcggtccttcaagtatgcttgggtgctcgacaagctcaaggctgagcgtgagaggggtatcaccattgatattgctctgtggaagtttgagaccaccaagtattactgcaccgtcattgatgcccctggacaccgtgacttcatcaagaacatgatcactggtacctcccaggctgactgtgctgtccttatcattgactccaccactggtggttttgaggctggtatctccaaggatggccagacccgtgagcatgctctccttgcgttcactcttggagtgaagcagatgatttgctgctgcaacaagatggatgcaacgactcccaaatactccaaggcgcgttatgatgagattgtgaaggaagtctcatcctacctcaagaaagttgggtacaaccctgataagattgcctttgtccccatctctggttttgagggcgacaacatgattgagaggtccaccaaccttgactggtacaaaggcccgaccctgcttgaggctcttgaccagatcaccgagcccaagagaccttcggacaagcccctgcgtctccccctgcaggatgtgtacaagattggtggtattggaactgtaccggttggtcgtgtggagactggtgtcatcaagcctggtatggttgtcaccttcggtccaactggcctgactactgaggtgaagtctgttgagatgcaccacgaggctcttcaggaggcccttcctggtgacaatgttggcttcaacgtgaagaacgttgctgtgaaggatctcaagcgtggttttgtggcctcaaactccaaggatgaccctgccaaggaggctgccagcttcacgtcccaggtcatcatcatgaaccaccctggccagatcggtaacggctatgccccagtgctggactgccatacctcccatattgctgtcaagtttgctgagctgattaccaagatcgacaggcgttctggcaaggagcttgagaaagagcccaagttcttgaagaacggcgatgctggtatggtgaagatgattcccaccaagcccatggtggtggagacattctcgcagtatcctccccttggtaggtttgctgtccgcgacatgaggcagacagttgctgttggagtcatcaagagtgtggagaagaaggacccgaccggcgccaaggttaccaaggcagctgccaaaaagaaatgatgcaacctgtcgttaatcctgtatctgcttttgcaatacctgacttgtcactccatcccgaagttttgtatgcggttgttactgttattgtgtactgttaagctctgctgcggcgtgccctgttgtttgggtagcgtcaacgtcgagcgccacttgcgggtgtgcctttgtctgctatcagtagcggcaaaaattgaaagctctcgagacttatgtcccttttgggcgccgttgaactgattattttaaagtc

SEQ ID NO: 35674 - DNA, 1093 bp, Zea mays
  Clone ID: UC-ZMROB73078E11_FLI
taaaatcccagcggcttcccccaaacaaaacctcttctccgccagagtccgcgtcggccagatcaaacgaatcggcacgacgcatcggcatcgcctccgacgatcttgagacaaacaaaacccaccgctgcggcaactccgcctcccgctgacacggggatcgcctgacaacaggcagagaaaagaggcgcagggtttgcccgcgaagatggaggacgtggacgtctcgcggcagctgaagcagatgacgaacttcatccgccaggaggccgtcgagaaggccgccgagatcgaggccgccgccgccgaggagttccaaatagaaaagttgcagctggtggaagctgaaaagaagaagatcaggcaggaatatgaccggaaagagaagcaagttggcatcaagaagaaaattgattactcgatgcagctcaatgcttccagaattaaagtccttcaagctcaggatgatttggtaacagatatgttggagtcagcaaggaaagagctactgtgcataagtagagatcaccccacttacaagaagctcctcaagacacttattgttcagagtttgctgcgcctgaaagaaccagctgtgcttctccgctgcaggaaggaggatcttcaacttgttgatttagttttggaatctgcaaggaatgagtatgcagataaagcaaaagtatatcctcctgagatagtggtagatcgtcaaatctatctgccatctgctcccagtcattatcaggcacctggcccctcatgctccggtggagttgtgctagcttcccgagatggaaagattgtctgtgaaaacacactggatgctagattgcaggtagttttcagaaagaagctgccagagattcgtcagagccttttcgggcaggtagctgcgtagccaattcttgaaagcagaacgtggcccagtactctttggggtaccctgacgatgtcgaggagaaactttggcagctctcaatagtgatttatcacacttttggacctcgattattatttgtgtatacttttttcctggttatggatacctttgaatcctgcacagagcaaataaactgtgttcatttgtggg

SEQ ID NO: 35675 - DNA, 1003 bp, Zea mays
  Clone ID: UC-ZMROB73078F06_FLI
ctccccactgcctcgtgtggccgtcgtctcccgttcggaacgccaagccccccctccggcgaaatggcccccaagcgaggtggcagggcgccggtgccggccaagaagaagacggataaagtgacgaaccctctattcgagaagaggccgaagcagttcggcatcggcggcgcgttgccgcccaagaaggacctgcaccggttcgtcaagtggcccaaggtcgtgcgtatccagcggcagcgccgcatcctcaagcagcgcctcaaggtaccaccggcgctcaaccagttcacccgcaccctcgacaagaacctcgctacgaacctgtttaagatgcttctcaagtaccggcctgaagacaaggctgccaagaaggagaggcttctgaagagggcccaagctgagaatgaaggaaaaactgttgagtcgaagaaaccaattgttgtgaagtatggccttaaccatgtgacttacctcattgagcagaacaaggctcagcttgttgtcatcgctcacgacgtggatccgatcgaacttgttgtgtggcttccagccctgtgcaggaagatggaggtcccttactgcattgttaaaggaaaggctcgccttggatcgattgttcacaagaagaatgcatcagtcttgtgtcttaccactgtcaagaacgaggataagcttgagttcagcaagattttggaggctattaaggcaaacttcaacgacaagttcgatgaggtcaggaagaagtggggaggtggcatcatgggatccaagtcgcaggccaagaccaaggcccgggaaaagctgctcgccaaggaggctgcgcagcggatgacctagattgtctactgctgtgtctgccctgtagtttaacggggaagaactgatgaactcgtattgtggttttccgaatctagtttcatatgtttctgtccaccagaccatgtttagaagctttgcaagacagagtttacagtgtttatgtgatgcctcagatccatgc

SEQ ID NO: 35676 - DNA, 832 bp, Zea mays
  Clone ID: UC-ZMROB73078F08_FLI
acagcacgacaccatccgttcctggccttcctcctgtgcaactaccactcgcgtcaccgcggaaattaaccccgaaatccagcgccttcggcacgagcacgatcaggcctgcgcaggagatggggcggagaggggagccctactacgtcgaggcggtgccgccggtggacgtgaacaagaacacagagtggttcatgtacccgggcgtctggaccacctacatcctcatgctcttcttcgcctggcttctcgtcctctccgtctctggttgctccccgggggcagcctggaccgtcgtcaacctcgcgcacttcgccatcacttaccacttcttccattggaagaaaggaaccccttttgctgctgatgaccaaggcatctacagcagattgacatggtgggagcaaattgacaatggtcagcagcttactcggaacaggaagtttttaactgtggtacctgtggtgctgtatcttattgcgtcgcacttgaccgactacaagcagccgatgttttttctcaacacgattgcagttttcgtgctggtcgtggcaaaattgccgaacatgcacaaggtccgcatatttggaatcaatgcagacatctgaggacggctgcaagaagtacatggatgcgatgccatgatgttatgaacaagcagtgtgtttctcaaactcgacacaactgcctgtaatatatgtacaggtttagaaagaactgtaaatgaatgatactctaggatacaaggtttgcctgcagactgctctgtgttgccgttgccgctgctttcttttgagtttcactgaaagtggaaaccataacttgggtaaat

SEQ ID NO: 35677 - DNA, 3703 bp, Zea mays
  Clone ID: UC-ZMROB73078F10_FLI
ctgttgcaataattttgtaggcgagaattgggagagtctggaggctgccagccggtctagtggctcggccaaggcgagcggtggtcccagcgccgttctttccgcctggtgccggagtttcagtcttcaaggctgtgctcggagtttctgtgttctaggggccgggaggtgtgtgctggtgtgaatttggctttcttttgatccaattggtgcttaatttcagcctgtcgaaagaggcttctagcttgcaggttcatcgccgttggcgccgaacttgcctgccgtacagtctttctagtgccaaagttgaattttgaggaactgtgaagccgctttaagcaattacctttgccgaactttcctctaaaggcttgaccttttgggttccggagttcattgctgatcgacgggtcttggagtttttgtctactacctgcgttatgaacaggacatttctgcataagaaaagttgtctcctgtgcagatagccagatactcctgctttgctagtatatcaaattgcttcttgtgtttgaacaaagattctgttcagctagaagacagtgctctcctttatatcctgtctgtagctcaatacagtgctccaaatccatttcggcgtactaggtgtggataaggatccttgcctcgacgagtggagcaaagccatggatgtgcctacgcctcccaaccgtgccggctgcaacagtaacatcggcagccccatgcaatcttttgatgatccctttggtgttgctgccatgacgagctttgatggatactcggagctctgcagcccatcagttgctgatcacatattctccctgctgaatgatccctccgctgcgcaacagatggttgccatgtggtcatccttgggctcatctccgcgtgcttcagctgtgagagaagacatgtcgtttgacacctttcctgggcctgtggacgggacatcgtcacttgctcaaaggttcaactcagcagcagcatcgagtccaactggagtcgacagagggctaaaagagtcagatgggcttgttcttccaagtaatggctcacagcaagggagtagcatcattccgaggtctgttggcaacgctcttgcagacaggatgctcatggcgctatctttgttcaggaagtcattgagtgatggtgttcttgcccaagtctggatgcctgttgagcacaatggtcgtgtcgtgttgagtacatctgagcagccctatttacttgaccaggatcttgcaggttacagagaagtttctagaaatttcctgttttcagttaaggaggagcctggtctgcacctagggcttccagggagggtcttcatatccggggtgccagagtggacgtcaagtgttatctattacagtaagccagagtatttgagaatggagcatgctcttcttcatgaaatacaagggtcacttgctatgccagtttacgatcccagcaagggctcttgttgtgcagttcttgaacttgtcacaaacaaggagaaacctaattttgatgcagagatggacattgtttgcgatgccttgcaggctgtgaacttgcagacaacaacagatcgcagcaatcagaaggtttactctgaaaatcagaaatctgcttttactgagatattggatgttctaagagctatttgtcatgcacacatgcttcctttggcccttacatgggtccctacatcaaatggcatcgctaatggtttttgtgttggaaagaatattgggatagatccgcaaccaggaaaagcagcacttcgtatccatgaatcagcttgctatgttaatgatgcaaagatgcaggggtttcttcatgcatgtgctgatcgtcatcttgagaaggggcagggtattgcaggccgagcccttaaatcgaatctgccattcttctcacctgatataagagagtacagtatcgaagactacccgcttgcacaccatgctcgtaagtttggtctgcacgctgctgtagccatacggctgaggagtacgtacaccagttacgatgactacatactagaattctttctcccagtcaactgcaagggctgtggagagcagcagatgttattaaacaacctttccagcacaatgcaaagaatatgcaaaagcttgcgaacagtctctgaggcagagattgaaaatgttagtgctactgcagcaatgtttgagaagactagtggaacttgtttaccaactggtaactctgaaagttcctcacatgatgaccagccaatcacagaatctgcactccaggatctatctttgggtgacaaacaaggagacagagaacctgacaagccacagagaagctcaatgcgagttgcagataaaaagcgcagtgcatctgaaaagaactttagtctggatgttcttcgcaaatacttctctgggagcctgagggatgctgcaatgagccttggtgtttgtccaacgacattgaaacgaatatgcagacaacatggaatttcccgatggccatctcgaaagataaacaaggtcaatcgttcattgaagaagatagagaaggtcattaaatcagttcacggtgtggatagatccttgcagtacgatcctgctactgggtctcttgttcctgcaacctctcttccggaaaagatgccattctctgcttgcgatacattgcctacttcatctcttgggagagcagtggaggaaacatgtagcccaaaatcagaacaagatttctcttcgcctgatgggtggcaaagagaaactagccaatttcatgtttctggtatacctaaaaggggaggcgatgaagttcggacgttggcaaacaacaacaaaggcagaagaaactatgtttctggtattgcaaatatcacacagcattcaaactctgaaggcacacatggtccttcatatcccaatcccattggtgctgttaattctctgcatactggagaaacaggcaacatcgattctctgacctccctccacccaagcatggatggcattgaaggccaaacaacagtaaggaactcaccatttgtgcaacaagcagatgtcactatggtcgatggtcatgacaccaaggagcagacactcccttccacctctggcatgaccgattcttcgagcggcagcgcctcaagcgagcctactttcaaggggaacccaggacgtgccctcaaagaccgaagcagccctgcactgaccgtgaaagctacctacaatggcgacaccgtccggttcaagtttgtgccagcaaggggctggtaccacttgctggaagagatagcaaagaggttcaagctgacggctggagcattccagctcaaatacaaggacgatgaggacgagtgggtgatcctggcgaacgatgccgacctccaggagtgcatggacgtcctggactcgatcagctcacgcaacatgaagctgcaggtgcgcgacctctcctgccacgtgggcagctcgggcagcagcagcagctgcttgcaggtggaagcgcatagctcgtgacagaacagaagcctaggttaccgcccttagcctgttgtagtaggcccagtatcctgttgtcgccatagaggttccttgtccatgttcacgccatgttgtcgtatggaatgtacaaatggcgagtgtagaaaaggaataaagtgtcatactcttcgcacggttgaaacacgaaacgatgccgtgaaggtttttgtcat

SEQ ID NO: 35678 - DNA, 1397 bp, Zea mays
  Clone ID: UC-ZMROB73078G10_FLI
gtgaagcccgggaggacgtacatgctccggctcatcaactccgccctcaacgacgagctcttcttcggcatcgccaaccacacgctcaccgtcgtcgaggcggacgccagctacgtcaagccattcaccgtcagcacgctcgtcatttcaccggggcagaccatgaacgtgctcctcacgacggcccccagccccgcctccccggcctacgccatggcgatcgcgccctacaccaacacgcagggcacgttcgacaacaccaccgccgcggccgtcctcgagtacgccccgacgacgaccaggaacaacaccctgcctcccctaccggccctgccgctgtacaacgacaccggcgcggtgtccaacttctcgcgcaatttccgcagcctgaacagcgcgcgctacccggcgcgcgtgccggtggcggtggaccggcacctgctgttcaccgtggggctcggcacggacccgtgcccgtacaccaaccagacgtgccagggccccaacggcaccaagttcgcggcgtccgtcaacaacaactccttcttccgcccccggaccgcgctcctcgaggcgcactaccggcgccgctacgccggcgtgctcctggccgacttccccacggccccgccgcacccgttcaactacacgggcaccccgcccaacaacacgttcgtgcagcacggcacgcgggtggtgccgctccgcttcaacgcctccgtggagctggtgctgcagggcaccagcatccagggcgccgagagccacccgctgcacctgcacggctacaacttcttcgtggtcggccaagggttcggcaacttcgacccggtgaacgacccgcccgggtacaacctcgccgaccccgtagagcgcaacaccatcagcgtgcccaccgccggctgggtcgccgtccggttcctcgccgacaacccgggcgtgtggctgatgcattgccacttcgacgtgcacttgagctggggcctgtccatggcgtggcttgtcaacgacggcccgctgccgaacgagaagatgttgcccccgccatccgacctcccaaaatgctgatgacgactggtcgtttatcacccgatcgaggggtagatgggcatttaggaaggttctcctgcttcctgcacgtctgcctacttcctttccttacgatgtttggaactatttggtttggactatttaattaccgtgtgccgatttttggcgagtgcttggatttcgcgatcctcgctgaatccccttttgaaacatgttaatctgtatctatgtaacgacaacgtttgttctgcggttacttgttctttttttaccccctttctgaacattcagcacgcattggtgtattcacatggtcaaatacaatgtaacaatgatgtctgtatgtt

SEQ ID NO: 35679 - DNA, 1559 bp, Zea mays
  Clone ID: UC-ZMROB73078H04_FLI
gccttcaattcatttgcgcgggtggttgagtgtttgtcatcgttccgatcgcaggcggccgcataacccttcttcctcctcgatcgatcggctctagctctcctgatcccatctcctcctcgaccacgaggaagccaaacccttctttgtctctagctagtgtgcctctgctgcacgtacacgcactctctctcggctagctagctgctgctctgcgttctttcaattcagctcagctcagctccttctatatattttggcttagcttcgtcctccggcccgaccggtcaatccatcgtcgagtccagcgcctgctcctgcctcctgcacgctgaacctgtagccgcagaatatgcctccagccgtcctccaagagccatgaataacaccagcaatagcaccaagaagcacagcctcctcgcgcccaaggccaccgtggacatgtctcgcctgcaccaggcctacgaccgcggctagctaataggccgggttgatagtcttttgatctgctgtggtcgttagcttgttgaacagaaaaacctactgggttgatagtgtttgccttgtgcagttgtgctagcttagcttgtttgcggctcagttactacgccgtttaattactgtcgtaagttcgttcgtaatcgtaacatcaatgaaggaaggaggcgagaagaagaacatcctgtccaagacgctgcagaggtgccggacctcgctggcccaacggaggaggccgccaccgccggcggcaccgaagagggcggcgtcgtcgccgtccctgggcgtgcccccgccgccgccggtgccagccgccggctacttcaccgttctggtgggcccggagaaggagcggttcggggtgcgcgcccgctgcgccaaccacccgctgttccgggcgctgctggacgcggccgaggccgagtacggcttcgccggctgcgacggcccgctcgagctgccctgcgccgtcgacgacttcatggaggtcatgtgggagatggagctgggcgaccccagcgcgtcgcctggctgtggacgcttcgccgccggcagcactagaggctaccaccacgtgcaccagctggccggctaccagttggtggtgagcccgccggcgaggttcctcgtcgctggccgttaattcaacagagcacctgcttgcatgcattgctagctgcttggacgcccggccggcgacggtggtctaaaatggtctggtcgtatcgtcggttatggttgagcttgagcttgaacactcttttcttcctcttcttcttcggcgtcatcataagtagactagagatccgggcgcgcgcagaactttgttcaagtgcttgctgcttgctttactttgccgtctgttaacgtttgtttcactctctttgccttttcatcgcaagtgtactccatagatttgtttttgtgtctttgtaactctcatgttgtcttcaaatcgtttaattaacgatgtatgtatgcatgtatatacatcgtgtttactgtaacgagtgtaacacgttaaatacatataatagaagtggtgtatgtatgttctgtat

SEQ ID NO: 35680 - DNA, 1532 bp, Zea mays
  Clone ID: UC-ZMROB73078H07_FLI
tttactactgaagcacgcaccgcagcgtctccaccttctgctcaacctccgcttccgtaggtgccggcgctaagcgaggatccctccgttcatcggtcccgacggcacctcgactcgtttcgtcggtcgctgtggcgacgggtgattgactgcgatatgaggcaatggttatgttgtaactgccactttgatgacgaggaagatggccatgacaaggaacaggccaaagctcagagcaataagatagaccccaagcagaagtcttcaaaacctcctgttagtcaacctgagccagagttctcccctccaacaattgatgttcctgaattgtcattggatgatttgaaacaaaagactgatgattttggatcaagtgctctgattggtgaaggttcttatggacgagtatatcatgccgctttagatgatgggaggcaagccgcagttaaaaaacttgatgcatctgaaaatgagcctaatgatgagttcctcaaacaggtctcactggcatcaaagctaaaacatgaaaatcttgttgagatgttgggttattgtgtggatgggaattatcgtatacttgcttatgaatttgcaaccatgggttcgcttcatgatgttttacatggaagaaaaggcgttcaaggcgcgcagcctggccctgtgcttgactggatgcagagggtcaaaattgttattgaggctgcaaaaggtatagaatatctgcatgaaaaggttcagccttcaatcatccatcgggacatcagatcaagcaatgtactgctgtttgaggatttcaaggcaaaaattgcagacttcaatcttttgaaccaagcaccagatatggcagctcgtctccattcaactcgtgtattgggaacttttggatatcatgcacctgagtatgctatgactggccagctgacacaaaaaagcgatgtctacagctttggcgtggtccttttggaacttttgactggaaggaaaccagtagatcacacaatgcctcgaggacaacaaagtttagtcacatgggctactccaaggttgagtgaagacaaggtgaagcaatgtgtagatcccaggttgaagggagaatatcctccaaagggagtcgctaagcttgctgcagtggcagcactgtgtgtgcaatacgaagcagagttcaggcccaacatgagcattgttgtgaaggcgctttcgcctctccttcaacaaagacctgcaccaggcaccgcagagccagccccgcaacctgtgagctgaatccagtcacgtgtgatgggacctcgcagcatcaggcatctccgcgatcattcaatcagcaagtcattgagagtattttgaatatttgttctgtagcattctgttcctggcttgatgttggcgctgcacaatgacaatggtatatgcagtaggtttgatttttctttttcttttaccttctctataccagtaccaagttaccaactgttcgtagattttcagaattcgctgcttgaagaatagatgcaggatgatctggattttttttt

SEQ ID NO: 35681 - DNA, 1936 bp, Zea mays
  Clone ID: UC-ZMROB73078H10_FLI
aagcacgccatcactgtgctaaagattgccccatggcagctccttggcatggagtttgatgttcttgagcctctcaagaagagttatgataacctgcccagtgacaagttaaggctctgcctgctatattgctcattgttcccagaggagttctctatttccaaggattggatcataggctactgcatcggtgaaggtttcatagacgacttgtatactgagatggatgaaatatacaacaaggggcatgaccttcttggtgatctcaagattgcctctttgctggagaaaggtgaagatgaggatcatatcaagatgcaccctatggttcgtgccatggctctgtggattgcatcagatttcggcaccaaggagaccaaatggcttgtccgtgctggagttgggctgaaggaggcaccaggcgcagagaaatggaacgatgctgagcggatttctttcatgcggaacaacattcttgagttgtatgagaggcctaactgccccttactgaagacattgatgctgcaaggaaatcctgggctggacaagatatgtgatggattcttccaatacatgccatctctcagagtgttagatctgtctcatacctctatcagcgaattgccttcagggatcagttcattggttgagttgcagtacctggatttgtataacacaaacatcaggtcacttccaagggagctaggatctctatcgactctgcggttcttgcttctctcgcatatgccgctggaaacgatcccaggtggtgttatatgcagcctcacaatgctgcaagttctgtacatggacctcagctatggagattggaaggttggtgcaagtgggaatggtgttgattttcaggagcttgagagcctgcgtaggctcaaggcgctggacatcacaatacaatctgttgaggctctggagcggctgtcacggtcatatcgcctcgctggttccacaagaaacctactgataaagacatgctcgagcctgacaaagatagagcttccttccagcaacctgtggaagaacatgactaacctgaagagggtgtggattgtcagctgcggcaacttagctgaggtaatcatcgatagcagcaaagaagctgtgaatagcaatgcgcttccccgttccatcttgcaagctcgggcggaacttgtcgacgaagagcagcctatccttccaaccctgcacgatatcatccttcagggactgtacaaggtaaagatcgtctacaaaggcgggtgtgtacagaatctagcatcactgttcatctggtattgccatgggctggaagagctgattactgttagtgaagaacaagacatggcggcaagcggtggcggaggacaaggttcggcagcgtttagagtcatcacacccttccccaacctcaaggaactgtacctccatggcttggcaaagttcaggaggctcagcagcagcacatgtacactgcacttccccgcgctggagagcctgaaagttatcgagtgcccgaatttgaagaagctgaaactctcagctgggggactcaacgtgatacaatgcaacagggaatggtgggatgggcttgagtgggatgatgaggaagtcaaagcttcttatgagccattgttccgcccattgcactgaactcagttttggttgctagagattcttctgttattttagaggttgctcttccccgtgcatgcagtagatcgcgtgaattcagagatggccagtctgcactctgcagtgggtgtgattgtttgtattgtccatcttgcaagtacaagttgggcgattctttcttttttacccagctcgtgttctatagaaagaccagtcagcatgtgtggcagccaggaaactggcagatgtaactgtcgaaatctcctgaacagaatggctggtggataccggtacaaccattttctct

SEQ ID NO: 35682 - DNA, 1490 bp, Zea mays
  Clone ID: UC-ZMROB73079A02_FLI
gaatgaagttggttctggctgttgtgctctccttgttcttctctgttcttgggttgctttgcttggcagcggcatgtcgaagggggaggaagaggtgtgatgagctgcctgtggttaagcaggtgtcgtcgttcgatgagcctgctgtatcagggccattttctttccagaccgattcaactacatgggttgctgatgtgaaggttgcaacttcggtgccggttgtcatctttgagaagcccttgctgagcctcacatttgctgacctcttggcggcgacatcaaacttcgacaggggcaccttgttggcagaaggcaggtttgggccagtgtacaggggattccttcctggtggaattcaagttgctgtgaaggtgttggtccatggatcagcaatcggagaccaagatgctgcaagggagctcgagcggctgggacggatcaaacatccaaacttagttcccttgactggttactgtgtggcaggggttcagaggattgccatctacgagtacatggaaagcggcaatctgcacaacctactgcacgacttgccgcttggagttcaggcaaccgaagactggagtggcgacacatgggaggacaacaccggtggtgttgcaacaactgaaatcgtcacgccggaaggtactgcgacatggatgttccggcacaaaatcgccctaggtgccgcaagggcgctggcattcctccaccatggctgtatcccgcagattgtccaccgggacgtgaaggcaagcagcatctacttcgactgcgcaatggagcctaggctgtccgatttcgggctgtctatggtggcaggaaccagggccgatctgctacaccattccccgggctacgcgccgccggagttctccggctcggagaacgccgcggcgaccgccaagtccgacgtctacagcttcggcgtcgtgctgttcgagctggtcacgggcaagaaaccgctgggcgacgagtaccctggggtgcagaaggaggcgagcctggtgagctgggccagggcgatggtgaaggcgagcctcgcgccgagcatcatcgaccccaagatccgcgacacgggaccggagcggcagatggaggaggcgctcaggatcgcctacctgtgcaccgcggagctgccgtccaagaggcccgccatgcagcagatcgtcggccttctcaaggacatcgagccgaaggtggaagaggagggggactgaagatctggaggagtgtgatcggttgcaccttgcagcgtgtcggatggtggtgagatttgtgtagtgacagcgtcggcaggcaggcaggctgtgactgtgagtgagctcgtggttgttttaccatcgtcgagctcactatgccatgccttgctctgcatatatctttttcatccttctttcttccctttttcccgcttctatctcgctgattcctccagttgctgaagattattgcaatactgctctgttacattacacctgcccctt

SEQ ID NO: 35683 - DNA, 1746 bp, Zea mays
  Clone ID: UC-ZMROB73079A05_FLI
cgcaggcacgcacatcacacaacgccagcgagaaagagctctcgtccgcaccacggcgcaaccaacggggagaagaggaaggcagtgagctgtcccgcgcgtgcgcgccccgcctcccgcccgcccgtctgatgaggaagctctgcccgaacctcgagcgcgacgacgcgctggacacggtgctggaggtgcccatccccgaggagatgttctccggcggcggcggctcccgcggctccaccaggttcggctgcaccaacgtcaaggcttggatgcggtcgcacgccgccgaccggtccggcgcgggcgagccgtgctccatgacccgcggggagctgcagctcatgctgggcgtcatcggcgcgccgctcatcccgctgcccgtctaccacgccaaccagtcgccctgctccgtcctctgcgagcagctcaaggccgatcccatcgagtcgtcctccgccaagtacatcgtgcagcagtacatagcggcgtcgggcggggagtgggcgctgaacaaggttaagagcatgtacgcgatgggcaaggtgcggatgacggccgcggagctcaacagcagcgacgccgacggccacggcggaagcaccggaaacgggcaccaccgcggcgggaagaagggcagcaagggagggggcggcggcggcgagatcggcgggttcgtgctgtggcagaagaagccggagctgtggtgcctggagctcgtcgtgtccggctgcaagatcagcgccggcagcgacggcaaggtggcgtggcgccagacgccgtggcaccagtcgcacgcatcccgcggtcccccgcgcccgctccgccgttcgctccagggcctcgatccgcagctgaccgcgagcctgttcgcggactcggtgtgcatcggcgagcggagcatcgacggcgaggactgcttcgtgctcaaggtggaggcggaggcgtccagcctgcgcgcgcgcaacagcagcagcgtcgagatcatccggcacacggtgtggggctacttcagccagcgcacgggcctgctggtgcagctggaggactcgcacctgctgcagatcaggtccagcggcggcggcgccggagggagcgtcttctgggagaccaccatggagtcccgcctcggcgactaccgcgccgtcgacggcgtcaacatcgcccacgccggccgcaccgccgtctcgctcgtcaggttcggcgactgccaggacggcaacaccaggacgcgcatggaggaggagtggaacatcgaggaggtggacttcaacatctggggcctctccatggactgcttcctgccgcccagcgacctcagggagggcaaggagagccaggacgtcgccgtcgtcaaggccgacgcgcgcccgccgccgctgaggataccggcggtcaccgtgcgcgtcgggccctcgcaggtggctgccgtcaacatggacgactcggactcgctcgtcgcgaggtcatgactactcgtcacgtaccgtacgtacgtacgtacgtacttgcagtgctgagtgaagagcatgtatttgtacgtgacacttgtgttactataagatcatacatgtcgcaagatctgtaaatatattggaggttgagatcttcttttccccgcttcgagaggtgtgtgtttacctcagctagaattgaggccagaaatagtgcgatcgataatccgagctacatattccgcgtagctgtgttgtaaattctaatgaactagtaatacctgtaactctg

SEQ ID NO: 35684 - DNA, 1252 bp, Zea mays
  Clone ID: UC-ZMROB73079D01_FLI
cgacgaacggttcttctactgccaaaaggccaaaggttcctgtgacggtgacttcatatacagttgctgatctccaagtcgctacgaatagcttctgtgaagactctctcctaggcgagggttcgcttggtcgtgtttacaaggctggttttcctaatgggaaggtacttgccgtgaagaaggtagacgacagtgccttgctgtctctgtatggaggaggagaagacgccttccttgagctggtctcgaacgtttctcggctgaggcatccgaacatcgtgcccctcacaggctactgcgtcgagcacggacaaaggcttctcgtgtacgagtacgttgggaacggaacgctgcgtgatgtgctgcagcactgcttgtctgacgacgagggggcgagcaagaagctcacgtggaacacccgcgtaaggatagcgctaggcaccgctcgcgccttagagtacctgcatgaggtgtgcatacccccagtggtgcatagtaggaccttcaaggcatctaacatcctgcttgatgaagagtacagcccgcatctatctgactgtgggcttgctgctctcactactgtggtctccccggaagcggttggctcctttggatatagtgctcctgagctcgccatgtcaggaacatacactgcaaagagcgacgtgtacagtttcggagtagtgatgctggagctgctgacaggccgcaagccactagacagctccagagagaggtcagaacagtctctcgtgagatgggcagccccgcagctccacgacatcgatctcctcgccaggatggtcgatccggcgctggacgggctgtacccttccaagtccctctcccgtttcgccgacatcatcgccatctgcgtccagccggagccggagttccgcccgccgatgtccgaggtcgtgcagcagctggtgcgcctgatgcagagggcggccatcataaggcggcaatcggacgatctgggctactcgtacagggtccccgaccgcgacggcggcgcagcagcaggcgacgtcctctgactctgagaggctaggaggagacccaagttggttcacgttttgtttccgtccgtcacctgtaaatgacatttgacatgtactatagggttcggagtgtacctggacttttcgtcagctgcgagtgtcatgtattgtgtgcgctcttgcaagtggtagatatatagatatatttgtactacttattatgaaggtaagagtagtctgcctccctt

SEQ ID NO: 35685 - DNA, 1453 bp, Zea mays
  Clone ID: UC-ZMROB73079F01_FLI
tttttcaccccgagcgcgagaactagggcgaccgcagcactacgcccctgctgcccatgtcttcgtcggggcctttgccggcgaccggaacccaccacggcagtcaaagggcagagtgtaaatcccagggttccacttctgcacgcaaggtacaaaaggctgatcgtgagaagatgcgaagagataaattaaacgagcagttccaggacttgggaaatgcacttgatccagaccgtcccaggaacgataaggcaactatacttggtgacacaatccagatgctgaaagatttgactactcaggtgaacaagctgaaagctgaatacacgtcactttctgaagaagcgtgtgagttaacacaagaaaagaatgagcttagagatgagaaagcttcactgaaatctgaggttgataatttgaataatcagtatcagcaacgaatgcgggtgctatacccatgggttggaatggagccttctgttgtcatggggccacctcctgcatatccctacccagtcccagttccaataccctctggtgctgtacccatgcatccgcagttgcaaacataccacttcttccacagtcaagcttctggaaccatccaaaacacatgcatcccttacatggcatatacacaaccctgccatcctcccactgatcagccgtctaaccaacttaatactccagttgcccattcaagtagtcataggtctaactctccagctcaagactgtagaagcaagtcatctacattgcagcaaccaagctgtggagtgagaagcagtgatgctggtgatattgctactgatctggaattgaagactcctggttcttcatgtcaatcacatgcagagattgcttacaacgattcctcttcggatttgaaaacaaagaagcattgcataaagcagattaatgattgcactctcactgaaagcagtagttcaagcagatgctcttccaatggtcccccagatgtttctaatagtgctattgatgaataagctgcttgacgaccgattaacatacaaaccgttgactggtatagattgagaaaagatctcgtttaaccacccataagtgagctcccaactctatatgcagtgtaatttgctattgttgctagcttatttacatagaagtggtcagattctaatgtgatgactcacaaattgggaggcgtggactttgtagataatctcatgattgttagtggtaaaagtttggtggaagggaaaaaaggagagaacaaaatcatagacagcagcatctatggtggttcggtagggactccaggactaggtatggtgagcattgtcagtgttcggcatggcaggtagatattcataataactggattctagtaccattgcatagttcgtcctagactggcattttacataaatttctgtgtcaaatatgtaaataactcgagggcggataactggat

SEQ ID NO: 35686 - DNA, 2230 bp, Zea mays
  Clone ID: UC-ZMROB73079F04_FLI
ggagaagtttataaaggggttcttgatgataacagtttagttgctgtaaagaagtacatccataatgtaaaggaggactttgccaaagaagtgattgtccattgccaaatcaatcaccggaatgtagttagactcattggttattgtataggtgaaaatgcactaatgatggtgactgaatatatctctagaggaaacctcagtgatattcttcactccagtgaaatttctatatctttggaaacacgattgagtattgctatagggtgtgcagaagcattaagctatatgcattcgcaaatgtatgggaaagtcatccatggagacattaagcctgccaacatacttctcgatgacaacctcactgcaaaaatatcagactttgggatatcaaagttactttcaacggataataccttatacaccacacatgtactggggagcatagggtatatggatcctttgtttgcacggagcggacgcctcacctcaaagagtgatgtttatagttttggagttgttctcttggaactgattacaagaagaaaggctgtcgatggtggtcaaattagccttactgaaaacttcactcaagctctagcgaaacggaataagatacgggaattttatgatgtaaaagttgcagatgagaacagtttgaggattcttgatggaattgggaaactagcagcaaaatgcttagcaatggaaatagagaaacgtccagaaatgaaagatgttgcagaacagcttcggatgtttagaaaaactcaatatcagtcacaagaaaaaatatttttctttggctgggtacggagaagcaaacagccaccccaaaatatggtccagattcacaaaaatcgtggaaatcaagttcttaaagcggaggtacaaacacaggaagtcagtaaagtagataaagatgttcataatgtcacagtagtgagagataggagttcaaaactttacagctttggttcatcgcaggggatagaattagaaaagctgttggaagcatctgccgaggttcttgggaaaggcaagtatggaacaacatacaagactacactgcatgatggttccacgttaattataaagagactgaagactctagacgtgccagaggcagtgttcaagaaacgaatagtagcaataggaacaattgagcatgagcttgtagtcccactacgtcagtactactacagcaaggatgagaagctactggtgtatgattattttcccaatggtagcctagcttcaaatcttcatggaaaagatgtgaagccagtaggctgggagactcggtctgccattgcactctctgtagctcgtgctgttgccttcatccactcaaccaatgctgcagcttcccatggcaacatcagctcctccaacgttcttctcaccagtaactacgagggacttgtctcagaacacggcctcaaaactcttgtcagtatcccaacgttacttgctgacaacaacattgcacaaaaggatgatgtgtacagttttggcgtcatactgcttgagatgctcacaagcaagtcaccaatcgtcacagacgagccagatttggtcgattgggttttatcaataccccatgagcactgggcaacacaagcattcgataagaagctccttacaaacaaaactgtggtagaggagctggttcagtttctcaaacttgcaattcattgctgtgacaagaaccccacaatgagaccagcaatggcagaagttgttcaacggattgaggggatacgacgtttctacagctgggaataggcaccttatgtggaacagcagtgcaggttgagaggaacaaactttgagccaaggaacacgaggatacaaattttactgtgagcatacactactgttacaagcatttcttgttgtctgaaaaagacactcacgttccatcacttggttgtttgcgataccgtttccgtttgaaatatagagccctttttcaccaacattttgttctagtacacatgacacatattgtatattgagggtgctattttgttgcaattatgtcagggacgtgacaaaccgacttagttctatggaagcgggaagatgtgattcatttgtaatccatttgtgtgtttggaccctatgatggtcgtattagtagtgggccgtattggcctagtgttgtaatacaaatactggacaagtagtgaagaaagacagaaaaatagaatatcgaaaattcccc

SEQ ID NO: 35687 - DNA, 691 bp, Zea mays
  Clone ID: UC-ZMROB73079F07_FLI
gccgcccacgggcaacttcacggagctggcccagctgttcggcgccaagggcctggacaccagggacctggcggtgctgtcggccggccacaccatcggcacgtcgcactgcttctccttctcggaccgcctctacaacttcacgggcctggacgacgcccgcgacaccgacccggagctggaccgcgcgtacatggcgcgcctccgcgccaagtgcgccagcctggacgacaacaccaccctggtggagatggaccccggcagcttccgcaccttcgacctgggctactacgccaacgtggccaagcgcaggggcctcttccactccgacgcccagctgctcgccgacccttccacccgcgcctacgtgctccgccacgccacgggcgcccacagggacgagttcttcgccgacttcgccgcgtccatggtcaagatgggctccgtcggcgtgctcaccggcggccagggcgaggtcaggaagaagtgcaacgtcgtcaactaacttattatatggcctcctgaggagtcatgtctttctcttcttcattttttcgttcactgcattattgattgattgattttttttttgttcctctgtcgccatgtatgtaatgtaaatctctgcccctcatcttcagttgtccatcaggatctcatgataatgcatgcaataaaacatttttgattt

SEQ ID NO: 35688 - DNA, 1235 bp, Zea mays
  Clone ID: UC-ZMROB73079H02_FLI
cccagtggaaaagggttacacctcaagcactgatggacaagtacggcggttttttagataagagtattgtaaaagactatacagacttcgccaaggtgtgctttgacaacttcggtgacaaagtaaagaactggtttacctttaatgagcccgagactttttgtaccttttcgcacggaactggacaatgcgccccagggcggtgctcccctgggataatcactccaacgggatccacaagttgtgctaacccaattggaaactcgctcactgagccatacattgttggccacaaccttctccgagcccacgccgaggttgttgatctttacaacaagcattacaagatagattacaagggtgagaatggacgcatagggattgtatttgacgtgatgggccgtgtgccattcgaaaaatcggcgtttattgatcaacaggccgaagaaaggtcctgggacatcaacctaggatggttcttggagccggttgtccgtggagactatccattctccatgaggtcgttggtaagggaccgactacccttcttcactaacgaggagcgagagaagctagtgggctcctatgacatgctggggttaaactactacacctcaaggttctccaaacacatcgatatcacgcaacacaacacgctaaggctcaacactgacgatgcatatgccagtcaggaaacgaaagggcctgatggcgagcccattggtcctccgatggggaattggatctacctgtatcctcaaggcctaaaggatctccttaagatcatgaaggagaaatacggaaacccacccatgtacatcactgagaacgggatggctgaagttgaccttggccataacttgaatgaccagaaaagaatagattacctccagagccacttggcagctcttcaggactcagtggagtcgggagcaaatgtgaagggctacttcctttggtctctgctggacaacttcgaatggttctgcggctacacccaaccttacggcatcgtctatgtggaccgcaacgatggctgcaagcgctacatgaagcagtcagccaagtggtacaaaagcttcatcgctgcgaatgataaatgaagtgcacccatacgtatactcactaccagaggagaggtagtggagagcaccatatgcattgttccagtccagggttaccgtaccttattatatatgaaataaatgaagtgctctaatatttcgtcctgtggg

SEQ ID NO: 35689 - DNA, 1927 bp, Zea mays
  Clone ID: UC-ZMROB73079H05_FLI
ctcatctagggtttaatcctctcagccacgctttcagaaacaattcgttgattgctattcgatagatcgtactaaaggaagcacatggatctagtatgatttatatctaattcagcgcaactgatcgtggggattcgattctccatcgtgaattgtggtgcctttccgatcagccatggtgaagaggctcaggcgtaagggcgacgtctcctccgcgccgccgcccaaggcctccgccccggggtctaccaagtccgtcaagttaaagaagggggtcaaaaccgttccgaagaagttgaaggggctctgcactgaatccgtgggcatcgctgaggcgtctgcttcggcgcagacaccggccccaaaatcaatcaagacgagtccggcagcggccaccgccgcagagaccgcagatgatcgggtcgcccagaacaaaacggtggacagaaatttgagtaggaaggagacaatgaaggggagagaggcggagaagggagagatgaccagtgatggggtcgcccagaccaagacggaggacaggaaggccagtaggaaggaaacgatgaaggggatagagaagaaggcggagggggaagagaagaggacgagtaggaaggagatgatgaaggggagggaagaggagcgtgtgaagagggaagagaagagaaggaagttgacagggaaggaaaaggagaaagagagtgcctctggattcatattcatgtgcagtgcgaggacaaagccagagtgctaccagaacggcgtgtttggcctgccccgggggaagatggatgtggtggagaagatccggccaggtgctaagctgttcttgtatgattttgacctcaagctaatgtatggggtatacaaggcagatacaaggggaggattggatcttgtgcgacatgcctttgatgggaaattccctgcacaggttaaatttagtgttgacaaggattgtcttcctattcctgagagtagtttcaagcatgccattaaggagaactacagctcaaaaggcaggttcacccaagagctgaactctaaacaagttcaaagactattggcaatgttcaagcctatcgaccttcctcaatcagctccacaacatatcgaggaagtgcgacaatcacatatcattgaagatattagaaacccgagtgactatgaagatagaagacgattgcaacatattgaagaaagaggtgcacctattgatgtccatgcatatcctcttgaagatcagtacaatatcacacgatcattacatcctccactttttgatgagcctcgacgtttggtgctagatccttatcatatgcaagagcctcaacatgttcctcttaattactatcaccaagtggctactaggtccccatactgtcaacctcatatggatattatgcatgaaagaactgcagctgaggcaaccctgatggatccacttccggtaagagatcaccgagcactgccaggagagcttgctgcacggtctgaacgcgtggatgagctgtaccgttcttacaaactctctacacgcgggatggacttcaatccgggagcatcctaccagacaacttatcacccgtctagtagtgtttatggtgaaggcattcagaggccagttttggcaaggggtaatggcccaagtgtgcctgtgtccagccgttattcctttaatggcccaccagcatattgatggattgcctagatgcaagcactcaaatcggccccagcctattgtactgcgtaccagttaatgtaggcaatgccttcttgtataccgttggaagccaggatagacttgatggtagttaggggccctaatggtagtagcttcgcagtttgttcatcgccgtgggattcattttgcaagataaatgtatgaaatgaaatgttaaccttgtttgatccaagttgtttaaac

SEQ ID NO: 35690 - DNA, 1180 bp, Zea mays
  Clone ID: UC-ZMROB73079H08_FLI
cgcgccgccaccgtccggaaccgccagcgccgcctctacaccaacaacgccagcggggactggggcggcggcgacgacgggccccgcgcctggacgcacgtcaagctggagcacccgtccacgttcgccacgctcgccatggacccggacaggaagcgggaggtcgtcgacgacctcgacatgttccgcgacggcagggactactacgcgtccgtgggcaaggcgtggaagcgcggctacctgctgttcggcccgcccggcaccggcaagtccaccatgatcgccgccatggccaactacctgggctacgacatctacgacctggagctcacggcggtcaagagcaacacggagctcaggaagctcttcatcgagaccaagagcaagtccatcatcgtcatcgaggacatcgactgctccatcgacctcaccggcaagcgaaagaagaagaagaaggacaagaacgatactaggaagaagaagaagaaggcgccgtgggaagaagaagacaaggacgaaggcagcaaggtgactctttcagggctcctcaacttcatcgacgggctgtggtcggcttgcggcggcgagcgcatcatcgtgttcaccaccaaccacaaggacaagctggacccggcgctgatccggcggggcaggatggacatgcacatcgagatgtcctactgctgcttccagggcttcaaggtgctcgccaagaactacctgggcgtgcaggagcatgacggcgagctgttcggcgacatccgtcggctgctggaggaggtggacatgactccggcggacgtggcagagaacttgatgcctaggtccaagaccaaggacgccgatgcctgtctccggaggctcgtcaaagcgctcgaggaggccaaggaggcggcgttgttggcggccaaagccaaacaactggacgggatcaaggacgatgagggaaccgacgatgaagacgacagcgatgacgatggcagcgttaccagcagaggtcacccctccgacggtgacgaaaagagtgccaaaaaagaggaaatgtaataaaaaagtttaaaacctataaaagcctgaaagctaggtgaggatacttgacttgagcattcctttccaaagctggtggtacctagaattacttttcttacttgtatgctaactatcttgtcgtttttctgtt

SEQ ID NO: 35691 - DNA, 703 bp, Zea mays
  Clone ID: UC-ZMROB73080A06_FLI
ggctaaaatagtgccatctattggtcagcttttagaaacagctgagatacagaaagtattgttccttgaaactcctgagaggatttcgtctgcactgagaccgtactgggcaaaggcgatagagggaagggcccatgttgttcaggcacagcctgatatgcttgaacttgtaccacctgcaacttcgaaaggcaatggtgtgaaggttctgttgaaccacctttccattagtccagatgaggtaatggcaattggtgacggagaaaatgacattgaaatgttgcaactagcttcgtttggggttgctcttgcaaatggatctgacaagacaaaagcagcggcaaatgtaattggcgccacgaatgatgaagatggagttgcacaggctatttatgaatatgccttctaagagcaacgaatcattttggactgggttaatttcttctgatttcccatttttcgtggactcaacacagaacaattgtagtggttccaacttgcaagtacacaccgctccaccggagcgcaatctcgctctggtgttacagtttctgaactgtttgcaactgtaagacattttttagttggcatgaaccgaaatccagctaccagctcgacatactcttggctggatatgtaaccgctaaccgaattactatttttttctcatttttttatgcaaaagctttccttttttttaccc

SEQ ID NO: 35692 - DNA, 691 bp, Zea mays
  Clone ID: UC-ZMROB73080A08_FLI
gaagcagctcaacgagctctactcctccctccgctccctgctcccggacgccgaccaaactaagaagctgagcatccccaccaccgtgtcccgagttctcaagtacatcccggagctgcagaagcaggtggacaacctggagaggaggaagaaggagctgaccaacgccaactgcaagccgggagttctgaaaaccaccaaggccgtaactcccattgtttctgctacctgcctcaacgacacggagatcatggttcaggtcagcctgcacagcgatgtggccgccacagctctccctctctccaagtgcatcaaggtgctagagaacgaaggccttcatctcgtcagctcatcaacctactcctccgcctttgagaacaagacattctacagcctccatcttcagagaagtcaaagaacgatgaaggaggagtgcccggcattctgcgagcaactggagaagatcgtcaggaagaaagcaggggcgtagccagctgcagcctgcaggaggagtgtgctggcgcatgcgttcaccattcctctgcgtgctactccagccataagcacacacagctagctaattaaggtattttagtctgtaaataatggactgtgtagtcgtgtgtgtgtgtgtgtgtcgtaactgtgaaagtcgccgatggatgcataatatatatgtggtttttccctt

SEQ ID NO: 35693 - DNA, 1265 bp, Zea mays
  Clone ID: UC-ZMROB73080C07_FLI
catcatcaagtcaaggaacacttaacctgaagaaaaccactattgcagcagcagtatagtcaacggtgtagcagtagctgcattgcgttattggggtagtagtgtggcagtgttggactgctggtcatcaggtcatggcttcttcttcttttacttccttgtcagtgatggtgctcttgtgcctagcggcggcggcggtggcctcggcgcaactgtcgccgacattctactccaggtcgtgtcccagagctctggccaccatcaaggccgccgtgacggccgcggttgcgcaggaggctcgcatgggggcctccctgctcaggctccacttccatgactgctttgtccaaggttgcgatgggtcggtgctgctgaatgacacggccaccttcaccggcgagcagaccgctaatccgaacgtcggctccatcagaggcttcggcgtcgtcgacaacatcaaggcgcaggtggaggcggtgtgcccgggcgtcgtctcctgcgccgacatcctcgccgtcgccgcccgcgactccgtcgtcgcgctgggagggccttcgtggagggtgcttctcgggcggagggactcgacgacggcgagcctaactctagccaacagcgacctgccagcgccgtccctggacctcgccaacctcaccgctgcgttcgccaagaagcggctcagcaggaccgacctggtcgctctctcaggcgcgcacacgatcgggctggcacagtgcaagaacttccgggcgcacatatacaacgacaccaacgtgaacgcggcgttcgcgacgctgcgcagggccaactgccccgcggcggccggcaacggcgacggcaacctggcgccgctggacaccgccacgcccaccgcgttcgacaacgcctactacaccaacctgctggcgcagagagggctgctacactccgaccagcagctcttcaacggcggcgccacggacggcctggtccgcacgtacgcgtccacgccgaggaggttcagcggggacttcgcggcggccatgatcaggatgggcaacatcagcccgctcaccgggacgcagggccagatcaggcgcgcctgttccagggtcaactagctagctacgtactcgcggctatagctacctgtgcgtacgtcccaagtgatccgacgatccaacggttcccatcagtgattatcactgtaataaggccggttgtgccattgtcagttgcgcctctgttttgcttgtactggttcaagaactcctctttctcgagtc

SEQ ID NO: 35694 - DNA, 948 bp, Zea mays
  Clone ID: UC-ZMROB73080C11_FLI
ggcggccctggctagtggtacaatgggaaagctgcatggttgtgtgttaattgcgggcactggatgcattgcttatggagttacagaagatggaaaagtagcaagagcagctggtgctgggcctgttttgggcgactggggtagtggatatggcattgctgcacaggccctgacagcagttataaaagcatacgatggtcgtgggccacaaactagacttacaagagatatccttgagaagcttgatctttcttcaccagatgaaatcatagggtggacatatgcggatccatcttgggctcgtattgcagcacttgtaccagttgtggtatcttctgctgaagatggtgatgaagtagctaacaaaatcttgcatgattcagtccaagagttggctgacactgttatagcggttgttcagcgtcttagattgtgtggcgaagatggaaaggacatgtttccacttgttttggttggaggggtccttgaaggaaataaaaagtgggatatcagtggtgaggtcataaaatgtatttccaaggtcttcccgggcactgatcctatttggcctgaggtggaaccagcaatcggtgctgccttgctagcctggagccatcaccacaaagggttgaaattggagaatggaagttgattcccagcatttaagggtgtcaattgtacattgaggagttggcgagccaaaggggtattggtcccaatgatacattcatcggcatgaaggcttttcgttcccagcaaaaagaataaatcgtggatgggtgcaaacatgcggtgtggatagaacatatttctgatgtaagtaggtagtaagaattgttcaaatattcctctgattctaactctcggtgattgttgtatgtgttctgtttgtgtttggaggtagtaacatgtatctgtctaccatggataattgatcgtcaaatgttc

SEQ ID NO: 35695 - DNA, 1865 bp, Zea mays
  Clone ID: UC-ZMROB73080D02_FLI
cagttcctcttctcagtcatgctcttcgaccggttgtcgccggtgaccaggcgatcgcatccctttttttctctctcaggggaggggcggcgcgtagaggcacgccgccgagcttcgggcatcccatctgacgcgaccggtcttcgggcacgccgccgatcgagctatggacgcgtcgagctccctgtccctcctcgcactggtgaccatgctcagcctcctccactccgccacgaccgacgccgccgcgggtctgccggcggcgcggacgagccaccggaggctactgctgctacaccagcaggacaccaacctcgccgcgctgcctccccctgcacgcgtgcacgtcgtcccagtcgacgtccacgtcccttctcatggaaccggctcttttccggcagcgtctcccggtccacacgggggcaagaacggtccgagtgaggcagcgccagcgacgccggcgacggcggcggcctatctgtcgagatccatgaggtggctgtacatggttgcggttccggcggtcgccctgctggcgctcgctggactggcgtgctggcttctgtgtcgcaagagcgccgttgccaccattgggccttggaagaccgggctcagtggccagttgcagaaagcgttcgttacaggagtaccgaagctgcagcggtcagagctggaacgtgcctgcgaggacttcagcaacatcgtggtgagctacccgcactacaccgtctacaagggaactctatcgaccggcgtcgagatcgccgtggtgtccaccatgatcacgtcgagcaaggagtggacagagcattcagagagctgcttccggagaaaggtagacgccctgtcgcgaataaaccacaagaacttcgtcaacctgctcggcttctgcgaggaggaagaaccgttcaccaggatgatggtgctcgagtacgcgccgaacgggacgctccacgagagccttcatgccgaggatttcgagcgcatcgcttggcgaggtaggatgaggatcgtcatgggactagcgtactgcgtccagcacatgcacgagctcagccctcccgtggcgcaccctgacatgcagtcgagctccgtactgctatctgaagacggcgctgcgaagatagcggacatgagcgtttggcacgaagtgatttctcaaggcaaaacgacgacaaatggtgacgaacaagcgtcgtccgctggcctgctggcggggaatgtgtacagcttcggtgctctgctgcttgagatcatctccgggaagcttccgactccataccccgcacacgagcgctccctgcagatgacctcggtaacgagctatcgacggaacaccgttatgtttctaacaaccagaagaagaacaccaaatggtgacgttatgtttcttcttcttcttcttcttcttcttcttcttcttcttcctaggctctggtggagcgcgtaaccaacgacgaccggagcgtagcctcgttgcttgatccaacgctgggtggagaccacagggaagacgagctagcggtcatcggcgaggtgatccgggcctgcatgcagagcgacccgaggcgaaggccgagcatgagggaggtcgccgccaggctgagggaggccgtgggtatctcgccggtcgctgcgacgccgaggctgtctccgctctggtgggccgagctggaggtcctttccgccgcggaagcaagctaataatagtgggcgagaggacaggacaggaacagggcaggatgatgtcgcgcaatctgaccagtttgttctcaagaaaaaaaagccttgcagccctttgtgcatgctgtaaatgtgaatgtgaagctgcagggaaggaatagtaatccgtgaatgtaaatctg

SEQ ID NO: 35696 - DNA, 1301 bp, Zea mays
  Clone ID: UC-ZMROB73080D09_FLI
ggcgggcgtggccatgtgcctgcagaagcggcggcggcggcgcgcggaggcctccgcggggaagctgttcgccaagaagggctcgtgggacctcaagtcgttccggatcctggcgttcgacgagcgggagatcatcgagggcgtccgcgacgagaacctggtcggcagcggcgggtctgggaacgtgtaccgcgtgaagctcggcaacggcgcggtggtggccgtgaagcacgtcacgcggggggtggcgacgagcacggcgccgtccgccgccatgctgcggccggcggcgtcggtgcggtgccgcgagttcgactcggaggtggggacgctgagcgccatccggcacgtgaacgtggtgaagctgctgtgcagcatcaccagcgcggacggcgcggcgagcctgctggtgtacgagcacctccccaacggcagcctgtacgagcggctgcacggggcggcggggcggaagctgggcgcgctcgggtgggtggagcggcacgacgtggcggtgggcgcggcgaggggcctcgagtacctccaccacggctgcgaccgccccatcctccaccgcgacgtcaagtccagcaacatcctcctggacgagtcgttcaagccccggctcgccgacttcgggctcgccaagatcctcagctcggcaggcggcggcggcggccactcgtccgccggcgtcgtggccggcacgctggggtacatggcgccggagtacgcgtacacgtgcaaggtgacggagaagagcgacgtgtacagcttcggcgtggtgctgctggagctggtgacggggcggccggcggtggtggagagccgggacctggtggactgggtgtcgcggcggctggagagccgggagaaggtgatgtccctggtggacccgggcatcgtggaagggtgggccagggaggaggcagtccgcgtgctgcgcgtcgccgtgctgtgcaccagccgcacgccgtcgatgcggccgtccatgcgctccgtcgtgcagatgctggaggacgcggccgccgcgcgccaggacgacgacgggaaggtcctggaggtgaaggtggtctgagaccgaatggcggcgccttaggctttggccgtgcccggcgggcgccggcggtgacaggaggacggaaaggtcaccacggccagtggcagtgtcgcacgtgtaacagtaagattagtagattgttattttgcctgaataaccggccaagaaatcttcttcaccttctacagaaaggcatttttgtaagcacatgtcagtcaatggaggagtaggttgtttggcgtct

SEQ ID NO: 35697 - DNA, 1829 bp, Zea mays
  Clone ID: UC-ZMROB73080E02_FLI
gcacggccacacctgccctccattccatccagcacctagaaaaaactaatcgcaattagttgacgcataatattttgagggaggagaaggggggaattgactagttgaccaatcgcgagtggcgatgatgatgcagttgggggccaggagtttggtgaggaggttctcccgtctcgccgcggcgggggccccggccgagacgacgtcggctggcgtgccgcgaatgccggcgttcgaccacgtcccgctgccctacgacgggccgagcgccgccgacatcgcccgcaagcgcgccgagtacctcagcccgtccctcttccacttctactccaagcctctgaacatcgtggagggcaagaggcagtacttgtacgacgagcacggccggcgctacctggacgcgttcgccggcatcgccaccgtgtgctgcggccactgccaccccgacgtcgtggacgcgatcaccaggcaggccaagcgcctgcagcactccaccgtgctctacctcaaccacgtcatcgccgatttcgccgaggcgctggcatccaagctgcccggcgacctcaaggtcgtcttcttcaccaactccggcacggaggcgaacgagctggccatcctgatggcgcggctgtacaccggctcccacgacatcatctccctccgcaactcgtaccacggcaacgcggccgggaccatgggagccaccgcgcagaagaactggaagttcaacgtcatccagagtggcgtgcaccacgcggtgaacccggacccctacagaggcgccttcggctccgacgccgagaagtacgtgcgggacgtgcaggagatcatcgagttcggcaccaccggccaggtcgccggcttcatatccgaggccatccagggcgtgggcggaatcgtggaggtgtcgccgggctacctgccgctggcgtacgacaaggtccggaaggccggcgggctctgcatcgccgacgaggtccaggcgggtttcgcccgcgtcggcagccacttctggggcttcgagacccacggcgtcgtccccgacatagtgaccatggcaaagggcatcggcaacggcatcccgctgggcgccgtggtgacgacgccggaggtcgcgcaggtgctgacccggcgctgctacttcaacacgttcggcggcaacccgctgtgcaccgccggcgggctcgccgtcctcgaggtgctcgagaaggagaggctccaggagaacgccttcgtcgtcggctcctacctcaaggaccgcctccgcggtctccaggagaagcacgagatcatcggcgacgtgaggggaacgggtttcatgctcggcatcgagctggtcaccgatcggcagctcaagacgccggcgaaagatgagatctgccacgccatggaacacatgaaagatatgggcgtcttggtcggcaaaggcgggttctatgggaacgtcttcaggatcactccccctctatgcttcaccaaggaagatgctgatttcttcgtcgaggtgatggacattgcgctgtcgaagctctgagctgtggccgtcaggcggaggggcggtgtgtctgtctgtatatataatcctcgcccgagtttagcagctgcgtcggagttgtactatctcactcaagagaatggcgaaaaaaccttggcagtttgtgactcaaggggaaaaaactaaaccatgcagacgaatttggcttatcgcaacgctagcttttaattcagctttcgtctggagatgacgtgccttgtaacgtgccagagataatgactggggactggggttcattttaccttacttatataaaaacagattttatatgatc

SEQ ID NO: 35698 - DNA, 1445 bp, Zea mays
  Clone ID: UC-ZMROB73080E05_FLI
atgattaccggcctccaggaataaaatctttgaagttcagcaaattttctcttggaaatgtgtcaccaaagatagaaggtattcgtattcaaaatcttcaaccaggtcaaatcatcatggatatagatttccgttggggtggtaatccaagcataatcctagctgttgatgctgtagttgcatcactgccaattcagctcaaggatcttcaggtctatactgtcatacgtgttatatttcaactgtctgaagacatcccttgcatttctgctgttgttgtggctctccttgctgatccagagccaaaaattcagtacaccctgaaggccattggaggaagcctaactgcagttcctggactttctgacatgattgatgacactgtcgattcaattgtttctgatatgctcttgtggccacacaggcatgttgttaaacttggtgtcaatgttgatacgagtgacttggagcttaaacctcagggaagactttctgttactgtggtaaaagcaacttctttgagaaataaggagatgatcggtaaatcagacccttatgtgaaactgtatgtgcggccaatgtttaaggtcaaaacaaaagtcatagatgatgacctgaatccggaatggaatgaaacatttgacttgattgtcgaagacaaagaaacccaatctgttatttttgaggtttacgacgaagacaaacttcagcaagacaagagactaggtgtggcaaaactagcagtaaacactcttgaatctgagattacccaagacgccactctgaagctgctacattcactggatccaattaaaaataaggacaccaaggataggggcacattacatcttaaggtaaagtaccacccctttacaaaggaagagcagctggaagccctagagatggaaaaacaagccatagaggagaggaagcgtctgaaggaggctgggataattggtagcacaatggatgctgttggttctggtgttggatttgtgggtactggcattggcgctggcctcggtttcgttggttcaggaattggtgctggcgcaggccttgttacctctggtattggtgctgtcagcagtgcccttggtaaagccgggaagttcatgggcaggactgtgacagggcctttcagcatgtcccgcaagaacggcagcagctctactgctccccagcatgatcaaccttcggcgtagtctgatgtacagtgaaagacaattgtcatatttgtgacagggttgccattctactctgtatacgtgctatacctaggactatacgtagcacttcgtttttgtttctgccactgcctggtgcctggttatatgaaatatgttttcgtcgttgtattgaaacgaggatctttcaaagtaaagattgctgtaaattgcatcagctttcccgaactatatgaaatttgtgcagtctgttgaagt

SEQ ID NO: 35699 - DNA, 1894 bp, Zea mays
  Clone ID: UC-ZMROB73080E10_FLI
ctttaaatcgagcgccgcttcctctccgccgctttctctccccttcactcgagcgccgcttcctctccccttccatcgagcgcagcgcctgcgccgccgccaccactccgcaccgccgccagttccccacttcctccccacacccgaatcggattgaagccagaaggcaaggtgaagagtgggcttgggtaacggttgcaaagagatatccccaacagttgcagtcactcgcatccagtcggctcagctatggaggaggactcatcagcgatggagccgaataggctgcgcgaggccgaggcggcggctggggagctgaagaggctgcgcgaggccgggcagtctcagtacatgtaccggtctatcgccgacgccagggttgtcggcggccgggtctgcctcttcgccgtcgtctccgagatcggcgctaccgtccacagccgtggcacggatttcactgttacgttgagggtaatagatgaatcatacaagtctggaatatctgtaactttttttgctgacagcactgcactattgccttgtgtgaagtcgtgtggagatgtgatcagtctccataacgtcgtggcaaaacgtatactgaatgcagtccatatcagacttctataagatatcatgacagcgaacacgacaaagattttttaaatcagatgagaacgtggctccctcaaggtctgaaggatttcacttcaaataattccgaattgtatttaatgaatttgaagtccgattctacttttgatctagtatgcaaggtttttcatgtacatgtggagaacaacaattcaatattttatgtttgggatggaactgatacccctgcagctgagtttccagcaattttggatgctgaggcagccaaatcactctctctacatgaaggcccccctctatccagggagattttatgtacaatgccagatttcggaactgtcctaaggattttttcagatagatttgtcaataaagtatcatatatgcaaaagaacatatattgggccaggttctggaacattacttgcaaacaaaactttggcatttggaaaggtactttctcggactccggtggagttcgcctattatcaaacaaagatgatagcgttgttgatcgtctaaagatgtatgacagccgcatcgccaaccgagttcgtcgtcggccgatggcaagcatcccctccagtgttactgatgtagaatacgaggatgcaggttacgcttcattaatgaagtctttaactcatcatgatgtgacgcacaaattgagaaccttggtccgtgttgtggcagcacatccatgtgaagctagtttgctttcaactggtaactgtcatcttcggttgactcttgaggatcctacagcgagaattcatgcgtatgtccacaagaatgatttggtcggattctttggtggtggttttttgacagcagaagtgatagtaaaaaagatgaacatggtactgggcatcccggaaccacaaggcagcgtggaagttgccccctcgaccaggaatccaccttggatatggtgttgcttgatgtcatactatatggacaaaaacgatccctgggtcagcagaaagtaccggatctatagcacagccatcagggattgagcagagggatgctgctggaatgtgcaggaacaaacttgtaaatgaatgggacagatgctgtgtagtattggcatcttgcttgtagaagaggccatatgcttttgcaggtgcaatcagtgaatcattccatactgaacactgagaatagcacctcgggttcattctgtatgtgcctacactctagattgtcttttgggtgctcatcacgaaacgtgagcatatcttttggaaacagagacctgcgtttgattcctgtgcttgtt

SEQ ID NO: 35700 - DNA, 1744 bp, Zea mays
  Clone ID: UC-ZMROB73080F12_FLI
ctcctcctcctcctcacctcctcctagtcccatctgctgctccacctttctggtccggaggcgcctcgtcccgctcctccgccgccaccggatggcgctgctcacggcgccggcggtggccgcgctgctgctgctcttctggtccgcggcgtacggcggtgacgcccaggaccagggcgtgccgccgccgtaccaggacgccagcaaggacgtggaggtccgcgtcagggacctgctcgcgcggatgacgctggccgagaaggtcggccagatgacgcagatagagcggatcgtcgcgtcgccgcaggcgctcagggactactacatcggcagcctgctcagcggcggcggcagcgtgccgcggaagcaggcgacggcggcggagtgggtcaccatggtcagcgacttccagaaggcgtgcctgtccacgcgcctcggcatcccgatgatctacggcatcgacgccgtccacggccacaacaacgtgtacggcgccaccatcttcccccacaacgtcggcctcggagccaccagggatccaaacctggtgaagaggatcggcgccgcgaccgcgcttgaagtgagagccaccggcatccagtacgcgttcgcgccatgcattgcggtgtgccgtgatccgaggtggggccggtgctacgagagctacagcgaggaccaccgtatcgtgcaggccatgactgagctcatcccgggcctgcagggcgacgtcccgcagaacttcaccagcggcatgcccttcgccgccggaaaggacaaggtcgcggcgtgcgccaagcacttcgtcggcgacggtggcacgcagaacggcatcaacgagaacaacaccatcatcgaccagcagggcctgatgagcatccacatgccggcctacctggacgcgctccgcaagggcgtctccaccgtcatgatctcctactccagctggaacgggctcaagatgcacgccaaccacgacctcatcacaggcttcctcaagggcaggctcaacttccagggcttcacgatctcggattgggagggcatcgacaggatcaccagccctccaggggcgaactactcctactctgtgcaggcttcgattcttgctggcattgacatgatcatggtgcccaacaactaccaaaacttcatcaccatcctgacgggtcacgtcaacagcggcctgatcccgatgagcaggatcgacgacgccgtgactcggattctgcgcgtcaagttcaccatgggcctgttcgagaaccccatgccggaccccagcctcgcggaccagctggggaagcaggagcacagggacctggcgcgggaggcggtgcgcaagtcgctggtgctcctcaagaacggcaagccgggcgacgcgccgctgctgcccctgcccaagaaggccgccaggatcctggtcgcagggagccacgccgacaacctggggtaccagtgcggcgggtggacgatcgagtggcagggcgacacggggcgcaccaccgtcggcaccacggtcctggacgccgtgaaggcggccgtggacccgtcgacggaggtggtgttcgcggagagccccgacgccgagttcgtcaggagcggcggcttctcgtacgcgatcgtggccgtgggcgagcacccgtacacggagaccaagggcgacagcatgaacctgacgatcccggaccccgggccgagcaccgtacagacggtgtgcgccgccgtgcggtgcgtgaccgtgctcatc

SEQ ID NO: 35701 - DNA, 2066 bp, Zea mays
  Clone ID: UC-ZMROB73080G04_FLI
tctctccacacataaaaaccaacgaagcgggcgagtgatcaggcagaggcagcaggcaggaaataaatttgaagaaagctagacctctgatcagcaggagctcatgggcgccatgatggcctccataaccagcgagctcctcttcttccttcccttcatcctgctggccctcctcgccttgtacaccaccaccgtcgccaaatgccacggcacccacccgtggcgccgtcagaagaagaagcggcccaacctgcccccgggcgcccgcggatggcccttggtcggcgaaactttcggctacctccgcgcccacccggccacctccgtgggccgcttcatggagcggcatgtcgcacggtacgggaagatataccggtcgagcctgttcggggagcggacggtggtgtcggcggacgcggggctgaaccgctacatcctgcagaacgaggggcggctgttcgagtgcagctacccgcgcagcatcggcggcatcctgggcaagtggtccatgctggtgctcgtgggcgacgcgcaccgcgagatgcgcgctatctcgctcaacttcctcagctccgtccgcctccgcgccgtgctgctccccgaggtggagcgccacaccctgctggtcctccgctcgtggccgccctccgacggcaccttctccgcccagcacgaagccaagaaggtacggtactcatcaccatccttcttctgacccttcaatttgtctccacgcgtagtacgtacgtgccacatcagatcagttctatctatatatgtggctgaatctatgcaaaggatcgccgctaacaaccggtgccccggccgggataacaaccggtgatgggcgcgcggccggccggatgacgagtgcagttcacgtttaacctgatggcgaagaacataatgagcatggaccccggcgaggaggagacggagcggctgcggctggagtacatcaccttcatgaagggcgtcgtgtcagcgccgctcaacttcccgggcacggcctactggaaggcgctcaagtcgcgcgcgtccatacttggagtgatagagaggaagatggaggacaggcttgagaagatgagcagggagaagtcaagcgtggaggaggacgaccttcttggatgggccctgaagcaatccaacctgtccaaggaacagatcctggacctcttgctgagcctgctcttcgcggggcacgagacttcgtccatggcgctcgccctcgccatcttcttcctcgaagggtgccctaaggccgtgcaagaactccgggaggagcatctcctgattgctaggagacaaaggctaaggggggcgtccaaattgagctgggaagactacaaggaaatggttttcacgcagtgtgttataaacgagacattgcggctcggcaacgtggtcaggttcctgcaccggaaggtcatccgagatgtacactacaatgggtacgacataccgcgggggtggaaaatcctgccggttctagcggcggtgcacctggactcgtcgctgtacgaggaccccagccggttcaacccttggagatggaagctgcagagcaacaacgcgccaagcagcttcatgccgtacggcggcgggccgcggctgtgcgccgggtcggagctggccaagctggagatggccatcttcctgcaccacctggtgctcaacttccggtgggagctggcggagccggaccaggccttcgtctaccctttcgtcgacttccccaagggcctcccgatcagggtccagcgggtcgccgacgaccaaggccatcgtagcgttttgaccgagagcacaagaggctgagagggaggaggcagttcaatttttcgttgcattttgagggctgtggtctcgtgttttatgtagattgtgattattattattatacatactaaaacaagatagaagcacgtatagacagagcaaagaggaggatggtccaaaagtgtttggggtagataaaatgtgtactcactagggttgtaataaggccggtccatggcccatgtcaagtaatactagagatatatagaatatagtggatatcc

SEQ ID NO: 35702 - DNA, 1241 bp, Zea mays
  Clone ID: UC-ZMROB73080G10_FLI
ggcatattcctggaaggcctcgggtggatgaaggaccagcagttcaaccagctcttgcaggttttcctgctaatcaagcagctgggctgcaagtacaatcttcactcaagcctgacattatggctacattagcaaaacttctgcctagtgtgcaatcgtcaccgctggtaagtggtcagatgaatgccatagacagaacatcgcagatacaggatccatccatgctttcaaaagtatggaatcctgaaaaccaagttactgcttcaaattcatcctttgggcaaatggctaatgttcagcatccaggacagcagtttagtggccaagcttcagctgctcatttgacaaactatgggaacatggtgagtgctcaggagcgctcaatacaacatactgcttacaaccctgaagttactttgaacttgccaccaccacctccacttccaacaataccacacagttctgctacattacagtctcaaggtggccacagtttgccctcacagacaaaccagcaactgtatcagccagagcagtattatgtgccccaaaacaactatggtccattagttccagttagccattctaaccttcaaatcagcaacactaacaaccccacccttaccatcccacaagtgaaccctggacctccaacaaataatcagattgggaatttggcccagccacagcattctatgccactgcatgttgatagagcaagtcaggatttctcttctcaggggcaacaacaaaatcgtggtcctggtgctgcacaagctcccgaggaggataaaagcaagaagtaccaggcgacactccagttagctcaaaacctactgcttcagttacagcagcgtggatctggaaatcaatcctgagacctaattattgcttcaggtaccctcgtctcgtctcagctggtcgcaaacaactgaaaatatatatcccaactcgacggcttcgcctccactctacaatcgaagcggcccatggtgtgtcagctcgttggcctacacctacttgccccagttctcccttttcaaggacatacattaccagaaaacgatttctttttctcctttttattttatcgtgtatttgatatggataatccggcctgaattttgtactcgtttgttagtatggcctcgtgttatgttgttatttactctgaaaccatatgttattgtgtacggtgccgtggttccaacacaagggaagcttgttcagagacccgtttc

SEQ ID NO: 35703 - DNA, 2537 bp, Zea mays
  Clone ID: UC-ZMROB73080G12_FLI
cgtcagcacgtcctagtgtcccacacaccggcctccacgcagccacgggcatgtgggccctcaacctgaaggccggtgggtcttgcctcacgccgaggcatccccagccggcagcgcggtcgtcgcttgccgccgggatcggctcgctggctgtggggatgaggtggatgcggcagcctgtgcggtggccgaggttggcggtgagcgcgtcggggaggaagggcaacaacggccgagaggacggcgacgagcccaagaacaaggccgcctcttctggaaaaagtgatgcatctactcccagtggagatgcttccaacgaaacaaaccaaaatcagggtgaaccaaaatcaagtgacacgatgtatatacctagcaacttgtcatattggagagatgtgagagcaagctttgtgattccaaagttggtaagaccaaactttctggtctttgctatatcatccgtactataaagtttggcaaaagattttgacaggtacctttaaatcagctcatttagcgattatgtaggaatgttgttagaatctgaaatgaaatttcatagtaactctggctatcatttttcctcagttgcgttcatttgttagtgtcataaaggaaagaagccaatgggtcaatttctgaagattgacttgcacttataacccctaacattgtacctaaatgttacaacctcagaaattgacacatgggactttggaaacataagaatgaccatgatacaaaatgtattttattccctttcagtttttcaacttaatgaatattatttttgtctgttgttccccgtttttagagaaagttgaaatgtgagacttggctgtcctcattcctcaactcctcagttgattgaaacattttctctctctctctctctctctctctctctctctcacactatcatctatgtgctgatcctggacttctttttatggttcttgctgcaatattcattattctagattatgttgaactttttgtctagcaacgcagatacacaaaaatgtgtatttcttcacatcaaacaacaacatactgctagatgagttgtctccatcatgtagtgtaacaagatcttcagtgccctatttcttatagatcacaatgtcttaggctatctccagcagatccactatcctcaggggcgatgccgggttcacgtaccctggtgcactggcaacagggtaaaaacgagaaatgctactagctagatacaaattcactataaatatttgctaaatcatttattttcttaagttgtgcactagggtatgtttggagctggcttcgcccctgcctatcacatcacctatcacattttctatttcaaactacactctgcaaacagtgtcatctacctttgttgtcccaattatttttcttttgattgatttacagaccagattctttttttcttctcctttaggccttgttcgtttgtgccggattggtgggtcggaacgattcctaaccggattgcttctctaatttatatgaactttgattagctgaaacgattacgggtgcaatccgacacaaacaaacaaggccttagcaaagcagtagcctcgtctctgcctgaagctaattggtatttttgttaagaagtccctcattacttttttttttgctaatttgttatttgtcatgcatccaaactaggagcaaacattagatgcaaatagtccagtgcagacaggtcaggatggagcagcatatcgtcttcctcggaagtgggctcattccatccctatgccagagtctggatgtgtgttggtcgccactgaagagcttgatggcaacggaacctttgagaggaccgtcatccttctcctaagactaggttcaagggatgcctacgatgggccgttcggtatcatcctgaaccgtccgctgtacactaagatgaggcatgtgaacccatccttgggcgatcaggcgaccccttttgttgactgttccctcctgttcggaggccctgtggacatgagtatattcctgatgagcgcgggcgatgggagaccgatcaaggggtttgaggaagtggtacccggcatctgcttcggcttcaggactgacctggagaaggccggtgctctgataaagaagggcgcggttaagcctgaggacctcaagttctacgtcgggtactctgcgtgggaccatgaccagctgctgagcgagatcgacgcaggttactgggtggtgacttcgtgcagcacaggcctgatagccgacgcgctgacgacgacggacccctcctgcttgtggaccgaggttttgcagctgatgggaggccagtactcggagctgagccaaaagccgaagcaggatgggatgtagacttggttagtcctagccatctgcgacggtcactgtggctaatctgtacataatttgagtgatcctcggctgctcttagccgtcgtgattgctctgcccgatgtaattgactaattgcgtatgtggactgctttgacttgtttttttatatataatttggttagcatgttggcatc

SEQ ID NO: 35704 - DNA, 1362 bp, Zea mays
  Clone ID: UC-ZMROB73080H02_FLI
cttctccacaccaccaatagcagtagcccgccccctggcagcagcaggaagcagcagcactgcggcagcagatgcttcgtcgtgtcccttctcctggtcctgctagctcttgtagcctcggacgtgtatctcagcttcccaaaccgacgacgggttcttccattgttcccccagcagcttttgtctcgcagacagcagcgaggcggcgagggcggctgtgacattttcaggggcgagtgggtgccggacccggacgcgccctactacaccaacgacacctgcaaggtgatccacgaacactacgactgcatggggtacggcaagccggacctgggctttgtcaactggaggtggcagcctgacggctgcgaccttccccgcttcaacccatggcgcttcctccacatgatgaggggcaagacccttgccttcgttggcgactccctcggcaggaaccacaaggactcgctcatctgcctcttgaccacggtcgcggagcctacgacgagctggccgagcagcaagcacaccgtgtactactacgccgactacaacttcaccgtggcccacttctgggcgccgtaccttgtccggcacgagcagatcgacgaggacggcccagcgcacacgggcgtctggaacctctacctggacgagccagacggcgtgtgggcggcgcacgtcgcggagttcgactacgccgtcgtgtccgcgtccagctggttctaccgcccctccatgctgtacgaggccggccggctcgtcggctgccactactgccggctgcccaacgtcaccgacctcacgctgcgctacgcgctgcgcatggccacgcgggccgcgctgcgggcgctgtccggcgccgacggccgcttccgcggcacggccctgctgcgcaccgtggacccgtcgcagtacgagggcggtgagtggaacaaggacggcaactgcgtccggacggcgccgttccgtcgcggccagaacgcggtccagggcctcgagcgtgagttccgcacgctgcagctggaggagttcgcgtcggcggagaaggcggcgacggacggtggcggtaaggtgaggatgctgctgatggacaccacggaagccatgatactgcgtgcggacgcgcacccgagcaagtaccgggggtggacgccggagaagcacttcaccctgcacaacgactgcgtgcactggtgcctgcccggggccattgatacgtggaacgacatgctgcttcatatgttgaaatgatcatcagtaatttgaattaataatgccaaaccagtgtggctgtgtagtgtgtacaatatggtgctccctctgttgacaagtatatgatgactttgacgttttttcttc

SEQ ID NO: 35705 - DNA, 1214 bp, Zea mays
  Clone ID: uC-zmrob73080h09_FLI
tctaccgccgcaccggccgctgggagtcccacatctgggattgcgggaagcaggtgtacttaggtggattcgacactgctcatgccgctgcaagggcgtacgaccgagcggcgatcaagttccgcggcgtcgacgccgacataaacttcaacctcagcgactacgacgacgatatgaagcagatgaagagcctgtccaaggaggagttcgttcacgccctgcggcggcagagcaccggcttctcccgcggcagctccaagtacaggggcgtcaccctgcacaagtgcggccgctgggaggcgcgcatggggcagttcctcggcaagaagtacatatatcttgggctattcgacagcgaagtagaggctgcaagggcgtacgacaaggccgcgatcaaatgcaacggtagagaggccgtgacgaacttcgagcccagcacgtacgacggggagctgctgctgactgctgaagctagcgcagaagttgctgacgacgttgatctgaacttgagcatctcgcaaccggcatcgtcccagagccccaaaagagacaagaactgccttggtccgcagctccaccaccaccatgggcggccgtttgacggctccgccgttctgaagaaaaccaagatcgatgctccgtctgagctgtcgtcggcgggccgccctcaccggtcgttcctccctcatctcgtggctgccgagcatctaccgcctcggtctcaccccttcttcatcacacaccatgagagtgatgcatcaagaagagatcccagctgggcagcagcagcagcatggaaggtgaccgcagctgcacctcctcctcctaccaccaccctgttgccgttgccgctgccgtcgacgtcgtccgctgcagcatcatcaggattctccaataccgccacgacagctgccgccgccccatcggccgcctcctcccgccggttcgacccgccgccaccgtcgtcgtcctcctcctcgagccatcaccaccaccaccaccgccgctgagaatcgaagaagccacactgtaaatctgccgggaagcggctggtggcatccggcccgctcctccctccgggcgccgcaacttttttcgatcggttttgcgccgcccgggacgggttgtagttgatcgattggattcttcataactgtatttgcgtactgcttacactacccaagtgaaatcgaaaatggcgccttctctcgttg

SEQ ID NO: 35706 - DNA, 2568 bp, Zea mays
  Clone ID: uC-zmrob73080h10_FLI
gctgcccgcttctcccctccctcagtctcactcgctccgctctcctccccgagaccaggaggccaagccaagaaccgcaaaccctcaggccgtggccatggcgcaaggagcaggacgggacccggaggagctcttcgaggagctgtggcgcgcctgcgcggggccgctcgtggagttgccccagaccaacgaaagggtcttctacttcctccagggtcacctagaacagctgcaagagccgacggacccggcgctgctggctgagcagatcaagatgttccaggtgcccaacaagatcctctgcaaggtcgtcaacgtcgagctcaaggccgagacagaaacggacgagatgtacgcccagatcacttttgcagccggaaccagatcaagtggatctaccccaattacctgaaccgcccttgcaggagacgtcaaggcccgtggtgcactccttctgcaagatcctcacaccatccgacaccagtactcatggcggtttctccgttcttcggcgtcatgcaaacgaatgcctcccagcactggatatgtcgatgccgaccccgacccaagagctcatcacaaaggacctacatggatctgaatggaggttcaagcacatatacaggggccaaccccgtcggcaccttctgactactggatggagcacgtttgtcacatcaaagaagctgattgctggtgacgcgtttgtctacctgaggagcgagaccggacagcagcgtgtgggagtgaggcgcctcgtgcagaagcaaagcacaatgccagcatctgttatatcaagccaaagcatgcatcttggggtgcttgcaagtgcatcacacgctattaggactcattccattttcctagtgtattatagaccaaggttaagccaaagccaatacatcgtcaggctgaacaagtacctggaatctagtaaaattggattcgatgtgggcatgaggtttaagatgagttttgaaggggatgacgtccctataaagaagttttctggaacagttgtcgataaaggagatctttctccacaatggcaaggttctgaatggaagacattgaaggtcaaatgggacgaagccacaaacttaaatggccctgagagggtttcctcctgggaaattgaaccattcgatgcatccgcacctgccatcaccatgcccgtgcaaccatcaatgaaaaacaaaaggcctagggagacagctgaaggcctggatattcatgcactggaacctgctcaagaattctggctctctggaaggcctgaacagcatgagaagacaagcgtaagctccagcgaacccaaacatcaagtcgcttggacaagtgaacgcgcaggatacagtgccatgagcagttcaatctgtcagaattctgcagtaactgggagctggttcaagggcttcaattcctccggctcacacccttccctgccagagatctcccagaaactgtttcaggtcaccagcaacgacgcgagggttcctccttggcctgggctctccgcttatcatgctgacgagccctcttccaagctgtcctgcaacactgctctgtgcagctaccagaccgaggaggtggctccaagattttccaatgccgtcgaagaggaaaagaaggagcccggcatgttccgtctgtttggcgtcaatttgattaaccatgctaggagtagtgctaccgctgacaagacgagtgtgggagcaggggaaacatcggcgcgagctgctggttcttttgaagactctgctcagctatcaagagtgacgaaggatcatacgcacatggtgaacggaagcccccgagaaatccaaagccaccagagttgcagtggaaggagtcgtatcaaggttcaaatgcatggaaatgacgtgtgcagagctgtggatttgggaaatctggatgggtacgagcagctgatgggtgaggttggagagatgtttgagatcaaagaccttggctccaaagagaaagaggaatggaaggttactttcattaacgacgagaatgagacaatggaagtcggagctgttccttggcaggagttttgccagatggtgaggaagatcgtgatccattccattggagacaggggccatatggaggcttgcccttgcctggggcaggatgggaagagggactattagaagaagggatttttttttttggctggggcagtcaggagatgggtgctgctgaaacatgatggcgtagcttgtcgatgacaaagaaggcaacagattggttgctggcgtcagttcttccttgagaaaaaaattcagtggaaggaagaagtgatgtaacataggatttgcagaaaagatttgataatgcgtcttttagaagtttggtttggtttaaagatgacaagttaatgtgtgtctagtgatctgcctaaagccttagcgacgggcaacaagcaataacaaggatggatgatgaccttaccttgggtatgttagctgtgtaaatattatgtatgtatgtatgggacattaaattggttggcatacttgactcctgatttatattgtacgtagtgtgttgcagtgctca

SEQ ID NO: 35707 - DNA, 722 bp, Zea mays
  Clone ID: UC-ZMROMO17006C02_FLI
ggggtcatagtgtcgtccacaggcgccaccatctaccagctctactgggatttcgtcatggactggggcttcttagacctcagatctaagaaccgttggctccgagaccagctcatcctcaagaacaagccgatctactatgcttccatgatgctcaaccttgtgctgcgcctggcctgggccgagagcgtgatgaagctccgtctcggtatggtggagtctcgcctgctggatttctcactcgcttcactggaaatcatccggcgagggcactggaacttctacaggctggagaatgaacacttgaacaacgctggaaagttcagggcagtgaagaccgtcccgttaccattccgtgaacttgaaactgattgatcaagtcaaagataagaacttgccagcatgttcccaggaatttaaggaggggggcaagagttccaggaatggacacactgcccctgctagtgcttgcgcaaggattggtgttcaagtgggtaataaaacaaatcagagagcataactgcacaagagcaagacgctgcagatttttaaagatggaattagctcagacggtgccgtgtagttgaggcgccagggtcaggaaagatgatgtgcgtttactctttattggttgattgaggattgttgcatgctaatcgactaacaaatccttgacttcgtcgattcattaacctatgaatgtatctgggaactgatgactg

SEQ ID NO: 35708 - DNA, 749 bp, Zea mays
  Clone ID: UC-ZMROMO17006G12_FLI
ctcaattggccttcagttagtgattaggatcctgtgcaacttcaccccagatgagttttgccctgatccggttccaagcacggtcttagaagagctgaattccgaggtttgttccactcgttctctactccagccttgcacactacatcttgctgacaatgtcactcaaatgcactgatatacatatgctatgcagagcttgctggagcgtcacaccaacaaagacgcgaccagtgtgtttccgtgcaccgctgcccctatagtgtaccacacaccttcaacgttggacgcggcagagagagcggcagacataggaggtggcgcgaagctggacaggaaagcctcaatggtgcagaggagagggtacaccagtgacgacgaccttgacgacctggattctcccctcgcatccctaatcgacaggagcgccccaccttctccgtcgaacggtttcgcacacttcagtgctcggagaggagtttccatggagaatacaagatacacgctcctaagagaagtatgggggctggagcaacggtgatggatgatgatgagcctgtaaaacctaaaatctcttctacagccacccaaatgagagcacaagaaggcctatttgtgtggggtcttcagcaatctctacagtaaaaaatgcaacacttccttgtactgtacattcccacgatcctatgtatcttagctcttttgtagtatatagcagcaaaagagggtgtcggcaaagatacagatac

SEQ ID NO: 35709 - DNA, 505 bp, Zea mays
  Clone ID: UC-ZMROMO17007A04_FLI
agaaactaaaacttgcatcgatcgctcgctcgtcagttctttctgatcatcggtcgcctctctagctagtagctagctacctacctgatcggccatggctgaggagaagaagcaccaccacctgttccaccgccacaaggacggcggcgaggaggaggcgagcgccggcggcgaggtggactacgacaagaaggagaagcaccacaagcacctggggcagctcggcgggctcggcgccatagccgccggtgcatacgcaattcacgagaagcacaaggcgaagaaggaccccgagaacgcgcacggccacaaggtgaaggaggaggtggcggcggtggcggctctgggcgcggccgggttcgcgttccacgagcaccaccagaagaaggacgccaagaagcagggccagagctgatcgagcctctgcgtgtgtgtgtgccgcttactattgtggcgtttatagatactacttaataaatcgcctcgtccatgttgcctgccattg

SEQ ID NO: 35710 - DNA, 1092 bp, Zea mays
  Clone ID: UC-ZMROMO17007H12_FLI
ctgtgacagatctgctatttcatcagacaacccagctgatttgtatgatgtccatgtctatacttcatcaggtgatatgttttccaaatctagaatgtttgataatacagcccgtaccggacccaaggcaattgttagtgaatatgctgtaactggaaatgatgctggccgaggaacactaatagctgctttagctgaagctgcatttctcattggattagaaaggaacagcgacgtggttgagatggcaagttgtgctccactctttgtaaacgacaatgaccaaaggtggaacccagatgctatagtctttaactcatggcagcactatggatgtccaaattactggatgctgcactttttcaaagattcaagcagcgccacacttcatccgtccactattcaactaccgaactacgaccaactggtcacatctgctatcacttggaataacccacatgatgggaacacttacatgaaaataaaggttgtaaattttggaagcaaagctgttagtctgaatatatctgtaactgggttggaaactgatattcagacatttggatccataaagacggttctcacgtcgggttggctgcgggatgagaactccttccaacagcccgacaaggtggtgccggcggcaagtccaataaccaacgcgggcaagcaaatgggtgttatattgaactcgtactccctgacctcatttgatctcctcttggactcggagtctcaggttcgagcctccatccaagcttatgattagtgtgagatgtgtcgtgtgcgtgcccacaatactcaataccgagatacgggtccccccaaggctccccacaaggctttcaatagaaaatacgatatttgtgaattattgtgaagtacaggcgtacagctggctatgtgtatgagattcaacaaatggtttctacgaccctaataaaggtataaaagcacctttcctcggatatcacacatccgttgtagtctgcactcttgacattttctcttttttagagcatgtacagtgtacctaactaccgcaaactttttgtcctggtgcactacagcgaatgtgccatatataagaat

SEQ ID NO: 35711 - DNA, 813 bp, Zea mays
  Clone ID: UC-ZMROMO17008C09_FLI
cttgaggctgcatatacccaggcaactggcaagcccatctctctctctgagcaacagcttgttgactgtggttttgcattcaacaatttcggatgcaacggaggccttccatcccaggcctttgaatacatcaaatacaatggtggccttgacactgaggaatcttacccttaccaaggtgtcaatggaatctgcaagtttaagaatgagaatgttggagtcaaggttttggactcggttaacatcaccctgggtgctgaggatgaactgaaggatgctgttggtctggttcgcccagttagcgttgccttcgaggtgatcactggtttcaggctgtacaagagcggagtttacactagcgaccattgtggaactacaccgatggatgtgaaccacgctgttctggctgttggctacggtgtcgaagatggtgtcccctactggctcatcaagaactcatggggcgctgactggggcgatgagggttacttcaagatggaaatgggcaagaacatgtgcggtgttgctacgtgtgcatcctaccctattgtcgcatgaggcccttacgaagtgttacatggtctgtttggcatcaataatgcatgtttaacctgagcttggcgatgggttatacagaacggaaactctgtttgtgaatagaaaatcatgaagggaaggagttgaccggacccctgcttgtacgtctccccgactgtgtaggtagattgtcagttggggttccgaagtactctactcatacgtgtgtatgacagtttatttatgaaacaaaatacgcattgatcgttatggtgc

SEQ ID NO: 35712 - DNA, 361 bp, Zea mays
  Clone ID: UC-ZMROMO17009A01_FLI
gggaaatgaatcgaagggaagctgcattgatcctcggcgtcagagaacgtgctacggtggacaagatcaaggaggctcacaggagggtcatggtagctaaccaccctgatgctggtggcagccattacgtcgcctccaagatcaatgaggcgaaggacatgctgatgggaaaagggaagtccgggtcttcgatcttttagccgacacaagctcattctgctgtggcgtgatcaggctgtagctttttcgagggactgacagttgcacgtttcacatttcttaacaatgctctgctgcttgtaccatatatcataaaggatacagatacagatacagaattgaatcaacttattatctgggt

SEQ ID NO: 35713 - DNA, 699 bp, Zea mays
  Clone ID: UC-ZMROMO17009A11_FLI
ctctgatattggatcttttgagcttgttataaagatgtatccccaaggaagaatgtctcatcatttccgtgagacgaaagttggtgattatatgtctgtgaagggacctaagggccgtttcaagtacctacctggacaagtgagagcatttggaatggtagctggaggatcaggcattactccaatgttccaagtcacaagggcaattcttgagaacccaaaggacaacacgaaagtacacttaatctatgcaaatgtcacgtatgaggatattcttctgaaggaagaacttgacggcatggccaaaaactatcctgatcgtttcaagatctactatgtcttgaatcagcctcctgaagtctgggacggtggcgtcgggttcgtgtcgaaggaaatgatccagactcattgcccagcgcctgccgccgacattcaggtattgcgatgtggacctcctcccatgaacaaagccatggccgcgcacctggacggccttggctacacgaaggagatgcagttccagttctaagcgttacattctctctaccagtaccagaataaacggcggtggaacaaagtcacagtcacagagcgtcgtacttactctacctggatgaaagcagcagtacagtacccacctaatttgtatcggtgtcgggacattgtaccgtgccgttcttttgtatcggtttgtcactc

SEQ ID NO: 35714 - DNA, 587 bp, Zea mays
  Clone ID: UC-ZMROMO17009C06_FLI
gctacaccaagggtgatggccttggcgctgagattgttggcaccttcatcctagcctacaccgtcttctcggccaccgatgccaagaggaatgccagggactcccatgttcctatccttgccccactgccaattgggttcgcggtgttcctggtccaccttgccaccatccccattactggcactggcatcaacccagctaggagccttggcgctgccatcatctacaacagggatcacgcctggaacgaccattggatcttctgggtcggccccttcattggcgctgccctggctgccatctaccaccaggtgatcatcagagccatcccgttcaagagcaggtcttaagctgccgtggccgtgccgagacatgccagtccgaagaacgggcgtcttcctgtgatgtcttcttgtctgcccacgcctagtttctctgtcgattcctattcgtcgtctcttcagggctggtgctcactgctgcgccgttctgttaaccgaaacaagaactctgtgtattcctgtaccgagctgtgcatgtttctttctttccatcgtggagaatttaagttattatccgtttgctgc

SEQ ID NO: 35715 - DNA, 741 bp, Zea mays
  Clone ID: UC-ZMROMO17009D08_FLI
gggagggtcgcggccgtgattatgacaccatttctggatcaaagcgtccgtatgcagatatggatgatgtgcctcggtaccaagaaatcggtgtccgtcagtctaaggcacgtttagactacgacattggtggcagcagtgctcggtatggagatacatatagtgagaggtctggacgaccacatgcgggatatagtagcagccgatctatccctgttcatgattcagcatatggcagcagccgtcatggaatgagttatggaggttctgctagcagtgctgatgctggtggtatgtacccaccgagttacagtggtagctatgggtctcgtggatctgatgttggtgggagttcatattcttcactttactcgggtcgcaatttgggtaccagcagtggtggctactatggaggtagcggttccagttcatattactaagatttggcatcataggactttggtgtaggccctgcattttatggagctcctcgatttaagccacacagatctgtaaaagaagtgccaagcacccaagtgaggcaatgttttccaataagacatttcaacgaagccagaccatcgatttggttcgagcagtagttctgaggacgttctggcttgtttatgtaatgtaaggatttgctttatctggtcaagagttctgaacataacaaccagatatggtgttttaagtgtttcgacatgtttacttccagtgtttctataacattattgagac

SEQ ID NO: 35716 - DNA, 1037 bp, Zea mays
  Clone ID: UC-ZMROMO17010B09_FLI
agaagagcttgttacctcaggttatgataataaggtcttcagaattcctcttaatggaaaccagtgtggagatgctgagtcagttgatataggcggtcagccaaatgctttgaaccttgcaattcagaaacctgaatttgcactgatcactactgattccgggattgtgttgctgcacaattcaaaagtcatttctacaacaaaagttaactatgccatcacgtcatcttcagtgtctcctgatggcacagaagctgttgtgggtgctcaagatgggaaactgcgaatctattccatcagtggcgatacactcacagaagaagctctgcttgagaagcactggggtgctatcacttccatacattattcgccagatgtttctatgtttgcttctgctgataccaacagggaagctgttgtgtgggatcgagcaagtagagaggtcaagctgaagaacatgttgtaccacacagccaggataaactccctggcttggtcacctgacagtcgattggttgccactggctcactggacacctgtgcaattgtctacgagatagacaagccggtagccagtcgcgtcaccatcaagggagcccatcttggtggggttcatgggttaaccttcctcgacaatgatattctggtgactgccggtgaagatgcttgcattcgtgtttggaaggtggtgcagcaataggccgctcttcattctggtgtgcaatgagaatgtctgtgctattgattggaataaacttcttttttttgttggtatggtggctgttactcacggggtcatagcatgggttgttgctttatctgcgatttgtgctctaaatttcctttacaattctttttgagctgtattatttttgcttgtttttttttcaggaagactccttcgtaagtggatccggtatccctgcatctgattttgttaggagttgtgagaatatagggatactgttgttgctttttctacccaggtccctaaaatagtcgttaataactgacttcgctgtggttaagtttttacg

SEQ ID NO: 35717 - DNA, 461 bp, Zea mays
  Clone ID: UC-ZMROMO17010D11_FLI
tggggaagggcaagacgatcgtgctggggctggggagggacagcgacgaggtgtgcctgccgtcgctggagctgctgttcgggaggtgcgtcatggggtcgctcttcggcggcctgaagcccaagacccacatccccgtcctcgccaagaaatgcatggacaatgagctgcagctggacgcgctggtcacgcatgagcttggactgcaggacatcaacaaggccttcgacctgctcctgcaggggaaaagtctgcgctgcatcctctggatggacaaggacaagtaacggaaggagaggggcggccggaccagtccttcgtgtctctgaataaatttgccctgttttttcagcgaggcgtcgctgaaagctggtgttagcggcgaccaagactatctgttcctgaaagccggtgtatcagtatcgtttcgttgtctgaactgattaaatcctaatatcgat

SEQ ID NO: 35718 - DNA, 1398 bp, Zea mays
  Clone ID: UC-ZMROMO17010G11_FLI
gggttaaccaatgtctacgagatgcttgttctatatcgaccattccatattgtgattcttttatagactgtggacgtggcattgggagtggactgtacagacagcagtggttcaatgactcgggtgcagaagcttgttttaacactggaaatgatgctactttccaatatggaatttatgagcaggctgttttgctcactacagaacacagtgctgtaaaacgatatatatattcattattttgggggtttcagcaaataagtaccttagcaggaaaccttgtcccgagttactttatatgggaagttctgttcacgatggctattattggtctgggactgttgctttttgcattgcttattggaaacatgcaaaattttctgcaagctcttggaagaaggaggttggaaatgcaacttaggcgccgtgatgttgaaaagtggatgagccataggcgattgcctgaagatttgagaaggagggttagacgagccgaaaggttcacctgggcagctactcaaggagtgaatgaagaggagcttttgagtaatttacctgaagatatccaaagggacatacgtcgccacttctttagattccttaataaggtccgattattcaccttgatggattggcctatattggatgcaatatgtgacaaattaagacaaaacttgtatattagtggaagtgacattctttaccaaggtggtactgttgaaaagatggtcttcatagtgagagggaagctggaaagcatcagtgcagatggcagcaaggctccattacatgatggagatgtatgtggagaggagctcctcacgtggtacttggaacactcttcagcgaacagagatggtgggaaaattaaattccaaggtatgcggttggttgctatacgtacagtaagatgtttaacaaatgttgaagcttttgtactcagagcaagtgatctggaagaagtcacctcgcagtttgctcgattcctgcgtaatccacgagtgcagggagcgatcaggtatgaatccccctactggcgaaccattgctgcaactcgtattcaggttgcatggaggtatcgtaaaaggcggctgaagcgagctgagaagtcgaggttgagcgaagagacttatgcctcgcttggatcttgacacatgattcttttcagcgtagacggaggcagctgaagacttcttttctgctatgcttgattgatggggctgtgtcttcatccagttctgcctgtggcctaggctattttaccttccactgcgctttatgattttcggctcactctcgagcttgtatcccccggtattgtaataacattattcagactctgtaactatttgaagtaatgaatgtggttactagcctcctgggactagtaattgtatc

SEQ ID NO: 35719 - DNA, 737 bp, Zea mays
  Clone ID: UC-ZMROMO17010H09_FLI
ccctactggctcatcgacctcgccaacctcgccatcgttctccacctcctcggcggctaccaggtgtacacgcagccggtgttcgcgttcgcggaccgcaagttcggcggcggggccacgatcgtcgaggcgccgctgctgccggtgccgggcgcgcgccgcgtgaacgtgttcaggttgtgcttccgcacggcgtacgtggcggcgaccacggcgatggccgtctggttcccctacttcaaccagatcatcgggctgctcggctccttcaccttctggccgctcgccgtctacttccccgtcgagatgtacctcacgaggaacaaggtggcgccgtggaccaaccagtggctcaccatccatgcattcagcctcgtctgcctgctcatcagcgcgttcgcctccgtcggctctgcggttggcgtgttcgggtcggagacgagctgattcaaactctgcaaatgcaattgccggccacttttcggacatgcatgttctgtacatatactgcgcttgtatatttagcgttatacctagtactgggacggtcaggccgggccccgagcctcgtgcttaggctcaaacgggtctgggcccataaggtccaaattttttttttgatcataccgtgtcagccgtagaaatagtggtttagtcaggctctaaaacacttcctatctttgttgggccatgccgacccatatatttaaattatataaaattcaaatattacaacg

SEQ ID NO: 35720 - DNA, 653 bp, Zea mays
  Clone ID: UC-ZMROMO17011B06_FLI
gagaaaaagggaggcagcacagggcaataactatgagaaatttgctgaggttgcagtcacgcagacaggttctctggatgaaactgagaagaaaagctgtgacaacgttaccaggtttgcagattgcaagagtggttcaggtgacgaagagtataaagagcaagatcatatccttgtggatgcacacaggcagtcttcggatcatggtgataagtttgaggctgggtatgctgctgaagtggatgcagaaggaaaacaagaggcagatgactatgaccagagagagggcgagtccgacgactacgagacatttgaaggccatgactacaaatctgaagatgaaaatgtgtaccaagacgacgaggatttcgatgataacgatgactttgctcggaaagtaggggttttattgccttagacgccgcggtgtcattggttctgttgcttgaggcaacgagctctagtttttgccatcggttctgttgcttgaggcaaagctgaaatgccgatcataatcgatttgaggtttacatgtaaactgctgtgtggtgttcagcacatctgacctctcctcggactttgttgtattagtttccgtactaacagcaggatatattccttaatcaatttgtgcccggaataatcaactccac

SEQ ID NO: 35721 - DNA, 551 bp, Zea mays
  Clone ID: UC-ZMROMO17011B12_FLI
ccatccgcatctgaggagaatgagtgaagagcaatcgggaaataaaaagagagtgttcaagaagttcacctaccgtggtgtggacctcgagaacctccttgacctcaacactgagcagttcgcccagttggtgcacgctcgtgcccgcaggaggttcaccaagcgtgggttgaagaagaagcacactaacctcctcaggaagttgagggctgccaagaaggaggctcccgctggtgacaaacccgaagtgattaagactcatttgcgtgatatgatcattgtgcccgagatgatcggaagccagattggtgtgtacaatggcaagaccttcaacggtgtggaagttaagcctgaaatgatcggacactacctcggcgaattctccatcacctacaagcccgtgaagcacggaaggcccggtattggtgccacccactcctcccgtttcattcccctcaagtaaactttttgttcttatttttgcctctgttcgtgaatgatgtggctggactctgctccctgtacaagacccgaataaaactgttaaatag

SEQ ID NO: 35722 - DNA, 491 bp, Zea mays
  Clone ID: UC-ZMROMO17011D02_FLI
gacaaaatcagggctagagttggctggatgcccgagatgttcatggactgcgagaggcgcaactttgtcgttcaggcgtaccacagagagctactggagcagatgattgcatcaggtaggatgcccccttcgggggctgtggtggtgaccgacgcagcaccatctcggaaagtccgggcaggtagcaggaaggctactccgtcgaagaagccctccgtgaagcggaaaaaagagaagaaatcgagctcgcgacggcgtctcccgaaacccgtcgccggtggtttgggtgctatgtgacctaagttttcgtcgagtagcagagtcttgatactcccacagtcacacacttatacagcgtgtaccggaatacaaacaatgttccattacttaggtctggggcttgtaatcgtgccccggcgaaatttgttcatattactcttcatcgttgttgtacataacatctccaaaccaatattcaattttgttcattg

SEQ ID NO: 35723 - DNA, 918 bp, Zea mays
  Clone ID: UC-ZMROMO17011G02_FLI
ctctttgtcaccgagagtaagatagtgtacaaggcgactaggccttcgtacttgccattcatggggatagttaagaaagagattaaagtacctctccatttgattgttgatgttataattgagcaaggctgtctacaatctgcttacagcttatacatatttagaatagaaagcatagcccatgggaaacctgcttcagtggatgaactgcaatttcatggtgtccataatccagattttctaagaaaggttataaccagagaagcctccaggagcatcagagaagtccaaagttggaaaaatagattgtactccgaggaaggtccttctcatgttcaaagtagtggattacactcacctagtgcaaaggtcagagcttccccaatctgtgctgcctttgattctaagggtaaaatttctgacaatatattgctccataagattgaagaacttaatcgatcagtgaagaatcttgagtctctactcgtaagatcacatagaagagaatgatctgatattatatcatctttgaaaattagctcaaattaaacatggaaagaacaggaggaacaagtggagtatatgaactctgtttttctatttagtccttcagatcatataccatgggaaattgcaaagctgctcatgccgtgaaggagcttctagtttgattcaagtttcacaagttatctgttgtacataggtcttgctgattcttccaagtttcacaatttgatgtacaaagaatcacagaatcagtggacagtggtctagggtcacaaagtagatcaacgtacatgtaagcttgtttactgtataaattctaaaatggtaatctgtgccaatacgtgtactgtaatgggcttaggctcagcccatatatgtttatagctatcaatacaacattctaatccaaac

SEQ ID NO: 35724 - DNA, 583 bp, Zea mays
  Clone ID: UC-ZMROMO17016A12_FLI
ccacgtgtccgggtttatgaggacgaagaggagtggtttcgggagatattcggggggtcgaagaaggaggatgccatccagaaccagtatgagttcctgatccagcgcatgggcggcccgcctctattctcccagaggagaggacaccctgcccttataggacgacaccgaccattcttggttacccaccgagctgcagagcggtggctacaccacatgcaacaagctttggacgcaactgaaagcatagatgtgggctcaaaaacgaaaatgatgaacttctttaggcacactgcttacttccttgttgctggcaatgagatgacaaggcaacagggccatggagtagcctgcaaacatgcaacaagtaaaccagctgagtaaccattttagccgtggagctggtaaccattggaataattactgataagccttttatccagtgtgcctttatagcattccgtatacaatggagttgaaacaacctccacattcaaagaaacaatggcactgactctttgtaggctttatagccattcttgagcagagagtgtactcaaagtgaatagttgtagcttctgcc

SEQ ID NO: 35725 - DNA, 495 bp, Zea mays
  Clone ID: UC-ZMROMO17017A08_FLI
gcgttactctgaagtccgtatcgtatctgattcagatgaggagacgggatggtatgatggtcagatatgggttaaaactccagaagttttagctcgtgatcggcttctaggctcattttctgtcaagcctgtgctaaacagggtgaagttcaccttggtgggtctggcaggctccctgatcctttgcattcttctgtacgtgaacacggaaaccccaaaggaaccttatggaaatacaggtggaaggtctatcccgggagtgtacagcgacgctgctgcaaggtcgtttgagcccgatgcattctgtggaggacctgatttgtcgtagcatcgtaaagcgtggagcatggaaggtttgtagatggcagtatatatggtctcacagggtatatacgggggtttctgtacggggtttttaatccatcaaactagggtaatgtaaatatttggccacacccacactagtatcgatattttagacgcaagcctcttatg

SEQ ID NO: 35726 - DNA, 948 bp, Zea mays
  Clone ID: UC-ZMROMO17017F03_FLI
gttcctgtacatcagcatcctgactgtgatgggcgtgagcaagtcgtccagcaagtgcgccaccgtgggcatccagggcatcgcgtggtccttcggcggcatgatcttcgcgctggtgtactgcacggcgggcatctccggcggccacatcaacccggccgtcaccttcggcctcttcctggcgcggaagctgtcgctcacgcgcgcgctcttctacatggtcatgcagtgcctgggcgccatctgcggcgccggcgtcgtcaagggcttccaggagggcctctacatgggcgccggcggcggcgccaacgccgtcaaccccgggtacaccaagggcgacgggctcggggcggagatcgtcggcaccttcgtgctcgtctacaccgtcttctccgccaccgacgccaagcgcagcgcccgcgactcccacgtgcccatcctcgcgccgctccccataggcttcgccgtcttcctcgtgcacctggcgaccatccccatcaccggcaccggcatcaaccccgcgcgcagcctcggcgccgccatcgtctacaacaggtcccacgcatggaacgaccactggatcttctgggttggccccttcatcggtgctgctcttgccgccatctaccacgtggtcatcatcagggccctccccttcaagagccgtgactgattatacgtacattgtttattaccaacagcaaccatgcagcatacgaatcatcgttattaagctatatatgtataatatccagcatgtcttgttaattactagtatatgtgctagtaagtggtgcgtgctcgctcttccatcgctgtcgtcgtctcatctgctattgttcgtcatatatatatgtccatgtgagctagctagtgtgtatcacgcgcggaggccagttcagctagccatcagtctgcaatgcactttgtgacttctctgtttagtcc

SEQ ID NO: 35727 - DNA, 922 bp, Zea mays
  Clone ID: UC-ZMROMO17017H03_FLI
gaagaatttttaagggttgtgacatgtgcttatgttgttcaaggctatggactgacggaaacttgtgcgggatctatagtttcgataccaaatgaacactccatgcttgggactgttggtccacctgtccaacatatagacgtacgtctcgagtcagttccagagatgggttatgatgctttgtctagtgtcccgcatggagagatatgcataaggggaagtgttctgttctctggatactacaaaagagaggaccttgagcaggaagtcatgattgatggctggtttcacactggagatattggcgagtggcagccagatggatccttaaaagtgattgatagaaagaagaatattttcaagctttcgcagggggaatacgttgcagtggaaaatctagagaatgtgtatggtgttcttcaagatatagattcgatatgggtatacgggaacagcttcgaatcttctctcgtcgccgtcgccaatccgaaccagcaagctctcgagcgctgggcagaacagaacggcgtcaccggaagcttcgctgagctgtgcgagcatccaagggccagagaacatattctcgcagagctcaccaagatcgccaaggacaagaagctgaaaggctttgaggtcataaaggctgtccatctcgaccctctgccgtttgacatcgagcgcgacctcatcaccccgacgtacaagaagaaacggccgcagatgctcaaacactaccagggagtaatcgacgcgctctacaagggcatgaagtgagacggcacgtttgcagagtcgcaaggggtactgttgtgaattgtgatgcacatatttgtctatatgttgtttcagtatactgtggtgtgtggagtcactcggagggttgtgtattgttgtattgagataaggggaatataaataaaat

SEQ ID NO: 35728 - DNA, 289 bp, Zea mays
  Clone ID: UC-ZMROMO17017H06_FLI
gcagattatgttgatgagtacttgaggattggtgaaagcactgctattgagagcttacggaaatttgtcaaggctatctgtgaggtttttggcccagaatacttgagagctccaaatgaagatgacacaactaggttacttagtattgccgaacaacgtggatttcctggaatgcttggtagtattgattgtatgcattggaagtggaagaattgtccaacagcttaccaaggcacatattgtggtcatgtgaaagaaccaactattatactagaggcagttgcgtctc

SEQ ID NO: 35729 - DNA, 216 bp, Zea mays
  Clone ID: UC-ZMROMO17023B10_FLI
ttgcgcctgagaatgcatgcatgctggatttcatattgttcttgtcatatttttgcagaaaataaagcaacccctctctccatatctagccgtgggagaggaagcatgcatgcatcacaatccatgttttatttccctttttttcagttattacataccctctcgttggacctccctccaagtatgccctctgaggctcttgagtgtattcatgat

SEQ ID NO: 35730 - DNA, 1272 bp, Zea mays
  Clone ID: UC-ZMROMO17023F08_FLI
attaatttgttctcgttatattatcatagagagacagaaacaatactgaattataaatgtaccttcggcttgatagaaggcaaaagtacaagcgtgacgcacaagtgaatacaagtcaatgtgaacagtacgggggtactgttcatctatttataggcacaggacgcagcctgtgtaaaattacattcatgcccctcatattcactattgacttaagaacaaactgtcgaggactagatagccttttcctccttaagtcggttcctctttccgttactgagccgaagctttcacgcgcgcaccttctacactggttcaatccttcgttccaatcctgctttccattccgtatatgcttttaacccgagaccgaaggtacctgttcatatgttacacttggaaaacattgttaaatcatgtttttaaggacattcggaggacgaaggcccccaacactatcctcgcattcctaaacgcgcttccctactttcggtacccctaggcaaaccaccatattttgatggtaaatattattgtatgtggagtgataaaatgaggcaccatctaacctcactccacgaaagcatttgggatattgttgagtttggagcgcaggcaccacaggtgggcgacaaagactacgactcggatgaggccacccaaattaggcattttaattcccaagcaacttctatactcctcgcttccttgtgtcgagaggagtataataaggtgcaagggttgaaaaatgccaaagaaagttgggacgtcctcaaaacggcgcacgaaggggacgaggtgaccaagatcaccaaacgcgagacgatcgagggagagctcgatcgattcgtcctcaacaaaggagaggaaccacaagcaatgtacaaccggctcagaacaatagtcaaccaagtgcggaacctcaggagcaccaagtgggatgaccataagatggtcaaggttattcttagatctcttgtttttcgtaatcccactcaagtgcaactaatccgtggagaccctagatacaaacagatgtctctagaggaggtaattggcaagtttgtgagctttgaacttatgatcaaagactccaaacatattgtcaacttgaagcaaggtgccacctccacacccgaggtgcaacccgttgcattcaaagcaatagaagagaagaaggaagagtctacaccaagtagactcctaatcgatgcctccaagctcgacaacgaggagatggctcttatcattaagagctttcgacaaatcctc

SEQ ID NO: 35731 - DNA, 648 bp, Zea mays
  Clone ID: UC-ZMROMO17025H07_FLI
aacgcgcgacgtccattcttctatcagcggaggacttccagattttttgtcatcgtgatggaggaaatgaaagccaggacgaccaagttcgcagctatcgttcttgtatttgctgtagtcagccatggtctgatgagccctgccatggggatgctcgagaacaagggtgccggcggagagacgacgacgatggccacggccaggtccgcttataagcccacgcttggtgttggcggtggaaccgccgtggacaaccaccatgccatcccacgagaccagtacagcagtcatggaggagacgacggggggagtggtggtgatacaaacaactagtgcgcaagcatgcagctgctcatgttctctctgtgtggtgccagtttctacatatatgcatgttgctctgtttgcgtggaagacaaaggatatatatgtaattttgccgaaacactagttttcgtgatatatcttgtacatgtatatatatatgtacaaaaccctagtcttgtagcatcacaaaatctaccctctgcttgtacatgtatatactgcaccgcgcgctgattccttaagagcggtatatgtatatgacaatatgataaattaacgatgtttgtgtaataatatatttcagaagatatgtgttttaac

SEQ ID NO: 35732 - DNA, 518 bp, Zea mays
  Clone ID: UC-ZMROMO17026D01_FLI
cgaaaccgcctgtaaaaatatatcgtccccgcaggctttgagcctttttgtactagtgattgtattgtatgattagttgctgatgctatggagtaccaccaacgagttcctcacgagaagcctgcacatgttctcacctatgaagaccgggatggagactggatgatggttggggatgtaccgtgggagctcttccttggaagtgtgaagaaacttaggatttgcaagaacagataaatgctagttagcaaagcttattattcgtgcgctgcatggactctatttctttcttctttttatttatatcggttcatacagaaagattttgctggccacagagtggacatgcatgtgataccgaggctatatatactgaccgtgtacagtatacggaagaaaagtcaatcttgataccatccctagaaaattaaattttggtatttttatatgtttcccttttctgttttctctgagtgcctagcttgtaaataccatatatgcatggctatttgttaaag

SEQ ID NO: 35733 - DNA, 562 bp, Zea mays
  Clone ID: UC-ZMROMO17026D05_FLI
gcgcctaccaggtctactgccagccgctgttcgccttcgtggagaagtgggccgcgcagcggtggccggactcggcgtacatcaccggggaggtcgaggtcccgctcccgctcccggcgagccggcggcggtgctgcaaggtgaacctgttccgggcgacgtggcggacggcgttcgtcgtggccacgacggtcgtgtccatgctgctgcccttcttcaacgacgtggtgggcttcctgggcgcgctcggcttctggccgctcaccgtctacttccccgtcgagatgtacgtggtgcagaagaaggtgccgcggtggagctcccggtgggtgtgcctgcagatgctcagcctcggctgcctcgtcatctccatcgccgccgcagccgggtccatcgccggcatcgcgtccgacctcaaagtctaccgcccgttcaagtcctactgatcagattcacggcctacgggagacgcagcagcatgtggtatataggcatatactagcaaccatgttcgtgtgagttgcaactcataagtacttaaatcagactctgcatcattgct

SEQ ID NO: 35734 - DNA, 534 bp, Zea mays
  Clone ID: UC-ZMROMO17027C09_FLI
gcgccgccccaacggttgcagagaaggtgtactgcttatccggtctgccggaactgccattcagaagaccagtgagccttggggaccttctggcgttcgaggcatctgagaaggagtctgtcacgacagtgatgaccagtgtctcgaacaacactagttcagtgctggagctgactccaaattgcaactggaaccaggaaaatggcatgtcacggatgtggagcccccttgggatatgagatagatctgtgttgtttgctggatctggatgtatggagtcttagtactgagtggccagtagggttctgctgcttagatttgattagcagtgtgacttgcagattgtgtagattagattatccgttattggactaatggcttggcgtagtatttgtacatattgctactgaaggaacagtgtccttatccttgtttggcgtagtatttgtacatagcacctgctaaacttcagacaatcagtgaaagacaaatgtgtacattgtaacatagtgttaagaaactctgagagttgct

SEQ ID NO: 35735 - DNA, 816 bp, Zea mays
  Clone ID: UC-ZMROMO17027F06_FLI
ctggacctggcctaccgatacgtcggagacgtgctcggggacgctcaggtctacgccgaccacgccgggaaggctcagatcgacgccgacgacgttcgcctcgccatccaggccaaggtcaatttctccttctcccagccgccgccgcgcgaggttctccttgagctggcccgtagccggaacagaatgccgctgcccaaatcaatcgctcctcctggctcgattcccctcccaccagagcaggacacactgttggcccagaactaccaactcctgcctccgctgaagccgccacctcaatatgaggaaacagaggatgagactggagaaccaaacccaagtaacccggcgaattctaatccatcctattcgcaggatcagagtaataaggagcagcaacagcagcacactccccagcatggtcagagggtttccttccaacttaatgctgtggcagctgcagctgcagctgcaaagcgtcctcggatgaccattgaccagctgaacatgggctaaccgttcgtcgtcgtcggttagactgtagtatctttttccgcaccctctagtctggtgaatcatgttttgaagagatagtgctgtagtggtatatgctcttactgactaccacccacatatttaaccacgagatgtgcagtccaacagcaccagcagcataagtttctgcctgcaagaacgttgctggagggaaggaaggaaagtgactgttctacagttctagtagtgtattttgtacttgcacactaaaagcttaatatctgctagtgtaattttatctgggtcttctacatgttcttg

SEQ ID NO: 35736 - DNA, 951 bp, Zea mays
  Clone ID: UC-ZMROMO17027F08_FLI
gacgccgagagcaccgtccacgagatcaagcgcaagggtggtgacttgagatattgccagaaatgttgccactataaacctccacgtgcacaccattgccgtgtttgcaagagatgtgttctgaaaatggaccatcattgcatttggattaataactgtgttggacatgagaactacaagattttcttggtctttgtattatatgctgtggttgcaagcttctatgcattgattctgatcgtagggagcgttttgcacagtgtgcctaaagatgagcagccaggcagcgattcttctcgaacatccattattatctgtggggtcattctttctccattagcgttagcgctggcagtgctcttaggttggcatatttacctcatattacagaacaaaactacaattgagtaccatgaaggagttagagcgatgtggttggcagaaaaaggtggagatctctatcatcatccatatgaccttggtgtctatgagaatcttatttcagttcttgggcctaacatattttgctggctctgccctgtattgaatactgttggaaatggccttcggtaccgtacatcctatgatattccggtatctacaccaccaaaaaaaatagcagcacattcacaataggtagtagttgctaatttgtgaaaggatttcccattaagctgctagaacgtgtttggtctgaacgattccgaaggcaggtcgtgtaactctgcgacatacaggagatgatgactaccacagcctctcgccaggtgtttgtcctgaatcgagacatgaactcttaaccttgtttttttatttcattcttgacatacttgataatgtctcgcttgtaatctggagtaggctgttcttaccaaaaagaaaaaaaactgcaattctgttgtaaagttagttcgtatgtttgggagccatgtaatgtagccaaaggccatg

SEQ ID NO: 35737 - DNA, 358 bp, Zea mays
  Clone ID: UC-ZMROMO17027H01_FLI
aaacgagacaattgccattataaaacaccagacaagcggtttcgacaaattggaggcgttgccgatggcttctctgttttggagacgcagacaacaggcaaactccaaaatggatacgagacagtcaataggagctgagcaaacagagattagtctcctttcgccattaccgtcgccgtgctcacacgccgtctgcgtcgtattcttctctccgtcgcggacagcttttgcgccgcggacaactcttgcgccgcgccgcggacagctcttgcgtctcctctgcgtctggctgccccgtcgccggacatggcaagcatcagacgaggcggcagctccgtgaccgagacaatcacccagg

SEQ ID NO: 35738 - DNA, 852 bp, Zea mays
  Clone ID: UC-ZMROMO17028G10_FLI
atcagccaagcatcaaacttttggaggatccgtgagggtatatcagaagcatccgtcaaagttggagctgtgtacaaatatgacttgtccataactgtagagaagctctatgatattgttgaagaaatgcgctgccgtcttggtgataatgcagaggtattgggctatggccaccttggagatgggaatctgcatttgaacattgtatcaagcaaatatgacgacaatattctcgcacaaattgaaccattcgtctatgagtggacatcagcacaaagaggaagcatcagcgcagagcatggtttggggctaatgaaagctgagaagattcactacagtaaatcacctgaagcagtacaactaatggcctccatcaagaagttgctggaccccaagtcgatccttaatccctacaaggttctgccgcagtctgtactgtagctaaaaggttaggaccctgtaagtaaaggagtttgttagggctgcttgatgcttgaatggactgtgagcggaggcaaccgaataattgaggcgaacatgcttatcggcgtgcccaatgtaatgattcagttggtggcgtcgtcaaaccacatcggatgtcatctggagaaagagtcattttactgtcgttcaaacttttaggattagcattgaaattttcaggattcacagtacataatttgaatgctaacaattcaggataccatctgctagcatataagatgtccagtccagaggataaactgctcattagggcgacatctgctagctccaattggcaagcactgaaacttgatgttgctctgtaggtatggttggtgtgggaacaaatgaacggagaatttcagggag

SEQ ID NO: 35739 - DNA, 859 bp, Zea mays
  Clone ID: UC-ZMROMO17029E07_FLI
gttttgaagctgtgaaggtacgtgtgcagacacaacctggatttgctcgtggattgagtgatgggctccccaaatttgtccgatctgagggtgttcttgggctctacaagggaattgttcctctctggggtcgtcagattccttataccatgatgaagtttgcttcctttgagaccatcgttgagcttatctacaagcatgctgtgcctgttccgaagtctgagtgcagcaagactacccagttgggtattagctttgctggtggttacattgccggtgtcttctgtgctattgtttctcacccggctgacaaccttgtgtctttcctgaacaatgccaagggagctacagtgggagatgctgttaagaagcttggtctctggggtctcttcactagaggacttcctcttcgtatcgtcatgattggtacccttactggtgctcagtggggaatttacgatgcattcaaagtgatggttggactcccaacaacgggaggtgttacacctgccccagcagcagaggctgaattgaaagccagtgcttgattttttttttctgtgttccctgagatcatatttggtggagtggaattgtatcagccggtcgagagcttagttcccgaatcttttttaatcttaacggaaaatttgtccgtcatccttctgatgagaggaactcattaaacaggcgaaataggtcttttttgcgctgggaaaagtttacgcttgatgcataataatttgtaggacggcaacgctctagagcgcaggttttgttcacctcctgtaccgaggaatgcttaaagttacatttcacattatggtctttatgaaagagtgcacctcggttgatgttc

SEQ ID NO: 35740 - DNA, 603 bp, Zea mays
  Clone ID: UC-ZMROMO17030H10_FLI
ctcggttgcttgcctcaaaacattgccctcttcggcaaagacccatcccaactggacgagctccactgtgtggcgaagcacaaccgtgccgcaaagcttttcaacttacagctgcacgcactttgcacgaagctgagggcagaattcgatggagccagcatcacttacgtggacatccacacgatcaaatacagcctgatcgccaactactctcgatacgggttcgagcacgccactcaggcgtgctgtggatacggaggcccacccctgaactacgatggtaacgtaccatgtggacacacggtgtctctggatggtaagatggtcaccgcaaaagggtgcagcgacactactgaattcgtcaactgggatgggatacattacacggaagctgcgaatttccatatcgcctcgcagatcctgaccgggaagtattctgatcctccgttcgtggataagatgccgttcgtcataaaacctagattctgattggcatacaattttccctctttactcacccactttacagcaccggttgcagatacgatgtatacttattacttgccaataaccatatatagcttgagtaaaaaaatcatatat

SEQ ID NO: 35741 - DNA, 680 bp, Zea mays
  Clone ID: UC-ZMROMO17031D06_FLI
cgcgcacaccgacgccgggggcctcatccttctgttccaggatgaccgcttcggcggcctgcaggcgcagcttccggacggcagctgggtcgacgtccagcccctcgagaacgccatcgtcatcaacaccggcgaccagatcgaggtgctgagcaatggccggtacaagagcgcatggcaccgcatcctggcgacccgcgacggcaaccggcgctccatcgcctccttctacaacccagcgcgcctggccaccatcgctccggcgatccccgccgcaggggtcggcgacgacgactacccgagcttcgtgttcggcaactacatggaggtgtacgtcaagcagaagttccagcctaaggcgcccagatttgaagccatggccacgacgacgaccaagtgatgacctagcagcgactcagcgagagcctaaataaatattaattcacagtcgtcaagttaatcttgtggttatacggtacgggcggggcttgtacttatgtaggttgctaagtcttaagtgtgtagtttaattaacgtgtgtgtggaatgtacgcgtcatacaaatgtgttggtgtgtgccctgccgcaagattgcggtgagcggtggatctatggtcaacgggtgcctaaatgatttgtgcttttgtagcataaaatggcacatctcctctgcttttgtt

SEQ ID NO: 35742 - DNA, 330 bp, Zea mays
  Clone ID: UC-ZMROMO17037E11_FLI
cttcagcccttgttcgtttgcgtcggattgcacgcggaatcgttccagctaatcaaagtctatataaattagagaagcaattcggctagtaatcgttccgactcatcaatccggcacaaacgaacaaggtctcaaggtacttcttgtcttgtataaactgtaaggttgattcttttgtttcaattgaaatggaacttcattggatttgtgcaaggctttttggctgaatttctgaaactgtaattgagatcagggaaagggaatggtgttgggtctgtaatattattgatattaagttgaccatatgcaaatttaacccaaatttggaac

SEQ ID NO: 35743 - DNA, 792 bp, Zea mays
  Clone ID: UC-ZMROMO17045E02_FLI
gcggcgcagctgcggtacatgatgagccattattttggtaccccacctagcaaggaggtgatccaagatctgtactacgccttgaggacaaagggaggtttgacccccaaggaggaggagacgctcctggcttgcaatttacttcctggtgtttatttcatcgtgggttcagtactgggcactttcgcgatgttgttgggttcccacaaaggactcaaattgcttgggcgtccacctaattctccattaagatctttgactgtttatggctacggttttattgtcggaaaggcctgtgctaatgaaacctggcatcaattgcctgaactgcttttagacagggaagaaggacgcatgaagacagagctagctaaaatgtggcgcctacgacatacgtatgttgacagcacctttgtagaaagaacgaaggaagttgaagccagcaactctgatgatgtggctagatcaatttcaagagagacaattacaaacactacaccatttggagaaatgatggaggattcactggcttgtatactgggttctcccggatgcaacatggaaagcaacaatcccccagaaaagacagctaatgtcctgacgcgaagtgatctgcgagctcgcagaagaggtcgcaggcatcatcggcatgctgatgactagtttcctattgtgaatgttgtgtagaagtgctgtggaataccctagaccattaccattttatttgggcctcatgccccacagttaatctgctgtgcctggtcaaaatttctaggctggacaagagctgct

SEQ ID NO: 35744 - DNA, 785 bp, Zea mays
  Clone ID: UC-ZMROMO17045G06_FLI
tgctgtccatgtgcctggcgttcgccaaggagccgttcagggtgaagtcgggcgcgtgcgggacggtggtgcgcaacgccgagctgaagatcgtggacccggacaccggcaggtccctcgcccgcaacctgcccggggagatctgcatcaggggccagcagatcatgaaaggttacctgaacaacccggaggcgacgaggaacagcatcgacgccggcgggtggctgcacacgggcgacgtcggctttgtggacgacgacgacgagatcttcatcgtcgacaggctcaaggagatcatcaagtacaagggcctccaggtggcccccgccgagctggaggcgctgctcatcacccacccaggcatcgccgacgccgccgtcgtcgggaaacaagtggagccggagatcggggagatcccggtggccttcgtagccagggccaaagggtgcgacgacgggctcaccgaggacgacgtgaagcagtttgtggccaaggaggtggtctactacaagaaggtccgcgaggtggtcttcgtcgacaggatccccaaggccccgtcgggcaagatactgcgcaaggagctcaggaagcggcttcaacttcagcaccagcacctgcagcaagcggtgtgatgtacctggctcaatgagaagcgttggagttgccaagctagtgtacatcatatttgggggtggctgtagatgctccgtgtttttggtctagtttggcggtgggtgatggtgattaattgtctacctcataatgttcattttgttttcagacgt

SEQ ID NO: 35745 - DNA, 546 bp, Zea mays
  Clone ID: UC-ZMROMO17049C10_FLI
gtggaactctaaattggacggagacaagtatcgccattgctgacacagagacagaacagcggtcacaaactgcaagttccagcgaatggcgtcgcagttgatgattcaatgacgacgacaggaaatcacaaaccgcaagttttcaattcgtaggctaagacaactagtgggacgccatacattttgtaggcggctgatctggtggtgaaagggtggatgtccctgctagagccccagcttacggcatctgggagagccttggaagttggaccccgacgcttgtgctgcactgaggactgttacactattttctttgtacagaacaaacaggtgtggttaggcgattagcgctgtgacgattgattgtaattcacccacgtaccattgaggaaattaatggctgcgatggtgaagcgccgtgcgcatggcacattgtatgacgttcactcagtattcggttcgagtttaaagtaggatgatgcggggtaacactgttgtctcgtttttaccataacaacaacaacaacaataaagcatttttgttct

SEQ ID NO: 35746 - DNA, 1050 bp, Zea mays
  Clone ID: UC-ZMROMO17055H05_FLI
aaattctcatggaagaagaggaaaaggcgcaaacaggcattattgtggctatggatcaagaagttgtgggcataatttctgtatctgacccgataaaaccaaacgcccgtgaagttatatcttacctcaagtccatgaatgtggagagcattatggtgactggggacaactgggggactgctaacgccattggcaaagaggttggaatagaaaagatcatcgccgaagcaaaacccgagcagaaggctgaaaaggtgaaggaacttcagctgttaggaaaaactgtggcgatggttggtgacggaataaacgactccccggcactagtttcagctaatgtaggcctggccattggcgctggaacagatgtcgccattgaagcagccgacatcgtcctcatgaagagcaacttggaggatgtgatcactgctatcgatctctccaggaaaacgtttttccgcatacggatgaactacgtgtgggcgctcggctacaacgtcattggcataccaattgctgcaggggtgctcttcccatcgacccggtttcgcttgccaccatgggttgccggcgccgcgatggcagcttcgtccgtcagtgttgtctgttggtccctcctcttgaggtactacaagagtccaaagaagtttgacaactgatgacaccgcccggaccggagcgaccaaagcagtgttattaaggtaataaaagaagctaatattttaatgggtaaaactatttggtgagcgacaggtgaacattctggagttgacaaggaattgcgtgcgtgaaataaactgtacatatgcattgcttatgtatgatatatattcacatggcaaaatcctggattttatgaacatgttggcatagcatagttacattgtaatatatatctcacctttcacttttgtaagaaactgaggccatgtttggtttcatttagtcttaggactaaactttagtcctaggagtaaactttagtccctacttgtttggttctagggactaaataggttctaaagtcattaaatacattgtccaaagact

SEQ ID NO: 35747 - DNA, 825 bp, Zea mays
  Clone ID: UC-ZMROMO17066H08_FLI
tccgcgtggccgccatcagcggctccattcgcaaggcctcctggcacagcggactcatccgcgccggtacgtacgtctgttcttttctcgctgaaacaccatatttatatatatataggaatgggtacactagcttggcaattatccagccgcggaggtgtgcgaggactgcatcccggggctgcgcgtcgaccacctcgacgtcgccgacctgccgatgctcaacaccgacctcgagacgaacggcggcacgggcttcccgcccgccgtcgaggcgttccgcgccaaggtccgccacgccgactgcttcctcttcgcctcgcccgaatacaactactccatcaccagcccactgaagaacgcgcttgactgggcttctagaggagtgaactgctgggcagacaagccggccgccatcgtcagcgcgggaggcaacttcggcggcggcaggtccagctaccatctgcgccaggtcggggtgttcttggacatccatttcatcaacaagccggaactgttcgtcttcgccttcttcgagccggccaagtttttcgacagcgacgggaacctcatcgacgccgacaccagggagcgcctcaagcaggtgctcctgtcccttgaggccttcacgcgcaggctacagaacaacaaggactgaagcagcagctcccgggatcgccgtgctaataataatagggacatttacatttcacccactagtgtggacgtgctgctcaaatctaccccgcccaaattttctacttagttttcccctcctacctccacactttgctcagaaatcacctcacgacggcattttcttcc

SEQ ID NO: 35748 - DNA, 696 bp, Zea mays
  Clone ID: UC-ZMROMO17068A01_FLI
gtcgcagtccccggcgtcctcctccacgtcttcggcggacgataacctgaggcgcatcgtcgagtctgagatcgagtgcgttgtccagtcggaggagagcaacaccgacaagcacattgatctaccagaggacttcccttttgagatcatagacaatcctggtgatcagtcaataaccctccaaagggagattgcaggggagacaattaaagctgttatatacaccaactttgatacagatgaacatttggatgatgaggatgacaaaagtggcacagatgaggaatctttcaaaccactacttcagatggttgtcactattaaaaaaccagaaggtccaatcctagaatttgactgcaactttaatgatgatgaactaacaattgaaaatatgagggcgctgaaccgtgataaccccgatgctaagaatgtgtatgaggggccacaattttcggacctggataagagcttgcagaaggccttgcacaggtaccttgaggtcagggggttcaaacattcactacatgattggctgtacgaatacatgatgagaaaggatgagaaggagtatgttgtttggctgaagagcatgaaggagttcatcggcggaaattgattgtttgcgctttaagttttatctgcattgtgagaacgagacctgtactcatcatgaaatactagcatcataattgcgcg

SEQ ID NO: 35749 - DNA, 2362 bp, Zea mays
  Clone ID: UC-ZMROMO17068C07_FLI
aagagagacacaaaagaagaaagactcaagtcagtggcatcacaatcatgaagatactcaggctgtgactcttgtttctactcactccacgccactgactggcaggcgattatgtgattcatgaaccttcttgccatggcgacgatgtctgcagcgtgcttcttgccatggcgacgatctcatcgctgctgtgcttcttccctgcgagcttcaaccgtgttatttgtgttggcagttcttgtttcagatgtaggcgggcgacatcatcgtcatatttgccctccttatttctcctgtggtggtttgagcgatatatcatatccattccgtcggcaaggcgatccatctgggtgcggtgtcgaatcgtatgagctggtttgcacggatacagacgctaccattcgcatcggcagtggaacatacaccgtgcttagcatcaactccacgtattcttacttctgggtcgttgatgccgacctggacatccagagcagttgcccccttccacggtgggattaccatttgtttcctttcattttgaggattgacaactcacatcgtcggaggattgaattcagccatgatacccctttttcttcttatatggattcggtgtgggctatctttgtgaattgttctcagccattagagaacaatgatactgataaatatcatagatatgagccggtgtcttgcttgagcaattcttctttcatctacttggcaactggctaccggtatgatggctatgtttctgctggggatctgaaaccttcatgcggttacctagccatgactcctttgggtggtccaggcatgccggtgccctggaatacaagctatccagatgttgttaagttcatgaggagtggatttgcccttcgatttcccttttcgtatggtgataacatcagagaatgtctcgcaaacaatatgcgtactttccttaaggatccaagaagtagtacaggcatcaaggaactgattgtggacattcttacggtcgtcgacatattctgggcttgtgttatctatcaacttcaatcaactaataataatggtgtcacaactgttctcatcggcatcattgaaacgatacaatatgttagcggggtcctgaaatatacagctgttgtttgcaggttcgtattaatgccgctggcagtattcgtcttcctagtctataaatactggaaaacaaggataacagtagatgcagtcgagaagttcttgcgaatgcagcagatgctcgttccgatgagatatgcatacacaaacatcattgctatcaccggccatttcagagacaagctcggacaaggtggttacggttctgtatacaagggggtgctacagccaggtgaagttcatgttgctatcaagatgttgggcaactccaactgtaacggagacgagttcatcagtgaggtcgccaccattggcaagatccaccatgtcaatattgtgcgcctcatcgggttttgctccgaggaaaatagcagggcacttatctacgagttcatgccccatggatctctcgataagtacatcttctcatcggagaagagtttatcatgggacaaactcaatgagatcgctctgggcattgctagaggtctcaactacttgcatcatgggtgtgatatgcagattgtacacttcgacatcaagccacacaacatccttctcgacaacaactttgttccaaaagttgctgattttgggcttgccaagctgttcccaaaagatgacaatttcgtgccactgagcgctatgcggggaacgattggctatatagctccagagatggtatctcgaagctttggtgttatctctagcaaatccgatgtgtacagctttgggatgctactattggagatgacgggcgggcgaaggaacgcagatcctcatgcaggaagctccagtcaagcatactacccatccttggtgtacagccagctgagccaaggagatgcgaacgagatcagtgaaggtgttgatatgcacgagttagagaagaagctatgtatcattgggctttggtgcatacagatgaagccgcaagatcggccgatgatgagcgaggtcatagagatgtttgaagatggtgttgatggcatccaaatgcctccaaggccattcttttgtgatgacgagggtgatagttattactctgcaatctctaaactggatacaatagaagagtagtagttgtagtaaaatacacttgtgtctatgtgatcttaatgtattagactactaataatgcaaggttgtcgtaagctaaggtactggttgtatacttttattgagagtgtggtaatgtgttttgatataaatacctccatgaaccattttttac

SEQ ID NO: 35750 - DNA, 2655 bp, Zea mays
  Clone ID: UC-ZMROMO17068D12_FLI
tcaaattgagaagagcaacagaacagataaacattatagagggaaaacttcaacaagctttgaatgaaaatgcaaagcttaaggtgaagcagactgaagattcgaagctctggcagggattagattcgaaactctcctcaacaaagaccttgtgtgatcaactgactgaaactcttcagcagctagctagtcagacagaacaagctgaggaagacaagaagttttttgaggagatgcttgggaagaattccaaagctctagatgaattcaactgcctgttgcgtgatttatcaacaaaactggagtatgcggaacaaaagataatttcagggagacaggagatgttgcagatcaaacaagagaaagaagagatggatcgaagttacaagggacaactgtattcaaatgatactacgataaaggaaaaagattcgctcatcaagcagttggagggttcacttgatgataataaatcccgcttgatatatcttgactcccgcttgcaatgcatggagcaagaactgaagctaaaagatgatgtttgtatcagcctgaaaggaaacctagctagcagtgaaagtgaaaagaacagcttggagcttatgaataagggacacattctggaaattaaaaaactatgccaggacaataaggatcttaatgaattgtttagcagcttcatggttaaagtaactgagctagataaagaacatgcctctatgtcaagtcatgtgtctaggctgatttcttcatttgaaagattctatgaaatggcccaagaagagaaaatgctaatggcaagatcttctaaggataaatttgaacatcttcaaagccagtatgtagatttgacatcagaaaacaatgctctcaaaactgaaattgaagaactgaagtccagactcatagagttgcagagaactcaagaaattgttatggttcaacatgttgaagaatgccaagtggctgaagataagatcagaagattagagtctgaagctgaagtttctgcctccaacataaatcagttagaaaaattagcttcagaactacaagggagaattcagaagttactagaagattctacctttgctgaaaatcacaagcaagagttgcttcaaaagattttgaagctagaatcagataatcaggaactcctaggacaaatgcagtccattatggaagagaaatcaaataatgctgaatctctgcatggagagataactaagcgtgaccagcaggttgatacacttgagaatcagatcaaccagcttcgtagtgttctggatgagaaggagcaactctacctttgttctgtacaaaaagagaagactttggaggaacagaaattacaggtcgaagcattgctttctgcaacagagtgcaaacttagtgatgcaaaaaaacagtatgatctgatgcttgaaggcgaaaagatagagctatccaagcatttgaaagagctatctctcaaaaatgaccaggcgatcaatgaaatccgtaagaaatatgaacttgaaaagattgaaattactaatgctgaaaaagaaaaggcagaaaagctcataagggaaattgaaaacaaatgcaacgaaaagatatcacagaacaagcatgattctgagaggtatttgatttgccttaaggaggaacatggcacaacggtggcgagaattcagcaggataatgagcataaagagtcaactctccgggcttatcacaaagaagaactgcagcgcattcaatctcaggctgagaatgaaatgagggagaggttgtcattgctcagaaaagagcatgaagttcaaataaaatcactaaggatgcatcatgaggaagaatgccagaggatgcaggaggaactggagcttcagaagtccaaggaggagaagcaaagagcattgttacaattacagtggaaagtaatgggagaaagtcaacgagttgatcaagaagtgaactctaagaaggaatactctgtttcgtcgattaggaggagcgacccatatggaagaaaagaacaagaggtccagttggtaagtccggagaccaatcggaaggacgtaaacttacctgggattttacaatcaccaatttcgaacatgttgagaaaggtagagaaagtgtctcaggatattcctaaacatagaaaggtaacccaccatgaatacgaagttgagacagcaaatggaagaatcacaaagcgcaggaaaactaggagcactgtcatgtttggtgaaccgaactctcagaaaccattgcataatactactgacaaagatgttaaaaaactaaaaaaggttcctacaagatcccgtgcacatcctgcaaacattggtgaattattctctgagggttccttgaatccgtatgctgacgacccttatgcttttgactagaagctcacgcctggaagtatcatttttgcaagcacgatgacgaattctggaacacacaattaccaccaccgtgttgggtcaatcctacggcttttccctggtcatccgtccatcataatgtacatgactgccgttgactcatgtatctctgaagtattgctactgcaacaaccatcacgattgtcggatatgtaggtgtagatttgtgaatgaactgtacatgccataactacggagtaactgaatatcctcagat

SEQ ID NO: 35751 - DNA, 474 bp, Zea mays
  Clone ID: UC-ZMROMO17068F04_FLI
gtcggcgtctgcgagtgctacggcgggggcgcctgcgtctccagctgcgccgcggcgttcgccgccagccactgcagcctgagcgacgcgcaggtgggggagatgcgctgggtgcagggcagctacaggatctacgactactgcgtcgaccccaagcgcttggtcaacggccagaggccggtcgagtgcgacctgccgcagtactgaacggatcggagctccgatcctgaggtccttgttgcgtatgaatgagggagcaataatcatacgtatttactcaaacaacagtgcaaggggcctgccgggaattccaacaagccgacatatacccaccagaggttgggtcgagtcacgacgatcaacgaggccgcccgtctcactcgtctattttcatggataatgcaattggttttgtgctcattttactcttttaccgatatatattatatacatggactatgagtttttgagaat

SEQ ID NO: 35752 - DNA, 2627 bp, Zea mays
  Clone ID: UC-ZMROMO17068H01_FLI
atcccaagaaatttccatgaccactattgagcaacctatagctattgatcaagttgaacctgtcaacctgaatgtagatgaacttgtggttgatgatgatcaacctggttttgctccaaggtgtgaatctgctaggctggataaacctggatgtacttccaaaaaggatgattcaaatgagattgttgaagatagcaaatcactggaaaatcagttagaaatttgcaatgcagctactatgtctgatgagtgttcctccagaaatgcaaatgaagatccctctccaattaatatgtctgctgagtgttcctccagaactgcaaatgaaggtttctctccaattaatgaggcttctcatctagctgaggagtcttgcctttcagacaagtcatacaatgctatcagttatgaaaatggaaatgggcctgctaaatcttctgaggagcctgacaagtcatgcaatgctatcatttgtgaaaatgaaaatgagcctgctaaatcttctgatgtggttgaaaccagatgcgtggaagcattagcgccttcatctgttggcacggttgtcacggcagaacagaaggacaatggacaccgtgcttctggtgagtggcatggagataatgtgcaagtcattggacaacaacagaagatctacataattaaagttccaaagtttgccggtgatgatctctggaataagatccaggctgcacaggctcacttagaccacctgacccaggaaagagatgcaattaaccgtcgtaggcaaaagcaaaaggctgtatgtgatcaatacagggagaagcttgaggcagcacgtagagaagagcgggaagctaggactgcacatggagataagaagaatgatttaaataatgtacgttcggtactagggaaattgcaccaagcaaattcagctgaagaacttgatgagctgattgcgaagaaagagaggactatgcaacatgagaccatttctttgaaagaagaaaaacttttaattaaagagattaatgaattaaaagcccaacggaagcagctatccaccactatgggctcaaaggctgaaatcaatgaggcatttgaccaaaaagatcacattcatgaaaggcataaggtgttaaagaaggattctgatgttttattgaccaacctgaaattcctagaggaaaacacaagaaagattcaaaagtctttcgaagatgaaagaacagctctcagaaaattaacagaggaacaccgagcagctaatgaaatacgtcaaaaggcctacattgaatggactgagcttagatcagagccctccaagaagaatgaatacttcttcaggtacagggatgaccggaatgcagcagaaattttcagagctaatggcgatataaatggacttaaatcacactgtaatagtcagattgagggagtcatggaaatgtggaacaaaaacgaggaattccgcaagcagtatgttgagtcaaacaaggttagcacactaaagagattagggacccatgatggacggaaacttggccctgatgaggaccctccagtcatatcaagcagaagaccaagcagcatctatccattgtctgcctcaagcccgggagtggccactttagcttcaataccagcacctgtggtagctgctccagctgcagtctctgccaaagaggactcctttcctgttttggaagccccccagaccagcaagcgcaccaagtcaaaagcatctgatatctgtgcccagaccgagaacaactctgttatagtatcggaggcagaggctttggaacagactttgaaagagaaagctcgtctattggaggaacaattggagttagctaggaaggcagaggagttggcacggaaggaggaggaattaagcaaagagagggctgccgctgagaaggagcggcttaggatggagcagaaggctaaggccaaggaggccgaggagaggaagaggcggaaagccgagaaggacaaggagaaagccgagttcaaagcgcgcaaggaagctgaggagagggagaagaagaaagccaagaaagacaaaaggagaggcacggcaccagcagattctagcctcactggtgacgggcacgccgcggccttggccacagcagacactgacagcaacgcatcggacaacccgagggaagctgaggctcctcaaccggcggcggctcccaagaggctgtctaggcccgcagcggcaatcaagcagctgaacagggtgcagcccatgccggcgccgctacgtaacaggggcagaaggagactgcggcagtacatcctgatcgcggcggccgtgctatcggggcttgcgttgttcgtggcaggcaactatattcccaggctcaagtcggttcactcctaagtttatctgtaggaaaggggtgctaatctgtcgcggtgaacctgggtgtgattcgtattatttcgattattctccggttggtttgtactattttttttacctcatataggttggttgtgaaagatgggggtgcattgtgttaaaagttgttttacaggatggtggtgaaatcttcgttagaacatggataataattagtactatagattctttcttgtagtagccttagcgtatatgatatttactggat

SEQ ID NO: 35753 - DNA, 824 bp, Zea mays
  Clone ID: UC-ZMROMO17068H03_FLI
gcttgacatgcaaaaattgaatgagatatatcgatataaaacagaagaatattcttatgatgctgtcaacaagttcaacatttaccctgatcagatttctccatggcttgttgagtggatacctcctaagggtggttactttattggaaacctccagccagctcatatggacttccgattcttttcactgggaaatttatggtcaatagtaagcagcttggcaacaactcatcagtcgcatgccattttagaccttattgagtctaaatggtctgatttagttgcagagatgccactaaagatatgctatcctgctcttgaaaaccaggaatggaaaatcatcactgggagtgaccctaaaaacacgccttggtcataccacaatggaggatcctggccaacattactgtggcagctcacagtggcatgcatcaagatgaacagaccagaacttgctgccaaagctatagaagtagctgagaggcgaatcgctactgacaaatggccggagtactacgacaccaagagagcacgattcattgggaaacagtcgcggctgtaccaaacgtggtctattgctgggttcctagtagccaagctactaatagaaaagccagacgctgctaggattctgtggaacgatgaggatgctgaaatccttaatgcttcgagcacaaacagaaaacgtggcaagaaagtgttgaagaaaacatacatcgtgtgagttctcgcagcaagttcgattaaattcctcagttagcatttttaagttgtaatataggaagtgttgtccctgtatataaacttaaatgaggttgcatttt

SEQ ID NO: 35754 - DNA, 376 bp, Zea mays
  Clone ID: UC-ZMROMO17068H05_FLI
ggggaccatcccagaggtgtcgccggcgctgcgcgaggagttcgtgattgcgtccaaggacgacgaggtcgtggacgcctgagcgagcatccacgtgccagcatgcaagcagtgtcttatctgggccggggcgccatcacggggtttcttttaatctgggactttgttgttgttggacgaatgaattcccttccttcgatcggttagctttaatctgtctcgttagtgtcgtgttcgtgtagcaccatgccacagctacaccatgccgtgtgctctgtcacgtggggggccactcgtggggtctcctgctgctgtcagaacgaataagagaagatggaattgtgatgaaacaataaaaatgcatggtttaaattgt

SEQ ID NO: 35755 - DNA, 722 bp, Zea mays
  Clone ID: UC-ZMROMO17068H08_FLI
agcgaatcgaatgaatcaagcttgcgcgacgggcagttgatgccacccggcgatggatcgtcgcatcctcaggacctcgtcgtgcaacggcagcggtaagaacccgtccccttcctctcccgcggcggtctcacggcctgcgtcctccgggggcatcggctccaaggacgacgccgctgccggcgagcgcaaggcgctgctgccgcggcagcctcctggcggcatggcgcggaagggccgcaaggggtccaaccgccgcgtgcagtggaaagataagcatggcagcaagctcaccgatgtcagggagttccagcctagtgactcaagtgactcagatgatgaatatttggatacatgcatatgctcaatcatgtaaatacatcttgcacaggtggattctatcatgtgtataaagagctgtatctcagtattcctgtcttcggcttggccctaacagtacagtgacaatcatgcatgcatgcatagttcgttccaacagactccgaactggtgataatcagcgggtggatatttagctggccttaactgggagttacatcaaagacctagaaaatgatcaccggattcagtaggtagacatgattgaagaagccgagaaagaatgcctttctttggtttaattttggataccaacaccatcctgagtttttggcagagtaatgattcatgtgataatgcaaatgctattagaatcgaacatt

SEQ ID NO: 35756 - DNA, 688 bp, Zea mays
  Clone ID: UC-ZMROMO17080B03_FLI
ggcaagacagtacccttgctttggatttgcagctaagatgccaaacatcgaatggtggaggacatgtgttaagaattcattcgttaaggctggctatgattatgatgaagagacatttgagaaagtcttcaggcgcatttattctgcatttggctcctctgcgccatactcggcgtttcctgattcgcagcccttcctaaggtgggcacgcgaaaagggactcactgttggcattgtcagcaatgcagaataccgctacaaagatgtaatcctgccagctttaggattgaatcagggctccgaatgggactttggggtgttctcaggcgtcgttggcgttgagaagccagacccaagaatttacaagatagcgctggagatggcaggaaacgtcgctccggaagaagcgctccacataggtgacagcatgcggaaggactacaccccagctaggagcatcgggatgcatgcgctgctcctggaccggttcaagactgcagatgctgagagctggaggcagtcaggtgccacggtgctcccggacctcgtcgccactcaagagtggctcaccaaggatcagaatgaggaacaggaggaaacagtggcagcacgagtgctgaagagaatgtccgaaaagctatagatggggtgggctttaaccatgcattaattctacgagtgttccttt

SEQ ID NO: 35757 - DNA, 372 bp, Zea mays
  Clone ID: UC-ZMROMO17080B04_FLI
gcggagcgccgccatggtgtacatacaggacgtgataggaagcccctcatagccaaccccccgccataccagtgtatgttttgtaccatacacagcatgtcaatgtaaggatagtagaaaagccactttaggtccctccctggctccctccccttgcaaaccaaacacctacattccttgtgtgcctagttagatatgttgtttgccatatagcctttcccttagtaaattattgttgtcgactgtgattaagcctcctaattgtacccgccacgtggcccgtgctgccagaatcaagaagttttgactgtaccttctgtatgtaaatgcaatgggggaaaaatgatgaatggaagcttttgtcaagcctgc

SEQ ID NO: 35758 - DNA, 1033 bp, Zea mays
  Clone ID: UC-ZMROMO17080E04_FLI
gttttcacccttttgtttatcacagcaaacgcttttacactgttctactatggcgtagggtgctggcatttctagtggcttcacagtttttaaggattatgacattctattccactcaacttcctggtcccaattatcactgtcgtgagggctcaaaactggccactctcccaccaccaaataatgcacttgaagtgctcctgattaactttcctcgtggagtgctttttggttgtggcgatctgatattttcatctcacatgatcttcaccctagttttcgtgcgcacgtaccataaatatggctcaaacagattaattaagctcctttcttggctgatggctataattcagagtcttcttataattgcttctcgcaagcactacactgtggatgttgttgttgcttggtacactgttaatttggttgtgttctttgttgataagaagctgcctgaaatgccagatcgtacaaatggattatctttgcttccagtaagcacaaaggataaagacgggaggatgaaggaagaactccataagcttgagaaggacgggaggatgatggatgagttccataaattattaaatggaaacactgtcgacgctacagattggcgacaacgagtgcagatgaatggaaagcatggagaagacacgaaccacactgtctctgatgccacccctactggaacatgatcagtagcttttctttgttatatcgtttttaacatccacaggggagtctgcgatgaaaaaggaaattgcgtgttgtgcctctgtatctgaaaggcttctcaggtacccgcaaggctgcaacatcatatcagaatgttttgttgtgctctccatggcacgatgacaggaaaaaacgaggtgttgaagtagtggtagaaactaaatcaggatctcttcgcttttctaagaggccgcagctacagttttgcatccttcagacatttcaaaaacgacggtactagagagaaatttatgtttgatgtaaatgttgattagattcagctagtcctcactac

SEQ ID NO: 35759 - DNA, 284 bp, Zea mays
  Clone ID: UC-ZMROMO17085H11_FLI
atgctggagacccggcgcgccgtgatcggtggtgaggtgatcgcgaaggccatcgggagagtgatgggcgacggcgaggacgcggaggcaatacgggagatggccaaggagctcggggagaaggccaggcgcgcggtggccaacggtgggtcatcttacgatgatgtcggacgcttagtggacgagctgatggctcgtaggagatccgtcaaagtctgattgcagcatgttcgtcttcgtgtgcacaatattaatctggaactcgtatacataaatttaatctc

SEQ ID NO: 35760 - DNA, 630 bp, Zea mays
  Clone ID: UC-ZMROMO17089D03_FLI
aaaaagcagttctcggtagctctttcggtgtggtgggtgagggtgagaatgcagagccctccaagtcgaatgtcgaagaatcaggtgccaagaaggaaggagcgaagcatgagacgagtgattcgagcaaggacagcgattactccatagtgtctagacagcgaactgcggaggaagaggatcttgagtgggatgagattgaggatctaggagagcatgaagaaaagaaaggcggcatccagacctcaagccctgctctgaaggaggagctgcgcaagaggctgagcattgccgaagatgatgaggatttaagctgggatatcgaggatgatgatgacaatgcctgaatgccattggtggtatggaagtgtcagttgtatttctacattttgtaccttccattactcgcgcaagttactgtgatttggccaataatgattggctatccttatgctatggacacgtgtgtatactgtaaactctccagtttgatgatatcaagtggcaattggctaagcgtcaatctattaggttgtctttgtggtatttaccgtaaacatgccatgtttatttgacttgtgtcacatgttataatgttgtttgtttattaatgtacatttgctgcaccag

SEQ ID NO: 35761 - DNA, 867 bp, Zea mays
  Clone ID: UC-ZMROMO17089F02_FLI
tctttctccagctctctgataagctagccagcgtcgtcgtcgtgtcttgttagttattagctctatctcgccgccctgcagctgctgatcgagtgagggaattcagcagcagcagcagcagcaggtagcatagcatagatatgacggcggcggaggtggaggccgccaaggacatcgccgaggagaaggccgtcgtgccgttgccaccgtcgcccgccaagccggccgacgacgactccaaggccatcgtcgctcttgtcgtcaaggacgctgctgctgggaaaccttctacagctattattggaggttcaactgaaagagatgcttacctcgccaagatcgtgtccgacaagaggctgagtctgatcaccgcctgggaggagagccagaaggcgagagccgacaacagggctgccaagaagcttgccttcatcacgtcctgggagaacgccaagaaagcggagatggaggcggagctcagaaagatcgaggagcaactgcagaagaagaaggcggcgtacgaggagaagctcaagaacaagctggcgatgctgcacaggacggcggaggagaggagggcgcagacggaggccaggcgcggcgaggagaccatcctggcggaggagatggccgccaagtaccgcgccaagggcgagggccccaccaagctctttggcctcttgaaagcgtgacctctgctatggagaatgccctgtttcgtgcgtgtattaatttcgtattctcaacaagtgcacttggtgtgtgtgctgtttgttattttctctcttgtattccaaggcttgcttgacaatatctgttgtattgtatttgtataggagtgcagtgcagtgcagtgctattctttct

SEQ ID NO: 35762 - DNA, 1032 bp, Zea mays
  Clone ID: UC-ZMROMO17089G09_FLI
cccagagcttcagcatgctcttgaggtccagaaaatgtctgaacaagctgctacaaacagctttaaagaattaacttacattcgtcaagaattaaggaacccactcaatggcatacaatttacttataacttattgaagccttccgaattgacagaggatcagcggcaacttgtttcatctaatgttctgtgtcaggaccagctgaaaaagattttacatgacactgatcttgaaagcattgaacagtgctatatggagacgaacacagtagagttcaaccttgaggaagctctgaatacggtcctaatgcaaggcattcctttgggcaaggaaaaacgtatttctattgaacgtgattggcctgtggaagtatcacacatgtacatttacggggacaatataaggcttcagcaggtcctagcagattatctggcttgcgcccttcaattcacacaaccagctgaaggacatatcgtgctccaggtcattcccaagaaggaaaacattgggtctggcatgcagattgctcatttggaattcaggattgtccatccagctccaggcgttccagaggccctgatacaggagatgttccagcacaacccaggggtgtccagggagggtctcggcctgtacataagccagaagctggtgaaaacgatgagcggcacgttgcagtacctacgagaagccgacacctcttcgttcatcatcctgatagagttcccggtcgcccagctcagcagcaagcggtccaagccttcgccaagtaaattctgacactgatgctcctggaactgcagtgagggttcggccgtgtcaaattctcgggtgtagctctggccaagtgactgatattctgaaaaacatacggacttctagtataggagaagaggaatcctaatcctagtaattatatcttagcagatatgtgcttagtctcttgttaaatttttgtcttgagaggactatatatactgataaagtgataatttattcagagaataaagaatgggctccatcctttgtct

SEQ ID NO: 35763 - DNA, 458 bp, Zea mays
  Clone ID: UC-ZMROMO17091A09_FLI
taaaggatctccttaagatcatgaaggagaaatacggaaacccacccatgtacatcactgagaacgggatggctgaagttgaccttggcaataacttgaatgaccagaaaagaatagattacctccagagccacttggcagctcttcaggagtcagtgcagtcgggagcaaatgtgaagggctacttcctttggtctctgctggacaacttcgaatggttctgcggctacacccaaccttacggcatcgtctatgtggaccgcaacgatggctgcaagcgctacatgaagcagtcagccaagtggtacaaacgcttcatcgctgcgaatgataaatgaagtgcacccatacgtataactcactaccagaggaggtagtggagaggaccatatgcattgttccagtccagggttaccgtaccttattatatatgcaataaatgaagtgctctaatattt

SEQ ID NO: 35764 - DNA, 2162 bp, Zea mays
  Clone ID: UC-ZMROMO17091D05_FLI
cttgtctcaccatgctaagatcttcaagttaaaaggtgcagtggcgatccgcctgcggtgcacacgcactgggacagcagactttgtgctggaattctttctgccaacagattgcgaagcactggaggagcagaagtcagtgctggactccttgtcaggcaccatgcgaagtgtttgccagaccctacgtgtggtcacagatagagagatggaagacgaaacggtgctggaaatgaacgagctgaactcttttactcctcatgggaaggacaaagttgagttgtcctttggatgcaattcagcagatcgtagaggagaggcctcttggacaagtctggcaggaacatcacagcaagaatccgagttagctgcattgcggatgcatggaatgttctcacctggggggcagggtccatctctatctggtgttcaggcaactgctgaaggtagcaaggcaaaaaggcgtacaaaggccgagaagaccgttagtttgcagattcttcggcagtacttcgctggtagcctgaaagatgcagcaaggagccttggagtgtgccctacgaccctcaaaagaatttgcaggcagcatggtataacccgctggccatcgcgaaagatcaagaaggtagaccactctctaagaaagcttcaacagatcattgattcggttcatggagcagagacagctttccagctaaacaccctgtacaaggatatcacgaacacctcaatatcatctgacaacaatttgtcaggaagtgtcacggttcctccaaccaaccagagcaatctcaccgacgtcaacaagcaccaaccccacaagtcaagcagtaatgtgccatcaacttcacactcacactcttcgtgcagccacagttctgagtcaagtccctcatgtagcggtggtgcaacaaaacatgcacaacagggtataattgatcagatgaagtcagaaaatcctgtgaaagacagctctattcagactctgcaaacagaaaacacttcattatttgagcatttctcagttaatgagactccaattgatcttctacaggatgttactgaaaaggctaatggtggacatcattcttctcgaagcccgttgtcccccaatcccaagcagaacacagatgcaaatatgagagtaaaggcaacatttggctcagaaaaagtgagattcagactgaacccagagtgcaattttcaagaactgaagcatgagatagcaaaacgtttgagtatagtagacacaaaccccttggttttgaagtacttggatgatgattcagaatgggtcttgatgacatgcgatgcagatctacaggagtgccttcatgtatacaaactagcaggaatccaaacaatcaaaatttcagttcatttagctgttagtccagctacaagggtgacaactggtcacactggtttgtcatgacaacagtatgaacctcaccactttgtgaggtttaatcagaattcaacctggatcacttggttttatggttttatacaggggaaaccaattccaggagtcccgagttggtagcctatgcaatgtactatgtgccaccaagtcccagttctgctgttagatcgattagtcttcgatctgttgctcaggttaggaactgatgatcaaacaaaagtacttgacaatgggaaagtcaattctaggaattaggataaaccgaagtaagcatgcattgcttgtaaacactcactgatgaacctaaatctctgaaaggcaatgcaattgattgaattaatagggtgatagggtgaagtatacctacaaatcagatttgctccaactccaagtatgttttggttcttggaatactgatgtgcaacaatccttgatgacttctttctgataattgatcagctacaatgtcccttaagatcccagcattccttcatcgcccgagtgaccaacatgctctgtctgttcaatggacattaaattctgcttctgaaattgcaactttctgcagcaagggttagatctaaaaaataggatgataggatatttagtttgttcaatttgtttgtcctttgccaaaaaaacattgtatgctatactacagtgtggtcctctttgaaagaacgcctgctactgtagacgttatggattgctttccttttaagaagcttccgtttat

SEQ ID NO: 35765 - DNA, 1385 bp, Zea mays
  Clone ID: UC-ZMROMO17096C12_FLI
tatcaatcagtgatggtacagtcactattgttgctaaaactcaagaaattatggataaagctattgagaaggttgagttcctcgtgggacgtgaaattgaagttggtcgtacatacaaaggaattgtttcttcgattaaggagtatggcgcttttgtggagttcaatggtggacaacaaggcttacttcatatttcggagttgtcacatcaaccggttacgaaagtctcggatgttgtaactcttgggcaatctctctctctgagatgcattggacaggacatgcggggtaacattaaactttcacttaaagcaaccttaccccaaccacgtatcaagaaggatttgaaaaataaggatcctttgccaagtgaagttactggttgggctgctgtggagaacatgagtagtgtggatgttgatgctcagctatcaagtaccgaacatgaaaatggcacaactgaggaggcagctgcattttcgactccttcagttataattcgaagtgctgctgactgtgatgctcaagatgatgcaaatggttctaagaagcgggcgaaggttgcaaagtcatctcctagaccaaataaaccagccagcgaatgccatgatgttaggaaagctaccgctaagaaagctacaggtgccactaccaagaaaactaagaaagtaaagattgaggaatctgtgagtaatggactagaaaccagtggttctgatgttccagaacagagtgctgacaacacttctgaccagaatcagagtcccacgaaattccaatctggggcaatgaagttgggtgatgtagttacagcaaaggtctaccagattcgagcctatggactagtacttgagttgagtgatggtgtgcgtggaatgcataaatttgaggcaaatggcctaaaggaatttgaagttggacaggaactagtagtgaaatgttctagtttcaatgcgaaggggattccgttattctcattgctggactagcaatgccaccatttgggaaccggatacaaatgacaccttagcagctaaccaatcaacttgtggaacacatggctagcgaagttttgttctttcgctgttgttgaagcgttggtcaagttctttattcgtacaaccatgaatagaatggaggtcaatcacatgaagtgtagagcgtacggactgagtacgaaccatcggaacctgctgtagccattatatataactaggattacgttacttatctatctattggttaaaataatagggacgatgaattctttgtaagacgtactgaagcagagtgtcccacttacaggaatccagttccagtttgtagtttctttacctaagattgttcagctgtacctttattttatttttagcagggctgtttac

SEQ ID NO: 35766 - DNA, 873 bp, Zea mays
  Clone ID: UC-ZMROMO17096D03_FLI
gacgccgaaccgcagcagacacgcgcgcggacagcgtacgagggagggagcgagctgccttgaggtagagggaggaggagaacatgcagggcggcggcggcggcgtggaccagccgccgatgcagatggtgctgcgggtgaggcacccgtcgtcgctgggcggcagcggggcggacgaggacgacagcgaggggtcctccaggtcggcgctctcggtgttcaaggccaaggaggagcagatcgagcggcgcaagatggaggtccgggagaaggtgttcgcccacctcggacgcgtcgaggaggagtccaagcgactcgccttcatcaggcaggagcttgaagggatggccgaccctacaaggaaggaggtggagtcgataaggaagcggatcgacacggtgaaccgtcagctcaagcctctcagcaagagctgcgtcaagaaggagaaggagtacaaggaggtcctggaggcgtacaacgagaagagcaaagagaaggctctgctagtgaacagactaatcgagcttgtgagcgaaagcgagaggatgcggatgaagaagctcgaggagctcaacaagacggtcgactcgctctactagacgccaaccggtgctccgtgctctgctcacccacctctccatccactcatccatccagagcttgcactctcgccctctgtaatctgatccccgtgtgccgtggattgtgacctgttcaaggtggtgcttgtagtaactgatatttttcgttgggtgatccttttctcttttttttttttcttcttcttctcttttggtctcttttatttcaccagttcgagagtctcgttgtactgtcattgtcgagtaaaactgacgtactgtatttataagc

SEQ ID NO: 35767 - DNA, 364 bp, Zea mays
  Clone ID: UC-ZMROMO17098B11_FLI
taatgggttacgatagtacttgcgacgtaggtagcgatctgatctcgagcatcttgggtgcgcggaaagccaggaaactcctgcagcacccaaagaactccaagatcccgcgttgatgtgtacccagttcctcttttttttcccctttgtagaacagaatgcatttttttgttatgtacacaaggtacgaagggccggccgccggctggtggagctcagattttgctgtggcgtgtacaggctacgaactgtgacgcttcggcaggaacgtaactgagatcctccatgttctggtcctcacttgtaaaaattgccgttcatgtgacttcagacttcagttgattagatattgttctgtggattt

SEQ ID NO: 35768 - DNA, 532 bp, Zea mays
  Clone ID: UC-ZMROMO17098D10_FLI
tgttgctgcacaaacaaaagcaattgctgagaagatcaaggactggagcaacgtagttgttgcctatgaaccagtttgggctattggaactggtaaagttgccaccccagctcaggctcaggaagtgcacgcctccctgagggattggctaaagaccaatgccagccctgaggttgctgaatctactaggatcatctacggaggctctgtaactgctgcgaactgcaaagagctagcagcacagcctgatgtcgatggttttcttgtcggtggagcttctttgaagcctgagttcatcgacatcatcaacgcggccaccgtgaagtccgcttaagatgctacgctgaagacgaacatacttttttttgctcaactgtgctatgtaagctagtagcttttgcgcaggagcagagactgttttgcctgcccccaacttctagcttgagcttgctaataatgtttacctctggacgtatcaataatggtgcttatgtatccccttttttttgtgccgaattacggtggatccgtc

SEQ ID NO: 35769 - DNA, 750 bp, Zea mays
  Clone ID: UC-ZMROMO17100D05_FLI
ccaagggcaggaaagggaaggccggcaaggaccccaacaagcctaagagggctcccagcgctttcttcgtgttcatggaggaatttcgcaaggagttcaaggagaagaaccctaagaacaagtctgtcgctgcggtggggaaagctgctggcgacaggtggaaatccctgagcgagtcggacaaggctccctatgtagccaaggctaacaagctcaagctcgagtacaacaaggccatcgctgcctacaacaagggcgagagcactgcagctaagaaggctcctgccaaggaggaagaggaggaagatgaagaggagtctgacaagtccaagtcggaggtcaatgacgaggatgatgaagagggtagtgaggaggatgaagatgatgacgagtgatggagctcctcgagacaatggaccgtgcttcatccaacaatggagcggctacacaaggccccgtggcgatcacaaaaaaggagcctatatccatgtactagaattattcagtttcactccacatcgtgatgttttatttttacttttgtcgtgctataacggatagcgctcctcgttggcgccactggcgggtggttctgcctctggtctggtgtgtttgtgtgtggtcacacttgccagccagcagaggcgcctgcttgtacctagattactgtttccattgtcgtcatcatcggctaacattgtcataatgtcagtttgggtaatgttagattaagtaattattgtgttctgt

SEQ ID NO: 35770 - DNA, 1164 bp, Zea mays
  Clone ID: UC-ZMROMO17100D10_FLI
cgccccgcacactctatgacgacggcggctcttagcccccttacggaagcaagaggacgtcagcaaggactcgacagctccgacagctgtccttccctcaggctccagcgctcctccgacggccacgacaccacacgaaccgggtgccaaaacctccccggctgccacgatggcatgtacttagggcgctagctctcctccgctagacacgttagcactctgctacaccccccattgtacacctggatcctctccttacgcctataaaaggaagcaccagggccctcttacagagggttggccgcgcggggaagaggacgggacaggcgctcgcgtgaggccgctcgctcccctcccgcgtggacgcttgtaaccccctactgcaagcgcacccgacctgggcgcgggacaaacacgaaggccgcgggatttccgcctctctctcgctccggccgcctttttccccccttcgcgctccgtctcgcgccgacccatctgggctggggcacgcggcgacatttcactcgtcgacccagggacccccggtctcgaaacgccgacactatgttaactcgcaaacatatgcatggcataagccaataaaaggcaagaatggatgtttccattatgtttattggatttagtcgtggtcaacaattgttccaacaacgtaagtagtcattatgtttgaagtggagtttttagcaagcagtattcaattccggaagccattaacgtgagattaacacttctgacctgctacttaaatcttcttatttttcattttgccaggatgttataactaatgttgtggatgcctttcatgcacctacttcggacgtggcaagtatgcgctattgtacgctatcagcaagaacatggatggaatcaaaacagaaattttgttaacttatgatgctggagtcgaaaggcaaaaccatggccgagttgattgtgttctctgagatcagatgtggcatagatagttttttttatatatatgtatccacatcaaggtactaactttatgtaatttctacttttggattgtggcattgtgccgcttgtttgcagaataacatgcaatgcgctctgtacatcaatgtgtgtcaagagtggacccgtagatttgtcattagtggaagctataaaattgttactagc

SEQ ID NO: 35771 - DNA, 619 bp, Zea mays
  Clone ID: UC-ZMROMO17100E05_FLI
cttgagaagggctacaaccttactgaacatgcaactggcctgtcaaaaatccatggagtcagcggggacagcacaaatgtcatttacacatcctcccctaattgctactctccacatcgagcgtctcatatggtcctatagagcagcatgtaccagtcaccaatggagcttacctttccgcaacagtggtatgtacctgttgccaatggagcttgcctttccacaccagtgttacgcgttaccgatggagcttgcctttccgcagcagtgtatggtagtcaccaaatgacctttgatcccaattcttgaggtttttaagcaatgagcttgagagttacctgtaaattctagttttgctagggagcaaactgctttctagtagaaagctatttgctggtagagaactttaattgtgtattcttgaaattgtcacagccgacatcaatgcggtagtgaatatgggcaacaaggtagttgtatagggctatatccaacataccaatttgccctagttatcaattttgtcaccaatgagaatgtgaagatactagtgtaaccacgagacatcgagtcaatctccatgttgaacttcatttattaaatctgacaaaactcgtgc

SEQ ID NO: 35772 - DNA, 1047 bp, Zea mays
  Clone ID: UC-ZMROMO17100E09_FLI
cttttccaagattctgaagttggctgctattagaataagaaacttgtgcgaaagggttcaatgtgtggaacagacagagcgtgtctataatgtcttcaagcagattcttgagcaacagacaacattattttttaatagacacatcgatcaacttatcctttgctgtctttatggtgttgcaaaggtttgtcaattagaactcacattcagggagatactcaacaattacaaaagagaagcacaatgcaagccagaagttttttcaagtatctatattgggagtacgaaccgtaatggggtattagtatcgcgccatgttggtatcattactttttacaatgaggtatttgttccagcagcgaagcctttcctggtgtcactaatatcatctggtactcatccagaagacaagaagaatgctagtggccaaattcttggatcacccaagccatctcctttcccaaatttaccagatatgtccccgaagaaagtttcagcatctcataatgtatatgtgtctcctttgcggcaaaccaagttggatctactgctgtcaccaagttccaggagtttttatgcatgcattggtgaaggcacccatgcttatcagagcccatctaaggatttggctgctataaatagccgcctaaattataatggcaggaaagtaaacagtcgattaaatttcgacatggtgagtgactcagtggtagccggcagtctgggccagataaatggtggttctacctcggatcctgcagctgcatttagccccctttcaaagaagagagagacagatacttgatcaattataaatggtggcctctctcgtatatagctcacagatccgtgctccgtagcagtctattcttctgaataagtgggttaactggagcgatttaactgtacatgtatgtgttagtgagaagcagcagtttttaggcagcaaactgtttcaagttagcttttgagctatcaccatttctctgctgattgaacatatccgctgtgtagagtgctaatgaatctttagttttcattgggctg

SEQ ID NO: 35773 - DNA, 624 bp, Zea mays
  Clone ID: UC-ZMROMO17102B07_FLI
aactcaaagcaggattagccaaacttggatcaaagctgtcagaagctgaagtaaagcagttgatggaggctgctgatgttgatgggaatggatctattgactatgtggagttcatcactgccacaatgcatagacacaagctcgaaagggacgagcatttgttcaaggcattccagtactttgacaaagataacagcggcttcatcacaagggatgaactggaatctgctttgattgagcatgagatgggcgacacgagtacaataaaggagatcatatcagaagttgacacagataatgatgggaggattaactatgaggagttttgtgcaatgatgagaggagggatgcagcagccaatgaggctcaagtagcctgttcccttaatagaaacggtgtaccactagttactgttcactttttttcttcatgtttggtacttggtagtcggataaagcttacaatgggtgttgcttttgtattgttgagagatgattgtctatacctttttttccctgtttgctcgtgcttgttgcattgtagtatcttgaacgtcccttcctttttttaagtttgtttatgcaagtacatctaatacaaagtgcattttgtctcttactttgt

SEQ ID NO: 35774 - DNA, 875 bp, Zea mays
  Clone ID: UC-ZMROMO17104C10_FLI
gatgaactgtgggaggaactgattagacaatgcctccagaagcctgaaatggtagggaatctattggaacatacagttggcaatcttgatcctctgtacattgtcagtttggttcctgatggcttagaaatacctcggttgcgggatcgtcttgtgaaaattgtgacggattaccggacagaaacttcattgcgaaatggatgcaacgatatacttaaggctgactgtgttaaccttttggttaaatactaccacgaggctcggcgtggggtatacatggtaagcatggacgaggaggtacacggaaacagagctgacgatggatcatcgcggggacacgagagatcatctagcgtccgggctctagatatcaagtccagaacaagatgtggtgcccggtgttgtttgtgcttcgatcctttgcctatccaggacatatctgtcatcgtgttctactgctgccatgcgtatcatctgtcttgccttgaaggtggcttagactcgatgagatcaaacagtggtcaggatagtgacggaggcatggacgatgaggatggttccccatcaggccagtctcgcatgcgctgtgtcttgtgcactactgctgcttcataattttataccgtgttgggtagtacacactaccttgtgttgtgttgtaagttttgagccatgtaattattgtgttcttttcgcgtgttacacataacacatgcttacaatagcgtaattcttttgagggaggccatgtcctcggcaaggagagttctgtgtaaatttgatgaaccagcatgagcaaagctgtgcggcatttccatctttttttaatgccacgtttgccagataatcaaaagtttattgacattacacgatgc

SEQ ID NO: 35775 - DNA, 495 bp, Zea mays
  Clone ID: UC-ZMROMO17104C12_FLI
cacacccagatatacaagaagcagtggaacccgctgaccccggagcaggtcgcggaccctaagagctacgcggactgcacgcactggtgcctgccggggctccaggacacgtggaacgagctgctctactccaagctctttttcccctgagttaaaggtttgagttgcgaggtgcacggtgaagttggggtctctctctggcattggcacgctgcacaatactagttagcttggcattggcccagcagtctgaagatggatgctctgctgcggtatggcatggcatggtattgttgatgtacgattcattcgttggaaaacctggacgtgagtgctggaattgcaccatctggccttttctgtacatgcctgatgtaacggtggtgttgtgtttccccaccaccacctctcttttcacgatgatgacacagtgcatgaatagttgtatggggtaatgtgataatacatactgtaattctctggttccttcccttc

SEQ ID NO: 35776 - DNA, 395 bp, Zea mays
  Clone ID: UC-ZMROMO17104G01_FLI
gttcatcctccataaatatatggtgcaatttgcaaaagcaattgacaaatccaactataataaataaatggaccatgtagacaaaccagaggatgcggtgccgcaaacattcctcgctctcatcctcatccttctctctttcttttttgggtcagttcagggccggccctggacaggtgccggcggtgcggtcgcaccgggcctccaagaactaagggacccctctttttttccccaagtttacgatttcccatccgccctttcgcagactgaagctaccgtttgccccggatttcgactttacagttactcctatttctgagttcacctgtgattttgtcctcacttttttccccaagtttacgattttccatccgccctttcgcagactgaag

SEQ ID NO: 35777 - DNA, 791 bp, Zea mays
  Clone ID: UC-ZMROMO17107A08_FLI
aaattacccataacatccacttctggaggaatggcttcacagtaaacgatggtccacttagaagttttgatgatccagcaaatgcaccctttttaaagagcatcaaggattctgactgcccaactgagcttgtgccggctgatgagaaatctatagtgaatgtgaatcttgtccggacggaagaagaatttactgagccagtcaagcgtgctgctccttttgaaggggaacgaagaaacctcatggaaccttctgataataatacttccaatgctgctgctgctgctgctgcttccagtagtgcaactgcttctcggacaatcacagtggacgattctttgccatcaacctccctccaaatcaggttcgcagacggcagtcgcttggttgcccgtttcaacacaagccacaggattagtgacgtgcgggcatttatcgacgcgacaaggccaggagccagtgattacacgctgcaggccgggttccccccaaagccgcttgaagacacggccaagaccatcgaggaagccggcgtggccaactcggtaatcattcagtcagtctagcttggcagaacaggtgccgcaaccctattccatcgaacacgctaggcatctgaagctaccaccttccttgatcttccttcattttgtttctcaaacctggcttttaaccttttatcttcatccagtagctacttctggtattgcgagtgtaaaacagtgaggtctgggtgtcctacatcttattcatctatagcatatatagtactacttgttgcatacagtact

SEQ ID NO: 35778 - DNA, 1071 bp, Zea mays
  Clone ID: UC-ZMROMO17107A11_FLI
ggaaatgtcatcattttcagttctgatgccaagggagaagtgatgggtcattggtatggttatgttgtccccgacgatgtgcctgttttgctgcataaacatattggacaaggagaagttgtggaccgtctatggaggggacagatgggtttatctgaggagcagcagaagcaagctctcgagcttcggagcatgacaaatggtggcaaagaatcccttgaagaaaccgaaacagacggtgcttcttgtaaccctgcagcaactggtggatgctgccaaggcaatggtggcttcactcgagcttcggagcagcagaagcaagctctcgagcttcggagcatgacaaatggtggcaaagaatcccttgaagaaaccgaaacagacggtggtgcttgtaaccctgcagcaactggtggatgctgccaaggcaatggtggcttcacttgctgccatcctgacctgccaaaggaaaaacgggacaagagcatcgcaattgagcagaaccctaagagctgtgaggagaatggcaaggagggtggtgctggcagcaagaaggggaattcaaagacttgcccgatgcccacctggtttgagacctgggagagagctgacacctatgctgctcttgctgttgtcgcagctgccgcagctgtgtttatctctttcagaatctacaagaacctcaactgaagagcttgagatctttgaagaggtgcccgaaacaagtctaggtgaatcagcgtactggtggtaaaacaatccgggacgagaataatctttacctgtgtatagtaatgtgaggtttagaacctcaaagtagcttatctggagatggtgataaaaaggtgttgtggctacggtgttttcgcgtgtgaacgtccactgctatcgaagtttggatgccttagctgctggtaatcgtaaggcatcaagtaagcaacattcactgtgatgatgttgtcttttgtttgggttttggatgttctggagattctaggttttgaaacaatatcaggttgattgaaaaacataaacatctggaaaaggttaacgcctttcttgtgacatttg

SEQ ID NO: 35779 - DNA, 1111 bp, Zea mays
  Clone ID: UC-ZMROMO17107B05_FLI
ctcctttgtggcaaccattattgtacaaaatcttgccatgtgttagaagtcccattgaatcatcctgaaggagatcgtacaacatctatcagtaaagtgaacgcacttgctatgccttgtgaacaatgcaatcttccttgtcaaagggttagggagcctccttgttcacatccttgccctttgccatgtcatctgaacgattgtccttcttgtaaagtccttgttaaaagaccatgccattgtggtgctatggtgcatgcttttgaatgtgtgttttataacatcttaaatgcaaaggatcagattaaaataagatcttgtggtggcccatgtcatagaaagctaccaaattgcccccatctgtgttcagaagtatgtcaccctggtgtatgcccatcggttgatcagtgcatgaaaaaggtcaacacccgttgtgcatgcagcactctgaaacaagagtggcgatgtcaagatgtcctcaaggaataccgtaagtctggccgggatccaaaagaagtacctaaaagtcagtttggagttggcttacttgcctgcggtgaagattgcaagaagaagctgaaggctccagattcagagttgcatctccggaaaagtcaggagaacaagatccctgctgtggaagtcgtaaatgcacccaaacgcaggaagcggcgtgaccgtggacaagaagttaaaatttcgaaattccaggaagtgaagacttttgtgctgagagcgctactgattattttgctgtcaataatcgttgctgctggtctgtacctgttgtggaaaggtattttctggctttctgattggatgaacgaaatggaagagcagagggcgagtcaaaggtatccgaggggtgcaatgttgtaaaaaaaaagagataaaacaattactttgagcctaataatcggtattgacatgtggattaattaatggttgttagggattcagttttgcaggatcataaacatgtcaccgttttctcactttttgtcactataaactagaaattgtatgcgtaatgtattgttgtattttcattttgctactctgcattgttgagtgaacaaacgatacaattactacatgattcatcgcttat

SEQ ID NO: 35780 - DNA, 972 bp, Zea mays
  Clone ID: UC-ZMROMO17107E01_FLI
atatagtgcaaggaggagcctcgccaacctcgaagctagtccaaactagtgggaggttgtgtgcagtgatcgatcgaggaagacgagaagcttttcgctgctagctaccgcccgcccggtgtctgtcgatctgtgacgaccgccaagccgaagccgaaggcagcagcagtcgtcaagttcatcgatctcggcatcgacgaccgcccggccgtccatggcgcggggcaaggtgcagctgcggcgcatcgagaacccggtgcaccggcaggtgaccttctgcaagcgccgcgccgggctgctcaagaaggcccgggagctctccgtcctctgcgacgcccacgtcggcatcatcgtcttctccgcgcacggcaagctctacgacctcgccaccaccgggaccatggaagagctgatcgagaggtacaggactgccagcagcagagaagcagccgacggctgcggcgacaataacagaatggacccaaagcaagaaaccatggtgctgcaacaggaaatcaacctgcttcagaaaggcctgaggtacatctatgggaacagaacaaatgaacacatgagtgttgaagaactgaatgctctagagaggtacttggagatatggatgtacaacatccgctctgcaaagatgcagataatgattcaagagatacaagcactgaaaagcaaggaaggcatgctgcaagctgctaacgaagttcttcaggagaagatagtagaacagagtagtttgcttgacgtaggcatggttgtagcggatcaacagaacgggcattttagtacagtcccactggtagaagagatgatcagtaacccgctgactatactgagtggctattctaactgtaggggctattccttctgacactgtcataacaccctggggggctaactctctgttgattactactactagtgtgtaatactaccagttaataaagcttgtgtaactttgcc

SEQ ID NO: 35781 - DNA, 868 bp, Zea mays
  Clone ID: UC-ZMROMO17111B10_FLI
ggagcaccggtggcagcgtcaagctaagaggcgtcagcttcaccgccaagggcttcggcatcgagcgcgtgagagatgactacaggcagctgtccaggctcctgcacgcgatcatcagaatctccggtgggggtgataccgccatcgccaggctgcctcccgactaccgcgagttcctcgcgctccttgggagggacaccctcgccatggaagacgagttcttgatcgtcaacaacgccgcgctgctgccgatgaaaaaccgcacggaggccttcctgatgctgcacgacaggatcgtgaagtacctcggccgcacggaccgacagaagaagaggaggatcctctccgggctcccctaccagagcgactggctggacacggccagggcgaacaagcggatcaaccagtgggtcatgaacgtccagcacgagtacaagggaacccaccagtccgacatgctgcggctcaacaggaatgtgaggagccacctgcatgagcacaaggacgacgacggcatcgaggaggccctgtactgcgagtggcccgagctgctcatggccatggtgaagctgttgcaccaggaaggcgagctcgaggccactgacattgagaacaagtttggctagtccatcgtcctgccgaagaacagagatgtgctaggtagctctgcactgcggtttctgaatctactgttggtgttggcacgctttcagtgagaaagtttatggtgatggcctgatcgcgggtgatatgctacctggtttatgtaatgtaataggctacgtactttcttgaattctctggacttgaaggcaaaaggttggggtcagctttatataatgttgccttgaaactcaaagttgtactc

SEQ ID NO: 35782 - DNA, 888 bp, Zea mays
  Clone ID: UC-ZMROMO17111C06_FLI
cttctcgcggttcccctcgcctacgtcggggtctcctttgtgctcgcggtcgtccgcaccgtgcgcaggttcacctcgccgcacactaagaagaagcgaagggtgagtaagaatatattcttgttgaagtcactagatgatctgtttcagaagggcagggaggcaataaattatcctgctcttcaggacctaatgcaaaagacaggatttgacatggatgatgtagtaaggaagtacatccgttacacactgaatgaaaaacagttcagtcctgatgtggttgtggatctcatacatcttaggaaggcatcaatgctggaagatgcagaagttgctgaaattttaaatgagatttcaagacgaattgtccgggaaaaagggccagtagttatggacttatctggttttacagagcaaggttttaagcggaagcttgctgtacaagcactgtttggaaaaatcctatacttatcagaacttccggagttctgttcacgggacagctcacttgtagtcaaagaaatcttcggagttacagatgaggatgcagacagcctgcggattcacaccctatcagcaacaggtgatatcgaatctatacagaagatggtggacgatctagacctagaacaaggtcccccatcatcgtcttgagttatggtggtggaataatgctaaacatcgtcgttgatagtgttgcaattttagattgatgtgagtttctcgaatcttttcgtttagttttttcagctgttgaagtaggacttggcctgtgaacacaggatactttcggctggagcctggaggttttgtaaattgcctctcgattaggataacgtctgtcagacctgcccatgatttgagtaaacgagaatactattattatag

SEQ ID NO: 35783 - DNA, 613 bp, Zea mays
  Clone ID: UC-ZMROMO17112A12_FLI
cgcgaggaccagtgcacgtccaactgcggcgacctctcccagagatggtaccacgtgccgcggtcgtggctgaagccgagcgggaacctgctggtggtgctggaggagtacggcggcgacctcgccggcgtcagcctcgcgacacggactacgtgaacaaggcaggcgagcgacacgcgttgcatctaactcgtacatgtgtatgcatatactccgacgtgcgagtatatatatacatcgattggtatttgtttagtgaggtcaggccatatggcgaggaggagcaagcaaaccaaccatgccgtattcgtggaccgtatttatacacacgacaccgtacactacactcgcgtcatagcaatggttatactgcaaggggaaggtaaggatggcatttaagtgcagagcggagagggtgggtggtttccggccatcagtgcggcggcaggaccggcagctagctagctgcgccggcgcggcacacacttcgaggccaattcaattcaactgtttcaattcatgtaactggcactctggcagcgggtgtttgctgctgcttgctgtatttttttgaagacgtgaacatgaaatacaaaactgagcttgttttgtc

SEQ ID NO: 35784 - DNA, 411 bp, Zea mays
  Clone ID: UC-ZMROMO17112E06_FLI
gcccatgcttcacctcgattcaccaactacataatcacctcgattcacacacgtcaggcttccagtcgataaattcatttagtttcatcagaaacggaatgcagttgccagttaatgttggcgtcagtcgcaggggatcttcggccatcgtcgccgcatcagaagcaatgcgcagctccagtggcctcgaccgaacaggacaagaaataggtctagttggatttcttttcgcctttgggtttttgtttaaaaagaaagagaacttgattttccttaaactagaattctctgtcttccattatagtgcacccttttttatactcagattcaaaaccaaaatataaaagaattaagtagatctcaacttgtcatacttctcagcatatttgttatctatccacacttgttaag

SEQ ID NO: 35785 - DNA, 821 bp, Zea mays
  Clone ID: UC-ZMROMO17113B01_FLI
ttaggaaagaaaacaaacccacagcctgtgcgctcactgggacctgaaaacattaggtggactaacctctccacaggacgaaaaggcaatggagttgcaattgcaagcacacaaaaaagtggcctgcacaagaaagcttatatcatggcagatgttcttcggacttctgtttatcatatactttcagcattcattgatgacctgcaagctaatgcaaaaccattcagcttagagaagaactggatcagtgaagggagaaagcctgtatatggttcacaagccgtgttggttcagaagttgattctgtttattgagtaccgagctgtatgaacttggttccatgtctctcagatcctttgcctgcacatcagatcatacttggatggaagtgtttagttctcgaacttggttgaagaacctttgctttccaccagagcctataaagatgcatcgtaaactaacagtttcaccagagcctataaagatgcatcgtaaactaacagtttctcaatatggacttctggcttctgtattcctgtgggctggtgcactgcggaaggcaccgccgctcaggccttgtttctagtctggttatccactcaggccttctattctgacttgtactttgaaagttgaatagagttaggccttgttcgtttctgtcggattggtgggtcggaacgattcctgaccggattgcttctctaatttatataaactttgattagctggaacgattccgggtgcaatccgacggaaacaaacaaggccttacctgtgttgtagcatggagatggtatgtgaaagatttgcgatttttg

SEQ ID NO: 35786 - DNA, 1249 bp, Zea mays
  Clone ID: UC-ZMROMO17113D10_FLI
tggaaaatgaagtgtgcgctattctaaaatcggaagagcagaggaaagattctgaatttgaagtcaaggatgtcaagtatgtacctgctgaggtcaagcttgtgaaggtaccatattctaaaatcgtagatctttatggtggcaggtcaagcttgtgaagtgcaaggtgcaaaacattgctgtagacatctcagttaatcagattggtggacccaataaagtttattttctagagaaggttgatcaaaacttggggaaaaataacttgttgaggagaagcataatgcttatcaaacattggtgttattatgaaagctgcattcttggtgctcaacgtggtttggtttccacttatgctttggagacattagtgctgtacattttccatgtcttccacaagtctctggatggtccattggctgtttcttgactactatagcaaatttgattgggataacaaggggatcagcttgtttggtcctatttcactatcttcactacccgagctagtcagtaagtgaaagtgaatgaactgttgattgtgctgtatgttggtgttctgtctgcggttgaaactattggtcattggcatggcttttcttgaacagccgagccaccatatactcgtgatgatggttttctctcacgggaggcgtttctcaaagactgtgctaaggcttttagtgtccccccaataaactctgaggaaaatccgcaagtattctccaaaaagtttgtgaatatagttgacccattgaagcagagtaacaatcttggacgcagtatcagcaaaggaaaccttggccggatacgcaaggaattctattttggtgcttgcaagctcggcaagattcttcaggcgcccgcgtgtttctctgccaacgaaatcaaccggtttttcaggaacacattaagcagggcagatgttccggtgagctctcctgatgatgttctacaggccgctagtgtttctgcgtcaccgggcaacaagggcgtggaaggagtcagcaagggcagttcacccaacaactcgtgtgacgttctgtgcaatcagttcggttacattaaaatctcagattccaacaatgcgctgcagaatctggtcgtggacaggcccgcttaggctgtacctgcacatggtcatagaacctccagcagcttactcatcttactttctaccatacgttttttaaaacttccatattataaagaatacagtctataatataaaataatgttttacggctgt

SEQ ID NO: 35787 - DNA, 1023 bp, Zea mays
  Clone ID: UC-ZMROMO17113D12_FLI
caaacccagaaaatcttctccggaatactgttctgggtggcagtagtaatcattatcaatctcagtttggaaggcactcaagtgacatggagttcgatgatcctgctatattagctgtgggcaaagggctgatgcctggaattggcgattcagggctggagatgaaaaatactcctgcttttcaagcacagttgcaaccagcaagcagtgatccaagatttcacttacatatacagccaaatgtgcagtctcaccaaaacatgagatttgcagaccatatgcaggatggtttgaaccatatgaatgataatagatttttaggtcagaaccatggtcctctatccccttatgtgcagattccgcaacaacccagaaactcgcaggttacaaatggtcactgggatgggtggagtgattcgagacaagggaatagcactcctatgtcagacatgtcgaggatattatatccaagtgaagtgaacaagttgcacatgctgggttcaaatgatatctataacagagcctttggaatgtgattatctcctgggataatgtgtgagtttgagctgacatgttctgacttgggggcgttctgtggaagtaactggttgcacaacacatagtatacctgaggtggataatggtggttgtgcttatgagctggtacacgagtattttttgctattggaatttacaaaaacgaacctgagttttggttcagccatttgaaattaccaggttcgttctcttgtatggtctgtgaagcttgagtgaaaagaaagattatgtgccgagaacaaagcagctgaagttgaaatatattgagatatgtctataatgtagtgtggtgtggctcttgaacgtgagcgactaaagatttggtgggcttgacttgatgatggcagtgttttcttgtgtttgtacatgatgatggtgttggtcggtggctgcctggccagtacatgcgttttgccataataatacccatggtataataataataataataataataataataat

SEQ ID NO: 35788 - DNA, 1050 bp, Zea mays
  Clone ID: UC-ZMROMO17114A05_FLI
ttggtgccgaccttgtggggaaggtagaaagaaacattcctgaggacgatccaagaaacccagctgtcattgctgacaatgttggtgataatgttggagatattgttggaatgggatcatatctctttggctcatatgctgaatcgtcatgtgctgctcttgttgtggcctcgatctcgtcttttggaatcaaccatcaatttactccaatggtgtatccccttcttgtcagctctgttggtattatagcatgtctcataacaacgctgtttgcaactgatttcttcgagataaaggctgtgagtgaaatagagcctgctctcaagaaacaacttataatatccactgttgtgatgaccattggcattgcgctcatgttggcttggtcttccatacaccttcaccatttataactttggagcccagaagacagtgcaaagctggcaattgttcttatgtgtggcggttggtctctgggctggcttagtcattggttttattactgagtactacacaagcaatgcctacagccctgtataagatgttgctgattcctgcagaactggagctgccactaatgtcatttttgggcttgctctgggttacaaatcagtcattatcccaatttttgctattgcgtttagtatcttccttagcttcagccttgctgccatgtatggtgttgttgtggctgctcttggaatgctgagtaccattgccacaggccttgctattgatgcctatggccctatcagtgataatgctggaagcttaagtctgtatgggtgcatcttatcatatatatgtatatctgaaagcttaagtattttttaaatagaagatgtctggaaactttagtaacgacatgagtttcaggctttcagctatagcagtcttattcgcttttaagacagagaagatttttatttagagtttagaaagagtaggtgctatgggtgcatgttatcatttatgtggggaacatctctggtggaaattaatcagtaacgacatgagttaagacagagaagcttaagtattttttcagct

SEQ ID NO: 35789 - DNA, 1043 bp, Zea mays
  Clone ID: UC-ZMROMO17114D10_FLI
aacttgaatgtaattatgaagccacttcgtgcaagcatgcttcaggtttcgctacaaagagcattgggtgggatagataaactgcattgcaggaatggagtagtcggaaattcaacactgggcagccttcttcacaagaagcgaatcatagtggttgatgataatattgtaaatctcaaggttgctgcaggcgctctaaagaaatatggcgcggaagtaacttgtgctgacagtgggaaggaagcaatcacactgctgaaacctcctcacaattttgatgcttgtttcatggacatacagatgcctgaaatggatggatttgaagccacaaaaaggattagagtgatggaaagagatctaaatgagcaaatagaatgtggagaagccccaccagaatgcgtaggggttcggcagtggcgaactccaatattagccatgacagcagatgttatccaggcgacacatgaacaatgcttgaaatctgaaatggatggttatgtttccaagccattcgagggcgagcaattgtacagagaagtagctcgctttttcctaaatcaagaccaagttcagtaggtaggcttatatggagtgtaaaatagtggaggatatcggggttcacccatcgaggctgaaagaattctgtcagagatcccatgttcttgagagtggaaaacactttaggctggagatggaaccacccatgttcggttccttggtacatctgaccaaactgcaaaactaaatgtgcaatgtcttgaaatcaaggtgcatgtggagctatttactcgacaatctgaagtcaaggcgtgtgaaaaaaaagcccagctgcattcactaaccgcagatgtcctctgccactataatatagagtagggagagaaattttccttccccggaaggtaccggctgtacatattaggtattggttgtttgtgcaggcatttgttggcattttgttgtgcatcgtcttcggtctgtattgtttgggtcgaagctgtaaaatgtaaatggcattttcaaagatggaagttttgtttgac

SEQ ID NO: 35790 - DNA, 541 bp, Zea mays
  Clone ID: UC-ZMROMO17114E08_FLI
gtgatgaacaacacttggatgaagcactgcagagaatctttcaatatggtttgggtgggggcattcctagacgtaatgcacctatattacaaaagattcgagaggaagtaactgacgatgggaaatacagtttagtactcgtatttgaagccaaagcattggagctatctgattttgagaagagacaggctaaattcacctccttttttggtcctgggattaaagcagaaatcgatgcaggaaaaggtggcggtgatctatatgaagttcgtctaatctcagacactgtttagaaacaatctttgtgaattttctctaatacaaaactaaacttttattttttttctttgatccgctgattttgcatatatgatgttaatagcatcagattttacccttgtttctgttgtgccttctgagcttccatgtatattggctgttgatccttggccatgacctgacaccttcatacactccatggacatgtgtgaaggaaaagttgttgtaatattagatgtaaatgaactttgattgggaacgc

SEQ ID NO: 35791 - DNA, 333 bp, Zea mays
  Clone ID: UC-ZMROMO17119C08_FLI
gtgcggaccctggacctgtggactgacgcacccggcatgcagctgtacactgccaactacgtggatggcatcggtggcaaggcgggcgctgtctacgcgaagcatgctggagtgtgcttggaaacccaggggttcccgaatgccatcaaccagcctgagtttccctctgtggttgttcggcccggtgagaagtataagcatactatgctgtttgagttctcgggatgttgaatgaatagtgactggacagcataaattgatgtaaaacatgttgaatgaataaacaagcagaaggataagctgtgataataatgcaccagtttgcttcagatt

SEQ ID NO: 35792 - DNA, 954 bp, Zea mays
  Clone ID: UC-ZMROMO17119C10_FLI
tgaatccgcccctgccagcaaccgttctgacgtggcggggcggggcaggatccagatggcggcggcaatagaggaactgcggctcctgggatccatccctgtactggaaggtccgggagaggtcgacggcgtggtgggtgaggaagggcgaccgcgaggcggcggcgacgacgaggagatcctgcgattcatggactcggtggacagctacctgctcctcatggactccctatcctccgctcttcgtcagggctggcttgacctggcaagtgctcgccattccatgggcacatcacgtgtttcgagtacactgtttgatcacaaggagcagtctgctgccactaagcttcaagttgttgatcatgatggcctgaaatcatcagagtcaaaaccacactttgctctatcaaagtggtctttgcaagaagaatgtcactccacctatgatctcagtgagagagattttactgagccaaagatgaggcatcgaggatcagttactaccccagaaaagggaaaccatgaaagtgcaaacaccacaacattgtctacaggtgctgatgctagcaatcatgttcaaagagcgagatcaaaagcattatcagtctttgggggattggtatccccaaaactaagaaccgcccaactttcatttgaaacagcacttgacttgattgtggagctagcaaattcaaggtcgaatatgttagctagtttctcccacttaaaagagtgaagacattatgttatgagattttgtaccttgggcaccatctattcagcactcatgagatcgcagcaactgtaaactaagttttgagatccagtatattttaagaacgactaaatagcatataatgcttgctatgctgattactcgctgcgaaggtgttgctaacatatctgtgaatgcgagaacacatgctggaagcagtcagaaattatggtttgatt

SEQ ID NO: 35793 - DNA, 567 bp, Zea mays subsp. mexicana
  Clone ID: UC-ZMROTEOSINTE001A04_FLI
gcggaagaggccaatgctgcagttgaggctctcaatgggactgaggttggtgatagaaaaattaaagtgaacgtcacagagagcttcttaccgaacattgaccgatcagcaccagaaccagaggctctgtttgtagatagtcagtacaaggtttatgttggtaatcttgcgaagactgtaacaaccgaagttcttaaaaacttcttctccgaaaaggggaatatcctcagtgcaacagtctcccacattccggggacctccaagtcaaaggggtatggctttgtcacattctcttctgaggaagaagttgaagctgctgttgctactttcaataacgcggaattggaaggacaactcattcgtgtgaatagagcttagattagcagaaatttgcaggggcaccggaggagggggaatatcttggcgaatacatgtagtaggagggatgttttgaggctagattttgataacaaagtgatcaagaccttcaatgtgatttcgatatgtcatacaatttttgtaccataacagtatatttttcttaacggcacttctaaatgataacat

SEQ ID NO: 35794 - DNA, 457 bp, Zea mays subsp. mexicana
  Clone ID: UC-ZMROTEOSINTE001A12_FLI
cgaatccagctaacccttcaattgagcttggacctgagttcaagaaggttgccaatttccttggtcggttcaagtccatccccagcatagttgagcttgacagcttgaaggtttctggtgatgtctggtttggctctggaattacactcaagggcaaggtgacaattatcgccaagcctggagtgaagttggagattccagatggagacgtacttgagaacaaggatgtcaatggccctgaggatctttaagcaatgtttatcatcaccagttttcccaaggacatgtcacaggaactgccaagcctaatcactcctactgagctctatattttgtaattttcatgtgcattccgattccgctgtgagggtcatgtgagcccgctagagaataattgtaatcttctttgctgcgtctgtacttctgtttttgtgcgccaggacgtatatttttactg

SEQ ID NO: 35795 - DNA, 1684 bp, Zea mays subsp. mexicana
  Clone ID: UC-ZMROTEOSINTE001E04_FLI
ccgtgaagctatatctaagatgcacaatatgagtgctgctgtcttgacatcagtgcttacattgattgacgaatatgacctgtatggtcaagtggcataccccaagcatcataaacactcagaagttcctgacatttatcgtttagctgcaagaacaaagggggcttttgtaaatgtagcttacttcgaacaatttggagttactctgatagaggctgctatgaatggtttgcctataattgcgacaaaaaatggagcccctgttgaaattaatcaggtcctgaacaatggtctccttgttgatccgcacgatcagaatgccattgcggacgcactatataaacttctttctgataaacatctttggtcaaggtgcagagagaatggactgacaaatattcaccaattctcgtggcctgaacattgcaagaattacctgtcaaggatactaactcttggcccaagatctcctgctattggtaacagagaggagcggagtaatacacctatttcaggaaggaagaatatcattgttatttctgtagactctgttaacaaggaagatctagtcaggataatcagaaatgctattgaggtcatacacaaagaaaacatgtcgggttcaactggttttgtgttgtcaacttccttaacgatatcagagatacattcactgctactatctggaggcatgcttcccactgattttgatgctttcatctgcaatagtgggagtaacatttactatccttcacattccggagaaacatcaaacaactccaagattacatttgcattagatcaaaatcaccagtcacatattgagtatcgttggggaggagaaggcctaaggaaatatcttgtgaagtgggccacttcagtggtagaaagaaagggaagaacagagagacaaattatttttgaagatccagagcactcttcggcgtattgtcttgcatttagagtggttaatcccaatcatcttcctcctttaaaggagttgaggaagttgatgagaatccaatctctccgttgcaatgcattatataaccacagcgctaccagattatctgtagtccctatccacgcatcacgctctcaggctctaaggtacctgtgtatacgatgggggatagaagtgccaaatgttgcagtcctcgtgggtgaaagcggcgattcagattacgaggaactgctggggggtctccataggaccgttatcctaaagggcgagttcaacatcgccgcaaacaggatccacaccgtaaggagataccccctgcaggatgtcgttgccctcgatagctcaaacatcatcggtgtcgacggctacaccacggatgatctgaggtctgccctgcagcagatgggtatactggcacggtaacaccttccggagcttccgtttccactaccaggtcaacgaagagaaacgagaaaacagacagaatggtgacgaaacaagtgcgaccgtttccatgctcgatgggaatgccgattttgcattgtaggctgtagcggttgtgttcgtgtgtgtgtgtgcccgcgcgcggtggtggcctattcttgtgctgtgaataactgcccctcctttgtttgtgatatgccaaaattttgaagtgagtacagtacaaccaaacatgttgatgatggaaaaacgaatggagaaaggggaaaaacaaac

SEQ ID NO: 35796 - DNA, 519 bp, Zea mays subsp. mexicana
  Clone ID: UC-ZMROTEOSINTE001E07_FLI
cacagtcacagcagtagagtttgaaagcggagagcatcttctgcttcatgtcaaaaacacttgtttggttataggatgatgagacggttggttggttataggatgatgacttacatacacacacatcataactttatccacatgagataaaagcgggaacattatcgtcaatacaaggagctgatggagaagttgaaactaacaaagtaacaggggatttcagaaagtgctgtaattttccgttggaaatatctgttcgggagagttgtatagtgtcatgatatacacacttgtgcagttatttgatgaggaaacttacatagcctagagcagatgtgtttcctatattattattgccttgtacaatgtaagatgaattccatgagtcagaaatagcatcaggtctgtatgcttatacttggacaagttaagaggatggcacggcatatttttgtgtcaccgcaccgaggttgtcgctctctttatgtgtatcaaaaatataaaggctcttgtttatgt

SEQ ID NO: 35797 - DNA, 1421 bp, Zea mays subsp. mexicana
  Clone ID: UC-ZMROTEOSINTE001F01_FLI
ctcagtgctaaccagaactttgaccactacgctcaaccctacaacacgagccgtatcctcaaccctgattataccgttaacctcacagcctataaggagtactcccctatcctgttgggccctgctttttccctgtcgtatggcatgggctttgccggcctgatctcaacacttacccatattgccttgttctatggcccagacgtctggcgtcggtctgttgactctcgatctgaagagcccgatattcatttgaagcttatgcgcaaatataaagaggctcccgaatggtggtttctcgccgtgtttctggtttcgttcggattcggtttggcggcatgtttgggctggcaaacgcatcttcccgcgtgggcgtacatcctgtgtattatcatcggtctcttcttctttattcctgttggcatggttcaagccatcaccaatcagcaaactggtctcaacatcatcaccgagatgattttcggttacatgcttcccggccgccccgtggctatgatgctgttcaagtcttggggttacatgatgactttcaatggcctacagtacgtatctgacatgaaagtcggacactacatgaagattcctcctcgtagcatgtttggcgctcaggcctttgccgtgatttggctctctattgtgcagattgcttcgtacaatttcttgcgaggcaacatcgagggtatctgtactccacatcaagcacagggtcttacatgccctaacgctcggactttctataacgccagtgtcatttggggtgtcattggccctaagttggtgtttggtgctggtcaattatactcctggaccaactacttctggctgattggcttcctgtgcccctttatccagtggctccttgcccgtcgttaccctcgctccccactccgatatgttgtcttccctgccttgtttggagctgcaggaatgattcccccggcgacaacctggtaccttgcccagtggtgtatcatcggccttgtcttcaattggtggatccgaaggcgttggctcggttggtggactcaatacaactatgtcttgtctggcgccctcgatatcggcactgccctctgcactgtcgttatcggtctgggtctgggtctgggcaatgcggaattcccagactggtggggtaactcagttgtagctaataacctagattataatggtgctgctgtcttgaaggttgcgccaacctcgggtcctggcattggaccttcgacttggtaaagaaggggatgaggtgggtgtgctatcgcatacagtaggatgtgagaggtcgaggggaatatgaaggaaaactatgtcatgatgtaatgaaatgtcttttggttgatgtattatttatcgcatatctttttgatgtgctgtctctaaatataccctatctcttcatg

SEQ ID NO: 35798 - DNA, 2110 bp, Zea mays subsp. mexicana
  Clone ID: uC-zmroteosinte001f08_FLI
ggagtgccccccacaaacctttccttgcattccactgaaatcttcctatctgcacccatgcagttgctcaattctggcctcagctgaggcccaaccatccattgttatataagtcgctgcagcctttgcaatttcccactccttcagccatcatcggtcattgaaggagcttcgtgccaccagagaaggtgttcgccgtgcataatcacaggctatatacattccacaggcctgtaaagctctgtgaatttggagctcccacaggttctgcattggcgttgagatggggaggcattcttgctgctacaagcaaaagttgagaaaggggctctggtcccccgaggaggatgagaaactcatgaaccacataacaaagcatggccatggctgctggagttctattcccaaactcgctgggctccaaaggtgcggaaagagttgtaggctgaggtggataaactatctgaggccagacctcaagagaggggcattctcccaagacgaagaagacctcatcattgagttgcacgctgtccttggaaacaggtggtctcaaattgcggcgcagctgccaggaaggactgataatgagatcaagaatctatggaactcgtgcatcaagaagaagctcaggcagaaaggcattgatcccaacacccacaagccccttactgaggctgatcgcagcggagcagctcccaccatcagcaccgagagaacctcagggtccagcgacatcaacccatcaagcgctggtgctctgggaaacttgagccacctcctcagcgagacggctcaatcatcaatgctgatgcccgtgtatgacaagaatcgcgctgaaactccaaacttggcacgccctaaggtgccaccaaaggagttgttcctggagcagcttactgctggacacgagagtccatcaacctgccgctcatcaggccaaactctctatttccctttccaacagcctttaggctacaacagtgagagtggcagtggcgatggggcgaatatgaattcgctctggttcaaccagagtgacttcaactgcagcacaatttctacagtgatgccgccagcttcaccatcggccctctctacatcaatggggctgaaccttccacctgataattctcgacatggaggaactggcattggaagtactgcagtagattcattctactgggatggtactaatcctagcagcagtagcagtactgggagcagaggaagcaacagtatgggatttgaaccacagagcacgagctcaattctggagaacagtgtcttcccatggacagacatcggacaagaaaaagatacaagagctcacctggtagaggaacttaagtggcctgacttgctccatggaacctttgccgagacgactacagccatgcagaaccagagccagacgctctatgatgacgtgatcaaggcggagagccaattcagcatggaagggatatgtgcttcttggttccagaatcagcagccacagcaacagcttcaggcaacaccagacatgtatgacaaggacttgcaaagaatgcaactgtcttttgagaatatctaggcattatgttccacatggaacagagcagatcagcagaagcagaaatttgtaattttcagagattcgtgggcagaactatgctgaattgcttacatagatacattaagttgatacagaaatcatcctccacagctgctcctcagttgaagacctgacaatatcaaggaaaggacagccctggcattagaagtggcagcagaatgcatacaaaagtacgttctagagtctccttttctttatcttgaaaattgatgtttccttctgtacacaacgactcaacttttgcatatttgagtttttgttcactctctggtggaaattaaataaatataggcagccatgggcaaaactgcatgtgtcggtagctctcaccatgcaagtagacccaaacatttcaactgctgccatgcacgtccatgcaaattaattattgcatgttgtatttttttttataagttgccgacaaacgacagttgtatatttgtaagaagaaatttggaatgttgacctgagagctattttcttccccctttc

SEQ ID NO: 35799 - DNA, 934 bp, Zea mays subsp. mexicana
  Clone ID: UC-ZMROTEOSINTE001F12_FLI
gaactcttccagttctattgatcctcttattcaggcgaacactggatccaatgcgagttcatcactgtcatttatgagagggatcctgccgaagtatttcagttcagagtggtcatttgctcagttccatttaccagaagtcacccgttacatagtagcctttggtgctcagaatactgtgatgatggttggcctggatggcaggtacttaccttagtgaattaaattttacaattttaagattttactctcagcagatttggaatacctacatttttattgctggttgtgagcaaaaatttttttttccccacctgagttcacttattgagttatgtgggagtttcatttcagttagtagtagggtagatttggcagactcggttcctacctagcgagtgccaccgtcttgtacgcatcgcttgttccaaataatcatgtttctacctccagcttctacaggtgcagcttcgaccaagtgaacggagggcagatgttgcagaaggagtatttccggtttctcaagtccgacagcccaccattgaggagcgcagccatctgacctacctctctcaccctgtaaataccgaaggttgtgcccggtccattgtacatatcaccatcttctcgccggctaaagttattacaggcagcgggaataaggaggagctggccgtgtcggatcgccgcaacccacaggattccaacattgaagtttctggagcggttggtgtcccatccaagttgcaagcatcatttgccatctctcttctttcttctagcgagaacctcaaccacccattggtacactacatataacgtaaaaagttcgataacgaatttgaccgtgtggtctgaaatgccgtgtaagaaatctccgacttgttcttgcctttggcttgttgatcttgatgatgactggctgcgcaagtgc

SEQ ID NO: 35800 - DNA, 1373 bp, Zea mays subsp. mexicana
  Clone ID: UC-ZMROTEOSINTE001G04_FLI
ctctgcttcatcataatgttacacattgttcaagaccataaatgagaacaagcttgggttgtggaaaaacttcagaaagtaaagacaatggaattcttgacgacgatggtttggcacccaagtttttaaggaaagaacaaccttttagcaaccccggtgcatctagaaagtattaggcctctaactcttgttgatcacaagtcatacctttgatcatttgaaaaccatagcggctctttctgattatgtcaactagccgagtggatggaagacccaaaaaatgctttggaagtctcacaattatggataataaggcgtccattatcataaaggcaacaaaggaaattgaaatcagaaggaaacctgccagtccaggttcttatatgccaaattcagcagtagatacgcactcctggtctctcaccattaacttgaatctgcagccaacgagattgaattgaacacttctcgtgacattacgtgccacatgcttataccttgatgacaaatacggctagggctcacagttgtggtcttgtggacatctagaggaaacaaaggaaattcaaattacaaggaaacctgccagtccaagttattatatgcgaaattcagcagtggttgttggacaaagtttgtgggcggtgggataaggacgaggagggggaggaggagcacccgtaggacagtggaggagacacagcaggacaacgacgtccagcagcaggtggagcagcaggccgctgtcgatgcggcacaacaggacgacgatgatgcttagcaggacgcctcaggttctggcgccttaggttcgaggaacgcctacctgcgaggtctcgcgagtctccctcaacgtcccatacttcgtgacagtcggccactaattcgacccgatggggagaggtcttggaaggttgcggagaatgcagggggtcacggccgcaaccccaatggcattctcggccttctgtgtagggaacacttccctagactggttaagtacggtggagtgacggacccagcttacaccttcaaccactacgtcgtcgcccccgatgcagtagaccaggacagcagggaattcaacaacaaggcggagcgtgtgaagcaaaagctgtgggatttcttcagatatgaggttgtatacgaggccagggcggatgtgttggccaccacgagctataagaagctcgtcgtggacatgcattacgaggtgcgaatccaagccatcatcagctaccatggcgctccgtccttggtgagaaggtgaccaagtaggatgcccgaaccatgtcgttgactagggaccagtagttgcatgtaaatacatcactttaatattcgtgacaaaatttgcttaattttatcttttg

SEQ ID NO: 35801 - DNA, 1177 bp, Zea mays subsp. mexicana
  Clone ID: UC-ZMROTEOSINTE001H01_FLI
ctttgactcggaggacgctagggagagggatcgccttaagatggtgcttcaccgtatctatgggaagttcatggtgtatcggccatttatccggaaagctatcaataacatattctaccagttcatatatgaaacagaaaagcacaatggaattgcagagctcttggagatttttggaagtatcatcaatgggtttgctttgccactcaaggaagagcacaaactgttccttgtaaggaccttaattccacttcacaagccaaggtgcactacaatgtaccatcaacagttgtcttactgcattacacagtttgttgaaaaagattgcaagcttgcggattctgttattaggggcctcataaaatattggcctatcaccaacagcacaaaggaggtactgttcttgggtgagttggaagaggtactagatgcaacacaacctggcgagtttcaaaaatgtatggttcctctttctcaccagatcgctcgctgctcgaacagccctcacttccaggttgctgagagagtattgtttttctggaacaatactcacttcgagaatcttgttaagcaaaacagtaaggtgatcctgcctatcgtcttccctgcattggagaaaaatataaatgggcactggaatcaagtcgtgcgaagcctcagcctgaatgtccgaaagctattctccgatcgtgacccccaaatgttcaatgaatgcttgcggggttatgaggaagacaaagacagagagaaggaatttagactgaagcaagagttggcatggaaacgtctagatgagattgcatcagcaaaagtcacaagtggtgaggctgtcctcgtgtccccaaccttgcatcgtcaaccttcagtcttgtaggaacctgcgctacatgagtggtccttgcagagtcgttagacattgtacaggattgggttgtagataaaagcgggtatatgaagccaccaaggcaggtgtgcgaaatcgaggaaagagagatgaggagccagttgtgcatcatttctgtaaatcccgtgccatggcttcttttggcatcctggtgggttcactttgctgctgtagtccgttgtttgggagaatggatgttttttttcttcttataatggaaaatgtcgagatggcgtgcagtcagcttaaatgataaaagttataagcttttcc

SEQ ID NO: 35802 - DNA, 950 bp, Zea mays subsp. mexicana
  Clone ID: UC-ZMROTEOSINTE002B01_FLI
gacaaatgttattggtaccctgaacatgctaggacttgcaaagagagttggagctaggattttgttgacatcaacctctgaagtttatggtgatccacttgagcatcctcaaactgaggcctactggggcaatgttaacccgattggtgttaggagttgttatgatgagggtaagcgtgtagcagagacgttgatgttcgactatcacaggcagcatggcattgaaatccggattgccaggattttcaacacctatgggcctaggatgaacattgatgatggccgtgttgttagcaacttcattgctcaggctgtgcgcggtgagcccctcactgtccagaggccaggaacacagactaggagtttctgctatgttgccgatatggttgatggtcttattaagctgatgaatggaaacaacactggaccgattaacttggggaacccaggtgaattcaccatgctggaacttgctgagaatgtgaaggagttgatcaacccagatgtgacagtgacgatgaccgagaacactcctgatgacccccgccagaggaagccggacatcacaaaggcgaaggaagttctgggatgggagcccaagatcgtcctgcgggacggcttggtgctcatggaggatgatttccgggagcgcctgaccgtgcccaagaaaaccaaggcctgaattgccctgcagttggggaagaatatccacacgggggagcatactcatagtcgggctcgtcattatttgtggccacatttcattacggaatttgagttccaataaacttaatattcctttgtcgttcaccttgaaggattgtattattagaattttcatacagggctggccgttcgagtctctgcctacgcagatcttgtggtacttgtgtttgtagccaatgtgtgagtaaaagtcgattatagcaatgttgatgccattttgggct

SEQ ID NO: 35803 - DNA, 766 bp, Zea mays subsp. mexicana
  Clone ID: UC-ZMROTEOSINTE002B06_FLI
gtttggggtctaaacgtaaatttttatcgcaaaaggagccaaaaaaacaaaaaattcggacagaacgcgctatcggtttcactttcactcacagctattacacatgcgaaaatgcatacagtaatttttttttggcacgagatttggcggtcggtccccgcgggaagattgctctgctagttccacatccaccaccagctgacctggccggcgtcctcgtcgtcgccgtccgcgtggtgggtgtgttcggagaggaacgcggcggcggcttcttcgtcggcgtagtagctgcatccctcgtcgctgccggcgccgtcgtcgtcgtccgactggatgcctccagcgccgtgggttactggacccatcgtcccgcagccgtggtactggtcctggacctcggcgccggggaagtacgactcgacgctgctatcgacggccgcgccgccgatcctgccgttgtacaacagcgcgtccgccgcgtccaccaccgcgctcccgccgctgcccgtgctcagcctgtcctcggacttcacctgccgctcctcgaacgccgccgcctctgcctccggctccggctccggctccggttcctcgacgtcatcggccacggaagccctgacaacgcccaccgccggcaacgccgccgcggcgccgttggcgtcgccctccgtcgcctccttctctcgcagcttctcggtcaacgacaccacctgtgagcggaggcggtggttgtcctggagaagggcgtcgtggtccgcgcggaggg

SEQ ID NO: 35804 - DNA, 900 bp, Zea mays subsp. mexicana
  Clone ID: UC-ZMROTEOSINTE002C10_FLI
ctggacagctgaactcggacctgcgcaagctcgcagtcaaccttattccattccctcgcctgcacttcttcatggtcggctttgcgccactcacctcacgtggctcgcagcagtaccgtgctctcactgtccctgagctaacccagcagatgtgggattccaagaacatgatgtgtgctgctgacccgcgtcacggccgctatctcacagcatctgccatgttccgtggaaagatgagcaccaaggaggtggacgagcaaatgatcaatgtccagaacaagaactcgtcctacttcgtggagtggatccccaacaatgtgaagtccagtgtttgtgatatcccgccgcgcggcctctccatggcctccaccttcattggcaattccacctccatccaggagatgttccgccgtgtgagcgagcagttcactgctatgttcaggaggaaagctttcttgcattggtacactggcgagggcatggatgagatggagttcaccgaagctgagagcaacatgaacgatctggtgtctgagtaccagcagtaccaggatgccactgcagatgaggaggaatacgaggacgaggaggaggtccatgacgagtaaggtgatcttggaccctgctgcatactgtaccgtctctggacctggttttctttcaagctggagcttaggtttggttgttgtattcgaacatgctatgatgggtatgatgtagtagtactttcgtgggtagcatgctgtatgctaccacttgccctcttcacctagctgcttgatttgctacttgtccgacctcttgtgtcgttggatctgcacggtccaagggatacacggccggctggacctcaatcccatcgctcttgccagagccacacttgccgttgtgccatttatt

SEQ ID NO: 35805 - DNA, 2105 bp, Zea mays subsp. mexicana
  Clone ID: UC-ZMROTEOSINTE002D03_FLI
gaaaaagctgaagctcatctttataccataattaaggtagctcgagatgaggatttgaaggaacaaattggaaagggtatatattttgatttggtggaccatgaaaaggtccataatttccgtatacagaaacaaatgccttttagttgtttcaaggaggaagtagccaaggaatatggcatccctgttcagtttcagcgcttctggttgtgggcaaagaggcaaaaccatacataccgccctaatcgtccattgaccgttcatgaggaaacacaatctgtggggcaactgagagaaatatcaaataaggcacacaatgttgagttgaagctgtttttggaagtagaacttgggctggatttgcggcctctccctcctcctgagaagggcaaggaagatattcttcttttcttcaaattctacaacccagaaaaggaagaactctgtttcatggggaggctctttgtgaaggccttgggaaaaccttcagaaatcctggcaaaactaaacgaaatggctggatttccccctgatcaagaaattgagctttttgaggaaattaagtttgagccaaacgtgatgtgtgaaactatagacaagaaactcacttttcattatagtcagcttgaagatggggacattatttgtttccaaaaatcaccaggagcagaatatgatgcacccgtgcgatatccggatgttccttcatttttggagtatgtccataataggcaggttgtacatttccggtctttggagaaaccaaaggatgatgatttttctttggaattgtcaaagcttcatacctatgatgatgttgttgagagagttgctcgccaacttgaattggacgatccagcgaaaattcggcttacaccccacaattgctactctcagcaacctaaaccacagcccgtcaaatatcgaggagtggtgcatctgtcggacatgctcatccactacaatcagacgtctgacatcttgtattatgaagtgttggatataccactgccagaattgcagttcctaaaaaccctgaaagttgcatttcaccatcctacgaaggatgaggttgttattcatagcatcaggcttccaaaaaatagcaccattgctgatgtaataaatgacttgaaaactaaggttgaactgtccagtcctaatgctgaactacgtgtactagaagtcttctaccacaagatctataagatctttccactacatgagaagatagagaatataaacgaccaatattggacactacgtgctgaggagattccagaagaggaaaaaaatataggcccaaatgatcggctaattcatgtttatcacttcaagaaagatattaatcagactcagcagattcagaactttggagaccctttcgttttggtcgttcatgaaggtgagactttagcagaagtcaagaagcgcatacagagtaaactgcaagtctctgctgatgaattttccaagtggaaatttgcatttatatcaatgaatcggccagactacctccaggattcagatgttgtacctactggctttcagaggagagaggtctacggagcttgggagcaatatcttgggatagagcacgctgatactgcaccaaaaagggtctatacagtgaatcagaaccgtcacgcatacgaaaagccggtcaaaatttacaattgagatttctaactaacatggccgcacggtgaaggcctccatacgagaggagcggccagaaaagggaggacagggaatttatactgtcagggggaaacctcatagttagcgagccattcggtgtggcacggccatgtattccagcgctagaggccagccactgttatttcatctgtagcagccagcagctcctatagcaatgattttctttttgtacaagattttccttctttgccttagggtgatggcgcgagcgcattggtgtccgtttcggttgggcaattgcttcattcttagagcaaagctgggtacataagattttggtaggaagcgtgtatacaggcaggctgtatagttgtggctctctcggcttgatccctcgtatcttgtcttgtgctattgttaatgcagtgacaggggctgactgt

SEQ ID NO: 35806 - DNA, 1046 bp, Zea mays subsp. mexicana
  Clone ID: UC-ZMROTEOSINTE002D07_FLI
ccaggacttcttcaacggcaaggagctgtgcaagaacatcaatcctgatgaggccgttgcctatggtgctgctgtccaggctgctatcctcagtggtgagggcaacgagaaggtgcaggacctgcttctgcttgacgtcactcctctctctctgggtctggagactgccggaggagtgatgaccgtccttatcccgaggaacaccaccatccccaccaagaaggagcaggtgttctccacctactcggacaaccagcctggtgtgttgatccaggtgtacgagggcgagaggacccggacccgcgacaacaacctgcttgggaagttcgagctctccggcatcccaccggctccccgtggtgtcccccagatcacggtctgcttcgacatcgacgccaacggcatcctgaacgtgtctgccgaggacaagacgacggggcagaagaacaagatcacaatcaccaacgacaagggccgtctgtccaaggaggagatcgagaagatggtgcaggacgccgagaagtacaagtcggaggacgaggagcacaagaagaaggtggagtccaagaactcgctggagaactacgcctacaacatgcgcaacacgatcaaggacgagaagatcgcgtccaagttggctgccgacgacaagaagaagatcgaggacgccatcgacgcggccatcagctggctggacgccaaccagctcgccgaggcggacgagttcgatgacaagatgaaggagctggagagcctttgcaaccccatcatcgccaagatgtaccagggcgcgggtgccgacatgggaggctccggcggcatggacgaggacgctccggctggaagcggtggccctggccccaagatcgaggaggtggactaagcggtttgtgtcagtctcgtgtgtctgctgcagtggctggctggcccagtcgctgctcgatttatcctcgtcgtcgcggtgtatccgcgttagaaccttttgttggtgaacaatattatcgtggcacgcgttttaagtaatacggtattctggttcggtttcc

SEQ ID NO: 35807 - DNA, 1111 bp, Zea mays subsp. mexicana
  Clone ID: UC-ZMROTEOSINTE002D08_FLI
caggagttggtccgtgaaggggttaagatcatgctagatataatggagaactcatcgctctgtgctgagactggaacttcgcaggaaggagtgggagtgaaaaatccagatgaatgttcattggaggaaccacaatccatgaatttgttgccagaaccggcactgtattctccagatgacttcgttaatgaacaagagaaccgtagtccgtcagaaattgttgaattagtcaaaccatctgtattgacatttccttactcgccggaaaatactaatgacaaagaggagaaattgagtccacaatccgttcttgatcccattgcagaagttaccagtcctagacacaaaactccaaagcaagatgaattctccatgcctacttccagagtgctattcaaagaggttgacgccccttcagcatccccagctttgtggaatgggccacaggtagccattttggatgacagagccacaagggtgtccttcatcaaggccgtgctagaagcttcaggattgctgtctgaggaaaattcgcaaatttggtacacagaagagccactgcttgatgtatctgtattggctgaagtaggaaactcgtactgcctgacagacgatgcagtgctcttgtttgactacgtggaagaggttcttctcgagataagggacaagttctttggtagcgacccttgggttaattctctgaaacacaatgtacggccagctccagtaggaagacggctggttcgagaggtggctaagggaatcgattctcttgtaggtaaagaatttccacacactttagaacaggtaatgatgaaagacttggacagtgggtcgtggctggatcttggaggcgatactggaagtgttgtagttgagttgtgggatggtttacttgatgacttgctggaggaactggtttttgatttgtggctttgatactgtagtgctttgtagtaatacatgcagaggcatattcgactagtactgacatggggttaatagatacagaaaccttttgcgaaaggatagggaaaagtgagttcggcagactgccagatgttgtagagctaggcatttcatcaatatagttgatttccattttcttttg

SEQ ID NO: 35808 - DNA, 979 bp, Zea mays subsp. mexicana
  Clone ID: UC-ZMROTEOSINTE002D12_FLI
gcgggcacaggaaagacattgttggcacgtgcggttgctcatcacactgactgcaccttcatcagggtgtctggttctgagttggttcagaagtatattggtgagggctcccggatggttagggaactctttgttatggccagggaacatgcaccatccattatatttatggatgaaattgactctatcggatctgctagaatggagtctggaactggcaacggtgacagtgaagttcagcgtactatgcttgaacttctaaaccagctcgatggttttgaagcatcaaacaaaattaaggttttgatggcaacgaacagaatagacattttggatcaagcccttctgaggcctggccgcatagacaggaagattgaatttccaaatcctaacgaggattcacgtttcgatatcttgaagatccattcaagaaaaatgaacttgatgcgtggcattgatctgaaaaagatcgcggaaaagatgaatggggcctcaggagctgagctcaaggccgtctgcacagaggctggaatgtttgctcttcgtgagagaagggtgcacgttacccaggaggacttcgagatggcagtggccaaggtgatgaagaaagacacggagaagaacatgtccctgcgcaagctctggaagtgaggctcgtgcccacctttcacggcctccccgaagctagtggcagtgccttcatatccatatcttttaccaaagcagtggaatggtgtaacggcatgctctggacaatgttatctcaagttgcgccgcgcatgcttatgttttaaattttccttataacggctgtagtgtgttgttgcaaagttgattggctttatcagatcagctagattacggtactaatacattgctagctcgcgatgtggacactgcataatggttacttgctcggattatccacattctcgtgtgtaacatgcattgcaatgtcgtggcccattcaatatctcat

SEQ ID NO: 35809 - DNA, 1341 bp, Zea mays subsp. mexicana
  Clone ID: UC-ZMROTEOSINTE002E07_FLI
catcacaataccaaaaccaggagcttatgataccaaacctacctgagaaggagactgcatcagagcgattccaagatgcggagcagctggtgacaccaaacctacctgaagaagatgaggagactgcaccaaagcaattccaagacgaggagcagaagggacttcaacaacaccaagagccggatgagcaggcatcgcaacctgaagagcagaagtctcagcaggaatgccatgagaaggcaccggagcaattccaaaccttgaagaagctaggcgcgccaccacgtcttgctgacaacgtgccccggttctcccttcaggagcttatacaacagaagcagcttccgaccggcgaggcgatgcctgccagaaagcaaggcagccgtggagagagtgtcctcgctgatcacaatgtttcaggaccaggagcagcagcagggggcacgacactggccatggtgataaagcgacccgagggagggaagaagtcgatgggggtgatacgccggtgcgtgaaggccctgaacgggatgatcaaggccaagcacagttccaagaagaacttgcatttctagctttcaacagaatccaggagaccaggagtacatacatacatacatacatacatacatcagcactgatgagtaagtgtggtccagagtttcttagtagaccgcacatctctgaataatgcattcgcagttgcgcagaaccaaaattttgagtatgatgcgcagggtgtgcaagatctggcgagaaactccagggctttttacgccctggtctacactgtctacctatagcaataaactgtggtagttttattagctgaatatcacaaatctgttcctcctatgcgagaagatggtctgctaagtccaagagtagagatcaggctctgatcatgtgctgttgacttcctctgcaaaagcttgtttgcttttagaagtgtatgggtgtgattagaaaaggtggaaaatgatcggttctacttctaccgacacctgccccccaggtcggcagcggttttggtgcagactccttttctgcctttctgtgccgcgtcccgtttaggtttggtgcgtcacttgaatgctgagaaaacaagttagtgcaaaagaaaaggcgatggagctgaagcctgtgaagcttcttgtgaattattggttgaggacgcagcgcatggtacgccatcgcatatctcttcgtttatgatcactctctgtttactcgatttgagcgcttgtgttgttggggttgggacctgggcatgtttatgatctgaagttctaaacatttactactgtatttttctggaaattgaacagatagtgtttcttc

SEQ ID NO: 35810 - DNA, 2428 bp, Zea mays subsp. mexicana
  Clone ID: UC-ZMROTEOSINTE002G07_FLI
cttcattacgttctacgttagtgtgcaactattaaattcatcactataaactttctctgttactctttctagcactgtgcaaatatggcccaagagttgttgttcgttgcataaaaccaattaacaagggagatgaagtgtgcataacatacattgatcttctccagaccagggtactatttcttgaattttgctgaacccatatttagtcactctgacacatgaagtcagtatacccataatattatagatctccatatattatcaacatcaacatagtcttttagtcccaaacaagttggggtaggctagagttgaaaccccacaagaactcactaaaaagagaaagagagagaaaggggaggggaaaaggcttttgagagaactaaaagggaaaagacctaatcacggttcgggcacgtggatagcttctttccaagcacttctatccgaacacaactcctttgggatatttcattccttcaagtcccttttgagttttgattgcctcctctcatgtcaagtttggccgctctctaccgctcttcatatactatgtttccaaggatctaatcatggtttacatgtagtgttcgctacctgagttactgttatacacaatatttgatatttacatgattgacatatcatattttgcctttattttagaattttgggctgtaatttagaacaaaaatatcaaaggagtaaaggacctaacactcgcactcggttttggtatttttgtttcttttgagcggctgttgttgatacatgacagtgccctgatttgtagtgtattggtaatttgcttgtgaaaaaagattatcttgactcacatggtcacagtcacacttactgtattctgcaagttacacactagtgcctagttcatagctacgccacttgataaaattgtcaacttatcttgaaaactttggtttctctgctttctagcagaggaatgcaaaaatgttgagttgttgaccaaccctgtccgttttgatgtagctttctatacaataatactaatgtttttcactaacgattagtcaatgcgtactggttatcttagcaaaatttagctgatattgtcgaagttccagattgaggtcaccatccatagattgaaaatagactttcgtggtatttgtaccggatgtatttcaaattaaatattttattcgcttatgttgggatgctcataagagttcttttcaggaagcaaggcattcagatttgtggtcaaagtataaatttatttgttcttgcaggcgctgtattgcatcaccagagccatacactgatcttattctgaattgtgatgtgagggacttggataaagcagaagcagagggtactgttacacctccagcaattgagaatttgggtgatgtactacaacaggcaatatctgagtacacgtcaaatgatgaccctgaagcttgctgtaatatgattgaaaccatgctttccaacaggtttttgagtggtttgaagcaagaggatatttcagggagaaaacatatactacagcctcttcaccatatctgtcttactgcttacatgacacttgcctctgcttaccggtttcgcgccttaagtttagaagaagctgtccgttcagatggagaaaatactgatgacttttttagaatggctaaagcagcagcagcgtattccctggtacttgcagggagtgcacaccatttgttcctatcagaatgttctcttatgatccccctgtctcattttttgttaaacactggacagtctctgttatatcttgctgagtctatcaagggaaagacaaggcaaaatatatccgaggccaggctcagcttttcttcatgtccagcaagttctacagacaatgattctccaccgtaccatgtgttcagatcaacctgtgaagcgtttggcaagcaaacgttatccctgtcactgcggtgctggtcatttctagtgcgaggtttaccctgcctggaaaagataaagagccccatggaatttagtatgcccggaacaacaatatttcagtctgtcctttctgaggaagaccatgccaacctttccgcgcacgagccagtaagtttcacggagagacaagcggggtgcatccttagtttggctctatgttgtatcacctactgcaaatatcttgctaccatatgctacggcccacatcattatctggcagaccatgcaaaatatctacttgaaggtatcgatcctgcacaatgaatcttctttcttggcataggtgtgttgtgaaatcttatgctcttatgagttaatgtaaaacgtgtcgtgattatcaaggctgttgagcttattttctatatgattgtatgctgagctcgttatttattattttgtatggaagcaccatttttctaaaaaaatttggtcactgggaagttgtatc

SEQ ID NO: 35811 - DNA, 913 bp, Zea mays subsp. mexicana
  Clone ID: UC-ZMROTEOSINTE002H06_FLI
cgccctcgtctccgccgtcgcactgattcagctcgtcaggatccagcgccgggtgcccgagttcggatggaccacgcagaaggtcttccacctcatgaacttccttgtcaacggggtccgtgctctggtattcggcttccatgtccacgtcttcctcctccgcgcaaaagtatacaagttggtgttgctagatctccctggtctgttgtttttctccacctacaccttgctcgtgctcttctgggcagaaatataccatcaggctaggagtctcccaacagacaagctgaggcctgcatacattgccgttaacaccatcatatacgttgttcaggtttgcatatggatataccttgggataaatgataatgctgtggtcgagctagccagcaaaatattcatcgtagctgtctccttcgttgcgcttcttggcttttcagtatatggtggaaggttatttgtcttgctgagacgtttccctattgaatctaaggggcggcaaaagaagctttatgaggttgggactgtgacagcaatttgtgttacctgcttcctgataagatgtgttgtggttgcattatctgcgtttgatgccgatgtatctctcgaggttttggaccatccagtcctagatttcttctattatatgcttgcggagatactgccttctgcgctagttctcttcgtccttcggaagcttcctcccaagcgggtttcggcacaataccaccctattaactagagagtttttttttaatgatgttacatgctaagaactccggataatctgaaactactggaaacctacagccggctgtagttggatgcttttgcttgtgttgttatttggtcggtttgtgcactgcatgacatgacatctccagcagtaccataccattattatttgatttgc

SEQ ID NO: 35812 - DNA, 659 bp, Zea mays subsp. mexicana
  Clone ID: UC-ZMROTEOSINTE002H11_FLI
cctctccagtctctagttctttctctacactcttgcagtgcagctagcagcgcacggagagccaaaaccaaagccatggcagcacatctcgccagcgccttcttcttcgctgccgagcccgtcggcgagcccggcgtgcacgcgctcgacgcgtgcgcgctctgcgccaagccgctggcgcgcgacagcgacatcttcatgtacagaggggacacgcccttctgcagcgaggagtgccgctacgagcagatgcagctcgacgccatccgcgccaggcagccgtacgcgtcagggacggaggcgcggagggggcaccgggaggccagcaaggtgtccgcggtggcgacctgatgaacgcccgccggagggtggcccggagctgcgcctgcacagattgagagactcaagccaacggtttggttggtcgtttgcctcgtgaaggttgggattcggagaaacgtactcttagatcagatcgagcggccctgagccgagcttcgcggtgaatgatgcccgcggatgccggaagtcggagaagacgatctccatcggagttgctctggttgcacgaggcttggcctgcgtgccacagtcagtgccttagtcctagtgtaacatgatttttgtaaattcgatgcatttggaaagcttttgcctcc

SEQ ID NO: 35813 - DNA, 697 bp, Zea mays subsp. mexicana
  Clone ID: UC-ZMROTEOSINTE003B12_FLI
cgttggtggaagatgtcgtacctgctgccgcatctgcactcggggtgggcggtggaccaggccatcctcgccgaggaggagcgcctcgtcatcatccgcttcggccatgactgggacgagacctgcatgcagatggatgaagtgctggcggcagtagctgagaccataaagaactttgcggtcatctaccttgttgacatcacagaggttcctgatttcaacaccatgtatgagctgtacgacccttcgacagtgatgttcttcttccggaacaagcacatcatgattgatctcgggactggaaacaacaacaagatcaactgggccctgaaggacaagcaagagttcatcgacatcgtggagaccgtatacaggggcgcccggaaaggccgtggtcttgtgattgctccaaaggactactccaccaagtaccgctactaagaaggcaggcattccccttatgcaatctattggggatgtttacacggacagttagtccgacaggtgatccctaactgtatcttggcataccctagtatatttaaattgctggctggagtgatgcttaaccatgtcttggcatgccatagtgaacatgtaaacctgtgatttgaggtgattattcgagtgtaaagaaaccaggattgcgttcgcctatgactatgtgtttacttaataagaaacagttattggtttg

SEQ ID NO: 35814 - DNA, 915 bp, Zea mays subsp. mexicana
  Clone ID: UC-ZMROTEOSINTE003C05_FLI
gttgagaacttcaacaccagagcagctctttggggagaggctttccgccatcaatactttgctaccattagtgaggttccctttgatgcacctgtctatactaaagaggatggagagaagtaatctagcaaacaacatacaagcattcagacagttggttgcagaggccattgaattctctcatgctggacaattgatgcctacagcatgcgaatgtgagagatttcagcatagacggtcaagctataaagagctgcagtatatctctgatggtgatagcaatggtgttatctactatgctggaacatcatttggaaaacatcagtggatgaatcctgtgttaaccaagaatatcactgtggtggcaagcagtccaaattcaaggcacacagatccaaaggctttggtttcaaagaattaccaggggacatgttttgctgggccttgtgttgaaaatggcaagagggtttcttggtggatggtagacatcggacaggagcaccagttgatgtgcaactactacacggtgaggcaggatggctccacagcattcatgaggtcttgggctttccagggatccatggacggccggaactggacaagcctccgtgtccacgacagcgaccctaccgtctgctatccaggccagttcgcctcttggcccatcgttggcccggcggtccttctgcccttccgattcttcagggtcgccctgacaggccctgccgtcggctgtacgtggaacctctgcatttgcttcctcgagctctacggctacttccattagatcttcttcttcctcttcttcttaataaaaaatatagatgccggagtttttatgcaaacacaagtaatattacctgcgatgccacaattgctggtcattgcacatcatgaaacaagtattcacagttg

SEQ ID NO: 35815 - DNA, 1112 bp, Zea mays subsp. mexicana
  Clone ID: UC-ZMROTEOSINTE003C10_FLI
taaaccataaggcaatggcggcggcggcaaagagcgtatgcgtgaccggcgcgggcggcttcatcgcgtcttggctcgtgaagctcctcctctcccgtggccagtacgtggtccgcggcaccgtgcgcgaccctggtgctagcaagaatgctcatctcaaggagctggagcgggctggggaaagattgcagcttctccaggctgatttgttggactacagcagtgttgcatcagcaattgctggctgtgagggtgtcttccatgtagcttgccctgtcccttctggtcggtcctccaaccccgaggtggaggtcataggtcctgctgtagtaggaacaaccaatgtgttaaaggcttgctatgaggcaaaagttaagcgagttgtggtggtgtcttctgtttcagctgtattcagtaaccctaattggcctaaggacaaggtctttgatgaagattcttggtcagacgaggattattgcaggaagaatgaggattggtattatctttctaaaactctatccgaacgtgaagcttttgcttttgcagcaaaatcggggctggatgttgtaactatttgcccgtccttggtatttggacccttgatgcagtctatagtaaatacgagcagtaaagtactccttaattatttcaaaggagatcgtgagactgttgaaaacagactcagaaatatggtggatgttcgtgatgttgctgatgctcttgttctggcttacgaaaatccagaagcatctggacgatacatctgcagctcgcatccattaaaagtttctgatatgataaacatattgaagaccttatatccatcttacccttatcctaaacactttgtggaaacggatggcaacatcacctgcagttctgagaaacttcagaagctagggtggaccttcagggctatagaggaaaccctgcgtgatagtgttgaatcctacaaagcatttggcatccttaactgagcatccgactgggacagtgagacagcagttccaacagtccaatccctatctcgttcatataaaccgtgaaacagaacatgctgttcatgtacatttgcaataaaaaattgggaaatttgtagccctctactgaac

SEQ ID NO: 35816 - DNA, 553 bp, Zea mays subsp. mexicana
  Clone ID: UC-ZMROTEOSINTE003D01_FLI
gaactccatctatctcttccccacgaacgcttgcggcggcggcggaattaggaggcgatggggcactccaacgtctggaactcgcaccccaagaactacgggcccggatcccgcgtctgccgtgtctgtgcgaaccctcatggactgatcaggaagtacgggctgatgtgctgcaggcagtgcttccgcagcaatgccaaggacattggcttcatcaagtaccgctgaaatcaggtggcaatggaccatgtggtagaggcgaagctgtagttttatttccagtaatttagatgttttgttcagaagtctgctagtaaagactgctacgtttatgatggagaacttagccatgttggtcatgttggtcatgagttacctatgttgagcttaaactatcttgtgtccaaccatcgctgggtagtatgattactgtaatgtaggatggttaaggtcgcaaactaatacttatattgcatgtgtggaagatctattccaattgtactcctagcgcactatttgggaaatgttgctgcgcctgtacggcattgacatt

SEQ ID NO: 35817 - DNA, 1929 bp, Zea mays subsp. mexicana
  Clone ID: UC-ZMROTEOSINTE003D05_FLI
ccaagatcttggttctgcaaaatgttgtgcaaactgcaaagctgttgcaatttttgttgatttccctttcagacatcaaaacaactgtgcataaacagtctacttctacaccagtgcttccttcaaacctttttccagtatcatcaactgtcatgtgtttgcctttaacttgttagaagcgacaagtaaaaaacgtgcatgcctaatcaaagatcacatttacagcataactgtctgttttgaactatagtttggcttatacaaggagtcaaaactgaaatactcccattgtctaaaatgtaggacatttttgttttttatgaactcagtttcctaattttgaccaagttaatgaaaaatgcatcaccatctataacattaaattagttttattaaatccaccatgaaatgtctggacagtgcatttatttcggattgtaaatgataattatgtggtttaaggatgcatgcaaacagactttttttagatttgtcttgtgaaaacaacagcagtattttttttccgaacgcacaagaggtgtctcatttgattaaagtagactagatgtttaggctatggccagcagactacgcatatggtcatgcaaaataccgtctacactgtagattacattgtttatatagtggagtttgaaatagtgaatgatatgagtaacgatgttcgagtcttggagatagctttacaatactattatttttttgtcgaatggccaagagagctgcatgccatttcagtaaacaacgctagtagaattaatatcataaatattttcagacatttaattttttagtgtattttactgacatatttgtagaagtaaccgtcatatttagattgtaatggtggccaacaaggtaaagaaagggagaacggatcaaggattgtttgatgattgttggtatctgtcttctgcagtacactgcatttgatcagctcaagaaaaggataattcagaggcagcgacgcaaaaatgcagcaacggcagaggataattccatagtggctctttctgctttctcagcttttctgcttggtgccgtctcgaaaagtattgctacagtattgacttatccattaatcaggtttgcaaacttttacttgacaacagaagtgtatctgggccttaccacctgcttttgcttgttattttttctagatggattcctttatgtatgtgtgtttctggctcctgtaaggggttttctgtattgggcctttctttagaccctggttccaattttttcttaatataacgaggcacagtttttctgcgcgtttcgagaaaaatactatctaatgatttgtctcttactacaattaactgtcaaacaggtgcaaggtgatgattcaggctgcagaccctgataaggatgatgacgatgattctgaaaggccaagcaagtcaagaacaccaaaaacaatgctaggtgccttgcatgctatctggagcaaggaaggcattccaggcttcttcaaaggcctgaatgctcagatccttaaagcagttctgagctccgccttgctgctgatgataaaggagaagatctcgaagttcacttgggtctcgctgcttgccctgcggcggtatcttttcgtttctcagaagaggatcaagagtgtaactgtataaatactagctccaaacattgcgacatcgtgcttctggagatgttatgccaaggaattaatctgaggaataatgagcagaaatactgaagcaaaagagtgtgtgtaaagtgtgtatgtgtgatcgatagcatcagagggctcttcaataagtttgttcattctttttttcccctctctgaatctctgatagctagtgacacagtgttgcacggatctgaaactggactgtacttttggctttggttgtctgtaatgtgtaaaatagcagccgtgttaat

SEQ ID NO: 35818 - DNA, 689 bp, Zea mays subsp. mexicana
  Clone ID: UC-ZMROTEOSINTE003D07_FLI
gaacgactacctggctgtgactgcggcgaagcacgcgacattcctgccgcactccgcggggcgctactccaagaagcggttccgcaaggcgcagtgcgccatcgtcgagcgcctcaccaactcgctcatgatgcacgggcgcaacaacggcaagaaggtcatggccgtccgcatcatgaagcacaccctggagatcatccacctactcactgacgccaatcccatccaggtggtcgtggacgccattatcaacagtggaccacgtgaggatgccacccgtattggttctgctggtgttgtgagaaggcaggctgtggatatctcacccctgagaagggtgaaccaagccatctacctcctgaccactggtgccagggagagcgccttcaggaacatcaaaaccattgctgagtgccttgcagatgagttgatcaacgctgccaagggctcttccaacagctacgccatcaagaagaaggatgagattgagcgtgttgccaaggccaaccgttaagtggagcttgtatcctggtgcacttgcactagaactacgtttctggcagtcgtattttttcttgtgtttttacccatgtttagactttgagacctatatctaaggttttggttctcagtgaacaatgaaaattactgtgaaatgcagttgttttggtgcagaaatgcgcactgag

SEQ ID NO: 35819 - DNA, 1510 bp, Zea mays subsp. mexicana
  Clone ID: UC-ZMROTEOSINTE003E08_FLI
taatggtgtgtttggtttgtggagtcaccatatgcttcatgaggtgatgcatcataagttcttcccataaattttggtggactcaatccactcatcatgtatatactaattattagcttatgaggaataagatgatgatggatcaactcattctattccataaaccaaataaaaaagtgaggagtgagaagaagatgaaccacttcattcttcaaaccaaacacaccctaagtgattcatgttatgtatatgtatggtagccttttttctctttttgaagatagatgacatgtttaacacttccctaaatactcattgagtcattgaacatattgttgcttcctgtgttcgatagaacaataacttatagcttaattcagctaaattactgatatgtagtactccctccattaaaaaatggtaatcatattagaccagagaaaaagtcattcaaaatagattttgaccatcaatttctcttgtaatgtaaagtcgacggtctaaaaataaataccatcttataggcacttttaacacaaatctattgatgcagattatatgctctaaactttaatggaatttgattagttggtcaaaatttatgaagtttgactttttctctggccaaatatgattaccacttctgaacggagggagtaattatttgtttttgtctttactcttcaaggaccgagcaaatgaaatctacaagaaagttgaagatctcaaatctatcaggggaagaaatcaagatgccatattagctgcatgcctatatattgcttgtagacaagaagatcggcctagaactgtgaaagaaatatgttcagttgctaatggggccacaaagaaagaaattggcagagcaaaagaatttatagtgaaacaactggaagttgagatggggcaatctatggagatgggaaccattcacgctggaaattttctgagacgtttctgctcaactcttgggatgaacaatcaagctgttagggcagcccaggatgcagttaagcactcggaggagcttgatataaggaggagcccaatctcaattgcagccgctgtcatttatatgataacccaactctcagaggacaagaagccacttaaagatatatccttggctactggtgtggcagaaggcaccatcagaaattcgtacaaggatctgtatccttatgcctcaaggctcatcccgaatacctacgccaaggaagaagacctgaagaatctctgcacaccttaggaagcttactttttccccctttctgttactacataaatcggaattagatttgtcaaagaggagtgagtgaagttgttcctcgttgtgacagtaccgggcaaggtgtcgtccccgctgtgcttaactttatgatggaatttcttttcagagcacctaccacctgaagatttgtgggatacgtatactcacttctgaaagaatgtagatagcaagcagctggacaagcacaagattttaatttaaaacatgattttgttctcc

SEQ ID NO: 35820 - DNA, 1211 bp, Zea mays subsp. mexicana
  Clone ID: UC-ZMROTEOSINTE003G02_FLI
tcgacacggatcccggcatcgatgatagcatgacgatcctaatggcgttcagagcacctagtgtggaaatcattgggctcacgaccatattcggcaacgtcgacacaaagggcgcaacacgtaacgcgctattgctgtgtgagagagcaggatgccctgaagttccagtagcagagggcagccatgagcccctaaagggaggaaagccccgtgttgctgatttcgttcatgggtcagatggcattgggaatctgtttcttcctgcaccctctgctaagaaggttgaggaaagtgctgctgatttcctgattaataaggtctctgagtttccaggagaggtctctgtgcttgcgttgggacccctgacaaatgtagcattggccatcaaaagagacccttcctttgcaagcaaggttaagaaaatagttgtactgggtggagctttctttgcggctggaaatgtcaaccctgctgctgaagcaaatatccatggagacccagaagcagctgacatagtttttacttcaggagcagatatcgttgtggttggcattaacataacaacacaagtctgcctgacagatgaggatctcttggagctaagaaactcgaaagggaagcatgcagcgttcttatatgagatgtgcaagttctacagagattggcatgccaagtctgatggttttcatggaattttccttcatgatcctgtgagcttcactgccgtacttcatccagagtacttcacattcaagaagggtgtggtgagagtagagacccagggcatttgcactggccacactttgatggatcagggattgaaaaagtggaattcagagaacccatggtcagggtataaaccgatttcagttgcatggacggttgatgtgccaaaggtcatcagctttataaagaagctgctcatggcaccatgagcaaagtacaaccatttaacgacatgtcgacatcagcgctctctgatgtccaagaaaatttgacgagtacagatgctctttctcagttgcactgtaattagttcctggacctaggatgattcctattcctccaatagtaagaggaacctttcattgtgaaaggtcatgcagcagtctcgaataccatgaagcaaattctggcatacgacatcatgtctcacacatttgtatcaatacatttcgaatcaataaagtttccctcactctttactgtgc

SEQ ID NO: 35821 - DNA, 139 bp, Zea mays subsp. mexicana
  Clone ID: UC-ZMROTEOSINTE003G06_FLI
gttgttttggccttttgatgttgggaccatacaactgtcaattattatcttataattgttgtaagcatactataattgttaccatgatttggtcgtttttttgtcgccagacgtttattgccagcaggttatgttcttc

SEQ ID NO: 35822 - DNA, 435 bp, Zea mays subsp. mexicana
  Clone ID: UC-ZMROTEOSINTE004A03_FLI
tagtcacctgcctatctatctagcgagagagagaggaaagctagctagctagcatggagtgcggcagcaagaaggcagcaggcggtgtgttggcgctgctgcttctccagctggtgttagctccgacgacggcgacggcccgcctcctgcaggcggatacctccaccgtggttggcctggacatcatcgcgagggagtttggccatccagtgagaggcatcccctgtggtgaaacctgtgtcttcctaccatgctatacggcagccatgggttgccaatgcattggccaaatctgcatgacgtgatatctggactagcgctatttgtaatttgtgttgggagaaacacaaggacggtacggtggtgttcaacttattgcatgtgtatggtgatctaataagtaaagtataataaaaagggatatgttggatgtgt

SEQ ID NO: 35823 - DNA, 1829 bp, Zea mays subsp. mexicana
  Clone ID: UC-ZMROTEOSINTE004A10_FLI
gccaacaatccagagctcaactggatttcccgtgtattaaagttgagcttgaatgatctaccaagttatcttaggagctgcttcctatactgcagcatctttcctgaagattacaagattagaagaaagatgatttccaagctatggatagcggaaggtcttgtggaagagagaggagacggaacaacgatggaggaagttgccgagtgttaccttatggagctcactcaacgttctctttttgaggtcacagaaaggaaaacatgtggaagagctagaacatttctgatgcatgatcttgtgcgagaggtaacttcaatcattgctaaaaaggagaagtttagcattgcacttgcacatggtggtgccagtacaacccaagttgcccatgaagcacgccgcctatgcatccaaagaggtgcgcagaccattaattctttaagaagctcgcggcttcgctcattcattttgtttgacgctgaagtaccatgttcttggatacatgatactgtatcatgtttcagactactgagagttctatgcctaagatttgtcaatgttgaacaagttccaagtgtagtcacagaactgtataacttgcgttatctagatatgtcatacacaaaagtgaagacggtccctgcatcgtttggaaagctcgttaacctacaatctttggatcttagagagacctacgtggaggagttaccactggaaataactaggctaactaaattacggcagttacaggtgtatgcactctatgatattctacaaagatcatcgaaatttctcagtgctacaaaaattcctggtaacatttgtcatctaaaggatctccaaactttgcatgttgtttcagccaataaagttttggtttcacagctggggaacttgaagttaatgagaagtttggctatcgcggaagtgcaacaaagctacattgcagaattatgcaactcgctgacaaagatgactaacctgaaaacactatttatttccacgtgcaatgtgaatgagactctcgacatagaaatgctaaagccgctgccaaatctgacatcatttctcctatcaggaaagttggagagaggcttgcccccgtcgatattttctatgaatttaaaacagttaaaattgttcgggtctagtctgaagaaggatcctgttagctcgttctctcatatgctaaatcttgttaatctattcctcactggagcatatgatggggaacagctaactttttgcaccagatggttccccaatctcaaatatctgcaattagctgatatggaacatctgaattggattgagctagaggatggaacaatgatgaatctacaatatttgtcacttgctggtttaaggaatctaaaggctgtacctgagggcatcaagtacattagggcactccatgagatgcttctgacagatatgccaaatgagttcatgctaaaactgcatggaagtgacaatcacattgttcaacacatacccaacataaaaaagtatgactcttctgattctcaagcagtaaacaacctggcttatctgccgtggcttgccaataagtttggtcctggtgctgcaattaagtatgcctccataaactgtggctcatctggctcttgacggttcattgggagttgtttgtgccaatgctagtcgttttaagtcttaagagtcatcaatatgtagatgtaggtctacatcttggtgccactggatgagctaattgtttctattttgtaccctgtccaataatgtataagagcacaggcatggcaaactatctctaagagatttttaatgattttttttctcaaagc

SEQ ID NO: 35824 - DNA, 2127 bp, Zea mays subsp. mexicana
  Clone ID: UC-ZMROTEOSINTE004A11_FLI
aaattcagcttttcaatctggtggtaccaccttgaagagaagttcgttgaggaataacagtgcctctaatgttcacaatttcagtaaagctgatgtagtgcctgtcattgttcccagaactagctccggaggggagttggctactgattctagaagcgatgctgctgatgtggcacccgtttttccgaaggtaaccagaagggttgaacctgctaccgattctagaaaagaaagtaatgatgtggaacttgttgttcctagagcaagctcaagaatggaaatagccgatttagcacccatttctagttccaagtcaggcagaaggttggagtctgcccctgattcgaaagaagaaagtgctgatacagcacctgttgttgtttccaatcccagggctaatgtaagaatggaaatagtctctgattctgcgcccgctctttcaaagtcaaacagaaagctagattctggcactaattcaaagaaagaaagtgctgatgcagtcattgtacccagaacaaattctagaatggaaatgatttctgattctaggagagaaccctctgctggaagaatatcaccattcagaatccagtcaagatatgctgagccacggaagctagcccatgccaaagctgattcaaacaaagttgatagcagaaataaaattactgaaacagaagacttcaattgccaaatatttcttccccgtagaaacggtgtttttcaaacaataagttctgaagaacctcgtgaagatgtaaagtgtggtccagttgacagggtgggattttcaaattcatcagaaccaaatgcgagtgtccgcaatgagaattatgttcctagaatgcgcaaaccaggagataactgctatatcgaagtttcaagagccgggagagcaaggtcaagtgtctctaattgggaagggagggatcagccccctagtcatgaagaaccaacaacaagcagttctacactggctcctaccggccatccatattcatctagaggaagcaatcaagcttctgaagctccaaccatagctagtgatgaagatgttctatctcttatcatggagcgacatgatctatttttaagctcaactaagtctcggctgatgaaattgcagattattcatcaaatgtgggaaagaaatgacatcaggggtgtgctctctgcgatggacaggatgggtgatcatgctgtctgtgctgatatggctagcgttctcatggagaaaagtgaaacaatcacactagatttgtgtacctctatcctgcctgtcgtaactgatcttctggagagcaaaattgacagacacttagtcgtcgcattggaattgttggtgaagcttgtaaggacttttggtccaatgatacattcaacagtatcgtcaggtccttgtgttggtgtagacattgaggcagagcaaaggagggagcgctgtaacttatgcttcatcgaattggagaaggccaaaaataagcttccatctctaacaagaagaaaaggggcggttgcaaatgctgcacaagaacttgctcttgtcttccaggaaatcatgagttgactgacgacacactagatatacacaattagatgggacatgcttcgacctctgatggcaacaagattggatatcagctgccatggagggtgctagctattcagtcttagcgacgtcatcaagctccaaggccacagcaccaacaaatgcattttgttgctgctgttcgtgccttttgtacacatgctaacacataatccatgtcatttgtgaagagaagctgccatggacagtgacttcatccacaatattatgtggatggcggcagctggagatgttaggccccgatcgaatggtgatcagcagatgagacttgcttgggcttttctggcactcgtagttctttgctgtctgtaacatctttctcatgtatcgttatcatgtgcatgtgcaacagtcaagtggttgcatttggtagtttatggttgtgctgtgtgttggtcgatttagtggtcgttgatgagtgaagcgagccatgtacatcattttttttgaagatttgatatcttcttttgccttgatgactcctctcgttatacttgtgtgaaaatgatatcttgtgt

SEQ ID NO: 35825 - DNA, 1746 bp, Zea mays subsp. mexicana
  Clone ID: UC-ZMROTEOSINTE004B05_FLI
aaaaaggcttaaaggttctgaagcactaagaatctcaaatagcataaatcattgttctgcatttgagttctcaggtgttcaagagagtttggagaatcaagatttctcatatgatattgattttttgtcacaattcattgagaaagaaagggaccattattcttctctctggagtccaactaattcaattgggcagagagaagcaagagaatggctgcgaaggctttgggttctgaaacctgatctgagagaactaatatggaagggtgcatgccttgcaataaatgttgacaaatggtattcatgcttagaggagatatgtgcatgccatagtttaccaccacctacagaggatgagaagcttcctgttggcactggtagcaacccagtcttcattgtctcgggcaatgtgattaaaatatatgctgaaggaggattggtttattctgtccatggtttgggcacagagcttgagttctatgatctcctgcaaaaaagtggttcacctttgatcaatcacattcctgagataattgctagtggcttccttgagtataaggatgatatctacagcacggttccgtggaatggaaaaggaataccagaaattttggttaagtactactcattggaggtttcttgtgcgaacagctgctttcctcttgggctttggagcaagcaacgatttgggatgtgtagttcggctgatgtttcagacagaccaatttggccttacatggtaacaagaaagtgcaaaggagatatttttgctcgcatccgcgatatgctgtcgaagactgatattcttcatcttgcatcatccttgggagttcaaatgcgaaacatacatttattacccctgccacccgtggagcatgtacctgaatctgggaacaatgatgtgaaagaagtggtaggaacatgtgatgataccacggttctacctgaatggcagcaacttgtctctactctaaataggaggaagcagaatgtaaaaaagcacctagctaactggggggactctgttccacaagttctagtagaaaaggctgaagaatatctccctccgaatatgggcttcctcatcaagtttgttaaggatgatggtgagttgctgtgcccatgcccctcttggatacattcagatataatggacgataacattcttatcgaggggatcacaaaactgagttcttctggtgagagggaaagagtttatgactcagatcgggacaaaataaatgcaattcacatcattgatttcagtgatctgtccattggggatcctatatgtgacataattccgctgcacttggatattttccggggtgatagtgaccttctcaaggaatttctacggagctaccaacttccccttctgaggggggaatcaaccaccgatgtctacagatcagtgcgaaactcgaagttcagcagggcatcatatcgcgcgatgtgctactgtatactacacgaggacaatgtcttgggagctatattcagcctgtggaaggagctgagggttgcaacgtcctgggaggacgttgagaacctggtctggggagagctgaaccggtaccaggactctgcagttcgctcagcataactaaacaccagcaaaaaaaaaaaccctttctgaacatacgtgtatgttgttgtccctccgaggaatgtaacttccaaataaaaaaaaagtgtagggaaaataacgaaggctcggcacggcatgcccgtattttccttggc

SEQ ID NO: 35826 - DNA, 1184 bp, Zea mays subsp. mexicana
  Clone ID: UC-ZMROTEOSINTE004C06_FLI
aaaatcagcaagttacaagctgaaagacagaacgggtttggaaagtgaggaattggatctatggcagtatgagaatacagcagaagctgctaaaacaatatgctctactgtaaaatttctgtggtctgcaatggaacctcacttgctgcaggtattggcatgcttgtcttttgcaggtttggtggctgcattatataggtactatcaaagatcaagagagtgctgcaactgcatcataacctatgactcacttgctgaacaaccattgttagttcaacatcaagttgcgcagctgtcagtgacttcagttcgagatgcacagctacctgttcactcttcggagcaacctatacaattggcaattcctaaccaaggcacggctggtagtttggaggttcctatggagttgacattgcccaagctggacccattggtcagtcttgaggatcctgcacaagagtcattgcccatgacagacccactggtcaccgtcaagattcctgtgattggtcgtgggatccatgatcagaaacttaaacgtggggattctgagaacattaaggcttcaaatggtatgtttctgaaccatagtgacgttgacagctccaagccaccagtggttgaactacttggagagttcgtgcttgcaagtagctcaagagaaagatctaccaagaaattgtatcagaatgctggagatgctacagatcagaaattgttgaaacctttgaaaaaggatgaggatgttgaaaagatgcagatgcattcaagcatcatccaaagccctagtgttggaagagccaaaaaagaggagaaatctataaaccgggagaagaccgatgcgacgccaactccactgagacgctcaagccgcctccgcaacaaggtgacttctccctgaccaaaatccaaggtgctcagctcgtcgttcgctaaccttggatgctgggttcctctgtggtgtggtggaaagctgtggacgggacagcacctagttgttacccaagctttgatattgtactttaggagcagaacaatgttttaccagaatatatgctgcgtattcgtcccctcttaatatcctcatgtgcatgaatttctcgtaacgatggctacacttaagctttccggctagagatgtctgtaacgaacacatatgtggcttcttagtttattttagttct

SEQ ID NO: 35827 - DNA, 382 bp, Zea mays subsp. mexicana
  Clone ID: UC-ZMROTEOSINTE004C10_FLI
cttcaccgaccgccgctcccgacccaccgtcaacctcttcgccgccaacgccaccgccttctacgaggcattcgtcgccgccatggccaagctcggcaggatcggcctcaagaccggcgccgacggcgagatacgccgcgtctgcaccgccgtcaactaagcctgcattggctgcttgcttgctgcttgcgtgcgtgggtttcacttatttcacttcttctttctcttgtttatatacgtacgtttgtcggatggattttgttggtagccatgagatgagatccttgttcttaactagccatgatagagattgatccagatgttcttctagattctaattctttatggatgtttcccattgacacgcggttacgcgcgcttc

SEQ ID NO: 35828 - DNA, 668 bp, Zea mays subsp. mexicana
  Clone ID: UC-ZMROTEOSINTE004C12_FLI
ctccctagcaatctctagcagcagatcctcgtgcgacgcaaagcgctagccttcctactgtcccgatggcccgcacgaagcagacggcgaggaagtccactggcggcaaggcgccaaggaagcagctggccacgaaggcggcgcgcaagtctgccccggcgaccggcggagtgaagaagccccaccgtttccgccccggcaccgtcgcgctccgggagatccgcaagtaccagaagagcacggagctgctgatccgcaagctgccgttccagcgcctggtgcgtgagatcgcccaggacttcaagaccgacctccgcttccagagctccgccgtcgccgcgctgcaggaggcgtccgaggcctacctcgtcgggctctttgaggacaccaacctctgcgccattcacgccaagcgcgtcaccatcatgcccaaggacatccagctcgcccgccgcatccgtggggagagggcctaggcgtcgtcgcggtggaggtggaagtagtagtcgccgtttctgtcatcactgtctggcgggctagaaggtgtagagatgtgccgggttctgtagtttgggatatcggtcaaatcatgatgtagttgggtcttccctgctgtaatttaactatgactatgcaatggcaatgaagttctcggttatcagttcccg

SEQ ID NO: 35829 - DNA, 1451 bp, Zea mays subsp. mexicana
  Clone ID: UC-ZMROTEOSINTE004E11_FLI
gtccaagacgacttcatggttgaagagattcatcgggcgtgcgaagaagcctgcaatgacatggccattcccctttgtagaggagaggctatttgttctgactatacaagctggagttgaaggtttccacatttacgttggtggtcgacatgtgacatcttttccttatcggccggggttcactcttgaagatgcaacagggttatttgtcaagggtgatgtagatatacattcagtttatgccactgcacttccttcgtcgcatcctagtttttctcttcaacaagtccttgagatgtcagaaaagtggaggtctcggccactaccaaaaggccccgtttcccttttcattggaatactgtctgcatcaaatcatttcgctgagcgcatggctgtgaggaaaacatggatgcaggctccagaaattaagtcttttgaagccgtggctcgattctttgttgcactgaattcaaggaaagaggtcaatgtaatgttgaagaaagaagcagaatacttcggagacattgtcattttgccatttatagaccgctatgagctggttgttcttaagacaattgctatctgtgagtatggggtccagaacttgactgctgcaaacatcatgaaatgtgacgatgatacatttgtgagagtagatgtggttctgagacgcatcaagttgaacaatggtgacaaaccattatatatggggaaccttaacctcctgcacagaccattgagaactggaaaatgggcagttacagacgaggagtggcctgaggatatctacccgccatatgcaaacggaccaggctatgtgatttctggtgacatagcaaaattcatcgtgtcacagcatgccaatcagagtttaagactgtttaagatggaagatgtaagcatgggcctatgggtcgagaagttcaattcaacaaatcctgtccaatattcccacagctggaagttctgccagtacggttgcctggagaactactacacggcccactatcagtcacccaggcagatgctgtgcttgtgggataagttggttcgtggtcaagcatcctgctgtaactacagatagcagagtgaagctaaggattgctggacgctgtcctctcttcatcataccccagccaagtttaggtcggttggctggtattttctttttcgacacaatcatagtgtagtaggtgttgttgctcctccgtcgctggctcaaatatgagctaaatgcatgggtgtgcggtaggagattgaagatttaggaagccccaaccagttggtattgttttttacacgatctgtattggtccaattgtggcgttggcgtccttgttcttgtaattgatccaattttgatgtagtaggccagattagagggaatattccagatcagatgtacgtctccgttcttttcttatagtaataactagacacaatttgccctg

SEQ ID NO: 35830 - DNA, 891 bp, Zea mays subsp. mexicana
  Clone ID: UC-ZMROTEOSINTE004F03_FLI
ggcctggtcggaaacgatctgcggatcacgaacgtccttgtggaccagaaccatgtcgccaagatcggcagctacaacatcccgatcctggcggaggccatgaggtccgagcagggaggagctgggaacaagttgcaggctgacagtcgggtgaagagcgataagacggacatcttcgacttcggggtgatcctgcttgaggttgtgtccgggaagaccatcacgtccatgtatgaagtggagatactgaaagaactgcttgcatgggcgattgccgacgaggaccgggtgaggaggaggagcttcgcagaccccgcggtgagcaaagggtgctcggacgagtcgctgaggacggtcatggagatctgtcagaggtgcctggccaaggaggcgtcgcagcggccctcggtggaggacgtgctgtggaacctgcagttcgccgcccaggtccaggacgactgggagacggatgcctggagcagcggcggaggaagcccagtgtcgtcgtcgtccagagccaccaggccgtctcggctacacttgagcagatagatgatcaggtgcttcaccaatctccagtaaagcggtcacatgatctacccatagtctaccggggacaaggatctaaagatgggaaatgctggtcagcctacagtacagcatctgcctctgatgggatgctgaaacccacagcaggatcagctcactgaaaactgtccccccttggtgcagactaatgtgctttgcgctggtgcagactaatgtgctttgcgccactgtagagttcttttttggtttctctttatcatcacgtccctatctaagagtacaataatggtgtgccttttgtccattttccccccattggtattggtagcacaataatgatgt

SEQ ID NO: 35831 - DNA, 1210 bp, Zea mays subsp. mexicana
  Clone ID: UC-ZMROTEOSINTE004F09_FLI
ggacaatctggaggcgaaggtggttgtggcagggctgtcaacaacctgtagctaggaaattcacaatcaattggtacacaagtggcattgttctcatcctcattgtatctttcatgatcggcgttgaaaagacgcacagggatacaaagtatgtcttgtttcttgacgatgatgtgaggctgcatcctgggactattggagctgtcacaaaagaaatggagaagaatcctgagatatttatacaaactggatatccccttgacttaccttctggcagtttgggcagctattgcatatatgaataccacatgccttgctcgatgggatttgcaactggtgggaagactttcttcttgtggggggctgtatgatgatgcatgctgatgattttaggcaagaccgatatggtgttgtcagtggattaagagatggttgttactcagatgatatgacactcgctgcaatagcagtggcgagaactgtctcacttgagtcaccaagtcatgggtttcaagctgcctctccgtatttgcggtgggaggacttacctcagtttatcccttccccaaaccctactcataggggtcttcggcactgggacagcacaagatgctcatatcttcacctcctgtcgctgtgtttccacaccctcttgccagtgatcttagcttctcgaggtacagcgaatttgcattggaaagctacgcagcttatttgcgggcagtaaaagaaagagtaaatcacataagtccaattcattgtgtcacaacgacaaagtttctgtttgtgaagcattccgatcacatttctcccaatcaatcaattggtctggtatctgatactacttgagagatgggaaaatatgcaagatcgaaagagagaacagttcaaagtacagagaacagttcaaagtacactgatcttggagggaagcgtctatatggcaagagaacatacccttccaataaatcattgctcggttacctgtcaagaactctagtgcaatggcaccaaccaaagaaatacgacgtataggaagctgaaccccctcgatttggcggggcttcttgttgtacaaccctcttttgttttcgtttattggttattaggttcattcatattaaattttgtttgcacctcagctcttgtaacactatagatatgtaatgtaacgacctgtctgaagaagtgaaaatgttccatattgctg

SEQ ID NO: 35832 - DNA, 1035 bp, Zea mays subsp. mexicana
  Clone ID: UC-ZMROTEOSINTE004G02_FLI
gtggtctttctctccccgaccgagtttttttagtatgaacagtagtacaagttgtaatttcgggcaccacacagtcagccccttttgcctaaactgatgcaaaagggggaaacataaatggagttgacgaccaggtaatattttttgtaaggtcaagattttgacatctaacaacagtttgctcatagtgagaggtggggtgaagtctctaagagcattgtgcattcttcttgaaattatggccctacagtaatgaataatctgaaagctgcaatgtggaagatgatgataagattttaagaacactagttctgcacatctaatcttgctgatttcacacatctaatgttgccactccatctgcctttgataagaggtactttgttgggttggccatctggaactttgggcacaatatattagtatcctgaatgagttttgcagcctcgcgttccaatgtctttatctcagaggggaaacatgttttgcctttgtcaagtactatttggtcaattactgcgcgcttgagctgcatttgtttctggctgtatcttgttcacacttaaaaaatttctgttacctcaataagctattatcctcattagtggaactaagttactgaaacaggtcttcttaaagttatcaaatatactaaaagagagggtttatatatagaatcaaatacttttgtcaggatttaaaaccttaaactttcatctcgaatttccttttatttcaggttgcttgaggttaaggctcagaaaaggagaatttgggggttgaggagggaagaatgaacattggcatgttgtgctggatgctgaactgctcgcccttctatggttctatctcatagttctcaggatatggcattatgacgacgctcattatagaaagacaggtcagaagctctgcaaaaaggataccaacggatgaaactggtttgagttgtcattattgttgctgttgtttaaacgaactactgattttttatatatattgaaaagaagaaagtggaggaggttaagccttggt

SEQ ID NO: 35833 - DNA, 1535 bp, Zea mays subsp. mexicana
  Clone ID: UC-ZMROTEOSINTE004H12_FLI
cccaatcgcaacagtttcactgcgccacagtacaaatcctgtctcgcaccgccccagccggccagaacagcgacaggcccctcgcgccgatcgccgggcaatgggagctgggcgggggcggtgatgggcgcggcgggctccaggttggagaaggcgctgggcgagcagttccccgagggcgagcgctacttcggcctcgagaacttcggaaacacctgctactgcaacagcgtgctgcaggcactttatttttgtgttcctttccgtgatcaattgctggagtactatgcaaacaataaaaacaccggagatgttgaagagaacatgctaacctgcctggctgatctgttctctcagatcagtagccagaagaagaaaacaggggttattgctcctaagcgttttatacaacgattgaagaaacaaaatgagattttccgcagctatatgcatcaggatgctcatgagtttctgaattttttactgaatgagctagttgacattctagagaaagaacataatgctgcaagagagtctcttcaaaatctctcactccaaaagaattcaaatggccctattgatggccaacccaatggtagtcacaaagaattagctgtcacatgggttcataaatgcttccagggaatattgactaatgaaacaaggtgtctgagatgtgaaactgtgactgatagagatgaaacattttttgacctgagcctggacatcgaacagaatagttcactcaccagctgtcttaagaacttcagctcaacagagactttgaatgcagaggacaagttcttctgtgacaaatgctgcagtttgcaggaagcacaaaaaaggatgaaaataaaaaaaccaccaaacattctagtaattcatctcaagcggttcaagtatattgagcagcttcagcgctacaaaaaactatcatacagagtggttttcccactggagcttaaacttcttaatacagttgataattcggacttggaatactcccttttcgctgtggtagttcatgttggaagtgggccaaaccatggccactatatcagtttggttaagagccacaatcattggttattctttgatgacgagaacgttgagatgactgatgagtccatggtacaggcattctttggctcaccgcaggagttcagtggtaatactgataatggctacatactcttctatgaaagccttgctgaaagaagttgatgtccttctcataccatgtgattagttatacactttcctttcccttccatttctgctggggatatatagaatattcagtgaaaaccagaataagctgaatgagaggccttcagcttcagttggtatggtacgatcaacgcttggcaataaaacaagttacctggaggggctataggctgactagtttgtagttcctactttatctgtttttatgcatatacaggttgtatcaattcctgaataatgtttgttgaagacctttattatcatgtaaagagattctatctaggaagccttttttggattcgagt

SEQ ID NO: 35834 - DNA, 2230 bp, Zea mays subsp. mexicana
  Clone ID: UC-ZMROTEOSINTE005A06_FLI
cgacatccttcgtcgcatccgacacgataacgtcatcgcactccacgactccgtcaaggatcatgggagtatatatctcatactggagtattgtcgaggtggtgacttacatgcataccttcaacgtcataaaagagtttctgaaaaggttgctaagcacttcatccgtcagttagcatctggtctgaaaatgcttcgcgataataacgtggttcaccgagacctaaaacctcagaacattcttcttgttgaaaataatgaaaatactctgttgaagattgccgactttggatttgcaaaatttttgcaaccctttgccctagccgaaacactttgtggttcaccactttacatggctccagaagtcatgcaaggtcagaagtatgatgcaaaggcagatctgtggagtgttggtgtcattctatatcaacttgttactggaataccaccttttaatggggacaatcagatacagttgcttaaaaatatactcaggacgcatgaaatacgattaccatctgattgtgaattgagccatgactgcatcgacttgtgcagaaagttgctgcggctcaattcagtggagcggcttacagttgaagaatttgtgcaccacccatttctttctgaacatgctccagagaggaccttgagccggacattatctgaaataagagatggctttccaataaataatatcagtccaacaaggccttcaagccaaagttcacaagaagattgtatgccttttcctttggatgatgagtcaagtggacaggatgagggtccaattcctgacagtaagagtccgatgaaatcttatgggtttcccacaggtaaaagattggataaaacttcaggccagagtccatcaaaacataccagtctgttctccaggtatgtcttgggaaataatcatgcacctagtagccaacaccatggccatactgataaaatgaccaaggaaagcaagattcatgaagtgcaaggtccaaaaggtgtttatccagaagattcccctatcattgattcattagagtttgtagatcaggaatatgtatttgtgtctggaccacacccagagggatcatcgtcttcaacaaatgcttctcagcagcttaacttaccggcaaaatatgataatttatctgtttcaccaccgaagttaactttcttgagtgcaccaatgccgataaacggtttgccgattaatagacaacaatctgctgggactggtagcttcgacagccactattctcctgcatctgtcatttcacagggatctgcggatataagtgatgccatggatcagcccccatctgattatctgacgaggattagattgttagagcaatatgcatcagccatagcagggttggtcagggatgagatcaaaggtggcaggcacttggtggcgttctctattcagctaattgttcttgcaacctggaagcaagcaattcatttatgcaatacctttgtagcttcacttgcaagggagagtccctcacaggatatccatatgaaggggcttagtgctgatgcttcgcatttgcttgcgaactcaaagctagctgatgatgtctgcgtgcagatagagaaacagtttctctccgaagttgaatatgcggaagaactagccagcactgtgggacagatagctgatggtacagagatgccagatgcaatcgaaatgatatttcagtctgctttacttacaggaaggcgaggcggtgttgatgagatgtttgggaaagcagcggatgccatgactgggtatacgagggcggtatccatgctgcggtttctcctgatcgaggcaccatcacttgccctcaaccctcctttgactctgacaagatccgatcggcatcgacttcgcacatacattgaagctctcaacaccaggctctgtcagatgcagagccagaggcattgactgctgccatgtgtcctcaaatcttgttcaggttgagggacggtagacttgtgcaatattttttcatttgtaaatatatttgttggcccaagataggacatgtaagatgtcagaaatttggaactaggcagagcagcgaaaatctattataactcgaccagactactattatgatatggaattaggtggagtgtacgtgttaggttcattctgtgtgaattcaggcagaagcttgaaaacgaaatgaccaatcatggtcacttgtggaaatgtaaactacttcgtagattc

SEQ ID NO: 35835 - DNA, 573 bp, Zea mays subsp. mexicana
  Clone ID: UC-ZMROTEOSINTE005A10_FLI
gccggttgccattggaggccctggtcttcaccccggagtgaaattccggaacgacattcaaatccctgggctcgccaatgtagccgcaactgtgatgaacctccatggatttgaggcccctgctgactacgagcaaaccctaattgaagtggctgacaactaaatactggccagctatgtccaattttggttctatagttttgagaagggatatggccatgccattcaataatttctgtttgcaagcacgttgctcaaactcaccaaaacattgagaaacgccttttgacttgcatttagatgctctatttataccgttgacaatcgtctcttctggcttttagcagtttgatggctatctttacttagctatataatgtatctgagactgcaaactttgtgtcagtcaaactgctcgaggttatatgctgtttgtgtgggtcatcacgtgtgattaccttcgcacgcattgacgcatgaattgtgttcaccattctaattgcaaggcattttgatgggctacaatgtttgggagcaagataatttcagccccttcattcgcctagctctccc

SEQ ID NO: 35836 - DNA, 1132 bp, Zea mays subsp. mexicana
  Clone ID: UC-ZMROTEOSINTE005D12_FLI
cgaggaggagggcccccggagagtgcgcaagccctacaccatcacaaagtcgcgcgagagctggaccgaccccgagcacgacaagttcctcgaggcactgcagctctttgaccgtgactggaaaaagattgaagcatatgttggctccaagacagtaatacagattaggagtcacgcacagaagtactttttgaaggttcaaaagaatggaacaggtgagcatttgcccccacctaggccaaagcgaaaggctgcccatccatatccacacaagtcctcaaaaaaggcccttcaagttgtcttaccacaacaagtttcacacataatggagcaaggctgtggtacacctatggatgtagctactgttgctacagactctagtgtaaataatgcttttcctgttcaacatttcagtccgaggcatacacaagccatgccagactttgctcgtgtatacaacttcctgggaagcatatttgatccagagacaaatgggcatttgcagaagttgaaggaaatggatcccattgatgctgaaacggtactgttgctgatgaaaaatctgtcaatcaacctaactagtccaaactttgaggagcataggaggttgctctcttcggatgcctcaagcatggatcaagagtcgggctcttcccgcgttcatctcccgttcatgataacgagcaagtgagagaagcagctggctggcctgaaggcaagaaggtcgtttggagtcgtcacactcaggagcaaggcgatgcgtatgtacatatatcttaataagcagctttaggatagcttggtttgctcgacccacatgttgcaagtttatgcgcctttttctttattctctgcccctccagttttgcccattgtagtactagtatggaacttataacatgcgtgttttatgccgcatcttacaaaaattttttgtcccatcacaaggatgaacgggtggggcatgtgtgtgtgttttttgccgtgtgtgtatgtatacaacatgcggctgtgtgtagatcaggctatatatataacagactctgtgctgttctattattgccctcgtttcaaatacttgttttttttgccgttattaataatattattacatggagtatggtattagtat

SEQ ID NO: 35837 - DNA, 591 bp, Zea mays subsp. mexicana
  Clone ID: UC-ZMROTEOSINTE005F08_FLI
gtgagcacctgtgcccgactcaaccaatctactcgctgctacaacagagtttgcctgttgccttgcttccacctcccggctgcagctgcacctgctgctcgatcggatcggccgcgcgcggcatgtcgaccaccacccccaccaacgccgcctcccagcagggcgacgacgctgcggctggccgcgcggacaagaagccggcgcaagagacggtgacgaagacggtgcagacggtggaggtgcggtcctcggcagggcagcccgacgaggagggcgtgctcaagcccgtgaaggtggtgcacgagatccccgccaaggacagctccggcgtcaagcaggactaggactagctaagctgcctagctcgatcgatcatctagctaggatcgatgctgctgctgctaagctgagtggatttgatgctgctgcggtcagaaatcttatcgtcatttccaccccccaaccagatcctagctagtaattgcaaataaacaaatgttgcgttggatcctaatgtgaattagtgatctgtgcggcctgccgcttcatttgtaaacatgtactaataagacgcctgattttgtgttcgac

SEQ ID NO: 35838 - DNA, 429 bp, Zea mays subsp. mexicana
  Clone ID: UC-ZMROTEOSINTE006A12_FLI
cgtcgaggacgccgccgtcttcgggctgccggacgaggaggccggcgaggtcccggcgtcgtgcgtggtgcggcgacgtggcgcgccggagagcgaggcggacatgatggcgtacgtggcggggcgcgttgcgtcgtacaagaagctccggctgctgcgattcgtggacgccatccccaagtcggtgtccggcaagatcctgcggaggcagctcagggacgagttcgtcaagaagacggcagcagcgtaataatgcacatcatcctgtgggtggctgcttgcttatgccagtgcaagatcctgcgttcgccacttgatgaagacaataatacaattagggtacagtcagatgttccaagctactgatacaattgttgtttctgcaaacagtactcccaactagtgcatatacattgacattgtggaccc

SEQ ID NO: 35839 - DNA, 1363 bp, Zea mays subsp. mexicana
  Clone ID: UC-ZMROTEOSINTE006B07_FLI
tgcacttctagctgtgatatcaaggagcaatgttgtgacaagccatcccccttggttaaggactcgtcacaaatcaatgtctgtgatactgcactttgtcatccaaaagatatcttaagccgattaacacttcctcatcaacaagatctggactctcttttaacacctggaagtgagagcacagctgcagttaagccagttcgtggagctagtttaccaccatttccttggtcacactcacaggctgggggctgtcgacaaagtgttgactgtggtaaacatgggtcaagtagaagttactcccagtggcaatgggtgcgggttggatccaacctcacttctctagattatgaagatacgtctgtccatagaattgatcatctccttcaagagatggatgcagcaaaattatgtagaatggattcatgtgatgggcaatataatttgtgtggcacggaatcaacatctggatcacttgcacaaaacattcaatccagaaaaaatgggggtgagcatggttctcagcaactgcaaaccctggatcgtgttgactctttagatggcttccagaagcatgacagtgaacattctcttttaaaaacttctcaagtatcgccaaagatacagcatgccgctgaaatcttatgtgatatgagaagaagcattgaatcgttgagtggccagggatacagcaatggggtgattaagtggccaaaatcaccatccgaaaaggtgatgaaagcacggaagccctcatcccagtttggtataactgagagctcatcaggttctcgtaacaacgatgcaacttggaacggtagcagtcactctaccaagaaattttgtgacaggaagaatgattctgcatgcttgaattaccctggtaaggaaactataaggtggcctgtgcctgtggaaggtggcgcttctcctgtcaggtcgtccgagcgcggtcctatgctcgatatgaggcagccccatggaaatggtggaagacatcctgttcaggtgccatcacaggtggcacggcttgaaaaggagtatgagaaccagcagaagttgaggaaagcaacactgacctcgtctctagggcctccgggagattggagtagggagaggaacaggagggtgtgaagtctgtacattattcatgtcaaaaatcataggctacggtatatcgtctgggggggaacagcggaaccaggcaactgtttcataagaggtctcagaacatttgggagatgtgataatttaggtggcgggtgatgtatctattgggccatttgttgttggggaaaccgttgtaactagtgtaaatttcgttttttattaccatcatatatcacaggtctcgtctcactat

SEQ ID NO: 35840 - DNA, 1146 bp, Zea mays subsp. mexicana
  Clone ID: UC-ZMROTEOSINTE006D03_FLI
gtcccgtgcctcgcctgtggcaggtcttctaaggactttgctgatgtccatggacttgtcatgcatgcttacaacccaccaaatgcagattcacttgttgatcatcttggtttgcacaaggcattgtgtgttcttatgggatgggattatacaaaagtccctgagaactttaagggctaccaatcattaccttctgaccttgtccaagcaagtagggaggacctcattgtctggccgcctactgttatcattcacaatacttcgactgggaggaagaaagatggtcgcttggagggtttagggaacaaagaaatggataaaaaaatgacagaactagggttttctggtgggaagtcgaagtccttgtatggaaaggaaggacatatgggtttgacacttatcaagtttgcaaacaactcatctggcttgaaggaggctgagcgtcttgctgagtatcttgagaggcaagatcgtggacgtataggttggtcacgcgctcatgccagtcgttctgtagattcagatcagaaccctttgttggtcgagacggataccaggacagctgagaaaaagaggatactttatgggtacctagcaattgcatccgatctggacgaactagactcagattctagaaaaagggcttccctccagagcagaagagaattcgacccaaacgaatgatctcttgtcataaagcccacccccatcagttcattaaatttgcactgaggcgtgcatacctatctctgatcccaatttataaattcatactgctgctgtggagaaaaggtgttaccttgaatataatatctgccgctagttgagttataaccactagttctggaagctgtatttgcattatgtgtattttcttgcacgcgtctatggctcacgatttgactggctatttggaagagatctgtcttcctatttaagtatcgcccgttgcatgattcattgctcttcatttggaagtgtgatgttgcatagacctcctgattggtatcttttatgtattatagcattccctttctttcttgacttcccatgaatatttaaatttctgctaagacggtagtggctacatattccttggcacttctgaacatgtctggttctttgaatatcagagtatattgttgt

SEQ ID NO: 35841 - DNA, 1335 bp, Zea mays subsp. mexicana
  Clone ID: UC-ZMROTEOSINTE006D05_FLI
tttgaggttgccacagaggatggtacagtactcgccatgaaacttcataggctgggaaggacatcttttagggctgtgaaatctaaacgtgactatctgaggcacagaaggagctttaattggctgtacctctcacgacttgcagctttgaaagaatttgcctttatgaaggctttaggggaccatggtttccctgttccaactgctgtagattgcaatcgccattgtgtgatcatgtcacttgtgcagggatatcctcttgttcaagtgaaagagttacaaaatccagatgacgtttttgacacaattcttggtcttattgttcgtttggcagagcatggactgatacattgtgactttaatgagttcaatatcatgattgatgatgatgaaaaaattacggttattgatttaccacagatggtatctgtttctcatcgtaatgcccaaatgttttttgaccgagacattgaatgtatctacaagttctttaacaaaaggttcaatctgacaacagagaaaaatgaagaacaagctgggtctgaaagtgatgatgaagggaatagcagaccttcctttttgtctgtgaaaaagactgctggttccttggacaaggaactagctgcaagtggatataccaggaaagagcaagtggagatggacaagtacattgaggaagatgctgaaagacatgattccagctcagatgatgatgatgatgacgacaatgacaaggttggtgatgctgtgtctttggtttccttgaagatagaccaggacgattctgctgagcctgattgtaatcttgcctcaagggattcagatgtgcctggaactttttctgaagagcatgaaacaagctgtagcagtgagaagagattggaaagtccctcggatgacaatggagaggctatgaaaccgcttgaatctgatggcaagacgctttcccagaaagacgacaacaatgatgatgactcatcagaggatgctgatgaagaagaagaagatgccgagctcatgaaacaattgaacaagcaaaggaaaaaggcaatagcagctgccagtggtcggagaaggccagtgtcgtccaggaacgcctacaaggacaagggtaagggcaccatgaactccaaaatccagaggcaggcgtgccagtggtgatggtcactcgaatgtctgcagtgcctctttcgacaatggtaaagtagaccatgagtaggattttccatgagtgtagaaccgagggatccctgtactagaatcaactctggttttattcttttatcacatgtcgtatacctttttgtacacggttatggtgagatcatttgagtt

SEQ ID NO: 35842 - DNA, 688 bp, Zea mays subsp. mexicana
  Clone ID: UC-ZMROTEOSINTE006E07_FLI
ttgagatggtttagacatgttcaacggagacctacgtaggcacccaatgcataacgggattcaaagacgtgataacaatgcgaagagagagatgaaaaaaccgaaattgatatttgaagagatagtaaagggaggtttgaaagaatgaaatattaccaaagatttagccctcaatgttttgttgttattgtaccaaagaatggaaaatactgcaggggactaaaatgttttgttgttattgttgttttttgtaagcatagatattgtgctaatgctccagtttgttctactgcttcagagaataaaaatgttgttgcataattgattgccaataggtaaatgaagacatccagacaagagcatatctaagcaatgtctgtgttgccaaggagcttcagaaaaaaggcttaggctatacattagttgacaaatccaagaaattagctcttgaatggggcataacagatctgtatgttcatgtcgccatcaacaacgtagcagggcaaaagctgtacaagaagtgtggatttgtttatgaaggcgaagaacctgcatggaagggtaggtttctggggagaccaaggaggctgcttctttggcttgatatgagcaaagtgcttgtgcgatcgtgcatgtaaatacatatttagctatttgtaatcatattattgcaattgttggttttaat

SEQ ID NO: 35843 - DNA, 1006 bp, Zea mays subsp. mexicana
  Clone ID: UC-ZMROTEOSINTE007C06_FLI
cctactggtgtcttcaccttgtcagatgtgacaacacagtcatccacaatgtgtcgatatttggagattttaaaactcccaacaatgatggcattgacattgaggattctaacaacactgtcataactgattgccacatagacactggagacgatgctataagcccaaagtcgacaactggaccagtttataacttgacggcaacaaactgttggatgcggactaaatcttgtgctatcaagtttggaagtgcaagcttcttcgacttcaaaagactggtttttgacaacattacaatagttgattcacatcgaggacttgggatgcagatccgggatggagggaatgtgaatgatgtggtgttttcaaacattaaaatgaggaccaggtactaccatcctttatggtggggaagagccgaaccaatctatatcacaacttgcccaaggcacccagattcaaaagaaggcgccatttcagacataagattcatcaacatctcatcggtatcagaaaatggagtttttctggctggatctaagcatgggctgctccgcaacctgaaattcaagaacatagaccttacctacaagcgttggacaaactacacgggagggctctatgattacaggcctgggtgccaggagatggtgaagcacaagactggtggcatgatgctggagcatatctccggtctggagattgacaacgtgaggatgagatgggcgagaggaagcctgaagggctggaatgttaaccctatcctcttccggccatcaaccatcgataatctgtctttccatgactggcagtcagtggatgttcagtaaatttaagtggcacagttgtattacgtgtgtatctatcagaataaaggggtgattcttttgtgaaatattgaaatgtgttaataataagcaatcccaacagcatttaagcttctgcagggactggtgtggtttgctataataattttataaatctgaattcaaatgtttgattgttc

SEQ ID NO: 35844 - DNA, 1578 bp, Zea mays subsp. mexicana
  Clone ID: UC-ZMROTEOSINTE007C08_FLI
cttgcccctttgcatcagctgatccaacaagctctacaccagagaacttctcagcatcctgcctaaaatcatatgcaacaggtgactctgagtggtcagcatttgagtggatgcacactgattgcctgccagatttgatcaagcttgcctgcttgttgcctgtgaaagaagataacttaagaaccatcatcacaaagtacctcttggaagtatctggactctacggtaaagattatctggagcacattatgctacctgtatttcttgtagctgctggtgacattgatagtggcgattttacctattttcctctatcaatccagccaaaagtccgtggcttgcgtccgaaaacttcaactgctgaaaaacttgccatcatgtgtgtcttcccattattgttatctggtattttgggttctccttccagtcgtcaacagttggaagagtatctgagaaaagtacttatccaaaacaccaaggatggttcattttctatgcatcatactactgagatcattaacgcagttcggtttctttgcttatttgtggagcaccatagtgtcatctttaacattttgtgggagatggttgcgagctcggataccagcctgaaaataaatgctgcggctctactgagagcacttgtaccctacacggatgtgaaaatagcatcaactcatattttgccagcacttgttacccttggctctgatcaaaacttgaaagtaaaatatgccagtatagatgcatttggagctgttgctcagcatttcaaaaatgacatggttgttgacaaaatacgcattcaaatggatgcttttcttgaagatggatcacatgaagcttctgtttctgttattcgtgcacttgcagtagctgtacctcattcaacagataggctacgtgaatatcttttaaccaagatatttaagatgacatgcatcacacctgtcggcaatgatattgaacggcgtcgtgaaagagcaaatgtactctgtgaagcgctccgggctctggatgctacagatcttcctgctatgggtatacgtgatttgcttctgccatcaatacaaaatctgttaaaagatctggatgctctagaccctgcgcacaaggaggctttagaaatcataagccgggaaaggtcagggggtacgctggaaagcattagcaaggtaatgggggcgcatcttgggattgcatcatctgtcagcagtttctttggtgagaacagtctcctcacaaagaaagaaggtggcgaggaacatgatcctgctggccccaccgctcctgagcaaaacctgcaggctcagccagagagcacgaggtttggtcgcataatgaggagcggatttggagacatattgcgaggtcaaagcaaaggacagtgatgcacttagattgaaatgatcaattacatacatagctgccgataccacattctttctttgtaagttgacagaatatacctcaagggttgtatgttatttgccgaggtaaaaaaaaaacgatttgacgttgcaaatctagcatcaaacttcctgtatgtaagttgcctgtagttagctgctcatttat

SEQ ID NO: 35845 - DNA, 1574 bp, Zea mays subsp. mexicana
  Clone ID: UC-ZMROTEOSINTE007E12_FLI
ggcaaaaaactgatggctgaatctgcaaatactgtgaaaaaggtctctttggaacttggtgggaatgcaccttgcattgtttttgatgatgcagacattgatgttgctgttaaaggcagtcttgctgccaagttccgtaacagtggacagacatgtgtttgtgcaaacaggatattggtgcaagaaggtatctacgaaaagtttgcatctgcattcatcaaggctgttcagagtttgaaggttgggaatgggctagaagagagtacatctcagggtcctctgattaacgaagctgctgttcaaaaggtgcatattttggccactaatatgttccaactacttagtctcccgccctccctcctccatccctaaagtgagcaattactcatgctttatttcattatttgttggcctatttccaccccctctaggtggagaagttcataaatgacgcgacttcaaaggtaatctcaaatcatctaagaatgtgcattttcccttccacaatgggagggttcacaaaaggaaaaaaggaactggactgatttcctgcttctaggacgtgttggtctgtctgcagttcactcaggacagaccagtttcttgaatttcttttggctgagatcagatcaacctgaattggttaatatgtgggtttaagttggaatatctggttctcgcttacttcattgagaccttaaacatggtttttggtgttttgttgcctctctttgtaatgcatgtgaagtaccctctaatctatttgtagggagcaaatgtcatgctaggtggtaaaagacacagcctggggatgtcattttatgagccaactgtagtagggaatgtcagcaatgatatgcttcttttcagagaagaagtttttggtccagttgcaccccttataccattcaaaactgaggaagaagctgtccatatggccaacgatacaaacgcaggcttagctgcatacatatttaccaagagcatacctcgttcatggcgtgtatccgaatctcttgaatacggcttagttggggtaaacgaggggattatttcaacagaggtggcaccatttggcggagtaaagcagtctggtcttgggagagaaggatcgaagtacggcgtcgacgaatacttggagctcaagtacatctgcatgggcaacttgggttgagtcatgaaatcggcctcaggctagaaacgcatggaagagatgatgaaccgagagaccaagatggcaggcgtctagctacaagaccggaggaacatggctgaaaggggccggccactggttgtgggggagcagttttcgaataaagcgaataagccgcggaacatgaacaaaagaagccgaaatgagttgtaaatgacgtgaactataaagtatggcttcgcctccggacttttgtatacgtaatcatggcactacttgtctatagtgtctccaaagacgtccatgttacagaataaaagcgtatagggtggatgctacattacaggctgtcggtggtatgtacacctcgcctgattcctgacgaaataaagctggatactgcattcttgcctgcaggggt

SEQ ID NO: 35846 - DNA, 1267 bp, Zea mays subsp. mexicana
  Clone ID: UC-ZMROTEOSINTE007F06_FLI
ccgactttgtcatgcctttcttcctcttcatcgtcggagtcgccctggcgctcgcgtacaagagagtccctgacaagttggatgcctcgagaaaggcattgctccgtgcgctgaagctgttttgtcttggtcttgttctacaaggcggattctttcatggtgttcgcagtctaagtttcggggttgaccttcaagaaatacggctgatgggtgtactgcagagaattgcaatagcttatctgctgaccgccctctgtgagatttggatcagaggagatgaagatgtagactatggatacgatttgctcaagcgataccgctaccaactgttcgtaggtgcagtcgtggcgatcacatacatgtccctgttgtacggtacctatgttcctgactgggagtaccagacatcagctcctggttccacagagaagcatttctttgtgaaatgtggagtaagaggtgacaccagcccacgctgcaatgcggttggtatgatcgaccgtaaaatcctgggcattcagcatctctacggccgacctgtttatgcacgatccaagcaatgcagcatcgactcgccacaaaatgggccccttcctcctgatgctccctcttggtgccaggccccttttgaccctgaagggcttcttagttccgtgatggctatcgtcacatgcttgattgggctccaatacggacacgtcatcgtgcattttcagaaacacagggagaggatgatgaactggctaataccttccttcagcatgctggtcctagccttcgccatggacttctttggactacacatgaacaagccactgtacaccctgagctacaccttaggcaccgccggcgccgcggggctcctcttctccggaatctacacgctggtcgacatctacgggtaccggcggccgaccgtcgccatggaatggatggggatgcacgcgctgatgatatacgtcctgatcgcttgcaacgtcctgcccatattcatccacggcttctactggaaggagcccaagaacaacctgctgaagttcatcgggattggagcgtgaggcgatggactgacgacggtacacgattacggatatcgtttaggagtctatttggacagagatagagaagcacgtgcgttcaggccaagttttgctacacggccaagtgctgcagcgcatcattgttgctgcacagagcgcctttctctgtgagctcttgtatatatgataaaatgagtgttgcatataatgacgacacgatttgaaag

SEQ ID NO: 35847 - DNA, 551 bp, Zea mays subsp. mexicana
  Clone ID: UC-ZMROTEOSINTE008A01_FLI
gccgtcgtctgctgcggactccgcctccagtttgctctgtttcttgcaagttgctcttgcggtagttcccccaactgtcaccatgcagaacgaggagggtaagactgtggacctctatgtccccaggaagtgctcggccacaaacaggatcatcactgccaaggaccatgcctctgtccagatcaacattggccacttggatgcgaatggcctgtatgatggtcacttcacaacgtttgctctctctgggtttgtccgtgctcagggcgacgcagacagctccttggacaggctgtggcagaagaagaaggctgatatcaagcagtagattttacatctagtttaccaagaattggacactgccttagctatgttttgaattcatgtcactatatgcaatgttgtgatttcagctggtaccttaaatctgaagatttagtatctttgttgggttccttctgagtttgatgtgtggtgttcaattcaaccgtccagtggcaccgaaatatgctgttggggtagtttcattcaaaaaacgtgccattcaattc

SEQ ID NO: 35848 - DNA, 826 bp, Zea mays subsp. mexicana
  Clone ID: uC-zmroteosinte008b05_FLI
tcagtttgtttgcgcgaaaaaaggttaggaatcctcttgtgtcctggccgtcggccgtcgctgcgtcgttccagatttgggggaaggaaatccggcaccgagattcgagtcgaaaaggacatcatttgctagatggcgcgtaccaagcagaccgctcgcaagtccacaggaggaaaggctcctaggaagcaactcgctacaaaggcagcccggaagtctgcacccacaactggaggagtgaagaagcctcaccgttaccgcccagggactgttgctcttcgtgagatccgcaagtaccagaagagcactgagttgctgattaggaagctgccgttccagaggcttgtgagggagattgctcaggatttcaagacggatctgcgcttccagagccatgccgtgcttgctctgcaggaggcagcagaggcctacctggttggtctcttcgaagataccaatctgtgcgcgatccatgccaagcgcgtgaccatcatgcccaaggacattcagctggcaagaaggatccgtggcgagagggcgtaagtctgtcgacgggaggaagaactctgcgctcgttttgtgtgttcgcttctctcaccctgtaagttttatgagaagataatctagtaaactgtacttggcctgtttgactgtagccgcagtagcatatgcatgcgcatactgttggctgttggcgtgtctggagtcttttatccatccattctagtactacttaataatcgtgatatatcaacgggttgctgaacgtgtatccagacttaactgtgtgtttggctgtctgaacctctgagtcgttattgatgtc

SEQ ID NO: 35849 - DNA, 598 bp, Zea mays subsp. mexicana
  Clone ID: UC-ZMROTEOSINTE008B11_FLI
tgatcatgtccctgtcatgcatgcgaggaggcaaaggtcgctgcggcctgtcgaagctttttctcctgcctgctattcttccggaggagggagagaagaccgatcatgggtcagcgtcaccatggttggaacaaagtccccggattggattggatctcagtatacatgagacatgcatgagaagccccctaccccttttttctcttttttttttctttttcacttctactactagtatttatctttctctttttttttctagcttgtttttcacctttactttctttggacaaagagggggaaaaagaagcaacttccttgaaggcgaaggtaggtatagtagtaattatcaatagtggtgggcataagacatgatggtggtggttgttcatggggtttatagtaaggagtagctcaagaagggtggctctcatgtcatggctccccccttcttggtgctccacaatgtgatgatggtatggaggtggcatggtagaaaagcttggtgaatctcaatgtgctctcgagtgccgtgtctgtccctagtggaatggaatgtctctggtgtcccccgctatttttttttaaaaaaaaaaac

SEQ ID NO: 35850 - DNA, 2304 bp, Zea mays subsp. mexicana
  Clone ID: UC-ZMROTEOSINTE008C02_FLI
acatccttgagcatggagcagacataaatgctgtggatcacactggacaaacagcacttcactggagtgctgtacgtggtcatattcaagttgctgaactacttctgaaagaaggagctaaggtggatgctactgatttatacgggtatcaggccacgcatgttgcagcacagtatggtcagactgcattcatttaccacattgttgcaaaatggaatgctgatccagatatccctgataatgatggaaggagccctttacactgggctgcttataagggatttgcagactccatacggcttcttttgtttttggatgcttataggggacggcaagacaaagaaggttgtactccattacattgggctgctattcgggggaatcttgaggcatgcactgtcttagttcaggttggcaaaaaggatgatttgatggtgaaagacaaaactggcttaactccagcacagcttgctgccgataagaatcatcggcaagttgcatttttcctcgacaatgctagaagggtacacggcaaaggatgtggtgcgaacaccagatttgggaaattgtcaaaattagggctcgctcctcttctttggtgcaccattattggcatgcttattacatacacacactctgttatatcaggacaatatgccatgactacgacagcaccatttgggatattcgcatggtcaggagtttttcttgcaactgctggcttggtcatgttctataaatgtagcaggaaagatccaggttacatcaacataaatgcaaggggctcgcaaaatcaaagggatgatgaaccgttgctgaagatggagttagaaaatcctgcacttctttctggcaactggtcacaactttgtataacctgcaaaatagtcagacctgttcgttcaaaacattgttctacatgtgatcgctgcgtggagcagtttgaccaccactgcccttgggtatctaattgcataggaaagaagaacaaatgggaattcttcatgttcctcactctagaagtttttgcaatgatcattactggctctgctgccattataagaattgtaagagatccaaattctccatcatcctttggtgcttggattcattattctgcgtttcagcatcctggggtggtttcatttctcgcattggattgttttcttttctttggtgttgcagttcttacagttgttcaagcatcacagatagcaaggaacattacaacaaatgagatggcaaactccatgagatatgcatacctcagaggcccaggtggcagattcaggaatccgtatgatcatgggattcgcaagaactgctctgacttcttgttaaatggatacaatgaggacactgaacggctagagcagacattgcccactgatgaggaaatgggaatgatacagatgacaagtgcagtttcgcagcagaacggtgacaatcatttacatcatggtaatggcactgaccatagttgcgctgtttcacaagcaaactcaaaacctcatagccaagtgggttcgtctcagtgttgtgaccacagtaagaggactgataggacaccgttgggcctaggattgggccttggacgaaacagtgcgtcccggcagtatgttcggtctcttatcccattgtgatccatcatttggcgatcatgtgtttgtttgactgtagattggatttgttcacttattctgttatacgtgcccttgacatggttcaccatggctgggcagggttaacgttattgtgccatgagctccggaatactaagatatatctggtgttgtagtttagcgttgaactcagagaagttgaaggtaacgacctggtttgcgagtatcagctgatcagcagtctggaatcagagagtttgtgcagaaaatgtaagagttatggactcatggcagatgcagtagcatgagatgtcttcagaattgttgtgtacatcaggttcggtggtacccccattgtttagcgtgatacgagtttggaaaaaaaaagtagtcgtaaattgagaaaattgtaaattgattagtaagttcactgcaacactagctgttttcctagttttcattcatttttgggtctggttattgttatgaaccccggaaagaattttcggttttcgggtatgggtacctcagttatatttggtctggttatggtacttactggtggtgcatgtttgtgtgagtgcttagagtttaggctatggccatcagatcatgtatatgactatatgactatgtaaaacactgttttttatctgattgtgtaaaacagtgtttttgtatc

SEQ ID NO: 35851 - DNA, 861 bp, Zea mays subsp. mexicana
  Clone ID: UC-ZMROTEOSINTE008C05_FLI
cacaccaccaccgctgcacacacaaaccaaccacaggcaataaacactagacagctcccactcccagtaaatttctcgtctcccaatctccgattcgaggaagccggaggaggggatttcgagccgcggcatcgggacattagagtggccctcacccggcgctggaattgccgagagggactgggttggagtggagttcgggaggtgtgagagaaggcggggatggggcggttgttcctgatgcacctggacggcaacgtctacagctgcaagcactgcaggacccagctcggcgttgccagcgacatcatctccaaggccttccactgcaggcacgggaaggcgtacctcttccataaggttgccaatgtgacttctggagtaaaagaagatcgcatgatgatgacaggaatgcatactgtttctgatatcttctgtgttggctgtggatctattgttggatggaaatatgaagctgcacatgagaagagccagagatacaaggaaggaaagtttattctggagaggtacaaggtgtcgggccctgacggaagccaatactggattccacaagatcctcacttgggtggaagcgacgccgatgatatatgaagcgcaagtcaacaagttcaagcctgctgttcgtcgcctcccctgtagataacctgggtgtttttgctctttagtcagccgggattgctcccattgaaataatccccggcataaattattgttgttcttgatgacatgatcatatccttcctattgcccttggaagttgttggatgtttctattgtatatgcgtaaccggtgttgcttataagttcatcgagttgtatgccaagcgctaatgaccaaat

SEQ ID NO: 35852 - DNA, 643 bp, Zea mays subsp. mexicana
  Clone ID: UC-ZMROTEOSINTE008D07_FLI
cctcgtgcaggtgtcgtacgccatcggcgtgccggagcccctgtccgtgttcgtcgactcgtacggcaccggcacgatccccgacaaggagatcctcaagatcgtgaaggagaacttcgacttcaggcccgggatgatcagcatcaacctcgacctgaagaagggcggcaacaggttcatcaagaccgccgcttacggccatttcggccgtgacgacgccgacttcacctgggaggtggtgaagcccctcaagttcgacaaggcatcggcttaaggttgggagtgttcattgtggacatgaggactaccttcctctggctctgctgttacctgcaagcattgctgctgctggatgtgtgtgtttgatcagtgactggctgctgctccatagaagatgaacggagagaaggatgatgaagaagggctttggcaatcgccgctgcaactgcaacccatgccatgccggcttagtgattgggtataatttggcttagcagtagccagcattattatgtgctgatcttttatctttactagtttggtcgtccgatatcttcctttcttttccccacctttttcgactctgtactgaaactgctgagagattcgcagtattgttgtatcgtattcgtatgctactgtt

SEQ ID NO: 35853 - DNA, 1272 bp, Zea mays subsp. mexicana
  Clone ID: UC-ZMROTEOSINTE008D10_FLI
cgagaagacaaggaagtatttattggcttcacaagctttctttctccaggcattattttcaggtgtaacttagcatctacaatccctgaaatgaagatgtttcgagaaatttcagttcctggatttgatcgcacaagttttcaagttaagcaggtttttgttcctagcaaggatggaaccaaaattcccatgttcataatgtcgaagaaagatatcgatcttaatggatcgcatccaactttgctatatggttatggaggattcaacataagcataacaccttcatttagtgttggtcgcgttgtgctatgcaagaacatgggctttgttgtctgtgtagcaaacattcggggtggtggagagtacggggaggagtggcacaaagctggagcacttgcaatgaaacaaaattgttttgatgactttgctgcctgtgctgaattcctcatttctaatggttacaccagttccagacgtttatgtattgaaggcggaagcaatggtggtcttctggttgctgcttccattaatcagaggcctgatctctttggatgtgctctcgctcatgttggcgtcatggacatgctccgttttcacaagtttacaattggtcatgcatggactacagactatggttgttcagataaggaagaagagttccagtggctcattaaatattctccccttcataatgtacggagaccttgggagcaaagctctggtaataactgccagtatccagcaaccatgttgttgacagctgatcatgacgatcgtgttgtgccattgcattcactgaagttattagcaactttgcagcatgtcctgtgtaccagcactgaggacagcccgcagacgaatccaataattggtcgcattgatcggaagtcagggcatggagctggcaggccaactcaaaaaatgattgacgaagctgcagacagatatagctttatggcaaaaatgttaggggcttcgtggactgaatagtgaattttgtccagcttagtgtggagatggtgagcaagattactctatgcagtcaaagtaaagtggctgtaaaagttatattgcttatgttttgctcttgcttggatgatcatccaccaaatagtatagtgtttatgcttcggtttgagataagggttcagggagcattgtcatgcttggcgttggtgcaccatttctttcatatatatcttttgattgttaaattttatacgttactacttcattgattctaaattataagatgttttggttttttcagat

SEQ ID NO: 35854 - DNA, 897 bp, Zea mays subsp. mexicana
  Clone ID: UC-ZMROTEOSINTE008E09_FLI
ggcaagctcgcgcccacggtgcagtgcctcgccacgctgcaggccaggcccggggaggtggcgcaggccatcgccaagttcccccagatactgttccacagcgtcgaggagaagctctgcccgctcctcgccttcttccagacgctcggcgtctccgagaggcagctcgccaagctgctcatggtcaacccgcgcctcatcagctacagcatcgaggccaagttctcgcagaccgtcggcttccttgccggcctcggcgtcgacagggaaggcatgatcggcaagatcctcaccaaggagccgtatatcatggggtacagcgtcgacaagcggttgcgccccactgccgagttcctcaagtcggaagtcgggttacaggggccagatctccagagggtggtcatgaccttccccgatatactgtcgcgagacgtggataagatcctgcggcccaatctggcgttcctacagagccgcggattcagcagggatcaggtcacggcactggtagctggttaccctcctgttctcatcaagagcatcaaacattgcctggagccaaggatcaagttcctggtcgaagagatggggcgggacatgggcgaggtggtagattacccccagttctttcgccatggcctcaagaggagcctggagtaccgccacaaggtgcttaagcagatgaactcgagctgcagcctcagcgagatgctagactgtaaccacaagaagtttgccatgaaattcggtttggtcgcagcagtttaggtactcaacttttctctagtccaatccaaggtagtttgttttattctcaggtgaatctttccgtttgtaccgtcaggttgtactgttcttttgaacatttgggcaatgataactaataatgcaaggtcc

SEQ ID NO: 35855 - DNA, 1055 bp, Zea mays subsp. mexicana
  Clone ID: uC-zmroteosinte008f10_FLI
tgttcgtgtggatattgggtgcacaaactgcagggctgattctacttgcaaagaagactgtgaatgcaggggtctttctatgagttgttccaagaattgtcgctgctcagatctatgtacaaacaggccattccgcaaggataagaaaattaaaattgtgaagacaaagcgatgtggatggggtgctgttgcgttggagccattggagagaggtgattttgtaatcgagtatgttggtgaagtcattgatgatgcgacatgtgaacaaaggctttgggatataagacggcgtggtgacaaaaacttctacatgtgtgaaatcagcaaagattttacaatagatgcgacatttaaaggcaatgtgtcacgttttctaaatcacagttgtgagcccaactgtaaactcgaaaaatggcaggttgatggtgagacaagagttggtgtctttgcctctcgttccatcgaagttggagagcccttaacttatgattacaggtttgtgcattttggagagaaagtgaagtgccattgcgaagcagtgaactgccagggatacctgggcagccaaataaagaacccaattcaaagcattcttgccactgtagcaccgcaagtgcagttgcgagagtattcgcccatgcaccacgaagctccaagattgaagccaataaatcacttgttaccctggaccaactgtatagaggtctcttttaacctgagaagcaaaaggaaaattgaccggctatgctgggcccgcaagaagaagagaacatccctcgtgccatcttcaacaagcatgccagcatcggcgagtgaagttcctgccgcggatttctaactgcccttcgttgaagagcaagcctgccctgtataataatttcatggtacattctttacatgcattggttggaaacgattctttcacattgctcatcaatggtgttgtaacctgcaacattctttatttggtttcatagggcattcagtcagtttacgggtggtagtttgccggaacatgtacccaatttttctgatgaaacaaatgtttgagcttc

SEQ ID NO: 35856 - DNA, 838 bp, Zea mays subsp. mexicana
  Clone ID: UC-ZMROTEOSINTE008G02_FLI
cagcaagcagcacaccagcacccagaagcagaagctcctatatcctgagctcctggcacagcaacaatggcgagacccagtgcagctgctgccggcggcttcttactggcttgcgccgccctgctcttgttcgccggccaaagcaacgcacaaacaaccttcatcttcccattcgcatccctctttcctgtaggttacgtgccgccgatagtgaggatctacagcaagcagaataccgggctgaacatggccgttcgctacggcaaagttgtcctcgtcacagccaactcttgggaccaaacacagctatggtggaagatcccccctctcacgagcctttttgatggagagggcgccaagtactggctggtgaacgtcgcaaccaaacaagccatgacgtgcccaaacggtccaatgcaggtgcaactggcagaattcaacccttacaatggcgcgcagatgtgggtgccgagcacaccccgtctccaggacggcgtcttctaccagataaaaccatacactcagaattccaaggccctcaatggcttggggggaaatgtacatgacggcacagagatcgggatatactctgacacacctgtgtcttccaacaccttatggttcacaagcaatgtcttcccctttccgttctattaagaatggcgaatgaacatcaagggccctcgtgtcgtacttgttgttgcgtgcttgatcaagaataaagacgatacttgagatcttttctttcttttttttttcaaaatgtgatgcttacttgtgtccatgtgccttgcatgttttcacagaatttgttgtctctttttttcttcaaaatttg

SEQ ID NO: 35857 - DNA, 475 bp, Zea mays subsp. mexicana
  Clone ID: UC-ZMROTEOSINTE008H12_FLI
ctgccggactcccccaagtgctcagcgtcgacggagggggatgaggactcggcctccgccggctcccctccttccccgacgcaggcgccgcccgtgccggagatggcgaagctggacttcaccgaggcgccgtgggacgaaacggaggccttccacctgcgcaagtacccgtcctgggagatcgactgggattccatcctctcatgaacgatcaactacaactagtattttagtagtagtagcagcagcagcagcaaggttcagtcagtgatagctctgtgtaattttcgatttggggtttgcagctgcggtggatcgatggcattttagacatcggccatggcggctgtgttgtgatgcagaagtaaacgtacgtgctaatctcctggttgagctgccggttgttttttctcacggcacggccagtcgagaaagtcagtgtaatcccctgttatgatctcctctgttgcaactt

SEQ ID NO: 35858 - DNA, 1167 bp, Zea mays subsp. mexicana
  Clone ID: UC-ZMROTEOSINTE009A08_FLI
agggccaagcgacgccacgaggaccctgatgaggatccagaggcggaggccgaactcgtcgtcaagcaggccggggagtttgtgctcgagtgtagtgagattggagatgatcgcccgctcactggctgttccttctctcgtgatgcatcgatgctcgccacaagttcctggagtggaatagtcaaagtatggagcatgccacaaataactaaggttgcaaccttgaaaggtcacacagaacgtgcaactgatgttgtcttctctcctgctgatgactgcttagcaacagcttcagctgatagaactgcaaaattatggaaaccagatgggtcacttttgatgtcttttgatggccaccttgatcgtcttgctcgccttgcttttcatccatctggaaagtaccttggtacagctagctttgacaagacttggagattgtgggacatcaatactggcaaggaactgctactccaagaggggcacagcagaagtgtatatggagttagctttcaccctgatggttctttggcagcatcttgtggtcttgatgcatatgctcgagtatgggatctgagatctggaagattgttctttaccctcaagggccatgtcaaacctgtcctaggagtcagcttctctcctaatggttatctggttgcaactggaagtgaagacaatttctgtcggatatgggatttgaggaaaaggcaaatgttgtattctattccagctcataagagtattatttcacatgtgaaatttgaaccccaagaagggttttatttagcgacttcttcctatgacaccaaagcagccctgtggtcagctcgggattacaaaccaatcaaaagtttggtgggccatgagtcgaaggttactagtttggatattagtggagatggacagaagattgtgactgtgtcgcttgatcgtacgataaaaatttggtcatgcagaagtagcacacaagataatgaaatggaactggattgagacaattggcttcattgttgccagccctgctctctattcatcagctagaagtagatattctccctttttgctgatcagagattccaatcagtcattgttgctattgcacggaaatatttcatagcatgtataaacccttggcttgagaaatatgttctgcacttctattatgtt

SEQ ID NO: 35859 - DNA, 986 bp, Zea mays subsp. mexicana
  Clone ID: UC-ZMROTEOSINTE009B07_FLI
ggagtaccatgcgctctgtaaggaaccgccgccgcaggtcgtggctcgcccactgcccaacgacatattggagtggcactatgtacttgaaggaagtaaaggcacaccctttgaaggtggatattactatgggaaactcaaatttccaccggattatccttttaagcctccaagtatcagcatgacaaccccgagcggcagatttgcgccacacaaaagaatatgcttgtcaatgagtgactttcatcctgaatcttggaatccgatgtggtctgttgcaagcattctcactgggcttctgtccttcatgatggacgatgcactgacaactggaagcatcaagacatcagatgcagaaaagaggcgtttagcaaaagcttcccttgtctacaattgtgagagcaaaaactgtccgcacttcaggaaacttttcccagagtatgttgagaagtacaatcaacagctacaattggagaacactgctgcagagccggtgcctcaggagaatcctgcacctgctccatcccctgctgtccagcaagctccgaccgtggccaatagggcacaaccactggcggaggcgcgccgtgacaagaaccagaagaaggcggtgcccttctggatggtgctggtcatgttttcagttttcggggctgtgatggcgttgcccctaatgcaactttgacaataataaagacaataagaacgtgtgatgccagggccgtaattttgtatagttttccattggtttgtctgagtgactcagttggtcccctagactacctaccacctcggagtcgtattgatgaacctgtgatggtatatctgaagaacttttgttctcagttctcactcttgagtagcagcgccagaaggtcgttcgtttttgctttctgtttccgaaatcgtatacttaattttttttgttgcctcccagttcgtctttgtgatgtgtgctgacttcaaggttgagttcgcattttcac

SEQ ID NO: 35860 - DNA, 1156 bp, Zea mays subsp. mexicana
  Clone ID: UC-ZMROTEOSINTE009B10_FLI
ccagattgaacggatacatggctacagtgacaaatcttaagaatccagtgaacaagtggcgatgtggtgcgactcctatttcgtattactactttattcgcctgatcggacgcaaggcttctcatgtggcattggaatgtgctcttcaatcacatccaaacatggttatcctaggacaggaggtggctgcttccaaacttacaatttttgatattacgaagcagatttgtgatgtagtttaggcaagggctgaaaaagacaagaaccatgtggttattctttcctgagggccttgtggagaatattcctgaactatatgctctgctttaggaaatccatggcctccatgccaaaggtgtttctgttgagaatatctcttctcagctttcaccatgggcatctgcactctgagtttttgcccccttttataaggaagcagctactactacatcccgaatctgatgattcagctcaactttcctagtgtgttgagacagaattcttccagctttttgttggaagatgtctacagaaacccaggcccgctccagtttgaaggaccaggtgtcgattcaaatcctatttcattgtgcgttgaggatcaagactatatgggcagaataaaaaagttgcaagaatacttggagaaggcaaaacttatactggtgaggagtatatcgataatgcatctcaatcctctctgcattgtaaactcctacattgaagttagacaaaagtctcatctattcattttggtttaagctggttgagcactttttacaatctccggtgaacacatataggatgactcttcacatccgtcagtacaaaaacactcatctaattagcagtgcacgagaaaaaaggacatcttatatgagtgccatattggtcatgacagtagcttcatgttgagctgtttgtttacacgagcttgagattgcttttttggaccgatgattacagatattaaccttctcctgtgtgtcatgtttatcgatttcaatatgtatatgtatgattatgatttatctcttctcatcaaataatgtgagatattgaggtggatgataaattatgtactgtttatctccatgtaatcgttatgcactaacatttaataacgagagcatagaatgacaaatagtgattctac

SEQ ID NO: 35861 - DNA, 1118 bp, Zea mays subsp. mexicana
  Clone ID: UC-ZMROTEOSINTE009D02_FLI
agaaactacgccatccaaatattatactcttcatgggagcagttgcatctccagaacgactttgtattgttacagaatttcttccacgggggagtttgttccgcttacttcaaaagaacactgccaagctagatccaagaagacgagttcacatggctatagacattgcaaggggtatgaattatcttcaccattgtagccctcctattgttcaccgtgatttaaaatcgtcaaatttgttggtagacaagaactggactgtaaaggttgcagattttggtctttcacgtctaaaactcgaaacgtttttgcgaacaaaaactggaaaaggaacgccacaatggatggccccagaagtgttatgtaatgaaccttcagatgagaagtctgacgtgtacagctatggggttattctgtgggaacttgtgacccagaagataccctgggataatctcaatacaatgcaggttatcggagctgtcggctttatggatcagaggttggacattccaagcgatacagatcctaaatgggcatcgatgatcgagagttgttgggatagcgacccgcagaaacgcccttcgttcctagaggtcctggacaggcttagagatctgcagaagcagtacagcctgcaggctcagatgcagcgtaacctgtccgcggatgctctcctgaaaggcgctgtgaaatgagcgtcgaggaatgctagctctcggaatgtaatggaacatggcactggacacattgacagcgaccagagcaagcattcatcgacatctgtagcgtctgcgtgctgatgaggaaggctggctacgtgcatcttggtcgccttcgtatagaagaggaggagctacgtgcaaaggcggccggtgcatgcatggcttcatgtatctcgggcctgaacgaagcttcataatgcggtaatcttcggccaagaaggccggactactttttgtattaacgccccaatttttcagtggggggaaacaatcgaattgtttataaattgtatacttagtctcgataacgttcttgtctgcatatagaacctatatagattatatgtaagcatgaaactggcagagactgaccaaaatcaattaactcgaacaact

SEQ ID NO: 35862 - DNA, 1540 bp, Zea mays subsp. mexicana
  Clone ID: UC-ZMROTEOSINTE009G04_FLI
agcagcactacactcctccacgcctccacctccagcctcccactgatctggcctctctcgtggtgagcgcgcctgtaagtgatcctttctcgcagattatttttgtagttttcgatggaggcggattagctttgaactggtggatcgtgttgggcatcgtattgtgactggttctgtactgtgaatttcgctagtttattttttctcccacagattactctgaatatgcgtgcccttaattgtgttacgatttggcttcgtcgcggtagtctgttgtgatgcgcccattatttcgcgattaattgtatgtgattctgcgttcgattgattgagaataggcagtgaacccttccgtttcttatttcactgctaactgtatctaggattctatggattcgatgtgaagtcccaaagggtagcttttagggatggggaatgatgagatgttggaagttcacaagctgtgtctttcttataggctggtaaccttatgtgtagactgccccttgtcttttgtaatgtccttttcaggttcagatgttctctttgtgcatctactgtttcagcagggagttactgatgtttatatttaactataatatctctgcttatattattagttaatcctagatcaatatgagaaggggctacagttacagtccttcaccaccaaggggctacaggagaagggcccgcagtccaagtcctcatgatcattatggtggtcgtggtagggatctcccaaccagtcttctggtcaggaatctccgtcgggactgcaggccagaagacctccgtcgcccatttggacagtttggtcgagttaaagatatatatcttccaagagattattacactggggagccccgagggtttggctttgtccagtattatgatcctgctgatgctgctgatgcgaagtactatatggatgggcaggtagttcttggtaggcaaataacagttgtttttgcagaagagaacagaaagaagcctcaagagatgagagctagggacagagtcaggggtcattcttatgatggcaggaggtattctcgctctaggtcccctcgttattataggggccgctctccttcacgcagccaaagctactcgaggtctccacctcagaatccaagacacagacttagagagaggtcctactccggctcacctgtggacagcagatcaagaagtgggagcccttatgaggatggatatcgcagatcgtcacggagagagaggtctctttctgttagtggatgaagcagttttacggtctagagctccttgctgtgaatctgcgcatggtggcctacttgctatgtctttctgaaccatatatgttctgtctagattatcattcccagtaccagagaagtatcgtgagactgtttgctgtactttctagtcttgaggatacagaagggggtcaccgattctctcagtagatggactaatgaccactagctacgccagttccactgctttgtgtatttataggcagctttgtggtttgaataaaattatttgcatcgtg

SEQ ID NO: 35863 - DNA, 1721 bp, Zea mays subsp. mexicana
  Clone ID: UC-ZMROTEOSINTE009H08_FLI
gcgactatctgcacacgcctcactggttgccagtttgccactgcatcagcaaggcatatcctgctgggcagcaataatgcctcacttcgtcgtcggcatcgcggcggcgctgctccttctgcagcagctgatggcctcgtcgtcgtcctaccccagcagtgcggtccttgcagactctgtgctcggccggaaagctggcaccgtcgtcgacgaggcgtcggcgcctgctgagagttcacccccgggggctgggactgggaggtacgccgtgatcttcgacgccggcagcacagggacccgtgtacacgtcttcaggttcgacaggaagctggagctcctcgagatcggcgacgacggcatcgaggtgttcgccaaggtgaagcccgggctgagctcatacgctggacatccccaagaggctgcaaattccatgctgcctcttcttgacaaggccaagagcgccgtccctaaacagctgacgaaaaggaccccgcttagactcggagcgactgctgggttgagacttatcggagaggagcaatcagagcagattctcgaagcagtcaggaaccttatccacactaagagcaaatttcagtacaagcccgagtggatcaatgtcattgagggatctcaagaaggatcatacctatgggtatgacttaattatcaagcataaacaaacaaacaaaaaagacctttcaggaaatgctatttttggtcacctcattttaatatatgtacccctaacactatatatgtgtttgagtgctctgagcatgggttgtttattaggttgctctgaattatctgttggataaattgggaggggactactcacagacagtagctgtgcttgacatgggcggtggatcagtgcaaatggcctatgccgtttctgcaaatgccgctgcaagtgctccggcgccgcctcatggggaagacccctatgttacaagagagtatcttaaaggaaaagattacaacatctatactcacagttacttgcactatggtgcttttgcatcacgagcagagattttgaaggcaaaggatggaccattcagcagctgcatgttacgtggattcattggtcaatacacctacaatgaggagcaatatgacgcgactgccgcgccggaaggagcagtctatggcaagtgcagggaagagatcggcagagcactgaacctgaacgcgccatgtcaaatgaagaactgcaccttcaatggcatatggaatggcggcggcggagcaggccaaggcagcatctatgttgcatccagcttctacttcgtggcctcagaggtcggcatcgtagatggcaacgcaccaagcgggaacactacccctggcgcattcggagcttccgcggagaaggcttgccagatgagtgttgaagaagccaagatcgaatacccaaacgtcaacgatgtcgatgtgccctacctgtgcatggaccttgcctaccagtatactttgctagtagatggctttggtgtggagaggaccaaggagatcacagtggtggacaaggtgaagcacggagagtactacgtcgaagctgcatggcctctaggctctgctattgaggctgtgtcgtcaaccaaagaatggcgtgaagataaatgatctgttggtccaatctcatatgctagtattgtatctgacatgtacagtactggcaccacgtatgaaataaacgaaaacgactgtggtct

SEQ ID NO: 35864 - DNA, 647 bp, Zea mays subsp. mexicana
  Clone ID: UC-ZMROTEOSINTE010A01_FLI
caccaaactatgctataaccgacggcctgagaagcaaagtgccctggtgcagtggctgatcaagctggctgcaattgcggctatggtggctgcatattccattccattctttgtgatccctcgcacagtccacccgatcatgggctggtccgtctacctatttggtgcgcttgccttgtcagtgctcgttttcaatgtgtttctgctcccgccacttgatgtgcttacaacgtggcttgcaattgtgggcatgctcatcgttatggcattcccatggtaccatgatggtgttgtgagggctctggcgatctttggatatgcattttgctctgcgccaatcttgtgggcatccatggtgaggatgatggactcactgcagacgatgctcgagagggattcattcttcccccggattggtgaaccagcacaggagactgaattcagcaagctgtactgattcttttacgcacagatttgggatgcttcatcaccatatgaacagatgattcggatcagttaattctcgattgatgctggtggttttcgctcaggcattccgttgcgtactcatagtaatgtataaagattgcctgcagcaaccatgatagatgcagattcaggaaagacaggtcagttgtactgaactg

SEQ ID NO: 35865 - DNA, 820 bp, Zea mays subsp. mexicana
  Clone ID: UC-ZMROTEOSINTE010B02_FLI
gacgacatggcccagcacgccgaggccttcggcggcgtctctgacgacgaggacgtgcctccccaccttcgcgccctcgccaacgccgcccagtccggcgacgtccccgcccttgtggctgccctcgataatcatgatggcagtattgatgttccagttgaagatggtgatactttgctccatctggcatgcttatatggtcatcttccttgtgtgcagctattgctggaacgtggagctagcttggaatgccaagacgaagaaggtgctattcctcttcacgatgcttgtgctggaggcttcactgaactggtccaatatattctcaactttgctgccaacaaggatggttgcgtagtgagaatgctcaacactattgattctgaaggcgatacgccgctccatcatgctgctagaggagaacatttggatgttgtcaagcttcttctccaggctggggcgtcccccaagaaggagaacacttacgggcagacacccgctgatatggctgaccaagacaccgaagttcgaaccctgttgactgccaagcaaattgaggcaaacacacacatgagtgatgattaagcggcattggaatccttagttgcaactggtaatgttgagaaatagccgtaacatcttatctgccatccaaacttcatttgaactgaagtaatattgtaatcagactagtatggaggggttagcttagctacatgatcatgctccttttccttatcgctgcattgtactaaagatgaagtggaacacccatcggtctttcttgttctttcgcggaaaatctgatgcttgatcaccg

SEQ ID NO: 35866 - DNA, 1527 bp, Zea mays subsp. mexicana
  Clone ID: UC-ZMROTEOSINTE010B08_FLI
atttcaaacaccacagaagtcatctttcataaaggtaatcgctgacatacgtcttgataatcacatatctagagggaatgtaaataaattacaataactcaaaaaaaatctgaatacgtggctgcaaagttcaaagacacaaggttttacagttccaccttggttcttgttggacacgtgcatgtaaaagaggaacaccattcagcagttgggagctcacaccttcatgccagcgttcaacaaccaccgtctatcaccgctgaagtttcacaaatggagggtttcggcgtgctgctgactaagaaagcaggtatccagtggaggcaaggcgaagaggtggtctcttagggcaggccagcagtgttggtgtgttgccaccgtatgcaggagacagcctgtgggcctggtcaggcagggtagcttcattggagagattaacaatgggtacacatcaccagagagggtcagagatgatcactgatcagtcagcggggacggcattggagttggaagtttggaacgcatgagagataaacagacgagagattcaaaagccggtctctgtcatcgcggacactctgatctccatccgacgtccagttcattgcctgaagctaaaccatatttcaggcacctgacatagagtgcctctcgaaaggaatagagtgcacaggaaacacaaacacacacacagatagagaccatgcattggctgtagaccaccccagaaataattgattgaatcctgttaacaacaaaatatgtcagcaatgattaattgaatatcaccaagcttgttaactatcttaaccgctatgctttagagtatgcacagtgataacacatgctatggcaaagtgtccatttaaatttttatgtcaaaactttttaaaattcaaagtgaaattgtctgttggcaggacagtaaaataccaaacaatggaaaaaccaaggcctttatagtacaacatgacagacagtataagattgtcatttcaacctggagaatctttattaggcctttgtttggtagggcttctcaaagcttcttcggaggagctggaagagtttcagggtctgtgtgagagcgaagtattttttatagtttatatgcaataccatggttttgacaataccatagtattttatgccataagatgaaaacggtcggaaacggtatttattcggtaatcagttttttagtcgtttttctttgattgcgaataaataaaatatagaatatacaatacaaatttgtattcttgtttttaacatccagcttgttaagattcataaaaggtaaacctcaaattcatcctatattttctcaaataatagatataaacttcggtatggattcagaaacaaattcgataattttttcaactttttgtgttgtagggagcaaataatacattaaacaatttatgtaatattttattcatatttgtactaatatgcttgataacataagaaaagatcaacatcaaattttatacatatctattttaaaatattaaatttgtc

SEQ ID NO: 35867 - DNA, 1143 bp, Zea mays subsp. mexicana
  Clone ID: UC-ZMROTEOSINTE010B10_FLI
aaaccaggaaaacatgtattccacattgtgacagatagtcttaactatgctgcaatgaaaatgtggttcctggctaatccctttggtaaagccgctattcaggttcagaacattgaagagtttacatggttaaactcaagctacagtccagtgctgaagcagttggaaacgcggtttatgattgattactacttcaggactgggcatgctaggcacgatgaaaatccgaagtttcggaaccccaagtacttgtcaattctcaaccatctgaggttctatctccctgagattttcccaaggcttaacaaggtgttatttctggacgatgatactgtagtgcagcgagacctaagtgcgctttggttggtagatctcaaaggcaaggttaatggtgctgtcgagacctgtagacaggacttccataggtttgataagtacctcaacttctcaaaccctcttattgccaagaattttgatccacatgcttgtggttgggcatatggcatgaacatgtttgatttgtccgagtggagaaagcaaaacatcactgaggtctaccatacctggcagaagttgaatgaaaacaggctattgtggaagctaggtaccctccctgctggccttgtaaccttctggaaccatacgttccctcttgatcgatcgtggcatcaattaggacttgggtacaacccaaatgtcaacgttaaggatatcaggcgagcggctgtcatccactacaacggaaacctgaagccctggcttgagattggattgccgaaataccgcaagtactggtcagcacacgtcaattacgatcaagtgtttctacgggagtgcaacataaacccctgaacagcaaatagtggtgcatggtttatatccttttcttttcaatgatttcttagaccaattctttgtgctctaggtaatttaaattgcctagagtgcttattctttgtaactgatgtctttcctgatgtaaaggtgccagcaggttggcggtaggcttggatcatacaaacagttagtagccaaaggcatatcccgttttgtgcttataaatgctaatatggtagataatttttgactgtatgtatgaattgaatgctatgttagatgccctcacaaacagtacagtttgcg

SEQ ID NO: 35868 - DNA, 1684 bp, Zea mays subsp. mexicana
  Clone ID: UC-ZMROTEOSINTE010D10_FLI
atttttcaaataaagttgcttctacccaaaaggcatctgctggtcctatccataaacgttcatcaagaaccgcaagctctggttatgctaatcgcaggaatccaccagaaaatcctctcgcacagtctgtccccagtttctctgacttgagaaaagaaaatacaaagccttcacctggagtcagtagagcgagtgcaagagttcagcaaaagtcttttgcccgtagcaagagtattattgaagagtcaaagagcatattgaaagaagatcaatcgaggaggtcacaatctatgaggaagaaccaaattcctgatgagctaaaggacatttcgtcagggaatgatgatatttacaattgggctccctcaagaatttccaagaatcaatcagagggaccttttgcttacagtacccgtagatcgggtccaccaaagccttttcttaggaaaggcaatgggactcaccctgttattggtatagctggatttcaggctgcagctgccatgatggcgaatgccctccagcatggtgacagtggtgattttgaagatcagcaagaggattcccctgatgatgccaaagaagaggaagaatatgaaagcatggaagaaaatcttagagaaagtgactttcctgctgattctgacagtgagaacccaagagtgagtcatgaatttggaaattcagatgacccagggtcagaaaacggtgatgctgattttccaagcaaagcacctgccattggtggtactaagttcactgcttttacaggaaatgttcacaatccagctggtgatgttccagcaccctggagttctcgtcttccacagctgttcccttacacgaatgataattcagatggtgacgcctttgctgattcaccatcgggaagtccatcaccatggaattctcattcactgtatgaaataacagatgctgatgtatctcggatgcggaaaaagtggggcagtgcacagatgccttttgctggtgtcaatgcacctcaacagccacgcaaagatgtttccaaaggattgaagaaactgtggaaatttggtaggaagactagaggcggtgacggtttagtaaatgattgggtatctgcttccactgcctcagaatgtgatgatgacatggaagatggacgggatctggtagtaggatcttctgatgatttcagaaagtctcgaatgggttatcttgcttcatatgacggttttgttgagaacgaggttttttctgaacaagaacaatcactacgcagctccattccaaacccacctgcaaatttcagattgagggaggatcagctgactggaagttctcttaaagcaccgcgttctttcttctccctgtcaacattccgaagcaagggaggtgatgccaggctcaggtgatcctcagaagacaccagaggtgtggtgtgtataaaatatcttgtcaagttaggtatggttatcaaattttcagggtggtacgtggatgctgctagcttgtgattatatatatattgtgtatctatggcggttcatataagctaccagttgagctctctccattgttgccgtttgattattcttttttcccctgtgtagagttggacttttgcaatccgttctttcaactggcccaggactcctgtatttttttcattgtttttgtgatatatctgtatctccctctc

SEQ ID NO: 35869 - DNA, 1022 bp, Zea mays subsp. mexicana
  Clone ID: UC-ZMROTEOSINTE010G05_FLI
tctggttatgcagatgtcaatgacaatagcttcttaaaagttaacttccaaatggaacagggattgccacttgtacctaagtcattgaccttcaatagagttaaatgtgcagtttcaaaaggcattaagttgggtccgacatttttggttactagtttgacaggcggatccattgttggggacatggcaccttatcaagcttttgccataggtggacttggtagtgtccgaggctatggtgagggcgctgttggttcaggaagactatgtctaattgctaactgcgaatatacgattcccttggtgaagcatctggagggttctattttcatggactgtgggagtgacttagggtctgctcgtcatgtccctggtaatccagctctgcggcaggggaaaccaggatttggtattggatttggatacggacttcacttcaacactgacctaggtcagatccgtgtcgactacgctatgaatgcatttaaccgcaaaaccatctattttggaatcaacagtagcggtggctcttaggttatgaaagacatagctctcacttaacatagactggcaattcaattcgattcttttttgtggacatagaaggggagttctttttcttgacagtgtgtgttccggacatgccagcagaatcttattgtttgtactacgtgctggcattcaaaaggtgtatagttgggatccacgagatgcattctctttattatttattgttatgatctttttttgggggtgtgggtagatgctgaacaaatgtttttgctgagaagatggtatgtgtaggagtaggactgctccaaatatacttccactgctttatagcttaatttcattaggtttgcaaaatatataccaatggatgttcatggtcaatgtaacttcgttagatgctaaatattttttaagttagacgctgagcaaacattttgcctgtatgataatgtgagaactgctcactgacgcttccattacatcacaacttcattactatggtcgatgtc

SEQ ID NO: 35870 - DNA, 1235 bp, Zea mays subsp. mexicana
  Clone ID: UC-ZMROTEOSINTE010H06_FLI
gtttgggacagcatgggacaaaagaaagaagttggttatagaaagcagaagtttcatggattcacggtaaactgaaactgtcgctacaacaattcttcttgtgatcgttgctccttgccaattcatcgatctgagatgcaaactgacatcatctatgagcactgggatattcttcccccctaagcaaattaaggacccagagactaagaagcctgaggactgggatgacaaggagtacattcctgaccctgaggacaagaagccagagggctatgatggtattcccaaggaaattactgaccctgatgctaagaagcctgaggaccgggacaatgaggaagatggtgaatggactacccatttgctcgtaccattcccaaccaaaatacaagggaccatggaaacaaaagaaaatcaagaactcgaactaccagggtaaatagaaggcccatatgattgacaacctagatttcaaggatgatccatatatttatgcttttgacagcctaaaatacattggcattgagatgtggcaggttaaatgaggcactttgtttgacaacaccatcatcactgatgatcttgcgttggccaagacttttgcagaggagacatggggcaagcacaaggagatattgtgttcttatgcttggagtgaagatggttgccactctgcattagcggtgtgctctttgcaaagccttggagctgcctctcctgcaaagtctgaacttgcagagatagtcccacaagagaaatcaccaaaagcttccattcaaccaatgccaccgagtccaaggtattctacctcaagatgaagggcgactaccacaggtgcatagaggaaggatgctgcggggagcaccatgaatccctacaaagctgctcaggtttcctctgactgttcaccattattggaagcagggcaggcagagagccttggaaccgaactcttggggatggtgcctagcagggaagaggagattaagttgaaagaatacagggaggatgttgtgtcgacttttgtagttgatgattatgtgatacttcagtttaagggctcaacttttaccggttcttggaagtcatttagtagccctaagatttcatcaacattcttagtagtaattgctatagtatcaaatgggattgtggtacgagttgctcgagtactaagtactaatgttgttgtacattgtgaagctaagtgggtaatatcaaaaggattaagattt

SEQ ID NO: 35871 - DNA, 998 bp, Zea mays subsp. mexicana
  Clone ID: UC-ZMROTEOSINTE011B05_FLI
agtcaccaaagcctggcatgtaggcgccaccgacggcggtggtggaaaatcttggtggtatcacaagcagcagcaagaagcccgatgaaaatcgtgtgctggatgcctcgcagattgggaaggcagaggcggtcaacatccagttcggtcctttcgggatcagcgcctggatgagcgacacgggtggaaccagccatgctggaagtgtggaagacctgagggctgatggcgtggagactggtggtaggaattactcgtcgtgctgcagttcgccgaagacgtcggattccacttcgaaggagcttatggaggactattcggtctatgtcagcgaagaagaggaagaggaggaagctgacgacccttgtgatgctgaaactgatgaagatctatccgatgaagaaagagacatgcacgagatagatgcaggctctgtggacgagcactcgaccaagtcggacgaggagtatgaggacctagccatgcgcgatgtgatggagagtggcgactggtccgacgatgagcagcaaggcgtcagcaaaaccaagaactcacctaccctggagtgcagcatccatgggagtggggcagctgaagatgatggcataaatggccggtaccaccacaacctggacctgttcctgaagatgtccaaggaggtggtagccagcaacagaatgccttgcgcgtcgtcatagccccaccggccggccggcgacacgctgccctggtcccggcgggtgatacgtttcttgggctggtgctgtagagtggtggctgtctttgtagcgtgtacctgtgcaaactacaagatgccctcacctggatgtaaagagagaccctgatgctttgtccaggcaaccatgttcatccataccatgtagtagtaggagtattatcttcggcaataatgttccggccaagggcaaatatgtattctatccctgtgggggaaaaaaataaaatccctgctgtcaataaagtcacctctcgtggct

SEQ ID NO: 35872 - DNA, 1596 bp, Zea mays subsp. mexicana
  Clone ID: uC-zmroteosinte011c06_FLI
gaaatttattgtgaagtacagttaagtgctcttcaaaatttggatctctgcaccgccaaggtcatctagtgatgcctgacatgctttgaattattaatgcatttttattgtttgaatgcacatttgtctgtactgcttaactcatgcgcatttgtaaatttcaaggaacatgcaacctccaaaaaccaatgtctacttcgagtattggtatagtttcgcttaactaatttcagtgttttgtcattaaacagggttggtgcatcagaatttattgtgccgtattgcaagttcttgaagagcttgaactatcccttttcagttggaaccagatttaaagttggctgcgagaatgaagatgctaacgagaggtcctttggattgatcataggtattagtgaagttgatcccatacactggcctggatcaaaatggaaatctctcctgataaagtgggatggtgctactaagtacagccaccagaatagagtatctccatgggacatcgagggagttggcagctcagttttagttactcaccgtctttcctcttctgtttcgaagcgaacaaaactgtgcttccctccaagcgatttggacacaccaattctagatggaaatggtcgtccagactccgtggaaactgaacgtttccacagggtcttgcaaggtcaagaattggtgcaccctagtattcatggtgctgcatgctctcattcatcagatagccccagatgtcaaggctcttatggcaggagattctctgctgatgtgtggaactgcaagatgaatgatgtaatgagtgggcctcgacacctaaatgccactgggtttgcttaccagcccctaggcttcagtgaatctgtcaaattctcagaggtcttgcaaggtcaagaaatatctcaggcggttccttccttcatgagatctgcattcaacgctggcacacagaatggcagggttcgaccatttgattatgtgcagagatcagatgcaactcaaggatacgctctccagcagtttaatctgccagcaacagaagtgcattcgccctcttctgttcttatgtttaaccaaaccatggcaccacatgctgagctagatggtgcgaccaaccgtgaagaagtacatggcagcaggtacttgtcatccaatgcaatagggagagaagctgaaccatggccatccatgcagcagcaaagagcgagtgtaaatggaagcgagcctctcgacaactgaagcctcagctcctgcaaggaacgctgaatctggatcggtcggcaggggcgcggggcgaagcaactgtaagctttttggtttctccctgactgagaagatccttggaacggatggtggtggtgtgaaagaagggaactacgaagtggaccgtcaaactccccgggtgctagacttgtttgggcacggttctacgcctggagctctgcatgctctctgtgctgctcccttgggaatatgatgctgttctgcctagttttacagcagttagatttatgtaatccttcaaccattttcatcgcgttgtacttgaccaatatgtccagcgtatgatttccagttttaattgtatgctgatgctac

SEQ ID NO: 35873 - DNA, 1893 bp, Zea mays subsp. mexicana
  Clone ID: UC-ZMROTEOSINTE011D10_FLI
ctgaaacaagcgcatgtcccccgtcccgagtcctagcgcgactccgtgcgacggcgaggcctctgtcccgtcctcgtctcctcgaggcccggaggctgcgagtctgtgacacttgaccgtgaggcggacggcgactcggaggacttcaccagcgagtccctcaagcaccgaggccgagccgcccaccgcccgccgccgcctcgcctggcgctagtcgccgttgccgagcctgttcggcacatccgttggggtgccggggcaccgatcaggctgcgcacagccgaagtcggcctccgggtgccccaagctgcagagcagcgcgccagcgcccgtggaccggtgaatcagactacccttgtttcaaatcctgggtccgccattgggggcggtgaggccaccctagtagaggctagaggatgatatacacggcgatcgacacgttctacctgacagatgagcagctccgtgactcgccatcacggaaggatgggatcgacgaggccaccgagactgcgctccgcgtctatggctgtgacctcatccaggagagcggcatcctcctcaggctaccacaagcagtgatggccacggcacaagtattgttccatcgcttttactgcaagaaatcatttgttcgatttagtgcaaagagagttgctgctagctgtgtttggctggcagggaagttggaggagagtcccaggaaatcaaggcatattatatttgtcttccacagaatggaatgtaggagagaaaacttgccaattgaatttttagatgttttttcaaagaaatattcggaactgaggcatgacctgatacggacagaacggcatctgttgaaggagatggggtttatttgccatgtcgagcacccccataagttcatatcaaactaccttgcaacacttgaagcccctcctgagcttactcaagaggcatggaaccttgccaatgatagcttaaggacaactctgtgtgtgcgatttaagagtgaagtagtagcatgcggagttgtgtatgctgcagctaggagacaccgggttccccttcctgaagatcctccgtggtggactgtctttgatgctgatgaagcaggaattcaggaagtttgcagggttcttgctcacctctacagcttgcccaaggcccaatacattccagtatataaagacaacgattcctttactgttaagagaatctctgatctacaggcttcaaaggaaagtccagcaagggctgttgctagcgataagggtacccctgtaccctcaagttctagccaggagaaggatccagtggctaagactatactgaacaaggtgaaggaaaaaagtgatgacgaaggtaaaccattgcccgctgaatttgatggaaaagaaaacccggtggcaaactcaaaaaatgacaagtctgattctggtgtcgaccggagtcgagaaagagagagatcaagagggcgggaacgtgatgccaggggtagggattctgatcgtgatagcaggggtcgcgagtctgatcgtgagagggaccggagacgctgctctagggaaagaagttcaggacactcagacaaggagaaatcaaggcgccattcatcacgcgaccgggctgactactacaattcacattcatctcgtgagaaagatcggcataggcaccattgatcaaggtgacgaggatccccggtctgcagggcttcgctgcatggagaccaccacttggcagtgccgaccggatcatgaaaacttgtggattatcatcccactggtggttgtattggcttgattgtgttttgcaccttggattgtaacttgcaagatacgctagccatgagctgtgtgcaacttgaatttataaacacaacatataagatacaattgacgcacgtgc

SEQ ID NO: 35874 - DNA, 818 bp, Zea mays subsp. mexicana
  Clone ID: UC-ZMROTEOSINTE011E01_FLI
ggccgtaccggccccggcgcccgcgccgcccgtggtggtggacacgcatgctcaccacctgcaggagggagagcacaagccgcacttcccggcgccggcgcctcccccgcacgtggagacgcaccaccaccccgtcgtcgtccacaagatcgaggacgacgacacgaagactcagaccccaccacaggcaccggaggaggagaagaaaggcctgctggacaagatcaaggagaagctacccggtggccacaagaagccggaagacgctgctgccgccgccgccgcgccggccgtccacgcgccgccgccgccggcgccgcacgccgaggtcgacgtcagcagccctgatggcaagaagggcttgctgggcaagatcatggacaagatacccggctaccacaagagctcgggtgaagaagaccgcaaggacgccgccggcgagcacaagaccagctcctaaggtcgcagcgtgtgcgtgtccgtcgtacgttctggccggccgggccttattgggcgcgcgatcagaagcgttgcgttggcgtgtgtgtgcttctggtttgctttaattttaccaagtttgtttcaaggtggatcgcgtggtcaaggttcgtgtgctttaaagacccaccggcactggcagtgagtgttgctgcttgtgtaggctttggtacgtacggactttatttgcttctaagtcagggtctggatgttgtgtactacgtgggtttgttgaattattatgagcagttgcgtattgtaattcagctgggctacctggacattgttatgtattaataaatgctttgcttaattgagag

SEQ ID NO: 35875 - DNA, 1616 bp, Zea mays subsp. mexicana
  Clone ID: UC-ZMROTEOSINTE011E02_FLI
ggattattccgttcgtcagttccgtccggagcggcggaggtacgtctacgcccctcaacccctgctcctaatccgcatctcctgcttcccccaaaaaatccatgtcctgatcttctctgccgctgctcccaatttccctctcatctcttgctgtctcttccgccgccgccgcacgtcttccttcccatcgctctctactggtgctggactggatcggcttggaccaactcatattttaggctctgttggtggtgcaaaaatgagtgacaacctgatggacaaggttagcgcctttggtgagcgcttgaagatcaccgggacagaagtcagcaaaaagatgactgccggaatgagctccatgagtttcaagatgaaggagttgttccaggggcagactccagctgacaagattgttgagggtgccacctcagaggaactggacgggcctgactggaactcaaacttggagatttgcgacttgatcaacacagagaaggttgacagtatggaactcatccgtgggatcaagaagaggatcatgctgaaggatgcgagggtccagtacctctccttggtcctgcttgagaccattgtcaagaactgtgacaaggccttctcggaagttgcggccgagcgggttcttgatgagatggtcaggttgatcgatgatcctcaaaccgtggttaataacaggaacaaggcccttatgctcattgaagcatggggggagtctggtgatgaactccgttatctgccagtctatgaggaaacatacaagagcttgaaatcaagaggagtgcggtttcctggacgtgacaatgagagcttggctcctatatttactcccgcgcgatcagttgctgaagctgatgttgatgcaagcttgccccagcaggtgttcgaggacgtccatgttcatacatatactgctgaagaaacaaaagaagcatttgatgtagctcgtaacagcgtagaacttctttcaactgttctttcctcttctcctgagcaggatgctttgcaggatgacttgacaaccactcttgtgcaacaatgctaccaatctcagcacactatccagatgattattgagaccgttggagacaatgaagctgtgctctttgaggccttgagcgtgaacgatgagatccagaaattattatcgaagtacgaggagatgaagcagcccagggcctccgagcatgcagaacatgtaccagttgtcataccgattgctggtacatgaagatttgaatgctgttggcaatgaagacgcccttgtcagaaaaccagctgccgcgagagcaacgtcaggtggagatgatgacatccttgatgatctcgacgagatgatatttggcaagaagggaggtagcagctcccaggatccgaaaaagccagatccgaagaaggatgacctgatcagcttttaattacctttccataatcgcaaccagtacttgctattttcctggtgctgtacccactcggtagattgaagattcttattcgcatacgattcataccggtttgttcagttaagtcgctacactttgtcaatcttgtttcatggctgggtcccatgaccatgaatgtattgtattggatggtggatt

SEQ ID NO: 35876 - DNA, 675 bp, Zea mays subsp. mexicana
  Clone ID: UC-ZMROTEOSINTE011E09_FLI
ctcgtctgctcgcatttcctcccaatccatcccgcctccaaacccgaactccaagtcgccccgcatcgatggcgcccaaggccgagaagaagcccgcggcgaagaagccggcggaggaggagcccgcggccgagaaggcgccggccgggaagaagcccaaggcggagaagcgtgtcccagcgggcaagtccgccggcaaggagggcggtgagggaaagaggggccggaagaagggcaagaagagcgtggagacttacaagatctacattttcaaggtgctgaagcaagtgcacccggacatcggcatttcctccaaggccatgtccatcatgaactccttcatcaacgacatcttcgagaagctcgctgccgaggccgccaagctcgcgcggtacaacaagaagcccaccatcacctcccgcgagatccagacttccgtgcgcctcgtcctccccggggagctcgccaagcacgccgtctccgagggcaccaaggccgtcaccaagttcacctcgtcctaggctgcgcagcctccggttgcaggcttctctcgtatgttcgcgcgtcttgctgtagttaggtgctgctgtgtctggtctccttctgtagcaactgttatctgatggaacagtaacaatgcttatttaatccagctagttgcttatttgtggatcc

SEQ ID NO: 35877 - DNA, 647 bp, Zea mays subsp. mexicana
  Clone ID: UC-ZMROTEOSINTE011F09_FLI
gtttttccgagacccagtcacatcttcttgctactgtcctgatcataagctggtctgtcactgaggtacaaatcacttgatgtgattctctaaatcactcacttatcatcaggtactctttctttgcaatgaaggaggcatttggctctgcaccttcctggctatcatgaaggtagagttgtacacggaactcttcgggtgcaaagccggcaactttccaatcaattaccttggcatcccaattcacttcaaaaaattaagaaatcgggattgggctagagttggagagcgctttgagaagagactcagtagctggaaagggaaacatctctccatcggaggccgtccgactttgattaattcagttcttagtagccttccgatgtatatgatgtctttcttctccatccctaaaggagttatcaagacattagattattttcgttcaagatttttttggtagggggatgaaaacaaaaaaaaaggcttgctaaatgatctattctgtgccaaccaaaagaccagggaggaattggaatcctagatttgaacactatgaatagagcccttcttagcaaatggttgtataaattgcttacctctgatggtatgtggcaacaattgctccgtaataaatacataggttc

SEQ ID NO: 35878 - DNA, 1382 bp, Zea mays subsp. mexicana
  Clone ID: UC-ZMROTEOSINTE011G04_FLI
tttggctgtggtaaaactgtcattagtcaggcactttccaagtactccaattccgaagctgtggtttatgtgggctgtggtgaacgaggaaacgagatggctgaggttctcatggactttccccagttgacgatgacattgcctgatggccgtgaggagtctgtcatgaagagaacaacactggtggctaacacatcaaacatgcctgtcgctgctcgtgaagcttccatttacacaggaattacaattgctgagtatttccgtgatatgggctacaacgtcagtatgatggctgactccacctcccggtgggctgaggcattgcgtgagatctcagggcgtttggctgaaatgcctgctgatagtggttacccagcttacttggctgcacgtttggcatccttttatgaacgtgctggtaaggtaaaatgtctgggaagtccagacaggaatggcagtgtcacaattgttggagccgtctctcctcctggtggtgatttttcagaccctgttacctccgcaaccctcagtattgttcaggtcttctggggtttagataaaaagctcgctcaaaggaagcatttcccatctgtgaattggctcatttcctattcgaaatactccaaggcccttgagtctttttacgagaaattcgatccagatttcattgatattaggacaaaagcacgtgaggtgttgcagagggaggacgatctgaatgaaattgtgcagcttgttggtaaagatgcgctggcagaatctgacaagattacgctggagacagcaaagcttttgagagaagattatttggcacaaaatgcattcaccccatatgataagttctgcccattctacaaatccgtttggatgatgcgcaacattattcacttcaacacattggcaaatcaggctgtggagcgggcagctggtactgacggccataagataacatacagtgtcataaagcatcggttgggggatctattttatcgcctagtatcccaaaagttcgaggatcctgcagaaggcgaagaagctttggtcggcaagtttaagaaactgtatgacgaccttaccactgggttccgcaacctagaagatgaggcacggtgagctgctgtagattttgtgtaagacaataatggctgccaaatgttttataaggtacggaagttgtagattgagaccatgtatgagaattttccccaccgctactcatctctttgccaccactattttagtcatcagtgctggatgggcaccctatttatttcgacgtaccctttattgctagcattgtaataagcgatgggcatgcttgtagttgaataagtacaatgtccatgtattcaaacatcagcgtcatgtttatttgtttgtgg

SEQ ID NO: 35879 - DNA, 648 bp, Zea mays subsp. mexicana
  Clone ID: UC-ZMROTEOSINTE011G10_FLI
gcgtgagttgtgaaagttgagacgcctcagaaaaacgcaacccttttttgggctttggcttttgctgcaaacaaaaggcgacgcggctgggatctagcacgctagcgagcgagagagacgcacatctatctgtcaagcgacgccgcggcctcgatcagagtcggaggcgaacacccccatggcggcggctggcggcggcgcaggagggaaggtatccttcaagatcatcctcacctccgaccccaagctccctttcaaagtgttcagcgtgcccgaggcggcgccctttaccgcggtgctcaagtacgccgcggaggagttcaaggtcccgccccagaccagcgccatcatcaccaacgatggaattggcatcaacccccagcaaagtgcaggcaacgtgtttctgaaacatggttcggagctgcgtctcatccctcgcgatagggttggagctgtagtcatgtcttccggttagaggatatatacagtccaatgcataatgagcaaaacttgagagaaataaagctttgatgttggccttgcttggctgtaggatgttgttacaaggataataagcgaaccttaccgtacatgtctcaagttgtatgctctctgtttgtatgtggagagatttctgaaagtgaatcc

SEQ ID NO: 35880 - DNA, 1621 bp, Zea mays subsp. mexicana
  Clone ID: UC-ZMROTEOSINTE011H03_FLI
ttctctctcaaaggaaatgttggatagcaaggttgagataaatgaacagaactgtgacatcaatacagaaaatgtggcatttgttgcaatcacagaaccattggatgttccctcgcaggctgatacagttgaggaatctattaatgatggaagttgggtgaatagacaaaacaatggttctaatttgaatgcaatgccttatgccatgaacgttgaacctttggatcctcctaagccttctacagtttctgaacctgttgatagtggagttcaggtgaatgaagatagaccttccatatccttggtggagtttcttgcagcaaggaatgctagctcttgtaagaatggtacttctgaggtatgccttggtaatgttgccgctgaaaaactgtcttttgagagaacatcggctggagctggtaaaaactcgaaaaatatcagtcagcttctagtgaagaaagctcttgaggttgatgcggacaagagattttttttgtttagtgtacccattgggccaaaatttgaaggatcaagcagtcccacccccagaactagtgggcacaatattaataatacagaagaagctgtctcagataaggaatgtggcgtgaaggataccaagaatggatttaggctctctttggggatggactctatattttctcagtaccatgctacagattctaagaaaaatttgagtgagaacagcagtttggaccggattctagatgagagtttctcaaaacagaatggagaacattctcggtcaagtctgagtagtatggtgtcatttagtggagcatctgccaaagaacccgttgttctagggagtggcacatcggaaaattacgtggaagatcttacaggcgttagagatcgtcctgttgcaacactaaattctggggaagagctccaaaaggtctgtgatttactttatgagtttaaggatgaaatgttgggggcctccgcagcgaagtgtataaataagagcagcccgtcacttgaagccttgcttgctgaatcatctgattctgaagcgcaaatctctgatctggagggtactgacagtggtgctggcattggctcaggtcgactgtttagtacactctcatcttcagatgacgatgatgcttctgctgctgacgagtctttagttgatgttgctgacctgactacgccaccagagccatatacttctgtccccagcgacgagcctctggttgacatggctgacctgacaaacccttcagggatagatgcttcttcagtgaatcagcctccggctgatgtggttgatctgctacatacttcaaacgagcctttggtcagtttggatgatctgccaaaccatccagagatgtcttttggtgggagcagtggagaacataccgacagtcttatataaaggataaggccatgcggtactgatagttcagagatgagcggaacatataaggccatgcggctgatgtgaagacagtctcatataagtgtgtcctgtgcagtgaataccgctttcttccaagttatgcataagtttttgtacataaataagtctttgtgtctgcatcagtttatactaaatattatgaaagcagattaactttggttttggcttgct

SEQ ID NO: 35881 - DNA, 1383 bp, Zea mays subsp. mexicana
  Clone ID: UC-ZMROTEOSINTE012A02_FLI
tcacgtttgactggtgattctagatatgaagctgcagctcttcgtgctctccgcaagttatggagcatgagaagttcactgaatctagtaggcaccacacttgatgtttttactggcaagtggattgagtattcatccggaattggtgctggtgttgattcattttatgagtatctgattaaagcatatattcttttcggaagcgatgagtactgggatatgtttcattcagcttatcttgcggtacagaagtacttccgacatggtccatggtatcatgaggctgatatgaggactggagaagcaacgcactggcagctaactagccttcaggctttctggccaggtcttcagacacttcttggagacgtaactgctgcaaatctatcacaccgtgagttttacaatatatggcaaagatttggtgtgctacctgaaagatatcttttggactatggaatgttgcatcctacagagaagtactatcccttgcgtcctgagtttgctgagtcaacattttatctttatcaagctactaaagatccttggtacctagaagtgggtgaaaccattgtgaggtcacttaattactatactaaagtggatggaggttttgctagcatcagagatgtttcaacaatgaaacttgaagatcaccagcacagcttctttctttcagaaacgtgcaaatatctttttcttctgtatgatgattcattcttgaggaatcaaaattacatatttacaacagagggtcatccccttccaataagaagcacgtggcatgagaaatttcctgcagcatatgttcccagcaattggacatctgttaaggatgagatccaaccaattcgcgcgagcgcattatcgtctcaagtttgtcccgagacgattttccgaagaagtgttggtaccccatgggagagtgcgtgccatgttccagatgcgcacgctagccacagatgcaggactgacgaggactgtggaatagaagcaataacatgcaagaagaggacctgcagtatggctggctactgcggcttatggctggtgatttattagcatctcaagagcgggaggttatattgttgacattacgggaggattgaaatagcctcggcctataactgtacaatagattagtgggatcgcttgataggttgtcgcatctgtcattctaatttgcctttctgaattcgttttgtacatgcctgcattctggtgcggattttgagcattccagagtgtacgtaaaggaaataaatttaggctccatttggattctttgaattgaatttcattctaataatcctaatttaggatagattgattaagctaatatgatttttagtgaatatatttgcatattattgttggccatat

SEQ ID NO: 35882 - DNA, 564 bp, Zea mays subsp. mexicana
  Clone ID: UC-ZMROTEOSINTE012E02_FLI
ggcattgactgggccgaggtcggaaagcagcttgagctggaaggtgtggactccttcaagaagagctttgacagcctactcgtgagcctgcaggagaagggcaacagcctcaagacggcaactgtgtaagggggtgtttggtttctagggactaatttttagtccctcaattttattccattttagtccctaatttactaaatatagaaactaaaactctattttagtttccttatttaacaatttatgaactaaaatggaataaagtggagggactaatgtttagtccctataaaccaaacacccactaaaactgagaagattgggtaccggcgggtgaacgattttactaaataaaatgctagcttgctggctctcttagtttttacgatgtacctttgctctccattttctgaatcgggattgtattctaggcttgcctggccgtcattgtgtgaccaacgttcatggcttgtaacaagggatgggacgtaaacggttggaaaacatctctgttactttctatacgatttttatttgccccgctctaaagtgtgtttggtc

SEQ ID NO: 35883 - DNA, 1396 bp, Zea mays subsp. mexicana
  Clone ID: UC-ZMROTEOSINTE012F08_FLI
cgttcatgggtcagatggcattgggaatctgtttcttcctgcaccctctgctaagaaggttgaggaaagtgctgctgatttcctgattaataaggtctctgagtttccaggagaggtctctgtgcttgcgttgggacccctgacaaatgtagcattggtatgttcaggatcataggactaaacctatttatcgtgctgtctatgctgtgctatatgttataagtcagtgtctctgttctttgcttaggccatcaaaagagacccttcctttgcaagcaaggttaagaaaatagttgtactgggtggagctttctttgcggctggaaatgtcaaccctgctgctgaagcaaatgtatgataacatactgcattatacttgaggaggctaatactttaacataagtattgaaccttgagtgcattacactgcagatccatggagacccagaagcagctgacatagtttttacttcaggggcagatatcgttgtggttggcattaacataacaacacaagtctgcctgacagatgaggatctcttggagctaagaaactcgaaagggaagcatgcaccgttcttatatgagatgtgcaagttctacagagattggcatgccaagtctgatggttttcatggaattttccttcatgatcctgtgagcttcattgccgtacttcatccagagtacttcacattcaagaagggtgtggtgagagtagagacccagggcatttgcactggccacactttgatggatcagggattgaaaaagtatgtttttttctttctgagtaactcataaaagattgacccgtctgatgttactttataactcttggagtaagcaaaccaaggcaaaagttaccccacatgatctatatgtttcagcagatttcacacttgtttcttcttgttcttcctatgctgcaggtggaattcagagaacccatggtcagggtataaaccgatttcagttgcatggacggttgatgtgccaaaggtcatcagctttataaagaagctgctcatggcaccatgagcaaagtacaaccatttaacgatatgtcgacatcagcgttctctgatgtccaagaaaatttgacgagtacagatgctctttctcagctgcactgtaattagttctggacctaggatggttcctattcctccaatagtaagaggaacctttcattgtgaaaggtcatgcagcagtctcgaataccatgaagcaaattctggcatacgatatcatgtctcacatttgtatcaatacatttcgaatcaataaagtttccctcactctttactgtgcacttttctcaaagatcacaatcttgttgtaatgtgcctctcatgtaaagcaaagtgccaacaaggcatatgatagttttgat

SEQ ID NO: 35884 - DNA, 417 bp, Zea mays subsp. mexicana
  Clone ID: UC-ZMROTEOSINTE012G05_FLI
gttttgtcgacacagacatttctaacgggaagatatctctcagaaccctgatcgaccggtcggtggtggagagctttggagccgggggcaggacctgcatcctgtctagggtgtacccgtcgctcgccatcggcagcaaggctcgcctctacgtgttcaacaacgggagggcggacgtcagggtgtcccgtctcaccgcgtgggagatgaagaagccactcatgaacggcgcttgaaatatttttattgcggatatggaatggtgctcgcctttgtacaatatggctagatacatatatatgagagcttccacgctcggtcgtcgtgtggaaaaaacctatgatgagtgtgtacgatcttagggatgttcgattcagatgccactacacgggcaataactattccaattcatggttt

SEQ ID NO: 35885 - DNA, 747 bp, Zea mays subsp. mexicana
  Clone ID: UC-ZMROTEOSINTE013A10_FLI
aggaagatggggctcgcgttcgggaagctcttcagccggctcttcgccaagaaggagatgcggatcctcatggtcggcctcgacgccgccggtaaaaccaccatcctctacaagctcaagctcggcgagatcgtcaccaccatccccaccatcggtttcaatgttgaaactgttgagtacaagaacattagcttcactgtctgggatgtcgggggtcaggacaagatcagacctctttggaggcattacttccagaacacccagggtcttatctttgttgtggacagcaatgaccgtgaccgtgttgttgaagccagagatgagctccacaggatgctgaacgaggatgagctacgtgatgctgtgctgcttgtttttgccaacaagcaagatcttcccaatgccatgaatgctgctgagattactgacaagcttggattacactccctgcgccagcgacactggtacatccagagcacttgtgccacaactggcgagggtctgtatgaaggcctggactggctgtccagcaacattgcgagcaaggcttgaggcctaccttgaatgtcaaccgcgaactgactaggagctccggatgtatcatggaaactcaggacagaatcgcagttgcaacctgttagatgtcttctaccggcactatatatattttttgtttgatgtgtaatgatgttactgttcaacgtttattaccctactatactgttggatgttctttggacctgtttc

SEQ ID NO: 35886 - DNA, 789 bp, Zea mays subsp. mexicana
  Clone ID: UC-ZMROTEOSINTE013B03_FLI
ggaggcgcggcggcgggggcagtaggtccgcggcggacggcggcaggaccgccaagcagaagcagccgcagcgtggactgggcgtcgcgcagctcgagaagatccgcctccacaaccagatgctggccgcgtaccgctccgccacccggcagccgccgcacgaccacccccagcagccgcagggccacgacgtcgtcgtcgacgccgccacgcattttcagctggtgccgccgccacggagcgactccagctcgttccagccgtaccaccaccggggcgtcgtgcagtactacggcggcatgtacagcaggaccgaaacgagcccgccgtcgctgtacgcgcacgacgtcagggactcgtcgggacacaggctgggtccgccgccgcagcagcagcactactgcatgacgatgatgagcagcagcagcagcagcaggagcgacgacggtgcctgcagcgccgccgaggagctcgacttggagctcaggttgtagcagggaccggctgcagcttttggttttgttctgggctgggtcatgtaatcgcttcgggatcacttggatcatccattgctatcatgcatgcatgggccaagaacatgcatcatatatagaattgaactctcgattgatcttgttgagagatgaaaacaaaacggccggaagtcggaaaacgaaggatccgccggcatctttttgatcccacggcctcataactagtagcatgcagtagcagctacagattagtagtagctccattatcattaataaaagatacagtaaaatttat

SEQ ID NO: 35887 - DNA, 832 bp, Zea mays subsp. mexicana
  Clone ID: UC-ZMROTEOSINTE013C03_FLI
ggggaggtgctggagttcgatatggaaggggtgtggagggagatggaaggcctcgtgaaagacgggctcgtcaaggatataggtgtctgcaattacacggtcgccaagctcaaccgcctgatgcggtcagcgaatgttccaccggcagtgtgccagatggaaatgcaccctgggtggaagaacgacaggatctttgaggcatgcaagaagcatgggatccatgttactgcttactctccgctgggttcgtcagagaagaacctagcgcacgacccgctcgtcgaaaaggtagccaagaaactggacaagaccccggggcaggtgctcctcaggtgggcgctccagagggggacaagcgtcattcctaaatcgaccaaggacggaaggatcaaagagaacatccaggtgttcgggtgggagatccctgaggaggacttcagggccctgtgcggcatcaaagatgagaagcgcgtgctgaccggagaggagctgttcgtgaacaagacccacgggccgtacaagagcgcgaccgaggtgtgggaccacgaggactgagcggagctgccgtgccgccggatccctccactccacctgatgaaaccagaataaaggataccgacgcacctgtcagtcacctccctcccgtgccttgcgagagcggcagcctctcgcacagggaagatgctctgtgtctgagagcatgcagcctcgcacgagaaagatgcagaaggagtgtgtgtggcgcgcaatacactcctgtactgtacgatagactgaataataataaagaagaaaacgcagcagtttgccgttgcgttttcctttgtgcttg

SEQ ID NO: 35888 - DNA, 451 bp, Zea mays subsp. mexicana
  Clone ID: UC-ZMROTEOSINTE013C04_FLI
cgcctccctcgccctcgcactcgccgtcctctccttcctaacctagccctgccgcgccattaacggcagctccctcgtcttacgtgttatgtctcgtcgtgttcagtaccatacctctctgaacatgagccagctgctgctctacttggcttgctccatggcggaaggggacgggccgggggagctgtactgcgacgaagaagagtgcggtggaactggttggttggttccagcttcattttcacctcacaccccacactgctagtggcgacggtggttggggggggtgcggtgcgtgcctttttgatgaatcctagctacacgacgggatggcgtgtggtttattcgctggtaggatggctgtctcttttcctccgaggaccattcatgtcttccttgtttgtacgtacctctcttcctttcttgttttatgtacacaagacttgtcgct

SEQ ID NO: 35889 - DNA, 1268 bp, Zea mays subsp. mexicana
  Clone ID: UC-ZMROTEOSINTE013D05_FLI
gctgcttaaccaaagcggtctagagcaaattgaactgatggataagaagaccaaggttatagtttgtgttgctgctgcacataagttactgtcaatgatggctatgattattcattctagaaaaagaaaacgaaatgcaaggaggacagggattacctatgcaccaatgcatgaaagggatagaattagaattgaatatctcaacacaaagatttggagggatgacacaacatgtataaacatgattagaatgaaaaggggttgtttctttcacctaactaaacattttagagagcgtggtttacttcaggacactatccatatgtgtgttgaacaacaagtggccatgtttctaaatacaattgggcataaccttagaaataggttgattggcacgaattttggtagatctggggaaacagttagtcgttgtttcaataaagttcttcgtgcaattggtgagctacgaggggaactaattaggccaccttcattggacactccaaccaaaatatcagggaactacagatgggatccgtactttaaggactgtattggagctattgatggtacacatgtaagagccactgttcctagagatatggagcatgcctttcgtggtaggaagtcctatgcgactcaaaatgtaatggcggctgtagattttgatctacgcttcacttatgtgttggctggttgggagggaacaactcatgatgctaatgtattacgagatgctttagaacgtgtgaatggccttcgcgttccacaaggtaaattctaccttgttgatgcgggatatggagcaaaaccaggattcttgcctcctttccgtggtgtgagataccatttaaacgaatggggcaataatcccgtacaaaatgagaaagagttgtttaatctaagacactcatctcttcgtgtcacagttgagcgtgcattcgggtcattgaagagaagattcaagattttagatgatgcatctcctttcttcccttttccaacacaagtcgatattgttgttgcttgttgtatcattcataattgggtcatacaagatgggagtgatgattttattatacaagattctaattggcctagtcatagccatgctacatctttagttggccaagcaagtgagcatgctgctatggttgctttgaggcaaggaattgcagaccagatgtggacagaccatcagaactacaatgaaaactagtatcttgtaatatttgtaagaactatttgtaaggatgctatgttattgc

SEQ ID NO: 35890 - DNA, 1148 bp, Zea mays subsp. mexicana
  Clone ID: UC-ZMROTEOSINTE013D06_FLI
caggagcccaaagaggaggagcccgaggaggcgccggtgcctaaggaggaggagccagaggagctcgagggggtggaggaggagggcgaggacgaggaagaagaagaggaggaggaggaggaatgcgaggatgagaatagcagcggcgcccggaagaagcagcggggtaatgatggcaaaaagaggggtggtggctttacaaaattatgcagtctttccccggcacttcaagagtttgtcggcgcctctgagttagccaggacagaggttgtcaagaagctttgggcatatattcgagaaaataatcttcaagaccaaaacaataggaggaagattttgccggatgagagattgaagaagatcttcaatgtcaattccattgatatgtttcaaatgaataaagctttgaccaagcatatctggccattgaattctgagggtcctgtctctcctgatagatcaacacccaaagagaagccacaaaagagagacaggagtgaaggaaagaagcaaaagggtggctcttctggagctggatctggttttcttgtgccccttcaactttcggatgatttagtgaaatttatcggcactggtgagagcatgttatcacgatctgatgtcgtgaagaaaatgtgggattacataaaagggaacaacctgcaggcccttttatttcagtcgccttccagaaataggctgtatgcctatccactatggtcaatagccagagttctaaattgcagcagcaaccagccaattactgtcagtaacttgaaaaattctagggcacttttgacatgttatgttggacttcttgaaaatcgtcgtgaaagaaaataagagaacataatgcagtgagatgtctcctggctcccagcaaaaggtctgggaaattattgaaaacatattttcaaaacccttattacaatactggtggtgtagccttgtaggtttgagctttcatgggccacagcccaaccaaattgtatttgcatgtgttagtatacaattaaccattatatggttcttctgcagcctcatgcctagcatcacttgttagacatccaaataagtggtgcaataacttagaagactgatgtatcatgtatgattggtctaggtagagaaattcacccttttcagat

SEQ ID NO: 35891 - DNA, 2286 bp, Zea mays subsp. mexicana
  Clone ID: UC-ZMROTEOSINTE013D11_FLI
gaaatattgattccattgaggccccctttagaacatagggtttgtgaaggaattttgtaggacaggagtcctataggggcttttcctatgcagcccatttggaacaaaggattgaccatccttaaatccaacaaaattcctattgtttagctcaatccaaaatgtagcattttaggagatgtaacatatgaatattgtcttataggctgcttggatctattcattttggaggaattggaatttacttaataaattagtctatttggcttggaatttgacattccaccactttctaaagttcaaatataagtctatctcaattcttaaattaatggggtggagtatggaaaatgattttatgtatcaacggaattatgtttctactctgcaacttataagacgttcttcgactcactcctctatagtaaaaatgtagcagataaatatctcccacgtatggtaataataatatacaaaatatatttcacataaaaccatattagcttaattgatctttgcctaaattaatattattagaatggaatttaattccaaagatccaaacggggcgttagagactttaatgtgtgcctctctctcctctagttcctgtctttttcttgctctccgtcccaaaatagttgtcggtatggtatcatgccagccaaactttctctagtttgactggatttgtaaaaaaatttagcaacattaagttttatgaaaattgattcaaagattatctaatgatacgaataatgtactataaatattactacctccgttctcgaatatttgtcgtttgctagttcatttttgaactaaaacgcgacaaataaaaaagaacggagggagtaatattttttgtgtatatttgatcaaagttaaaaatggttgactcctcgaaaagcgagaataagaactattttgggactgagggagtatgctgcatctaaatgaaattagaattgcatgggacatgcactccaatcctgtgtttttccctattcttagtttttggagtcctgtattcagtcattgggttttgttctatgctaactaagcctccaattttcaaaaccaaagcatttcacaaaatcatggtaaatttttttaaaacaacaaaaatacttccacacagggcctaaaatataatcatagttgggtaatttttttgcattgatggtacccaatactaaccatttttttttcaaataaatttcatttggcgatgttctggaaagggactgagaacttttgtactgttcacagagaagactataattcatcgtgatgtgaagtcatcaaacatcctgctgacagatagctatcgggccaaggtgtctgactttgggtttgcaagaagtggccctagtgacacggagaagacacacatatcaacgaaagtgaaaggcacagctgggtacctggaccccgaatacttgaggacataccagctaactccaaagagtgatgtcttctcatttggcatattgcttgtagaaattctttctgctcgcagacccgtagagctgaagagaacccctgaagagaggatcacaatcagatggactttcaaaaaattcaacgaaggcaacacgagagagatactggacccgttgctggaagatcacgtggacgatgaggtgcttgaaaagctccttagcctggctttccaatgcgctgctccgacacgggacgaccggccgaccatgaaggaagttggggagcagctgtgggagataaggaaagagtacggaaagagtgttaggaaggtgtgaagatcatggaaaacatttctctgtttctcaagactttccctggaccaaggggactatgggggtgtttggtttattaggattaatttttagtcctttcattttattccatttaagtcttaaaattaccaaacacggaaaccaactctattttagttttcgtatttggcagtttagagactaaaatagaataaaatagagggactaaaaattagttcctataaaccaaacacctaagcacgcgaagtatttgtgcccattggataaacacctgatcatatatgtttcttggaagatgtggtctgaagaaatgtacagtgcgataacaccgccatcagtttgtgctttcttgtctatcagtttgcagtgcactccctctatggagaatgtatattttggaattctcgcatttcttgattctattgatatggcattctgatggatgtaaccgcatacattactgcaaacggtctgcaataatacacgaagggattgtttgtattggaag

SEQ ID NO: 35892 - DNA, 889 bp, Zea mays subsp. mexicana
  Clone ID: UC-ZMROTEOSINTE013E07_FLI
tttaattcgtctgttttgcatagcatttgctacgccactcatgtcactagtaagctcttgctatgatgctaccccaaaatgggtatgctgcatagtgtgcaggagctatgttcgatacgatcaacttgtgcatgtttggtaatttcttaacagcatatgcatgaaacattcttgtgacactctcgctgcaatgagtagggacaataagttgataagtttgttcaaacaattgagatccccccccctccagtgcttcttgctcttttttttccaatcgtatattgacctgcaagatgattgtgctcgtacaggcatgccttctatttgttccttccataccgagtatccgcttaagatggagatattgattctaacttttgaactctgaatcacaggctgagggtgccatcatggctctgaattgcagcgggatgattttgggaacactgcctgtcaggcatgacctcccctctagccacattctccatttctctttatttgtaggttatctagactgaaaaactgaacatatttgtatctgccaatgctgatggaactgtgggatgtccagggtgagcccttccaagactccggtgaagccccgtgtaaatcgagtgggatctaactgactctgcgcaagctgaactggattgttcacgggaaggcgtcgccataagctgaaggcttccgcggtccggtgcatcatgatgcgtctgctcacattcttacaaacgttttctttgtacccttttgcaaacctgttgttggaagggaactggttagatcaggcccttctatagccagctttcggtttctcctgtttcactggacgtgatggaaccattgaggatgactatcttggcaatcagccatcaaagtaacttctgtt

SEQ ID NO: 35893 - DNA, 1051 bp, Zea mays subsp. mexicana
  Clone ID: UC-ZMROTEOSINTE013F06_FLI
ctgacatccaaaatcagtactctcaatttggaacgtgcccggcgattaaaaagtagactagttgcattgaccagaagagttcaaaaagtcagagatgaaatagaacaactaatggatgatgatggtgatatggctgagatgtatctcaccgaaaaaaagatgaggatggaatcatctgtctttggtgaccagtctttgttgggctacaattcagcaggcgctgttggggcttcagtttcagctcctgtatctccagtctcatcgcctacagaatcacgaaaactggagaaatctttcagtttgtgtagaagtaggcatgacagtacgaagggctcagataacacaatgacagagcatatccaggagctggagatgttactggaagcttattttgttgttatcgacagcactctgaacaagctgacatcgcttaaagagtacatcgatgacactgaagacttcatcaacattcagctggtatgccagcatatttttatgctctctattcgggatatgaatatcagagtttatgcatttctcacactgctggtctgtgtaacttatttggctttccatatgttcctaggacaatgtgcggaaccagctgatccagtttgaattgctgctaacgaccgcaacatttgttgtggccattttcggagtggttgctgggatattcgggatgaactttgagacatcagttttcgaaatagagaatgcattccagtgggtccttgtaattacttcagtgaccggcgttttcatcttctgctcctttctttggttcttcaagtacaagaggttgatgcctttgtagagagtgtatatgccctcctcccataggaccgatgaatcaatttgaaccctgttaagaggcacttgatcagaagcctgaatctctgccgatgtaaattaccattcttttagaggtttacggcatgagtaccgagaatccgggtgaaaattgtaaccttcttgacatgatccctgtgctgtataagagaaaataatattacagtttatacaaataacaccgaccaattctacatcc

SEQ ID NO: 35894 - DNA, 997 bp, Zea mays subsp. mexicana
  Clone ID: UC-ZMROTEOSINTE013F08_FLI
agacctcaaggagggcgatgacagctggagagatccacccaatgacacgctatgtcatgaactatttgaggttgctggttgtttacagtgagacacttgatgcactcttgtccgatgacagcagtgatcatgatactttcagaagttctgatgatcaggatcaggaacacttggagagaatgaccccttttggaaggcgtcttctgaagctgatatcttacctggaggccaatttggaggaaaaatctaagctctatgacgatgctgccctggagtgcatatttgccatgaacaatttgctctatattgttcagaaggtaaaggattcagagctggggaagggtttgggtgatcactggataaagaggcggagtggcaagattcgacagtattcaaagagctacctaagggtttcgtggacgaagcctttgtcttatttcaaggaagatggacatggcagtgggagtggtagtggcagtggcagcggcagcggcagtgggcattcaagttcgaggatgtccatcaaggaaaggttcaaaaacttcaacatggcctttgaggaaatttacaggaaccagacactctggaaagttccagatcctcagctccgggaagaactgaagatatcaatatctgaaaacgtgattccagcttatcgtgcttttctgggcagatatggcaatcaagtggatgggggaagaaatccaggaaagtatataaagtacacaccggaagatttggagagccagctatccgatttatttgagggatcaccagtgtctgccaatcactctaggagaagagcatagttcatggttggccggatccatgttgcaggtacgattttgttttaatgggttgatattgatgaacttttgtacacagcgcatctgttgattggatgcttgtccccatagtagtcactacagtactgtaatacaagatgtgaaccttttgatatgcttcctactgcatagtgtgaactgaggaatgctgt

SEQ ID NO: 35895 - DNA, 1139 bp, Zea mays subsp. mexicana
  Clone ID: UC-ZMROTEOSINTE013H05_FLI
actaaacatggaaatggctattattatggcaagggatgctggaatggattggatcattcacctcgatactgatgagttgattcatccagctggtgcccgagagtactccctgaggcgattgcttttagatgttcctgacaatgttgacatggttatcttccccaattatgagagcagcattgaacgtgatgacattaaggatccttttactgaggtttccatgtttaagaaaaattatgaccatcttccaaaggatacatactttggcctgtacaaagaagcaacacgtggtaatccaaactacttccttacttatggtaatgggaaatcagctgcaagggttcaggagcatttgcgaccgaacggtgctcatagatggcataattacatgaaatccccaaatgaaatcaaattggaggaggctgctattctgcattacacctacacaaagttctcagacctaacctcaaggagggatagatgcggctgcaaaccaactaaagaagatgtgaagcgatgttttatcttggaatttgaccgtttggcctttataattgcatcaacagctactgaggaggagatgaggaactggtacaaggaacatgttgtatggaccgatagagacaccaatttgaaacttttaaggaagagtgtcttgacacgcatatatgcgcccatggctattatccgtggcctcaaggaatctggcgtctttaccaatgcagtaacatcagcgaaagcacagtcaaaaacgaagtcatcaaacatgggtctcggaaacaaggatcctatccagccaaacggaactgctggtcagtccacactggaaggcagtcatggaaagttgcaggcaaccgtgagaaagatcctggaaatggttgacacacaggaagaagcagcgatgccaccaatgtcgcccccgggttttcttgagctgactgaaattgccactgccttttcatgacgctttggtttaaccatgcgtgatgcatgcagccttgagcatacgaatagcattggcttgtttggtcgtcgtcgtcttatcttgcaaccccagaatgaccagatgtatcgtgctgatgtaaaattgctagttatcaccatgcaaagagctttaaatcaacttcagaaggtattat

SEQ ID NO: 35896 - DNA, 815 bp, Zea mays subsp. mexicana
  Clone ID: UC-ZMROTEOSINTE014A11_FLI
cggagactgagcgcggggagggcgacagcgtatcgatagatgtgccgttcgaggagctctgtgacgaggacaagatcaccgcgttcttcaggaggctgttgaacgagtggacccaggaggtggacggtatgcctgaggcggaacggaggacggcaaaagggaaggccgcgatagccacctgcaagcagtgcacgcgatacctcgaccctctgttcaagcagtgcaagaagaaggctctcccttctgatgtccgacaagcattgctggaggtggtcaagtgctgtaggagacgagactacttggctgcagtggacaactatatcaagctagcgataggtaactcgccctggccaattggtgtgaccatggttggtattcatgagcgatcggctcgtgaaaagatctacacgaacagcgtggctcacatcatgaatgatgagacgaccagaaagtacctgcagtctgtgaagaggctcataacattctgccagagaaagtaccccactgatccatcaaggtcggtagagttcaacagcctggcaaatggtagcgatctgcagtctctcctggcgcagcaaaacgcgaagaattcagaagaaacgcttcggttagtggcagcgtcatgaaaggttggattatatctgtcctcggaattttaggcaagttcgattcttgtgtgatttatttgtgatacgaattagtacttgtaagaacctgaattgtatgttcggtcgttactcgttactgccttactgaaccgtggaacaggaacctaatttaactggagcatattgatactgtttgtggacattgct

SEQ ID NO: 35897 - DNA, 749 bp, Zea mays subsp. mexicana
  Clone ID: UC-ZMROTEOSINTE014D11_FLI
gtggaaatgaaccaagtgcctgtttctttgccaataagaactctaccatcaggtgcaccaggtatgactagcagggtccagacagggagggcttactatcctgtggttggaagcagcagcagctcaagtgttggtgctgtcccaacaatccagggatcatctggcgctgcaatgtttgctaacggtggctatgctcctagtagtgttcatgctggaactgttccgatcttccctaatccagctcctgctacttcatctggctccagagccatgctccaccagatggtcattcagagtcatccacctgctacttccgcagcaacctcttctacatccatgcggaccgtccaaccatcattacctgccagaaccgcagcggcttccagacatgcaaggcatgtgtcagcagggcttgctaacaacggaaggtacagaagggccaggagctcttactacaggcttcatccattgatggtagaggcagagcggttcatgatggaccacttggtcttctacgaatcgagagcagcagctgctgacccccacagggacatgagactggacattgacaacatgagctacgaggacctgttggctctgggagaagctatgggcaatgtcaacacagacctggccgacgaaaaaatttcggagtgcgtgaaagaagtggtctgctgcagttctgaccacacgcagatggaccaagacgatggaagctgcgccatttgcctggaggactacagagacaa

SEQ ID NO: 35898 - DNA, 1644 bp, Zea mays subsp. mexicana
  Clone ID: UC-ZMROTEOSINTE014E03_FLI
gaacagaagcctcccccgccgcacccgccaggcggcgcgggcgcgcggcaatggccgcgcagaacgctgggatcatcatcgattgtcgacaggcgatgtcccccgatcccccggccgtggagttggaggtcatcggctcatcttctccgtccatcacgccatgtcccgctgcagcggcgcccgccgacgccgatttcgatcatgacggatgcaccgcggaattatcttcttcaactgatcgagaattacaggaccatatcagacagtgggaagggtcctatgggcagggtgtactccgtaggatgccggatggtggcgagaagatgcattcacgtgtcctccggatgaagaaggagctcgagcggcggagggccagacagaggatggatgtcacgcccttgagacagacagtgcaagctaagcgtactggtggcagcagtggagaaatctacaacttaaagtctgatgatgagaccatggacagtacggctagcaaacactatccaaactcaagttgtactacatctacgaagacctatacccaggtggaaccttgccaaaaataaggcctcacccttggagattaaaaaggatgtagttctgttggatgacgatgatgatatagagcctgctagatcagctgatgttcagatatctaataagtgggaggagtcaaatatccactatccttcaagcactgatccagaagcggttgaactgacctactctgacatgaaatgtcttgaaccagaagaatatttaaaatcacctgttataaatttttaccttcagtacctcaagaaggcaagacctcgcagggatttacacatgtttaacacctatttttatagcaaactcgaagaagcactatccaagccgggtcaccatgactcagaattcagcaagttacggagatggtggagaggtgtagatatttttaagaaagcgtacataattttgccgattaatgaatcgatgcactggagcttgatcattgtttgcatgcctacaaaagaggcagattctgggccaataatacttcacttggactctcttggtcttcactccagtcaaaagctttttgacatagttgcgaggtatattcaagcagaacggtggcacctaaggatggattcgtcttatgatattccattttcagggaggatatggaggcgtctttcgaaaaatatcaatagggaaaagattgaggtgccacgtcagcgtaacgagtatgattgtggcctctttatgctttactatattgacaggtttattcaagatgcgccagagaggttgacaaaagagggccttggcatgtttggacgcagatggttcaaccatgaagaggcttcagcgtttcggggagggatacgggcgctactgattgatctatttcatagtgctctagacgacgatggaccatcggaggcagagcttgaagacaaggacattcagatggactgagcctgctgttgctgctttgattgaatatgtaacctcgttcactcccaagtgaagtttggccgtggagggaatgcgccccgttggttacacacttttgtttacacgctcgtttattcggcggtggaaatgtacagttcaacgttatctaagggcctgtttggaaccggattcagattcaac

SEQ ID NO: 35899 - DNA, 1055 bp, Zea mays subsp. mexicana
  Clone ID: UC-ZMROTEOSINTE014F08_FLI
agctctcgtcccttcgcgttgccctccgtggtcgccggctagctccacatcgccgccatggagttcgccggggctggacgaggaccaccggccgcccctctgtagcagacaccgccgccgcgccggacaaggacgtggaccactgaagcaggtcatcgaccacgtttcccagctgcagcaggacgcctccgaccggatctgcaccgccaccggctctcaggcctcgtctacaccggcagcaaccaatttcgaccaacagtgactgagagtgaggatgtcgcaggcaagcttctctggtttcggagatcaaaagcagcaggtgttgcttacagagcacgatatttctaaggcggaattgaggaatcttccgctggtcaactgcccattctgcatagaccacccacagcttgcggcgcacgtctcagggcaacctaaaagcatgggggcacattttgtcgcatgtcggagatgtgataagatggttgagaagaagatgagatgcccctttttcaagtggctgtctgtttatgcggagttcctgctggagaaagacacttatgatgacaatagtcttcttcgtaagattcaagcacttcagagggagaaagaaaatgccaaattactcgagaaccaggtgacaagtccatggaacgtgaactaccaacaggggagcaaggtgccaacgatgaacagtgcctctgaggttatgatcggtgcctctgaactgagagaagttaaggaggtacttctcaaggtgcttaaggtgctgcgacagcttcgagtcatgtttgcacttgccctagcggctctcgttctcatcgctcttaagtaataactagggaagttaaggagctacttcttaaggtgcttaaggtgctgggacagctttgagtcctcatgtttgcacttgtcctagtggctctcgttctcatcataactaggaatcgctaggacattggatgacactggtagaattagatggcaagtcctaaacccaagtatatccctatgtaatatcactcagtcccatcttatattatgatcttatattattc

SEQ ID NO: 35900 - DNA, 996 bp, Zea mays subsp. mexicana
  Clone ID: UC-ZMROTEOSINTE014F10_FLI
cagaccgtggcttcaccttcctacgctataacctcactgtggcataccacagaacaaatctcttggtacgctacggtaggtggtcaagggatccaaatggaggccctctagaatctcttggatataagcaaggttacagagttgatgtggatattcctgaccaaacatgggtagaggcatgtagcttccatgatgttcttattttcaacactgggcattggtggtgggcaccctcaaaatttgatccaatacggtcaccaatgctgttctttgagaaggggaggccaattgtacctcctttactgccaccggctggactggatttggctcttcaaaacatgatatccttcgcgaacaaagcaacaagaccaaacgcagtgaaattcttccgcactcaatctcctagacatttcgaaggtggtgactggaatgaaggtggatcttgccaacgtaatcagcccttgtcgtcaaaagaggtggaagaaattttctctttggacaataacagcactaatgtagaagcacgcttggtaaaccaacacttggtgaaggctcttcaacagtctagtttcagagttctggacatcactcgcatgagtgaattcagagctgatgctcacccttcaacaactggcgggaaaaaacacgatgattgcatgcattggtgtttgccaggaccaacggatacatggaacgatttgctagcattgagtctcgagtcacttgagagctagttgagagagctcaagagctcaccggagaaattatccctaactttttttttcagggggatatgagtatgaagcatgaatctactggtagaatagaattttgctgatagctggttttagggcttttgttgcagcttgtttcatataaagtggagcattttccccatttgtttgaccctgtatgttttaatgtcactgtagagttccactgactaatgacgatatactaatgctataatcggtcgaatccattttcttgaccaac

SEQ ID NO: 35901 - DNA, 753 bp, Zea mays subsp. mexicana
  Clone ID: UC-ZMROTEOSINTE014G02_FLI
ggaaggatggaataaaaggaacatacagagtggatgttgacattcctgctaatgattggataaacgtcaccaagttctatgatgttctaattttcaacactggacactggtgggatagatataaattcccaaaagacactccccttgttttctacgaagggggaaagccgattgaacctccacttgacatacacaacggactgaaagtagtcctgaaaagtattgcttcttacatcgaaagggaggttcctaggaaaacactgaagctgtggcgcacgcagtcacctaggcacttctatggaggtgagtgggatcacaatggcagctgtgtatctgatagacgtcttgaagagcatgagctcaattcttggtttgatccccagtttgggggagtgaacaaagaagcgagaaccgtgaatttagcaattcaggaagccctggctggcacggaaatccagttgctcaacctcacttacatgagcgagttccgtgctgacgcccatccagctatctggctcggtaagaaggacgctgtggctgtctatggacaggactgcatgcattggtgcctgcctggcgtgccagacacttgggtcgacatcttggctgcacagatcatgcatcacttcaagcaggggaaaggctgatcacaatttctttaaatctgtagttttgcgataactacagcaactgtgctagaactttttagatttgtatttttgggataacataacaaacattaaatagttttgc

SEQ ID NO: 35902 - DNA, 432 bp, Zea mays subsp. mexicana
  Clone ID: UC-ZMROTEOSINTE014G12_FLI
gacgggtgattctggacccccaaaaggttttgcagcagcacgaaacagggccacgtgaatttatgtggatggttgattcggtcgctggttctggattgtaactttcagggacgctgaaagcttgtttcagcgctgtatgttgtatagtgatgttattggacacgatgtgtagtctctagacctgctactgctgaactcggtcattcagggacagtgaatgcagtgtcgtttaggctaatatgctgcagccttattcatccctcctcctatcctatttcagactccgctatatctatataaatagtgcagtttgcactatatctatataaatagtgcagtttgtaatgcaaaacaatgtatgctcagagtctgagagctcagcttgcaaagaaagagacatgtcacagaatcactgaagtgaaaatgtctggc

SEQ ID NO: 35903 - DNA, 510 bp, Zea mays subsp. mexicana
  Clone ID: UC-ZMROTEOSINTE014H05_FLI
tatcatctatgttctggccaaaccagcaatatatgcgataatttctggtgaagtactgtcaactgaccagggaaaagcgcaaggttttattgcaaccgtgcagtctgtagctatattgttggcaccactatttatgagtccactgacctcttacttcatttcagaggaagcgcccttcgactgcaaaggtttcagctttattgtggcgagtttcttcttggcaatctcgttctgcctcgcttggatgcttaacccaggaatgaaggacaagggcacaaaagctgccgtttcagacagcgctgatgaggaagcagcgcaagcaccactactggcaaaatggaacagaccatgactccaggaaactaagctataaagctcagctggagtgtgcgtaaaattgtaggatatgtgaattagagtgccaacaacatagggcttgcctgtacctgtagtatagtgtctgtacataccccagaacgagaaagccgataaagctcggtgttttgtgcc

SEQ ID NO: 35904 - DNA, 1421 bp, Zea mays subsp. mexicana
  Clone ID: UC-ZMROTEOSINTE015B01_FLI
ttaaagttaaagagaggtctatctcatcgttggtggtcaatacacctagagtaaccccagcagctttgacagggaggcgaacaagagcggttaccaggaaggctgccgcattgcgtggccttggtcctatcattgtggatcctttaaaaaaggacaacgataacccaaataagcaaactgataattcaagcttgctagatagcttgaacaaaatacctcaaacaagaagacagttattgtcgaatggggacacaacaagtcatctctctgttaaagataaagcaggtgataataaggacctggataagtccgagttctggaaacctttgaattgtcttgtagaagctgcaagcaaaacaaagcccctgacaagtgcaccaaggccagctttgaagggagataagcccagaaaatctccgagtagtgatagcgaacattctagcagaacaaagactagggagcctcttcagaagtccaaagctgaagttgacaaaagcgatcccgggccaatagtgatgcttagaaagagagggcggcctggccggaagaggaaaaatcccctacctgaaacaaatgcagattccactgctacagctatccaggccaggaaggcattgagcccaatatggttttcattgattgcctcgtttgaccagaaaggtgtccctcctttgcctcagatacctgcgcactatttgagaataaaggatgggagcatacccgcgtcatctattcaaaagtacattgtgcagaagctcagtcttctaagcgaatccgaggtcgaaataagctgctgcgggcagaccgtgaaccctgggcaacctgtgcgcaacttggtggagcggtggctgagggttggcccggcgcgcccgctgcacacggtgatcggctcctccgggggagattatgtgatggtgataagctatgggcggcccaagtccgcgtcctgttaaaaccatatcaccatcgacggcctggcgaggtcgattcctagttcgaacaagggttggtgccgccgccgctgccgccgccggggaagaggccgtcgacagataaactcaagcagcggtagcgggctgctctgccgcagcagctcgtcctctcaccggcgtgttctttaaggatctgttcgttcgttcgttgttgtcatacatgcacatgtgatggaagtcgctataatttggtagtacttggtaggctgtgagtgagaactgacgtttaggttggaggcgagatcgttaacctgagcttaagtgttgggggcgatgagtccgccgtgtatgggagaggcgctgctggttcagttctttttcctccgttttttttttcacttcttgaagggaaaaatacacacaaatacataatgtacctccgtttatttgtcctgaactaatatccagccgtgactgattcggatcgtt

SEQ ID NO: 35905 - DNA, 1380 bp, Zea mays subsp. mexicana
  Clone ID: UC-ZMROTEOSINTE015B02_FLI
aacagctgtctcatcgccagaaacttactatctggtcttaagacctgcatagaagtggcaaactacatgtataacaatggtgcagcgatggcgaagagacctctcttgaataaatccatctcaggcgactttgcagaaaatgaacaagactacatggagcaagacatggctgccagaacaagaatctatcgtcggaggggccgcaatcgaaagctgaaatatacttggaaatctgcagggcatccaactgttagaaaaagaactgatgacgggaagcaatgttacacacaatatagcccatgtgcgtgccagcaaatgtgtggtaaagattgcccctgtgcggacaagggaacttgctgtgagaagtactgtgggtgttcgaagagctgcaaaaacaagtttagaggctgtcattgtgcaaaaagccaatgcagaagcagacagtgcccctgttttgcagccagtcgtgaatgtgatccagatgtttgtaggaattgctgggtgagctgtggagatggttcactaggtgagccacttgcaagaggtgatggttatcagtgtggaaatatgaagctccttttgaaacaacagcaaaggattttgttaggaagatctgatgttgcaggttggggtgcattcattaagaatcctgtaaataaaaatgattatcttggagaatatactggtgaattgatctctcacaaggaagcagacaaacgcggcaaaatttatgaccgggcaaactcatcttttctgttcgatttaaatgaccagtatgtgttggatgcttatcgcaagggggacaaattgaagttcgcaaatcactcatctaaccccaactgctatgcaaaggtgatgctggtggctggcgaccatcgggttggtatatatgcgaaggagcatattgaggctagcgaggaactcttttatgattatcgttatggacctgaccaggctccagcttgggctaggagacccgaaggatcaaagaaggacgaggcatccgtctctcaccgtcgagcacacaaagtggctcgatagctgaagagtcgctccggatgatacaatatgcagtaaacttaatacttaatacatgattcagtcctagttcattggtagataaacatgctatatactatccattagtaaataaactctcattcatcgagttggagaataaatgcgtataaacatatgtggacctcaggtcgggaaggtggcaaccttgttagtttgagcaccaacaggttctcaaacttgagtggctattgctagagtatcaaataatggctgcgactatagccttgtttgtatattttcttggtgagatgaaataatttgtcaaatgtacactttattcctgaaagtatttgatgattc

SEQ ID NO: 35906 - DNA, 1889 bp, Zea mays subsp. mexicana
  Clone ID: UC-ZMROTEOSINTE016A09_FLI
gtgaaagatagcaatggcagattcctatttggaggtgaggaagagtgtgctggttggatggcacgcagccctgcgatggcgtctgccaggaataatgaacctcaaattgaggactatgaggataagttgcctgaagaaggctctagtccagacacgcaggaatctgacagaagtgactcgaataaatcttcggagcaagatgaggagatggatctggatgattagagatatgtggagcatggatgtatggcacacctttcaaccgctaccagctccaggtccaggctactcgaggaagacaagcatacatacgctcagaatctcctggacaggtgggaatcatcttgcatcgcgcagcgacacatcagcatctggattagtcccaggatcataattcacaaggtcatccagcgtgggagcttgcctggaccgtactcggtatagaacaaggctttaatacgaaactaacactttgttcccttcttcattcacgtgtcattttttgtgggtacagccctaaaaaactgtttatgtacaaatgtcttaactgggaatacatcatttttttgggtgagtttgatatctaatggcgactatgagctaatgagattggcttatggtggacagatgtgcacctgtatacaggacaacattgcaattgtttgtgagttttattgatcgccgaagagtgtgcttacacggatggagttggttcttctgcatgacctgtgctatggatcagaaaatcgtgtatatctactttggctacacgaaaagtttgtgtttcacatgagaagtttttgagtgaaaaaccttctctgaattccgctggctgttgtagtcggatcaaactgttgcatcttacttgttcttgttcatacagggagtgaacagaatgcatcgctgttcagtatatcgaacgcaggattccaaagtttggacatttcaatgcttgtaataaccagtggcagatcttaaaaaggaggccatgtctcctccccagttttaaaacacacatctttgtcaagctccgccactgcctataactgttaaatacatctcaataatcaacattggccatgagacttgacaaattgagattcttctgtctgccaggtgtaacttccaaaactgtaggtcatcatgctattcatttcaatctcttctcatcccaagagcatcaagtgtatgttgctgctttgtgtgaggaccgaattgaaaatggtgtgccacttatacaaatctggatggctgctacaacacaatggcactataggaaaactgaatataggaacacgctactcgtcggacacaaagttaggatcctcaacaacaaatacaaaggtactcaacaagtcctactcttccttatggagatgcagttacattatatatgcatgatcaattcataataattaaagagtaaaatacattttctgtccttaaacttgtcaccatgtctcatctcgatcacaaacttttaaaatatgtcagtccggtccttaattattgttcgggtcttagttaggtctaaatatgtcacggttgacatatggatatcggtgtgatccgaggtcctgggatgctggatatgtgggcttccatggtgggcgatgtttttgttttgtatcatcttctctttctgttctgtgtcaaacgccatatgaggggtagtagtcttggtgctctggcttgtggcttccgccatgagggctggttacctgcctcgacaggtggttgggttaggttaggctctctagcgtcttgcgtaaactggtatccccagctgagtgtgcgtgtgtttttggttgtatttgaactctatacgctttcctaaaagcagagaaagtttctagttaaaaaaaagaatggcctcagtagatgatcat

SEQ ID NO: 35907 - DNA, 1739 bp, Zea mays subsp. mexicana
  Clone ID: UC-ZMROTEOSINTE016A10_FLI
atttcatcccagaagagccccgtagcttgaagggtattgtatggaagtgtaggtcttgtggcgatacacttctgaggttcacaaaccagggtcctccatctgatgcctgctgcattgagaacgatgacatcaatgcatcctgtgggaacatgctttgttattggcacaaccacaagaatgactgttctggtacatatgaaaaaacgatgaagttagaagcaccatctcaaaagaaagttgcaggaggtgctcagttgcttctgactttgccatcagaaatgtccaacattcaagaatccagttcatctatattgcagttagagtggagtactaaatccacagaaccaaatgctgaagacaagcatctttgtctagggagtggcagcaatgggaaacctcagggaagtagctcctcgaagaaagcaggtaagaggaacagtcctgaaatggttggggaaacaagtgttctgcctgctgcggcccaaggaaaacccaatcaaaaccatggattggttgcgatggcgaagcaagcgcctgcgtctgtggaaggctacagtgatgcagaatcaccggggagacatacatcaaagaaagctggcaagcgacataagcctgatgatcttcagaaaagcagtgttctcccttctgtaccccagggaacaacaaaaccaaagcatgcgttggttgcgacagagaataaccctctcccctcagcagagcgccgcaacgatgcaaaatcgccaaaaaccaatacctcgaagaaaccaggagactggcatgagctccagattgctcagaaagcctgttctcagccagctgaccctcacaaaaaactgaagcaagacctgggtgcaccggaaaagaaagaacttttctctttgatgggccccagcaatgagaagttactgggcaggaggtcctcaaagaaggcaagcaggcagcatgaccgcgaagacattcaggaaaaaaacaccatcctgccaactgcccctggaatcagacccaaagcatcagcctttgctgcatcagagaagcggcgaaagggaaaatgcaaaaggaagcctgtggaggaaaaggagtacgctgtgatgagtgcgtggctgaactactacgaatcagacaggtcaagtggatcgcccgagccccttgtaaacaaaagaacagagcgaaggagaagagaaagggcaagaattctgacttattcacgatcaaagaagaacaaaactgagccattggccagctccgggacacatgcctctgtcagtagccacaaaatcgagatggcaccgcaagaccatgcagttgttactactggtaaccaggtggcggtggctccagcaactgaagatcaggcgcagccctctgctgattctgctccatgcctggatcttgttccatttcttcagccagcagatccattgacttctccagatcaaagcactgcccgagacatgatagtgatttctgatgacgactgacccttttcgatgatgatatcctctatcacattttggatggttgccgggctaattcagtggatgtggcgagtatgccatactatattagaagtgacatgctgtgcttgttcttactatagagtagtgtctgagggccccaccgaagtcccttaaactctttcgcgaacatgacgcgagaatgcaggtgctgcagcttgaacttgatttcttgaacaaaattcttggagttcagtactctcctgtgcttctgctggtgcttct

SEQ ID NO: 35908 - DNA, 379 bp, Zea mays subsp. mexicana
  Clone ID: UC-ZMROTEOSINTE016B01_FLI
ccgaccgcaccggagacaagctggcggtggtcaacggcgacgggcacggcgcggcgaacggcacggtcaacggcaacgacgtcgctgtcgcgatcgcggtgtaatagtaatgaactggaggatagggacgaacgaacgactggtaggtgtggcgtgccgcgcgtgcccaccggccggccatatatatcgatcccggcccggcgcggcagcacgtgctatcatctctgaatgtagtgcctcgatcgtatctgtacgtctttaggaaaaggtgtgtccgtgtgtattgtatgtgtgtgagcaagcgtgcgtgacgcgctctgcctgtgtgacaaagcagagcagtacaagctcaggcattttctgtccgagcgatgatttg

SEQ ID NO: 35909 - DNA, 819 bp, Zea mays subsp. mexicana
  Clone ID: UC-ZMROTEOSINTE016B11_FLI
gctagctctctgtctcctgctcagagtcgcagttcgctttgttgtactagagcgctgagcagatctttccttgtttccccattccggaacgaaggggaagggtccatccaagtgaagggaagagaaggcctgcgagcgatgggcatcgtcgacgtcgtctccgagttctgctccttgccgaggactcgccggcatctcaagaagaggaagcagttccagacggtggagatgaaggtgcgcatcgactgcgaagggtgcgagcgcaaggtgaagaaggcggtggagggcatgaagggcgtgagctccgtggaggtggcggccaagcagaacaaggtgacggtcacgggctacgtggacgccgccaaggtcatgcgccgcgttgcctacaagacgggcaagcgggtggagccctggccctacgtgccctacgagatggtgcagcacccctacgcgccgggcgcctacgacaagaaggcccccgccggctacgtccgcaacgtcgtctccgaccccaccgccgcgccgctcgccagggcctcctccaccgaggtccgctacaccgccgccttcagcgacgagaaccccaacgcctgctccgtcatgtagtagaccacccacacaccgaccgaccgacccacttgttttctagctattagttactagtagtatagtaggtgcttgcttgggagcaggggtggacccagcgggtggtccatatggtacacggcacaccctaaaatcacataagtgtagataacacagtggtgtaagtgttatattttaaacttggtggtcaaggttctagtcttgttgattctt

SEQ ID NO: 35910 - DNA, 761 bp, Zea mays subsp. mexicana
  Clone ID: UC-ZMROTEOSINTE016C03_FLI
ccttgcattggctttgccatgctgcttatggatctttccggaagaaggtttttgctgctaggcacaattccaatcttgatagcatctctagttatcctggttgtgtccaatctaattgatttgggtacactagcccatgctttgctctccaccgtcagtgttatcgtctacttctgctgcttcgttatgggatttggtcccatccccaacattttatgtgcagagatctttccaaccagggttcgtggcctctgtattgccatttgtgcctttacattctggatcggagatatcatcgtcacctatagccttcctgtgatgctgaatgctattggactggcgggtgttttcagcatatatgcagtcgtatgcttgatttcctttgtgttcgtcttccttaaggtccctgagacaaaggggatgccccttgaggtcattaccgaattctttgcagttggtgcgaagcaagcggctgcaaaagcctaatttctttggtacctttgcgtgcaactgttgcactgtaagttagaaacttgaaggggtttcaccaagaagctcggagaattactttggatttgtgtaaatgttaagggaacaaacatctgctcatgctcctcaaacggtaaaaaagagtccctcaatggcaaataggagtcgttaagttgtcaatgtcatttaccatatgttttacctatttgtactgtattataagtcaagctattcaacgctggttgttgctagaaatctttagaacaaagatg

SEQ ID NO: 35911 - DNA, 1625 bp, Zea mays subsp. mexicana
  Clone ID: UC-ZMROTEOSINTE016D02_FLI
tctgattttacaagtcagaagcaggtcatcaaacctaagctggtacgaccaatgcggattcctgttacatcatgtgcatgggaccatgaagggaaacgaattgtgggtggcataggggatggttctatacaggtctggaccataaaagctggatggggtagcagaccagatatccacgttgagaaaacacacacagaggatattactggggttaagttctcaacagatggacagagtcttctgtcaagaagtatggatagtactcttaagatatgggatttgagaagaatgaaaactcctttgaaagtatttgaagatctgccaaatcactacgctgagacaaatgcagcatttagctcagatgagcagcttatttttacaggaacatctattgaaaaagatggtgacaatgggggattactttgtttctttgatagaaagaaacttgagcttgtatcaagggtgggaatttcagcacattacagtgtgataaggtgcctctggcatccaagaatcaaccaggtgtttgcaacagttggagacaagaaagaaggtgggactcatatcctgtacgatccttctattagtcaaaggggagctcttgtatgtgttggacgagcaccaaggaaaaagtctgttgatgattttgaggtgcaacctgtcatacacaatccacatgcattgccacttttcagagatcaaccaagtcgtaagcgtcaaagagagaagatactgaaagacccactcaaatcccacaaaccagaagcacctgttaatggtccaggttttggtggaagagttggtactacaaaaggcagtttgctgacacagtatctcttgaaggaaggtggtttaattaaggagacctggatggatgaagatccaagagaagccattttgaagtatgctgatgctgcggagaaagacccaaagtttattgcgccagcttattcccaaacccagccgaaacctgtttttgcggagtctgattcagacaatgaagagaaataaccatgcgcctggttacctaagctagcatgcacctgcattctgttttctgacagatgtctcttgatgagcttgttgcacatgccctgtaacctgcttttcaacagtggagaaacaaaagagcatcttcaagggtcttgatgataggagctctgccccttcattacagatggataggattagtatctacgacacttcagcactagagctctatgatttgttggatgttgtacccactgtatgtacttagtcctgaaacagtggccaatctatattatactctctctgttctttcttttttatttgtcgcggtctagttcaaaaatgaactagcgggcgacaaatattcaagaacggaggtagtatatgacttagacgtaactttagtgcaccgaatgtagtcaacctttgtttgctttggagaatgaggatttgttgttctagtatcagtctctttgttgttcctaatgggctagttggaagatattttgaggattttgaaaggcaaatgctgtttttgtgtggtttgggctgtacggtccaaacaagttgtgaaacagtggcgtatcagccttgttattactatgatccaacaagccaatggtcctggatatagc

SEQ ID NO: 35912 - DNA, 923 bp, Zea mays subsp. mexicana
  Clone ID: UC-ZMROTEOSINTE016D09_FLI
cccgcccccgcgcccgcgggctccaggccgagcggaagctaggcgcgatgtcgctgtcaccggcggacggcgcggcgtactggctgcgatggcaggtcctcgtctgcggcgcgctcatcgcgctgcccacggtggccgcggcagcgctgctgccgcggctgcggagagcagcgccgcccctgcgcgcggccgacctctgggtcccttgctgggcgcgcctccacccgggctggctcctcgcctaccgcgccgtcgcgctcgccgccgccgtagcgcttctcgcgcgcctcgtcgtcgcgcgcggcatcaccgtcttctacttctacacccagtggacgtttctattagtcaccatatattttgcgtttgccacagctatatcagcccatggatgtttggtttactcaaggaaaagtttgaggaaagccgacgaatcccgtggacttcttaatgctgatgtcgaaaatcgtgatgtttccatttctggagagaggaaaacagatgagacaaatatgatggtgagctattatgaacaaacagtgaatgagagaagagctgggttctggggccggtgcatggaaatcatataccaggacaacgctagagacactgacctagagtcctcacatcgtcatctcgatgttgaggctaggtatagccaaagacgtcggataggaggtccgagacttcgagagcctgtcgtggaggtctatgatattgaagagtttctcgggaggcgaccgatgctgatggcctcggcgaagctgaagaggtggagcgcggcgccattaccaagcatcacaatactcgttgagctttgaaaccaatttacacgataagttgagcttcaaatagaatgtccttctcgaatgtaaagtaaacataagaacacacctgagaacgatgtccttctcgactttact

SEQ ID NO: 35913 - DNA, 533 bp, Zea mays subsp. mexicana
  Clone ID: UC-ZMROTEOSINTE016E01_FLI
ggaggaggagacgtcacgcctgcgcggctgcgcccaccatggacgaggaggagttccggcgcatgctcgacctcttcccggtcgtccgctcccgagactactgctgctccgatcctggaacatccagcagaggaaccagacagcgatcacgagttcaggaggcaactaagggcgataataaggactcgtctggtgcacaagatatgtttatgcagaaattgaagatggctgcggagaataagattggagcgacaaaggcagagttcttctgcaagacattcgaagaagttcatgagaaacttgttcacagagagctgaatttggatgctgcgaagaagttcctgagcgcatatgagagctgatgatgaacaataggcaaacttttaacaacaggtagatgctgttgagcataccgcctgattggttcaccgatcgtccgtagccagctcgtatgcagccaggccgtccagagacggttatttgggccgtacgagtggatgcacccaaatgacttcaaaataacttatgttaac

SEQ ID NO: 35914 - DNA, 1257 bp, Zea mays subsp. mexicana
  Clone ID: UC-ZMROTEOSINTE016F09_FLI
aaaaacagacagctgaacgaccctcattttcaacttttgataattggtatgtatgtatacacacaaggccgatcttctaatgttgagtggcttctatctaataacaagccacacaagacagtttagaactggcaacctcctaaatagtttttcaagtcagcattagcgttggtgagcccaccaaagcctctgttacatcatttaccacaagcctgcacaacttcaatcactcatcattcactatactctgaagaatatgatgatgtaccacctccatcctcatctccgttggctgctccatctccaccgtcgtcgtcatcatcatcttcaatgtcatcatccccatccatctcaatgtcatcatcctcatccacctcgacatcatcatccccatccatctcaacgtcatcatcctcatcaccagcaggatcttcagcttcatagtcctctccatcttcctcaccctcatctccttcagcatcctcatcattatcgtcgctcccatcacccatcatctgtacgggtctggactcggaattgtctcttggatagcctgaaatatgcccaccatattcctcattcataggttcgacattttcctcagactcgtcggattgagagaccaaattgttctcatcatccttcacatattccctcctctcaaaggcccactcttctgcacctgagctctcgggagaatgcgtagtgccagtgtgatttgtcttacttaacatgctaaaacttcccaataggtttgcctttggaattgatctggcactgagctcggatggttgccgaggtctaacagttcgaagtccacgtccacgtccacgtccacggccgcggccaccacgtgcattctttcgtggggctctcccatagagcatactattgtcatccctgaactgaatcctggaagagctgccaatacctctgggaaccctaccaccacgaccacgagatctacctcccctgctgcctcctctacctccccttccacgacctctacgaccattgctgttaggtagcaacgctccatcctgttgatcaaaaccaataggcctgaactgttctatttcttgtttgcccttattcatagaaggatatctcggtggaagtttcatgaaatctccagattcttgctccttatttgaacccaactttggatgaagggtgtatgagatggaagcatccaagtctaacaatcttaaggctacagcagcagtagtgtcaggaacccatggaagtgcagtggca

SEQ ID NO: 35915 - DNA, 1367 bp, Zea mays subsp. mexicana
  Clone ID: UC-ZMROTEOSINTE016H03_FLI
catcgaggtcgaggaggagggaagggaaaaggggggcgcatgggcggccagtggctgggggaggggatgccgtcgtccaacctgcagtgcttcttggactgcaccacccccaccgtcgagacgcacattctccccaagacgaatggacgattgccgaccgacgcctggcaccacgctgagatggacagcgtcgagtacttcaatcttgccgacctctgggaacagtactatgaatggagcgcgtacggcgccggagctacggtgcagctcccaggaggggacagagtagttcagtactatgttccatacctgtcagggatgcagctatacaccaacaaggtcctgactgcatccagaagttttggtgaagataatggcatggatttatggagtgatgatgaggacaacgagaagatgtcgagatcctggagttccacctctgatgaatcattgttcaactgtgatgtgttatggtccaacaggaagcgtccagggcacctgtactttgagttctttgaagtaggttcaccttatggaagggttcctctcattgacaaggtttatgaactatcccagggctttcctggattgacatcactgaagagtgctgagctttcgcctgttagctggatgtcagttgcctggtaccctatataccacattccttaccagcgcagcgtgaaggacttatctgcatgcttcctaacttaccataccatttcctcctcgtttcaagatcacgggcttgagaccatgaccactgattgttgccatccagttgcaaacggcaaacaaaatggccacatggataagaagagcaacaccgtatcactgcctccatttggcctcgcagcacacaagatacaaggttccctctggaccaaccccatgacaggagaccgcagaaagatggacttcctcttcagtgcggcagactcctggctgaagcagcttggagtccagcatcatgacttcaacttcttcatcactcaccccatgtgaactgctgatccggagtggcttgcaaagaaccacatgggtacagtttgaagctagttatattacctacaccaccaccaacggggtagcaaaacgtttacagtacaatgcactggtgaaacgagtctaacaatcgcaggatagatttatacttgagtttactgctgcagcgaataccaaacatgtcggcactcaaaaaggttttctgtttcttgtttcttggcagaaaatgtaactgatctgtacagaagttttgcaactaatttggtatccaatgtgggggttggatccatactgtagctgttgcttgtgaactttagtgccctagagaatgttagttccaggacgaaactgtttgcgcagactcc

SEQ ID NO: 35916 - DNA, 1120 bp, Zea mays subsp. mexicana
  Clone ID: UC-ZMROTEOSINTE017B09_FLI
tgagacagagaccgaaggggggggttgaccggtgctcgggaggaagatgtttagcgggacgcagcagaagtgcaaggtgtgcaccaagacggtgtacccgatggaccagctctccaccgacggcgtcgtcttccaccgctcctgcttcaagtgccagcactggtgatgcaatgtagcatcgggtagtagatctgcgaattgccgcagcgaacagatctggtgcgagtttcctagtaccaggaaaattctacgcccaggagaggtcatgactttgtccgtttcccattcgctaacttggtgaaagaggattgggcagggaatccatgcaaatggacactcttatctgatcttctacttaggacgacctgtcgatgtctaggcaaagataagcagctgtgcgaggtctgacaatctccgtcttcatcctttccgcctttgacagctgagcaactattcctcgttcgaaggagtgccgtactgcaagacccatttcgagcagctgttcaaggagaccgggagttacaacaagagcttccaatcacagtcacctgcaaagattactccggaaaagttggcccctgagctgaccagatcaccaagcaaagctgcaaggatgttttcaggaacacaagacaagtgtgcgacttgtggtaaaactgcgtatcctcttgagaaggtaacagtcgaagagaagtcctaccataagtcatgcttcaaatgctcccacgggggctgcgcgattacaccttccaactatgcagccttggagggcatcctctactgcaaacaccatttctcccaacttttcaaggagaagggaagctacaaccacttgatcaagtgcgcgtcggtcaagcgcgccgctgaagcacagccagaacaaccggcctctgattcctcctcctgaccacgccatttaaacagtgggggtttggaggcgagagagttgggaatcctcctgtttctacttaaaaccgcatgatgtatgttattattccatctatgccccgaggatactagactactctattttggtatcctctgctgtgctagctggatcatatcagcgaaccatggaattgctgtcattttcaatgaaactgttgtgcatcaagtagtg

SEQ ID NO: 35917 - DNA, 1158 bp, Zea mays subsp. mexicana
  Clone ID: UC-ZMROTEOSINTE017C07_FLI
tggatgtgccattctgatgcacaacaaggttctgtcagtggttggtattttgcaagacgaagttgatcctatggtttctgtgatgaaagttgaaaaggcacctttggagtcttatgctgacattggtggcttggatgctcaaattcaagaaatcaaagaagcagttgaacttcccttaacacatcctgagctatatgaggacattgggatcaggcctccgaagggagttatactatatggggaacctggaacagggaaaactctactcgcaaaggctgttgccaattctacttcagcaacgttcttgcgtgttgttgggagtgaattgatccaaaagtaccttggtgatggtcccaagcttgttagagaattgttcagggtggctgatgatctttctccttcaattgtctttattgatgagattgatgctgttgggacaaagaggtatgatgctcattctggtggtgagcgtgagattcagagaaccatgttggagttgttaaatcagctggatggttttgattcaagaggagatgttaaagttattctagcaacaaatcgtattgaaagtcttgatccagccttgcttcgcccaggtcgaattgacagaaagattgaattccctttacctgatgtcaagactaggcggcgcatcttccagatacacacatcgaaaatgacactggctgatgatgtaaacctagaagagtttattatgtcaaaagatgagttttcaggtgctgacatcaaggccatttgtactgaagctggcttgcttgctttgagagagcggcggatgaaggtaacgcatgcagacttcaagaaggccaaagaaaaggttatgttcaagaagaaagaaggcgtgccggagggcctatatatgtgagactcatcagcagcgctattagtctttgtgagagaactggcgtttgtaatctgcttaaatggtccgaaaatgtttgcttacagcatttattttggttggaaacacacaactcaaacaaacagttatcctattatgagtacttggatatatgaaatggcagcatcgagtcaagatgaggttgaatgttggttgtctgtgcaggcgtggacatgtatgacaagcatcctaggtttcaatcctaggttaatatgataattttatattttttatat

SEQ ID NO: 35918 - DNA, 539 bp, Zea mays subsp. mexicana
  Clone ID: UC-ZMROTEOSINTE017D11_FLI
gtgaatgttcaccgtctcatcatgcgtggcacccttgaggagaaggtgatgtctctccagaggttcaaggtgtcagtcgccaatgctgtcatcaatgctgagaactcgagcttgaagaccatgaacactgaccagctgcttgatctgttcacatcaacccctgcttcaagaaaagcaagcgacgagcagagtaagaggaaatctggtggcaaaggcttgaagtccattcttaatggtctggatgagctttgggatcagtcgcagtatgccgatgagtatgatctgaaccagttcctggcgaagctgaacggctgagccaccaccggctggctcgtgtacagtgtataaagcaatttggggcaggttaattttgttgttgctgttgtttgatagaggaaggaaaagattagatgctaacagatataggtggtggttggggttacgatctcattttttttggtttccatcttcctcaatttttgttttgaggagttgtatatactctgctcacctataatcaaagctgcagctcttatcag

SEQ ID NO: 35919 - DNA, 801 bp, Zea mays subsp. mexicana
  Clone ID: UC-ZMROTEOSINTE017E02_FLI
cgtcatccccgacttccccaagccagggatcatgttccaggacatcacgacgttgctgctcgatcccaaggcgttccgtgacaccatcgacctctttgtcgagcggtacaaggaccaagggatcaccgtggttgctggtgttgaagctagagggttcattttcggtcctcctatcgctttagccatcggcgcaaaatttgtgcctttgaggaagccgaagaagttgccaggcgaggtgatctccgaagagtattctttggaatatggaactgacaagatagaaatgcatgtcggagctgtacaggccaacgaccgggctcttgtagtcgatgatcttattgctaccggtggaacactctgtgcagctgtcaaacttattgaacgtgttggagcaaaggttgttgagtgtgcttgtgtcattgaattgccagaactgaagggccgagacaagcttggggacaggccagtttttgtccttgtggaagcagacgcctgagcggaacttgggacttctcagagagtttggcgccgtcgatgctcagtttcccatgttaccatgttggctattttctggctgacgcgtaataaagttttattccaaattgtgatcccctgaatgatttgtcaatgtagacatgattgctgatctttgtaaactgtggcttatgttttgtcaaaatggttctaattattcacatcaattaaggataaatcctgattggagcttgttgtttgttctagtaatgttgctttcttgctttgtttgtgcaaccattgatgaaataaagttgccatcacaat

SEQ ID NO: 35920 - DNA, 1633 bp, Zea mays subsp. mexicana
  Clone ID: UC-ZMROTEOSINTE017E10_FLI
ggcgagtcaaaaatacatttggtcatcttccctgcttggagttggagttgagacgccgacgcggcgcccgagaagaatttgcggatggattcgctgcgcagcgtgttggagtcgattcaggcgatgcagatccgccccgtggtcgcccaaatcatcaccctagggatgatcctaacttcggcattgatcctatggaaaggattggtcgtcgtaacagggagtgagtcgccggttgtggtggttctatctggaagcatggagcctgggtttcgaaagggtgatgtcctgtttctgcacatgaataaggaccctgtccgcacaggagacataattgttttcaatgtcgagggccgtgatattccaattgtccatcgtgtgatcaaggttcatgagcgccatgatacggtggactctgacattctcacgaaaggtgacaataatcccggggatgaccgagtcctgtacgcacatgggcagctttggctgcagcgacagcacatcattggacgggctgttggctatctgccttatgctgggtggcttacaatcatcatgacggagaaaccagtcctcaagtatctgctaattggtgcactggggctgctggtggtagcatccaaggagtgacgttaaaaggaagggcatgaggtacgaggccatgtgtgcgcgggactgcatggacaaggaggggatacgagcggacactgtcacatggaaccccttgatccatggcctgttcaaggatgctagggtgaaggaggcggctcagctcttcacggagatggtagcgacacaggtgatgccggacaatgtgacctagaccacactgattgatgggcagcagttcaatcagttcacttacaaggctctcatccatggattctgcaaaacaaggagctagatgaagccaaggaaaccttctttcacatggttgatgaaggtgctttgaatgcatcttatatcttatggttccagttagtaaaaaaagcgacctagtgctggagattcccatatgagtggagtggggtctgtctgatatggttccagttagtaccactagctaattgcaaggaccgcatttggcagttgaaatggcactaagatcgttgtgtcgctatcgtaggcaaccagtttgcaatctcactgattatcttgcgagaatatcatagactatatcttctgatgacgtggttgcttttgctgtatgctgggttttcacccaattatatcatattttcatggcttgtcgatggtttctgcaagaagaacaatgcagatgcagtgctagccacccctgatgaacttacggaaagaggccttccaccagataaagcggtatatagatatctgattccaaggctttgcagaaaagggctggttgatcaggcacaataaccatgtgtttggtttcccgatgcagacatgcagccctatccaagcctgcatggtgggatacgggacctcacccacatctccgtggatgcaacccatgtctcctaaggctattcacaatggaggtttcatggagtgtttcatgtattaattagactgccaaatcagctattttgatgacatgtcacatcatttaagaaggaagagtttcatggggatgaaaccatgttaactcgtttcc

SEQ ID NO: 35921 - DNA, 1108 bp, Zea mays subsp. mexicana
  Clone ID: UC-ZMROTEOSINTE017H04_FLI
cggttcgaccacggtgcgccctacttcaccgtcaccaacggcgaggttgcccgggtcgttggtgggtgggaggcgcgggggatcgtcgccgagtggaaggcaacgttcgcgtgcttcgatctggccaccggaaaatttacagacttcgagaaggagggaacagctaaaaagtatgtgggagtgccagccatgaactcgatatgcaaatcactctgtctagaggatggtgtggtggccaaatttggtgtcactgtgggcaagatggattggcttcaagatcggagttcgtggtcactagctagcctggatgggaaagatctaggctattttgattatgttgtagcaacagataagaacatagcgtcaccagcattttctgggttgactggaagaccgccacctcttgatttgtcgtcatttccacgcctgcctacagcacttcaagatatcccagttcgtccatgttttgctcttatggtagcattctcggagccattggctacggtacctgttcatggtttctctttcaacaattccaattctctgagctgggccttctgtaacagcagtaagccagggcgtgcttgcgtgcctcctaacagacaatcttgggtgctgcattcgacaactgagtacgcttccaaggtaataaataatattggtccacgcaaaccttcggcggaggcgcttgctaaggtggcagaggaattgttcagagaattccaggcgactggattaagcattccacaaccaatttttatgaaagctcacagatggggtgctgctttcccagccattgcaattagtggagatgataagtgcgtttgggacaagagcacgaacttggcgatttgtggagatttctgtacaagcccaagtgtcgaaggagcagtccttagtgctacgagaggggtttccaaaatccttgaatgtttaaggtgcccctcaagtatctaacgttattgttaccatccccagggcccccctctctgtgattggttgtatttatgcctgcattctcttacacaaataaacaattcaagccttatttggaggcacatattgttcgtttatgctaaataagaaataaagtaactgcagaagttgc

SEQ ID NO: 35922 - DNA, 1143 bp, Zea mays subsp. mexicana
  Clone ID: UC-ZMROTEOSINTE017H11_FLI
tccaactttgggtcaacgttctcccgtccccccgagcgcagtctcgcgtggttctcccgtcccccgaggcccgagcgtagtctctctcttttgccgtggttctccagtcctccctcatccgctctctttctttctctcgtggcgagtggtaacgacgtcaggtgctcaggtcttgttcaggaccttcgccggcgaccagcacacagcaaatggatacaggagttcaagctatgttcatcatcagtcttgtgctctggtgtactacaagctttgccttggatgatgctgctgctacaaggattccaaatgtgggcacattacctctgtcaatgaaagaaaatccgcaattatgccaactttgtgaggagtttgcatcagaggccctcttctatttaaatgaaaatgagacccagactgaaatcattgatacactacaccaagcttgttcaaagtttggctcttttaagctggagtgcacgaggttggtggattattatgtccctcttttcttcacaaaaattgcttcattaagccctgaagaattttgtgcatcagcaagtttttgtggcgaggtaacattcattcgtcttccaagacatgaagatacttgcaccctttgccatgtggttgtcgatgaggttgttactaatcttgaagatccagacatggagcttaagataattgagatacttctgaaaggatgcaataatgcagaggattatgtacaaaagtgcaagaggttgataatccaaaatgcacctatcataatggagaatattaagaagttcctcgagaagagagatttttgcaattctatccatgtctgtggaggtaaatccgttcgcgctggatcacaagtcctcagaagcctttcttcagcctgaagccctgaacttgcacggattgttatgatcatgcaacagatattaattagtgtaaaaacatgcccaggcgccgctatgtgagtcccgtgtgacatcgactgtacagatttggctgtgtacatgttaaaggaaaaacacaactgaggcacaaacctcttctgtttacgggtcatgagcatggtgtatatttgaactgtatatcattataccttggattggatgtcatgttgctctatatttatacgtaacagagttttgt

SEQ ID NO: 35923 - DNA, 928 bp, Zea mays subsp. mexicana
  Clone ID: UC-ZMROTEOSINTE018C11_FLI
atcagaggaagtggcctggacagtctaacaaccctagagattgtgtggtgtggagatctgagggcagttttccctttggacactgatgcccagagctaccaagatcatcggcgaaaccaggcaatcaccgtggaatttccttcccttgagcgtattcacttgcacgagtcaccgaagctgcatggcttatgtggccgtggaagggtgtacgcaccaaagcttgagagcatggtgatcaggggctgctggaacctcgcacgcataccatccgttggcgatggcggcgaccgcattaccaagaaggtgaagtgcgactgtgagaaggagtggtgggacaggctggagtgggacgggcttgaagaaaaccaccatccatccctatatgagccaactcatccaaaatattacaagaaaaccatgctcaggacctccgtgctcagatgagcattgctcaagcctaataatggtgatcgatatgggccatgaccagtgtgtgatgtgctgctcctctatatatccggtcaccagagcgtttgtccttcgatttcacctgcatgtgtgttttggtcttgcttgttgtttttcaaatctgtgacatcgcatccacagaatatttttcacttgtttccatggtgtgtggacttccgatcttggattgtggtctgctgatctgcgtcgcaacgcgaactatctgcaaaatgtatcagctcttctcagtagacacacaaataaatatgggtgagccaaaatgcatttggttagtagctggatgtgtttgccccctcataatatttgtaactctgtactctccctgggttttctggtgtggcgtgtatttgtcagcattgtgtaaactgaatgactgctcctactgttgtgcttgctcaagctacaaacatatatataaatggatctggacttttgtgtc

SEQ ID NO: 35924 - DNA, 1798 bp, Zea mays subsp. mexicana
  Clone ID: UC-ZMROTEOSINTE018D05_FLI
tggaggagcttgatgtgaacgagcgtcgggcctttctggtgtggcgcaggaatcttgcaagattggaagagaatgataagcttatcctgactccctttgagaagaatattgacatttggagacaactctggagagtgcttgaacgcagtgatttgttggttatggtggttgatgctcgggatcctttgttctaccgctgccctgaccttgaggcatatgcaaaggaaattgatgaacacaagagaacaatactccttgttaacaaggctgatctgttgccgttaaatatcaggaagagatgggctgattattttaaggcacatgacattctctatgtgttctggtcggctaaggctgccactgccacattagaaggcaaaaagttaagtggatactctgaaggagaatctgcttcacttgatttggataccaagatatatgaaagggatgaactcttgatgaagctgcaagctgaggcagaatctattgtagctcagaggaggatctcacctactgtagatgatcacgaagccagttcttcagattctgtttcttcagtgactaagcatgtagttgttggatttgttggctatccaaatgttgggaagagttcaactataaatgctttggttggcgagaagaggactggtgttactcacacacctggcaagacaaaacatttccagacactgataatctctgaagagctcactctttgtgattgccctggtctggtcttcccttccttttcaagctcaaggcatgagatggtggcatgtggtgtgttgccgattgataggatgacaaagcaccgggaagctattcaagtggtggcagatcgtgtcccaagggacatccttgagcagatttacaaaattgcattgccaaagccaaagccatatgaaccccagtcccggccgccaactgctgctgagctgttgcgggcctactgcgcgtctcgtgggcatgtcagccatgctgggctgcctgatgagaccagggctgctcgacagatactgaaggattacattgatggtaaaatcccacactttgagctccctcctggcgtgactggccctgaggtggactttgaacaaatcgctggatcagaaagtccaactacttcagcagctaatgaatcagttactgatgatctcgatgaagaggatgatgatgcagttgatcctgctgaatcaaacatgagagatgtcctagatgaccttgaatcttttgacttgggtaatggagggtccaaaactacagcaaagaagaaagaggcgtcccacaagcaccacaagaagccccagcggaagaaggatcggtcctggagggttggcaatgatggtggcgacggaacagcagttgtaagagtgtaccagaaacccgcagttaatttgtccacggtctctttaagtggcagggtctgatgccccaacttttactgctcgcacaaccccggcacacatgggcaagggcatgggacctcttactgtagcaacggctgaactctgaagctacttcgatggaaggaagaaaggagtactgagcatacgagagtttgaaaaccttagaaacaacattggtagtcgttgccggaacttgtgctgcccttccggcctttctcgtatgtatatgctgtgagttgtagcacggttgattcatactaaacgtggtggtatgtgttgttttgttttttcatgtctcacatagctgcagatacagctttgggatgcagatttgacgtggaaaaaatatgtagacgatttatacttgctaagttgctacatttttatttttt

SEQ ID NO: 35925 - DNA, 1035 bp, Zea mays subsp. mexicana
  Clone ID: UC-ZMROTEOSINTE018G04_FLI
caactatccccatgacaccattgcagattctttccaggctcttactagctgagttttctgttattttttttagtatttgttgcgtgctacttacttttaagagtattattttttttagtatttgttgcgtgctacttacttttttagtattgataatgctgtattatcgtgcatgtaatgcctgtcttttgctgtgattatctcagtgttgaaacaacagcattttacaaattttgtccaggttgcgtctttgaaagacacaattttgcgcaaagatatggaaatagagcagatccaggtcatcaaagacaaagtaaaatccccaaatttgttgttagatagaaatgtgcctggcttgacgaagactacagcaaaccaacctagccaactattatcaggcgaacgaatgcttaagtctagtgacagagttctatcggatcgtcagagttacggcgaggtgaatgtagatcctaaccaccatgtgatggatactgcaccagtgagcatagatgaagcaggatatgagaacaatgcatcggatgatggtttatcgggtgaaaccgagaatgataattcagctgctgagatgacagcggaacggctgcatagatttccatcaagaataagcaggttcactctcacaaagaacgggcagccatctatgtctagatcgaacccaaaggatgctaagactccaagcaatacgaaagctccatcgagccggttgacaggaggctcttcagccaggtctaaaagacggcagtagagcacgatcatgttgctcgttttgatgtgcattgtagttgaaatgtgaatttggtgggtagttgtaggaccgttttatgattgtaactttagaaaatgtcagacactgatggcagaatatttgagacatttgtttgatcatttgcttatgccgagcaaaacagcaaacaatgctcgattgtatgtgaaacactctgacctgtgaccatttgaatgtcggtgcgcctccggaagtccggagttgtgtatataccaccaaattgccggcct

SEQ ID NO: 35926 - DNA, 3026 bp, Zea mays subsp. mexicana
  Clone ID: uC-zmroteosinte018g09_FLI
attattgataggaagaggaactaacgcttcaaaagcacgaaaccagaagcgctcattagatgatgcagttttgggaataacgcacatcattgtggatgaaatccatgaaagggataggttttctgatttcatgctgactattctaagagacttgttgcctttgtatcctcatcttcgtatggtactcatgagtgcaacaattgatgctgagcgtttttcgcaatatttcaatggatgttcggtcatacaagtccctggttttacctatcctgtcaaatctttctatttggaggacgtgctttctattctgcagtctgcagagcagaacacagaagtctacaattaccagcattcagagactggtataactcctttaatggtttttgctatgaagggtcagcttggggacgtctgtatgcttttatcttttggtgtggattgttcagcacaggatcatgatggaaaatccgcattagattgggcacaacaagagaatcaacaagaggtctgtgaagtaataaagaaacatatggagtgtagttcagaaaaatcaactgaagataacgagctgcttaacaagtacttggcatctattaatccagagcacattgatactctgctaattgaacggctgcttcgaaaaatttgtgtggattccaatgaaggagccatcttggtattccttcctggctgggaagatatcagtcaaacacgtgaaagattatttgcttctccattctttcaggattcatcaagatttcttgtgttgtctcttcattctatgatcccgtcctcagagcagaaaaaggttttcaaacgtccaccagtgggggttcgtaaaattattctctcaactaatattgcagagactgctgtgacaattgatgatgttgtgtttgtcatagatagtgggagaatgaaagagaaaagttatgatccatacaataatgtgtccacacttcatgcttcttgggtttcaaaagccagtgcaagacaacgcgaagggcgtgctggccgatgtcagccaggaacttgctatcatctttactcaaggtttagagcttcatccttgccagactaccaaattcctgaaataaaaagaatgcccattgaggaactttgtttgcaggtcaaactgcttgattcaaactgcagaatagcagactttctgaagaaaaccttggaccctccaattccagaaactgtaagaaatgctattgctgtgcttcaggatcttggtgctttaacacaagacgaacaactaacagaattaggagaaaagctgggttccctgccagtccatccatccaccaccaagatgctcctgtttgctatattaatgaactgcctggatccagcattgacattggcatgtgcagctgattatagagatccatttgtccttccagtagcgcctgatgagaggaaaagggcagctgcagcgaaagttgagcttgcttcgttgtatggtgggttcagcgaccaacttgctgttgtcgcggcatttgactgctggaggcatgccaaagatagaggccaagattctcaattttgtgcgaagtactttgtctcttcaaacatcatgaatatgctatcaagcatgaggaaacaacttcagaatgaactgtctcaaagagggtttgtccctgcagatgcatctgcctgcagcttaaactctaaagatccaggtatcatgcgtgctgttcttatggctggtgcttacccaatggtagggaaaatgctccctcctcgcaaaaatgcaagaaaatcagttctggaaacagcgagtggtgccaaagttcgtctgcacccacactcctgcaactttaacctatctttcagtaaatcttctgggaatccactgctgatatacgatgagatcactcgaggtgatggtggaatgtatataaaaaattcttcagttgttgggtcatatcctttgcttctaatagctgcagaaatggttgttgctccacctgatgatgatagtgatgaagatgaggaagattctagtgaggatgaagctgaggaaagcacattggtacagcacaaagaagagattatgtcttcacctgacagcattgtttcagttgttgttgatcggtggctccggtttgacgctacggctctggatgttgctcaaatatactgcttaagagaacgtctagcatctgctattcttttcaaagtgaaacatccacaagatgttctacctcctgcgcttggagcgtcaatgtatgccatcacatgcatcctttcattcgatggtttgccttctatggttccacctaatgacctttcagcaaaccgaggttcaggccaggatttagcagaagctagcaagttctctcagggaagaagagcgggttatattccacctagtggttttctgatgtccttgttagctgataggacccataatgcaccttctttccagaactcatctaaccatccaggaggtggttcagcgcatactcggccatccagggctcctgttggtaggtttgatcgatctcggcgacctttccgcaattctggacctgggagttcagcaccacgttctttcaaaaggcagcgcgacgctccacggtgagcagggcataaaggcagccttttgcatgccagccatttcggatgtgctttgtcaacggtgcctagtctaagaaaaggacgtgctatagaatcacaagctttgctgtgttccgttgtagaaatgaagggaaagaattatagcactgcatcggattcctttgtcgaagagtttttgtaggtatgcccctgagtgttttgtgtactttgctcagccgagctcatttgcaccgtagacctcagaggtgcctgtaatcttttggatggagttcggatgttaaaaagaagtgggatagaaaagcgaagacctgttatctgctcaaatgatgagccccataattgacggtatcactggaccatagatgaactttgtgctgtagtgccatagacaatatggtgtgacgggcgagtggaatttgccctgcatcgcaagcgtt

SEQ ID NO: 35927 - DNA, 2435 bp, Zea mays subsp. mexicana
  Clone ID: UC-ZMROTEOSINTE018H01_FLI
aaaaagcaagaaaaatctcgccagcgaaggatcctgaaaactaaggaagatcttgctgctgctgaaaaggaacttgaagatctacagccttatgaacttcctaaagctgaaatggcacaactaacagaccaaattgcacgaataagtgttgagataaaaaacttaaaagcggaaaggaatgccatggagtctcagttagctcgagaggaagaaagcttgaggagatgttctgataggttgaaggaaatggaaagcaagaatagtaagctactccaagcattacgaagtgctggtgctgataaaattattgaagcataccactgggtgcaagctaacaaaaagaatctcaggcaagaagtttacgggcctgttctccttgaggtaaatgttcaggataagcttcatgccacttacttggaagaccatgttccaaactatttatggaagtcattcatcactctggatgcttcggaccgtgactacattgctagagaaatgaagcagtatggcattcctgttctgaactacttagtgcgcgaaggcacaaggagacggccattaaacatcactccagagatggagcaacttgggatctactcccgacttgatcaagtatttcaagcccctgacactgtgaaagatgttttgattagtcaggcgggtttggatgattcgtacataggtacagatgaaactcatcgcagagcagatgaggtgtcaaagctaggcatctatgacttttggactccggataatcattatcgatggtccaaatcaagatatagtggttatatgtcagcatttgtagatgcaatccatccttctcgtctcttcaagagcaatctggatgtaagcggcattgaagatcttcgacttcagaaagaagaccatgtaacaaatattgaaggaatgcgtgaagctataaagacgcttcatagaaaacagagacagttagaagacgaagaggcaaatatacacaggcagaaggaagaaattattaatgcgatgagataccacaagaagacacgagaagagatacaaagacgtgttgatatcaaaaagcgaatactgaaggacatatccagagaagacgatgtagaatccagcacgagaaagcttgttaatcaggttgctaagataaatgatgagaggtttcatgcaatgataaaacttaaggatttgcttactgaagctgttgctctcaaatggagtcacacagaaaagaatatgactttaattgagctcgatacaaagatatgggagatggaaaagggtgtgaaaaaacttgaaaaggatgctaatcaggcggctagaaactacgaagattgtagaagaatcactcaggagcataggcggaggctgtctattgcaaaacagaatgcagagtcgatagccatgattactaaagaccttgaaaaagagttttgtgcgatgcccactaccttagaagagctcgaaactgcaatacaagatactgaatcagaggcaaattctatgctatttcttaaccaaaatgttttgcaggagtatcaaaaccggcaacatgagatagaatcaatctcaaataaacttaaggatgataagggtgaacatgagatctgctgttctgaaatcgaaacagtaaagggtaaatggcttccgactctgcggattcttgtttcaaaaataaacgacacattcagtcgtaactttcaagaaatggcagtcgctggagaagtttcactggatgagcacggtattgattttgatcactatggtattcttataaaggtgaaatttaggcaaactagtcagctgcaggtgctaagctctcatcaccaatctggaggggagcgatctgtatcgaccatcttgtatcttgtgtcacttcaagatcttaccaactgcccttttcgggttgttgatgagataaatcaaggaatggaccccataaacgagaggaaaatgtttcagcagcttgtcagagctgccagccaaattaacacgccgcagtgcttccttctgacgcccaagctcctacctgatctggagtacagcgatgcctgcagcattctcaacattatgaacggcccatggattgaggagccagcaaaagcttggagctccggtgattgttggaggacagtggtcagcgcagctggacactgagcgccgagtattttgccttggaccgtaggaggcttgtaaagtttagcgtgtagagctggatgcagcttttgggtggttaatttaagtttgtagttgtactacatgtaagtttaggaaagttaaggtagctggtggcattatcaatgtggaaccagatgttgagctgctcaaatcacttggcagcccttttgacacgggagggtaaggtactgtggaatgatccctaccctgtaccggccagtattcctggaagtgaccagtttacttaagtaattgttttgcagcgg

SEQ ID NO: 35928 - DNA, 1445 bp, Zea mays subsp. mexicana
  Clone ID: UC-ZMROTEOSINTE019A03_FLI
agaaaatgggactcctgtcgaagtgcagaacagggacacaaacattactgaaatcaacaatgagattaaagctgaacctccctctacatcccattctacctctcccggagacctcctcctggcagatcttttgggtcctcttgcgatagaaggccctcctgctgtagagcaaaatcctgcccaaggattgaatgctaatcaaagtccagctggtgacttggcacttgctacccttgatgatcagtccaactcagttcagccaattgtcaacgtcgaggagaagtttcatattttgtgcacaaaagatagtggggtgctgtacgaggatccttacatccagattggcttgaaagcggagtggcgtgcccatcatggccgtcttgttcttttcctgggtaacaaaaatacttcagcccttacgtcagtgcgggcgctgattttgcctcctagtcatttgaaaatggaactttcgtcagttcctgatactattcctccaagagcgcaggtgcaagttccccttgaggttgcgaatctccttgcaagtagagatgttgcggttctagatttctcgtatgcttttgggacttcactggtggatgccaaacttcgactccctgttgtattgaataaatttttgcagactataactcttacccctgaagaatttttctcccagtggaaagcgcttactgttcattcgctgaaggttcaagaagtggttaaaggtgtgaaacccatgcctctttctgagatggctaatcttttcatgagccttcacttggcggtcgctcctggacttgataacaacccgaacaatctggttgcatgcacgacattcttttctgaagcaacacgtgccatgctttgtctgatacgagttgaaacagatccacaagacaggacccaactgcggctaacagttgcctcgggcgaccaatatttgacattcgagttgaaagagttcatcaaagaacatctggttgatatcccaaggactcaggtcgctccacctcgcgcagcagtccagccacagttgcctactacagcacctggcacatacaatgaccctggtaccatgcttgctggattgctatgagaagtaacccgaaggaatagtgttttgatgtacatgacagttatttaatacgaggatctaacatctccacaagcatcttgctgccaagacgtacacgtggagcaaccaagaaagagctggcggagtgtagtctccatgaggattctaaaccgagaaagagcttagattctttttgtgcggtttcaaggccccctctctctccatgcagcagcagttgccgtattgtgtaaaacttgttgtttctcattattatcatccccttttggcccatttgtataacctgtatcgcccatgtctggtggtggacaatcggtagtttttgtgttaatataaggtgctaggttttccc

SEQ ID NO: 35929 - DNA, 912 bp, Zea mays subsp. mexicana
  Clone ID: UC-ZMROTEOSINTE019A05_FLI
cgatttgggttcggagaagcctgcggaagcacattaagaatttgagagtatcaacagttggtgtaggcgcaataggttatattggtaacaagggatcaatatcggtcagcatgtctgtacatgagactcctttctgctttgtttgttgccacctgactgctggtgaaaaagacggagatgacctaaaaaggaattcaaatgccgaagaaatacttcgaagaacagtgtttaacccagagaatgttgtaggcatgcctatgagaatacatgaccataagcggattatatggttaggagacctcaactaccggatcaacttatcctatgaaagggcacatgaactaatctccaaacaggactgggctggattgttcgagagggatcagctgaaaagagaaatgaggaaaggatgcacatttgacggttggttcgaaggagttatcagctttgccccaacatacaaatatgagtttgactcagaaaactatgtaagcgatgagagtgaatctgggagaagaactcctgcatggtgtgaccgcattctctcatacgggaagggaatcaggctactttcgtacaagaggggggagcttacactttctgatcaccgccctgtggctgcagtctacgtggcagaggttgaagttttctgccgtagaaagccgcagagggctctaacattcactgatgcagagagcaggaccatctatcatcagagaaggatggatggactggttgaacaaagaggtcgccgaaccatgagatatgcaatttctagcacaagttccaagtgaggtggtgccatgccaatgacagtttttagaactcagtcagacattgttgatttgcactattgtatcatccttcacaagcagcatatttgccatggattattttttctgcacgcttctc

SEQ ID NO: 35930 - DNA, 1448 bp, Zea mays subsp. mexicana
  Clone ID: UC-ZMROTEOSINTE019A08_FLI
aggctatgactcctgttctagttggatgtcttcattggagatggtgaagaaacttcccatggaacggcagcacaaattacttatttgcttgcaatcttgttctgcgttgtgtgctctatgcaatgacgcgccagaagatcctgttgtcactctatgtggtcatgttttttgcaaccagtgcatactggagcaactcactggtgacgacagtgtatgcccagtgtctaattgcagagtccgactaaacacatcctcactcttctccagaggcactcttgaatgctctctgagtaaattagcctctgatttcaagtctgatgatacctgtatggaaatgatacatgctgaaaagcgccctgggatggattcatcctacgcatcttcaaaagtgagagctgcattagatattcttctctcattgcctaaaatagatcccactattgatagcaaatgttcaatcgggattgaatctgagaagtttgatggaaagggtatttcagaacaaactgacaccaagttgacagagaaggccattgttttctctcaatggactagaatgctagacttgcttgaagtccatttgaaagcttctcatgtgacatatcgaaggcttgatggaacaatgtctgttgctgcacgggataaagctgtgaaagacttcaatatggttccagaggttactgttatgatcatgtcactcaaagctgcaagtcttggcttgaatatggttgctgcctgccacgtacttatgctagatctttggtggaacccaaccaccgaggaccaagttgtggatagggcacaccgtattggtcaaaaacggcctgtcacggtatcaagattaactataaaagacaccgtggaagatcgtattcttgctctccaggagaaaaagcgggagatggttgcttctgcgtttggagaagacaaatctggttcccgacagactcgattgaccgttgaagacctgaattatctatttatggtgtagaatcgctcctgagagtgaacagttttgctcattggattggtgttagaccgtggtagataaaaatgttctctaaaaaaataacaaaatgctttcatttagggattattagttcttgtagcttgtacagttgcagagatttaggggttgctagtgacatgtcttccaattctttttgcactggaagcagtaagatgctgaactaggtgaattcttcagatagctgctatagtgcctgttaacttagggggtgttttttatgtactaatttctagtccctccattttattttcttttacttcctaaattgtcaaacacagagactaaaatagagataatccctcttttagtccatgtgtttagcaatttaggggctaaaagggactaaaatagagagactaaagacaccccttaatgtaatgaagataacgataatgaagctcacatgatatatatgtac

SEQ ID NO: 35931 - DNA, 2509 bp, Zea mays subsp. mexicana
  Clone ID: UC-ZMROTEOSINTE019A10_FLI
tctcttaccactcacttttcatgttgaactcttgtaaataatgataaatattggtcaagcacccagcagtccggcaccacctactgatccttgaagtgcatctcctgttgcagaatctgcatgtgcatgtcgtgcacatcacgtcggtcgaggaaacagagcaagcaagaaacgagctttaaaaacagttttttcagttcagttcagtctatattatctgcaacattgcaatatctaggcataatttcacattggatcaaaggttttctttttagagcgatgaaacagaataagaagcatggcagcttgaaggaggccacagaacactagagtagaacaaaataaagaattagtgaagaacatcatcaagcagcagatttcaggtcctcgtctctttcttcagggagttttttttgtctcgctcctaggccactaaatttcttgcttgtttcgcatttatgctgaagattggtgaatctacctcgtaataacgcatggcttagtgatggaagcacccagttaagtgccattttacgaacggaatttggtcaaatatatagcccttgaactgttttgtctagcatttagtttgcaatgttttttatattattttgaagtctgttttgagcaatctattactactctataaagccctattgtaggcgtccacaagtgcaccatggttctgccatcctccccctcgcgcaatccctcattcttataaggccctattgtagcctatctaaatatttttaggattagaaaattgttttgtattggtccatcttatacttttatttaacattacaccctcattcttcttggtcttggacgactcttttcagtatcaaatccaaattcatgtttaattgcgtgttgagataatgccaacttattccatgttggcatgtgattgtggaggcatctattttactacttacaggtatgcatcttgactagctcgctgaggggaatggcctggtggatctgttgttggtttgcttgtaggtgattagctagattgtgttgtttttttggctagatgcctagatctgattgatgcgcgtatattgttgagtctgttctccacctcggcgcctgttcgaaaccttctgtttttttactgcatgaaacatattaatgcagtaaagccaatagactttactcttttatccaacgaatcatgaaacatactattaataagtgacaccatgacatgtttaatcatttcgacatgttagcaacacagggaagacaaatatgtttcatactccatatgtattagatatggtattatgggatgtcagtatctgctatttcgtttggaatgtctttttgtgatatttcagtctgtggtccagacacctttactttttgaaaaatgtcgccttctgtagttgcttcaaattccatacgttcgacatctatgaatagaaaattttgacactatatctttgaacaattgatctctgaggaatatatgaggccttggagttgagggatggaggatctgattatcttggcaagggtattcttaagcttttggcttaaaatttgagaggaggagatggcggtcacgatcacgtgggtgaaggcgaggcagatcttcatcagccgcggcaaccccaccgtcgaggtggacgtgggcctcagcgatggcagctacacgagggggcgtacccatcggcgcatccactttatgactgccagcgtcagaatctgatatacctattggcgttagaatctgatattcctattaggacacattttctgggttgtctaggcgtgctgttttttataggatactaaaggagaaaacgtaaacaaatactggtcttagatcctcacagattagtgtacagttagcacgatgcaatgcactttatggcaggagcataatatcaattggcagtcatagatgcattgcacttcatgacagttagcacgagctctgaaagtaaatagaaatgagtatcaaaatgaatcacacttgtgtagaactgcagattgaacataaaacctacttgatcatgagcacatggaagcattttttagtgaagaatttactgccatttttaagtgaagcatttacctaaccatttgcaatgcaggtttccacattgcagacacacaagagtccagcctgcgccaacgctcctgcagctatctgcactgaagatcaggacacgaagatcgcgagctttatcaaggctcgccatgtgcggaaggtgtattttagtgagatctccaagatgaagcattaggggggggggggtcaatcgacccagattttacgtgtatctaacttagtagggcacccatgatctataatttattctctgtagttgtagcaacgacctagagctgtcattctgtagcacattgtgtaacatgtaggagagagatgaacacatatccccattctttctactgaaacaccagaaatagttgctcttgctccataattcgttaatctgaacttctgaagccatgccaaggccttacattg

SEQ ID NO: 35932 - DNA, 1417 bp, Zea mays subsp. mexicana
  Clone ID: UC-ZMROTEOSINTE019C02_FLI
aaactttatgtgaagctaaactgagcttatctaatagcccagactctgtgttgaatcaatcaagcttgttaataagcagctcaagtcctgatattggcgagcccagtgacaaagtgcaggtggattcctgccaatacttgataagcagtcacatgggtgattgtagggtctcaggtcctgacagcagttcgttgaatacttgtgctaatagaaatgtctcttgtaaagcacatgatgaagagagcttggatcaggccttaataatcaaacatgacagtgggatgatgccttctagtaatcagacatcattatatgctactgtaggcactgagggcagtgctgaactgaagcaggatgtaagccattgtaatgacttcaatatcagagtcaatgacgaaagcttgaaccaggtgttaagaaatcagcatggtgatgctatcccattacctgacgtggtatcgctggatgccaaggtggacaaggaaaggagttggtgtgtggaaccattaattgcaaactctgattgctgtactgacagtgttaatgtggatagcttgtgcactgatcagagattggctgatgctccttcaggccccacagctgatgcaccatccatgctggccgaggaggaatcttatccttttagtgcaaagcttgaaaatattgatgttgccaggatcaaaggtttattgatgaagaggaagagccggagagagatccaagaccgagccattgcttcagatggtctaagtgaagaagactggatcgagagggagcttgaatctgggattgttacaaaccaagaagccaattgtgctgccatctcagacgagctaagtgacgaagcctggattgagagagaactcgagtcagggattgtggtcggaccaagaaatgagcaagcgatcacttttgatggtttgagtgaagatgattggatcgagagagagctggagtctgggatcatcgttgagccagcacctgctaccaagaagcggaagctggagtcaagctgttagctctgcattcgaaggccagattccaagcaggtgaataataacagatggttgcgagtaggaccacatcgaagccaagagatacatgtcgcacagatgggaggatcaatattatcctttttttttatttctttataaccaaacaccttggagtactttgacacaaggggtgtgttcacagtgggatctccccagtttcttgaatgcagaaccgtatccgttgtatttgttccttcttgtcgtgagtgtaaatctagcgtgtccgaagttcggttttagattgtaggtgtaactgtagcagggattatctggtgttaagcccaacgagaaaatgattcagtgtaactgttactgtaaggaaagaagttattcagtgtagatttatggttaacacaagaggc

SEQ ID NO: 35933 - DNA, 638 bp, Zea mays subsp. mexicana
  Clone ID: UC-ZMROTEOSINTE019C05_FLI
gcatcacagaagattgtcactgttgagcagaaattgacacggggatggggaggagaaaatgcgtatcatgttagtggatatcgttatttgcttgttgatccggagagaagagtatcaagagcctccccacctgggaaagtcaccaccctagcaaaggattctctacttgccctcaacatgctaagacaagaagtagatctagagaagtcaagatacaagagaggcgacccttgtcgtgataaggatttcgaagtatgtatcagaacaaaaaacaatgcgtgggttattgctaaaatcagtcaaggaagggagctttacatggctctagagaagggtggtgaaacgcttctatatgcatccacagctgtagagaaattcagcaacaggtactgtgagggagcattctctacagattagaagcaccatagggagatcttagcttttccatacattacctattatgtacatcctgtttttttcccagctgtatcgttgccccccattgttgagagactcggaccacgcgaagggaataaggagttcgtatcagttgtacagctgctctgctgtcgtgtgctatctgcaaaagaatagcctagtctgggaataacgcagagcgggatagagtttgtttgttc

SEQ ID NO: 35934 - DNA, 547 bp, Zea mays subsp. mexicana
  Clone ID: UC-ZMROTEOSINTE019C07_FLI
ccttcccaaaaaatcccccattttcttcgaggcgaggagagcgtgaaagacagggcaccggcagcgacgatgtcggggcgcggcaagggcggcaaaggtctgggcaagggcggagcaaagcgccaccggaaggtgctccgtgacaacatccagggcatcaccaagcccgcgatccgtaggctggctcggaggggcggcgtgaagcgcatttcggggcttatctacgaggagacccgcggcgtcctcaagatcttcctcgagaacgtcatccgcgacgccgtcacctacaccgagcacgcacgccgcaagaccgtcaccgccatggacgtcgtctacgcgctcaagcgccagggccgaaccctctacggcttcggaggctaggctggatgcctcttctccttgctatcgtggatgcctgtttgttgttagggttacttcgtttagtttcttgtctgtgacgtgttggactattgttagtagtattcttgaagttgtgtttcgaatgtaatccaatcttatcgttcgagaattgaaatgattcctgggc

SEQ ID NO: 35935 - DNA, 913 bp, Zea mays subsp. mexicana
  Clone ID: UC-ZMROTEOSINTE019E06_FLI
caactcttttgactttggattttcacgaattagatgcattaacaccatggaatgctttgtctggcatgttttccattatccagtctgcaaatgttgcttttatttctgattttcttgggagattttttttttgctttgtaggagagagttgcggcagcgaaaaagttccactcaaaggaagcagaggaagaggcaaagaaggtgcctgccaaaacgtttactcctggtctgcctgatgctcaggacatcacaatggagccacaaggtcctaaagtagttgctccaactcctgaacaaatcacagctatcaaggctgctattgcaaatgcccacactctcgaggaagctgcaaggctagaacaggtactaagcactggccaagttcctgctgaatttgcagtgcccaggcccgatgcaaacatggccgaagcttcagatggagccgagaagatggacacagatggtgagaaccaagagggcggtgaggctgatgggcagaaacaaggcgaaggaagcaccccaattcaggaggattgaagtcatggtgacatgggctgggtcatccattgtctgagttaggtttgccagttttcgtgggggtgcaggaaagagctagagccttgttgccgcagaactccccctctatggatcgcatgtggatgctaacaagattcttgcttatttttgcagtagatggtactgagaacagaatcagatgttgtaaactatacatacagtcgtgcatgttgccgaatggaccattgtttcggtcgtagcgcttgtgtcggtgcctgactgcagtctgcagagcgagatgtcgccctgccgcctatccttttctcggagtgctttattacaagtttgagtgatggaccctgttgagctgaggcggatgatcgtcatctattgctgg

SEQ ID NO: 35936 - DNA, 1382 bp, Zea mays subsp. mexicana
  Clone ID: UC-ZMROTEOSINTE019E08_FLI
ggaatctggcaaatatggtactaataatggccgggcaacaaagatggtaccaacaactgagttcaggaggaccagtggtggtcttgtaagatcagggacagttaatggttctccaaatagcgctgtcaatggctcgaccaaggtgttgattaatggttctgcaaatgccattgacaatagctcatccaaagcagtcattaacggtacgccgaaggtggctgtaaatggtactagtctggtgaaaagcagcaagacttctcttgttaagacgcagaagcaagtgagacccaaagatgacccctttcaagaggaattgaaggttttgccttctgatgagggattcagctgggcaaaagataattacaactctgtgcagaggagcatagatatatggtcttttgtgctttctcttcgagtccgcgtgctatttgacaatgcaaaatgggcatatcctggtggattctcggaagaaaagcagaaagttcgaaggcggaaaactgcttcatggctaagagagcaagtattacagcttggcccaacgtttattaagctcgggcagttatcctccactagatctgatttatttcccagagaatttgtggacgagcttgcgaaactgcaggacagagtacctgcattttctcctgagaaggcaaaagctttcatagagaaagaaatgggttgttccattgatgttgtgtacaaagaatttgaggaacgcccaatagctgctgccagtcttggtcaggtacaccgtgcaatgctccacaatggagaaagagttgcagttaaagttcagcgacctgggctcaaaaaactttttgatattgacctaaggaacttaaagctagtagctgagtattttcaaagaagtgaaacatttggaggcccttcaagggactggattggtatttatgaggaatgttccaaaattttatatgaagaaattgattacatcaatgaaggaaagaatgcggacaagtttcggcgggatttcagaaatataaagtgggttcgcgtgccagtatgtttcttggacatcacaatgcaattttttgggggtgtttgattcaattcccttccactatcttaatcaaacaaactgagattgcatgactagaagaacagaacataaccaccatatacagcatcctggttgaatttttcttgatggaggcaatgtatgattgtagttaagcctgctcaacaatgagtatcacaaaatgttgtattaatgctgaagctgatatggcaagctacctgttgatttatgttgattagtggttggcacatgctgtaaggtctatctatatacttggaacattccatgaagcactatctatgtacttataaactattgtaaattataatccactttagtc

SEQ ID NO: 35937 - DNA, 393 bp, Zea mays subsp. mexicana
  Clone ID: UC-ZMROTEOSINTE019H06_FLI
cggaaaagtgaggtctccaacaccttccatttcaccttcacggtctgtagtgacacgctgaagaacgggttgaagattcgcaacgttgtcccctcaaccgaagaagaggcgcggcggatattggagcgcatggaggcagatggtttatgcaactaatctttccgcagatccacttgtttcggagttcggacgtgctttacttgatatatgtctcacttaccgttccacggtaccagctaaaacggggggatttggcgacgatttgagcagcagccagcagctaccataacgcgccggcaatagaacggcatagctgtagctccatggtactatttgtgattttttttttacagagaccgcatgttgcgtataataacatactcctcgagactc

SEQ ID NO: 35938 - DNA, 738 bp, Zea mays subsp. mexicana
  Clone ID: UC-ZMROTEOSINTE019H07_FLI
gttttgttcactgtggtgccttgggtggttgtcatggaccgtgatccacggccgcctgggcgcaatgctgtgaaggaagggtgctatcttgtatctctgatggcaactgatgccacaatgctcaagtgctgggaaacagttgtttgtggcagcatggggcggctcatcatggtgacatttggtggaaaggtttttggtggatttctgcattcaattgcgcaggtctacttcatggtggtatggctgctgttctactttgcagcaaggtgtaaggaggtgaggctgggtggtcgtcaatttggactggaggatgttgcagctgctcttgatggatttaggtagtgtctagttgccgcttgccgcctggatcatacatgaagagaggtatatttcatggcccatagtgtttattgatgaaacgctgctggtcttggctaagtagaggtttttttagttatcttgatcttctaaatcttgctgagatggtaaatgatttggatgagagagagaacttgacaatgttgtatgtacagtttttgccacagagtggtaatctgcttatagtccaccacatggcatacaaagaaaggatgtttggtccccttttccatggaaggttagaagcaagatacctggtgataggtgttctagctgcaacatgatttgtgaagtttatatacttgtgttgtgccagcaaaatttctctgggtaataggtcaaaacatgtgacgtgcatcc

SEQ ID NO: 35939 - DNA, 1010 bp, Zea mays subsp. mexicana
  Clone ID: UC-ZMROTEOSINTE020B02_FLI
ggagccgccaccggcgccggcgccggcagcctccaagaagaacagtgctagtgttggagcaaaacgaaaaggtggtcctggagggttaaacaaagtctgtggtgtgtctccagagctgcaagctatcgttggtgaaccagccatggctagaactgagattgttaagcagctttgggcatacattcgcaggaacaatttgcaggatcctaacaataagagaaagattatatgcaatgatgagctccgattagtttttgagactgatagcacggacatgttccagatgaataagcttctgtccaagcatatacgtcctctggagagtaaaaatgattcgaaaccagaagcaaagaaattgaagccacagggtgatgaaccaatttcttcagttgaaactgatgttaaccaacttccccttatggtttctgatgcgcttgctaccttttttggtaccggagaaagagaaatggtccattctgaggctgttaagcgtgtctgggatcacattaaaagcaatgatttagaggatccagagaatcctacggtgatactgtgcgactcgaagcttaaacaactatttggacgtgaaagtcttaccgctcatggtgtctcggagttgctttcagaccacctttacacgcaatctaccaatatctgactgatgcgactgtttggcttgttggctgcaggcgatacgattttctggactcggctgggctaacatcctgggtagtaggcgctgatgaaaggacaagggatctgctcaaattaagtgttgtatttgtatcctccatattggtgaagactgatttacagtagtaagggaaaaggaaatggcagttgtgttgcatactatctagtcagacatagtagtctacgtgacttggaatgatgcggcgttaaactaaaaaggacagcgagagctgatgtaaattcggcagccgtataccgtaggcgcgtgcgttttctggtaagactctcttgcattgctagtgccctaagttgactcg

SEQ ID NO: 35940 - DNA, 593 bp, Zea mays subsp. mexicana
  Clone ID: UC-ZMROTEOSINTE020C08_FLI
ccagggacgcgctcatccttttgcctcccaactgtgctgtgcaggaacctgcggggaaggcggtcgctcgctcgctgagaggatgcctctggggctgacgctgggctcgctggggcgggcgatgcgccggaagcggctgtcctcgctcgacatcctctcctccaagcgggcgccgcgggattactacaagggcaagaactgcaagcccaccgggttccacacccgcaaaggtggatatgtgattgttgatgaaaagttgccaagatttgtggtccctgacttgactgatttcaagctgaaggcatacgtgtcacaatgcgccagggacctcacagcgtcgacagcatcctctacttcagcagaaagtactgaaagcaagagctgatctgatctttgcttgcagggaggcagcccaactctgaagttatgtttccctagactgcccatgttccgaggattagcatcagcattctagctacaaacatttcagatatctttcttaagggcaaacattatggcatacctagattcactttttctgcttgtaattttgatcttcattttgaagtaataagtacttgagttaaggggac

SEQ ID NO: 35941 - DNA, 1018 bp, Zea mays subsp. mexicana
  Clone ID: UC-ZMROTEOSINTE020D09_FLI
gctgttcgaagctttcagccgagcaccatcgtcacagtcagtagccaagcatatttctttctccgagtgatttgcgctgagcgatcagttccagagcgagcggagctgagctgagcgagcttgcgttgcttgagagaccctgccatggcttcccaccaggacaaggctagctaccaggccggcgagaccaaggcccgcaccgaggagaagaccgggcaggcggtgggggcgaccaaggacacggcgcagcacgccaaggaccgggcggcggacgcggcgggcaagggccaggacgccaaggaggccaccaagcagaaggcgtccgacaccggcagctacctgggcaagaagaccgacgaggccaagcacaaggccggcgagacgacggaggccgccaagcacaaggccggcgagacgacggaggccgccaagcagaaggccggcgagacgacggaggccgccaagcagaaggccggcgagacgacggaggccgccaagcagaaggcagccgacgccatggaggccgccaagcagaaggccgccgaggccgggcagtacgccaaggacaccgccgtctccggcaaggacaagtccggcggcgtcatccagcaggccactgagcaggtgaagagcgcggcggcgggcgccaaggacgcggtgatgagcacgctggggatgggcggggacaacaagcagggcgacgccaacaccaacactaacaccaacaccaacaaggactcctctaccatcaccagggatcactagacgctaagacgcgtgtatgcacacgcacttggtccgatcctgtccgtgaccctgtttgcttgttcgcgagtccagtatgggtttgtgcatgttttcagtgtcatggtttccttttctacgaatttggcgttgtaagtttgattcgcaggtacgttgctgtgttttttttgcgtcatcaggtgtctgtaaacgagtcgggcgggtttgagtgtcctttgttgtgataataaagttggtaaatcctaattaatat

SEQ ID NO: 35942 - DNA, 1725 bp, Zea mays subsp. mexicana
  Clone ID: UC-ZMROTEOSINTE020E06_FLI
ctaacgcttgcttcaaatttgatcaatgcaagtcaatgcacttgggtacttatctgaactgtatgctgctaatatttctcaatgttaggcttgtccgaactgaggcacgcaacatttttacagtgtctggtctgccagacgaatactgatgccgtttcggtaacagtcatactgctactgactgcttgagtaacctttaaacaatactgccaaccgcttgaattcatgtggtctgtcggtgtttaatatggttggaaccaattgcttatccgcttagggatgctttgtcgtgcctgcaagcacatttcaggggtgttatgtatttttgtatcagatcaatgctgaagggcccttatggttgttttgtgctaagattatgaaaatatcaagttttaaaatttatttgtaaaagaaacatcttgtaggcttcatgttatgtttctctcaataaatggcatttcattggagctgtttggtactacattatctacactgaaatggaaggtctttctttggagaaattgtgaatgcgttgtgtttttgtgcctgatgatacatgtctttaatgtaaacaaatgacaaccagcgcactataacctcattggtttgtgtctacagctggtactctcttgtcgtagaactgatgattgataaacttgatcgatgtaatgagaattgtgagacctaaataccttatcgtctgtcattgtacccaccaccgtactcattgccgttctctattttgtagctgctgatgtgttcttgtggaggaacaagaacatctctgctggaatacttggtggtgccacagcaatctggatcttatttgaattgcttggctaccatctccttacttttgtttgccatggtctcatattcgccctgggtgttctctttctctggtccaatgcttcatcgtttatccacaaggctccaccaaagatcccagaggtgatcattcctgaagatttagttgtcaacattgcgctatccactcgttacgagatcaacagagcctttgccaatctccgccagattgctcttggccgggacctaaagaagttcctaatggttatcgctgggttttggttgctttctgttcttggaagctgctgcaacttcttgaccttagtttacattggtaagggatccaaacaacttctagagagaaccttgcttttcacccctcctgaaatgtatctaattggctgacactgggtcgtcttctcttctgcaaaaaaacagtctttgtggtgctgcacacagtacctgtcctgtatgagaagtacgaggatcagattgactcgtatggcgagaaggggtgggctgaaattaagaagcagtatgccgtgttcgatgagaaggttctgagcaaagtatccaggggtcctgcgaaagacaagaagcactagatgcaagtgattcgaggtccctgttagtagggaatgctagcaaaaccggttcgagtttctccggaggggcagcacttgtgggtgtgagcaccagtttgccacctgtgcattacgttgcgtatggctgcttagttgtttggtcttgatggtagtaagccgaattgctagctttgcgcttcatcagtgatgcagacgcagcatacgaatttctgtagtgctgtttgagtttgatctgtgttgtatgatgtgtgcagactgtgtttgcgacacttttttgggacttatatatcgaatgcattttggaatttgatgg

SEQ ID NO: 35943 - DNA, 1370 bp, Zea mays subsp. mexicana
  Clone ID: uC-zmroteosinte020g09_FLI
gtgatgactcagggactgaggaggagcaggctgccttcatgaaggagctggagcgtttccacagggagaaaatgttggagttcaagccccctaagttttatggtgaaggattgaattgcctcaaattgtggagacaagttactggattgggtggctatgatcaggtgacatcatgcaagctgtggcgtcaagttggagagtcattcaaacctccaaagacatgtacaactgtttcatggactttccgtaacttctatgagaaggcactccttgaatatgagaaacacaaaatcgaaacaggagagttccaagtagcttcatctgctctaccagatcgagttggttctgagagccaggtgggtggaagccatgtatctggttctggaagagccagaagagaatctgcaactcgtgcaatgcaaggctggcattctcaccgcctactaggcaatggtgaaattgctgatcctataattaaggataaagggcctattgtcttaaagaaggataaaactcctaaaagcagtggttctgccaagaggaaaaggacaccatcccttgaagatgacatggcgataccttataaatccgataagctacaaaatgactcaatggttattgacatgggccctcctgctgattgggtgaaaataaatgttaggaaaaccaaagattgctatgaagtctatgcattggttcctggacttctgcgtgaagaggtacatgttcagtctgaccctgctggtcgtttgatagttactggagagcccgagcaattggataacccatggggtgtcactccattcaagaaggtcattaggttgccttcccgcattgatcctcaccaaacctctgcagttgtcaccctccatgggcagctatttgtgcgtgcaccatttgaacaatcaaaataatgttgatgccacaatgaagcacaatactacaagtttgccttatgagtgggattatatcgttatgacatgagcttagaagtgctcaccctgaccgtcgtccaaaactagttccttgctgattttaatgcttcaagcctcctccatgctagatctctcatgtatcaagttaaactcattagttgacatagttgtgtgtgtattcggttgtgcccattggctgtgaattgtagctaaagcaaagttactaagcctagagtttaggatgttgatagtctgatgctcaacatgtccatgatttcttttcaatttagtctgcataaaatgtactgtttgtagcaatgtagtatgtagcttgttcccagtatttaagctccggaacatgaagagaggtagagattcattgtatgtaactgttgctgttgcattgcaattgctattcaacttgtattgtcaaac

SEQ ID NO: 35944 - DNA, 1980 bp, Zea mays subsp. mexicana
  Clone ID: UC-ZMROTEOSINTE020H10_FLI
ttcaacatcaaacctttcactgagctcaggtgttaataatggacctacacctgtgtatccaacaggcactgagaagagttctggtgaaacttggtttgaagtgggatggtcacgaacatatacggcaactactgatgatattggacatgtgctaagatttgaatgtatagttgtggatgtggaaacacgggggactgtgagagctcctacttcagtcatgacatcccgtgtaatcccagcaccgaccccgacaccacgccgcttgatccctgttaatgcagctgatgcaatggtccacttcgatttagatagccggacttcttcttttgggacatttactgtgctgtcctacaatattcttgctgatacatatgcaacaagtgatacatacagctattgtccaacttgggcacttacatgggcttatagaaggcaaaatttgttgcgtgaaattattggttaccatgctgatattatctgccttcaggaggtacaaagtaatcactttgaagattttttttcaccggagcttgataaacatgggtaccaacctctatataagaaaaggacgacagaggtgtacagcggaagtcctcaagcaattgatggttgcgctactttctttcgtcgggacagattttcgcatgtcaaaaaatatgaggtcgagttcaataaggctgcacagtctttaactgatgcaattattcctgccgctcaaaaaaagttagctctaaatcgtttggttaaggataatattgcgctaattgcagttttagaagctaaatttagtaaccatggaactgaaaaccctagtaaaaggcaacttctctgtgtggctaatacacatataaatatccaccatgaccttaaagatgtgaagctatggcagattcataccctcctaaaagggttggaaaaaatagctgttagtgcagacattccaatgttggtctgtggagattttaattcaactcctggaagtacgtcacatgggcttcttgcaaggggcaaagttgatcatttgcatccagatctagcaatagatcctcttggaattttgcgtccactaagtaagctgacacaccagcttcctctggtcagtgcatactcatcattcgtgagtatggctggtgttggctatgatttggatcaccagcgaaggaggatggaccctgggacaaatgagccattgttcacaaattgcacaagggattttactggtaccctagattacatattttacacagcggattcattgactgtagagtcattattggagctgttggatgaggatagcttgagaaaagacacagctcttccttctcctgaatggtcatcggatcatatagcgctcctagcagaattccggtgcaagcttagagttagacgatgatactttaggtgagggattctcgacaatcgcatgagaatgtaccctggcgaaggcaggaacgagaagcctaagggaaagaggcttgttatgttcctcacccttttacattttcgcctcgatgttctctagtggcactagttggaatgcgatttcctacagaagatatattatcaatgcaaagagaaatgatttaatagattcgtgtgccgtttctagttttccatcctcacattctcgcgccccccctcctctacaatgtgagttcattgtccacatttttgtttcctaccatgaatgtgctctagttcttacaaactaaaaatggccccttccatagtgtatgtatgtctcttgagcagggatcagctttggcgtagtttactgtgttgaagatgcttagttgaaaagtgatgccgggtaatctatgatggatattgaacgaatacctggtgactagagagagcttcacattggggaagctttactgaatgaaaactgtgaattttgatgtatctcttgcagtggtttctgaagcacccatctcaatctattgttatatatatattttttattcctgaacttgctat

SEQ ID NO: 35945 - DNA, 1619 bp, Zea mays subsp. mexicana
  Clone ID: UC-ZMROTEOSINTE021A01_FLI
ctcgtccgcccacggcccccgattagcatgagcctccgcgccagtatcattggtcttcctaatgttggcaagtcaaacctcttcaacgccattgttgtgcgatgctttgaggatgacgatatagttcatgtcaatggaagggtcgagcccggatcagacattgatgtcattaacctagagctgatattttcagatctttaacaggaacaagcagagaaatcaggattggaaaaaattcagtaggcacttatggaaggaaagcctgcaagatcggtcgatttggctgagcatgagaaagaagttataaaacatctttatctgctaactatgaaacctgtcatttctgttgctaatgtaatagaatctgatcttgctgaacctgatatcaatcctcgtgtcaaagaggtggctaaagcagcatcatatttgcagtatggtatggttacaatactagctcaggtttgttgtatacatcgaagtacaagaacctttgaagaaatttctgctaaataattttatatttttttatgttgcctacccatatgtgtccacctatgctaacaaaatcatggaatgtataaaaagattgaaactgaactcgctgagctaccattggaagagagagtagagtatttaaaatctcttggtgttgctgaaagtggactaggaaatttggtaaaagcaacatataatctattggggttaagaacttatttcacaaccggagacaaggtgcatcatttgtgctgttaaagttttttccccgtcagttaaaagaaactgacagacctttaactgtgtccttttaggaaacaaaagctcagactattttttcaggcccttcttcctcacaattatttctactgtaatatttgaagaggtttttgtaatcattataactgcatgtgattctacatataggcgtgactgcgccacaagcagctggagttattcatagcgactttcagaaaggatttattagagttgaaactgtaagctgtacataacgatgagaattgaatgacgaagtttcagatttcggtttacatgttatgatatttctcagatacaatggcaatacttcacctctacggaatttggatataccgttacctgcttttttatgtttgatatttattaatcgtacactcattaataccatacctcaggtatcctacgatgattttgttgcagctggttttcttggagtagcaagggagaaaggactggaaaaatttcaaaaacatcgagtcaagaagttttggcagcactttcatttcatccttattgcagtgcctcgacagtagacataattaagttctgtccatgagtgggatttggggctttggttggcttgcgtgcccactcggtaatcaccatgaagcagaggatggaccgtgtcatctggagcagcaacagcaacagagtgtgggctatccatttgttgtagatgaattatgcgatttacatgcacaattctttgcataaataaaatatagtacacactaattcaactcaattttatctcaattctcatcggtttaatctctggtgacatgttgtactcgtacaatatttagagaagacgagattgtgtgtcattgcaacacacagacatt

SEQ ID NO: 35946 - DNA, 837 bp, Zea mays subsp. mexicana
  Clone ID: UC-ZMROTEOSINTE021A05_FLI
ctctctgcctgaaagttcctcagcctatcctggccactgatcgagtcagaaggccttcagactgcagtgagttgaagtacaaatccaggtcacagttcggtacaaaggtgatcttgaaagatggacagattagtttaatgggcgagggctctccaagcattgctggatcggtagctgggaagccatccgatggacgcctggtaaatagttacaattgtgacttggaagatctcccaatgatgcttctgcagcaggttgccagccaagtaatccactggctccacgatgaagcggtggtccttgggatgaacgtgactagggacttcctgtgcctgtgcttggaccttgaccaaggtgaaacactaggcctggtggcacacgttgacccggatgatacctacggctgcgtctcatggtacctcactcttgatcacccgacggaggaagggaagatgtcagcgggtagtccggagctagaggagcgcaggcttttggggtacctttccccggaattgctttactctaccctgatggacctggtaaaactgtgcagcacaggtgtccaacgctgcgactcggactgatatatgcccaccgagtagtgggagtctcatgcgcgcctgtgcactggagcagcagaggcgatacctaacgtggcaggggcgagagggaggctgtgcactggactcagcctcacggtcacggccatggtcgatcgaaccgacagcatatataccgtactacatcacaaaaatcctgtccttacatcttgtatactcctacatgtattgtactgcaaggatcagtaaaaaaaaagaagatatgagttgtctagtc

SEQ ID NO: 35947 - DNA, 688 bp, Zea mays subsp. mexicana
  Clone ID: UC-ZMROTEOSINTE021A11_FLI
cgtctaagttaggctagggttcgaccagctagcggaaatggtggccttcaggttccatcagtaccaggtggtggggcgcgcgctcccgacgcccggcgatgagcaccccaagatctaccgcatgaagctctgggccaccaacgaggtccgcgccaagagcaagttctggtacttcttgaggaagttgaagaaggttaagaagagcaacggccaggtcctggccatcaacgagatctttgagcgtaacccgacgacaatcaagaactacggcatctggctgcgctaccagagcagaaccggctaccacaacatgtacaaggagtaccgcgacacaaccctgaatggcgctgtagagcagatgtacaacgagatggcctctcgccaccgcgtgaggtccccctgcatccagatcatcaagactgcgacggtgcacttcaagctctgcaagagggacaacactaagcagttccacaacagtgagatcaagttcccgctcgtgcaccgcaaggtcaggccgccgaccaggaagctgaggaccacgttcaaggcttcgaggcccaacctgttcatgtgatttagctgtggtcagtgtatgcgatcataagagtcacaagtgtttctgttatttaagttgacttcctactctcggcatacttgaagtggtaatgttgatctattcggattcctt

SEQ ID NO: 35948 - DNA, 1126 bp, Zea mays subsp. mexicana
  Clone ID: UC-ZMROTEOSINTE021B06_FLI
ccgaaggcgagcacgtgtttgtgtaacctttctccccttcttccctttgccggccggcccttcagcggcgacaagtgcccaccaggcggtggtttacgttgagctgaggagtgaggaagatgtctggaaatccagtcggcgtcgacaacacttctaggaggaaatttgacaaggaagagtacttggagagagctcgacagagggagcagagggagaaggatgaagctcggaaaggcaaggaaaggggtcctcctgtgcaaagacagcctttgaaacacagggactatgaagttgatcttgattctcgtcttggcaagactcaggtggtgaccccgattgcaccattgaatcagcaggctggatactactgttctgtatgtgaatgtgttgtcaaagattcagccaactatttggatcatataaatggcaagaagcatcagagagcactgggcatgtctatgcgtgttgaaagggcatcacttgaacaggtccagaaaaggtttgaggcacttaagaaaaggaaggatccaagtgcctttactgaagaagatttggatgagagaataatgaaacaacagcaagaggaggaggaacggaagcgtcagcgcaaagaaaagaagaaagagaagaaaagagaacaggcaacccaacatgaacctgaggacgttgatcctgacatcgctgccatgatgggttttggtgggtttggttcctcgaagaagtgacagctctgtgttggccgcatccctttggtgaccttctgccctgaagatattgctcaaccccataaacacatgtgccatgaaaaatcgtttttgccagaatcctgataagatttgaatgaagtgcactggatgcaaggatactacgttttggcactgggatattgaactgcgtgtatgggagttgattatcaaaaggaatatctaagggtgttttggataaacctgtttatttgctacttctggtattcctgccatagaaacagctgatggtcgtgattgtttgttgtgacttgtgggaatgcagatgtgcgaagtggaacaaaccaaaagaattgccgtctcattttctagaggaataaacttgtgtattgcagttaacagctcccttgattctgaatctt

SEQ ID NO: 35949 - DNA, 636 bp, Zea mays subsp. mexicana
  Clone ID: UC-ZMROTEOSINTE021C06_FLI
ccggcacgccggaggagcggcagcacgcgttctgggtgcccgtgaacaagcgctactacgcgctcgccgggaagctggaggggctggagctgccggcgtgcgtgaacgcgacgacgtgcctgccccgcgcgccccgggtgacgcgggtgcccaggggctgcagcgccaacatctacaccgacaacgccagctaccgccagttcatccgctcccacttcgggtgcacccccgtggagatggagagcgccgccgtggccctcgtcgcgcaccagcacggcgtccccttcatcaccatccgctccctctccgacctcgccggcggcggctcctccatcagcaacgaggccgccacgttcctcgacatcgcggcgcagaacgccgtggacgtcatgctcaagttcgtgcccctcatcgcgcgccgcggtggcgaacaggagcacgccgccgacatgtaatgtaaggcgggatcggagacagatccacgacgctgagacgttgcgtgccacagacacaacacaatgcgtgttttcgtcctccaagtttttacttacttaattttccacgcgcccacgatgtatcgatatactatcttattgggtggaataaatgaaattggtcgtggtggccaagttatat

SEQ ID NO: 35950 - DNA, 836 bp, Zea mays subsp. mexicana
  Clone ID: UC-ZMROTEOSINTE021C08_FLI
ggtcactcggcagtcggcacgcaggctagcagcacagcagcagccagagccatcccctctcctcgctacgcttcgcttcctcggcgccgattcctcctcctcctcctccaccctcgtccgtcccgttccggcgcgcgagctcgcccgagatggcgaacgcgagatcgggtgtcgctgtgaacgatgagtgcatgctgaagtttggcgagctgcagtcgaagaggctgcaccgcttcataactttcaagatggacgacaagttcaaggagatagttgtggaccaggtcggggatcgcgctaccagctacgatgacttcacaaacagcctccctgagaatgactgccgatacgcgatctatgatttcgactttgttactgcagaggatgtccagaagagcaggatcttctatatcctatggtccccatcctccgccaaggtgaagagcaagatgctttatgcaagctcaaaccagaaattcaagagtggcctcaatggcattcaggttgaactccaggccacagatgcgagtgaaatcagcctcgatgagatcaaggatcgggcacgctaggcgcaccgccatcgcgagtttcatgatcacgcatcatggactcgcctactactgtggatttgtatgccattatagacttggtgctgcgaaagactgctttggtgatttgtgggtttgttgctgtgtaaaaagatcctcatggcttccagaagaccatgaaggtttggatctatcatgtaattccttgttatctgccaattatgtatggactatggacatgtgttgcgctgttcaactcactacaaataagtaatcgatatattccct

SEQ ID NO: 35951 - DNA, 619 bp, Zea mays subsp. mexicana
  Clone ID: UC-ZMROTEOSINTE021D11_FLI
tgattggcttaagacgatggtaagcacccgaaactcggatggggttgtggatccaaagatacccaagaaaccttcttcgagagcactgaagaaggctttgctagtggcgctgagatgcgtagaccctgatgcacttaagagaccaaagattagtcatgtcattcacatgcttgaagtcgatgatttcccatacagagatgatcgccgaggcactagagcaccaggacaagcaaggttaccagaaacaccggcaggcggatcaggtcgacctgagactgacagcagtggaaacggcggttccacacaagctgaacccttcagatggagaaacccagaggcttagtgttcatcggactactgaaaggaaagccaagccctcttgatttgtgaagcaacaagccaacaatggtgtccactgaagtcgtgaaactctcatcttgctgatgataggcatccatggatactgttagatcatctgtaaatgtaaaaaaaaatgtaatttagccctagtaattctttcctgcttatatttatataggtggaggtatctatctatgacaaacctgttccattaaaggcaaaatagaactttatttaaatctctggggtgcctctggtt

SEQ ID NO: 35952 - DNA, 1256 bp, Zea mays subsp. mexicana
  Clone ID: uC-zmroteosinte021e06_FLI
cagcctatgattccaccatatggagcaccgccatatgtcatgtaccctcctggagtgtatgcacacccatctatggcctcgggtgcacatccatttactccttatgccattacttctccaaatggcaatgctgatgctactggaactactgctgtagcttgtgatactgatggcaagccctctgaaggcaaagataaaagtccaactaagagacccaaaggaactttgggcagcttgaacatgcttactggaaagaaccccagtgaacatggtaagacctcaggtgcatcagctaatggagccacttctcaaagtggcgaaagtggcagtgacagttcaagcgaagggagtgaaggaaattctcataatgattcatacaagcatagtggacaggaacaagatggagacgtacgaagttcccagaatggtgcatcacgttctccatctgagggaaaatttaaccaagctatggcaatcatgcccatgccatcaagtggcccagtaactggtccaactacaaacctgaatattgggatggactattgggccaacacagcaagctctgctcctgtaattcatggcaaagtgaccccaacaacagttccaggggctgtggtcccagcagagcaatggatacaggatgaacgtgaactcaaaaggcaaaaaagaaaacagtctaatagggagtctgcacgcagatctaggttgcgcaaacaggctgaatgtgaggagttggctcaacgtgctgatgttttaaagcaggaaaatgcttcacttagagatgaagtaaaccgtatcagaaaagagtatgaggaacttctatcaaagaataattcactaaaggaaaaacttgaaggcaaacaacacaaaactgatgaggcaggacttaacaacaagctgcaacattctggcaatgacatccagaaaaaaggaaactaatcgagctatcatgcaatgcttgcatagcatggccctaactagattattgggaggcgcaattgtagtatgcgtattaactccttactttattgcagttaattgttaccaggttgtgataatgttgatgccaaccttgtgtgtgggtgtttcctgtttcagatctatcttggcttatcttttagaagtcaagatgtgactgaagatgtaggctgtgacccagttcactgtatctgaaatagtggataaactcaaatttacaatttgtattgctgactaatattgttatgtatacctggcaaaaggttttctttgaattc

SEQ ID NO: 35953 - DNA, 1249 bp, Zea mays subsp. mexicana
  Clone ID: UC-ZMROTEOSINTE021E09_FLI
gcaagacatggttgccagaacaagaatctatcgtcggaggggccgcaatcgaaagctgaaatatacttggaagtctgcagggcatccaactgttagaaaaagaattggtgatgggaagcaatggtacacacaatataacccatgcgtgtgccagcaaatgtgtggtaaagattgcccctgtgtggaaaatggaacttgctgtgaaaagtactgtgggtgcgtcccaagttatgctaactttccctttttattgggcagatagatttctgttgtttctttaccccgttctcctagtgattaagtatgatttgacaattatttcgtgtatttttactaatgaaaatgcagagtaaaaaatgatactgatttcatttctgaagcctcatttgtcatgattaatcaataggtgttcgaagagctgcaaaaacaagtttagaggctgtcattgtgcaaaaagtcaatgcagaagcagacagtgcccctgttttgcagccagtcgtgaatgtgatccagatgtttgtaggaattgttgggtgagctgtggagatggttcactaggtgagccacctgccagaggtgatggttatcagtgtggaaatatgaagctccttttgaaacaacaacaaaggattttgttaggaagatctgatgttgcaggttggggtgcattcatcaagaatcctgtaaataaaaatgattatcttggagaatatactggtgaattgatctctcacaaggaagcagacaaacgtggcaaaatttatgaccgggcaaactcatcatttctgtttgatttaaatgaccagtatgtgttggatgcttatcgcaagggggacaaattaaagtttgcaaatcactcatctaaccccaactgctatgcaaaggtgatgctggtggctggcgaccatcgggttggtatctatgcgaaggagcatattgaggctagtgaggaactcttctatgattatcgttatgggcctgaccaggctccagcttgggctaggagacccgaagggtcaaagaaggacgaagcatccgtctctcaccatcgagcacacaaagttgctcgatagctgaagagcagctccggatgatacaatatgcagtaaattatatatttaatacatgatttagtcctagttcattatacgaggacttcgttggtagataagcatattgtatattcattagtgaataaactcccatacatcaagttggggaataagtgcatataaatattttttacctt

SEQ ID NO: 35954 - DNA, 1048 bp, Zea mays subsp. mexicana
  Clone ID: UC-ZMROTEOSINTE021H09_FLI
cgaacgcggtgggggaaggatcaacagggccgtttggggcccgctgaacaggaccattatcactgccggggaggatgccaccattcgcatctgggactcagagactggacagctgctgaatgagtctgataaagaatctggacatcagaagaccatttcatcgttgtcaaaatccttggactggtcacattttattactggctccttggataaatctgcaaagctatgggatacaagaacgctaaccctgatcaagacgtatgtcacagagagacctgttaatgctgttgacatctctcccactcatgataccgtggttctaggaggtggtcaggatgcaatgaatgtgactatgacagatcgccgtgctggtaaattcgaggctaaattctatcacaagattttgcaagaggaaattggtggtgttaaaggacattttgggccaattaatgctttggcatttaatcctgatgggcggagtttttcaagtggtggtgaagatggatatgtaaggctgcatcattttgattccgactacttcagcatcaagatgtagataaagaacaccagactaatccgaggctgtttgaggcccaactggtccagtttcttggttcaggtgctgcttcagttttttttttggttcaggtgctgctggttggccatgacgcacgcagagcaggctcagctcctctaggggtagtggcagtctgttgcttgttttaagacgatgttgctccggacaagcagctttgtcttctgcatgaggaatttgtgcacacatggcaatgaaaagatccttgaactgctgtcttgagctgtcgttctcgctccatggtttccaatctagttttgatttgtattctctgttcatctaattgttccaatacggtagtagacacatttcaaaacccgtgtttttttgttttttgtttgcttaaaaggcaaaatttacttaagtatccatgcatacacgtggccaatgcgtatgcttgtgtactaacaaaaggagcttatctttatatatatagacacgatgaatgtggtt

SEQ ID NO: 35955 - DNA, 1670 bp, Zea mays subsp. mexicana
  Clone ID: UC-ZMROTEOSINTE021H11_FLI
tgatgaccagaataagacaattaatgtcatcacagagctgttcacgtctggaagtcttaggctttaccgtcagaaacatccacatgttaacttgaaggcaataaagaattgggcaaggcagattcttcatgggttggattacctgcatagccaccaacctccaattatccatagagacttgaagtgtgataatatttttgttaacggaaaccatggggaagttaagattggagatcttggactagctacggtaatgcaaacacctagggctaggagtgttattggtactccagaattcatggcacccgaactttatgatgaaagttatgatgaactagttgatatatactcatttggaatgtgcttgttggagatctttactcttgaatatccatacagtgaatgtacaaatccagctcagatttttaaaaaagtatccacaggtgttaaacctgctgcattggctaagatttctgatcctcaagtaaagcagttcattgagaaatgtttagttcctgcttctgagaggtcgtctgccaaagaactcttgcaagacccatttctttgtcttgacaatgcacatgatcctgctggcactaagtttacatctccagcacctaataaaacagtagatatggtgtctttgcatatggaagttgacacttttgaatccagccctactaattcaggcaaggaaaatggttgtgttgctccacatacacctgtcctggagttcacaagaaccaacaaaaatacagagctaaagctgaagggcgagaaacttgataacaactctgtctcactggttttgcgaatagctgatttgtctggtcatgcaagaaatattcatttcctcttctacttggactctgatacagctttgtctgtagctgctgaaatggttgaacaattggagttagcagactgcgatgttaccttcattgctgattttattgatcttttgatagtgaatcttattccgggttggagacctgtaaatgatgcggcaacaaactcgtatacgcaatctgaaagtgaacttgcaatcacttcccataacaatctatcgaagttggtgcctgattatgcattaattgatggtatgatgcatccaaaagatgtgaatgtatcaactggttttcttgattctgtatcaagtgcaactaatctaggaggatcaccatgctctgaaggttcggtcatttctgtacagcgtgctgagagtttcaaaagtgtgagtgactatgggcctgaggattatggtactatggactgtggtgggtacaaagagggaatcagtaaagaaaattgcagccatgttgtagatgatggatcgaggttaattttccatatagatcaagatcacttctcttggagttggccaatggtcagcagtgcttcaatcatctactactgataatcaggatgtgctgaacggggagcttgtcttgattgaacctcagtttggttgagatgaattgacaagggtgcacggggagcttatcttgattgaacctcagtttggttgagatgaattgacaagggtgcgggaagaggctatggaaggagctcgaaataagtgggttgccagataaatgatgtttttgttcaaatctggcatttcatgtgaacaatcataagctatgttcgatttatgttagaagtgtaag

SEQ ID NO: 35956 - DNA, 397 bp, Zea mays subsp. mexicana
  Clone ID: UC-ZMROTEOSINTE022D04_FLI
tcgaagaggaccttgtttccaccgatttccagggtgacagcaggtctagcatctttgatgcgaaggctggcattgccttgaacggcaactttgtgaagcttgtgtcctggtacgacaacgagtggggatacagcacccgagtggtcgacctgatccgccacatgaacagcaccaagtaaatgaacaaactgatgaaagcatgcaaagagtgatgaaagcatgcaaagagagttgtgtttcttccccggaagtgcttccgagaataaatttttcttatctgattgtctaaaacctataattggtgtaatggtatcgtagtggttggttgagcattgagtgactcatattttgtcaggtctatgtgttatcgttaaacttttaacggtcattctatttc

SEQ ID NO: 35957 - DNA, 821 bp, Zea mays subsp. mexicana
  Clone ID: UC-ZMROTEOSINTE022H05_FLI
ctcgcgccgcgaccacccgatacgaagcgtgtggagagaccgaagaagcaggagagatggctcgtaccaagcagactgctcgcaagtccacgggagggaaggctcccaggaagcagcttgccaccaaggctgcccgtaagtctgcccccaccactggtggagtgaagaagcctcaccgctaccgccctggaactgttgccctccgtgagatccgcaagtaccagaagagcactgagctgctgatcaggaagctgcccttccagaggctcgtcagggaaattgcacaggacttcaagactgatttgcgtttccagagccatgcggtgcttgccctccaggaggctgctgaggcataccttgttggtctgtttgaggacaccaacctgtgcgccatccatgctaagcgtgtgaccatcatgccaaaggacattcagctggcaaggaggatccgcggtgagagggcctaatcgccacctcaaacatcgtgacaaaaaacatggagtcctggggttattgttaatctggtgccattgtaaggacatatgagtagggtttgttttgtggatcgtaagtttctcttctgctactgttgctgctgctacctttgctggtgttattgctagggtcgaatacttaagttaactatgcgctgacagtctggaatagcagtgttatgtgcgctgctggatcttgcgcgcaatgctgtggccggtttgttcgttaatgtcaagaattgtgttacagtgcgtgtatatatgcgtgtcgtcgcatttttatttttgggaactgttttaatctgatgattttgggctcctcgtttt

SEQ ID NO: 35958 - DNA, 1650 bp, Zea mays subsp. mexicana
  Clone ID: UC-ZMROTEOSINTE023A02_FLI
ccccgcccgctccccgccctcgtcacctacaggcccaagtgggaaggaggcgaatacgaaggcgatgacgaatcacggtttgaggctctgctattggcaatggagctgggagctgaatatgtggatgtcgagcttaaggtggctgacaaatttatgaaacttatttctgggaggaaacctgataactgtaaacttatagtttcatcccacaactatgagaccactccatcgtccgaggaacttgcaaatttggtggctcagattcaagcaacgggggctgatatcgtgaaaatagctacaaccgctactgaaattgttgatgtggcaaaaatgtttcaaatacttgttcactgccaggaaaagcaggtgccaatcattgggctggtgatgaacgacagaggttttatttctcgggttctttgcccaaaatatggtggattccttacttttgggtcactcaagaaaggaaaagagtctgcacctgcacagccaactgctgcagacttgataaatctgtacaatattaggcagatagggccagacactaaggtctttggtataattggtaaaccagttggccatagcaaaagcccaattttgcataatgaagctttcagatctgtgggtttcaacgctgtgtatgtgccatttttggtggatgacttggctaaatttcttgatacatactcttcaccagactttgctggcttcagttgcacaattccacacaaagaagctgctgttaggtgctgtgacgaggtcgatcccattgccagggacattggagctgttaacacaattgttagaagacctgatggaaagcttgttggctataatactgactatgttggtgctatatctgctattgaggatggaataaaagcatcagaatcagaaccaacagatccagacaaatcaccactggctggaaggctttttgttgttataggggctggtggtgcgggaaaagcactagcatatggggcaaaagagaaaggagcaagagttgtaattgcaaaccgtacctttgcacgagcacaagaacttgccaacttaattggtgggcctgcattgactcttgcggatttggaaaactaccatccagaggaagggatgattcttgcaaatacaacagccattggaatgcatccaaatgtgaatgaaactcctctatctaagcaagcactcagatcttatgctgttgtgtttgatgcggtctacacaccaaaagagaccagacttctccgagaagctgcagaatgtggagccacagttgttagtggtctggagatgtttatacgccaagctatgggccagtttgagcatttcacgggcatgccagctccagatagcttgatgcgtgatattgttctgacaaagacatagtgagtggacgattacaaattccgagcaattgcaagttcattggacaatcctaacaccatgaagcctcgtctgtgagagattcatccatgcccacaaacttccttgtttttcctttttagattcggattcagtgatcagtttgcctctcagccattgtaaattaatttgatgttccgagctgaaacattttggtgtgccttatttgtatcagcatgaacagcagtcatcgtgggtttgaatcagtctcttagcatttgcgttccc

SEQ ID NO: 35959 - DNA, 1483 bp, Zea mays subsp. mexicana
  Clone ID: UC-ZMROTEOSINTE023A03_FLI
gcattactccaattcacatttcacgtatatgcgtatatgttaagaaaagaatattctctgcaatgatctttgtgaagaatcattagaggaatcttacagatgatagtttattgaatgattgtttggttacttttattgagcatgctattttctccaatgtaagtgaagatgacataattcacctcttcatggccataaagaagcgtaaatcaaaaagccttagagtgttaggctagtatttttctagtatttatataagatcttatctactttgaatgtttatgttgtaagctatgtaatataatttgacgaattgaatgtaatatgagacattttgattattttccgtccatatatcgaattgatgaaaattatatatgtgcgctattgaattatacatggtattgcatgtcattttttaatcctcgactaccctagattcaagtcctgggtccgccactgatagttgccctaggcccctagcctctaggcgtcaaaactgaccggcgacaccactggttgagggcatttgccgtgggaacaaagggttagtacttttcagttgtttcctctgcttgtatggtgcttggtaagctgtagtagcttatttatatttggcaacgtaaaataccattgactgatagaccagttgggtttgtggctatcatcaaatgccctagtgaggtttgtgtatcttctaggaaatgcatcatgcaccatggaacatcaaattgccctgcattatttattttattcttttgctttagcagtaggatgtaatataaatacaatcatgatactgaacaggattaatattttgttgccagactgtgtatcgagcaggcataccctgttaaaaatcctggttccactactagtcaggccatggctgcagcagaggcatgggtgcggcaggagaaagttaggaagtttgaggagttcgtggaccagcggttgaaacccgacctcgccaatgccatcgcacagcgtaacaaggtgtttgagcagcagaagaccttcttggatttgaagaggaacattgaaaatttggagaggaatggtgttaccagcatgcggtccatggtcaatcttggctcagaggtgtacatgcaagcagaagtaccagatacaaggcatatttttgtggatatcggtctaggttttcatgtggaatttacttggcaagaagctttacagttcatatctgtaagagaggcaaggttgactaggcaaatagacgaatacacgcatctcatcgcaaacataaaagcacagatcaagttggtatgtgaaggtatccgcgaagtgctgcagctgcctgcggagaaagagttatcgtccaggaatacgtggtagaatttggttctcaatggagcagggggtggtgttctgtaaacgtggttccgtttcaactcttgcagttgagattattgtggtgccgacagtattttagagcagagaatgaggttccccttcgtacaac

SEQ ID NO: 35960 - DNA, 2014 bp, Zea mays subsp. mexicana
  Clone ID: UC-ZMROTEOSINTE023A11_FLI
tgatggtggagatgtgtttagacaaagagttgagccttacatgcaccaggttctgatgtatgaagattcagtgggacaagaggcagcacaaaagacagttccgatatgcgaactggaggagaaggcattagtttcactggccaaggaagggaatttcaatcctgatgaagagaagcatgcctttctgctgcaattgcttttttggtttaagcaatcattcagatgggttaatgcagcaccttgtgacagctgtggccgtgagacatccaatgttggaatgggcaccccacttacctcagaaatcaaatttggcgcttcacgtgttgagatgtataggtgtaaccattgttctaatatcacccgtttcccaaggtacaacgatcctcgtaagcttatacaaactaggagaggtcgctgtggagaatgggcgaattgcttcacattctattgtcgagcttttggatatgatgctcgtttgattctggatttcactgatcacgtgtggacagaatgtttttcaaacttgtatggaagatggatgcacctagatccatgcgaaggagtctatgataatcccttactgtacgagaaagggtggaacaagaagttaaattatgttattgcgatttctaaagatggagtacgggacgtaacaaaacgctacaccagaaagtggcatgaggttctctctaggcgaataattacctccgaagaaactgttgtgtctgttctatcatctataacagggaagtatcgcacaggtttgtcacctgatgctctatcagtcatagaaaaccgtgaaaaggaggagtctgaggaacttagaaaatctgcttatcttcaagttgaaacggctttatccttacctggaaggcttagtggttctgtggaatggaggaaagcaaggtcagagttgggccaagcagattcactaagttgctcatcctgccctattcggaagtgtgtggatggtcatgtttcaaatatatatgatgctctttctgcttttctttcacatttttttgacaaaaaaatccctaaagaaagaattattgaagcttttgaggcattgaagactttgatgctaactcttaaaagttccaactttaagagcagaagtgctacattagaccagaaagcacaccatctatttgaggagatatttccttccattgaaagattgttatctgctatttcactgaaagcagaattgggaactgctggataccaatctgtgaccgtgtctggaaatccagtacactcatccttagcgttaccagtagcactggatgcagttaatgagatattgagtaattataagaataatacctttttcacagaaggcaatcatttcccaagagggaacagagtatgctcaggttcagtccttgcaagcagggaacaacttccaataggaattgcaacagcagcttttgacggcattcactcctccaaatgggaagagcctgatggagccaaaggatgttggctgatttatacaatgcaagatggcaaaagttgcgagttggagtcatatgatttgatgtcagctaatgatgctccagagagggatccaatggactgggttcttgaagggagcgcagacggaggctccacctggaatatacttgatgctcggaattcagaaatgttcgagagccgtttcctgaggaaaacatttacagtggataagagatataaggcaaatgctttcaggtttaggtttctacgcgtaagagattcccattctaatccaaggtttcagataggatcaattgatctatatgggaaaaccatatgaactccccccccggagctatgtttcacttttcggctttctgaactgctcggtctcacgagcctgtgtagtatcataaattcataatattgtaatgcgagcatttactgtggacgcaacgctctcttcagtatgaatagatactgaataattaagagcatgatatatattgtttgcgcgcgcgattgagttctgaaatataagtgaagtccctcg

SEQ ID NO: 35961 - DNA, 1742 bp, Zea mays subsp. mexicana
  Clone ID: uC-zmroteosinte023b03_FLI
cagaacgctttgaaagatttttactggaatcatatattgaagataatgatacagtcaagtggtgcccaagcacaccacattgtggaaatgctatacgcgtcaagggcgatatttattgtgaggtggagtgcacatgtggatgccagttttgttttaattgctctttacgagcacactcaccgtgttcctgcatgatgtgggagctctggatcaagaaatgccgtgatgaatcagaaacagtgaattggataacagtaaatactaagccctgtcccaagtgtcacaaacctgtggagaagaatggtggctgcaacctggttgcatgtatatgtggacaagcattctgctggttatgtgggggtgctacaggtagagatcacacatggtcaactattagtggccacagttgtggcaggttcactgatgatcagactaagaagacagaacaagcaaggcgagacctctatagatatatgcactaccacaatagatacaaggctcacaccgactctcttaagcaggaagcaaagctaaagaatgagatccaggggaagatatccatttcagaaaataaggaatcaaagataaaagattattcttgggtcataaatgggttaaacaggttgttcagatcaaggcgtgttctttcatattcgtatccgtttgcattctacatgtttggtgatgagattttcaaggatgagatgactcctgaggaaagagaactgaagcagaatttatttgaggaccagcaacaacagttagaatttaatgtcgaaagactgtctggtttccttgagaaagattttcaactttttaccgatgatgaggtcatggatacaatgaagcatgttataaatctttccaatgtggttgataggctctgcaaacaaatgtatcaatgcattgagaatgatttgttatatcctctacgcacacctcacaacattgctccatacaaatctaagggcattgacagggcctcggagctcaatattagttgggatcctggtgaacaaagttcacagtcaacaaaacatagccaggatgaacacaggaacaaacaagcatcaaatattttgggtaaacgaactcatgaattgcatggttcgagttcttctaacaagcgagagagggtagatgctaacggtggtggtggtggtggtgcactttttgatctcaacgtgccagctgaagtggtggacaagatctgaaacttcattatctgatgggtgatggcacattcctttgaactgtacagctgacttaagcttcgtgaccaacataaaggaaaaaatactgttcttttttgctgccttaccaccatagagtacctgcatgtcaaatttttaccctggtgcttggatcccaaggtatagagtagcttttaagttatatgttgtatttcatggcatgatctgaagccaatgttcatagttctgatgaagttgtacccctcaagcaagatgaggatattttggaatagaaccatgcctgtgttgcaaattccagatataatgtatgcagcatggtgaaaagggaattgtttgttgagaagaatgtgggtgattatttcctggcaaatgggtggttctattgacaatgaagacaatgactgattcgtcgtattaaatgtgcactttgtttgttgcaactggcaaccatcttgtttctaggacagttttgtattcaacctgtgaaaatcccggttttctgggcacacattccagatttttatggct

SEQ ID NO: 35962 - DNA, 1268 bp, Zea mays subsp. mexicana
  Clone ID: UC-ZMROTEOSINTE023B05_FLI
ggctggggtccccgcggctgctggtggcgccgatggtggacaactccgagctccccttccgcatgctgtgccgccgctacggcgccgacgcggcgtacacgcccatgctccactctcgcatcttctccgagaacgagaagtacaggtccatggagttcaccacgtgcaaggaggatcgaccactttttgttcagttttgtgccaatgatcctgacattttgttgcaagctgcgaagaaggtcgaaccatattgcgattatgttgatatcaattttggttgcccgcagcgtattgcaagacggggtaactatggagcatttctcatggacaaccttcccctcgtaaaatcccttgtgcagaatctagcagctaatcttcatgttccagtttcagttaagatccgtgtatttccacgactggaagacacattagcatatgcgaagatgcttgaggaagctggtgcttctcttgtggctgtccacggccggacaagagacgaaaaggatgggaagaaatttcgagctgactgggatgccatcaaggccgtgaaggatgcacttagagtacccgttcttgcaaatggaaacattcgccatatggaggatgtgaagaactgccttgaacatactggtgctgatggtgtgctttcagctgaaactcttctagaaaacccagcagtttttgctggtttcaggacaaaggaatggaaagaagatggtgacgagaatggagacggtggcttggaccaggctgatcttgtgattgaatatctgaagctgtgtgagcagtaccctgtgccgtggagaatggttagatcccatgtccacaagatgttgggcgactggtttagggtgcatccagaggtgagggaggaacttaataagcagaacaagctcaccttcgagtggttgcatgacatggtaatgaggctgaaggacctcggtggaagagtgccactttacagaaaggagactgcactaggacaaacattagcctctagcaatgcctgacaggttcttatatatgcagcctatcattattggagaggagcaattgatgaaagctgaagcattttgtaccaattttgacctgttatagtacagactggaagagattgttggactacaattaaacctcgattagtaaagcatattttgagttgagcagctacagtgcaacggctcacctcattgttgtaacagctgatatgtaaaatcatttttacatcattacatggtctcagataatttggatttgctattgaactt

SEQ ID NO: 35963 - DNA, 622 bp, Zea mays subsp. mexicana
  Clone ID: UC-ZMROTEOSINTE023E07_FLI
gttacaagttccccatctctacaataagatgtgtggagtgcttgaagagagtggtgcttatgcgctcagttccttctttggagacaagtccgcatcttctagtttggccaatagccttcgacagtttgaaactgtgtgcgagaatgtcgtcgaggccttgcgaccacaccaaaatggtactggcagtgccatcaaagaggaattggtagatgcagccaccaaagcagcagcagcagcagctcctcaacaagattcaggccatgatgcaccgcatgggcagtcttcgacagccaaggcggacatggaaatcgatggttgatttgtaggttccagagtggtaagaaagggaatcccctctaatcattatgtatactgtggtcagaatgtccgctatatattgtaacatcaaagaaagcacctccaggcctgagggtgttactgctaatgcgtttggtttacttgttgtccttgtaatatgcatacacatttagaactcatgcagccattttgtgtgctcgaaccggtggatcgctgccctgttgtgttgtactgtgtttagggcctgtttggatacgaatggttaattataagacggggctaaagataagtccggattagctat

SEQ ID NO: 35964 - DNA, 1603 bp, Zea mays subsp. mexicana
  Clone ID: UC-ZMROTEOSINTE023F01_FLI
atgaccttaaatttgaccctgacctggtcataagaggtcttgttattgataaagagaagggaaacttggttaaagctgatcgatttgggtacattaagagggccatgcatggtacccaaatgctttccactcgtgctgtgagtgaaatatatggaagagaattggtggacctgcggaaagaaattcgatgggagttccttaatacccttttctctgtttcagaagctgtcatgttcatgcagatggttgacaagttagatcagggattggtgccagctgaacttgggccactggattacaaaggactgtacaatgctgtttccaaagcactttttcgagcacatgtagaaggccaactcaagagagaaataatggctgagcctgatcggtttgtagagcctgatccagaacttcctttagctcttcttgatcaaaaagaggctggaaaaaagttgcttctcattactaattcagatttccattatacaaacaaaatgatgaatcatgcattcaatcgctttcttcctaatgatgtgggatggagagatctgtttgaaatggttatagtctctgcaaggaagccagaatttttccagctttcacatccattgtatgaggttgtaacagatgatggactgatgcgtccctgttttaaagtaaattcaggtggcttatattctggtggtagtgctcagatggttgagaaatcactagacattcatggggatgagatattatatgttggggaccatatttacacagatgtaagccagtcaaaagttcatttacgatggaggacagcattaatctgcagagaactagaagatgagtttgatgcactggtcaaaagccatgaccagaaagaaaagcttgttacacttatacaacaaaaagaaattgtgggggatcttttcaaccagcttcgcctggctctgcagaggcgctctaattcacgtcctgcacagacgcttgctgcaacttgtatggatgaccaggagcttacggagagtatgcaaaagttgctcattgttatgcaaagattagatgaaaagatcgggccaatgctagaagcagatggagaacttttcaataaaagatggggttggttgtcacgtgctggcctatgggataagagtcatcttaccaggcaaattgaaaaatatgctgatatatacacatcaagggtttcaaattttctgcactatacaccattcatgtatttccaatctcaagaacagacacttgcgcatgatgcccattcctattctggaggaaaggacatcaaagttcattgagcatccgttcgtcacaatctggagattaggcaggaaagagcgaacgtgatcattgtgattatggctgcgatggctagacaataacaattgtcgttttgaacaaattaattaatacaccttgtaagattgtatttatatataggtaaatctttagctatagcatgctgaatgattggtctgatagtcagtttgtttgtcgtggcctacctagagcctcattttgggaggcacagtacctgttttggtgtacctgctgctatttgcattgtatatgtgaaatgcgaagtgaagtatgacaaggtaacgat

SEQ ID NO: 35965 - DNA, 1441 bp, Zea mays subsp. mexicana
  Clone ID: UC-ZMROTEOSINTE023F06_FLI
caagccgctccactgcctcgctgtccgcctcaccgcggagcggattgcgaggcccgaccagtacgcggacccggtgccgccaccgccggcgctcgaggaccccgcgctcttccactatgcaatcttctccgacaacgtgctcgcggcctcgtgcgtcgtgcgctccgccgttgccaactccaacgatccctccaagcacgtcttccatgttgtcaccgaccggatgaacctcggagccatgcaggtgataatccgccgaatggacttaaaaggtgcacactatgaggtcaaagcatttgaggattacaaatttctcaactcctcgtacgttcctgtgctccggcaactggagtcagcaaacctccagaaattctattttgagaataagcttgagaatgctaccaaagatgctagcaacatgaagtttaggaatcccaaatatctgtctatgcttaatcacttgcgattctatttgccggagatgtacccaaagctacaccgcattcttttcctggatgatgatgttgtggtacagagggatcttacaggactctggaagattgacatggatgggaaggtgaatggggcagtagaaacatgctttggatcttttcaccgatacgcacagtatatgaacttctcgcaccctcttatcaaagcaaagtttaatcctaatgcctgtggatgggcatacggaatgaatttcttcgatcttgattcttggaggagggagaaatgtactgagcagtaccattattggcagaatcagaatgagaacaggacattatggaagctaggaacgctgccccctggcttgatcactttctactcgacaacaaaacctctggagaaatcttggcatgttcttggacttggatacaatcctagcatcagcatggaggagattagaaatgctgctgttgtgcatttcaatggcaacatgaagccctggctggacatcggtatgaaccagttcaggcacctttggacaaagtacgtggactatgatgactcatatattcgtcagtgcaattttgcaccgccatagaaggctttaattaatcgacaacgaagaatcggtaaaagtggcacatacatatgccggaagcacgttttctgtagagataaggagtttctagagtacaactgaagggaccaccacaatcttttctagctcataatgtttgccatttgttatgatcaaagtaatgtttgccacatgactgcatgagcattattgtcgttgtgtgtgttagttatgtcagcaatactctgtatatgccgaagtcagatatatttctgttcacgtggatccaagaagtaaagtgtctgatgtatttacaaaaagcactaaatactaattgtagattgaaactctacaatgtcactgtatatttctcttgtcacattttcacaccgtgctggtatcaaattgattgct

SEQ ID NO: 35966 - DNA, 2237 bp, Zea mays subsp. mexicana
  Clone ID: UC-ZMROTEOSINTE023G11_FLI
attagcaagagagtattcaatgtgatgaagagtgaattcttggccacatcaaagtcagatggggcaaccaaacaagaaaattatcctgcctttggccttggagatggtacagatactccaaaaatgttggagagaagcaatagcagcgtaccatttgaattatacaagaaccagactaccgttgttgtttcaagagaggagtttgtaagtgttgtatgtgatgccctctctttgtacaagtatgttggacccaaccagaaagctgacctgcttcttgcttgcagaattaaagagagaaaggaatcggtggcaatactcttgtgtgggacaagtggatgtggcaagtccactttatcatctttgctgggtagtaggttgggtatcacgacagtagtttctactgattccatacgacatatgatgagaagctttgcagatgaaaaacaaagtcctcttctctatgcatcaacctaccatgcaggtgaatatttggatcctattgcagttgctcaggcaaaggcaaagcgcaatgcaaataaacccacagttgtttctcatccaaataccagtggagacaaagatgtgacttcagatgacaaatctcagcatggatcttcagaattacctcctagagctgaattgattggcaacaagcaaatggcagtagaaggctacaaggcgcaaagcgagatggtgatcgacagcctggacaggttaattacatcctgggaagagcagaaagaatctgtgattgttgaaggagtgcatctaagccttaactttgtggtacgtattagtcaagaaacagtgcagggatgggattaatgaagaaacatccttccataataccatttatggtatacattacaaatgaggataaacacatggaacgatttgctgtacgtgcaaagtacatgactctagacccagcaaagaacagatacatcaaatacattcgaaatattagagctatccaggaatacctatgcaaccgagctgacaagcatcttgtgccgaagatcaacaataccaatgttgaccagagtgtggctgctatacatgcaacagtcttcagctgtcttcgcaggcgagcagccggggagcaactgtatgacctcaacacaaacactgttgctgtagtggatgaggaatacaggaaccagcgtgcagctaacaccttgggttctaagggcatgtttcagttgatccaaaggaaggggtcttcaaggaatctgatggcacttcttaacaccgacggttcagtcaccaaagcttggcatgtaagtgcaagtgatggcaatgggaatcttaatggtatcacaaacaacaagaagtctcctgaaaatcctatgctggatccctcacaaatcgggaaggcagaagccgtcaatctccagtttggtccttttgggatcagtgcctggatgagtgacacgggtggaaccagccatactgggagtgtggaagacctgaggcctgatagtgtggagactggtggtagaaattattcgtcgtgctgcagttcgccaaagatgtcagattccacctcgaaggagcttatggaggactactcagtctatggcagtgacgaagaagctgacgaccctcgtgatgctgaaactgatgatgacctaactgatgaagaaagagacatgcacgagatagatgcaggctctgtagacgagcactcaaccaagtcggatgaggaatacgaggacttagccatgcgtgatgtgatggagaatggtgactggtctgacgacgaccaagctgtgggcaaaaccaagaactcaccagcccaggagagcatccatgggagtggggcagctgaagatgatggcataaagggccggtaccaccacaacctggacctgttcctgaaaatgtccaaggaggtagctggcaccagaatgccttgcgcgtcatagtgccaccagggtggagagaaggccggcgacacgctgctctggtcccagtgggtggtatgtttcttgggcacctgcttttgtgatgctgtgagcttgtgctgttgagtgtacaccggtggctgtggctttgtagcatgtacctgtccaaactacaaaatgctctcacctggttgtaaagagaggacctgatgctttgtcatatcatgtagtaggagtattatgtttgacaataaaatgctctcacctggttgtaaagagaggacctgatgctttgtcatatcatgtagtaggagtattatgtttgacact

SEQ ID NO: 35967 - DNA, 487 bp, Zea mays subsp. mexicana
  Clone ID: UC-ZMROTEOSINTE023H04_FLI
cggaggcgaggaggaagaagatcgggaggttcctgtccaggctcgtcggggcggagaagcggcggcacaccggggacggcggcggcgagctcgtccactccaaaaccatgaaggagaagacggcgttcaagtgggtgttcttctgaattccaccatctcagaccagatgccaacaccatgcacacacgctcgaggcccagtttcctcgatcggtcggtatatagttcccccctcacgtacttttgtgcttaaattaatctgcagttttagcacggtttcttttctattgtgtacacgagaactctaagccaaaaccattgaccattctgtactatttgggatttttttgggggaaaaaggttatatgagaaatcgtgtgtgtctgcttattttgtaaaattagaaggaaagtacaacagctacgaagtgtaaagtatattacgtggatcttaaatctatgttccagtatccgatagtgttttagttt

SEQ ID NO: 35968 - DNA, 1063 bp, Zea mays subsp. mexicana
  Clone ID: UC-ZMROTEOSINTE023H05_FLI
ttctcgctccgtctctacaggtcctccggtgatacctgtcaacctccggcgatctgggttgtgacaacgagaaacgaggaagacgaccccacctcgcctggaaaacgcatcccaagacttcaaccttcctttccggccggagatccgcttcgcatctccgcgacagatccgggcaaacgggccgatgcagttcttcggcggctcgtcgctgacgtcggtcgcgccggaggcgaccccagccccggcggcgccccctggcacgggcacgggcgccagcgcgcaggtcctctacgtcttcaaccgcaacggcgtctgcctgctctaccgcgagtggcaccgccccctccgcacgctcgaccccacccaggatcacaaactcatgttcgggctcctcttctcccttcgctccttcaccgccaagatcgacccaaccacggcagaaaagggaaatcttggtgtgccactactgcccggccaaggttgttcgttttatagcttcaagacaaacacatacaaactgaactttatggagagcccttctggtataaagcttatactaattacacatccaaggactggtgatcagcgagactcgctaaagcatatctacaacctatatgtggaatacgttgtaaaaaatcctctgtatgctcctggaacaccaatcaagtgcgaacttttcaacaaacatctcgatcaatacgtgagaacaataatttgatgtcattgagagagccattgactcaccttcgtccttgttcagctgagcattgtgttccagtttcacacaatgcggtcttactgtttatctagaactggcacaaccgagaaggcaggcaggcatagctgctaatatacatgtctttctcatacttatcaccagtgaaatgttgatttgcagacaatgggttggtgaggcaaaaaaaggtccatttcatgttctttagcgtgatatcaccatttcgtggatggtagacttttctggtggaaaatttgcacagccgcaccatgggagctgcagtattcttgtgtaccgacctcaatttgacagctctactgtgac

SEQ ID NO: 35969 - DNA, 1271 bp, Zea mays subsp. mexicana
  Clone ID: UC-ZMROTEOSINTE024A09_FLI
gctgcttcctactcttcaccgcttcaccccgcgtgcgcgctttctctgttgctctgctacaactgcggcgccgccgccgccgccgccctacgccagttgcagagcccttcatcgctcttctcgccggcgacgagcacccaccacaacaagtctttcacccacagaaggcaaagatgatcaagaggcgctactttaggcaggaccatggtgataacagcggctcctcatcttcctcctcatcggattgtgactcggacaacgatttggcagaagaggcagtcagcagtgaggaagtagaggagcaggaagaagaggaagcagtcaaggaagaatcaggagaagaagaggaaggagaactagaacaacaaattgtagaagggagttcaggataccaaagtgaggacaactcatggaatgatgttgatggtgcatctatagacgatgatgaacacagcagcccaagagatgaagaacgtcatgaaataagtttgcccattatgaaatcttctggtgctaatgctgactctgccaaaagtgctgataacacagatgacgctgttgatgcagacttccctaactgcattctgaaatgcaaatctgtgtttaagtgcaagctctgtcctaggatcatgtgcttaaatgtggagatggtcaagatacatctgaaatcaaagaggcatgctcgttccgagaaactactaggagaagggaggcttaagctgatgctcaacagcgatggtgaactggaggaagagcaagagacacatgctgaacgacatgctcggactatagccctttcccagcaagtacaaaagcagaagaaggattcaggtaggcagcgacagaatcggagaaagaagaaggtctcgggttaatctggaagaggcacagaacaacaaaaaacaacgcaaagctaaatgaagtgggtcttgcagaagcttccaagttcttttgtagcttcaactgctgtgttcccaaactttgtagcggccataccgttaggatattcaagtatccaagagttttctcgtcggctgtaccccgtttcggcctaaactgttagtaatttgttgaattttagatatttaattgaagtggatcaaaatgatatttttgagccgagcagctgatataggctcctcgaactacagtgtgtcgcctgtgccaaatcatcacaggttcatgatccacacgaactataattgtgcttctcaaactgtggtgtggagcttgagccattttagaggagtcacacactgtgtgtgtatttt

SEQ ID NO: 35970 - DNA, 769 bp, Zea mays subsp. mexicana
  Clone ID: UC-ZMROTEOSINTE024A12_FLI
tttgccaaagaatcgtgttattggttctggaaccaatttagattcatcacgttttcgttttcttatgagtcaacgtcttaatattgctcctacatcatgtcatggatggatcattggtgaacatggtgattcaagtgttcctgtttggtctggtgttaatgtggctggtgtacgtttgcgtgaattaaatccaaatgttggcactgattcagatccagaaaagtggaatgaattacacaaagaggttgttaatagtgcctacgaagttattaaattaaaaggatacacttcatgggcaattggattaagtgttgcatcacttgcgtcatccatgttacgcaacaccaataatgttcatgctgtttcaacattagtaaatggagaacatgatatcaaagaagaagtttatttgtctttgccatgtgttttgacagcaaatggtgtttcacatattgttaaacaaattcttactgaatcggaaacatctcaattacaaaaatcagctgcattaatgcatcaagttcaacaaggtctcaaatggtaaatcatcaacatcatgcttttttttgtcgtacaacatgacactagaccaacataaccactaccacaccaaactaaactaaaattatcaataatttaaatcatttaaatccaaatataaaaataatttatttgtcgattaataattatcgataagctatgactatgatgtaatttaaaaaaaaatgataagcattaaaatgaaacgaccaaagtcgtatattagatt

SEQ ID NO: 35971 - DNA, 864 bp, Zea mays subsp. mexicana
  Clone ID: UC-ZMROTEOSINTE024B07_FLI
gcccgtgcgtcgctcccctttctctctcgctcaaaagttgctgctggagccatctcccctctctccgacccccaaccatggatgaggcgcaagttgtggagtcaaaggatggaaccatctcggttgcttctgcatttgctggttatcaggaagctgtgcaagacagggatcacaaattcttgacaaaagcagtggaagaagcatatcgaggagtcgattgcggtgacggaggtccattcggagcagttgtcgtctgtaatgacgaagtagtagtcagctgccataacatggttctgaagcacactgaccctactgcgcatgctgaagtaactgcaattagagaggcttgcaaaaagcttgggaaaattgagctctcagactgcgaaatttacgcgtcctgcgagccatgcccaatgtgctttggtgcagttcatctctcccgaatcaagaggctggtttatggggccaaggcagaggctgccatcgccattggatttgatgacttcattgcagatgctctgagaggcactgggttctaccagaaggccaacttggagatcaagaaagctgacggcaatggtgcattgatcgctgagcaagtctttgaaaagactaaagagaagttccagatgtactgatgctgagcagaagagagatctcagatttgtacaatgcttactcataaggacaagaaataatacagtgcccaaatgtccattgtttcgggaaaaaaatctcaattccactgttcaacattttgatgatgcctgaatttcttgttaacagacacaagattgttatttgctgtaaaatgtgcagttgatggaatatactttctccctgtctgatggtgccatttatcac

SEQ ID NO: 35972 - DNA, 2947 bp, Zea mays subsp. mexicana
  Clone ID: UC-ZMROTEOSINTE024E05_FLI
ctgatgttatacgagttgttgatgatgtagctaatggtattccatctacatacacaaatggtgtatcatcaccaccctccactccatcttgttctcaaaatgaatctttggatccagctgctcacttgataacagggaatgagatcaataatgaagctctgacttctccatcttcggtgcaagatagtcctgaagataaaataatgcaagttgcaaaggctgtgtcttgtggcagtgaagtagttaaggcagatacattgccatatgccatgctgcggccgatagttgttcctagtatatcacgaaggtcatcacgatctgagattaagggtgctcatgatcacaggaggagcccatgtgtaccatcaacaaggagggacatacctattctaagaagacctccatcaccagtagtacttagtgttcctcgcgtacctaggccaccacctccttcacctgctggagagtcaagaaaacgagggttccctatcgttagatccggcagctcaagtcctcgacattgggggatgagaggtttattttctgaagacaaaatttttcatagggctcagttttgcttggatggtcctgaagttgtatggccttcatggggtaacaaaggtacttctggtacattggtgcaaacaattgaggatactgttttgcaggaccaccttgttaagatttcacagctatcttgtgatcaacatccagatgtggcattgcctgtacagccactagatatgctaaatggttcgtctcacaaggcatccctctctttgatgcacaatgctctacatgaagaaatagatcaattctgtaagcaggttgctgctggtaatctggtgaggaggccctatataaattgggctgtcaaaagagtcacccgttgcctgcaggttctgtggcctcgctcccgtacaaatctatttggctcaaatgccactggtctggctcttccaactagtgatgttgatcttgtggttagtcttcctcctgtccgaaacctggaacctattaaagaagctggaattttggaaggccgtaatggcatcaaggaaacatgtctacagcatgcagcaaggtgccttactaaccaggactgggttagaagtgattcccttaaaacagttgaaaacacagctatacctgtgatcatgcttgtagcggatgtaccctgtgacacgaatatgtccaatgagtattcttcagtactagatggctcacaagactattcagttaacatgcttggagaacaagggagtcctcctcggtctgacacctctagttcagaaggcagcaacatgctgatgtgctcaaaattgaataaggatgattgtgatattgtgcagtcaattcgtcttgatataagtttcaaatcgccatcccatacaggactgcagactactgagttggtacgtgagttgagccagcaatttcctgcagttatacctcttgccttgattctcaagaagtttttggctgaccggagtttggaccacccctattcaggtggtctgagctcttactgtttggtgctgttaattgttcgttttctccagcatgagcatcatcttggtcgacctattaataaaaatctgggcagccttttgatggatttcttgtacttctttgggaacatatttgatccacgccatatgcgcatttctatccaaggaagtggaatttatttgaatcgagaaagagggcaaagcattgacccgattcacatagatgatccacattgccctgctaacaatgtgggcaggaattgtttccgcattcaccaatgtattaaggcatttgctgatgcgtttgctgttcttgagaatgagctactgcagttcagttcagaatgtagcatgcctgtatcttcattcaatatactaaagaaaataatcccaagtattgattctgatgagctgtagctataaaaaagaggtacgattccacagaatacaattgatgacagggtggaatgacctgtgctgccttctagacacactgatgtctatgcagctgctcagaagcctcagtgtggcaagtttgatacctctggaatagaccaaaaaatagaccggcaagatggcaatattcaaacgtgagctcttgtgtgttcatgcaatggcacatgatgccttgctccctgatcgagcttcttgatgttcagatctctgactgaggtaaattggcttactcaagaacaaggtggtgaattggctttctcatgaacaaggcgttgctgcacacagactactgacatggatggctgttcttccacctttctgaataagcccattcatgtaatgtttggtaaatgcaaaccgcatgattatccgcttgatactgtgattgatagatccttcacctcgtgccaatattctgtgttccaatgccaagtcacattctgagcagcaactggagatttgctcatgtaccgattcttcaaggtcctaggatcatttggggtgatgaagattgtgaaatacatgtggaggggtacttatatggagatgcatggtcttagtaattaagcggtcaagaacttatggtcacctgatgaaaacaaggatggttgtgaagagaacggagtagtggcatcagctatcagggaaagggaagtgctattgacatcatggctgacccctttcagattatcgcgctgagatcttcctggcgaggattgggagctacgagccagatatccttgacggaaatgtttgcttggacagcgtaaaccggaaagtaccggcgatgatattgatgatgataatcgcactgctctctattgtcatactgttgtctgcactcttcagcgacatgtcttgtgccttttcaacgtgcgaaatgtgagcaattgctcttgtaaagctgcactatttcactaaaacattattgtttgggttatttagatccatggtattactatttatctatttggaaactt

SEQ ID NO: 35973 - DNA, 1269 bp, Zea mays subsp. mexicana
  Clone ID: UC-ZMROTEOSINTE024E06_FLI
cgtctccaaagggtcttcaaacaacaagtcggcgcagtcgggttgtcaggtgattgacaatgacgactacgatttgctgtgtcgaagtggtgttctggtggaacaagagtacacggtgtcatcttgggatggccacacggtgcttttgggtgactcgcacgtggttacttttagtgcgggtcaggcgctctggttggcgacgaattcacaacaagttgtctgcctccacggcgagctattctttatagaaaaaccagaattactcacgattgccaactccacatctaacatggcaaagggtatttctagtgattcttccttaaagttgcctccgattaaggacttcctcacagttgccgtgagtcctattggagacctcaaagttgctgcgaaaactttgatgggctcgaagaacctatcgaaggagtcaaaggcatactacgaggccttaaagaaagaacgtgctgccgaggatgctcgctcgacacttgaccttgagttccagaagttcgctttcgcgctgggcaatttctttcaacggatcaaaccatcaaagggtggcgaaagctggccagattggacgttaagaaatgcccgagccggaaacttcaagaagctcgaaaacaaactggattcgatcttcaaggtagagcaggcgaggattgaagggataacgcatctccagaagatctctggagaagcgtttgaccgggctcataaggcggaaactgaagtgatagaacttcgtcatgatttagctgtagctcgaaagaggctcaaggcttatgatgacagttacgcctcccgtgatcattacaattacgggaatctcccaccgggagatcaatggtagtattcccacctgaatacaaattacattcgttatttcatttgtaatattttcatttgtgcttttgcataagaggacacttcaggcaaatcttgtccctcgcaaaacccttacaggctgattcctgtgaaggttttggagagaaccctgggtttccttgggggatctcggaagatccttatgaagacccttatgcagtttataaagttcccttttggttcaatttaaatactttaaaacaaatatgagacaattcgtacgctaggtttggaagcccgtgagtacttattgtgggacgcaactaagggagtcccaggctatcactactataaggtttactatgacggttgctggtcataggttttcccttttgatatatagtctcttgtgcggtggaccgaacccccccgcacgcacac

SEQ ID NO: 35974 - DNA, 1373 bp, Zea mays subsp. mexicana
  Clone ID: UC-ZMROTEOSINTE024F04_FLI
tgcggtgtgggcttggcagagagcagacgaccgcgcgccttgcctctaccactgcagctgcgctgttccccggtgccatttctggcgtcatctccgacaaaataggaccacgaagggcttgcatattgtactgggtacttcagcttgcagtaggtgttgtgaagagtttcagtgcgcttcgctgttcatggatcaacaatttcattctggcttttgcctcttcagtgttctctttctgttttgagacgtggcttgtgctggagcatgagaaggtttctgtatttcttgaaacacatatgtgctattactgtgttgtctatgttgtatgaatcatttagcgcttgatcctgaattttcagcaagaccagaagcaagatctgctgtttgataccttctggctgatgacattctttgaatcggtgtcccttgtcggaagtcaagaaatcataaatgtattggttagtgatgatgacagtagattcttgcttccctatgcatttgcagccacactatcggtagtgggcattctgtatatcagaaatgcatcaagtacatgtcagcatgcatctgccattgggagctaccaaaaatcatttcttgctcatgtcctcagagacaaaagagtactgatcctggtcttagctcaagcaagcatccattttgctgtctcagccttttggtttctctgggcaccaaccatagtggctgacggaaggtatgctcaactgtcagtaatctacccctgtttcttggcatcaaggatgcttggaagtgctggttttccatggttttacggagccatagcccccttccggaacgaggacagcttgacaatagcttacgttggtgctggactcgctttgtcgattgcggcttatgattaccaggagattgcaccactggtgatagtgttctgcatcttccatgcctgtgtgggcttcattttgccgtcactggccagattgcgaacaatgtacctgccaaatgagctgcgagggggcatgatgagcttttcaatgtcactggcaaatgccgccaccttcgttttcttgatacagggcagcgcccaccatcgacgcgttgcaaactcaaccatcctgagccttgcgtcctatggcctgttaggagctgggggctgcgtccatatgttgaggaggtggaggaagcacactcggctgaatgcccgtagtctgtaggagctggaggcacccaatgaatgctatacacactgcagggtgaacttgagagcggtttctgtagcatgctagtatctcacgttttgtttatctgactttttctggaaatatcaggaggtaggtgtaggatactacttttgttgttgttcaaagaaattgttgaaattgaaggttgcc

SEQ ID NO: 35975 - DNA, 876 bp, Zea mays subsp. mexicana
  Clone ID: UC-ZMROTEOSINTE024H12_FLI
caaccgcctactagtgctgcagcaagctatccagttcaaggttcagctccatctggatatggtgctccaccaccccagcctggctatggcacccaacctccacagcaaggtggatatggtccgggcgcttatgggcagccttctccacagggcgagaaacctcctgcatcttcaccttatggacaagctccgcctcctggatctgctcagggtggttatgggcagtatggttacagccaacctgcatacggtgcaccaccagcttaccctggtgcacccactgcaagccacccgggctatggccaacagcagtcttatggcgatgcttatggtagtggaagctatgggcagcctacagcctacactactgaagcaacagctcctgctgcatcccaggatcactctgccgcacctgccgcggcccctggaacaacagctgcgccagctcctgacaacaatgggggtgcccaaacttctgcggaaacttgatcttcaacagctaattgggaacaaactttttacaagcctctgttgtgtcgtttcctccactgttgcttaatattacgcatctagtttaggctccacatctacaggttatatcttaaagcctgttgttttgaccccatgaatcgctctttccgtgctgttgattagtactttgttgtttttttattgctggttagatgtttggactggtgatatatgtgcttgtgcggttactcttgttggactctaatgggtacctaccggcttggtctggacatatactgtcctatatttgtttttagcctccttttacattggttattatgtgtgctgtacaactgtcggacgtttccatgagctggtgatggttatggatgaaaatttggtttc

SEQ ID NO: 35976 - DNA, 671 bp, Zea mays subsp. mexicana
  Clone ID: UC-ZMROTEOSINTE025C04_FLI
cgcagctgctgtaccagtcgtcgccgtaccagtccgcggtgctgctcgtcaccgggcctttcgtggacaagctcctcaccaagcgtgacgtcttcgcgttcagctacaccacccaagtcgtggtgttcatcctgctgtcgtgctcgatcgcggtgtgcgtaaacttcagcacgttcctggtgatcggcacgacgtcgcccgtgacgtaccaggtgctgggccacctcaagacgtgtttggtgctctccttcggctacatcatcctcaaagaccccttcagcgcgcgcaacgtggtgggcatagagatggcaatgggtacccgcgacccgatacccggtgggtatttactccattaggatatgtatgtgggctaaatattctacccgtgggtctgttattgggcaaaaatcttcacccaacgggtaaacgggtattagaacgttccaccgtcacccatacccgttaacccgtgggtataaaatacccaatataaacttatcccaagcatgaacttagactttagtcatccatttttttactatttaataatcttttaggccattatgtcatagaaggcttaacgacaatttaatgatcatgtaatggaacatgtaattcacccaatgtgtgttgaatggatggttaaatgatgctagaatttttgtaatgat

SEQ ID NO: 35977 - DNA, 1119 bp, Zea mays subsp. mexicana
  Clone ID: UC-ZMROTEOSINTE025F11_FLI
acgggagacacctccgccgcgctctcggcctactgcgcagccgcgggaatccccgccatcgttttcctgccagcggaccgcatctcgctgcagcagctcatccagccgatcgccaacggcgctaccgtgctctctctagacactgattttgatggctgcatgcggctcattcgcgaggtcactgcagagctgccaatctaccttgccaattcgctcaacccgctccgccttgaggggcagaagacagcggccatcgagatattgcagcagttcaattggcaggtgccagattgggtcattgttccaggaggcaatcttgggaatatctatgcattctacaaggggtttgagatgtgccgcgttcttggacttgttgatcgcgtgccacggcttgtctgcgcacaggctgcaaatgcaaatccattgtaccggtactacaagtcaggttggactgagtttgagccacaaactgccgagactacatttgcatctgcgatacagattggtgatcctgtatctgttgaccgtgcggtggtcgcgctgaaggccactgacggtattgtggaggaggctacagaggaggagctaatggatgcaacggcgcttgctgaccgcactgggatgtttgcttgcccacatactggggttgcacttgctgctttgtttaagcttcagggtcagcgtataattgaccctaatgaccgcactgtggttgttagcacagctcatgggctgaagttcacgcagtcaaagattgactaccatgacaaaaacatcaaagacatggtttgccagtatgctaatccaccgatcagtgtgaaggctgactttggttctgtgatggatgttctccagaaaaatctcaatggtaagatataaagttatatgattaattaaccctccaaactgtttttttgttttttcgttccaggaattttattcccgagtctttcaactttgtttggtgaacatggtatggtgctaaaatctatacctaataccttgtagtactagttctggaggctcttttggttgtaggttgaagtggatagagctgttccttgtactttatctgtttcatgtaatatgaacaataaattatggtataaatgtttgaat

SEQ ID NO: 35978 - DNA, 904 bp, Zea mays subsp. mexicana
  Clone ID: UC-ZMROTEOSINTE025G05_FLI
gcttactgccgggtactggtgcgctacaaggaggagctgacccggccgttcgacgaggccgcgtcgttcctgagcagcatccaggcgcagctcagcgacctctgcagcggcggcagctcgccggcggctaccgccacgcactccgatgacatgatgggctcctctgaggatgagcaatgctcaggggacactgatgtgccagacatggggcaagaacatagctctcacttaggtgaccacgagctcaaggagatgcttcttaagaagtacagtggatgcctcagccgtcttcgttcagagttcctgaagaagcggaagaaagggaagctaccgaaggatgctcggacggtattactagagtggtggaacacgcactaccgctggccttatcctacggaggaagataaggtgaggctcgcagcaatgaccggtctcgacccgaagcagatcaacaactggttcatcaaccagaggaagaggcattggaagccatcggaggacatgcggttcgcgctcatggagggtgttgccggtgggtcttctgggacgacactctacttcgatacaggcacaattggaccctgaatcatacaccacttgggatgacaactggccagctcatattagtaataagatctggcatgtggagtgacgatcggctcggtgaaaattgaaaataaatctgctgggctgaggttgatcagactagtcagttgccctattattttacaagatcatgtgtatatggtgccgtcgtatcagaacaaactgtatgcatgtatgggcgaattgagacctgcaaaaggagtttaattagtagtttcacgtattggctcatggatttgtaatactagctacccaatttaattgttagataggctgaagggcttataaaggcaaattt

SEQ ID NO: 35979 - DNA, 844 bp, Zea mays subsp. mexicana
  Clone ID: UC-ZMROTEOSINTE025H05_FLI
gcaccacaagcgagcgagggacccggggcggaagaagagagagaagacgtctctctcctctcggcgtccccgttccccaacctctcgtctgctgcctgcctgcctgcaaaaaggagtttgtcatggcgtctaagcgcatcctcaaggagctgaaggacctgcagaaagacccccccacatcatgcagtgcaggtcctgctggtgaggacatgtttcattggcaagcaacaattatgggaccacctgacagtccctatgctggcggtgttttcttagtgaacattcatttcccgccagattaccccttcaaacctccaaaggtttctttcaagacaaaggtcttccaccctaatatcaacagcaatggaagtatatgccttgacattctcaaagagcagtggagccctgctctgacaatttctaaggtcctgctctccatctgctccctgctgaccgaccccaacccggacgaccctcttgtcccggagattgcccacatgtacaagacggaccggccgaagtacgagtcgacggcccgcagctggacgcagaagtacgcgatgggctgacgaacgctttcctgctcgtccacccgactggcgtctcaagaaagccgttcctgggcgccattgttcccttggatttgttgttggtcgtgtgtatccctgatccatctaggatcatcgtattgtattgtattgtagtgtatgtcgtcggcttaccatcgttgccatccaccatagtgaggtggttggacatgcttcgcctatatgcacctgttcttgccttccttcgggtcggtgctctttggttaatgttcatggaagacgttgatttcgttgcc

SEQ ID NO: 35980 - DNA, 708 bp, Zea mays subsp. mexicana
  Clone ID: UC-ZMROTEOSINTE026A02_FLI
tacggtttctggcaagagaagcagatgaatcccgtctacgtgaggtttgtgagagcttcctaggtcctcccatgggcatgcttggatctgagtcatctacggatcccaaaagtccagcgtgggattctgatgttctcgggatgaagaagcaccaactcctcagggaagacatacttccatcgatggcatctaaccggaaagtccagcgtctgctcaacgagtttatggatctcctatcagagtatgaagctgctaagagcaaagttgacccaatggatatcacaccggcgctaccacaacaagcaccagaagccaatgccaacgtggtcacctcgtagctgcaccagttccgttgatagttccgttgctggcgacttactgacctctcggtaagtatgataggatagcaatcttggtaagtccttatatgaatcaatcaattagttgtgcttgtaactggtagattgtttagcgagggaggcgacctcaggcaaacattgatattgaacccgttagctgtaacgctgtgtaacagtagaagaaagaagctgaggtcgccaggtaatttattgttaaactgtaggaggccgggtaaactcatgcccttcttgttccaagctaccgtatgcagtggtggcccactggccgtgtgtattttggcgaaaacctgcgtcgtcaaaaactggcattgacatcttttagaggaac

SEQ ID NO: 35981 - DNA, 789 bp, Zea mays subsp. mexicana
  Clone ID: UC-ZMROTEOSINTE026A03_FLI
caagatcaaaacggagatgctgttcactagagcgctgctggtcgcggcccagcgaagggacgtcaccggaaacccagccctgcaggggctgctcgagatgctcggcaagaaggccaaggaggctgagaacaccttacacgagctccaccacttcatgacccgggacaagatcgacgggactcgatacgccgctccggaactgggcgatggcctcggcgccaaagctgagcatgcgcaccatgctgctcgccacactgctgataactggctctcatgcttatcttgctgctgtcgacgagatgatgacgacgacgacgctgcccatgccatgcctcgccgtcctcgtgacgatggccatgttgcaaagttgccattcaaccgagtggccatgtccaacaaaatcaggcagctcattgaggaaatgcactcctattgtactcgtatctctaacgtcctcgatgaaatgccaagcaggagcagggacattcacacgccagaaagaaacttaggcatcccattccaagagaaatatatgtcggtcctggacgctgagcgagagcgacaatgaacctttcctgctacagcaactaataagtacagtattaaacagtaactaatatttcttcaatttcaaactgttatattttttatttttctagattcatactttttattacatactcaagtatactgtatgtccaaatatataggaaaacaatgtatcaagaaaaaaaatcctagttcgtgagaaagcgggtggactagtaatgtctaaatatcctgtccctc

SEQ ID NO: 35982 - DNA, 433 bp, Zea mays subsp. mexicana
  Clone ID: UC-ZMROTEOSINTE026C07_FLI
ctcggagattggacctgaatattcaagcccggttgtgcaatgattttgctgatctttagctttttggctggaaacctactctagcagttgaggaaaacagggtgcctcaagaatgtacgaagattttggtgccttgcagtttttgtaagcttgcccttcccagactgattcaaggtggcactgcccctcgttgttattcaaggaattttggggctggcggggttgtttgtaagagcattgtaaaataacttgtttcatttttttggtttctgtaacatgaatacatgacatgtgatagttgtatataagatctgtggactggggggcgtatcagcacattctacacagctaagggttgcgagaactgaagcatgtaataaatgtctttaaactgccatctgattgagatgcagtagtactgctgttctggaat

SEQ ID NO: 35983 - DNA, 1252 bp, Zea mays subsp. mexicana
  Clone ID: UC-ZMROTEOSINTE026E04_FLI
aggaaacgaaggggactctccatctagctcttactatcagagcgaggaccaggaagattcttccaagagggtgccgatccataatgatgaaccacaaggaaatctgctaggcgagcaatgcactgacaagcgaactagaaagccaacaaaaagatacatagaggagctatcagacattgagactcatgactcaactgtaaaaaattcttcaccagcaaaaaaggcctgcacatgatgaactgttaatgaaaccgcgagtagcacctttcaatgagactggttctctgggcacaatctatcctactagaaaggatacctttggaggatttagtgtacacgttccttacgtttcaaggatgagaagggggcgccctaggaaggacttcatttcatttgcggataagggaccctcggttgaacctaaagggattcagccatcagttgagatgatattagtgaaggatggtgacaagggaaaccacctgaggaaagtacctgaggttccactaaaggtaagttctgagaacgggcatgtagaagcagttgatagcaaaggggttcggaacctacaagcaaaggtctgcagtgctgtttccaagcctaaaataaagcatggtttaacgcggaagcatcatcgagcatggacattgagtgaggtcgtgaagctggtggatggtgtggctcggtatggagctggcaagtggtctgagattagaaaactgtccttcgcctcgtattcctaccgcacttcagtggatctcaaggataaatggcgtaatctgatcagagcaacccagacccagcttccggcgcaaaaagatggtgcctgtccacggaagactaacccttctatcataccaataccaccatccattttgttgcgagtgaaggagctacatgagctgcagtcgcaagggggtggcttcacagccccagtcaagttctctgggcaggacggcaaggttctacagggaaaaggctcgggttttttgtgatccgtgtaatgcagatatacgtgtacgcttctggacgatgtggtatatatacgagtaaatattatttgaagtaggtgtaaccacgttatccatcacaatgttctctacacgctggaacatgtgtaactcagggcgtccagaaaatattgttatacttagataagggcagacgtctatcgccatgtattacaaacgtgtcaggcgtacacaatttaaaaggcaaatgcaaatctagacaggaagaggaaagttagagt

SEQ ID NO: 35984 - DNA, 1292 bp, Zea mays subsp. mexicana
  Clone ID: UC-ZMROTEOSINTE026E09_FLI
caagatccaggacaaggagggcatccctccggaccagcagcggctcatttttgccggcaagcagctcgaggacgggcgcacgctggccgactacaacatccagaaggagagcaccctccacttggtgctgcgtctcaggggcggcatgcagatcttcgtgaagactctgactggcaagactatcacccttgaggtcgagtcttctgataccattgacaatgtcaaggccaagatccaggacaaggagggcatccctccggaccagcagcggctcatttttgccggcaagcagctcgaggacgggcgcacgctggccgactacaacattcagaaggaaagcaccctccacttggtgctgcgtctcaggggtggcatgcagatcttcgtgaagacacttactggcaagacgattacccttgaggtggagtcctcagacaccattgacaacgtcaaggccaagatccaggacaaggagggcattccaccggaccagcagcggctgatcttcgccggcaagcagctggaggatggtcgcaccttggctgactacaacattcagaaggagagcaccctccacctggtgctccgcctcaggggtggtatgcagatttttgtgaagacattgactggcaagaccatcaccttggaggtggagtcgtctgacacaatcgataatgtcaaagccaagatccaggacaaggagggcattccaccggaccagcagcgcctgatctttgctggcaagcagctggaggatggccgtaccctcgccgactacaacatccagaaggagagcaccctccacctggtgctccgcttgcgaggtggtatgcagatctttgtgaagaccttgactggcaagaccataaccctggaggttgagagctccgacaccatcgacaacgtgaaggcgaagatccaggacaaagagggcatccccccagaccagcagcgtctgatcttcgctggcaagcagctggaggatggccgcaccctagcagactacaacatccagaaggagagcactctccacctggtgctgcgcctccgcggtggtcagtaagccatggatcatttaagctgctgctgtacctgggtatctgcgtcgtctggtgccctctggtgtacctctatatggatgtcgtcgtctaataaacatctgtggtttgtctgtcatgaatcgtggttgtggcttcgttggtttaatggacctgttgtgtcctctgtgttgtacccaaaactcttctgcagcagtatggcttgaatccttatgaagtttgatgtttgaactt

SEQ ID NO: 35985 - DNA, 1311 bp, Zea mays subsp. mexicana
  Clone ID: UC-ZMROTEOSINTE026E11_FLI
cggcgatttccaggctgttaggaatgagaacgatttacagtgtgttagcgttccacaaaagtatcgtaccatgaacacattttggaagtactactcaggagaagcagttgctccgtacccaaccatctttattggtggaaaccacgaagcatccaattatctgtgggaattgtactatggaggatgggcagcacctaacatatactttttggggtttgctggtgttgttaagtttggaaacatacgaattggtggattgtcaggaatacataacaaacaccattatcatttaggacactatgagaggcctccatacaataaagatactatacggtctgtgtaccatgtaaggcattatgatgttctcaagctcatgcatttgaaggagccgctagatgtattcttgtcacatgattggcctctgggcattaccgagtatggaaactggcagaagctcattagtgtgaagaagaactttgaagatgaggttaacaatagaacactaggcagcaaacctgcagctgaattactgaacaagctaaaaccaccatactggttttcggcgcaccttcactgtaagtttcctgctgttatccagcatggcaagaatggacctacaacgaagtttcttgcacttgataagtgcattcctgggcgcaattttttgcaggttatagacattccatccaatccaggaccatatgaaatccagtatgatgaagaatggcttgcaataacacgaaaattcaacagtgttttccctttagcacggacacagtttactatgcgggatgagcagctcgacactcaagaagaccggcaatgggtcaggagcaagttgaatactagaggagctaagccttttgattttgttcagactgcaccatctttcaatccttccagtacaacatctaaacagcccataacagtttgctgcaggaatccacaaactgagtcttttcttcagcttctggaactcccatatctgctggactcatctaaatctgagatgtttggtagaaatgagtcaacctctcagacaggaaacacacttgataatgaagatatagagctaccagatgaagatgaggatgctttagaagatgacgagtgaaggacagcacttttagacaagtaccattgcacctatcatgttggttgcagggtttgcgatagatttcattgtcttttgtagattgcaatctagatatctagacgaggaactaacatgtactagattgtattgtcatagctgcttttttgttggagaacgtttgtggatctagagggtgatgtgttgatcacaatgcc

SEQ ID NO: 35986 - DNA, 1238 bp, Zea mays subsp. mexicana
  Clone ID: UC-ZMROTEOSINTE026F09_FLI
cgagtttttttgtacaggtggtcagagtttttggtctccttaggctccaaagtgtccagggccagaaatgtttgggtaaggcaggtcacaatttcagtagtatgtgtagttagttgaaattttttcatggtggctagttcttgttgcatgtggaattaggttggggttatagtttgccgatgcccgatggttttgtttgtcagcagttgacaattgtttgactgtatctaacaagtatcgagccttgtatctggttgtctgtgaaccatatatacatgttttggttggaaaaaaagaagaattatgttcttttgtttgtggagtgtagacttcttagcttatgctgattacttaaggtggataaaacaaaaaccttcattctttcagtttggctatcaggattcaggagtcagacctctggttctgcactgagagccatgttttttcttattctagaatttgattggttgacatttcgcttctcttgctctgctgttgtcattgtctggtacgtgttagtttaaatagttagtgttgttcaaaggaaaaattctgcgtccagtggataaatcaaggaaagatcctactgaaactgacgatgataaaagttaatcctatgctgcttcactcctggcgtaagttgattcactttcatcaagggagcattttacgctcgctttattttgtatcctagggctgcatttcaagccaagccattgctaccaagcttaaatctgtcccaaaaccattggccctcagttcaatatatgcctacagtgtcaagcattggagatcttttatctaacattctgaagtggcttcctgttataaaagggacattctgaaacggtagttgagatgcaccaataaccatatatgaatattatctcttatctgaagcctcactgtgttcgttgtgtaggctcctactgaagaggcagctggggacagtgaaggtcttctgatgggttgtagttataacttatagtaatagacagctagggagcccctgcaacaatggatcccctcaagctgtcaagcatcttcggatggtgtgctcacagctggtaaaatgacactggttcaatcttatgtatttgcagaacccggtgcgttagcacctggacatggtgggtgtatggtccacggaacccagccgtggcgcataatgtgatagagtttgtagtttgtactttgtaccatattttccctcttgaataaaggcatgtgttacgctg

SEQ ID NO: 35987 - DNA, 937 bp, Zea mays subsp. mexicana
  Clone ID: UC-ZMROTEOSINTE026G07_FLI
cgttcacctacagctccgtccgccagcgtcagccaggctgccccgggaggccgggaggaagcagatcggagaaggtgattcgttttgatggctcgattgtacatcggcaacctggatccccgggtgaccgctcgggagctggaggacgagttccgcacgttcggggttcttcgcagtgtctgggttgctcggaaaccacctggctttgcgtttattgattttgatgataagagggacgcagaggatgcaatccgtgacctagatgatttttatggttctgtaggcaagaatggatggagagttgagttatctcgtaatgccagtggtggtcgtggaggtcgtgaccggcatggtgggtctgagtccaagtgttacgagtgtggtgagactggtcactttgctcgtgagtgccgtttgaggattggttctggaggtctaggcagcggaaggcgccgaagccgtagccgtagccgcagtcgcagtcccagatatcgccggagtccaagttacggcagaaggagttacagtcctgcagcacgctctccaaggcgtcgtagcgtctcaccagctcgtggacgcagctatagcaggtcaccacagcacaagggtgcacgtgaagaatctccctatgataatggataccgccgcagcaggagctagagccagatccttgtatccgacgagcgtcatgtgacagatattgggaaagctatggtcaataacctgcttgaaagatccttcgtcgactgcttgactttggttaaggttctcataacttatttctatatacctattatcttgtgtctactttataagtagcagtaaaaccttttgatgagtgtatttgttgaactaagacctactgtcttttcttgtgtggtaaaaaggcatcgtcctgcactgcttaaacgactcggccgactacggctttcagttc

SEQ ID NO: 35988 - DNA, 1045 bp, Zea mays subsp. mexicana
  Clone ID: uC-zmroteosinte026h02_FLI
caaacactaccagcatcttccagtatcaagggagatgtgcttcaatacatacaagaaaaggtcagtccgtgcatattggattgcattttccagcatatcccagtaaaggccgctgcgccgagtgggaagaaaaaggacaccgagctagcgcctgaagcagaagctgctgccaaagcttcgaagaatgccatagctacttgttctttgcttccgtacttggagtctctttggcccatcgggactttgcagatggcctcacttgcaggctcactgtacgggatgatgattaggctgctgccttcctttgtgcgcacatggtttactaccttgagagaccgttcattgtcatactcaatcgagtccttcaccaaacaatggtgcagccctcctcttcttctagatgagttttctcaggttaaggagtccgtatacggcgatgagaatttctcggttagcgtcaacaggtcggctttcgagatcgttgctacatacaaaaaggaggagacaggaatcgaccttgtcatacgcctcccgagctgttaccctctgcgccacgttgatgtcgaatgcacgagaagtttgggtatcagtgaggtcaagtgcagaaaatggctgctttccctcacgtcattcgtccgcagccagaatggcgcgatagcagaggcgatccgcacgtggaagagcaatttcgacaaggagtttgagggcgtggaggagtgcccaatctgttacagcattctccacactagcaaccacaacctgccgcggctggcgtgcaagacgtgcaagcacaagttccacggcgcctgcctctacaagtggttctccacgtccaacaaatcgacttgcccgctgtgccagactccgttctagtcctagctctagacacatgcttgtttgttgggcaccacaccgttcgatccttctatgtaaatggcgtgtgtacgcagcgcagtgttcagcgttttggctgttaaatactctcgaaacaggacgggacctgcagagactgagttcagaggtcttataatctacagttaccgtg

SEQ ID NO: 35989 - DNA, 1682 bp, Zea mays subsp. mexicana
  Clone ID: UC-ZMROTEOSINTE026H09_FLI
attgtgaagcactggaggagcagaagacagtgctggactccttgtcaggcaccatgcaaagtgtttgccagaccctacgtgtggtcacagaaagagagatggaagacgaagcggcgctggaaatgaacgagctgaactcttttactcctcctgggaaggacaaagatgagttgtcctttggaggcaattcagcagatcgtagagaggcctcttggacaagtctggcaggaacttcacagcaagaacccgacttagctgcattgcggatgcatggaacattctcacctggggggcagggtctatctctatctggtgttcaggcaactgctgaaggcagtaagacaaaaaggcgcacaaaggccgagaagaccgttagtttgcaggttcttcggcagtacttcgctggtagcctcaaagatgcagcgagaagccttggagtgtgtcccacgaccctcaaaagaatatgcaggcaacatggtataacccgctggccatcacgaaagatcaagaaggtagaccactctctaagaaagcttcaacagatcattgattcggttcatggtgcagagacagctttccagctaaacaccctgtacaaggatctcacagacacctcaatatcatctgacaacaatttgtcaggaagtgtcacggttcctccaactaaccagagcaatctcaccgacttcaacaagcaccaaccccacaagtcaagtagcaatatgccatcaacttcacactcacactcctcatgcagccacggttctcagtcaagcccctcgtgtagcgttggtgcaacagaacatgcacaacagggtataattgatctgatgaagtcagaaaatcctgtgaaagacagctctattcagactatgcaaacagaaaacacttcattatatgagcatttctcagttcatgaggctccaattgatcttctacaggatgtaactgaaaaggctaatggtgcacatcattcttctcgaagcctgtcatcccccaaccccaagcagaacacagatgcaaatatgagagtaaaggcaacatttggctcagaaaaggtgagattccgactaaacccagagtgcaattttcaaggactgaagcatgagctagcgaaacgtttgagtatagtagacacaaaccccttggttttaaagtacttggatgatgattcagaatgggtcttgatgacatgtgatgcagatctgcaggagtgccttcatgtatacaaactagcagatatccaaacaatcaaaatttcagttcatttagctgttagtccagctacaagggtcacagctggtcacactggtttgtcatgacaacagtatgagcctcaccactttgtgaggtttaatcaaattcaaccaggatcacatggttttgtgcaggggaaaccaaagattccaggagtccagggttggtagctgtgcaatactgcaatttactatgtaccaccacgtcccagttctactgttagatcaattagtcttgtttctgatgctcaggttaggaactaatgatcaaacaagaatacttgacaatgagagagtcaagaaatcaggataaacagaagtaagcatgcattgcttgtaaatacttattgatgaacctgaatctctgaatgacaatgcaattgattgaattaatagggtgacgtatctacaaatcagatttgctcc

SEQ ID NO: 35990 - DNA, 1051 bp, Zea mays subsp. mexicana
  Clone ID: UC-ZMROTEOSINTE027C02_FLI
cacagatgaccggatatgtctccacaagatattaccgtgctccggagatcatgctgacctggcagaagtacgacgtcgaggtcgatatctggagtgcagggtgtatctttgcggaaatgttggagggaaagccactcttccccggaaaggaccatgtcaaccagttttcgatcatcacagagctactgggaagcccaccggaggatgtcatccataccatctgtagtgagaatacactgcgattcgtccagtcgttacccaggcgcgagcgtatcccactctcccaaaagttcaagaacgccgatccagccgcggtcgatctgctcgaacggatgctcgtcttcgatccaaagaagagaatctcggccgcacaggctctagcacacgagtaccttgctccgtatcacgatccgtcagatgagcccgtagcagccgagaagttcgattggtcttttaacgatgccgaccttccggttgacacatggaaaattatgatgtacagcgagattctcgattatcacaacgtcgaccaaaatgatccttctctctagacaagacgaaaagtcgaacaaaaacaacaccaggtactattaacatgacggacaaaaaaaggaaacgggcattggcagaaagaaacgagacataaaaggcgttttttttattactacccaaacgattcgatgaacagacctttttctaccttcttttttttgggggggagagatgaaataatgcacagacacacacgagagccccccaaaagagatttttacatcttggcttttacaaacctactttcactcttcactcttcacttttcaccttactttctctctagtccgtcagttttcaacgatactaaggggggtttatgggtctttcggattttgacgattcgtatttttttaaagcttctttttgatgtttcctttgctattatgtatattgaatcttcattcctcttttgttttccctttgtggaattttgggcttccaatgatatccatttgatcagatcagaaagaaacaaaaagaatactttttcctctac

SEQ ID NO: 35991 - DNA, 1100 bp, Zea mays subsp. mexicana
  Clone ID: UC-ZMROTEOSINTE027E06_FLI
gataatctttcagtttcttcccaatgtgctcatctttgtgagcatgtatatcatcatcccgtcggtgttgtcgtacttctccaagtttgagtgtcatctgacagtgtcaggggagcagagggctgcattgctgaagatggtttgcttcttccttgtcaatctcatcctattgcgtgctcttgtggaatcatcacttgaaagttggatacttagcatggggcggtgctacttggatggtccagactgcaagcagattgaacgctatttaagcccatcctttttatcaagatcatcgctttcttccctggcattcctgatcacatgtacctttctgggaatatcttttgatctgttggcaccaatcccttggataaagcatataatgaagaaatttaggaagaatgatatggtccagttggtccctgaagagaatgaagactacctacccatgcagaatggtgaagaaactaataatttgacagcacctctaatgcctgagagagaagacggtggccttttggataatatcgaggggcatgatctttccctgtacccactaaacaggagcttccatatgccaaagcagaaatttgacttcgcacagtactatgcttttgacattactatatttgccctcacactgatctactccctgtttgctccgctcgtggttcctgtgggtgcgacatactttggctaccgttatctcgtggacaagtacaacttcttgttcgtttacagagttagagggtttcctgccggcaatgatgggaagctgatggacagagtgttgtgcatcatgcaattctgtgtgatcttcttccttgctgcaatgctgctcttctttgctgttcagggtgactcgatgaagctacaggctatatgtactcttgggatgttagtgttctataagttgcttccctctagaagcgatcgcttccagccatctttgttagaagggatgcagacagtgaatagctttgtagatggtcccacggattatgaagttttttcacaacctgacctggattggagtctgtatcaatcctgaagatcaatacacacttttgttcattacaatgacatctttcacgacttcg

SEQ ID NO: 35992 - DNA, 1739 bp, Zea mays subsp. mexicana
  Clone ID: UC-ZMROTEOSINTE027E12_FLI
ttttgcaatgacagaactaggccatggaagcaatgtgcgaggaatagaaacaatagcaacttatgattcagaaacaagagagttcatcataaatactccatgtgaatcagctcagaagtactggattggtggagctgccaatcatgcaacacatacaatagtcttttgtcaacttcatataaatgggagaaatgaaggagttcatgcttttgtagctcaaattagggatgaagatggaactgtgttgcctaatatccatatagctgactgtggccataagattggactgaatggcgttgataatgggcggatttggtttcagaatatacgtgttcctcgtgagaacttgcttaatttggttgctgacgttttgccagatgggcgatatgttagcatgatagataatccagatcagaggtttgcagctttcctatctccgcttacacttggtcgagtaaacattgcagttaactcagtctacatttcaaaggtcagcctagcaattgctgtgagatacagtttgtcaaggagagccttttcaattgcaccagatgcccctgaaatgttgttgcttgactatcccagtcaccagcgacgccttctaccacttctagcaaaagtatgtctgatgagcagtgctggcaattttatgaaaaatatgtatgtaaagagaactcctgaaatgagcaaagacatacacatttactctagtgctctgaaggcgacactaacttggcagaatatgattacgattcaggagtgtcgcgaggcctgtggaggtcaaggtctgaagactgagaaccgcataggaattttcaaatctgaatttgatgtccagtccacatttgagggtgataacaatgtgctaatgcagcaggtaagcaaagcgctttatgctgaatttttgggtgcacaaaagaagcagcagccattcaagggattgggtttggaacacttaaatggctcgagccctgttattcctgataagctgacaagtagcatattaaggagctccaagttccagatggacctgttctgcttaagggagagagatttactgaagcagtttgtagaggaggtttctctccatcttgcccaaggcgaaagcagagaaaaggctttgatgctgagttatcaagttgctgaagacttggctagagcgtttactgagcgtacgatcctccaaatatttttggaggatgagatgaatgttccttctggttccctaaaggaggtactgggcttgctgagatctctatatgttatggtgaacatagatgaatccacatcttttctaagatacgggcatttatcacgtgacaatgtagcccttgtgcggaaagaagtcctgaaactgtgcagtgaactcaggccccatgcgcttgctgttgtcagttctttcggaatccctgatgccttccttagtccacttgcttttgactggattgaggcaaatgcactgtcaaccgggagccactgatctcaggtttccacatacgagccaggttatcctgtgaaagtactgaatattgatggcggagcatacataccgtataactacaggagcacttgttgcctcggaacaaattgttgtgaatcctgttttgtataatagttttcttgaatataagcgaacgtagcctaacaggccaaagtccatgtaatggggtttacaacagtaataacttgcggagtgatgtaagcgagttgttgagcagtaaataaaatactcctgtccc

SEQ ID NO: 35993 - DNA, 1299 bp, Zea mays subsp. mexicana
  Clone ID: UC-ZMROTEOSINTE027F12_FLI
aaagattgcagttctccaactaggaagatggcacaacttatgtcgacaccatattgaggttgacagtactgaatttttggaaggactgcagtcatccaatcagttgaaatatctttgtctgaggggcatctctagaatcattgaacttcctgcttccattggtggactctcgaatcttaggatcttggaccttcatgcctgtcacaaccttgagagactgagtactagcatcacgtatcttcagatgctcacccaccttgatgtgtcagagtgctacttgctggaaggcatgccaaggggtattggcttgcttactgaactccaagtgctcaaagggtttgtcattggtggttcaactggcaattacaattgccgggtagcagagttggctaggctggacaaactgaagaagctgaccatatatattggaagcaaagttgcagtgacagaaaatgaactgaatgagcttgagaacatcaaaggcctttgcgtgctgaaaattacatgggctgtatcactttcaaagaaagaacgagtccatcaaacttctgattctacaccattgataacttcactctccctacctctaaatctcgaaaagctagacctgtgctgcttccctggagagaaggtgccagattggttaagtccgagtaagctgttgagactgaagagactctacttcactggaggaatgctaagaacttttggaaacaaaaacatgttagaggtgtggagcgttgaggttttgcgcctgaaattcttgaatgatttatcagtacaatggacccaggtgcatgaaatatttccaaagctgacctttctggaggtcttcagatgtaggaagctagaatccttcccttgcgataaggatggggtgtggatgaaccatgatacgaaggatagcagaaagtagaaggcaggaatgaatcaattgagctttcattattactttggctgtgtcaccagctttgccccatcgtcagcaacaacacctgaacgacaacttatcccggatgtgcaacatggatatcatgactgttgtctgttgagccttaatagtcaaggcggttccaatctcattttctatctcaccttctattttaaaattcactttgcaaacaacgtctacagtaaaacaatattttatacggtcatatacacgatttcttgggtacatcctaactgttcgttcttgtcttgctggtagctatgcaattatatatttaagccttgttcagttattcatgttccatgtggattggataagattgggaaaaaatataaagtattttgact

SEQ ID NO: 35994 - DNA, 687 bp, Zea mays subsp. mexicana
  Clone ID: UC-ZMROTEOSINTE027G01_FLI
agcaaatcggaggcccaagcgctcccaatctctccgggtccttctctctccgcattctccgtcatggctgagccgacgccgtcgcagtcgccagcgcagacgccgcccccgccgccgacgcagcagactcccgcggcgggtgggctcgaggacatgctggcgtgtgtggcggcgctggaggccgcgctgctgccgtgcctccccgcgcgcgagctccaggccgtcgaccgctccctccagtcctcccaccagattgatgttgagaggcacgcaagggatttcatggaggctgccaagaagctccagtcttatttcatcagcctgcagcgtgaggaaccgccatctgcagaagagatgcttcgaaaggagattacgacaatggaggaagagttgaagagcaagtctgagctcattgccaagcacaagaagttgattgaagggtggcaaaaggaactgaaggagcagctgagcaagcacatcacggagcttgaaagggtgtgaggagtgcgattctgcggtttaccttgtagtgatcatgaacctctaggtgaccaaatgttatgttatgccctataaaactgtgtacatgtgcttagaatctgacgccatggttagcaatcgccttttgttggtttcttaaggttggaagccacgaacaaagcccactttatctatgtttgattgtgt

SEQ ID NO: 35995 - DNA, 556 bp, Zea mays subsp. mexicana
  Clone ID: UC-ZMROTEOSINTE028A01_FLI
gggagattgggcatggccgtgatctgaagaaattcctaattgttattgcaggtctctggcttctttcagttctcgggagctgctgcaacttcctgacactgttctatattgtctttgtggcactgtacactgtaccagttctgtatgagaaatatgaggacaaggttgatgcttttggtgagaaggctatgattgaaatgaagaagtattatgccattttcgatgagaagtgcctatcgaagattccaaagggcccccttaaggataagaagcactagattggtagtaaggtacttgctatgaatcaacatctacattatgtcactagctgtcacctctttctctgaaggatggtgcttggtcctggtctctagttgatagtatataatctgtatgggcaactttggtgtgactgagagtctgctgaaaactgttgatcttgtttttggtttcagctttcaccatagttgcctggaagcttgaaatatattatgcgctctatcaatgtcatgtgaactttgtcatgtacctttaatattgatttggcgcctttcgc

SEQ ID NO: 35996 - DNA, 852 bp, Zea mays subsp. mexicana
  Clone ID: UC-ZMROTEOSINTE028A03_FLI
cggcgacggcgtggacaagcccgagcacgacctgtgatcggcatttgatgctgtgcgtggctgagcagacagcagagcacgaccattttaaaagctgaagcaggcattgccactggctttccaagatgagagacatcacatccaagcgtgattatctactacttgtaatgcatcctcttcttctcccccatgtctggtctatttttgggcatgcagctgcgcgatacggttgagctgagcttgagccaccgatgtgcactggactccgaaggaggcattgcatgttgtaggacagcacagcagcaacagtggtaccggtcggcaggcaggcaggcaggctccgtgagcggtgctccggccatggccgtccggaggtggcagccagccaatggtccgtgaccgtgatgcacgcaggagcggtgcatggagcgaggctcagagcagccgcagttattgtgtgccagtgtcgtacaagcgctgctcacaccacaggcagcagatgcatgccgtcactgaccagctgctttcctgcaagatcttctcgggagctatggtcggtcaggcatgctgcaaaagcttgaccccttgccaggaaggaagcagagataacccatccctacctccctcgacgtcgacgagatggctatccgtttggacatgaccaagagtaatgctcccagtttcgagcccaacgccgccattactccgacatcacccaagccttacctccgctccaagcgtgtagcccggctacaggctcaaaccctccaggcctccaccagcaaaatcgtgatgcttttctaaaatagccaaatatttaccagcaaaataaacataaacaatcaagattac

SEQ ID NO: 35997 - DNA, 1374 bp, Zea mays subsp. mexicana
  Clone ID: UC-ZMROTEOSINTE028B01_FLI
tgccatcagagcatttaaacttgtcgaaaggggtgttttccaagaggaaggaatagtccagctgctgcagtcaccttgctctgatgaacttgctggctataagatcccaggaacacgtcggatccaagataatctttccgatctccgtgctcaggttgcggcaaatcagagaggtatagcacttatcaaagaactgataaatcagtatgggttgatcactgttcaatcatatatgaaccatgttcaaaagaatgctgaggtagctgtcagggagatgctcaaaacagttgcgtctagagttgcaaaggagaatggatcatgtgttgtcgaggatgaagattatatggatgacggctctgtcattcacttgaaactcacccttgatgctgttaaaggtgaagctacaattgacttcgagggtaccagtcctgaggtctatggcaactggaatgctcctgaagcagtcacaacagctgctgtcatatactgcctacgctgcttggtggatgttgatataccactaaatcaaggctgcctagcgcctgtgaagatcctcattcctaagggctctttcctctcaccaagtgacaaggctgctgttgttggtggcaatgtgctaacgtctcagagagtgaccgatgtaatcctaatggcgttccaagcctgtgcctgctctcagggctgcatgaacaatttgaccttcggggacgacaccttcggttactacgagaccatcggaggtggatgtggagctgggccgacatgggacggcactagcggtgttcagtgtcacatgacaaacacaaggatgactgaccctgagatctttgagcagcggtaccctgtccttctgcacacatttagcatcagggagaacagtggaggttctggtttacacagaggtggtgatggccttgtaagggagattgagttccggcggcctattgttgtgagcgttctatctgagagacgggtgcatgctcccaggggactcaaaggaggacgagatggagctcgtggtgcaaactatttagtcagagaagatggtagaaagatttaccttggaggaaagaacactgtaacggtcagtgctggtgatatccttcagattttcacgcccggtggcggtggctttggctgtccttgatggcacttcttgcagacgcggaccttcctccatttgttacctacctttgtacaccagtagctctatttagatcgcgattaaaataaaacgtaataagaccgccaacaactggagattccttatgctattgttgctccccgaggcattggatccgaatgcagcatgaatggtgctattgtttatcagatatcatttatgtgaaaccagcaatcccaaaattggtgatg

SEQ ID NO: 35998 - DNA, 502 bp, Zea mays subsp. mexicana
  Clone ID: UC-ZMROTEOSINTE028B11_FLI
cgacaccgaccagcccatcccggatccatccatacatggaccaaacgcagcggcggctcgatgaccacggccacgcgccggtggtcagtgcccacgcccagcaggccggtccagacaagagccggcagcaggagcagccgccgccgccgccgccttcttcgttgaaccagacggcggcgaggctcctgcgcgaggccaccgtctcccgcccggacggcgagacgccggcgcccgcgacaggctcctcggacatcctggccttcgcgcgctccgtcgaccgcgtagactcgcctctcgagtagctttttttggcttgcccactctcagtcagctactagctcactggctttgtttcttttcttctccatcttgtgttagcaccgtaataaaagggtcaacagtagtcaacactttcctccgtatttcgatcgtcagtttgtttgtcattcctgttaaggtcgagggattactgcaggcttgtcattccattttcgcgatttcg

SEQ ID NO: 35999 - DNA, 1204 bp, Zea mays subsp. mexicana
  Clone ID: UC-ZMROTEOSINTE028C02_FLI
tcttaagtcagttatccaaggcttcttgccaggaatcatattgaaaatctttcttatacttctcccaacaattctaatggccatgagcaagattgaaggacacacatcgctctctggattggacaggaaaacagcaacgaagtactacattttccttttcgtaaatgtgttcttggggagtgtaataactggaacagcattccaacaactagacaacttcatacatcagtccgcaaataaaattccagaggttgttggagagtccattcctatgaaggcagcatttttcatgacatacataatggttgatggctggtctggtatagctgctgaagttcttcggttgaaggcattagtcatattccatataaagaatgcgttcttggtcagaacggagcacgaccgtgagcaggccatggatcctggaagcctggatttttacaactgtgaaccacgattacagctgtattttctgcttgggcttgtatatgcagttgtcacgccaatgcttcttcccttcatcatagtgttcttcagccttgcatatcttgttttcagacatcagataattaacgtatatactcagcactacgaaagtggtgcacaattctggccagatgttcacatgcgactaattatagcgctgatagtatcacaaatcctcctactggggctgctgagtacacaggaggcagagaagtctactgttgcccttctcccgcttcctgtcctctccatttggttccactatgtttgcaagggccggtttgaaccagcgtttgtgaagttccccttgcaggatgctatggtaaaggacacattggaacgggcgcatgacccgactttaaatttgagagagtacctaaagggtgcttatgtgcatccagtcttccagaaaaatgatatctacaaggttatcgccgtcgacgaggaagagaagaaccccatggttgtgacaaagaggcaatctcgcatgaacgcaccggccggaagctaattgaattccatttctggtggtactaacgaaggggaattctgttggatgcttcctacctaaagcctgattctttcatgagcaaatagcccagtaatcttgtaaatgtttggggaaaatggaaatacaggaggcagtaggatagtgaaacaggctgtattatatatgatccacaatttattaatttcattagtgattacaattattaat

SEQ ID NO: 36000 - DNA, 1222 bp, Zea mays subsp. mexicana
  Clone ID: UC-ZMROTEOSINTE028D12_FLI
gttaggaatggttatacaagatacactcctaatgctgggactttggagctgaggaaggctatttgtactaaactccaggaggagaacggggtatcctacctcccagatgaggtgctggtgagcaatggagctaagcaatgcatcacacaagctgtgcttgcagtttgctcacctggtgatgaggttttgattccagccccatattgggtcagttatcctgagatggctagactggctgatgcgactccagtgattcttcctacaaacatatcagagaatttcttgttaaggccagagttgcttaccgacgagatcaatgagaaatcgaggctcttaattctctgctctccatctaatccaacagggtcagtatatccaaaggagttgcttgagaaaatagctgatatagtcaagaagcatccgaggcttttggttttatctgatgaaatttatgagcatattatctatcaacctgcaaaacacataagctttgcttcactacctggaatgtgggaacgaacattaactgtaaatggtttttctaaggcttttgcaatgacgggttggcgtcttggttaccttgcagcccctaaacattttgttgcagcatgtggaaagatccaaagccagttcacctcaggtgccagcagcatatcacagaaggcagggcttgcagctctgaatcttggctatgctggtggtgaagcagtatcaactatggtcaaagcattccaggaacgccgtgactatcttgtgaaaaatttcaaggaactgcctggtgtgaaaatatcagaacctcagggtgccttttatttgttcattgacttcagcgcctactatgggtctgaagtagaggggtttggcactatcaagaattccgagtccctttgcatcttcctattagagaaagcacaggttgcccttgtccctggtgacgcatttggggatgacaagtgcattcgtatttcatatgctgcatccctaactacacttcagactgcgatgtcaaaattaaaggaagctgttgctctgctcaagccctgtgttgctgcgtagcaagatcactaaattgcaataaggagtgaccaaggcacctctaactaacctttcacgttattttaaacacaatgctcgaattgtttgggcagacttggtctgttgtttttatatgtaacattatggatttatgatgtgcacatgcaaataaaaatggtttgtttag

SEQ ID NO: 36001 - DNA, 1563 bp, Zea mays subsp. mexicana
  Clone ID: UC-ZMROTEOSINTE029C07_FLI
ttacatcaccgatgaaataagtcatcttaaagacttggtaagcttgaatttgagctataattcactgactggaagcttaccacctggtttaggtcaaccttcacttgtgtcactggatatttcatcaaatgagtttactggaggcattcctggaaccataggttcatccaagttacagactgcattactaaacaacaatcaactcgatgggcaagttccagaaagactttactcaattggcgtgcatggtggcgtgatagagtaatatatccttacttagtcttcttgtaaacgaaacttcaacttcttacttgtgatgtcagatatggttagaaagatttactatgctcagatgataatcgtcattatttattagcctattttatgctagctcctgaacaggtccaagaatgaagggtttaggttctatcatgttgagtaatgtaattattatggtatcatcagagtagagtagaccaaatcttcaaaatcatgtgcttagcaaaataggtctgactgtgatattctaatcctgaaaaaaaggaactgatgtgtgataaaagaatttatttcataggaacagatggacaaggctttgtttactttatctgaggatgagtgattaactaaattgtgcagctttattttcaatatatttactattcttggcacttttctccaaatagggagtttaggggtgcagagagttagcagatagataatgtactgtgctagttagtacatgattggcatgtacttgtggtattcattttccgtcttttactaacatgtattcttttggcagcctctcaggtaataaaggtttgtgtggcgtgcctaccttacctgcttgtgcattattctgggagaaaggagggttgaacaaaactgggaaaattgcacttggagcatcgtttgggtttgttctgctcgtcatacttatagtggtctacatactgtgcatcagaagggggccatatgactatgattttgacttccctcaagatttgacctccatatcagcaatatcagcgaaaaggaataggtaccagagggcaaaatccgtgatgcttgctgagatggaggcacataacccggatggtttctacacaaacgggagccctcactgaatggcatgctcagaagttggtcgcactgatggcttatattcattgaggaagcactcaccgtggtcttgcatcttcactcaggttccatgccatggcaggtccgcaggtatatatgttttgaatcaattttgcacgtgtcaccagcatggcggccttgcattttcactcaggttccataccataccatggcagttacactcacagtttgagatattcgaaatgtagcatatgtgcttgtatcctgtaatatgggggcatatgaggcagtcatttagtagttcgtgtagcgcaccgattctttttacttgaccgaggagtctccagatagtttagcttacgcttgtgctctcaatgaatcatgtcaaggctttgtatttaattttttttttgtatagaacctgacatgccatggtattactaaccgactttgggc

SEQ ID NO: 36002 - DNA, 1628 bp, Zea mays subsp. mexicana
  Clone ID: UC-ZMROTEOSINTE029E02_FLI
gcgagaagctcagcgtctggaccaacatgtgcaggttcatgagcaacgacgggctcggcccgccgctgggcaacgaggagggcgtgttctccgacaccggctggtatggcaccaaccagttctccgtggatgtcatcttcggcaacaggatgaagcagtacgagtgcctgaccaaggactcgtccgttgccgcggcggtgttcgtgcccttctacgctgggttcgatgtggcaaggtatctctggggctataatatcacgacgagggatgcggcgtcgcttgatttggtggagtggctgatgaacaagcccgagtggagcgtgatgggtgggcgggaccatttcctggttgccgggaggatcacctgggatttcaggaggttgacggaggaggaagcagattggggcagcaagctgcttttcttgccggctgccaagaacatgtcgatgctcgtggtggagtcgagcccgtggaattcaaatgattttggaataccatatcctacgtacttccacccggccaaggacgctgaggttttcctttggcaggataggatgaggagcttggaacgcccatggctgttctcgtttgcaggcgctccacgtcctggtgatccaatgtccatcagagggcagctcatcgatcaatgcaggagctcaagcctttgtaaattgttggagtgtgaccttggggagagcaagtgccactccccgagcacaatcatgaagatgttccagagttctattttctgtttgcagccccagggtgactcctacacaagaagatctgcctttgactccatgttggctggctgcgtgcctgttttcttccatcccggttcagcgtacgtccagtatacatggcatctcccaaagaactatacaacgtactctgtattcatccctgaagatgacatccgttctggaaatgccagcattgaggagaggctaaagagtattcacccagatgtggtcaagcaaatgagagaggaggtcatcaatctgataccaaaggtgatatatgctgatccaagatcgaaactggagacattgaaagatgcatttgatgtttccatagaggcgatcattaacaaagtgacaaagttgagaagagatatcatcgcaggccaagaagacaaagattttatcgaagagaatagctggaagtatagtctgttagacgatggacagcggacaattggacctcacaaatgggatccattcttctcgaagcctaaagataaaggtggagattctagtggttcatctgctgaagctgccaagaattcttggaaaagtgaacaaagaggacaggattgaaccatgagttggtcgtctttgggatgagatcaagggagtagagttagctatactctctgaagatgctctgatgcatataggttgcacatagatcaagatccagtagttatggtgatcatgaacatcattgatgatctatgtcaccctgcagttgtatgaagccattccaccaaaaatgctttggggaaattaaaaagacagcctttgcgtaccccctatgaatactatttttcacactaattttgctgtttctgctcaataatcctttgtaaacccttacagaatttagaggtatatcaaattttgctt

SEQ ID NO: 36003 - DNA, 642 bp, Zea mays subsp. mexicana
  Clone ID: UC-ZMROTEOSINTE029E09_FLI
cacctcccgcagcaggcagccaggcacaagcacacgaagccttcgcattcctgtccggcggaaccgctgaaggaagggagccgaacgagcaagcaagccaccaaggaaggttgctagggccggagtggatggggttcatgctgcgggtgaggctcgcctccttcttcgtcggcgcggctgccgccgccgcgggcgggggctacttcctctacaaggactacaagctcgccaacgactctatggccctcaaggtgaaatgtctccaagactcaactgatactcgctacgaagcccttgaaaagcgactcgctgctttggaaggtcagcaaagcactgaggctgcaccggatgtggatacgccatcagattagtctgttcgctacgagactttgatttacgtctgttttcgtttaccccagttgtcttctcctttgaaagcaagtacctgaccaacaacaaaataatttaggatgcttcttttgtactgcaaatgtccgaggctgagattctcccctacatttcatgccagaaaagcacatgaacatcagaactctgattactcaggcatactgagaatggccaaatgggcgtgaacccaaaacccagtttgagacaataatgttgcaatggtttttgccgcgc

SEQ ID NO: 36004 - DNA, 1534 bp, Zea mays subsp. mexicana
  Clone ID: UC-ZMROTEOSINTE029H01_FLI
ctatagtggatcctgagaatggatacacacagacagaaccagataaaaggaagtattcaggggggccatgtctaaatgagcattatcgtacagcttttaatgatgaaaacttaaagttcatgaagttgaacgaccaccagattgttctccttctttcatctatttggagtcaagcatctctggatgacaacttacctgcaaattttgaagcaatgggccttgtgtacagcattgctttattatgttcaaaatcaaaaagctccagtcatgtgacacgtattcgttgtttccagttggcgttctctctcaggagaaactctcttagccctgaaagtgatttgaagccatctcgtagaaggtgtctgtatacgatggcatcagcgatgctcatcctttcagcaaaaattgctgatctccaccagataattcctcttgtgaaagccgcagcaccagagaaaatggttgatcctcatcttcgcttgatggatgactgccagcttgttaatacctctgcagagtcatctaacagcgagatggtttatggttccgaggaagatgaaagtgatgcactggcttttctttcagccatcaacaagcctgacacagagttaatagaaaccgtgatgtgccacttcagggagaagttcgaaaatttaccagagaaggttaacgggatagaagagcaacttcttcaagagttttccctggatgattcgtttcctcttggtgctccactattcatggagatgccacactcttgttcaatgtatgcagaaaaggatgaagaatgttttgacgaggacactgttccttctgagctagacgatgacgacatcatctttgagcatagtgggtctcaatctgacaggaaaacgtcaggttccatggcttcgtcagatgttctaactgtcaaccaactaatagaatctgttcatgagaccgcaaggcaagttgctaacgttccagttcccgccaaccctgtaccgtacgaccagatgaagagtcagtgcgaagccctggtcatggagaagcaacagaagatgtctgtcctcttgagcttgaagcattcgaggactgactcgcatggttcagccggtgtggatgggcttgaaacgaatgagtcttctctgctgtctgagcctgagttacagtcaacaaggaaggggcgcatgcgccgctgcgattcagcgtccagcgaatcagactgttcgttcaggctgccacctgctagcccatatgacaagttcctgaaggcggctggacggtagcctgatgcggttgcggcagcttggcgcttcagttttcaactctctcaagtctgcatgagagttcagtacaagtgattcatcggcaccctctcgttctcggagtccattctttcaagtgtatattatatttacatccctcgacaaggtgtataaagttctgttactgtttccttcagaataaaccgaagtgtataggcactagcggatgatcatgttcaagacggtatttgttcatttgttggtcgtgaaaagaaaacattttacac

SEQ ID NO: 36005 - DNA, 739 bp, Zea mays subsp. mexicana
  Clone ID: UC-ZMROTEOSINTE029H07_FLI
ccggcaccaagatcgccgacctcgacgacgacgccgcgccactcgcggcctacgccccctacaacggctaccggatccatgtcgttgatctcgacccttcctcactcacctcagggggttggttggaagacacttcccttgtcgacaagtacaaaatgtccgatgaaacatacgataagctcgacactaactttcgaaaattcaaagaaaagatggtcccgaaaaactctccgtcagaggataaagaagaatcagaaaagcatatggaggaactatgctccaaaatcaaggtgggtgatagatgtgaagttgagcctggtgccaagaggggcactgtaaaatttgttggtagagctgaagcccttggacgtggattctgggttggagtgcaatatgatgagccacttgggaagcatgacggcatggtgaaaggcattcgcttctttgagtgccctcaaggtcatggggcaattgtgaggccagagaaagtaaaggttggcgacttcccggagagagacccatttgaagacgaggacgatgacgagatttgagtgcgtgtgcgtttggaaaagcaaggggaatgtccttgttgtgttgcattcgaaacgtgtgtaaaatgaattcggagatttgagtgtgcgcgcttgcttgcatcatcttgggcaatcatagtggtcacatttcaaggcatgctgttacatctctactattcaagcgtgagctaataaattttccctcc

SEQ ID NO: 36006 - DNA, 786 bp, Zea mays subsp. mexicana
  Clone ID: UC-ZMROTEOSINTE030A03_FLI
caggggtggcggagcggcggggcatcccggcggcggccttcgtcgaggacgtcgaggcctacctccggcaggccgggcttgacgttaactccgccctcgccttcctccaggaaaggttgcaacagtacaaaatagtggagatgaagcttctagcacaacaacgagaccttcaggcaaagattcctgatatagagaagtgtttggatattgtttcaacattacaagctaaaaaggatttgggtgaggcacttatagctgattttgaattatccgaggggatatactcctgtgcgaaaatcgaggatactgactcagtgtgcctgtggttgggtgcaaatgtgatgctggagtactcttgcgatgaggccaatgccctcttgaagaaaaacttggaaaatgctaaggccagcttagaagtccttgttgctgatcttcagttcttgcgagaccagcaaaccatcactcaggttacaattgctcgggtattcaactgggatgtacaccaccggagaagcaaacaggctgtaaaggaaccttaatcagttagatcacgaggtcaaccaatgtgattgggacaaattttttcgtaccttttggtacctctggcagattagtccatcatagcgagctctttgtttgttgatggtttctttgctgtgtaacaatgtatcggtttattctctttaatggtgtgggaacattagtagaagatgaaacattttactgcctttttccccactggatgtccactggatcacgtcgcaaaatattttttttttcatgatt

SEQ ID NO: 36007 - DNA, 651 bp, Zea mays subsp. mexicana
  Clone ID: UC-ZMROTEOSINTE030A11_FLI
gttagatgcccttcatcaaacaggtcgagatgcacgactgattggccaagggaacccaaatgatttcttagtttctgctgctgtagctgagtttaaagggcctgttgcatttggtgttgttcgtctggcccaagtaaacatggagttggctagagttgaagccacatttagtggtctatcacctggtaaacatggatggtcaataaatcagtttggggatttgacaagaggtgcagaaagcactggcaatgtctataatccgccagatcatttatctgataagccacttggtgacctgggaacactagaagctggagagaacggggaagcccatttctcaggaccgaaggagaaattgagagtggttgacttgatcggccgctctattgctttgtatgcaaccgaggacagatcagaccctggcattgccgcagccgtgattgcaagaagcgccggggtaggagagaactacaagaaactctgcacttgtgatggtgtcaccatttgggaatcaagctaaacctgctaccagcgaatttttccatactatttacttccgtatgttgtacacacattaatgtaggaacaatcgaagtggcgactgaacatttggaataagcttgaatacattgaggaataaaggctgttctc

SEQ ID NO: 36008 - DNA, 1343 bp, Zea mays subsp. mexicana
  Clone ID: UC-ZMROTEOSINTE030B03_FLI
gcgtgcgctccctctcctgtctccccctccccctctctctcgtggagacgactgggccgccgtcgttgctgccctacgcggctacgcccaggtcttcttcgggcccttagccgcgacgagcaccaccagggagtagaagaggttaaccttctggttggaaacgatgtacttcgaaggctatggcttccgtggaagtactttcgagcagacatatcgctgctatcctgcgtctttcatcgacaagccacaacttgaggccggtgacaaaattataatgccaccatcagctcttgatcgtcttgcatctctgcatattgaataccctatgctatttgaagtccacaatgcagcagcagaacggacttcgcattgtggtgttctggagttcattgcagaagaaggcatgatctacatgccatattggatgatgcaaaatcttctgttgcaagagggagatatggtgttcataaaaaatgccaacctccccaagggcacatatgtgaagttgcagcctcatacaacagactttctagatatttcaaaccccaaagcaatcttggagaaaactttgcggaacttttcttgtctaactacaggtgacagcattatggttgcatataataacaagaagtactacattgatatagtagagacaaagccctccaatgctataagtattattgagaccgattgtgaggttgactttgctccaccacttgactacaaagaacctgagccagtaaaacctgctgttcctgcaagcacggagcctggtaccgacgttccagctgaagaagaaccaaagttcatccccttcactggttcaggaaggcgcttggatgggaagccttccaaagataaagatgtgctagcctcttcccctgcaaagcgacaagctaatgcgaccaacggtgtgcagccttcaacagccaccacatcacagggcagttcatcgcgtaaggccacaggaaaacttgtctttggctctggtggtagccgagccgaaaaggcacctgaaaaggaagcagaggagcccaagaaagaagacccaaaattcgcagcattcacaggaaagaaatactcactgaagggctgaataaataggaagacaatgtattatcagtatttccggtgacggacattctcagggagaagcgcttaccaaccctgttatgtgggagggtctttcggtgggatagtggtctctgtttctcctgaactattacccttgtgtagttgtgtcagccacaccggagcaactgatgtataaagccgttcttatccgataatggatttctgttgagcttgcatgtacattttctaaaaagataattgaaatcgcc

SEQ ID NO: 36009 - DNA, 982 bp, Zea mays subsp. mexicana
  Clone ID: UC-ZMROTEOSINTE030B06_FLI
tcgccgccgccgccgccgtgctggctgaccccgccgagaagccgcgcgccgccaaggctcaggtggtgggatggccaccggtccggtcgttccggaagaacatcatgtccgtgcagtccgacaagggcgccgccgccgccaacggcgacaagtcctcgccggcggcaggcggcggtgccgcgttcgtgaaggtgagcttggacggcgcgccctacctgcgcaaagtggacctcaagatgtacaggagctaccagcagctgtccaaggcgctcgagaacatgttcagctccttcaccatcggaagctgtgggtctcaagggatgaacggcatgaacgagagcaagctggtggatctgctcaacggctccgagtacgtgccgacctacgaggacaaggacggggactggatgctcgtcggcgatgtgccgtgggagatgttcgtcgaatcatgcaagcgccttcggatcatgaaaggatcagaagccattggcctggcgccaagggccatggagaaatgcaagaacagaagctgaggagaagacggacggacggaagcttgcatctcagcaccaccaggggtggatggatgcaagaagaacaaatctccatggcttttgcagctctgctcgtctctgtatcatactcgtcgtccctgcccttcaggcctctgtatctccctgatcaatgaagtcgttttggtgtgtcaactgttctctccgtgcccagcttgtcagtgaaagagtcagtcagtgtccatcaagtctcatcttgtcctatacagaagagagaagccatgcatgaacatgtacctgtcctataacaatgtctttttttgctacctgtttttttctctttctctctctttttttggcacaagatgcaaaggcaccctgctcctgatcaaagggccttttgcatcataagctgtttgattataattaccatggtgtgtcagtggaacaaataactgttgcaaggtgtt

SEQ ID NO: 36010 - DNA, 1016 bp, Zea mays subsp. mexicana
  Clone ID: UC-ZMROTEOSINTE030B07_FLI
gatgcgaccaaattcctcctattccctctcctctccgcccacccttctctcgcccgcgtaactcctctgtgtcgcctaccagaagcggagcaaccgaggcaagaggaaggggtgggcgaggaaaagcgatttggcttctcttccagttccggattcatcgtaagaaacacatgactgcaatggatatctgaagcatgaaaagacaaaccatctcactcttcaaacagttcacctagcacacttaatggcggaggtgtttgcatgacattctctttgagctgatatatatgggagcagtggctgcattggtaatttaagaaaatctcagtcacttccagattctaagccgaaacgatctttaagaaagaaatctctggattcatctactggaaacagaagacgatggcaatcgagtctagaagcaatggagaagaatgttagcatatcagtttctcttgaggggaatatctcttctattcccaactcgatagtcaacgattctaaaacattaatggaaaatggggtagatacatcatttatcaaccatgctgctaaagaatggactgagatgagaagacaatgggttggacatcaggcagaagttccgagaaaggcccctcaagagccagtgataagttggtccgcaacatatgatgatctcttgtcaacaagtgagcgttttccacagcgaatcccactatctgagatggttgattttttggtcgacatatggcacgaagaagggctctatggttagctgacgtctggctttctttccgccttgcatttagaatgtggtcaacttcctccccacaaaagatgtaatcttttgaaggaatgaaaaaaaaactacttagtcgcaaaattagttttagcatttgatttttttaaaaaaactgttatttggaaagatactacagtggtttggtatatttggtgatgagctgtcagaggtttgtttatgtcaaatgactcgatgacctgtcattcctgaatgagctgttgcttaagaatag

SEQ ID NO: 36011 - DNA, 663 bp, Zea mays subsp. mexicana
  Clone ID: UC-ZMROTEOSINTE030D12_FLI
tctgctcgcatttcctcccaatccatcccgcctccaaacccgagcttccaagtcgccccgcatcgatggcgcccaaggccgagaagaagcccgcggcgaagaagccggcggaggaggagcccgcggccgagaaggctccggccgggaagaagcccaaggcggagaagcgtgtcccagcgggcaagtccgccggcaaggagggcggcgagggaaagaggggccggaagaagggcaagaaaagcgtggagacctacaagatctacattttcaaggtgctgaagcaggtgcacccggacatcggcatttcctccaaggcgatgtccatcatgaactccttcatcaacgacatcttcgagaagctcgccgccgaggccgccaagctcgcgcggtacaacaagaagcccaccatcacctcccgcgagatccagacctccgtgcgcctcgtcctccccggggagctcgccaagcacgccgtctccgagggcaccaaggccgtcaccaagttcacctcgtcctaggctgcgtggcctccgcttgcaggcttctctcgtatgttcgcgtgtcttgctgtagttaggtgctgctgtgtctggtctccttctgtagcaactgttatttgatcgaacagtaacgatgcttattgaatccagctagttgtttatt

SEQ ID NO: 36012 - DNA, 1460 bp, Zea mays subsp. mexicana
  Clone ID: UC-ZMROTEOSINTE030F04_FLI
cccgacgccggctgcctcgctccatttctgatccggtaatccccactcccgagtccaaaccctaaacctaaacctctcacccggcgccgccgccgccccatcccagcgcaaccgacttccacctcggattgaagcaatgtcgtcggacgacgaggtcagggaggagaaggagctcgacctctcctccaacgatgtcgtcaccaagtacaagactgccgccgaaatcctgaacaacgctctgaagctggttgtgtctgagtgcaagccaaaagcaaagattgttgacctttgtgagaagggtgactctttcataagagagcaaactgggaatgtctacaagaatgcaaagaggaagattgaaaggggcattgctttcccaacctgtgtttctgtgaacaacacagtctgccacttctccccgcttaccacagatgatgcagttctggaagaaaatgatatggttaaaattgacatggggtgtcatattgatggctttattgctgtggtggcacatacacatgtaattgcaaatgggcctgtcacaggaagagcagctgatgttcttgctgctgccaacacagcagcagaagttgcaatgaggcttgtcagacctgggaagaagaataaggatgttactgaagcaattcagaaagttgctgctgtttatgattgcaaaattgtggaaggtgttcttagccatcaactgaagcaatttgtgattgatggtaacaaagttgtgctaagtgtctccaatgctgatacaaaggttgatgatgctgaatttgaagaaaatgaagtctatgcaatcgatattgtcaccagcactggggaggggaagcccaagttattggatgagaagcagaccaccatctacaaaagggctgtagacaagaattataacctgaagatgaaagcgtcaaggtttattttcagtgaaatcagccagaagttcccaatcatgcccttcactgctagggcattagaagagaagcgtgcacgcttaggattggtggaatgcatgaaccatgagctattgcagccgtaccctgtacttcatgagaaaccaggtgaccttgttgcacacataaagttcactgtgctgctaatgcccaatggatcggataggattacatcatatccgctacaggagttaaagccaacaaaatccattgaagacaatgctgagataaaggcatggcttgctttggggacgaaatcaaagaagaagggtggtggaaagaagaagaaaggcaagaaaggagatgcagcaggagatcccatggaggcgacaaacgatgctacaagccaagaataattctgatttttggaattactgcacccagcattttctctcttgtttcttcgctgcatctgatggtgttatattacattcagttgcgaaaaaatgaatacttttttctagtgtctaagaaacgaagcatcctgttgcacattattgc

SEQ ID NO: 36013 - DNA, 1984 bp, Zea mays subsp. mexicana
  Clone ID: UC-ZMROTEOSINTE030G11_FLI
agtaaactgccgtaggccactgttgctgtaatctcagcacgtcgcttttgattctgagtagaagcttacaccagttacaactaaaagcactattagcagttcttacttacacggattctagtatctcttgatacaatatttgcaactttactctaaaagcctccatcggcctctgcttccttgccttgttctctaggagacggcaatggctgatccgaaccaccttctgttgcatctccaaaaagttccgcaacaacagcagcccttgctgacttcgctttttcatcatccccagacaggtcaggggttggagcttcctttgcctcatggctgcgaggctcgctcgatgattctaccatagcctcagcagacacgggtgtctcttgttttccagtgtcagcttcactaaattctgtatttctgccactaggagcaagttcggtgttcagccgtccatgcaaggcagcaggagtcttctcggtgtctgaattttcatcatttcccaaaatgtcactgctcggggcctcctttacgtcttggcagctgggtggcttattagatatatctaccatggcatcaccagaaggtgacaattgcagtcctagatcagttccaacaagttttgaagtttcatcaccaggtgaatgttcagtgtttagccgtttcatctcagcagtttcatcagttcctgaaggcccagagcttgcaacctccacttcctggctgagttgctccctagatatgtctaccattgaaggtggtggcagttgcagctccgtgccatcttcaccaagtttcgcgttttcacttgcatgagcaacttcagtagttagctgtctctgtgcagcagcagcagcagcagactcttccatctttgcatctttacgagccaccttttcgtcttggctgagtagctcgctggattcgtctaccgtggcctcaccagatggaagcagttcctgttctgtgtcagcttcatcaatctttgcattttcagcacgaggagcagaatcctcatttactgatccttgagcagcagcttcatttttcgtttcttcattattctccaaagggtcactgcttggagcctccacctcctggctgggcagctcactacacatacatgtcatggcctcctcaccagaggaaggtgccagctgcagttcagtgtaagcttcaccaagtttcatattttcatcaccatgagactgaccatcattgcatgcttcaccagatgcacgagactgggtatctttgtatacttcgctgatggtagaagtattattagcttctatgctaccacctggactaggaacaacaatttcttgagcaagcttcacttcaacaacagtttcagatgaaacaagattgtgaccatctgctgcacatccatcccctgtgcttgttgccagttccacttgcataacagaagtttcatcaattggctcgggtcctgcaacgtgctcagacgaggcagcaaacttcgattcaaccatggtagcagcagttgcaggagaatccatgttctctgggagggtagaggtggtttgagtaggcatagtttcttggcgataaacaccagctgctttactatccacaaaatcagcatcagttactcgggcagcagcatccaccattgagtcttctgaagaagaatatcctactaaagccatgctagacaccgcttgtgcaattgaagccatctttatttgttctgaacaatgagcctcaccaccttgtgctctattgtgatcatcaacagaagcagcctcctggacaacaatcattccaacatcatcagcaccagaaggttctaacttgtcagcacaaacttctggagtagagtctggttctagagctgaaaccatctttgcttgttccaaaacatgagcatcaacctcaataccacgcaattcaactccaggtgatgccttttgtccagattcaactaatagaggcgcatgtatacttacgccactgttgt

SEQ ID NO: 36014 - DNA, 893 bp, Zea mays subsp. mexicana
  Clone ID: UC-ZMROTEOSINTE030H12_FLI
cagacggggaacaaggaggccatcgagaaggataaggccagacttgcagtaccgatgaactgagtagaggctacttccaagactttgccgagatccgcgagaacgctggcaagattgcgacagcgagtaaggtcatcatcccagaggtagatgctgtgaagtttcctgatcttgatgtggattcccctgatggaggggcactgcatctgcctcttgttgcaccaactctgcaagctgatgatggtgaggctggagaccataagattcctggtgcttcattggtgtgcctttccttccgcgcaagctcgctgaaaatggcagagtcatggagtttaccttacctggatgctttcggtgctgccaagaacatgcatgtttatgaggtctcatttatagattcttgggtattatcattgagtcctatgaggcgagcatttctgaaggcgatgaggaaatctaacaatccacggagacatgttgtgtatgctttcggggaccattatgacttccggaagaagcttcaaattataaaccttctcactggatacatatatctggttgatggcctgggaagaataagatggcaaggctctggatctgcaacacaagaagaactgtcgtcactaacagcgtgcacctccattttgttagatgaaaaatgagatggggtggctaatctttgctattttgtaacttctggtacaagatattttgcttttcactaagcaaatcgagtttttttcccgtgggtaataagtattggatggttagtttttttcactaagcaaccttgattttctggtggaaaatgattttggtatggtattatcgttgtatttaactgctatcctaacttcgtgctataataagactgaattagtttaaatctttcc

SEQ ID NO: 36015 - DNA, 780 bp, Zea mays subsp. mexicana
  Clone ID: UC-ZMROTEOSINTE031A06_FLI
aagaagagaatgacaccacagcacgatgcaccacaggcaattcagtttaaagtcagtgataaaggtagcggcaatgttggttctgagttaccaagtcatccaggtgtcgttacaggatccatccttactgccactaagaagctcgggaccgcagttccatttgataatgccaaggtgctcattgtgtcagctgattctcatgaaggatttcatggcttgatcatcaacaagcgattaagctggggtgtcttcaaggatctggatagctcgatggagcctattaagcatgcaccacttttctatggtgggcctgttgtggtgcagggttatcatcttgtaagcttgtcaagagtatcctcggaggggtacatgcaagtcataccaggcgtctattatggcaacatagttgccacaagccgggtagtcacacggatcaagttgggcgagcaatctgtcaatggcctgtggttcttcctaggctactcggggtggggatacaaccaactttttgatgagctaactgaaggagcatggcttgtgagtgtgaagccgattgagcatttggactggccgaagagttgaaagggttctgtggacctcacgcctcagctgtttctttaggaaaattcagttcatcttgcacatatctgccactctgcccacactgcaccgtgacattgtactgagcttttttttggaacatagcagcactgtgttttcataccattcacaccgtactatggtcacatattttttatacatagtacttttcttatagtg

SEQ ID NO: 36016 - DNA, 826 bp, Zea mays subsp. mexicana
  Clone ID: UC-ZMROTEOSINTE031C03_FLI
ctcaaggttgcatcaacttatctgggaccacttgctgccaataacgaagctctactgaagcccttgaaggaaacattggtgacactaattcaacccaatgaagatgtagtcatgaatgcattgtcattgccagtacttgccagttctgtccaggttgcaatgagcagaaggcttggtattgaagagcctcagttaatgaagatagtcagaacaacaatccatacacacactgaatggtttaagcttcagatgtgcaaggaccattttgagcacttattgaagattgattctctaaaagaggttgatccatcattggggagtcaccgtaagtccaaggtccttacagatgaatgtgcaaatggatcatctcaaatgacaacatgttcaagtggcaaggtgccagatgaaggtagtagccctcaagtctcatcagaagttgcctgtgatgaaaatgctatactgaaggttatggaattccttgcgttgccaagggcggacgccatccaactcctcatgcagtacaatggaaatgcagaggcagtcatccaacagatcttccaatagtgtactgtaaataacaaagtattttgcttgctttcaaacgtaattatttgttgatacttttcttgccctgtacagaagattctgttagaactaggagtctgtgtttgatgatccacagtacttctatggacttacacagagtaggaatcggtgggattcagcgcaggctaaactcaacgataaatgcaaagatattgatttatactggttcagaccattgaacagcgtgcgtaatatatattatgtctagttagttgtgttg

SEQ ID NO: 36017 - DNA, 1079 bp, Zea mays subsp. mexicana
  Clone ID: UC-ZMROTEOSINTE031C04_FLI
ctcagctgacgggacatatgctctcaagaaagttcttgttcagagtgatcagcacttagagcttgttcagcaagagatccgagtgtcctctcaattcagccatccaaatttacttcctcttcttgaacatgccatcgttgctgtcaagggtgttcaggatggatcccagaactatgaggcctacttattattcccagttcatttagaaggaacattacatgatataactaaaaccatgcttgaaaagaaggaattcttcccaacaattactgttctccagatatttcgccagctttgttctggattaaagcacatgcacagttttgatccaccatatgcgcacaatggggttaaaccagataatgtcctcataacacagaggaagcagtctcatctagcaattttgatggattttgagagtgctggtccagcaagaaagactattagatcacaagctgaagctttgcagttacaggaatgggcttcagagcactgttcttctcattaccgtgcccccgaactatgggagtgtccaagtcatgctgacattgatgagaggacagatatatggtctttgggatgcactttgtatgctatgatgtatggaaagtctccatttgattatgagcttgatgagtcttctggtgaaagcttgcacagtgttattaaaaatgtacagattaaatggcctgaagaagcgggatctacataccctgattccctccgccagtttataacttggatgctgcagccacatcccgcagttcgtcctcatattgatgatatcataattcatgttgataaacttgtcatgaagtactctaattaaccgctacaccaagccgcttctccaccagaaaaaagaatcattattatgtaagtctacacgattcattagcaaaatgtgatatgtatgttccttgatagctattactgtattaaacgagaaaaggacattctgctgtagtcttcaaccattcgtggactcgccattgttcatgagtatgttatctatagatgttttttttgtatgcccgacagtgttaccgggttaataaatgatacagtacctcttttat

SEQ ID NO: 36018 - DNA, 1182 bp, Zea mays subsp. mexicana
  Clone ID: UC-ZMROTEOSINTE031C10_FLI
gtgaaaattgaaatgttcatgatgatatggcattgtgatactaaaaaagaaaactcgacctgcgggggtaaaacaaccccgagcattatgataagaagaagaccttctcactcaggtcgagaacctttgaaccattgtcccactcatacacagcggcactgtagcccatgtgagaaacgaccgtgactaggactagaccttagacctgtgcttgttgtaggatagacgagaggatttttttaaccatggcctggaattcgctcccacggggagtcgaactcaggacctgaggagtgctactcaaaccacccaaccaactcagctagaggccctttcgctggcattgtgatacttaactgttaactcacatacttattcatacctgccacaaatcggtttaacatacatttctgcagaaatctttccaggaactccttcgcaagcagaatggtgaccgtgcaatctgggagtatccatttgctgtcgctggtgtaaatataaccttcatgctcattcagatgcttgatctccaatcagttaaaccgaggtcattgttcggagcagttttcctaaagcttctttcagaaaacgatcaagcttttgacattctctactgcataaccttcaagctgatggatcagcaatggcttgacatgcatgctacttacatggacttcaacacggtcatgaagtctacacggcgtcagctagaaagggagctgttaattgaagatattcagaggattgaggacatgccatcatacagacttctggcccggtagctagaagaaactgaaaccttaacatggctacatattgcaaggcggcttgagatgctaatggatcgcaacttgtgtgtccacatcgggcgacaatcttgaaatgtagatgacatgtatccttgtgtgttaggtacttgtggtctctggtaacctgatctctgaagattacaaggtaggggtttttttcctggtgatagaatgccacgtagggtaactgaagtgtctgatcagctcccatggcaaaaaaaaaaaagagtagggtgtgttattacaatctggtcgttgtccatcataccacgaaaggaagtattcctagggttgttgttgtaaacaggaggatttgggaaagatgatctgtgttgtctcccatttgcttgaagataagaggctagttcttttt

SEQ ID NO: 36019 - DNA, 1988 bp, Zea mays subsp. mexicana
  Clone ID: UC-ZMROTEOSINTE031C11_FLI
agtaaactgccgtaggccactgttgctgtaatctcagcacgtcgcttttgattctgagtagaagcttacaccagttacaactaaaagcactattagcagttcttacttacacggattctagtatctcttgatacaatatttgcaactttactctaaaagcctccatcggcctctgcttccttgccttgttctctaggagacggcaatggctgatccgaaccaccttctgttgcatctccaaaaagttccgcaacaacagcagcccttgctgacttcgctttttcatcatccccagacaggtcaggggttggagcttcctttgcctcatggctgcgaggctcgctcgatgattctaccatagcctcagcagacacgggtgtctcttgttttccagtgtcagcttcactaaattctgtatttctgccactaggagcaagttcggtgttcagccgtccatgcaaggcagcaggagtcttctcggtgtctgaattttcatcatttcccaaaatgtcactgctcggggcctcctttacgtcttggcagctgggtggcttattagatatatctaccatggcatcaccagaaggtgacaattgcagtcctagatcagttccaacaagttttgaagtttcatcaccaggtgaatgttcagtgtttagccgtttcatctcagcagtttcatcagttcctgaaggcccagagcttgcaacctccacttcctggctgagttgctccctagatatgtctaccattgaaggtggtggcagttgcagctccgtgccatcttcaccaagtttcgcgttttcacttgcatgagcaacttcagtagttagctgtctctgtgcagcagcagcagcagcagactcttccatctttgcatctttacgagccaccttttcgtcttggctgagtagctcgctggattcgtctaccgtggcctcaccagatggaagcagttcctgttctgtgtcagcttcatcaatctttgcattttcagcacgaggagcagaatcctcatttactgatccttgagcagcagcttcatttttcgtttcttcattattctccaaagggtcactgcttggagcctccacctcctggctgggcagctcactacacatacatgtcatggcctcctcaccagaggaaggtgccagctgcagttcagtgtaagcttcaccaagtttcatattttcatcaccatgagactgaccatcattgcatgcttcaccagatgcacgagactgggtatctttgtatacttcgctgatggtagaagtattattagcttctatgctaccacctggactaggaacaacaatttcttgagcaagcttcacttcaacaacagtttcagatgaaacaagattgtgaccatctgctgcacatccatcccctgtgcttgttgccagttccacttgcataacagaagtttcatcaattggctcgggtcctgcaacgtgctcagacgaggcagcaaacttcgattcaaccatggtagcagcagttgcaggagaatccatgttctctgggagggtagaggtggtttgagtaggcatagtttcttggcgataaacaccagctgctttactatccacaaaatcagcatcagttactcgggcagcagcatccaccattgagtcttctgaagaagaatatcctactaaagccatgctagacaccgcttgtgcaattgaagccatctttatttgttctgaacaatgagcctcaccaccttgtgctctattgtgatcatcaacagaagcagcctcctggacaacaatcattccaacatcatcagcaccagaaggttctaacttgtcagcacaaacttctggagtagagtctggttctagagctgaaaccatctttgcttgttccaaaacatgagcatcaacctcaataccacgcaattcaactccaggtgatgccttttgtccagattcaactaatagaggcgcatgtatacttacgccactgttgttacc

SEQ ID NO: 36020 - DNA, 1221 bp, Zea mays subsp. mexicana
  Clone ID: uC-zmroteosinte031d02_FLI
cccgtcctccgccgacaagtcctccctcgaccccgacgcgctttatgaagaatgaagggagaatatcctgagagagtgggacagccagagtgtcagtattatctgaagaccggaacatgcaagtttggtcctacatgcaaatttcaccatcccagggaaaaggccggaattgcagggagggtgcagctaaacacattaggatatccacttcgcccgaatgaaaaggagtgtgcgtattatttaaaaacaggacaatgtaaatatgcaaatacttgtaaattccaccacccagaacttttcaatgcggtgccttcgtcacgtggttcacctatttatacttctgtacattcctctgcaagcgctggtccacagtcatatactggaactatgtcaagctggacttttccacgagcttcttttataccaagccctaggtggcaaagtccttcaaattatgcaccaatgattgtacctcatggccttgtccaagtgccgagctggaattcatatcctggtcagctgcagtcacctggggctcaacaaacttatggaagttcacaacaaggcgaagctagtgcaggaaatcagggaatgctatcaccctatagatccagttcgtttcctgtgcctcaatatgcgctgcagagggataatgtatttcctgagagacccgatgaaccagaatgccaatattacatgaagacaggagattgtaaatttggtgcagtgtgcaagtttcatcatccccgtgtgagatcacagccccctccggattgtgtcttaagtccaatgggccttccaatacgtccaggtgaagaactgtgcaaattctattctcgttatggcatctgcaagttcggcgccaactgtaaatttgatcatcctacaatggctgctccaatgggagtttatgcatatggtttctctgggtctgcttctgtcgcacccgcttcaactaatgcacctatgacgcgacgccttctgggatctccatcaggttctggatatatgtcttaggtgtcttttttttcagttgacctactttgatgtataaaatccacggcatcgcctcaggcgctgtgaatgtttctcctaacttcccgccgggatgaagttctgtaaattgagttgctgctggagatgtacagccccccccccccctccccaattaatccagaactttgggaataactgttggaacctaataaacttcagatacag

SEQ ID NO: 36021 - DNA, 677 bp, Zea mays subsp. mexicana
  Clone ID: UC-ZMROTEOSINTE031E05_FLI
caactactccacgcaccagctccacggcatcttcgaggccgcgagcttcggcgggaccaacatcgacccgacggcgtgggaggacaagaagtgccccggcgagtcgcgcttccctgcgcaggtgcgggtggcaacgcggaagatctacgacccgctggaggaggacgccttccgccccatcctgcaccactacgacgggcccaagttccggctcgagctctccgtcaccgaggccctcgcgctcctcgacatcttcgccgacaaggacgacgcctgatcgatcccccatcggatctgtcgtcgggccactcgaagctcggatgcacgaatgaatgaacaaacaataataacgaatggatgggcatgtatatggtcatgcgcatgtcccacgacgagacgggagtataccacggtggagtagtattatattaataattaatatagtatgtccacctttgtttgatactactaagggctatgtattgaggcacgcgtcccattgttttgtttttataacacttgtgcgatggttgcagacgactagccctcgtttatttttttggtaaaatgtctgtattattattattcgggttccactgacatggataaaaaccatctgtgaaatagtttgctcttgtgctgtactacaactcaaacgtaagaaatggattcgatct

SEQ ID NO: 36022 - DNA, 1790 bp, Zea mays subsp. mexicana
  Clone ID: UC-ZMROTEOSINTE031F10_FLI
aatataagccttcattgaatgatgttagttcctatctgattctttattgggttcctacacggcgtgatggaaaggttggtgatcctttgatggctatctctgatggtccggtcatggcagcttttccatctgtttcggatgttcacttagagcagaaaagttcagatgtatattgtggactaggcatctattatggtggatatgagggattaagcttgtatagatggtacagggaatctagtgatggaactaggcttcacatagatggtgctgattcagtcacatacgaagtgacagatgctgattacagctgccgtctactgtttggttatactcctgttcgttcagatgggataagtggagaagaaaaactctctgaaccatctgatgtaattttgccagaactactcaaaatcgagacactcaatttcaaggggaatcaggttgaaagagaaacactgactgctgctgaacaaattccgtacagtgagattcaacaacatatatggaaaaattataagaaagagatgaaatatcaatggtttatttccaatggatcaggaggcgatcagtcttttgaaccattggcaacccagtgttctcgctcatacaaagtgcgctttgaggatattggtcgttgcctgaaatgcgaatgctttgtcactgatgtatttggacgatctagtgaattggtatctgctgtgactgctcctattttgccaggaaggcctaaaattgaaaagctggagattgaaggaagaggtttccacactgacctatatgccgttcagggtacctatagcggaggcaaagaaggcaagagtaaaatacaatggctcagatcgatggttggaagccctgatcttatctccatacctggcgaaactggaagaacgtatgaagctaatgttgatgatgtagggtataggcttgttgcaatttatacacctgtaagagaggatggagttgagggacaacctgtttctgtttcaacagaacagattgcagttgagcctgaactttacagggaagtgaaacagaagctcgatgatggttcagtcaaatttgaggttctgtgtgacaaggaccgaacacccaaaaaggcacaagtaatgggccatttggagcggagggttttggaagtcaaccgaaagaggataaaagtagtgaagcctggatctaagacatcattcccgagtactgaagtacgaggaacctacgctccaccgttccatgtcgagctgtatcgcaatgaccagcaccgcttcaagattgttgtcgacggtgatactgaagttgacttaatggtgcaaacacggcacatgcgagaccgcatcatcctcacgatcagaggcctcgcccagaagttcaacagcacctccctcaacacacttctcaggatcgaggcatgatgggtagggtgcccacatgatagacctgacaagtgtaaaaaccaactattacgggaagctgttccccttgttccgattggttagagtgcgtggttttagtaggattcgtgacatgccagccttttgtgtgtatgggtgtgggacgggccgagcgtgttggattacagttttttcccctgacacatctctcaaatcagagcagcatcagctggttgctctgactggtgccgtcgtgctcgtgcgtcatgaaatgtacatagggtcgttagagcgagaaagagagtggtgtttcttggtgctgtatttattatgcactggttgggttgggtttttcgactgccattctcatactaagtattggttctttcttttttcggt

SEQ ID NO: 36023 - DNA, 595 bp, Zea mays subsp. mexicana
  Clone ID: UC-ZMROTEOSINTE031G07_FLI
acaaatcggttggaagagcctaaggctgcacttggactacgcccgccggaagagaggggacggttcctcagacttcgagtacgctggcaaggatgcatgggcttctgcatacagtgctgtcgcggcaggggcggctctggttgctgggctcggcgtgatggcttacttgaaacggtcagggtaatagcttgaggcaagcacggcagggactagggagcacggttttgatcgtctttgtgatacaagtgccacttcatcggaattggcagaatggctgtgtaagtaattcttgtgagagaggaaaaaaatgaagattttaataatactactgtcaaggcagtgaatggtcccttcatacaagtacacggaactgatcgagttttttttggtgggttgagacttgagagtcaccatggctgtcagcttcgtcacgattgtatttattatcataaaaacacatgattcattgtacaagaagagtcttgatagaccttcttcatgcagcgtctggctgattagaatttatccaaggcgatttttgtcaaaaaaaaaaaaaaaaaagaaaaaggggagagaggaagaaaagaaaaaaaag

SEQ ID NO: 36024 - DNA, 1039 bp, Zea mays subsp. mexicana
  Clone ID: UC-ZMROTEOSINTE031H07_FLI
acaattcaactctgagcccatggtaccggtacctgccacacctcatcctggtccgtatctagcttattttcagcctgccccgacaccggtatcatcaagctcccttgtcgctgagagaacaatggatggtgctgcatatcatgatcactggaacactctggctgggctatcagatggccgacgaccctgggcgtactatcctcaacccaacagtgataatggtatagctgagcagcaaggactccctctgggggcaatggcggttggaggggttgatagtgaaagccaacaacgaggatctctctccttattttatggaaacgggtctggaagaccaaggatcccaggtgttcctcctatggcaccacaatttacaagagcgcatggcaacataaacgatcagttccagcagacagctagcttatttgctgggtcacagcaatcaggaggtatgcgtccattgggagcattagggccttccgtgccaccacctccggagaacacctccttctgtctgttcccgccagcttcatccgtccccagtacaatggaggccgaggatgtcaacagagcaaaccagttctatgcatgggagagggatcgcctggctccttacccgctgatgcctgttaatagtgaaggtacctggtggagctcttcacaacagcagccccctccggagcctgctgcatctgcttcaaggaggctttctgggcagtggattggtaggttgccattgccaccaccagagaatagatcgccagacggctcgtccttccgtccactgcacatccctcggatgtagcgcaggaactggcaaggcgtaagttaatagtacaaacgtgggaaaccctgttggttgtaagtggtaacgccgctgtaagaaagccccgtcggatggtaaaccttgtgataaaattcaggatgttgaagaaaccgaccctgaggtgaaaacatttttggcccggggtttatgcatttcgatcaagtacatatttccggtcatgttaatgaatttctaagaatcgcagttctgctt

SEQ ID NO: 36025 - DNA, 973 bp, Zea mays subsp. mexicana
  Clone ID: UC-ZMROTEOSINTE031H11_FLI
gtttgatcttcgctggcaagcagctggaggatggccgcacccttgcggattataacatccagaaggagagcaccctccacctggtgctccgtctcaggggtggtatgcagatctttgtgaagacactcactggcaagacaatcacccttgaggtggagtcttcggataccattgacaatgtcaaggccaagatccaggacaaggagggcatcccaccggaccagcagcgcctcatcttcgccggcaagcagctggaggatggccgcaccctggcggattacaacatccagaaggagagcactctccacctggtgctccgcctcaggggtggcatgcagatttttgtgaagacattgactggcaagaccatcaccttggaggtggagagctctgacaccattgacaatgtgaaggccaagatccaggacaaggagggcattcccccagaccagcagcgtctgatctttgcgggcaagcagctggaggatggccgcactctcgcggactacaacatccagaaggagagcacccttcaccttgttctccgcctcaggggtggtatgcagatctttgtaaagaccctgactggaaaaaccataaccctggaggttgagagctcggacaccatcgacaatgtgaaggcgaagatccaggacaaggagggcatccccccggaccagcagcgtctgatcttcgccggcaaacagctggaggatggccgcaccctagcagactacaacatccaaaaggagagcaccctccaccttgtgctccgtctccgtggtggtcagtaagtcatgggtcaagctgccgatgtgcctgcgtcgtctggtgccctctccatatggaggttgtcaaagtatctgctgttcgtgtcatgagtcgtgtcagtgttggtttaataatggaccggttgtgttgtgtgtgcgtactacccagaactatgacaaatcatgaataagtttgttgtttg

SEQ ID NO: 36026 - DNA, 812 bp, Zea mays subsp. mexicana
  Clone ID: UC-ZMROTEOSINTE032A03_FLI
ctgagctcctggccaaagaaccattatttaatggaaaaacagagtttgaacagctagataagatttttagaacacttggcacacctagcgagaagatttggcctggctatgctaaattaccaggcgtgaaagtaaattttgtcaaacaaccgtataataggctaagggataagttcccagctgcatctttttctgggcgaccaatcctgtctgaagctggttttgatctattgaatagactgctaacttatgatcctgataagcgcatatcagcagacgatgctctgaaacacaaatggttctctgaagttcctctgcctaaatcaaaagacttcatgccaacatttcctgctcttaatgaacttgacaggcgtaccaaacgttatctgaagagtcctgatcctctggaagagcaacgtctgaaagaactgcaagggaacataggcaaccgtgggctttttggctgaactaagagtacttgattggattcctgtccgtactaactgttatgcttcaccctgaatccacgaggtcagatgtcttctgaggcttggtgccggtttgagtggataaggtttctccttgtggcccatcatagaaattttgttgcaggattaacactccatccagattgatcataaaagcaaatataaaccgtcttcatcgtaaggtgtgacatgttggctttgaatgggtacaccagtttcacctttggaacttctgtatgtaaaatattccagattggtacgttgtaaacaatccccagtgtgtcggatttaaatttaaataaaacatcatcattattagttttc

SEQ ID NO: 36027 - DNA, 451 bp, Zea mays subsp. mexicana
  Clone ID: UC-ZMROTEOSINTE032B02_FLI
gagagagagagatcgagagcgcggcggaggcgatggcgagcggagggaagggactcaacgcgactggggagttcttccggcggagggacgagtggaggaggcaccctatggcggggaaccagctgcgccacgccacacccgggctcggcatcgccatcgtcgccttcgggatctacctcgtcggcgaggccgcctacaaccgcctctaccgcccctccggcgacaaccaccactagatcgccggcaggatccgtgactcggtcaagaagctggagccaactttaccaagcactggtgctgttgatgtttttacagttttgagctcataaggtcagccatgaccatattgtaatctgtgaccaggtagacttgcccactggtccgtccaactattgtcttgggaccctgtgttaatccttgctatatggatctgacagtgctcatgtaattc

SEQ ID NO: 36028 - DNA, 1069 bp, Zea mays subsp. mexicana
  Clone ID: UC-ZMROTEOSINTE032B08_FLI
cgatgacgacggcagcgggaagagcggcgccgaagttgtgctcaaggggcatgaggcggagggttatggcttgtcatggagcccgatgaaggaggggtggctgctgagcggctcgtatgataagaagatttgtttgtgggacatctcctctgggagtggcgctcctgttctggatgcacaacaggtgtttgtggctcatgaggatctcgttgaagatgttgcttggcacctgaaggatgaacatatatttggatctgttggggatgactgtaagttgatgatgtgggacttgcgtacaaacaaaccagaacaatctattcttgcacatcgaaaggaggtcaactctttgtcattcaatccattcaatgaatggatattggctacagcatctggagacacaactatcaacctatttgacatgcgaaaactatctagaagcttgcatacttttgacagtcatgaggcggaggtgtttcaggttgaatggaatccaaatttggctactgtattagcttcatctgccgcagacaagagagtgatgatatgggatattaataggattggcgatgagcagtcagaggaagacgcagacgacggaccaccggagctgctgttcgttcatggaggccacacagacaagatatcagagctgtcgtggaatcctagcgagaaatgggccattgccagcgtgtctgaagacaacatcctgcagatatgggagatggcagaaagcatatactgtgatgacctctccatgcaggttaactgactcgtgcctcgaagcataaaggtgagttacctgaccaatgatgcaagcgtatctggaggggttatatacctgtatgatttgagagatttcaatttcgctatttttgttcactgcagagtgggcatctataagaactctttaaattcgtgacatgcattaggctatctccagcagatcccctatcacatcctttatgttatcccctattttcaaacttctctctgcaaagagtcagttattgacttgagtaatcttgatagtctgaatctgattgagcctttaggcataaatgtaactttg

SEQ ID NO: 36029 - DNA, 506 bp, Zea mays subsp. mexicana
  Clone ID: UC-ZMROTEOSINTE032C02_FLI
gacgacgccggtgacgccgtcgtcgtcgtcgacgccgcgcggcgccggcaacgtgtggcgcagcgtcttccacccggggagcaacctggccaccaagggcatgggcgccaacctcttcgaccggccgcagcccaactcccccaccgtctacgactggctctacagcgacgagaccaggagcaaccaccgctagatcgggcgagatggatggacagtgaagaggccatgtttgctggtccttgtggttatctaaaacgcatgcatgctctattatagctagtcatcactatatatatacttgtgtttgtgtattgttgttcttgttctgctggtgtttgaggataaagactccgccgtttaagttgacctatgttatggagtgagtgatatatatgccgtcactcctagtatatagtagtgactagttggtatgtgtagtactgtactatcttttctccatatgcatgttttgccagcgcgtaatgaatggaatgtgtactgctact

SEQ ID NO: 36030 - DNA, 970 bp, Zea mays subsp. mexicana
  Clone ID: UC-ZMROTEOSINTE032C06_FLI
aggagcttctcgaagcggagggcgggagcttctccgtggaggagatggtggacttctgcctgtccctgctggtggctgggtacgagaccacctccgtgctcatgacgctcgccgtcaagttcctcaccgagacacccaccgcactggcgcagctcaaggaagagcacgacagcatcagaggggtaaaaggcaaaggccaagctctggaatggagcgattacaagtcgatgccgtttacacaatgcgtgataagcgaaacgctgcgcgtggccaacctgatcagcggggtgttcaggcgtgcgaacaccgacatccacttcaaaggctacgtgatcccaaagggctgcaagatcttcgcgtcgttccgagccgtgcaccttagcctggaccactacgagaacgcccggaccttcgacccttggagatggcagcagggcaagagcaagctgcagagcgcggaaggggccagtctgttcacgccgttcggcggcgggccgcgcctgtgcccgggctacgagctcgcccgggtggtggtttccgtcttcctccaccacctcgtcacgcgctttagctgggaggaagccgaggaggacaggattgtcttcttccccaccacccggaccctcaagggataccccatcatcctacggcggcgaccggattgcgatgatctctgacctcatggctaggttccccccttatcttcttcggatcaaggctgaaggctaagcattagatagagtaaggtggatgtcgtcgtggctagtaggtgcatggtggtttttgccactcactcactcactcactcactcactctgttgtctgtttgttcctgttcctctctgttttctcttgctctgtaacctggacctggtacgagtcagcactcagcagccagcagcaaactcgcgttttgcttgtaaaatctaaaatctgatatgagatgcagatgcccccgcgactgagacgg

SEQ ID NO: 36031 - DNA, 669 bp, Zea mays subsp. mexicana
  Clone ID: UC-ZMROTEOSINTE032D03_FLI
ctttcaccgtattggatgctcctaatatggaattcctattcggacttgacatgctgcgaaagcatcagtgcatgattgacctaaaggacaatgttctcagagtgggaggtggcgaagtttcagtgcccttcttacaagagaaagacatccccgcacacatacgcaatgaagagaaactgtctaagttagggtctctcagccaagcaactggagagtcatcaaggacacgtgagggtactcccaatgcgccacaacaaacccctcctccaggagctccagctgcaaaccctccacagggaggcgattttgaagcgaaagtcacgaagcttgtggagctcggttttgacagggcgtcggtgacacaagcgctcaagctgttcaacgggaatgaggagcaagctgctgcgttcttgtttggtggttagactggtgggaccgtgggagcacccgttcctggctctctgttcgctcaaccctttccagggttgagtacttgaatatttgatacgaaagtgattaacgtatttggatactgtttgtccagtgaaaggacttacttttagaggttttatgttttctcttgtttctgagaaaaacatttgttttctgtacctgatacatagactgatagacaccagaattgagacagaactgtgaagattttttttt

SEQ ID NO: 36032 - DNA, 1139 bp, Zea mays subsp. mexicana
  Clone ID: UC-ZMROTEOSINTE032D11_FLI
caacagtacaaatggctggagcaatttgcagaagagtaccagtgtgataactccttgtggttatttccgaatttctcattttctcttgctactgcacggttttaccttgagtgtgatgcagcgtcagagggttctgatgatgctgacaagtcaacatctcttgatctcatgaagcaagctctgatgcttcatcctatggtgcttcgcaagatagttgacaaggctcctctgaaagactcatcatggacccaaatactcagaaatgtattctttggatcagcaaaaccgggaagcccttcacttgagcatatgatcaatatatatgtggaacgccattatatcatgtggagattcccagaactgcagaacttgctgaaagaggctgctcttttggtgattgaatcactaaagcaggataacagagaagccctggactgggcttgtgttagaaaagaagcattctcgtcagacaagaatgagtactctcatctgcttgtttcagacttcactgacacaacgccgtcgctcccaccagaagaactgcgaccatttatggtcggtccaggaatgttgcatgagatgccacctgttgaacaagaagctggacccgagagactccgtgctcctcgtgaagtcgctgggcgtaatcctgcagtagtcttccttgaatcactgctcccatgggtcgactatggtgacaaccatcaaggtgcaaatgacgatgacaacgacgacgattgatcagttggatgtataaagtggcaaggactcacaattgcgcctgaactattgaatgtgacacatgattaagaaaagttgttgttgctcatagggtcacctcggtactatcaataaccaccacaagtctgcaagccaagtggtcttgtgtttttcatgatggggcagaggcctgaggtatgtatggggatcgaccactaagttgccaaaacatgtataccaaattttagggatcgagtaccatccttgtccgagactttactctatgctaattctgcaaacatagtgaaagggtttaatactttacggtgctgttagaaaatttaccccaggctaggaaagcctttcacaaagaattaaatgtcttatttaaataatatcctcgtggattgttcaccctg

SEQ ID NO: 36033 - DNA, 712 bp, Zea mays subsp. mexicana
  Clone ID: UC-ZMROTEOSINTE032E05_FLI
cacgatctcttcgagaggaagcccaatcccgaaaccgccgccctattccaatggcgcccaaggccgagaagaagcccgccgccaagaagcctgcggaggaggagccggcggcggagaaggccacggcggggaagaagcccaaggccgagaagcggctccccgcgggcaagtccgcaggcaaggagggtggcgagaagaaggggaagaagaaggcaaagaagtcggtggagacgtacaagatctacatcttcaaggtgctgaagcaggtgcacccggacattggcatctcgtccaaggccatgtccatcatgaactccttcatcaacgacatcttcgagaagctggcggcggaggcggccaagctggcgcggtacaacaagaagcctaccattacgtcccgcgagatccagacctccgtccgcctcgtcctccccggcgagctcgccaagcacgccgtctccgagggcaccaaagccgtcaccaagttcaccagctcctaggcgagcgatgcgacgtgcactcgtctcctcttcttgcagtagtaccatagtagtacggttaggtgtgttgccgcggtggtagttgccgctgtgtttgctttctgggctcggttgatgtcttttatgtaagaaagtaactgtattgtgtctgcagtaccttaccatgcatgttttaagtagcatcccataatctataaggaatatgttttaac

SEQ ID NO: 36034 - DNA, 761 bp, Zea mays subsp. mexicana
  Clone ID: UC-ZMROTEOSINTE032E06_FLI
ctctccttcttcagccacctccagttcggcttcccggcgacgctcgtcgtcaccggcatcggcctgctgctcatcagaacctactgatgcgtaccggaagggatatgtctggagggggaagaagaatgtggattctttctcagcgccgtgtatcgcgtcacagactcacaggtcgttttgttcttgttgttgaatttgtgcaaggattcgttcgattgggggatatcatatcatcgtcgctgcctcctgtcctgtaaaatggagaagcgtagcaccacagagatagatagatagatcagcatggtgctcgcttgctcggagctggaggcgttttgggatgcacgtacatacatacatacattcattctctgcttttagtaagaaatctgtgcattatggagtagcacaccatgtatgtatatatcagacataagaaacaaaacaacaaaaaaaggaggtgtatatcatcgtatttctacgtgtaataagccagtgtattcagatcgaataatgttaggaatcgggttaatcagagccagaagtccagaaccgatggggttcttattcttcctcttacttacataatgatgatgattgtgtcagccatgatcgaatggtccagctgctgtttgtttaggtcagttttagtagttctatcagggctttatgtatgtattaataaactgttgtataagctttttttctcgcgttatagcaacagtttttatgagtttataataataaaactctcttgcctcttc

SEQ ID NO: 36035 - DNA, 1587 bp, Zea mays subsp. mexicana
  Clone ID: UC-ZMROTEOSINTE032F10_FLI
ctcccgcctcccagatctcgctcggcgccagttgcctcgcagtttggatcatctcatacctcggcgaagatgagggagatcctgcacatccagggagggcaatgtggcaaccagattggcgccaagttctgggaggtggtgtgtgatgagcatggcattgaccctaccgggcggtacactggcagttccgaccttcagttggagcgtgttaatgtctactacaacgaagcctcctgtggacgctttgttccccgcgctgttctcatggatcttgagcctgggacaatggacagtgtccggactggaccctatgggcagatcttccgccctgacaactttgtgttcgggcaatctggtgctggtaacaattgggctaagggccactacaccgagggtgctgagctcattgactctgttctggatgttgtgaggaaggaagctgagaactgtgactgcttgcaaggattccaagtatgccactcccttggtggtggtactggatctggtatgggtacgctgttgatctcaaagatcagggaggagtaccctgaccgcatgatgttgacattctcagttttcccctcaccgaaagtatctgataccgtggttgagccatacaatgccactctttctgtccaccagttggttgagaatgctgatgagtgcatggttctcgataacgaagccctctatgacatctgcttcaggactcttaagctgaccacccctagctttggtgatctgaaccatttgatctctgcaaccatgagtggagtcacctgctgcctaaggtttcctggtcagctgaactccgacctcaggaagctggcagtgaacctgatccccttcccccgtctccacttcttcatggtcggcttcgcgccgctgacgtcccgtggctcccagcagtaccgggccctcacagtccccgagctcacgcagcagatgtgggatgccaagaacatgatgtgtgccgctgaccctcgccatgggcgttacctcaccgcctcggccatgttccgcgggaagatgagcaccaaggaggttgacgagcagatgatcaacgtccagaacaagaactcgtcctacttcgtggagtggatccccaacaacgtcaagtccagcgtgtgcgacatcccgcccaggggcctgtccatggcgtccaccttcatcggcaactcgacctccatccaggagatgttccggagggtgagcgagcagttcactgccatgttcaggaggaaggctttcttgcattggtacacgggcgagggcatggacgagatggagttcaccgaggccgagagcaacatgaacgacctcgtgtcggagtaccagcagtaccaggacgcgactgccgacgaggaggagtacgaggacgaggaggaggtgcaggccgatgacatgtgaggggagggctgttatcgtgtgaagccttgtggtcctagggcaagcggacctcgatgagttcggtgttccctttcgtgttgttgccatcttgctactgctagcgtacccaccctcgtggcccattccgtcgctgttgacgcatgtatttttcttgtgctatggaaccttgcttttggt

SEQ ID NO: 36036 - DNA, 977 bp, Zea mays subsp. mexicana
  Clone ID: UC-ZMROTEOSINTE032G04_FLI
gcgcctacaagaacattgtcgccgcggacgacttccccgccgagttgcgcaagaagatcacccgcgtcattgacgtgaccaagctcaaggcaaagtatggccagtacgaggcccagcgcaagctcttcgccgagcacgacgtcttcctcggcgacgaccgcatcatcaaccgcctgcccaagatcctcggcaagaccttttacaagaccaccctcaagcgccccgtccccgtcgtgctcaagccaaaggcccgcaaggtcgacggcaagcgcaccaagccccagaagaaggagggcgaggtcaacgccgccacccccgccgagatcgcaaaggagattgaaaaggccctcggctctgcgctcgtcagcctgtcgcccagcacaaacaccgccgtgcgcgtgggcttctccgactggacgcccgagcagattgccgccaacgtcgaggccgtggccggcgctgtcgtcgagaagtgggttccccagcagtggcgcaacgtcaagagcatctacatcaagggcgctgagacggctgctctgcccatctggatgaccgacgagctgtggctcgacgagaaggacgtcattgccgactctgagggcaaggcctctgagaaggccaacattggcaagaagcgcaagaatgtcgaggagcaggccgaggctgcacccgcggccaagaaggctaagaaggctgccaaggaggagaagcccaagcctgacagcaacgacgacaagctggatcagcagatttcggatcgcaagacaagactgagaagcgcaaaggccaaggcggcaaaggcatcagagtaagaaaggacagaaaaaaaaaagacgagagggaagagaaaaaatgatttcatttttacataattatctgtgtgtatgcgcataataaggatgattagatatctggcactggcgttgcggcgtattagatggacagtcaaaaacatatgaatagaagaaatgagaaat

SEQ ID NO: 36037 - DNA, 857 bp, Zea mays subsp. mexicana
  Clone ID: UC-ZMROTEOSINTE032G10_FLI
ggcggccggcggctacctgatccatctgaacaagcatcttggccttataaaatactactgaatttgccttctgcgagtcaccaggcccggctgactggctgagttgttgccgttattacagaccgccgtgatttacctgatcacatatactaataacttctttcttcctgtggcagatttgacttcatatacggcgtgcctttttaccagcgtgggttgacaggaaaagttgcgtgtccggtgttttccaaagaagctgaatgccttcaggattttcaattgaagtcaaattccagaggaacctgccgggagagcatagcagggtgactccgggactctctgctacctgcactgcagccaggcagattggagattggggtggaagcacgggacgacaggaggacgcagaagaagccacggggacccacggcaacggcatgcgcgtgtacgtccaaccccatgcgatcggtctcggtcagcgcgctcactgcgttgcacttgcacgactggatgaaaggatgcgcgtggagtggacaacgacggccttcccgaatcccgttccaaccttacccatgcgtcggtctcggtcagcgcgctcacgggcactgcacgactggatctaacgtggaggtgtggccacacacacacctgcctttgcccttgattcacaccggcctcctaggagaatttttaattctttaatccattttaaacatactttctttttgaaaccaatctctattaagataaactatagcccacatgtttcagtcaaggcatccagacagagctactcattacttctatgcgaacgttttaatgtaaacagttgttttgaaatgtatccggtgtaaacc

SEQ ID NO: 36038 - DNA, 1322 bp, Zea mays subsp. mexicana
  Clone ID: UC-ZMROTEOSINTE033A08_FLI
ggctgatccaagaaggcaaatttgagtggaggaaggaccgggaggatgtgcatatgaacattgaagcggctctaattgaaagggttggtgagccagccaagaagttgcatactgctaggagccgcaatgaccaaattgtgacggatctaaggctatggtgccgtgatgctattgacaagattttgattcgtatcaagcagcttcaggtgtctctggttattttggcttcaaaatatgttgacttaatagtcccaggttatacccatctgcaaagggcgcagcctgttctgctgccacatcttctcttatcatatgttgaacagttggagcgtgatgctggtcggctggtcaactgcagggagcgaatgaatttctgtcctcttggtgcttgtgctttggctggaactggacttcccattgataggtttcaaactgctaaagatttgaaatttacggctccaatgaagaacagcattgatgcagtatcagaccgtgactttgtacttgagtttcttgctgccaattcgattgctgctgttcatctttcgcgaattggtgaagaatgggttctttgggcatcagaggaatttgggtttctgataccaagtgacaaagtttcaactggaagcagcattatgccccagaagaaaaatccagacccaatggagcttgttcgtgggaaatctgctagggttgttggagacctcatgactgttctaaccctctgtaaaggccttccacaggcctacaaccgtgaccttcaggaagacaaggaacccttgtttgacagtgtgaaagctgtattaggaatgcttgaagtatgcacagagtttgctcaaaatatctcttttaattcaaaaagaatacaaagttcacttccagctggttatctggatgcaactacgctggcggattatctcgtgaagaagggagtccctttcagaacttctcacgagatagttggaaggtctgttgctctatgcgtcaacaagaactgtcagctagctgagcttgaattggctgacttaaaatctgtccatcctgtatttgaggacgacgtctatgaatacctgggggttgaaaacgctgtaaacaagttcatatcctatggctctactggttcagaacaagtgaaaaagcagcttgaggattggcgcatccagctcggggtgagctcataagggttggcatggtccaagaaataagctcgcaaattagtgcttgcgatttttgaaggtgtatgttgacgtcgtgaacttctttttctgtgtgtttgttcatacatttcgaaaactggaatgaatgatgtaaacatgttggac

SEQ ID NO: 36039 - DNA, 890 bp, Zea mays subsp. mexicana
  Clone ID: UC-ZMROTEOSINTE033C03_FLI
cattcgagaagccgaagaaaattcgaagacgaggaccagctacactgcggacggacttcgggcatggagggccagttccaggttggcaaggaggaggtcatccaagcatggtacatggacgacagtgaagaggaccagaggcttcctcatcatcgcgagcccaaagaattcatccctctcgacaaactttccgagctaggaatattaagctggcgcctaaatgctgatgattgggagaatgatgagaacctcaagaaaattcgtgaagccaggggttactcttacatggacatttgtgatgtgtgcccagagaagttgccaaattacgaggctaagataaagaatttctttgaagaacacttgcatactgatgaagagatacgagattgccttgagggttgcggctactttgatgtaagggaccaagatgatcagtggatccgtgtagcggtaaagaaagggggcatgatcgttttgcctgcaggaatgtatcaccgctttacgttggatagtgacaactacatcaaggcaatgcgtctatttgtgggcgagcctgtctggacaccatacaatcgtccgcatgaccatctcccggctaggaaggagtacgtcgagaaaatcatcaaccgaggtggaaaccaagcagtcgaagctcgttgagcgtgtccactctacatgtcctcctgccgtctcagcctcttgtgttttacaccctacaactcctagtaccgccgaataagatttgctatctgcaatgtgctcatgccaccgccgtgtgtgccagttaacagtttgcacgaaacccgcttaaaatcttcactagatattttgttatacgaatgaatgacatgtggtgtttgataaatgatgaaacgatgatggttcaaatc

SEQ ID NO: 36040 - DNA, 906 bp, Zea mays subsp. mexicana
  Clone ID: UC-ZMROTEOSINTE033C12_FLI
cggaatcctatggcagtggaagatgccgtcacctcgcctttgttggcagatgatcttcacatgaagcttctctacctggaaaacagagttgcatttgctagattgttctttcctgctgaagccaaggtcgccatgcaaatcgcacaagcagacaccacagaagaattcggcggtatagttgcagttgcagcaagcacttctggtaaactgagggaggtggaccttaatgagacgccagtgacacaaaacaaaaggctccgttcaagggtagatgcactgatgaaaacaggtgaaagtttcaaccatcaaccttttccattgtagtgaacatgctctgcagctatctccagaaaatttagtttggacgcaatcacggattctacgtgtaccgaagtattgtggctatgttcaaaatacatgattgatacaatgtatctgatctggtgttcgcccatttttatccgatgacttcttgcagtggagctgggccgtcggtacttcccgaactgctcgcaggtgctggacaagttcctggaggacgatctgccggaaggtctggaccagttctacctccagaggggcacagccgatgagcagaaggtgaagaggatgcgcttctgcgagctgaaagaggacgtgctgaaggcgtttagcaaggacaaggcagagggcagtgtgttctcgggcctgtcctcgtcgtcgtcgtgctcgccgccccagaagtatgcccagaggtgatcaaggcaccagttttttgccgtatagtttattatcatggtcttcgagacttggacccggacagcatatagggacatgtacacctgtgtatgtatagtgcttacaattggcgtaagtagaactatatatatggaacataaggaaacatggcaggaacaccgggctggg

SEQ ID NO: 36041 - DNA, 1748 bp, Zea mays subsp. mexicana
  Clone ID: UC-ZMROTEOSINTE033D04_FLI
ggcattgtcaataatggctgcaacaagttagactgtagtttctactgtgttagctgtgggaaaatcaactggctaatgaggagtttgcagaaacaacttgcaattgctagggaggcaagaagagttgatgtgctttgtgagaggctgtcattgagccataaaatggtaaaaggatctgaacgttataaggaaataacgagcataatcagctcagctgcgaaaacacttgaaaaagaagttggtggtgcattagatcaggtttctgcgatcaccgggcgtggcattgttaaccggcttacttgtggtgctgaagttcagaagctttgttcaagtgcattagaaattgtagactctacagtggatagcatcttggagttcgagtcaaataatagtccaaaactcttaggtacccagccccaaatcctttttgatgagatcactccattttctgtggtaattgtgttgaactatcaggatagcatcggtaaggagcaggttgatggttccaaagtttggcaccgaagtgccaaggtttgcaactattcatcggagcccacatgccacatactgaggccaaatactaggagcctggtttctggtctgagcccttcaactgaatacttcttcaaggttttgccttttagcagcgtacaggggtttactgagtgggaggcaaaatgcagtacacgcagcctggaccatggcagcagccagtgctcaactcagaactctgagagcatgtgcctcaaagaggatccaatgaagcatcagaaaaaggatttgaatgtgcagaatcatcagagaaccattcaatatgattcacctaaggggtctacaaattcaagtgagaacaatttattatgtgaccggtattccaagcgggctaaggttgcaaggctagatggtgcaagtgacaacgacgaaagccagttgccgccaacttctgaagttttaccgtttgcaagctccaactactctccttccgaagctccaagtaaacctgacttgcttattggcaccccagattcggcctccaagaactatgtggagcagcagtacgagtactgtgtgaaggtggtcagatggttggagcatgaagggcacatggacaatgacttccgtgtgaagttcctcacttggttcagcctgaaggcaacatcgcaggacaggcgaatcgtgggtgccttagtagatgttcttatcggtgatcctgcaagcttggttgcccaactggttgatgcattcaaggatatcatctacaccaaggagaagccctttcaaacacaacagaaggatgcacgctgcaagatttggcactagaaaccttcataactgctctgtgtctttgtgtgacatcatttttctggtaattttctggcgactgaatgatgaactattgaagttatatcacctagcagattgcgtgcggattctgttgagatggatattgtgcactctcttaaaggttataagatgctgtagatgctccatttggcattcaggtccatcagatctctcatttattcattcaaattcagtccgtaggcagactattaatccatgaagacaatcatggtggaaccatgtgctggtaatcatgaacgggttctgagtttaggtttcaactagtaagtagttgaagcttgttagcagacaagcaactgtattcatatgtggaatgctatggtggatctgcaagctaactattgtgaattcatatcatgacttaagagatgtttattattatt

SEQ ID NO: 36042 - DNA, 1042 bp, Zea mays subsp. mexicana
  Clone ID: UC-ZMROTEOSINTE033D05_FLI
ctctggtactcaatttctgaaggtcgaggcgtgaaagaaaaactccgaaggtcgaaatggcggcggcggtgcggcgagcggaggagctggtggagagggagatgggcgggcgcgatgcctcccacgacgccgcgcacgcgctccgcgtccgagaccttgcgctctcgctcgcagccgaagagggcctctccgctcccgaccgcctcctcaccgtggaactggccgctctcctgcacgacgttggagattacaagtataccaagaacaatgtggaggatatgagcgtcgttgagatgtttcttcaagaggtaggattggatgaaggccaaaaggatgaaatagtggcaattattaaggggatggggttcaaaaatgaagtttcaaataaatctattgttgagcccactcttgaatttgcaattgtacaagatgcagatcgcctggatgcaattggggcaattggtattgcaagatgttttacatatggtggtagcaagaacagcgcattacatgatcctagaattctgccacgtgttagcttgtcgaaggaaaagtacatgtccaaggaagagaagcagacatcaatcaatcattttcatgagaagctttttaaactgaaggacatgatgaagacagaggccgggaaaaggagggctgagaaaaggcataggttcatggaggaatttgtggctgaattctacgaagagtggagtggcagggcttgaggttgaacaaccaggttttgagcctatgtcaaagtgtgcagtcggcgaaccatttctcaacaacccatgatgatgttgtctacctgggcctactttttgccgatgaagccaggcaaataaacaatgcaaagcctattagattggatggacaaatcatacggtcctgtgataagcaatcaacccactaccaattccgtggatgaagctgattttttttttcaaacagatgccatggcatcttgctgctgttgtattgaaataatactgctacaatattatcggttacatcacctgaaggtcaagcgttttgccaacac

SEQ ID NO: 36043 - DNA, 1228 bp, Zea mays subsp. mexicana
  Clone ID: UC-ZMROTEOSINTE033D09_FLI
cagaaactgaacataactttcttcgtgttgagattttaaaattactacaacccaatgtcatgggaattgatttcatgaaaatcaatcttgccaatatgggtgacctaagggctggcacaaaatcatggagtcaggaacatgatttccaacttaggctgatatttttgagattctttgcacagatcctgagtggttaccgtaacttcattgatactacttcagcgactggtttcaattctcaagcttttcttaaaaagcgttctcgagcaactaaccagcctgtcgactccatgtcaatgattatgcagtttttggagactcaagggttcttggattatctggagagatgcaacactgcagaagaaaatgcccacaaccttctcgataagttgcaggatgcaaccggaagaggacaaaaccctctaaccatatttccttctcaagtttctgatcctgagattataacaatagccaatcctgagattgaaggactagacaatagacactgctataagaggtttccagcaaatgcaagaacagaagaacaagaagaaaaacgtaagtcaattctagcgttagctagtggggctagtaagcaagtaccgagttctccttctatccgagtaaatgggggcccaaaggcagaaagtctgagcccaagagagagggcggctgagagagaaaggatggttctggacataaaagtgaagctccagggactctggcttcgtcttctgagactaggggcaactgaggatcctctctcatcttttgaatatggcaccatcctagctttgattgagtctgacgcagaaggcatcgggggaagtggttttgttgaatgcatcagagagcatattcattcgggctggcaatgtcgcttgactgatgaacaattcattgctgtaaaagaattgcttaagatggctataactcttgcgaactctcgcaacgacctggcgaccattagagatgctcttgaagtttctgctgaaatgtacagaaaagacccaaacaatgttcaagattatgttcagcgccatctattatcattgtcagtatgggaggagcttcggtatgtcatacttagtgtgaaaacgatcatttccgtattaaattgagcttaattcccaaattcatgtaaatcaatttgctccaacaatgttgatcttgccatttaccttggaacttttcagtagtaagaaagtttatacaaaagataatctat

SEQ ID NO: 36044 - DNA, 1368 bp, Zea mays subsp. mexicana
  Clone ID: UC-ZMROTEOSINTE033F01_FLI
actgaccagacctggccagcccaggcgtggaggtgctcgtctcctccgccgcgccgggaccggcgatgaacggcgggctccctggattccacaatgcgccggcgtcaaaggccgtggtcgtcgccgcaggtctcttctccgtcgcctttggcttccgcggccactccctcaacctcggccttgcctaccagagtgtttatgaaaagctgagtgtatggagactgatcacctcattttttgctttttcgtcaacccccgagctgatctttggagcagtcctgctgtactactttagagtgttcgaacgacaaataggttctaacaagtatgctgtcttcattatcttctcaaccatggtgtcggtactgcttcagatccttgctttaggttacatgaaagatccttctctaaatcctttgacatcaggaccatatggcctcatctttgcatcttatgtgccattcttctttgacattccaatctcaatgaagtttcgcatatttggactgagcttcagtgataagtcatttgtatatttggcaggactccagcttcttttctcatctggaagacgttccattgtacctggactttctggcatattggctgggcttctgtatcgcctgaatacatttggcgtccgtaggttgaagttcccagagttcgcaacatcgctcttctcgcagttgtcattgcccttttcaagcaatccatatcaagggttaccgatcacagaaaatgatggaagcatcccttctcatcaggcacgtcaaattgaggatgcacgcacagctacccaagatcctacggagtcttctattgccgcactggtgtctatgggctttgatcgcagtgcagcaattcaggcgcttgcattgaccaactacgatgtcaatttggcgtcgaacattctgcttgaagcacaagctctacagcaatgataccctggcatcgagtcacaaaagacgggcagatgctctgtacattaatgagcgtgaagtgtttgatactccgattcattcttctgttctagattttatcacaggtttccttgaaacaagccaccgtatatgaacgtgaactatgggaacgaaagacaattgatgcaggagctttctctatttgcttgcagcgattctgaatggtggttgactagtgaatgtctggcagtgtgcattggcaatagtgttggctttaaagattgccagcagattatggtggtttgtggatatgtagccaagtagccaattggtgtcaggaaagaaaagttgctataatcgagaaagcgaaaggttgatgtcaaacagctcgcactgattttcctccagttcccccctttgtggcagagcgagaacttttttcattttt

SEQ ID NO: 36045 - DNA, 1829 bp, Zea mays subsp. mexicana
  Clone ID: UC-ZMROTEOSINTE033F03_FLI
cgcgccgtgtcgcgcccaacgccgtcaccttcaccaccgtcatgtactggctcgcgcgggctggtgacgtcgacggtgcatgcgggtgtgggcggagatgaaggcgaagagcaggcctaccgtcgtcagctacaccgcgtgcgttaagattctgttcgacgccgggagggcagaggaggcgcggagggtgtttaaagagatggtggctgaagggctgcgccccacctgcaagacctacacgttgctcatcgagaatctcgccgacacaggcctgaaacaggaatcaggttactaccgaagagaaagaatgaatatgaaatggcatcttcagtatcatggtcagtgctgatgaagataccttatgtaactatctgttttgtggccttcttgggtgcttcttcaagatggattgaatgttcttatcattagcacaatcgttccagcttcatccatcctcaaccttgaaggctcacttaaacagttctcggctactattgcagaagggctttaccacgagactcggtaattttctgacacatctagccaccatattctgcattcctaattagttctgcatgcaatttgggcaaagcatgggctaaatataatgctgaaacatcgaaaaggatgacaaaataacttgttttaaacttgtcatttcaatccacatccagtcagcaggaaagaactgagctagaggttgaaacatctttagacaagatactgcatatatctacatcagatgaggctaacatagtctagttgtccattaacctagccacctgaatctaaagaacttcatgcatatatattacatagcacgacaacattcatcaaacatgctacatcctctcttgaatctgttagttgaagttcaggcttcacagtcaggccactttcatagccgtcttcagcctctttgcagcttgcacaaagccgacaatgacctgcaactcatccaattgcttcagcatgggcaaaagcaaattggaattaacacaccaaagcagactgtcaggacctaataacatcgtaatgatacaagttattggagtcagaagttaaatttgtttcatcaacctgggctgtgaagtgcctttgaacagcatcaactaactgctctctggatggattaggacatgcatcctgttcagcaaatgcagtcagttagaacaacgaggcataattggatacttgcagttgataatagaggcttatctatgaacttgagctctacttacgagattgaagtgacgccaatatctcagcagtgcagtcagttctagcttgcttaggtcaactttctgcagtgttaccggtcaaaagaatgtaaagatacaagcagcagaagcaatgtggacatgtggtccgaaaataatacgactgagcaaaactagatataaagtcatcaacacagattactgtaaagtgattgttggattccaaccaaatgatgtcaagtccacaacccaaggaagcgaaagtcgcaccgtgtgagctcttgaggaagatgaaacagacgtcttggagtgggagtcacatgacattgaacggctgatggattttctgtggaaacccctatgctgcctgctccgtgaccgctgtaactttggtgatagtgcatcatcggaggctgcaagaaagaaaattaaagaaggcagcatttcagacgcatgtgaccaagttgcaggacatggttaggaagcaacaaaactgtgcctcaatctaaattcaatctgtacaggtccatgacccttatggcatttagatatgtttcagatgttatttaatcaaatgcaatgctaatccctataaggaacgttgtctct

SEQ ID NO: 36046 - DNA, 699 bp, Zea mays subsp. mexicana
  Clone ID: UC-ZMROTEOSINTE033F05_FLI
ccgccgcctcaacctcgctgcgtccgggcagctcgccgtcttccgccccaaggtcgacgagatctccctcctcaccatcaacaccactaccggattcaacccagcttcagctggtggattcatggtagcatttgccggcaggaagtatgcagctagatctattccgatatttgtatccaacacctcagtcacagtgtccagcttcacactggtacttgagttcaacaaaggcagactccaaaacttgcactggaagaaggacggctgtggcgcttgctccggcaagtcgaacttcgtctgcctcggcaaacagacatgcgccatcaggacgcagagctgcaagagccaagggcccgtcgactgcagcatcggcatccagctggctttctctggcacggacaagcacgagtcggttctgaactcgtggtacgaggtgtccaacctgaggcagtactccctctacgggctctactccaacctcaaggacaccctgagcggccagttcaacaagatcttctaggctgctttggtgctgccattgtttattctctcctgctcccatcccgatcattcttaatcctgatgttgcgcgtaacattattttggtttgccgtccaggttgcttgtatccagaccagttttaaccctgtctcagctctaccgtatgtaccattgcccgatggtgtcgttttagtgcct

SEQ ID NO: 36047 - DNA, 594 bp, Zea mays subsp. mexicana
  Clone ID: UC-ZMROTEOSINTE033G04_FLI
cgaagactcagaccccaccacaggcaccggaggaggagaagaaaggcctgctggacaagatcaaggagaagctacccggtggccacaagaagccggaagacgctgccgccgccgccgccgcgccggccgtccacgcgccaccgccgccgccgccgcacgccgaggtcgacgtcagcagccctgatggcaagaagggcttgctgggcaagatcatggacaagatacccggctaccacaagagctcgggtgaagaagaccgcaaggacgccgccggcgagcacaagaccagctcctaaggtcgcagcgtgtgcgtgtccgtcgtacgttctggccggccgggccttattgggcgcgcgatcagaagcgttgcgttggcgtgtgtgtgcttctggtttgctttaattttaccaagtttgtttcaaggtggatcgcgtggtcaaggtccgtgtgctttaaagaccccccggcaccggcagtcagtgttgctgcttgtgtaggctttggtacgtacgggctttatttgcttctaagtcagggtctggatgttgtgtactacgtgggtttgttgaattattatgagcagttgcgtattgt

SEQ ID NO: 36048 - DNA, 1053 bp, Zea mays subsp. mexicana
  Clone ID: UC-ZMROTEOSINTE033G05_FLI
gggaaaccctttctggagattagtaagaaacttacttaagacaccagggaaggagcaagtcgaatgtcaagcaccaaaacctatcttgctagacactggtgaaatgaaggaaccatatgattgggcgcctgcaattcttccaattcagatcataagaatcggccagctggctatcttgtgtgtacctggagaattcacaacaatggctggcaggaggctacgtgatgccgtcaaagctgtacttacaagtgacaacagtggtgaatttaataacattcatgttgttcttgcggggctaacaaatacatattcgcagtatattacaacttttgaagaatatgagatccaaagatacgagggagcgtcgacgttgtatggcccccacacattgagcgcctacattcaggagttccagaaacttgctacagccatggtggcaaacaaagaggtcccgacaaattttcagcccccagacatgttggacaagcaaataggactcctcccaggcgttgtgttcgactccacacctcctggggtggagttcggagatgtcagctcagacgtccccgcaagctcaactttcaggaagggcagcagtgtcgtgaacgctacattctactcggcgtgcccgaggaatgaccttctcacggacggcacgttcgcgctcgttgagaagctggacggcagcaacagctgggttcctgcctacgacgacgacgactggtcactacgcttcaagtggtccagaccgtcgaagctgagcccgagaagcttcgcgacgctggaatggaccgttcctgaagacgccccgtcgggcgtttataggttgaggcattttggtgcctccaaaccactgattgggtccatcaaacattttacggggacctctcgggcgttcgcagtgcgttaggtaggtagcacaccgttgcgttgcgttcgacggcacacctgtcagagaattgacaccgggtcatatatttactttgcatacctgccacagtatatggacatgttttccctatagtttttacatgctcctgatattaataacgc

SEQ ID NO: 36049 - DNA, 1277 bp, Zea mays subsp. mexicana
  Clone ID: UC-ZMROTEOSINTE034B02_FLI
gcttgttttgtccttcaacggcctcacaggcacgatccctgctgagattggatatctgacggcgctccaagaccttgacctgaacaacaaccggctggaaggtgagctgcctgaaaccctgtcgttgctcaaagatctctacgatctttccttgaacagcaacaacttcaccggcggtgtccccaacttccgtagtagcaagctgaccactgttcaattggacggtaacaatttctcgggaggcttccccctgtcattttgcctgttgacatcattggaggtcttggatctatcgagcaaccaactttccggtcagctccctacctgcatatgggacttgcaagacctcgtgttcatggatctgtccagcaatactctttcaggggatgtactggcttcatccacaaactccagtttgtcgttggaatctttgcatctgtcaaataacagattctcaggagagtttccacctgtgatcaagaacatgaagatgctagttgtcctagaccttggtgacaactacttctctggtgaaatcccatcgtgggtagggtcagggtcaccattgctacgaatcctccggttgcggtccaacatgttcagtggcagtagtattcccttggagctactacagctctcccacctccgatttctggacctggctagcaacaatttgcagggaccaataccacatggtctcgctagcttaacgtccatgggggtgcagccacagactgaattcgacatcagatcgggagtccatcaccagatcttaaacctagaagcagacttctcttatgccgatcgagttgacgtgagctggaagacacacacttatgaatttcaaggagcgattgcgctgatgaccggtatagacttgtcaggcaattctatcggtggtgaaattccaaccgagataacaaaccttcaaggccttcggtttctgaacttatcaagaaataatctctctggtactattccagctaacgttggagatttaaaactactcgagtcccttgacctctcatggaatgaactgtctggtctcattccttcaggcatctcagaactcacgtctcttagttcactgaatctctctaacaatatgctctcaggtgagataccaactggtaatcaactccaaacgctagccgatccttcaatttacagcaacaactatggtctttgtggctttccgttgagtatatcatgtcccaacagttcaggtgtacaagtattggacaggagtaataaagaaattgaaggtgtgtatgtct

SEQ ID NO: 36050 - DNA, 1349 bp, Zea mays subsp. mexicana
  Clone ID: UC-ZMROTEOSINTE034B05_FLI
atcccactgaatttattctggaaactttggaacaaagtgatccacaatcattgatacaatatcttgcttaccaagatttgtgtgtggtatctgagtgtaacttggaaccgtggcgcagagctgctttctttgaggaatctggtgaaacttatagaagaattgtgacagcttgtttgaagccacttgaggagtttacttcaaaaattgctgaagcccttgaaggtttttctagtgatcagccagaattgatgctacaacagtccagactctttagtgcatttgatgattcccagatatgcacatggtgtgctaggacactggctggattaactgcacgctcacgcaaggaggatcgatatggtgttgctcaactgactggctgcaatgccgctgtgatgacaacattgctgtctgccctagtagcaatcgagacatgtttaggaaagaaaacaaacccacagcctgtgcgctcactgggacctgaaaacattaggtggactaacctctccacaggacgaaaaggcaatggagttgcaattgcaagcacacaaaaaagtggcctgcacaagaaagcttatatcatggcagatgttcttcggacttctgtttatcatatactttcagcattcattgatgacctgcaagctaatgcaaaaccatccagcttagagaagaactggatcagtgaagggagaaagcctgtatatggttcacaagccgtgttggttcagaagttgattctgtttattgagtaccgagctgtatgaacttggttccatgtctctcagatcctttgcctgcacatcagatcatacttggatggaagtgttttagttctcgaacttggttgaagaacctttgctttccaccagagcctataaagatgcatcgtaaactaacagtttcaccagagcctataaagatgcatcgtaaactaacagtttctcaatatggacttctggcttctgtattcctgtgggctggtgcactgcggaaggcaccgccgctcaggccttgtttcgagtctggttatccactcaggccttctattctgacttgtactttgaaagttgaatagagttacctgtgttgtagcatggagatggtatgtgaaagatttgcgatttttgatatccacgtaccaaatagatttatgacacagactgttagtactgtctaactacaccttggaacgaggggcatattcaggccctgtttgggaacatagtttttaaaaaccacattattatgatatcatggtgtttcaattgtcgtgctgtaaccatgaattgtaatttcaattgaacacctgtttgtagacagtattttggttagcatggttttggatc

SEQ ID NO: 36051 - DNA, 577 bp, Zea mays subsp. mexicana
  Clone ID: UC-ZMROTEOSINTE034B07_FLI
gccaacctgccggtgcgcttcacagtcaacgagcacaaccccaaccagaagatcggcatgtactacgatgaggtcgtcgcgtcggtgttctacggcgaccagctcgtcgcgacggggtccgtcatgcaccccttctaccaggtgcccaagggagacacgcccgtgcaggggaccctcaccgccaggggccccgtcccgtcggacccgtcgtgggggcggttcgccggcgaggtgtcggcggggagcgtcggcatgcggctggagctcagctccaagctgcagttccaggcgaagatgtgggacagcaagaatcaccacatcaaggtggagtgcgacttcactatgcaaggggatgggacgctccgtaagcaggacaaggactcccagtgcacgctctacttctagcgtgatcgccctgcttcttgaattggtgcaggctgacccctttcaactaaccttgatttcaaggttgtatttactgtgtgctttttccctgcatttggctgatgtttgtgattgttgtggtgccattatttgtaacacacgcgtgtcacttcaagagaatattttctcctcg

SEQ ID NO: 36052 - DNA, 716 bp, Zea mays subsp. mexicana
  Clone ID: UC-ZMROTEOSINTE034C01_FLI
cgaccgaccccaagccaaaggaccaaagcaaggctaggcaagcagcgtcactgaagcggaaaacgcgtcgccttcaccagtctccactccagagagaggagagctttgattgctggtggtctggtcggcggcggcgatggagcccctggaggtggccataacgatcatattcgacgcgctgctgctggtgttcatggtcaagctcttcttcgccatgttccagatgaagctcgtcgtcatcctcttctacctcgtcatcctcctcttcgccatggccttctccggccgggcgcccagcagcttctagctcgacgatcgtagcagcaggtggcaaaaattgaagcttttcttctccctcccccctctttcgtttcttctcccccctcttggtcttggagggtggaccggtggagtcgtgcagcgctacgtacgtcctgtgaaaaaagactatatcatctcggtttttggtggatggctagctaatttatttctctctaggaaaagaataagaagaagcgcgcatgatcctaggcgcaaattgcgtaagcgtgaagagagagaaattagtcagtctagagcttcgatctcccgcgtctcatgcttctattttccatgtatgtaattcgtgctgtacctcctgcctttttgttacgggtttcgtggatcacagggcagtggtgcatatgaaaagagatggacacggttttcttccttgg

SEQ ID NO: 36053 - DNA, 970 bp, Zea mays subsp. mexicana
  Clone ID: UC-ZMROTEOSINTE034D09_FLI
gactgctgggaagtggctgacactcactgcagctcgttctttcctggttacaagttcccgttggaccttgttctccggattgatcgttacattgctctcctctctggattttcagttccacccgggtgcatgaggacttgccttgtggccgtcaattctaattctgtaaatagtagtttcaacatcgagtgtggagatgctactgatgccaactttgagaaatacaatctcagtagaggctccgtagctggcattcttacacttgatacagtggcagactatcttccgagaaggggacccctgaagcagagaaggacaggtattgcgtatatagcaaacgttgcggtgcggaaggaggagcggcggaaagggatcgcgaagatgttggtccaagaagcagaggctcgggcaaggagctggggatgccggtcgatggcactgcactgcgacgtaaacaacgtggccgcgctacgcctgtacagaaaccaaggcttcaagtgcatacgcgtgccggaaggagctaaatggcccgaacccaagatagctaaaggagcggagtacaacttcatgatgaagctagtggccaaggcttgagtcttgagccgtataagatctgactagggaaaaaaaggtaaaggtttggccgtgtaggttatgcacggatgcacgatttgctctccattcatgtgtacagcatttggtgtatagtggaagctactttgtaaatggtatatataacagctacgtgttggtccatagtggggaactgagggtgtcggtgtttaaaccatccccagtccttgtgttgttgtgttatgttcttcagattctacaaggttccagccagccagaaggctgctggggcgaactgccagttctaaattgtcttttttttttgctggagatacagaccggctgtcatatacggctggtttgataataaaagaattaaagggatatatgagggagg

SEQ ID NO: 36054 - DNA, 970 bp, Zea mays subsp. mexicana
  Clone ID: UC-ZMROTEOSINTE034E09_FLI
ctcgggatcgacgtctcccgcacctcctcgcgcccgttccgggctccgcatccggcccctccccgtccccaaccccattccgcagcaggcgaccagcacaacatcccgaaacccccgccgccccccgcacgcacaaggttattatgtctgggatggcatctgatgattcacctgcccaagtgaatgttgaaggagatgtttcagagaaaaaagttgaacttgaagaccagaatgaagtgggtgggatgccctcacgacaagaggaggaggcagcaattaagaaaaagtatggaggaatattgcccagaaagactccgcttatatctaaggatcatgaacgtgcttactttgattctgctgattgggctctaggaaagcaaggtggtgttcccaacaagcctaaaggtcctcttgaggcactccgacccaagcttcagcctacgcaacagaatgctcgcgcccgccgaacttcatatgcgtctgcggacagtgacgagactttgaatctgtcccccgaggatctggtcccgcaaggagaacccagccagcagggagaaccagtcgaggacaagaacaaggaataagcacacaagatgccattttccgccgtcgcacaaaaaaaaaaaaaaacttcttttgccttggtaataagcgtgtggattcggttccggcccaacggtcccggtgaggctgaggttgagacacgtgcagcttgaactgcatgtgagatgtggtatccgctgcactgggctgttgggggtccttgggatgcatggaacaaataaacaatgatgcttgcgatgtttacattgctgtacctggacctgtgttacctctatgcaaacacatgcaaatccgatggtccgagactcgaaactctcccgttgagctgaaggagttgctgtactaataataatgaagatttttttgttctgatgttgcctatagatgcatcgcaatggtttctttt

SEQ ID NO: 36055 - DNA, 553 bp, Zea mays subsp. mexicana
  Clone ID: UC-ZMROTEOSINTE034H03_FLI
gccccactgcagcatcttatagctgaggggctgctgcattctggatcagaggccaaaaaactagctgaggacattgctacgaggtgggtgagaacgaactacgccgcttacaaagcaacgggtgcgatgcatgagaagtacgatgttgaggcttgtggagaatctggaggcggtggagaatacaagccccagactggttttggctggtccaatggcgtggtgttgtcattcttggaagaattcgggtggccagagggcaaggaaatagcttgttgagcggcgaagcgctcacgacagggtggatctggtctcgcggagagcaatctggttaggcatcgttcatgtcacacttgtagctacgagagtggcgcattgccttctgcagacatgcaagttttgcattgccttctgcagttcgtcaagtgcgtttgtgtgttctattgtttgcttttagttgcgactaggctgtaggagatccttcttgtatcacaacaatatatgtactgctactgtaccggccccggcctcttgtttaatctgaattgctcattgt

SEQ ID NO: 36056 - DNA, 497 bp, Zea mays subsp. mexicana
  Clone ID: UC-ZMROTEOSINTE034H05_FLI
cgaccagtcgcaggattcgatcaagttcgtgcaaaggttggtgatggcggagtacaacaaaacgagggccatcatccctgcagacgacgattactcctccaaccgttctcaaatcatggtgtggcgtgtcgacacaacgctgctctagctagccctcttgccacgctaagagcgatagataaagatgcatgcatgcttaaaataaacattccatgacttattacatagtaatgccatacacgtacgtatgtatatgtaaacttttgctgcattagaattatatatatagggaaaagaatggcaagcagcagtctgcatcagtcgttgtcgtcgaaatgctcaaggcaacgcatcgcatcgcatcatcctcttgcttgcctgcgtgcaatccttttcttgtccgccctgcattgcatgtccctttttctttttcttcttgtttgccttgtgcggctatctgtcttgcaacccggcctgaagaaaaggaattcgatttc

SEQ ID NO: 36057 - DNA, 831 bp, Zea mays subsp. mexicana
  Clone ID: UC-ZMROTEOSINTE034H11_FLI
ggaacccagacactcttaaaaagttaaatgaggctgagaaagcaaagaaagagttagagcaacaagagtattatgatccaaaattggcagatgaggagagagagaaaggcaacgagttcttcaaggagcaaaaatacccagaagcaataaaacactacacggaggctctcaagagaaacccgaaggatcctagggtttatagcaatagggccgcctgctacaccaagttaggagccatgcctgaaggtcttaaagacgcagaaaagtgtcttgaacttgaccccaccttcaccaaagggtatacgaggaaaggtgcaattcagttcttcatgaaagaatatgacaaggccgtggaaacctaccaggctggcttgaagcatgacccgaacaaccaggaactgcttgatggtgttaagaggtgtgttgaacagatcaacaaggccaacagaggtgaaataagccaggacgaattgcaagaaagacagaacaaagctatgcaagacccagagatccagaacattcttaccgaccctatcatgcgacaggttctaatagatttccaggagaacccaagtgcggcccaggagcacctgaagaaccccggggttatgcagaagattcagaagcttgtaagtgctgggatagttcagatgagatgatcgagcgatgcgatgattggctttgttcgttcacgtgcaccctggtcatacatatgttttaacaagcagcagcggcataagaatgaacctgttcgggggctaatcttatcccatttggattgtaagtgcattgacattggataattcatgtttgtggcactgagtttcgagt

SEQ ID NO: 36058 - DNA, 609 bp, Zea mays subsp. mexicana
  Clone ID: UC-ZMROTEOSINTE035B07_FLI
ttctcctccaccgccactattttctctctctccaaactcccgccatcatcagccaatctcgcccacgccatcaaaaccaaccaccatccttgcgttgctcccatcgccctcctccgagacctcataaaccacaaacactactcctttccacaacgatcacagcacaccatgcctcgcgaagagtaccaggtccccaccacctccggcggcgcctcagccggagccatgacccgtggtgcaaccggcggagagcgacacgacagccgtgccgtcatgacctacatctgcggcgactgcggcggcaacgtcacccttagcaaggatgcgctggttgcctgccctcactgcgctgggcgcgtgctctacaaggagcgcactaagcgaatggtgcaattcgaggctcgatagacgggcgagtggcaaggagaatattacattcgagacggcatgaggagatgaaagcaccaaaattgagaaaaacaacaaaatcatagatcacactcgaggagtttttgggatacaactagggataatcaaagagcacaaaggagtcagagaaacttattacttgggaaattttttttaaatctaactttgatattacttctt

SEQ ID NO: 36059 - DNA, 590 bp, Zea mays subsp. mexicana
  Clone ID: UC-ZMROTEOSINTE035C01_FLI
atgattcctcctccgtattaccatcctgcttttgtaccaatgccctgctacggttatgttccgttttactgtgagccacaaggtgctgcacaggctccgcatgaggttgtcaagccagtggctgtgcactcagcgcctccgctaaacgccaaagatctttacaacatgtctgaattgagcctgaagggcgactcgaatgcaaatggtggtgtgcctgcttcccccttgcctcctaagccgatcggtagaccagagaggcaatctgctttccatggcaaaggacctacacctaccggtggctcgtcaggtggactgattcctgcagtcaagtgaattcgattatgctcctaaacatgccttcatgtgtatgtaatacttagaagatagccaaatcgtaatagccgcctgtgctgctaaaatggtggtgtgttttcttgcaaaatatctatactgctcattttagccttcaccagtttggaagtcatgatccgagggtaaatatattgttagcttgttgtttttgcaatagtcttcttttttccccatcaatttgccccaattttcttcatcaatccttaaagttatcaatt

SEQ ID NO: 36060 - DNA, 733 bp, Zea mays subsp. mexicana
  Clone ID: UC-ZMROTEOSINTE035G04_FLI
tttttaaggaatctcctccttcaaaacaaagcattgcagctttcaaggaatatcctcctccttcgaaacaaagcattgcagtttttaaggaatctcctccattggaggaaactagtcctaaagaagctgttgtgctaagtgaccgaggacttttcagtgtgcagaaccatcaattatctcatgtaacagaagatgttcagaatctgaaatcaaagctcaacaatctcgaatcaaaactggaagaggctggaaagatgataataaggctaaaagaagagagcagaagtaccacccaggagcgggataagctacagcaagaaatggtattcctaagaaagaagggaaccccaaggagtcaagtgggtttccccttgctgtttgtggtctacgtcgcgcttcttggtaccttactcggttacctgctccgtctatgaattcagaactctaagaaaacaaaaaagttcagcagctgggatgcctcatatgcggcaagagaactgaattgaacggcagttgcactctaaaatgttggagaggtgaatttatttgcattattagttcaggacttcgtatggttttttgcacataacagcagtaccaaactaccagcagttgcgtgcatatatagaacagttttttttttttttggcgttgtatagaaccgacccaaaagatggctgctgtcttgtagactaattatggggattcttcctatgcctaagctttctctttt

SEQ ID NO: 36061 - DNA, 529 bp, Zea mays subsp. mexicana
  Clone ID: UC-ZMROTEOSINTE035G05_FLI
ggtgttcgcgctcaagaaggacggctcgggcgggacagtgatcgactccggcacgagcctcaccaccttaccggaggccgtgtttgagctcctccaggaggagctcgtggcgcagtttccgctgccccgctacgacaacacctcggaggtcggcgacaggttgtgcttccgccggccgaaaggtgggaagcaggtgcccgtgccgaagctgatcttgcacctggcgggcgcggacatggatttgccccgcgacaactacttcgtggaggacccggacagcggggtgatgtgcctgcagatcaacggcgcggaagacaccatggtgctcataggcaacttccagcagcagaacatgcacgtcgtctacgacgtggagaacaacaagctgctcttcgcgcctgcgcagtgcgacaagctgtgagtgaccaactcacttgctagcttgtgcgtacgtacgtacgcgctgcacatgtgcatgtgtatgactgtatgcttctacggctcgacctatgtgttgttagtgctaaat

SEQ ID NO: 36062 - DNA, 1241 bp, Zea mays subsp. mexicana
  Clone ID: UC-ZMROTEOSINTE035G09_FLI
gagaattcgaagaggagacttctccagtcaagcttaacccagctgagaagttcctcaaggcagtgcttgatgtgccttttgccttcaaaagagttgatgcgatgctttacatcgcgaactttgattcagaggtcaattacctgaagaagtcgttcgagaccctcgaggctgcttgcgacgagcttagaagcagcagactatttcttaagctacttgaagcagttctcaagaccggcaacaggatgaacgttggcacaaaccgcggggacgcgcacgcgttcaagctcgacactctgctcaaactggttgacgtcaaaggcaccgacggacacacgacccttctgcacttcgtcgtgcaggagatcatccggacggagggctcccgtcagtccggcagcacccaaacaaccccaagaacccaggcgaaccctctgcgagaagagctcgagtgcaagaagctaggcctccaggcagtggccggcctcgccaacgagctgagcagcgtgaagaaggcagccggcatggactcggacgtgctcagcagctacgtcaccaaactcgccggaggaatagagaaggtcaccgaggtggtgctgcggctgaagaacgaagggacggagtcaagggacggcgcgtggcggttccacgacaggatgcagaggttcctgaagaaggcggacggcgagataatcaggatccagtgccaggagagcgtggcgctgtcgctcgtgaaggagatcaccgagtacttccacggcgactccgccaaggaggaggcccacccgttcaggatcttcatggtcgtcagggacttcctcgcggtcctcgaccaggtctgcagggaagtgggcagggtcaacgagcgtaccatcgccagctccgcgcgccacttccccgtgccggttaacccaacgacgccgcagctgttcccacggcttcatgctttgagagctgggttctccgacgacgacgagagttcagccgcttcagtgtcgtcgccgtgatcgctggtagtctgccattttttttttaaatttttccgcggaccgtcagtagcacaccgccacgcccagggggcgcgcgggcagagggattcagatggtagcgggctgctgccctttttttctcacacacttttgtacctgtagattatagaatgtacaatgttttttgcaaatatttgtctctgtatgtaagaagggataaggcctagatcagaagagggaataagcagttcatct

SEQ ID NO: 36063 - DNA, 1341 bp, Zea mays subsp. mexicana
  Clone ID: UC-ZMROTEOSINTE036A06_FLI
tgaacagaaggctgcagagctcataagaatcattattagccttgtggctatgtgccattcacttggggttatgcaccgtgatctaaagccagaaaacttcctcctttgggataaagaagatgacctgtcaataaaagcaatcgattttggtctatctgtgttcttcaaaccaggtcaggttttcactgagctggttggaagtccatactatgttgctcctgaggtactacacaaacggtatggaccagaagcggatgtgtggtcagctggagtgatactgtatgttttgcttagtggggtgccacctttttgggcagagacgcaacaaggtatatttgatgctgtcttgaaggggcacattgattttgactcggacccatggcctaagatatctgaaagtgcaaagaatctcataaggaagatgctctgcccttgtccttcagagcgtctgaaagcccatgaagtactacgccatccttggatctgtgaaaatggagtggctactgatcaggctcttgatcccggtgttctctctcgtctcaaacaattctctgcaatgaacaaattaaagaagttggctctgagagtgatagctgaacgactttctgaggaggagattgctgggttaagacaaatgttcaaggcagtggacgttcaaaatagaggcgtaattacttttggtgaacttagacaaggtttagaaagatatggtagcgaattggagaatagagaaattagtgatataatggaagtggctgataatgacaataatgtgaccatcaattatgaagaatttatcgctgcaactgtgcctcttaacaaaatagaacgtgaggagcacctgatggcagcttttacctacttcgacaaagatggaagtggttatatcacagttgacaagctgcaacgagcttgtggagaacatgacatggatgacactttccttgaagagataattttagaagttgaccaaaacaatgacggtcagattgactacgccgaattcgtagccatgatgcaaggcagcaaagttggacttgggtggcaacaaatggaaaccactctgaatgtaaccttgagagatgcacctcaagtacactgtcactgacgcgctcgccatgtacagattttgttctcttctcgtgttcatcgtttctccacacgacctgagagttccggtcgacatggcatgtatcacgaggagagagcaaatcaatcgattcatttagtggtatttatcccaaataaagtgtgggctggcaggcagaatatggtttgtcatgagagacactagtatgggtttatatgtataaatatatagtagtggtggtatattggttt

SEQ ID NO: 36064 - DNA, 422 bp, Zea mays subsp. mexicana
  Clone ID: UC-ZMROTEOSINTE036A11_FLI
atgaaccccgccgtgtccttcggccccgccctcgtcagctgggagtggggctaccagtgggtgtactgggtcgggcccctcatcggcggcggactcgccggcgtcatctacgagctgctcttcatctcccacacccacgagcagctcccctccaccgactactaaaagccgaagccgaccgacccagggggtgcgcagcgcagctagcatccagctctctctccccgctcgccgtcgatcgtttagtttatctcgtgcacgtgcatgcatcgtcgactgtctcaggccgccgctgcgccggcgccgctcgcatcgtttgcttttccttggaccaccagcagtcgtcgccgtcaggttgagctgcttgtaaccgtgaattccggacccgtttgcttctgtaagatttgtgcatttgcctgagt

SEQ ID NO: 36065 - DNA, 1206 bp, Zea mays subsp. mexicana
  Clone ID: UC-ZMROTEOSINTE036B01_FLI
gagaatgtggcgagggagatcataaaccaccgctcgttgcggcaccccaacatcatccgcttcaaggaggtcgtgctcacgcccacgcacctcgctatcgtcatggagtacgccgccggcggcgagcttttcgacaggatctgcagcgccgggaggttcagcgaggacgaggcgaggtatttcttccagcagcttatctgcggtgtcagctactgccacttcatgcaaatttgtcaccgggacttgaagctggagaacacgctgttggatggcagcccggcgccgcgcctaaagatctgcgactttggctactctaagtcatcgctgctgcactcaaagcctaaatccacggttggaactccggcgtacattgctccggaggtactctctcgccgggaatacgacggcaagatggcagacgtttggtcttgtggagtgactctttacgtgatgctggttggtgcatacccttttgaggaccccgatgatcccaagaatttcagaaaaacgattgggagaatagtgtcaattcaataccagataccagagtatgtccacatatcccaggattgcagacagctccttgctaggatcttcgtcgcaaatcctgcaaagagaataacaattagggagattaggaatcacccctggttcctgaagaatttgcccagagagcttacagaagctgcacaagcgaagtactacaagaaggacaacggtgcccccaccttctctgatcaaacagtcgaagagatcatgaagatcgtagaggaggcccgcacgccgccccagtcgcctgctccagtggctggttttggttgggcagaggaagaagagcaggaagatgggaagaaacctgaggatgacgagcaggatggggaggatgagcaatacgacggcgaggacgagtatgacaaacaggtgaagcaagtacatgccagcggggactttcgacacctaataaaatgaagctcctagcaagaccgagttctcaactgatgagatactgtctggttttgctgtagtttgtggtgctaagatgatgcaccctcggtgcttacgtagtaacttctgtctggattcacctttttttcgcatattgtgttaatactctgtaaattatcaaactggcttcctcaatgctcgtgtaattaaatgaaccgttgagtgattaagctagaaggcaaaatatactttctatggagt

SEQ ID NO: 36066 - DNA, 973 bp, Zea mays subsp. mexicana
  Clone ID: UC-ZMROTEOSINTE036B03_FLI
caagaaccggctagaaggcctccgccaatgggccagcggtacgacccagagccatgctggaggcagtcccggccgccgcaggaactgagcaccgggcagacaaaggagcagttcgtcgcggagatgcttgccagaccctcgagcgtggagtcgggccccgggagaccgcaggcgaggcctaggcagcagcaccaggacaccccagcagctcaagccaggccgcagccggctgcgtccgaggtgagcgtctcgtgcctccgtcgttaaaaaccgtacgtgctgatccgaatctgatcgccgcgaagtctggttgtctgagttccgctcgatctgtctgcagaaaccggcggctcaactcgacgcgaactctgtgcgagcgaagctggagctcgcgaagaacgccaagctcgaggcgaccaagaggaagctccaggaagggtaccaagaatccgataacggtatgcgtgctgctgctgctgctatgggtataggatatccatccttcattgtgctggtggttcatgcattgtgctgtgctgcttgatggaccgagaatctgatctccattttttttttcggttctctgcttcgcgccaccgcagcgaagaagcagaggaacgtacagatggtgggtccgcagaacctgcccaagcaagggaacacgaacaacaaccgtagtttccagcctagcggtagcggcaagccaaggagtagcggcaacgtcaatagcaacaggaactggtcaagatgagaggcaccgattccgattccaattccttcaagagcggcaggatcccttttctttttctttttacatcggctacaacaatttttagtctaggccagtagtacataaacagcaataaggcttgtttctgaattgcatgtttggcatgtcacaatgctcggctggctggtctttgccgatgaaacctgtaaagataacactaccaaattctgatcttgagctagg

SEQ ID NO: 36067 - DNA, 633 bp, Zea mays subsp. mexicana
  Clone ID: UC-ZMROTEOSINTE036C07_FLI
atggggctggatattggcccagattccattgctgcattcaacgcagccctggaaacaacccagactgtcatctggaacgggcccatgggtgtttttgaatatgacaagttcgctgtaggaactgaggctgtggcaaagaagttggcagaacttagccgcaagggagtgacaactatcatcggaggtggagactctgtcgccgccgttgagaaggtcggagttgctgacgttatgagccacatttccaccggaggtggtgccagcttggaattgttggaaggaaaggagcttccaggagttactgcattggatgaagcagccactgtgactgtatgaagcaagttttcattttgtttcatcttcttttttggaagttaccgggggagggactcccacctgaataaggtgcgcaaggccaggattgttggctcaaccacagggagcgcacgccaccgcatcatcttcatgtaccattgtatacttgctacattcttgcttgctcctcctcagccgctcgaaatgtaggagatcaatgatttatagagctctggaaatcgtttaaacaaggagtaagcgacccaagtaatatgtgcttactgagtcatctttcctttgtgacgtaacaaattacat

SEQ ID NO: 36068 - DNA, 1260 bp, Zea mays subsp. mexicana
  Clone ID: UC-ZMROTEOSINTE036E10_FLI
ggttgatgagatgaatgaaaaggcgagtcataccccagattttagaagttcagtgggctctgataggaagaaacttaaaatttccagcaacagatatgtttcaagaggatctaggaacgaagatgtgcatacacgacactctcctcaagattattcacattctaagcaagaacgaagtagccacaacatgaattatgagtacagacgacataaaagagattcttcagcagcagataagcaccgaagacaagatgttggagatacaaatgacagacaattttcaacaatgggaaatgacagcaagtcccataggcataagcatgaagaacggcatagaagtgatcatggtaatggagaaaaagaagatgacagcaaaactaggcctaggaagcactgttctgttaggcgtggaagtttggaggttggatattctgactggtctccagacttcactggtacagacatcagcaagggtccttcaggtgagaagtccactagcaggtatgatgatgccaaagggagcaggaggggatcatcagagtattacaatcttgaaagacaccactctacagctcaaaaacaatcaagaaatgagcacagcactacaagacgcaggagacatgacattgaagattatcatgatgaaaaaaatgacggaagaggggaatcccgaaagcataaccgccatgaatcaaacgaccggtgggtagccacaaatagtgatgttgattcggatgtagatagatatcagagttcaagctgtaaaggcactaggttgggaaggaaggatgatgatccaggcattgaagttcggcatcagaggtcaggtagaagtacgaaggatgacaagagaaggaaacatcacagtggaaacaggtggcacagcggcactgaagagggtacctcagattcaagcggtggagatttgagctctgattcgtggagtggtagatcgagaaacagtgagaacttttcagcacacaggtcaaagaggaagcgaagtcggagcaaggagtctggttagttgtaaatagttatggagtgtttggtttgaggaattatatagtccatcatcttctcactcctcacttttttgtttggtttgtggaatggagtgagttaatccatcaccacctcaatccttatagttagttgtttagtattaatatgtggaatggagtcatcccactaaatttgaggaatggacccatgatgcatcactttattttggatagagtgattcatcaaaccaaacacctc

SEQ ID NO: 36069 - DNA, 616 bp, Zea mays subsp. mexicana
  Clone ID: UC-ZMROTEOSINTE036F01_FLI
cgacggtggtcgtggacgggacgctgtacatgctggagcagtccatgggcacgaagctgatgatgtggcgggaggacgccaaggagtgggccatgctcggcaggctctccgacaaggtcacgagacccccctgcgcgctcgtggcaatcggcaggaagattcatgtggtcggaagagggctgagcatggtgaccgtggatgtggacacggcggcaagggtggacgggttcctggttaccacatctgtaggcccgttggtggaggaagacctgaccccggagaggtgcgtggtgatcaccatctgaaggggtgtgcgtgtccaagcttccttgacgccgggtgtattgtggtaactgtgactgactatcgtcgctggcaccgaacatttggctagctagcgtggatgatatatactgcgatgtgagtgaattcaataagaggcttggctctccatacagccaataactatagttagcatttgtctctggttctcgtgttgtttgggctgcttttgtcgaatgctggctgtaagaacaatatttgagctttgtttgttgagtactgtgcgtcccagatggatgggattaatacaagctaatgtgatcctcgtcctggc

SEQ ID NO: 36070 - DNA, 1653 bp, Zea mays subsp. mexicana
  Clone ID: UC-ZMROTEOSINTE036G06_FLI
cgagcagaaaccacaccactctactgacgcccgacgagcagtgtaacattttccttcagccatgggtaaggagaagactcacatcaacattgtggtcattggccatgtcgactctggcaagtcgaccaccactggccacctgatctacaagcttggaggtattgacaagcgagtgattgagaggttcgagaaagaggccgccgagatgaacaagcggtcattcaagtatgcgtgggtgcttgacaagctcaaggctgagcgtgagagaggtattacaattgatattgccctgtggaagttcgagaccaccaagtactactgcactgttattgatgccccgggacaccgtgacttcatcaagaatatgatcactggcacttcccaagctgactgtgctgttcttatcattgactcaaccactggtggttttgaggctggtatctccaaggatggccagacccgtgagcatgctctccttgctttcacacttggtgtgaagcagatgatttgctgctgcaacaagatggatgctactacacccaagtattcaaaggcccgttatgatgagattgtgaaggaagtctcttcctacctgaagaaggttggatacaaccctgataagatccacttcgttccaatctctggttttgaaggtgacaacatgattgagaggtccaccaaccttgactggtacaagggcccaaccctacttgaggctctggacttgatcaatgagccaaagaggccttcagacaagcccctgcgtctcccccttcaggatgtgtacaagattggtggtattggaactgtccctgttggacgtgttgagactggtgtaattaagcctggtatggttgttacttttgggcctactggtcttactactgaggttaagtccgttgagatgcaccatgaggctctccaggaggcccttcccggtgacaatgttggcttcaacgtgaagaatgttgctgtgaaggatctgaagcgtgggtatgtggcctccaactccaaggatgaccctgccaaggaggctgctagcttcacctcccaggtcatcatcatgaaccaccctggccagattggcaatggctatgccccagttctggactgccacacctcacacattgctgtcaagtttgctgagctcgttaccaagattgataggcgatccggcaaggagctggagaaggagcccaaatttctcaagaacggtgatgctggtatggtgaagatggttcccactaagcccatggtggtggagaccttttctcagtatcctcctcttggtcgatttgctgtccgtgacatgaggcaaacggtggctgtcggagtcatcaagagtgtggagaagaaggacccaactggagccaaggtgacgaaggctgctgccaagaagaaatgatctatatggctggtgctgtgcttgcttgttggttacctcgtggaagcttaaaatatctcgtcttgttgacatccttgcagttgtcgcgtgaacaagtaatctatgatggcaatgtttgcctggtcatgaagtattattactttcgttgaaaccgtgatgctattaagacttaattttttttatggaacatcgaatgtaaggcatacatggttatgagttttttgccttgttgcagtgtgttcctgttt

SEQ ID NO: 36071 - DNA, 1107 bp, Zea mays subsp. mexicana
  Clone ID: UC-ZMROTEOSINTE037A02_FLI
gatcagttttcgggtctgttccgagcacaccaatgcagagatcagtttttgactctgttccgagcacgccgacgcagaaaccattcttcgactcctttccaagcacaccaatgcagagatcactgttcgattctgggccaagcagagcagaatctcctaccgccagcagcatgtatggcaaagagcagaagggattcttcgattcttcagtcccgagtactccaatgtacaactcaagcttcacgcctaggtatagcgaagcaggagacgattcattcgacaccatgtcccaatacagctcatttggcatgcacgagagcaattcctttggacagcgcgacagcttatcgagattcgattctttcagcagcaatgctgacaacggtgggaatgacacttttgcgaggtttgattctttccgcagcacttcagatcagggtgggggcaacagcttcatgaggtacgattccatgaacagcagcagtgaccatgacgggatcggcacgtttgcgaggtttgattcgatgaagagcagtgactacaacagccggggctactcgttcgacgacgaggacccctttgggacagggccgtttaaatcgacagagaccacgagccacagcccgacgaaacatgggacgaacacatggagcgcgttttgacaggcaggggctgtatcatatattcaatagaggtcatgcgcttgtgcaccttactgcagatatatacacacgtacaggggcaagacaattttttgttgtgtgcatgggcctctgctcctccacacctggggaaggggaagggatgggacggggatttgcttgtgtgcttgctttgtgtttaattttgtacgtaggctgggaacatgtgtttggtgggatgatgatgatgctgctgctgctgctgcttataaactcaacattctttataccttgtattgtacaagtgcatgtacaagatgtgagtcgacccgtttgggttgagtaactctcgagtgttttttcttccatggtgtagcgttttcctgtttctccagaattttctgagcaatgtacagacagacaaacttttgtgtgaaacacctgttgtccaatactgagacccttc

SEQ ID NO: 36072 - DNA, 657 bp, Zea mays subsp. mexicana
  Clone ID: UC-ZMROTEOSINTE037A10_FLI
gccgacgagcagccgacgctaaagcttggtccggtgagcttcagagaaggggcgggtacgtcaagatgcagatcttcgtgaagaccctgacgggaaagaccatcaccctcgaggtcgagagcagcgatacaatcgacaatgtcaaggccaagatccaggacaaggaaggtatcccgccggaccagcagcgactaatcttcgcggggaagcagctcgaagacggccgcaccttggccgactacaacatccagaaggagtccacccttcaccttgttcttcgccttcgcggtggcatcattgaaccttccctccaggcgctcgcccgcaagtacaaccaggacaagatgatctgccgcaagtgctatgcacgcctgcaccccagggctgttaactgccgcaagaagaagtgtggccacagcaaccagctgagggcaaagaagaagatcaagaactgaagcttgccaaatcggttccttgcatggtttgcgtcaacaagacgtagaagtttcaaagcttttgtagctgccataggctgctgcaacgtttttaagtcggaactcttgtgttcctgttcagggtcttcagcatgacataaatcgtttcagaagtctagtaatattattattatatggtgtcatgtcgtattgtggctcttcc

SEQ ID NO: 36073 - DNA, 1599 bp, Zea mays subsp. mexicana
  Clone ID: UC-ZMROTEOSINTE037E01_FLI
ctgaccgccagacccaagccaacaagcaagagcattactacttctgcttccgaccgaaacctttcttggaacgcaagaaggatccccaccccgaccgacctactctaatcggcgatggcgacggtggcgatggacatctcgaagcccacgccagtggcgtccggcgacgaggccgcggcggcggccaaggggaggagcggcggagggggcgaggggctgcggcagtactacctgcagcacatccacgacctgcagctccagatccggcagaagacccacaacctcaaccgtctcgaggcccagcgcaatgatctcaactcccgagttagaatgctcagggaagagttgcagttgcttcaagagcctggctcatatgttggtgaggtggtgaaggtcatggggaaatcaaaggttctggtgaaggtacaccccgaaggcaaatatgttgttgatatagataagagcattgatatcacaaagatcacaccttcaacaagagtcgctcttcgtaatgacagctatatgctccatctgatcctaccaagcaaagttgatccattggtcaatctcatgaaagttgagaaggttcctgattctacatatgatatgattggaggccttgaccagcaaattaaagagatcaaagaggtcattgagcttccaatcaaacatccggaactatttgagagccttggaattgcccaaccaaagggtgtcctcctttatggacctccaggcacaggaaagacattgctggcacgtgcggttgctcatcacactgactgcaccttcatcagggtgtctggttctgagttggttcagaagtatattggtgaaggctcccggatggttcgggaactctttgttatggccagggaacatgcaccatccattatatttatggatgaaattgactctatcggatctgctagaatggagtctggaactggcaacggtgatagtgaagtgcagcgtaccatgcttgaacttctaaaccagcttgatggttttgaagcttcaaacaaaattaaggttttgatggcaacaaacagaatagacattttggatcaagcccttttgaggcctggccgcatagacaggaagattgagtttccaaatcctaacgaggactcacgtttcgatattctgaagatccattcaaggaaaatgaacttgatgcgtggtatcgatctgaaaaagatcgcagaaaagatgaatggggcctcaggagctgagctcaaggccgtctgtacagaggctggaatgtttgctctccgtgagagaagggtgcacgttacacaggaggacttcgagatggcagtggccaaggtgatgaagaaagacacggagaagaacatgtccctgcgcaagctctggaagtgaggctcatgccttgatgtacccaccaccacctttcacggcctctccctgaacggtgtaacggcatgctctggacctttgcgacgtgccttgcatgtctgtgtttaaaggtttccttataacggttctaatatgttgttgccaagttgaattcatcagatcagctaggttacggtaccactacatttgctagctcacgatgaaccctgcataatggtt

SEQ ID NO: 36074 - DNA, 1443 bp, Zea mays subsp. mexicana
  Clone ID: UC-ZMROTEOSINTE037F05_FLI
cagaaacacagatgggcgacggggctccgccgccaggggctctatactccttcggaacgccgtggccggagctcaatcaaggcctcacctacaccgacacgttccgttgcgctgatgcggacgccgctaccaccttgattgagttctactctactaaccacaagagctcggcgccattgccagggtggatcaagaggattcgtaacgggcagataaccgttgatggtgaagttgtcactgatccagatacgactctgggggatgggtctaagttggtatatcatcgttttccttggcaggagccatttgcgccgtatttgctggaagtgctctacgaggatgatgacatggttgcccttaataagccttctggcttgcaagttctgcctaaaggactgtttcagcagcgaactgttttagcacagcttcaattgaaagactggaagatggcctcatcttgccggttcaagagaaaagatgtgcagtcacatccagtacctgttcatcgtttagggaggggaacatcaggcctcctgctttgtgccaagacaaaagttgccaaagttcgacttgcatcttattttgctgaaggtgctataaatgctgcaaagaaaagggataaatcagagttcagtgaagagcgaaaaatttcaaaattttatcgagccttagtgactggcatacttgatgatgatgaggttgttgttacgcaacctatagggttagttcattatcctggagttgcagagggactttatgcagcatgttcctcaggaaagccagcaatgagcaaagtatgtgttcttgagagacttgcacaccaaaatcacacactggtccaggttgaaattcattcaggacgacctcaccaaataaggatacaccttgcatacattgggcaccctcttgtagatgaccctctctatggtattggtgggcaccccaattttgttgagccagaatctactggcacagatagttcttttgcatctgatgggggttatgagagacctttgcaacctgttcctggagactgtgggtatcacctgcatgcacattggctggttctttgccacccaacaaccaataagatggtaaaaattaccgctcctcttccacaaattctacagacacgggaggaacgccgcgctgcagctgagcaaaccgctggttgatcatgtagaaccttgaaaatgtatatttcttgaagttagcaagcagcaggttctcacagacgttagacactcagacatctgctcctctgtcaactgtacaacggcgagctctggttctcacagacgttaggctaccgagatggagagataacatcaggttaaataaaaataaatagagtactagctaatgggctctgtgactgtccctgaatcttgttcagtctattcgaagcgcaattcgctggaaaaattgttttttcgctcacac

SEQ ID NO: 36075 - DNA, 1571 bp, Zea mays subsp. mexicana
  Clone ID: UC-ZMROTEOSINTE037F07_FLI
gtggaatttgatggtcgatggctatgtaaagcatggaaaaattcatgacgctattgagttgtactcaaagatgtctgaaaagaatttggaagcttctactactttgatgtcttgttttatagacaacggaatgcttgataaagctcgggatgtgttctacagtatgcctcaagtagatgtggtttcctgcactactttactctttggatatgtgaaaggagggtatatatatgatgcactggaccttttctgtaggatgcacaaaaggactgttgtcacatacaatgtgatgatagctggtttgcttcatcaaggtaaggttaccgaagcttacaagctttttgatgaatctccaacacgagatttagtgacctggagctgtttgatcaacgggcttgctcaaaatggtttaaacaacgacgcaattaagctgtacaagaagatgctactgtcaaatatacggccaagtgattccattctttctagccttattagttgcttttcacatcattctatgattgttcatggccagcagtttcacgcttctactatcaggcttgggtttggatcacatttattaattcaaaatgcactcattagtatatattgcaaatgtggtgaaatgattattgcccaaaccatttttgataggatggacaacagagatacagtgacatggaacacaatgatttgtggttatgcattcaacagctttggtcaaaatgctattgagacatttgataacatgaaaaaggcccaagttgatcctgatgagatcacatttctcggcatactttctgcatgcaatcacatgagacttttggaggaaggcaaacatttcttcaatatgatgacatgtaattatggaattttaccaaataaaatgcattatgcttgcatggttgatctgtttggtaggacaggcatgcttgaacaggctgaagagttaatgaagtcaatgccatttaaaccagactttgcaatttggacttcccttttgagcagttgccgattgaatggcaatgacaggttggcagagcatgcagcgagtcaattaatttccatcaaacctactatcaaaatgccgtatctgcatctcatcagggtaaatggatcaaccaaaagatggaatgtgatggaaaatttgagaaatcaaattagaaatgctgctactgacaaacaagttggctatagctggagttaactgatgtgtactacataacaggagcatgtcaacaaggtaccagaatacaagcctgcctgaagcctaccgctgctgattattgaggtcattttttaactttttgtggtggagccactatccatggatcagttatggagaaacttgtcagtttgtcactaagcaggtaaaatctagtacattatgttgttagctaaccttcccctgacatcgaaggcattaccaagtagatgattactttgttgcttttcagtgccatgctgaatgtgtgaaattcttggtgttcaaaattcatgttggacgtgtgggcacctaagaaaaatgctgatacataccttaaattagtataaagattacattattatttgtc

SEQ ID NO: 36076 - DNA, 404 bp, Zea mays subsp. mexicana
  Clone ID: UC-ZMROTEOSINTE037G08_FLI
gcgaccaaagaactaggtggcaagattttgcggcagccagggcctctacctgggatcaacactaagatcgcctcttttgttgatccagatggctggaaagtggttctggtcgacaacaccgacttcctcaaggaactacagtgaagactcgggatacccaggtgctgtgctaggatgtagtaatgcttatctggtgtaataagatgtgggtggtttgtttccgccctgacgaacttataataatgaatgttgctacagaggttgtgcttctgccagtgaggtttgggatttgctatgtaactgtgcctgctactaatgcaattgctacatgtagcaaggtgtctaggactctactaatgcaattgctacatgtagcaaggtgtctaggacttaggccctgttcc

SEQ ID NO: 36077 - DNA, 2342 bp, Zea mays subsp. mexicana
  Clone ID: UC-ZMROTEOSINTE037H06_FLI
catctctgctgtagcttgcattcttctatacttggagtacaagcacattgccaggctgaggttatatcacatttctagagcaacaagcaatcctagccattttactatccttgtccgaggaattccaaaatcaagtacagagtcattcagcaggacagttgaaagtttctttaccaagtaccatgcatcaagttacctatctcatcaagtcgtttacaaagttgggaaagttcagaagatagtgagtggtgcaaagaaggtttacaggaagttcagacatttcaagggtgcgacagttgatcggagatgcagacccattagatttcaatgctgtttttgtggagcttcttctaattcattccagttgttgcctagtgattacgagcaagagagtgaaaagtctgatgtgaatgaatcaagctcgagcttacctgatgaggaatgtggtgctgcttttgtgtttttcaaaactcggtatgcagcgctagttgtagccaaaattctgcagacatcgaaccctatgagatgggtcactactttggctcctgagcctgatgacatatattggtctaatctttggttaccctacaagcaactctggattcggcacatagtcacacttatgtgttctatcgttttcatggttgtattccttataccagtgacatttatacaaggtttaactcagctggagcaactgcagcaaaggctcccttttctgagaggaatattgaaaaagaaatacatgacccagctgataactggatatctccccagtgtcatcttgcaaatatttttatatactgttcccccgaccatgatgtttttttctactttggaggggcctatctctcacagtgaaagaaagaaaagtgcctgctgtaaagtattatacttcaccatttggaatgtcttctttgtcaatgtcttatcgggttcagcaattagccaactgaatgctttatcaagcccaaaggacattcctatgcagcttgctaaagcagtacctgtgcaggctacattctttactacctatgttcttacttcaggatgggctagtctatcatcagaacttatgcaactctttggtcttacatggaactttttaagaagatatcttctgagaattaaggaggatagtgattttctttactcatttccctatcacactgaaatgccaaaagttctgctgtttggactgctgggtttcacatgctctgtactagcacctctaatcttgccctttttactgctgtacttttttcttggctacgtcgtctaccgcaaccagttcctcaatgtttactgcacaaaatacgacacaggcggtcaatattggccaattgcgcacaatactacaatattctctctaatcctcactcagatcatctgtcttggtgtgtttggccttaaagaatcccctgtagctgctggcttcactgtcccgcttatcatctttactcttctattcaatcagtattgcagaaagcgtcatctcccattgttcaagactttccctgcacaggttggtgcgatctctttaaatctttaatagcttctagtttgcaaatgtaaacagttgaaggattcagaagaataaattttaggagtgtttggttctcttggctgcacttcctagtcttgcaagggtaagaaatccgtactagcgttggagagccagtttggtggcacttacaggagggaaccactgccaaaatcaagtcctcttggtaataatggctagttataagttggcaaaggaaccaagcatcatacccttatatcttgttgctaccttacatttttatttatgctctcgactgtgagttggttgaaattacttgtctagatatgaatcactctgactcgaatattggctgttggtcacgcacagaatttgattgacatggacaaggaagatcagcaatcagacacaacggaggaccttcatgaacgacttcattctgcctactttcagttccctgataccgacgaggtacctttggaaagagttcgcgttagtgtcggcagagacgaagacgggagcggcagttcaggtgaatcaagccgcaaggaaagcgccgaagacgaacacaagagtggcctctcccacccgacgctggatgggctcccggttagtcggttacgcaacgcggtgagatcacttgggtccgttttgagaccgcagaggagacagttaccattatagcacatttcctttaaccgcccatgtaaattcaaggtcgacagaccccacacacagatcattgatagcgcgtacagggagaggaagatacacagacagaaatggaagagagtataccacccgtttgcaagggtag

SEQ ID NO: 36078 - DNA, 1095 bp, Zea mays subsp. mexicana
  Clone ID: uC-zmroteosinte037h08_FLI
cgaagctagtgcaggaaatcagggaatgctatcaccctatagatccagttcgtttcctgtgcctcaatatgcgctgcagagggataatgtatttcctgagagacccgatgaaccagaatgccaatattacatgaagacaggagattgtaaatttggtgcagtgtgcaagtttcatcatccccgtgtgagatcacagccccctccggattgtgtcttaagtccaatgggccttccaatacgtccaggtgaagaactgtgcaaattctattctcgttatggcatctgcaagttcggcgccaactgtaaatttgatcatcctacaatggctgctccaatgggagtttatgcatatggtttctctgggtctgcttctgtcgcacccgcttcaactaatgcacctatgacgcgacgccttctgggatctccatcaggttctggatatatgtcttaggtgtcttttttttcagttgacctactttgatgtataaaatccacggcatcgcctcaggcgctgtgaatgtttctcctaacttcccgccgggatgaagttctgtaaattgagttgctgctggagatgtacagccccccccccccctccccaattaatccagaactttgggaataactgttggaacctaataaacttcagatacagaaacgctggttttcaggtgtttgcactattttgacactgctgcacctatggtccctaacagttgaggtaggaattcctctgaaggagctgaaacctgaaacctgtagctgcaggtgtgcagttgaaattatattattgcgtcaatttatttgtaacctgtattcagctggtgttggggcagatattggcattcctcttatctgtgaatgctggttttctgatatgaacagtgtatcccagcctacggcttctgccaagacaataaactcaggacctgtttgggactgttccactattcaaaaaatgaatttgaatctgggattcattattaaagtttcgccgacgaatctgagatcctttttagatagcagcttattattcacgtaaggatattctgtttgaaatagactaatttgtttttatgatagacctcatttgtc

SEQ ID NO: 36079 - DNA, 1456 bp, Zea mays subsp. mexicana
  Clone ID: UC-ZMROTEOSINTE038A02_FLI
gacgccacgactgacgacggagagccccggtctccttccacggctccaccgccaccaccccgcataaaaaatcctacagctcgtattcgcctcatctcgcagcagcagcagaagaacaagggtatggcgaaggatgggggtcccgactggaacggcctgctcaagtggagcctcgcccacggcgacagcaccaacccgccgcgtgctctcagcgaggaagacagaaaatggttcatggatgctatgcaagccaacacggtagatgttgtgaagaggatgaaggagatcactcaggtgatgaaaacaccagaagatgtcttgcagtctcagggtgtgaccccggagaacattgaagatatgttggatgagctacaggagcatgttgaatccattgacatggcaaatgatctacattctattggtgggctggatcctctacttagttacttgaaaaattcaaatgctggcatccgagcaaaggcagcagaagttgttagtacaattgtgcagaataatcccaagagtcagcaacttgtcatggaatccaatggactagagccactgttgacgaacttcaaatcagatccaagtacaaatgcacgcacaaaagctttaggagccatatcttctctaattcgtcataaccagcctggagtttccgcatttcgattgggaaatggctatgctggattgaaggatgctcttggttccgatgatgccagactccaaaggaaagctctcaatctcatacaatacttgctgcacaactacaaggcagacaggagtgttgccacagagcttggtcttccgaagctgatgatgcaccttgtgtccagcgatgattccttagtgcgtgaagctgctctaggcggcctccttgagttggcgcgggacaagacatctggtaatgcgctacctgaccaagaaaagctgaaagacatgctcaagagccgaatagaagggatcagcgcaatggacactgacgatctccacgctgctcgcgaggagcggcagctggtggattcactctggaaggagtgctacaacgaaccttcgtctctcagggagaagggcctcgtcgtgcttccgggagaggatgctccccaacagccgccaccagacgttgcagggaagatgtttgagccaccgcttcgtgcgtgggcggctgcaagacctgctcaggaagatgactctgactctggcagcggaaagaaggatccgccattgctgcttaagttttgacggccttcttatgccgatactagttcttaggctccaccatgggtgttgaaagctgaaagatcagatctgatggatgcctgaccttcttcgaacctcagttgtggttcttgtaatttgcaccgcatttcttctgagtatgttttttatgagaagactgggaagatgacagacagatactgtatcacgtgatgctcgtaaattaacactacctgtg

SEQ ID NO: 36080 - DNA, 1522 bp, Zea mays subsp. mexicana
  Clone ID: UC-ZMROTEOSINTE038A06_FLI
gcccaacgcttgtgcttgctgtgtagcctggcgcgtctgctcgcggccgatacctccgcggccggcggcgatgggccaggacctcgtcgagatccatccgagcgagctccagttcacctttgaggtcaagaaacaaagttcatgtgttgtccacctaatcaacaagtccaacgactatgttgctttcaaggttaaaacaacatctcctaaaagatactgtgttcgaccaaatactggggttatccttccaaggaaaacatgtgaattcacagttaccatgcaagcgctccgaactgctccaccagacatgcaactaaaggacaagtttttggtacagaccacaattgttccttatggtacatctgacgacgaactcgttcctgcctttttctccaaagaaactggcagatacattgaggaaagcaaattgagagttgttcttgttagtgcataccaatcccttgaagagcaaccgactaataaaattcatgacactgagccagttgttgaagttcctgtactgaaagaggtgccaaatatagagaacgaagtgccagatgctgcaaaagaagtttctgcccctctggtacaagctccagcgattgtgactggaataccttcacctgtcgaagagactcctggcctgagagaatttcgtgtgccgccgaatgaagcaccagctgtattggaagaatctccttccgctcaaaaagacccttctgctattacagttgaacatgcctctactgttacaattgaacattcccctactatttccattgaatcctcccctcctttgaaacaaagtgtcacagtttttaaggaatctcctccttcgaaacaaagcattgcagctttcaaggaatatccttctccttcgaaacaaagcattgcagtttttaaggaatctcctccactggaggaaactagtcctaaagaagctgttgtgctaagtgaccgaggacttctcagtgtgcagaaccatcaattatctcatgtaacagaagatgttcagaatctgaaatcaaagctcaacaatctcgaatcaaaattggaagaggctggaaagatgataataaggctaaaagaagagagcagaagtaccacccaggagcgggataagctacagcaagaagtggtattcctaagaaagaagggaaccccaaggagccaagtgggtttccccttgctgtttgttgtctacgtcgcgcttcttggtaccttactcggttacctgctccgtctatgaattcagaactctaagaaaacaaaaaagttcagcagctgggatgcctcatatgcggcaagagaactgaattgaacggcagttgcactctaaaatgttggagaggtgaatttattagcattattagttcaggacttcttatggtttttgcacataacagcagtaccaaactaccagcagttgcgtgcatgtatagaacactctttttttggcgttgtatagaacccacccaaaagatgcctgctgccttgtagactaattatggggattcttcct

SEQ ID NO: 36081 - DNA, 1500 bp, Zea mays subsp. mexicana
  Clone ID: UC-ZMROTEOSINTE038A07_FLI
ctttgtctatggcaaagtgtttgttgtttgcaaaatttttgaagtccatagcgcaagaagacacaatatctagtagcagtgagcaagatgtcgctgtgaaaatttcctgtgagcttgcacaaaagcattggcaaagtgctcttgaaggtctaggagataccattttggtaaatcaggaaacacagttctggcaggtggcatcagctatgcttgattacataatggggataccaaacgtccttgcttggggtaatgttcttaatactacatgctctgcggtcaagcacttctgctcccatgcacctaggctatcttggaggctgcagacagataagtggttgtcattattagtttcaggtggaattgagggcttcaaaaacagtgagatctgtttgattgatcttttctgtacaatgttgaatcattctgaaccagagcagcgttttgttgctgtacaacagcttgggaggattattaactcaacaagttctactgaagctgatttgaaatatccaaactatgaccaaaatttcctcatatctgtttcaacagtaacatcccttttggtaactcatacatgggacagagtagcagcattggctctccatgactcttctatgctattaaggaatcatgcaatggcattgcttactgaatatgtgccttttgttgataggaagcacctgcagtcctttctttcatccagtaacggtatcctgactggtttgggacaactttctggtgtaattgaagagggctattttacacgaatgtctttgctgttgttttctaaggcatgtctttattctaatcctgaagatatcgctttgatacctgaatgtgtttggcagaagttggaaaacatgcaaacatcaactggaggttttggatatatggagaaagatctctgcctagctctgtgccaactaaaaagtgaatcagatgctacaactgttgcaaaagttctttctggatgtaatagtcaaccagtcagccctgatttcaagagcatccgtgaatcaatccttcaggtgatgtcctctttgagttctattgaagcatactttgagttcttcgcagccagatctgcacaagaacatgaggaacttgaagaagctgagattgaattggagcttattgaaaaagagaagtcagttcataactttgttgagcataccaatgatacaatggtgcttgccatgccatcatatgaccatgatggtagtgaggttaataaacggctccagcaaatccgggaaaatattcggtccctggaaaggtctaggctgaaagaggaaattacagcacgcagacaaaagaagctgcttctaagacatgcccgtgaaaagtacctagaagagacatgctccagggaaacggagcttatgcaagagctcgacagggaaagagctctcgagatggaacgtgaagtagaaaggcagcgtcaactggatattgagcgtgcgaagtctagggaactgcaattcaacattgatttgg

SEQ ID NO: 36082 - DNA, 1126 bp, Zea mays subsp. mexicana
  Clone ID: UC-ZMROTEOSINTE038C05_FLI
caacaaaaaccctcgctcgcctcacttgttcgctcacctcggtgcggcgcgtcgttcggacacggagatacagcggcgattccgacgatggagtacgtgaaccccctcaccggcttccgcgtcgacggccgccgccccaacgagatgcggcaactcaagggcgaggtcggcgtcgttgcgcgcgcagacgggtcggcgctgttcgagatgggcaacaccagagtcatcgccgccgtctacggcccgcgagaggttcagagcaaaggtcagcaagtaaacagcaaggaggctttggttcgttgtgagtacaggatggcagagtttagtacaggagatcggaggagaaaaccgaagggtgacaggcgatcaacagaaatttctcttgttattcgacagacaatggaggcaagcatattaacacatttaatgccacactcacagattgatatatatgtccaagttcttcaagctgatggtggaacaaggtcagcttgcataaatgctgcaacactagctcttgcagatgctggtattccaacgcgagacattgccacatcatgtagtgctggttatctgtgttctactcctttgctcgatctgaattacctcgaagacagtgctgggggttccgatgtcactgttggcattcttgcaaagatggacaaagtgactttgcttcagatggatgcaaaattaccaattgatacatttgaaaatgtaatgggacttgcaatagaagggtgcaaagcaattgcaacttatatccgagaggtgctattggagaatacaaagaagcttgagtgtcagcgtggttaaccttaggagtgcaggcaggttgatgacctgaacctacacagccattaaaaggcttactggttgtggttgtgggtggctggctctggtgcagtgcacaggaacttccaacggagtatgtgcaagtcgtcagaagttgttcaaggcagcttgtcatcatcaccagggatacaagacatgcttcctcagtaaggtgttatcggaatttttcagttcctgtaaactgataaatcgatggtggcactgtactgataatcttccgtatggtgttattggaatttgtgtgacagttccagcggggctcctgcctcct

SEQ ID NO: 36083 - DNA, 2047 bp, Zea mays subsp. mexicana
  Clone ID: UC-ZMROTEOSINTE043C12_FLI
atgacatttattctatcgaggatcttgcacagttgatttatgacctccatcagataaatcctaaagctaaagtatctgtaaagcttgtgtctgaagctggaattggaactgtagcttctggagtttcaaaggcgaatgcagacataattcagatatcaggtcatgatggtggtactggagctagcccaatcagctccatcaaacatgctgggggtccgtgggaacttggtcttacagaaacaaatcagacacttatacaaaatggattgagagagagggtagtacttagggtggacggtggattcaggagtggtcaagatgttcttattgctgctgctatgggagctgatgaatatggctttggttctgtagccatgatagctactggatgtgtcatggcacggatttgtcacacaaataattgtccagttggagtggctagtcagagagaagagcttcgtgcaaggtttcctggtgttcctggtgatcttgttaactacttcctctttgttgccgaggaggttcgagctgcattagcccagttgggttatgagaagttggatgacatcattgggcgaacagatttgcttaaaccaaagcacatctcattggtgaaaacgcagcacattgatcttggatacctcctatcaaatgctggattgcctgaatggagcagctcccaaattaggagccaggacgtccacactaatggccctgttcttgatgagacaatccttgcagatcctgagatagctgatgctattgagaatgagaaggaagtttccaaggcatttcaaatctataatgttgacagagctgtctgtggtcgggtagcaggtgtgattgccaagaagtatggagacacaggttttgctggccagctcaacatcacgttcaatggaagtgcagggcagtcctttggttgtttcctgactcctggaatgaacattcggctagttggggaggccaatgattatgttggaaagggtatggctggtggagaactggtggtagttcctgtagacaaaacaggatttgttcctgaggatgctactatagttggaaacacttgtctgtatggagctacaggtggtcaggtatttgtgagaggcaaggcaggagaaagatttgctgttagaaactctctatgtcaggcagtggttgagggcaccggagatcattgctgtgagtacatgactggtggctgcgtagtcgtacttggcaaagctgggaggaatgttgcagctggaatgactggtggtcttgcctacattctagatgaggatgatacacttgtcccaaaggtcaacaaggaaatcgtcaaaatgcagagagtgaatgctccagctgggcagatgcagctaaagggcttgattgaggcctatgttgaaaaaacgggcagcgagaaaggtattgcgattttgagggaatgggaggcctatttgccgctcttctggcaactggtaccgcccagtgaagaagactcgcctgaggcttgtgcagagtttgagagagtacttgccaagcaagcaaccacccaattgtctgcgaagtgatcgaatcagactacaggaaggtggtaggtgttttctatttgacacaaagtgatctcatcttatcacttcaagaaaatcgaagaccataaccggcactctgaggcaccgaagtgcccgtctgaagactgcaactttgtggaggctctgcccaggccatctttttgagttgagctaacagaaccgagggttcttctcgacgctcgtgcacctaggtaacccctgtaaattggtttgctgacgctaggctgcaaggggcctgccctgtttgaactgctgtactgtacatgattcttggccgttgccctgtgtaattatgttttggttagctcgtaaatttatacgcatccaatggaggcatacaatgcaagtcgcaagcgcaatagtacagtgcatgataaactgtacggccaggttggattggaatgcttgcttcgtgaatgaacgaaaccggcgtcatgcctgtggtgtgatcgctcctctggttggcatcc

SEQ ID NO: 36084 - DNA, 736 bp, Zea mays subsp. mexicana
  Clone ID: UC-ZMROTEOSINTE043F01_FLI
ctcaaagcagcctactgccgctcaaagtagcttagcttaggcctcagggcagtccagtccacagggccttcttcaagcagatagcagtaccgtccatgggcaactgcacggcgtcgcagcgcgcagcggagtcgtgggccgacgacggcgagtgggaggaggcggcgtcatcgtcgccgttgtcgtcggagggcgaccaccaccaccaccaccaccatcatcatcaccgcgacgagaggagagaggagcaccacgactccgaggtgaccatcaggatcaccaagaggcagctgcacgagctgatggagaagaacggcggcggcggcggccacgggttaccgctaccggggcgacggcggtcgtccgcggagcagctgctggccgacatcatggactccggcgaggtgcaccaccgcgaccaccactggcactggaagcccgcgctgcagagcatccccgagaccgtcgagtcatgactgtcatgcatgatctttcttggtgtttggtggttcagtagctcaggcgtcgttgttttcgcctcttagcttgttcggtgtgcaattaagtgtagtcgctagctagtcggtgacacggtgtacatatcaaagttttcagacgtgtacatataggtcttgggaggtgggaattaattgttaggttaggtccattatatttcagatgtgtgggaaaagaagaatctgtgcaaggccaattgctgaagaagttgttttgtgtt

SEQ ID NO: 36085 - DNA, 1353 bp, Zea mays subsp. mexicana
  Clone ID: UC-ZMROTEOSINTE043F06_FLI
gtttctactaatcttctacttattccattctctttaattcaaaatgagcggtgaaaatttgatcatgagctcggtgaatggtgttagcagcattcggccggagattgccttgaatggtttggcgaatggtctcaaaagtaatgggattaatgggcatcacgaacacacaaatggacacacaaatggtgttgatcataaacaagcaaatggtcataaacatgcaactgttgacccccgaaattacgatgacatcatccgcctggccgaagttatccgtgacatggttgatcttaaagaaagtccaacaattggtgtcatctgtggctctggacttggtgatctagcagatctgctagttgacaaacaagttgtgccatacacaaaaattcctggtttccctcaaactagtgttgttggacataaaggaaatttggtatttgggtacttatccggcaaatatgttatgtgccttcaaggacgatttcatccatatgaacatgatatggatttagttttgtgcaccatgccagtccgtataatgcatcaccttggcgtaaaaaccatgattgtttcaaacgctgctggcggcatcaatcacaagtttaactatggtgatctcatgatcatcaaagaccatgttttcatgcccggtctagttggattcagtccattggttggcttgaacgattcacgttttggtgctagatttgtttctgtccatgatgcttatgacaaacagctaagaaaaatggcactccgaatcgcagtggaagaagatattagagcacatgaaggaatttatgtgatgtccggtggaccacaatacgagtctccagctgaagtcaagctttacaaagttctcggggccgacgcattgggtatgtccacatgtcatgaagtgacggttgcacgccaatgtggaattcgtgttttcgggttttccctcatcacgaacattggtaatgatgacgcagatacttccgtcgaagtttcccatgaggaagtcctcgagactgccaaagaagcaagtgtcagggcgtgtagattcgttagtcgaattgttgaccatctatgaggttgtaatgatctatttttactcatcatgttttcttttcaatactcaacaaaacttgaatttgtgtaagaaactcgttttattccctgatgtctaaatattatagctagataaattaaatgtgcaaattttgtgccctaaacacgactgttttctttcatttatatgctaaagtttagggcactttataatttgttttcggagcggatttttctttttttacatatcgtttgtatataatgttgtcttagtattagtttataaactttatttttctt

SEQ ID NO: 36086 - DNA, 1384 bp, Zea mays subsp. mexicana
  Clone ID: UC-ZMROTEOSINTE049B04_FLI
gcgaaaccccggcagactgaacagctacctttctgaccaacgaatggttcaggtgctcaccctcatgctgaacatcaagttccagaaccagagcagtggggcgcctgacccggcagcagcacaatcgaacccgccgccaccaaagcagcagccagaggcgaaggcaagagaaccagagccggacccggagcccgagcctatggaggtgacagaggaggataaggagcagaaggagaggaaagcgtcggcgcagaaggagaaggaagcaggcaacgccgcttacaaaaggaaggattttgataccgcgatccagcactacacagaagccatggagctcgatgacgaggatatctcctacatcaccaatcgtgctgctgtttaccttgagatgggaaagtatgatgaatgcattaaggactgtgataaggctgtcgagagaggaagggaactacatgctgatttcaagatgatctcaagggcacttaccagaaaaggaactgctcttgccaaacttgctaaatcatcgcaagactatgatgctgccattgagattttccagaaggcgttaactgagcaccggaacccagatacactgaaaaaactaaatgatgcagaacgagcaaagaaggagctggagcaacaagagtactatgacccaagaattgctgacgaggagcgagaaaaaggtaatgagttctttaagcagcagaaatatccagaagcagtgaaacattacaccgaagctctcaggagaaaccccaaggaccccagggtatacagcaatagggctgcctgttacaccaagctaggggcccttcctgaaggtctgaaagatgctgagaagtgcattgagctagatcccacattctccaagggatacacaaggaaaggtgctatccagtttttcatgaaagaatatgacaaagcgctggaaacttatcaagctggcctaaagcatgacccgaaaaaccaggagttacttgatggtgtaaggaggtgtgttgaacagatcaacaaggcgagcagaggcgaactcagtgaggaggaactgaaagagagacagaacaaagccatgcaagaccctgagatccagaacatcctgactgatccgatcatgcagcaggttttgacggatctgcaggagaaccctcgggctgcgcaggcgcacctcaagaaccccggagtgatgcagaagatccagaagctcgtcagcgcagggatagttcagatgaagtagacggtggctggaatgtccgggttcagatctgggacctgtgctggaaatgctgtgaacttgatcattgtttcgcattttggaaactgaacccttttgtgcgaccatagtttggtcatggctgttaatgatccatatatgggttttccc

SEQ ID NO: 36087 - DNA, 450 bp, Zea mays subsp. mexicana
  Clone ID: UC-ZMROTEOSINTE049D06_FLI
ccgcctccgacggcacggctgggtcagagcccggcgcctcagggatcgccgggaagaaaggcatcgacccatcacacatctcaggtgtctctctcacacataaataccataaataaaggtatcgagatccgactgttgttccttgcggcgacgtgcgaatgggtttggatctggggtctatccggcctgctggacagtggaatgacatttgttcacggttggatggattatttcacaattcatggtgaagatcattttaggcctccttgttcggtgtgccgttcttgttccgtgtgagaattaagatcatgatcattttttctcttcaaattgcatgcttcgtttccttagctgcttgatgtaaacaatattagtttctgtaaatgcacttttgaatttcgttcttaccatattttagagtcacaaataaatgtcagacttgattctgag

SEQ ID NO: 36088 - DNA, 938 bp, Zea mays subsp. mexicana
  Clone ID: UC-ZMROTEOSINTE049D09_FLI
gtgattttgttgggaaacctgtgttccaggctgagcgtatatatgagcatactccagttggagtggtcatgggtttagcttggactgctatgggtggttctactttgtacatcgaaacaaaaaaagtggaggaaagggaagggaaaggtgcacttgtgcttacaggacagcttggagatgtcatgaaagagagtgctcagattgcgcacacagttggcagagctgtattactggagaaagagccagataaccattttttttgcaaactcgaaggtgcacttgcatgttcctgcagggtccacccctaaggatggccctagtgctggatgcaccatgataacatctatgctgtccttagctatgggaaagcctgtcaagaaggacctcgcaatgacgggtgaagtaacactaaccggaagaatcctcccaatcggcggggtaaaagagaaaacaattgcggcaaggagaagtgcgataaagacactcatatttccggcagcgaataaaagggatttcgatgagcttgcttctaatgtgaaggaaggcctcgaagttcattttgttgacacatacagtgaaatatatgatttagctttccagagtgacgccgggacagaaacaagctgagatgatttagctttatgggattgagattttttccccctagacccacgacagaaacaagtccgtcaagaggcaggcaaaccagaccattgtaaccaagatgggtggagttaattgatattcacgagaaaaatgaaatcctttttttttgcccccaatataacatcattgaatttaagagatttttggctaggttgtacgtactagtgtggttgcccatctaggtggtatagcctatattattagtaggaataagaaaagcagcatggatgcaccatctgttatttatatttattgatttaagagtgttctct

SEQ ID NO: 36089 - DNA, 672 bp, Zea mays subsp. mexicana
  Clone ID: UC-ZMROTEOSINTE056H11_FLI
ggcatgcagatctttgtgaagacattgactggcaagaccatcaccttggaggtggagtcgtctgacacaatcgataatgtcaaagccaagatccaggacaaggagggcattccaccggaccagcagcgcctgatctttgctggcaagcagctggaggatggccgtaccctcgccgactacaacatccagaaggagagcaccctccacctggtgctccgcttgcgaggtggtatgcagatctttgtgaagaccttgactggcaagaccataaccctggaggttgagagctccgacaccatcgacaacgtgaaggcgaagatccaggacaaagagggcatccccccagaccagcagcgtctgatcttcgccggcaagcagctggaggatggccgcaccctagcagactacaacatccagaaggagagcactctccacctggtgctccgcctccgcggtggtcagtaagccatggttcatttaagctgctgctgtacctgggtatctgcgtcgtctggtgccctctggtgtacctctatatggatgtcgtcgtctaataaacatctgtggtttgtgtgtcatgaatcgtggttgtggcttcgttggtttaatggacctgttgtgtcctctatgttgtacccaaaactcttctgcagcagtatggcttgaatcctt

SEQ ID NO: 36090 - DNA, 895 bp, Zea mays subsp. mexicana
  Clone ID: UC-ZMROTEOSINTE059B04_FLI
cttcttgcaagaagtgtcttgccagtgccaggtgggccatagcaaatcggactgatgcttgtttcatccgtgtaattggaagtgagttagttcagaagtatgtcggcgaaggtgctcggatggtcagggaacttttccagatggcccgctcaaagaaagcgtgcattgtattcttcgatgaagttgatgctattggtggtgctcgttttgatgatggggtgggtggcgacaatgaggtgcagcgtacaatgttggaaatagtaaaccagcttgatgggtttgatgcaagagggaacatcaaagttctcatggccactaataggcctgatacattggatcctgcacttctgcgtcctggtcgtctggacagaaaggtagaattcgggctacctgacctggagggccgtacccaaattttcaagatccatacacgaaccatgaactgcgagcgagatattcgttttgagcttctggcacggctctgccccaactctactggagcggatataaggagcgtgtgcacagaagccgggatgtatgccattcgtgcccgcaggaaaacggtgacagagaaggattttctcgatgctgtcaataaggtcatcaagggctaccagaaattcagtgcaacacccaagtatatggtgtacaactagagtgtcttcatggaatatgttgattttagaactccgggatcttttcggtgattgtgtcatcgtgaggttctatgcaaggattgtttgtttagaaatctggatccccagggattgcatcctgtaccacatgtttttaagacaaggttatctgcttggtggttcactgtacctgtggcaattgttgccgacaccgaactgaacataaagtcagaaacaggctacagtgagtgttgaaaagg

SEQ ID NO: 36091 - DNA, 806 bp, Zea mays subsp. mexicana
  Clone ID: UC-ZMROTEOSINTE067G04_FLI
cgcaggcagaggcagcacagcagcagccaactccatccatcctctttcccctcctcgcttcgcttcctcggcggattcctcctccctcggcagtccccgtccccttccggcgcgcgagctcgcccgagatggcaaatgcgagatcgggtgtcgctgtgaatgacgagtgcatgctcaagttcggcgagctgcagtcgaagaggctgcaccgcttcctaactttcaagatggacgacaagttcaaggagatcgttgtggaccaggtcggggatcgcgctaccagctacgaggacttcacaaacagcctccccgagaatgactgccgatacgcgatctatgatttcgactttgtcactgcagaagatgtccagaagagcaggatcttctatatcctatggtccccatcctccgccaaggtgaagagcaagatgctttatgcaagctcaaaccaaaaattcaagagtgggctcaatggcattcaggtggaactgcaggctactgatgcaagtgaaatcagccttgatgagatcaaggatcgggctcgctaggcatcatgatcatgcatcatggactcggcctactactgtggatttgtatgccattatagacttggtgctgtgaaagactgcttgatgatttgcgggtttgttgctgtgtaaaaaaaggtcccatggctcccagaagaccatgaaggttcggatctatcatgtaattccttgttatctgccaattatgtatggactatggacatgtgttgcgctgttcaacttactactacaaataagtaatcgatatgttcccttccc

SEQ ID NO: 36092 - DNA, 496 bp, Zea mays subsp. mexicana
  Clone ID: UC-ZMROTEOSINTE067G08_FLI
gtcgatcatgaagggtggcaagaaggaagtggccggtgcggtggtggccatactgctggttctgcagctcatggcagctccaccgacggccatggccgcccgctcgccgcgcggagccgtgccggatggctccctcgccacgacgcccaaggtgacgatgctgtcggccacgctgtgctacacgggggagacatgcaaatacattggctgcctcactcctgcttgctcctgcaactatagtgatcgtctatgctacatcatatttactcctgttgcttgaggccattccgcgaagccacaactctcacatgcatgcgacgacgctgcctcgtgagcttctgttcaagtgatgcatgtttcaaggcatccatccatggatgctttatgtttatgcgtattaattagccgtgtgtcagggaaccgggcagaagggggtgctgttttatttacgtcttctggtgatcaaataaaggggaaatacatgttggatgtgtgc

SEQ ID NO: 36093 - DNA, 1073 bp, Zea mays subsp. mexicana
  Clone ID: UC-ZMROTEOSINTE067H07_FLI
tcagaatgcttaattgtattgccgaagccactggtaccttcattcctgtgtcctccctgctgcttgatatgcttgaaatgaaagaacttagaggacgtccagatggtgttggcaaagccgtgaatttgttcagtgttaaacaggttgacaagaaaacagtgaagacacgtgcctttcaggaagcttgcatttattctgtggtcgatgagctggctaaacatttgacccaatggagctactccattgccttctttgagatgtcctttattccacttgttcggctccgaagtttttgcaaaaccattaaagcggacagatttaggaaagagatgaaggatcttatctatcagatagaggccaatgtcgagttcatcaagtcaaaacgagtggggattgcattttcacccaatgacccagctgtagagtcatttctgcagaccgaaaaggaagaacattgcagccctctctcaaaatttgttgctactttacaccagagagcgcaagacaggatggatgctctggatgagaccagtgtgattgtgggtgccgagtcctcaaccttctcacggaggttatcagaagcgcagaagcaacaggatgagcaggatgatgatgaaggcactatcgctttcagtaagaactggctgtctgaaaataagaaacccaaaaccccaaaggaggataaaaagcgaccccgggaggatgatgatgtcgcgactgaggaggatcgggttgaggatttggtcttgagctcagatgaagaggatgacaacaatgaggaagcagacgatggtttcgttccggttgaaggtgatagtgatgaagactttgtagaccctgacagcgaatataagaaacaaaagaaggcgaagctgaagaagaggaacaagcgccagccatttcctcacaaggcgccctcgagaacaaaaagtaattcaggtcccaagaagaaggcgagacattagttatgcctgattgggcttggcaaatatgctgccgttgtgatgtatgcttctgagttccgaccgataaaaacattctcttgagtggaaaaattattatattttttcaag

SEQ ID NO: 36094 - DNA, 949 bp, Zea mays subsp. mexicana
  Clone ID: UC-ZMROTEOSINTE068C01_FLI
gccatgaagatgggagttgaggtgtaccacaacctgaagagcataatcaagaagaagtacggtcaggatgcgacaaacgttggggatgaaggtggttttgcacctaacattcaggaaaacaaagaaggccttgaactattgaaggcagccatagaaaaggctggctacactggaaaggtggtcattggaatggatgttgctgcttctgagttcttcggtgagaaagacaagacttatgatcttaatttcaaggaggagaacaacgatggctcaaacaaaatttcaggcgacagcctgaaagacctgtacaagtcctttgtttatgagtaccctatcgagtcgatcgaagacccatttgatcaggatgactggagcacttatgccaaactcactgatgagattggacagaaagtgcagattgtaggagatgatcttctcgttaccaaccccaccagggtcgccaaggccatcaatgagaagacctgcaatgctctcctcttgaaggtgaaccaaatcgggtctgtgaccgagagtatcgaagctgtcaggatgtccaagcgcgccggatggggagtgatggcaagccacaggagtggcgagacagaggacaccttcattgctgacctctcagttggcctgtctacgggccaaatcaagacgggagctccttgccggtctgagcgcctggccaaatacaaccagctgctcaggatcgaggaagagctcggtgatgccgcggtctacgccggagcaaagttcagggcaccagtggagccctactaagaaaggaagaggatgaggatgttttcttgtggagctatactagctcgctgctgccttttgttacaatgtttgtacggtcgcaataaatgtatggtcgtgtttgctcgagagctactcaggtgattttgtcgtgggagcaccaaaagcagaaaagaactgttttttt

SEQ ID NO: 36095 - DNA, 590 bp, Zea mays subsp. mexicana
  Clone ID: UC-ZMROTEOSINTE070F03_FLI
gcacctaccccggttcttggggaaccgatggacctgatgactgccctgcagctcgtcatgaagaagtcaggtgctcacgatggccttgtgaagggtcttcgtgaggctgccaaagccatcgagaagcatgccgctcagctctgcgtgcttgccgaggactgcgaccagcctgattatgtcaagctggtgaaggctctctgcgctgagcacaatgtccacctggttactgtgcctagcgccaaaactcttggagagtgggctgggctttgcaagatcgactctgagggcaaggcgaggaaggttgtaggctgctcctgtgttgttgtcaaggactacggcgaagaatctgaaggccttaacatagtgcaggagtacgtcaaatcgcactagatacagtgtgtcagtatctggaagttgtgttcaacactacattttgcacctgagtttaaatatgttcttgggctttgctaggagattagaacagttttcaagtgagcctaggatccatgtgaacgatttgaatatctcgcctcttgcaagtgttctcatctgctgttaatacaaaatcagcaagagctagtattttgttc

SEQ ID NO: 36096 - DNA, 1447 bp, Zea mays subsp. mexicana
  Clone ID: UC-ZMROTEOSINTE070F12_FLI
ctgcaattgtctgtgaaaaagcatatcccagttactgaaacccggagacagagagaccgagatgctattgaagcaaagaatacaaagcatgtggggaaaatgtcatttattgatcttgctggaagtgagcgtggtgctgatacaacagataatgacaaacaaacaagaattgaaggtgcagagatcaacaagagccttttggctctcaaggaatgtattcgggcactggataacgatcaaatacacattcctttcagaggaagcaagctaacagaggtgcttcgggactcctttgttggaaactcccgtacagtgatgatttcttgcgtttcaccaagttcaggttcatgtgaacacacactgaatacgttaagatatgctgacagggttaaaagtctttcaaaaggtggtaacacaaaaaaggagcagtttgctgtgcagtctgtatcatctggcaaggaatctacctacacatcgtaccctttatcatgtgaagctgaagagactatggagcagactcaagaaattaggcctgttgattcttctaggaaaggtgttgacagtttcacttccaattcttccattgagcctgagaaaagctcctattgtatgattccaagctatccacataaaggaaaagaagaaactagtactagatctggtttgaatgatagggagagaggggactcgaaatataaccaggctggttttaatagtaaaacacattcacttcaggaatcaataaattcacaagaagaggtgaaagtgacaaaagtctcaccaccccggagaaaagctaacagggatgagaaatcagaaaggcaggtcaactacatgaaaaaagaaagtgggcctgaaattagtcggactggtgttaagcagcaacagcaacttaaacagctgcaaaggccatcatcaacctcatcgtcgcaggttttatccaagcaatctgagaaggaagatatggaaataaacacaatacttgaggaagaggcgctgatagcagctcacagaaaggaaattgaaagtacaatggagatagtacgagaagagatgaatctattagcagaggtcgatcagccaggtagtcttattgacaactacgtggcacagctaagctttctgttgtcgcggaaggcttctggtttggtaagccttcaggcacgcttggcacggtttcagcagcgcctcaaggaacaggagattcttagccgtcaaaaaccattgagatagtttaaaccgcccaaaatggaaacctttcggtttgtcgttgatcggatactggaaactgccatcgatcgcgatagcctcggatcatggcctccaacatcgccttttagggatctaagggtgaaaggatgggagatggaaatgtgggctgatgaagtgcgcattcattattgattttgaggttttatgaaccagtttactaatttttcttttactg

SEQ ID NO: 36097 - DNA, 982 bp, Zea mays subsp. mexicana
  Clone ID: UC-ZMROTEOSINTE038C09_FLI
tatttttgctcgcatccgcgatatgctgtcgaagactgatattcttcatcttgcatcatccttgggagttcaaatgcgaaacatacatttattacccttgccacccgtggagcatgtacctgaatctgggaacaatgatgtgaaagaagtggtaggaatatgtgatgataccacggttctacctgaatggcagcaacttgtctctactctaaataggaggaagcagaatgtaaaaaagcacctagctaactggggggactctattccacaagttctagtagaaaaggctgaagaatatctccctccgaatatgggattcctcatcaagtttgttaaggatgatggtgagttgctgtacccatgcccctcttggatacattcaaatataatggacgataacattcttatcgaggggatctcaaaactgagttcttctggtgagagggaaagagtttatgactcagatcgggacaaaataaatgcaattcacatcattgatttcagtgatctgtccattggggatcctatatgtgacataattccgctgcacttggatattttccggggtgatagtgaccttctcaaggaatttctacggagctaccaacttccccttctgaggggggaatcaaccaccgatgtctacagatcagtgcgaaactcgaagttcagcagggcatcatatcgcgcgatgtgctactgtatactacacgaggacaatgtcttgggagctatattcagcctgtggaaggagctgagggttgcaaagtcctgggaggacgttgagaacctggtctggggagagctgaaccggtaccaggactctgcagttcgctcagcataactaaacaccagcaaaaaaaaaaccctttctgaacatacgtgtatgttgttgtccctccgaggaatgtaacttccaaataaaaaaaagtgtagggaaaataacgaaggctcggcacggcatgcccgtattttccttggc

SEQ ID NO: 36098 - DNA, 1137 bp, Zea mays subsp. mexicana
  Clone ID: UC-ZMROTEOSINTE038E07_FLI
gtcaagtactcagagttgttctatggtcgccacttcaatggtacaagctgttctatatcctttttgttgtgtttatggacttctaataacctgagttcagtctgtctgtgaagtttgttcattacaagttccttttttggtacagttgtttttattggcacaacgctctttgctttacaacagttatccggcataaattctgtgttctatttctcatcaactgtattcagaagtgtgggggtgccctctaaccttgccaacatatgcatggggatttctaatctatcaggatcaattgtagcaatgcttctaatggacaagctaggtagaaaagtgcttctttcagggagttttcttgggatggcttttgcaatggggcttcaggctgttggagcaaaccatcagtatcttggttctgcatgtgtatatctttcagttggtggcattctgttgtttgtcttgtcattttcactaggagcaggccctgtcccaggacttcttttgcctgagattttccctaataaaatccgagctaaggctatggctctctgcatgtctgtacattggatcgtgaacttctttgttagtttgatgttcttgcgtcttctggagcaacttggtccacagcttctctacacaatattttcgtcagtctgtgtggtagcctcaatatttgtgaggcgccatgtgttggaaacgaagggaaagactttacaagagatagaggtttcactcctgcaaccacaataaaggtacatatttgacgtggctggaaccttgggcaggctgtttgctgaacagaaacaagctggccctgcagaagctgattcctgaagtcatcggcaacgccctacaaatggtctcagggaagttccagatatgcgcctgcgacagctagggcggtgtttccatagagcatcatgtactgaagttatgcctgtatcgcccgccctagataggatattttcatacttgtgttgtcatctgttctatctatgagtcgtaatatcagaaaaaaggtactactgttttaccgttgatgagcacagttgaaaaaaggaactatcatcttcattttacatgtatgtactcagtaaccatactccgaataataacactgcatggagattccttgtt

SEQ ID NO: 36099 - DNA, 766 bp, Zea mays subsp. mexicana
  Clone ID: UC-ZMROTEOSINTE038F09_FLI
ggccggcaacggcgtcgcggccctgcgcgacgacaacctcgacacctactggcagtctgatggggcgcagccgcacctggtgaacatccagttccagaagaaggtgcagctgcagctcgttgtgctctacgtggatttcaagctcgacgagagttacacgccgagcaagatctccatccgggccggggatggcttccacaacctaaaggagattagaacggtggagcttgcaaagccagttggatgggtccacatatcattatccgggattgatccacgagaaacattcattcacacatttatgctccaaattgctgttttatccaatcatctgaatgggagggatactcatgtccgacagatcaagatctacgggccaagaccgaatcctgttccccaccagccgtttcattttacttccagggagttcatcacatactctactattagatgacagtggatgagcaatcaagataggatcggcagctcatggctctggatgatcgcgccatattagtatatttgcctgcttgtgtgctgtctatcgggtcttggacgtgtatgtgtaatgaagttgttaagttagctcagcagcatccacatctcatattttaaaccccactacgtaaagagtgcagtgcaaaatagtgatttgcagggcacatgtacctgctggccatagccttaggtagcaataacatacttttgaatttgtttcgcggcctctgttggcttgcagtgtttgcttggttcattggttggtccc

SEQ ID NO: 36100 - DNA, 1080 bp, Zea mays subsp. mexicana
  Clone ID: UC-ZMROTEOSINTE038G01_FLI
tcctgacagccagttgccccttgctactcatcttgtctggattattgttgttcttgaacacaaccttgagagcaaggcgtcactctacaaggatgcagcactgtctcatttgttccttatgaacaacgtgcactatattgtgcacaaagtaaaggattcagctgaacttagggggctaattggggatgagtatttgaggcgtctcacagggaaattccggcaggcagctacaagctaccagcgaactgcatggttgaagatcctgaattgtctcagagatgagggtctccatgttagtggtggtttttcatccggggtatccaaatcggcactacgggagcgattcaaggctttcaatgctgtatttgaggaggcacacagggtccagtctgcgtggtatgtgccagacacacaactgcgagaagagcttaggatatcagttttggagaagctgctcccagcatatcgatccttccttggaaggttcaggcatcacatagagaacagcaggcaccctgagttgtacatcaagtactcagttgatgatcttgagatagcaatggcagatttctttgagggatctccaccatcactgcataacaggaggagatctcatggatgaaagatggcttgaaaaatctcagtcttcttgtaatgtattctttaattctttggggacaggccaacaaatgcagttgggtcttttgttttgtcctcctgagacatatggttatagttggtgatgatttcttcgactagaggcaatctgaaacgggatcaggatcctgataacgctgtcaaaagccccatttcttcttccactgtaagcgatcttttttttttcatttgttacacttgtttatattcttgtgagtagcgtgtttatataggaatgatcttttagacatgtaacatacatataagtcgtaacttctgtatctgtttaacatttagctgagtgttgtatcatcgttttggtggttcacatgtatctgaagaatgctgcttgattgatgaggtgtaaaaaaagtaatgttaaggctatgcacatatgatgcaatgccatttcttctggccttg

SEQ ID NO: 36101 - DNA, 1971 bp, Zea mays subsp. mexicana
  Clone ID: UC-ZMROTEOSINTE039A10_FLI
cacggtgccaccatgtcccgcggcagtgccgcctccgtatacctcggcgtcgacgttggtactggcagcgctcgtgcaggactcttcgatgaaaagggcaagttgctggggtcagcaagcagccctatacagatatggaaagagaaagactgtatcgagcaatcatcaaccgatatctggcatgcggtctgtgctgcggtgaaatctgcgtgctcactggcaaatgttgctcctgaggacgttgctggccttggctttgccgccacttgctcccttgttgctgtcgatgctgatggttcccctgtttcggtttctttgagtggtgatacaaggaggaatatcattgtgtggatggaccatagagctgtgaatcaggcagagcgaatcaatgctaccaattcgccagtactgcaatactgcggtgggggtgtttccccagaaatgcaggctccaaagctcctatggatgaaggaaaatcttctagattcgtggtctatggtatgtaggtggatggacctaagtgactggttagcatatagagcaacaggtgacgacactcgcagcttatgcacaactgtctgcaaatggacatatcttggacatgcacacatgaaacagtggaaggaatctgattcacgtgatatggaggcatgcggatgggacaatgttttttgggaagaaatagggttggcagacctcctcgaaggaaattgtgcaaaaataggacgcagtgtcgcttttcctggtcatgctcttggttctggtttgacgcctactgctgcaaaggagttaggcttacttcctggtactcccgtcggaacctcacttattgatgctcatgctggtggagttggagtcatggaaagcattcctgatgcaggatctaaagctggtttgtctgatgaacatgcaatatgtcaccgtatggtattggtatgtgggacatcaacctgccacatggctgtttcaaaggacagattgtttatacctggtgtctgggggccgttttggtctgcgatgatccctgagttttggctcacagagggtggccaaagtgcaactggggctctgctcgattacattattgaaaaccatgttgcttctcctcttctttccaaccatgctgcttctcaaagtatatccatatttgaactactgaacaagatgttgctttctatgtcacaagagcagaatagtccgtttctttctgcattaactcaagacacccatgtgcttccggattttcatggaaatcggtctcctgttcctgatccaaaatcgaaaggagtgatttatggcttgacacttgatacaagtgagaagcatttagctcttctatacctagcaacaattcagggtattgcttatggtactcgtcatattgtggagcattgtaatgctcatggccacaagatagatacacttcttgcttgtgggggacttgcaaagaattctgtgtatatccaagagcatgcagacattacaggatgtcctataatacttcctagagagagcgagtcagtgcttttgggtgccgctgttcttggcgctgttgctggcaaaaagttcccgggtgttcgtgatgcaatgaaggctcttaatgcagcggggaaggtcgtaaatccgtcttcagaccctaaggtgaagaaataccacgatgcgaaatatcagatattcagatccctgtatgagcaacaactctctcatcgcgcaaccatggcacaggcattgcagtagggctctatggccactttggctcttcactcttggttattaatacccttggtttcatcgccatgttttattggcttatttacatgtaatcaatatcgccttgagtgatttgatagaatagaaaccatgataagatgcatgtatacacatataagaaaactggtaagatgatctttctcacagggacgtgaaatccccaaagcctgtgcaatgttaataaaagaaaaggaggttctt

SEQ ID NO: 36102 - DNA, 2339 bp, Zea mays subsp. mexicana
  Clone ID: UC-ZMROTEOSINTE039B09_FLI
ggtttgaaagtgctattaccgcaggtgggctccatgttactgagggcagcaagctatgggcagcctatagagaatatgagatggccattttgatcaccatcgctgatgccaatgatgaggagagggaaaagcaagttcagcgtatacgcatgctattccaccgccagttatctgttcctttggctgatatggaatctacacttgctgagtataagagctgggaggctgagcaggggaatgcaaatgatcctggtgcagattttgatggtgtcccctcaaatgttgtatctgcttacaaaaaggccaatgatatgtacaatgaaaggaagcaatacgaggatcaactaagcaatgcaggcacatttgaaggtgacaaactgcagcaatttatgaagtacatcaaatttgaggaggcttctggtgaccctgctcgtgttcaagttctgtatgagcgagctgtttcagagcttcctgtttcaagtgatatatggatgggatatacaagttacctggatagaaccctgaaggtgccttctgtagtcagaagtgtttattacagagccacaagaaattgtacatgggttggtgagttatgggtccattatttgttgtctttggagcgtattcgtgcttctgaagaagagctgcagcatgtatttgaacgggcaatacaatgtaccttttcaaccatacaagagtatttcaatatttatcttactcgagttcatggtttaagacggaggatttctgatggcttggattttcaactgattaggcagacattaacggatgctgcagaatttctctcatctcaactgagtaccaaggagttactgcgcttatatgcttattgggccaaactagagcttagtctcggcaaagatctttctgcagctcgtggagtttgggaaaacgcgatcaagaaaagtgggtctgtttttgaagtttgggagcagtacattttaatggagataaaaatggaccatgtacatgaggcgagatccctttataagcgttgttatagcaaaagatttgctgggtctggatcagaggagatatgctactcatggataagatttgaagaggagaatggcaccttggatgattatgatcttgctgtaaagaaggttacccctcggctaaaggagcttatgacattcaagtctcaagaggaggctaaagttgaggcttaccctaacctcaatgataattctaatgcaaatgattcctctcagaaaagaaaaccaagtaacaataaacagcagccccctgctaagaaaagaaaagagaatccaccaaaaagtaccatgccatcagatgaccaaggatcaaatgtgcaaagtgggcacagtggtgctgttactgatgtagaagtcggaggggccagcagggagaaggtcatggcatctatcgagatgaaagtggacagtgacagccgaacagggaaatcaagttcaaatgaaccaaagccatccttttataatgacaactgtacagtttttgtgtcaaatattgacttgaaagcaaatgaggatgatctcaggcgattcttctctgatataggtggtgccacagcaataagattgctgagggacagattcaccaaaaaatcaagggggttggcctatgtggactttttagacaacaagcatcttgaggcagctattaagaaaaacaagcagaagctgcttggaaagaaagtgagtatcgcgcgatcagatccaagcaagggtaagaagagccgtgaagcaggtcaaacaagccaggataatttacctccgagtggtggtgatgatgcaaaagcaacaggatccagtggaccagacaatgaagtacccaagggtgacgcaaaaaccatagggaagaataccctttttgcaccacgagctctggttaaacctcttggatggacaaacaaggatgagaagaaaccagatgttgcaggggagttgaaatcaaatgaggagttccgaaatctgttactaaagaagtgatatcagttggcaggtgtggatctccatgccccccatccagtgccaagacttgtggtgccttcatctctatgttagaatgatggacctgtagtagcagcttgaactggggatctacaaccgttatgtcttaccccgatgtagacatgaatatttctttctgctggggagattatacaagccatgccgaattgcagggtggtgaaggtgaaaacgggacgttgcgttcgagcagaaaaaccctgcccatgtgaaaagaaaacattgaccttacaatatgtgttcacttttttattgaaccatacgtacgcattgctggtgaaacatcactgcaaactcataatgatt

SEQ ID NO: 36103 - DNA, 1832 bp, Zea mays subsp. mexicana
  Clone ID: UC-ZMROTEOSINTE039B12_FLI
agctaccaaacactgctgggaagtcaaatatcctattggatgattctcaaaatcaaactcatgatgttgctcgatctcatgccatctctgccgatcctgaagctaccctaaaccccactaggaacacttctggatggctattccctttgtttcccatatttttggtcactggttatctgttgagcttgatatctgcaagcaagtcatgcaggcagtttatgattcaacttattgagccattcacgcacaacaagaaatcggtggacattagaggcaggtcggagggaactcccaaaaaaagaaaaacacggaagaaggatggacttgtcaatagctctgagaccttgacagcatctgacaaggagtgcagtgatactggtgggtcaactgaggcaccaatgaaaaattctgcgctaacagatgcccttggtggtcgtcagattggtaaggtatatgtctccaataaagaaattggcagagggagcaatggcacaattgtttttgaaggatcttatgatggtcgtcaagttgccgtgaaacgtctgctccgttcccacaatgacatagccgaaaaggagactcgaaatcttattatatcggatcatgatcctaatattgttagactctacggttgtgaccatgacagtgattttgtttatatctcgcttgagaggtgccactgcagcttggctgacctaatccaaaaacagtcatatttgtcttctggagagtctatttctaacaatgaggtcagtatgagcatcaactcaaagatttcaaatgttaagggaatagacatggaattgtggacgcaggatgggcttccttcagcacaactcctgaagctgatgagagatgttgttgctggccttgtgcatttgcataacttgggaattattcatcgtgatttgaagcctcagaatgtcttaataagcgcagaaggacctattagagcaaagctttctgatatgggtatcagtaagcacctgcaagatgacatgacttctgttagccatcatggtacaggaattggaagctctggctggcaagcacccgaacagcttcgtcatggtcgtcaaactcgtgcaatggatctttttagtttgggctgccttattttctattgtatcactaaaggcaagcatccgtttggtgaatactatgaacgggatacaaacattgtaaacaatcgctttgatctctttgtggtggactacataccagaagcagtacatcttatatctcaactgttacaaccaaacccagagacaagaccaacggcagtatacgtcatgcatcatcctctcttctggagccctgaattgcgcctttcgtttctaagggataccagtgacagaattgagaaaaccagtgaaacggacctcataaacgcactggaaagcataggaccagtggcgtttggtgggaaatggggagagaaactggatgctgctttagttacagacatgggtcgttatagaaaatataactttgagtctactcgtgatcttctgaggtatatcagaaataaatcgggtcattacagagaactttcagatgatctcaagggcatacttgggtcattgccagagggatttgatcactattttgctagccgatttccaaagttgctaattgaggtgtacaaggtcttgtgggtgcactgcaaggacgaagaagctttcagtaaacatttcaatggaagctccttatagctggagaggattgccttttcctactgtaaatactaaccctgatgtagaagttgtatgtacatttgatatgtataccatattacccgtattatagaataaagaaagctcagtctgtac

SEQ ID NO: 36104 - DNA, 1042 bp, Zea mays subsp. mexicana
  Clone ID: UC-ZMROTEOSINTE039C08_FLI
caaaagaggaaggaaaaggctggcaaatgggatgttcctctgccaaaggtcaggcctgtagctgaagaagaaatgttcaaggttctacgaactggcaagcgaaaaagtaagtgatgatgggatttgtcaatggatgtggaatttggttattggtttaaagggttttatgtggcatgatacttatcaatatgctttgtggaactgttgtgatgtgctacatgagaagttgacaactgatttgagcaatcaatgtgttccatctgttaagacttcataaatgttccataacatagtacacaacattttcctttggtctgaacaatttagctgatcttcttttccttgtactcagccaagcagtggaagagaatggttactaaagccacctttgttggagctggatttacaaggaaaccaccaaagtatgaacggttcattcggccaactggtctgcgtttcaccaaagctcatgtgactcacccagagctgaagtgcactttcaaccttgacataatttctgtgaagaaaaacccaaatggtccaatgtacacttctcttggtgttatgacaaggggaacgatcattgaggtatgccaaacattttttaccattttatgtagtaccctgtgtagctgactagtaactatattagtttttcgtcatggtttactgggattatctctttgtaccccccgaaaattgctgcttacaatggtcttctttcaggtaaatgtcagtgagcttggtctggtaactcccgctggaaaagttgtttgggggaaatatgctcaagttacaaacaacccggagaacgatggctgtatcaatgctgttttgctagtgtagagccatagtgagattttgttgatggtggtgaatcgtcccatttgtatctgctccgatatgctattttttgaccatgtcatggctaatcccagtagtttgttgtgcaccatgggcataatgagcattctgtattcacgctgtgtgctacaaacatatatggagtaatataaattagcagtattttctttcgagctac

SEQ ID NO: 36105 - DNA, 655 bp, Zea mays subsp. mexicana
  Clone ID: UC-ZMROTEOSINTE039D11_FLI
gacaacgaccgctgaagcagcttcttctggtggatttgcttgtgcagtcgcagctttagctgaacagcagcatatgcatggagagtcttctagcgcatcaccttgccaaacaataaggtttggcacccttagcagaccagacagatccactacacaggatctgagtgtagctgggagcagttcttcggactccagagttgaggaaccaccaaccagcaatacacaccgaacaatagaggctgcagagtattctaattctaatgtccagtggtccgaggtggccgaggctgggaccagtattgctgaatctgatggtacagtggaggctggtgttgacaattcatccactttggctgggtccaacattgattctgttagtgttcctgatagcttcgaggagcagatgatgatggccatggctctctcgttggtcgatgcccgtgctagagcaggttctccggggttagcttggcggtagcatttccttgtaggcccttccactccttatactattcttttcggttgtgctgcgttttgttcctaagtgttccaattgccacgtaaaacatgggggattagatggggagcaggctcaaatttgacgaactgacagtgatacttgtgaatagtgggataaatctgtacatttgaagcc

SEQ ID NO: 36106 - DNA, 853 bp, Zea mays subsp. mexicana
  Clone ID: UC-ZMROTEOSINTE039G12_FLI
caaaaacagtggttgtttctaccaccatcacaaagtcattgtatatttgataggaacatgagatcttcggtctataacttacatgatgtttctgaaaagcagtttcctgagtttagtaagacagaatggctagaatgcattcaagagcagaatgaaatcatatttgttcccagtggatggtatcaccaagtccataacctggaggacactatatctataaatcataattggtgtaatgcctacaacctacactgggtgtggaacttgctttatgaagactacaaagttgcaaaagaatatattgaagacattcgagatatatgtgatgattttgaaggactttgtcaacggaatttggcagctaatacaggcatgaacttctatgatttctttgttttcatagtgaggtttgccttagccaatgtagttgagctttaccatcttcagcagccagaggttgcaaccttgtcaacagaaaccgcacaccatttggtctataatctgatgtcaattcgtaatgttgcatcaaaaatgacaactacagaggcttttactactgagaatcgtctttgtagtgtctcggaagataaccgcagtgctttctctaatatcaaacaaatattagaagaggagagtttcagaaggctatcgatgacactgtcaaaggcatatgaccacatagacagagggcaaagaagtctcaaatcttcgatctcgtatcggaagggctgttcgtcagtgatctgcttgaaatctgattgcaatgttgttgactacattacttctttggttgatgaaatttgtggacccgaggatttgacgagactaattgatagtgctctctctcatggat

SEQ ID NO: 36107 - DNA, 1206 bp, Zea mays subsp. mexicana
  Clone ID: UC-ZMROTEOSINTE040B03_FLI
gctgacgacctcctccctgacctcctgcaaggccgggtgactgtaagagggcgtcctgatgaagatgctgtcctctgcacaccttgtgcaacttactccatgaagtttgttggcacatcaaattctatgtttttgataccacctggggaaccatctgctaaatgcttaagaccagacaacaccagtggcaatgctaatgcgttggctgctaccattaaactggcaccggggagcattgaattggtccgagtcgctccaagactagataaacttaagagccttctccgggagcggccctacatacttgatgaggatattggggatgatgacctccaacataagaataaggaggggctgtacacatggcaagacctctgcaaacttatccaggccagtgatggcgagctgttagatgcgctgaatgccctctcggctgttgacattgatggattctggaggacagttgatgccagttctgtgaacacgattcttgacatgatcctgcacaactctgtgttgcgtgattggccattaaaggcaatgccagaaagtgatgtgctctctgtcatgggatctgatggttttacgcataatatcgtaacccactgcctcaacagatttggcacaaaggtagagcaggaagccagaagcttttggagcctggatgagaagcgtgtatgcttacaatttgctcggagagcacttggcgctggaaagatgaagctcagcaactttatggagaaatggaagagaagcattccttcaggaatgtgttgtccggatcttcagatgcttgaaggggaagtgttgtgtgaaaagcttggggctgagacctgggtgcatgctttcagtgttactgatctgccactggcgcctgctgagaggttcgcagcacttttccgtgagcgggcaaaatgggaatggaaagacctgcagccctacatcagggacttgcatgttccaggtgcatcctcggaaggattgcttatcaagtataccagaagaagccaaccgaatgctgaagctgaacctatttttactgcaagataataatcaatgtacggccatgtcttggcgacgtggtgcattgcatttgcatgctagatattgtcaatggaacccaggttttgaaaaaaaaacatttgtgccttttgctgtaacttttgtttttggtgaagaaagctgaaatgcaagtattgagatccc

SEQ ID NO: 36108 - DNA, 1248 bp, Zea mays subsp. mexicana
  Clone ID: UC-ZMROTEOSINTE040D01_FLI
acctcggcccgtgcgccgagagcccgcagccggaacggaacggactggatggcgtccagttcgctcctcgcaatgggagcggagcggacccaaaaactcgaaaagtcgaaatccaaacccgctgatcagcttatccccttcgcaggagccaggacggacgaactgcgagtacacgagagaggacagaggagaggagacacaggcgacacgcgccatttgggagagggaaaggaatggagctgacgtcttcttcccgctccgtgctctcctcctgcaaccggccggtcgctcgagctctttgcaggacggcgtacccgggtgcaaggaggaaggagaagggaatagtatgtatcttgagcgaggagaaagaagtggtacaaaggacgatccggaggcgagctggcttttctttgttgctggcttcgccggtgctatcagtggcgttctcggcctatgggaagagtaaaaccatgaacccttacgatgaaaggcgtctgcttcagcagaataagaagattcaggaagccaaccgtgcccctgaggatttcccaaacttcatcagagaaggcttccaggtcaaagtagtgacaccggacaactatattacacgggcctctggattaatgtatgaggacattaaagtcggtacaggcgactctccaaaggatggtcagcagattatattccattatgtgggctacaatgaagcaggacgaagaatagatagcacctatattcagggttcccctgcaaaaattcggttagggaacggaacactagttccaggttttgaagaaggcatacgggacatgaaaccaggtggtaagagaagaattataatacctccagagcttggtcctcctgttgggccttcgacgttcttcagtgcgaagcagttcgaagtgttcgatgtggagctactggcggtgcaggactgccagcggaggacgatagcattttactctgatgtcgtgtgcagctgagcttcggtttgtctagtcttccgcctatttcacatcgcagcagcatcctgcacttttggctgctggtctgagttgccgtctaattgtgtatatatatatagccagctgttgttactgcggctactgatgatgggcaatggtagtgtgttattagttcttcatttttatcttgaatctcctgatggcgggatatgcgcatttggtgtttctgtttagaagttggcatgtgtaccttgatgttgaggttactcctggtcctacctct

SEQ ID NO: 36109 - DNA, 1858 bp, Zea mays subsp. mexicana
  Clone ID: UC-ZMROTEOSINTE040D05_FLI
cagttctgggcttccatgttcttggtgtttggtgcagtgtacttcttgtcactccctgtcagttcgtaccttttctccatagcagggtgcaggttgattagaaggatccgactgatgacatttgagaaggtggtaaatatggaggtcgagtggtttgatcacccagaaaactcaagtggagcaataggtgcaaggttgtcagctgatgcagcaaaagttagaggccttgtgggggatgcgcttcaattggttgtacaaaactcttcgacactagttgctggtttggttattgcatttgtgtcaaactgggagctatccctcatcatcttagctttaataccactcattggcctaaatggatggatccagatgaagtttattcacggtttcagtgcagacgcaaagatgatgtatgaagaggcaagccaggtggctaatgatgcagtaggcagcataagaacagtggcctcattctcagctgaagagaaggtcatggatttgtacaagaagaaatgtgaaggtcctctaagaacaggaatcaggacagggattataagtggaatcggttttggagtttcctttttcttgctatttggggtatatgcagctagcttttatgctggtgctcggcttgttgaggacaggaagacaacctttcctaaagttttcagggttttcctagctcttgcaatggcggcaattggagtgtcgcaatcaagtacccttacatcagattcttccaaagcaaaatcagctgcatcttctatatttgcaattgtagatcgaaaatcaaggatagacccaagtgaggatgcaggggtaactgttgaggcactacaaggaaacatcgtattccagcatgttagcttcaagtatcctaccaggccagatgttcagatattccgggacctttgcttgacaattcatgctggaaagactgttgcactcgttggagagagtggtagtggcaaatcaacggcaatttcattgctccagaggttctatgacccagatgtaggccatatactactagatggcgtggacatacagaagttccagcttaggtggttaaggcaacaaatgggcttggttagtcaagaaccagctttgtttaatgacacaataagggcaaacattgcctatggaaaagatggacaagcaacagaatctgagatcatatctgctgcagaattggcaaatgctcacaagtttatcagttcggcgctgcagggatatgacacagtggttggagagcgtggagcccagttgtcaggagggcagaagcagcgagtggcgatcgcccgtgcaattgtgaaggaccctaggatcctgcttctggacgaagcgactagtgcgctggatgctgagtccgagcggatcgtccaggacgcactggacagggtgatggtgaaccggacaacagtgatcgtcgctcaccgtctgtcaacaatacaaaatgcagatttgattgcggtcgtgaggaatggggttatcatcgagaagggaaagcacgatgccttgatcaacatcaaggatggcgcctatgcgtccctcgtcgcccttcactcggcagcctcttcatagcaggtgatggtatgggatcctgcatacgtctgctaagacatatatgaacagagcgagctggcacaacctgtgtagcaatccaggtgctagtctctgttcctctatttgatggcatacataattgcttatacctaagcggagaaatgttacaaatagcaaggaccagatgtaaatgcaaggagctggtccttaagataactttttataatctataaatcttaatatgtatatgtagcttcgaacatagaaaccaaatagatgatggttatgctat

SEQ ID NO: 36110 - DNA, 2085 bp, Zea mays subsp. mexicana
  Clone ID: UC-ZMROTEOSINTE040D06_FLI
tcggtgagcgctccaatgccaggcacaaacaagttatgctccaagcatatgaacagcaatgcgatgaagcacacaaaatatttgctgaataccagcgccggctacatcagttcgttaaccaagcaagggacgtgcgaagatcaagtataggcgtggctggagctacaggtgctcttgtggatatgcaattgcagagtgatagagatgatctttacccatcgactatcaaaagcaatagattgccagaggatcttttagaaactgcaggtgaaaggagcattcggaaggcatgtgaaactcttgctgcggatatgattgaaacaattcgaagttcattcccggcatttgaagggtgtggcattaattcaagttgccaattagatgcagaaaagctgggtattgacttggttggtgaaataccaacatatgttaaacttgttgcattggattccctaaagaatccattcctgcttctgcagtcaatcattacctacacatcacgcatgaaaacacttatacatagagaaactgacaagattgacatacgcgctgatgcagaactactgaggtataaatatgaaaatgagcaggttattgatgctgcttcaactgatgcaagctcacccttaccatatcaggtgtatggaaatgggaagactggatcacaattgtcaactcgaggaacatatgatcagctactagaaagacagaaagagcatgtacaacagtttttggcaacagaagatgctttgaacaaagctgcagaagctaaagcactaagtcagaagctattgcaacgcttgtatggcactgctgacatggcaggaaataagaagctgcccactgggatcaccacacagaatgtgaccaacagtaggcatttagagttggacgtttgggccaaggaaagagaagttgcaggactaaaggcgagcttgagtacacttacatctgaggtacaacgtttgtataagttatgcgctgagtggaaggaagcagaagattcactgaagaagaagtggaagaaaatcgaagaatttgacgcccgtcgatcagagctggagttcatttacagtgctcttcagcgggccaatatggatgcatcagcattttgggagcaacagccattatcagctagaggatatgcatcaactacaattatccctgcgtgccatgctgtggtagacatgtctacgaactcaagggacctcatagagcgagagttagctgcatttagccagagcttggataatagcttgtgcaggttgccagcaacccctcaggcccttttggaggctgtgggttctaacggcgtgacaggatcagaagcacttgcagctgcagagaaacatgcagctttgttgactgcaagagctggtgccagagatccatctgctgtgccgtctatatgccgcatctctgctgctcttcagtataactttgtttcaccaggtacagaaggcacagattctggcttggcttcagtattaaattcactggagttctgcctaaaaccatgtgggtctgaagctagcattttagaggatttatcaaaatctatcaacttggtgcacacacggagaaatcttgttgagaatgaccgtgttttgctgaaccgtgcacatcgtgctcaacaagaatatgaaaggttgatgagtggtacgagcagccagccgccacaattgtggattgggtaacgatagatggacagagcgttggtgcctggatcaacctcgtgaagcaactccacatggagatctccagacggacgttggccatgtcatcggtatgagacgactgaagcaaccagccgtgacctgcggctttggaagttcggaggctcctttatgggttcggtttggcgcaagatatcttctatctactcgatagccttttcccattgtagtttatacgtctctctctggtttggtctgtaattagttcctaacatgttccttttgtatgttgtcaattgtcatgtgctggttgtcatttggctcaaacgatcagtgttggtgttgtgcctttgctgatttgggttgtttgtatgttgtcaatggtcatgtgcgtgttgtcatttggctc

SEQ ID NO: 36111 - DNA, 1257 bp, Zea mays subsp. mexicana
  Clone ID: UC-ZMROTEOSINTE040E11_FLI
ccccgcatcagcgcccccaatcctcctccaacttccactcgagtagggttctgccggccgtttcctcgtcgtcgcaatggagttctggggtgaagaagtgaagccaggagccacggtttcttgcaaagttggtgatggtttggttatccacctttcacaggctgcactaggggaaccaaagaaagcgagtgagaatgtcattgtgtctgtcaaaattgatgataagaaactagtgcttggaaccttatcagttgagaagcatcctcagatctcttgtgatctggtatttgataaagattttgagttatcacacaattcaaagacagctagtgttttcttctgtggctacaagtcacctgttcctctgtttgaatctgattctggtgaagatagttcagatgaagagctagaacccgatctaattccaatacagaataatgaaattaaaatttctacggcaaaggttcctgtgaaggttggtatacaaaatgctgatgaagatgaaacttctagtggtgatgatgatgatttcactgatagtgatagtgaaatgtctgaggaagatgagtccagtgatgaagatgaattgtcaagcgatgcagatactagtgatgattctggttcggaagaacagacacctaccccaaagaagactgatgtagtagttggcaagaagagggcaattgaagctgagacaccttctggtaagaaggctaagtctgaacaatctgctcagaaaacaggcgacaagaaggtctcaacttctcatcctgcaaagcagtccagcaagactccttcagacaaatctacaaagacccccacagctgacaagaagtcccccaaatctgggagccatgcctgcaagtcatgcagcaaatctttcgtcagtgcgtcagcacttgagtctcatcagaaggcaaagaagcatgaagcctagagcacgtgctgtaccatctactccttatcaaaatcagtggtcttatttttgaacttgaaaatgtccaagtttggaacttgcccagtagtcatttgattagtggccttatttttctttgaacttgggaattgtcaagtttggaacatatgcagtatgccttgttaagaacattggaaatgtcaggttagaacaggtcctgctggcccagttttggtcgtcgtcgaatgttgctaatgtttgaactgagcattgtgacccgtaagggagaatctttgttatctggtagtgcctagtgcaaatcacatttttcctcagttgtt

SEQ ID NO: 36112 - DNA, 899 bp, Zea mays subsp. mexicana
  Clone ID: UC-ZMROTEOSINTE040G09_FLI
gatgatcttaagcaaagaagaaatggaagaggttgtcatgaagaggtgttggttagcccgttattggggtttggctgtccaatatggcatctatccagacatctcaatgtcaaaacatgaatactggtcttcacttgcacctcttccatttgagtatgtaacatctgctggacagagagccaaggatggatccgaagcagaaggtaatggtttggaagacgtggacaagcttgttcatgatttgactgttacagcaggggaaggcaacgtagaaaccatgcttgctgttgataaaggacttcaagaactagctttcctgaaggtggaggatgcggtactttttgcccttgcccaacaccatcgtactaatgttgctggagcagctgatccagatattaaatcatctggggatgaaaaattcactgaggcatttgacctaagcaaggaggaggaagaagatgtacagttcaagcaggcttggctcatatttttctggaggagggctaagaccaacaacgtggaagaagatattgccgaggagcgattgcacatgtggatcgatcgacacggccagcaaccaacgtcacatgacgctgtggatgttgagcaaggcatacacgagctgaggaagcttggcatcgagcagctcctgtgggagctctcccgccacgaggcgaaccttgccaaagacagtccatctgatgtcgaggacctgacctaacagtaacagcctgagcggacgacggtggccatctcccacccaaatgcagtccaggctccagccatatatttgtatatcatacagataactgggacatgtaaacattttttgtggttttggtttttcagctttgtcacaaacagttcactgactctccccgatgtacataacttccacc

SEQ ID NO: 36113 - DNA, 1767 bp, Zea mays subsp. mexicana
  Clone ID: UC-ZMROTEOSINTE040H02_FLI
tcggacgggaggattaatctcgtggcccatgagcttaccggggaggaaggccccagcgggggcctccggagtccggcggtggctcgtcaccgtcgtcgtgtcggtgctggcgctggtgctgaccctcgttgtgatatcgctgtcccagggctcgtccctgcctcggacgtcgctgcacggttacctccccatcggagctactgacctggggaagcgttcgtcgtcggagcatgctgatgaaaacaggagtggcgctgcaattggggaggaattgtcgcagggtgagcgggagtccttagtggagcagaatggtcagggtggcgacgtgaattcaagccaaacgtctgcagcttcaggaaagatggatgacaacgagccggatccagtttcttccagtgacaccacaacgattccggacgaggatacatctaatgaatctcaaaaggctgagcaagataattgtgatctatatcgtggagagtgggttactgattcttctgggccactatacacaaacaactcctgccctatcatcacacagatgcagaattgccagggaaatgggcgaccggacaaggactatgaaaattggagatggaagccagaacagtgtaacctcccacgcttcgatgcaaggaagttcttggagttgatgagaggcaagacacttgcgttcgttggggattcagttgctcggaatcagatggagtccctcctttgcattctgtggcaagtagatgtcccacaaaaccgaggcaacaaaaggatgcacaagtggctcttcaaatcaactaaaacaactatcgcccgtgtctggtcttcttggttagtgcacaggtcaactgaagctgtggggattgctcctaagggtattgataaagtttttctggatattcctgatgagaccttcatggagttcctcccaaggtttgatgtactcgtcctttcctctggccactggtttgctaaacgatcagcctatatcctgaacgagaatgttgttggagggcagctttggtggcctcgtaaagcaggaaaaatgcaggtcaacaatgtggatgcctttggtatctctgtagagacttgcctaactgctgtggtgaataacccaaatttcacaggtctagcaattgtgcgcacatggtcacctgatcattatgaaggcggagcatggaacaccggtggatcatgcaccggaaaggtcaagcccttggatgaagtggtgaggaacggctttaccgatgcgatgcatgaaaagcaggttgcaggcttcaggaaggcagtgcagaatgcaggggaacacggttctaggttgaaattgatggatatcactgaaccctttgccttcagggctgacggtcatcctggcccgtacagaagtcctgacccaaacaagaagacacagagagggccagatggaaaacctccacctcaggattgtttgcactggtgcatgccaggaccagtagacacatggaatgagatgttgctagaaaccattcgaagagagttcgagacagatagaacctgaggatagaaagtgctggctacttcgccatcatgtattcatgttatacattctgcgctgcgaactccatagggatgtatcgctgcacttagcatgttgtgtttaccatagataggaaggaacaaagcttcggatacgtaagattcactgtattttctctgacacgattcttggacatcattttcttgccaaattttgtgggcctgaatcccaaaaagtgtcgactgatatttgcattc

SEQ ID NO: 36114 - DNA, 1153 bp, Zea mays subsp. mexicana
  Clone ID: UC-ZMROTEOSINTE041A01_FLI
gcggatgtgtggtcagctggagtgatactgtatgttttgcttagcggggtgccacctttttgggcagagacgcaacaaggtatatttgatgctgtcttgaaggggcacattgattttgactcagacccatggcctaagatatctgaaagtgcaaagaatctcataaggaagatgctctgcccttgtccttcagagcgtctgaaagcccatgaagtactacgccatccttggatctgtgaaaatggagtggctactgatcaggctcttgatcccggtgttctctctcgtctcaaacaattctctgcaatgaacaaattaaagaagttggctctgagagtgatagctgaacgactttctgaggaggagattgctgggttaagacaaatgttcaaggcagttgacgttcaaaatagaggcgtaattacttttggtgaacttagacaaggtttaaaaagatatggtagcgaattggagaatagagaaattagtgatataatggaagtggctgataatgacaataatgtgaccatcaattatgaagaatttatcgctgcaactgtgcctcttaacaaaatagaacgtgaggagcacctgatggcagcttttacctacttcgacaaagatggaagtggttatatcacagttgacaagctgcaacgagcttgtggagaacatgacatggatgacactttccttgaagagataattttagaagttgaccaaaacaatgacggtcagattgactacgccgaattcgtagccatgatgcaaggcagcaaagctggacttgggtggcaacaaatggaaaccactttgaatgtaaccttgagagatgcacctcaagtacactgtcattgacgcgctcgccatgtacagattttgttctcttctcgtgttcatcgtttctccacacgacctgagagttccggtcgacatgacatgtatcacgaggagagagcaaatcaatcgattcatttagtggtatttatcccaaataaagtgtgggctggcaggcagaatatggtttgtcatgagagacactagtatgggtttatatgtataaatatatagcagtggtggtatattggtttatggtagcgggtgatcctgtcaagcgattcaatcgaaataccaaaagaagtgcgttcagttt

SEQ ID NO: 36115 - DNA, 1429 bp, Zea mays subsp. mexicana
  Clone ID: UC-ZMROTEOSINTE041A10_FLI
cacagaaacacgagaatctgcttcgtcctcggcggaattgccgtgggggtccggcgattcttcggaggacaagcgcctcggtttcgttgagctggctaggtccatggggattagtcaggacactcatgagtcgatggcaacagatgcagccaattacctttgccaccagcttcagcatcttcttgggcctatctcttctgcgacgagccaaagtggcccctgggaggagaggtcggcgatggttaggttgactcagaagctgcagaaatataagagaaataagcggtggcggcagaggagaaggaagcatgttgcggagctttttcagaaggagcgtgcggattatgatagagttgaccaggaagctgatgaatggagggctaagcaaatagccaaggacattgcaaagcggagggtggaaagcatgcagcagattgctagaaagaaaacaaatgaggaaagaaagcgcctagaatcggagctggagcttgccctaatggtcgagaaacttcaggagcttcggtctataagagttcaaaaaatgaagaaacaaggccattttcttcctgaagaggatgataaatacctcgagcgtgttaaggctgcagttgaggaagaggagcgccaagctgcatctgctgctcggactgatgctgttaaggatgctattctgactgctgaggagtcaaggaagcctctacaatatacaaattctcaggaaggtgattctgaacggcctaaaagtggaccatctgaagacgaggaccagggagatggcgggatgagtgagagaaataaccaggcaagccaaaaaacagaacatgaagatgaaggtcatagatttgaggggaaagggcatggacatcatgaccctgtcagcaatctgccttttgagttctaccattattatcatggaagtgactatgacatggggacactcattgaggtccgcagaatgtgggattctttcatcagacctggaggaagccgtatacctgggcactgggttcaaccaccccctccagctgatgaggtttgggcatcttatttggtacagcacaagtaaatcaccatgggtatgagaaatggtcttttctgcttcaaaaccaccggaatctttaatggttcctgcaaggtaatctagatacttaagttagaacttcgagttttgttagaatcctcggaattctgagatgtattggttattcctgccattaattgtcgttagttaacttcagtaccttctcataaattatagaataggatgtaatctacctcttggtacgtcatgtcaactaatgatatagagaagttgtataaagggtgcaagtgattgcagttacctgggttaaatttactacttcacccatttgtttgttgtataaacattttatcaattcttgattttcttccagactatgcatggatt

SEQ ID NO: 36116 - DNA, 669 bp, Zea mays subsp. mexicana
  Clone ID: UC-ZMROTEOSINTE041D03_FLI
cgccttcagcacctacggcgaggtcctcgagtccaagatcatcctcgatcgggagacgcagaggtcccgcggcttcggcttcgtcaccttctccacggaggaggcgatgcggaacgccatcgagggcatgaacggcaaggagctggacggccgcaacatcaccgtcaacgaggcccagtcccgcggcggccgtggaggcggcggcggcgggtacggtggtggccgtggaggcggcggctacggcggtggcggtcgccgtgatggcggcggcggctacggcggtggcggcggcggctacggtggcggcggcggctacggtggtggtggcggcggctacggcggtggcaaccgtggcggcggctacggcaactccgatgggaactggaggaactgagcggtggggcccgcgcggccaagttatcctgttcgctgccgtgttgtttgccctagtccacagggtttatcttcgttcgtgtcgtgtttgttgttgcccatctgtgtttttgattgcaaggtcgctctgtgtcagttgttagtgctgtgttcatcctcggcttcaacagacccatgcatcaaacagcatggactgcggatcgatggatgctgttacccccgtcagactttattctaagttaatcttaaggaaaaaatggtgcttcttggtgctgc

SEQ ID NO: 36117 - DNA, 1273 bp, Zea mays subsp. mexicana
  Clone ID: UC-ZMROTEOSINTE041D10_FLI
ctgccattgaaaagtctcaaataattgaggcgcttggagctactgttgtcacagagtgcgccctgtttcaataactcacagagaccattttgtcaacattgccagaagaagggctttagaagcaaacaagttagcagctgcacagagagaatcaagcgagaaacaaactaatggtttaacacatgtcgattctgagatgctggatgacaaattagcggctatgcagagggaatcaaacaagatgcaaaatggtggtccagcacatgtcaatactgaaatttcacactgtgggagatgcgatgtgaattctgattcaaagggaggtttttttgctgaccagtttgagaatttggcaaactatcgagcacattatgaatgtactggtcctgagatttggaaacagactaaaggtaacctgcatgccttcgttgcagcagctggtactggtggtacaattgccggagtctcacgatatcttaaggaaaagaacaggagcatcaaatgttttttaatggaccctcctggatctggtctgttcaataaggttaccagaggggtgatgtacacaaaagaggaggccgaggggaagcggcttaagaaccctttcgatactattactgaaggaataggaatcaatagggtcactaaaaatttcatgatggcggaactggatggagcctatcgaggatcagatagggaagctgttgagatgtcaaggttcttgctgaaaaacgatggactatttgttggcagttcttcagccatgaattgcgttggcgctgtaagagttgctcaagatttgggtccagggcatacaatcgtgacaattctttgtgacagtgggatgagacatctaagcaagttcttcaatgagcagtatttggctgatcatggattgacaccaacagctactggtctggaatttcttgataaatgagcatttcacagggacttttcaatttcaggaagttggcatcctccctgtgactgcgatgataccttgacacaagggtgaacgctgaataggtcaaagcatgaatatatgccatacaaatggtgaacctgatgtgttttaagtactaattgtagtctagtataggcattgccattggatgggattgggatagccagtgttttgatccttggtttgatatatatctattgaggctcaggttgttaccagttagaatgctgcactgagcatctttgctgtaaacaactgcaacatatgcattttttttgttaaaaaatatttcaagaacaattcacccgt

SEQ ID NO: 36118 - DNA, 1476 bp, Zea mays subsp. mexicana
  Clone ID: UC-ZMROTEOSINTE041F10_FLI
ccagcactgccacagcatcggtccattccagcgcggcggcggcgggggcgcagccgcggcgcggtaccacagcgcggcggccgtcgcgctggcggagcaaatgtattcgtcgtcgacgacgtcgtcgttcatcccagcagcgcggcagcagctcttcagcttgccgccgttgcacccgcagagctccccgccgtcctcggagacgacgccgccggtcgttagctcggtgactactacttcttttcagcgtgctaacgacggcgacgagctgtggcggacaggctacggctcgggggtgcccgtggcgcagtcgccgtcaacgccaccatcagtgcctccgccggccatttcggttcagaaggcggggctgctggacgacatggtgccccatggtgtaaggcatggcaccccatgatcgatggtggcaaaatatggtaattaaagaaactgagctaaatatgatactgacttgctgctttctatttggtgtgtacgacgtagtagggagtacgttgtataggagcaataataatggcacttcatgcatgctgccacacatatacgtatatatatgatcgtattcatgtctctgctggtacgtacacatgtggactcagtggcttaggatctttttcaacgacatatttcaattagtgcactacaaatactagatcgagtagttggcagactagagcacatttgtacatgtgtacagatctagcatatgcatatatatgcatgcatacatgtgatactcccaattaagtttagatttcttagggaatagttgtatgcgagttatttcatgtaccttattattattattatatcttctttatattgcatttccagctgccctggttagctttgacaaacagtcccccctctccacatgctcatgcatggctgaaagctactatagctactagctagggaatgctgaatgcaaaaatgcagcacatacataaatgtaacgccggccctatattcctttcaacgactagttggttttcgttggaatcctctaaaaaatcgttataaacaccaatcggaaaggaaagacgtacttgtgttttgcgttcatacttgtgcacatgtatatataggaccatttcctatcttatccttcagcgtatagagtgacttgacttgacttgacctggagtctgatcgatctaattcaggttctcacgttttttttcagacatatacctgtcggccgtaccagcaagaggcggataaagtgatcaaccagagctatagctagggttttctcctgctggattcatcagtagttagatttatctattactctaccagacactgcatgcatatatatactcagcttatctgttcagatttgcttatattcagtgtcactctccaacaatctccattgcacctacatgtggatgtgtagcagtacttgtatttcttgtcaaaaatcagagaggtatatctagaagcttcgcatgc

SEQ ID NO: 36119 - DNA, 914 bp, Zea mays subsp. mexicana
  Clone ID: UC-ZMROTEOSINTE041G09_FLI
cttgttgatgctgtgaagaatgtgtatgatgggctcaagaggctccacttggagagaaaaattgagcttttcacacctcattcggaagctgtttttgctacttcttatccaccctccgcatgtgtgttcaaggaggaactcatgccatacatgaaacctcttctcgacttctttgcaatgattggctcacctttctatgtcaacgcatacccctttttggcttacataagtgatcctgaacatatcgatatcaattatgctctctttaaacccaacaaaggaataattgatccaaataatagcctgcactatgacaatatgtttgatgctcaggtagatgcagcttatgctgctctacatgctgctggttatgataacatggaggttcgggtggcagagactggttgggcttctagtggggatcaaaatgaagcaggagcttcatctgagaatgcaaggacgtacaatttcaatcttcgtaaacggctatttctgaggaccggaactcctctgaagccaaagagaccagtcaaagcgtatatatttgcgttgtttaatgagaatcagaagcctggagctggctctgagaggcattatgggctgttccttcctgatggaaggatttcatatgacatcggtgtctcaggtcttctgccttcatctgcatcctcatccgtgctgtccattaagaatgttcaagctgggggttggattttacagcattgggctacagttcttttatgtagttttcattttttgggggccatagtgacttgaggacggcgtacacatccgtagtaaagggtacaattgagcaagttagaatgttgctattgggaagttcacaatgaaaatccaaataatagtaccgctgcaataatctattctcctgaggctgtcctgctttgctgctt

SEQ ID NO: 36120 - DNA, 1538 bp, Zea mays subsp. mexicana
  Clone ID: UC-ZMROTEOSINTE042A05_FLI
ggatactcatggttatgttggtgctgatcttgctgccctttgtactgaagctgctcttcaatgcattcgtgagaagatggatattatagatcttgaggatgagacaatagatgcggagatactgaactctatggctgtctcaaatgatcatttcaagactgcacttgggacaagcaacccatctgctctgcgtgaaactgttgttgaagtgccaaatgtctcttgggaagatattggtggcctggaaaatgttaagagggagctacaggagactgttcaatatccagtggagcatccagagaaatttgaaaagtttggcatgtctccttcaaagggtgttttgttttatggccctcctggctgtggcaagactttgttggccaaggcaattgccaatgaatgccaagctaacttcattagtgtgaagggtcctgaactgcttaccatgtggtttggtgagagtgaggccaatgtccgtgagatttttgacaaggctaggcagtctgctccatgtgtcctcttttttgatgagctcgactccattgctactcagagaggaagcagtgttggtgacgccggtggtgctgctgatagggtgttgaaccagctgcttactgagatggatggcatgaatgccaagaagacggtttttattatcggtgcaactaacagaccggacatcattgacccagccttgctgaggcctgggcgtcttgatcagcttatctatattcctctgcccgatgagcagtccaggcttcagatcttcaaagcctgtctcaggaagtctcctgtggccaaggatgttgacttgaatgctctcgccaaatacacccagggtttcagcggtgcagatatcacagagatctgccagcgcgcgtgcaagtatgccatcagggagaacatcgagaaggatatcgagagggagaggcgcagcaaagacaaccccgaggctatggaggaagacgaggtagacgacatcgctgagatcaaggctgctcacttcgaggagtccatgaagtacgcccgtcgcagcgtgagtgacgccgacatccgcaagtaccaggccttcgcccagacactccagcagtcccgcgggtttggcagcgagttccggttccccgaccaaccgacggcagctgctgctgcggccgatcccttcgcatccgctgcagcagcagctgacgatgatgacttatacagttaaattagcagtcctgtgttgtgacgcatattgagtactttgcttcgttatatgcttattatagtagactacgtgcaagacgcggagtcgctgtacctatataatacttaagttaatattttggtacgatcctctgaatcgtgccatgagccatggtttgtgttcatttgagattatcaaagatggccagctctaccattgtgaatgataaattttcgttcaatgagaagtttaggttgcattcacattggatcatcgtatcgccgtgcagggcttcaccacgatgaagtctcctttgtttggttgcaatgtgcaatggcggatggttacaatg

SEQ ID NO: 36121 - DNA, 705 bp, Zea mays subsp. mexicana
  Clone ID: UC-ZMROTEOSINTE042A09_FLI
agcagtccagcacgactagcggaataatatccaccggcgacgggaacgggaggcggcgcggccggagattcgaagcgatggcgttcacgatgcgggcagtgaaggtgcctccgaactcggcctcgctggaggaggcccggcaccgcgtcttcgatttcttcaagcaggcatgccgctctatccccaccgtcatggagatctacaacctcgacgacgttgtcacgccctctcagctccgctcgaccatcgctaaggagatccgtaaaaaccagaacgtcaccaaccccaaggtgattgatatgcttctgttcaacgcgacggaggagctgaacaacatagtcgaacatgcaaagcagcgccaccatgtgattgggcagtatgtgatcggccaagagggcctggtgcatgagctggggtcgaaggatatagggaactctgacttcctgaagaaattctacacaagcaattacttctgatctgtgttgcagatttacaacatctggtatactccgggtggtgctctgaataaggcgacactgaggaccaatcaggaccgattgtttcgcactggaggttttgatctatttggcccttgaatcctctgttcaatgtgatactgctgtcagctgtttttcttgtttactgttgtacttatcaaattgatgttttagtcgattcgagtctacaagattgaactttgttgct

SEQ ID NO: 36122 - DNA, 991 bp, Zea mays subsp. mexicana
  Clone ID: UC-ZMROTEOSINTE042B01_FLI
cgctgatctcatgtaacatgtcacacccgagtggcgtttggaggtttcttgcatcaagggacagcgagccacaggccagcagcgccaccagccctttcgacaggctccaagtccaaggtgatggaagtgctccgttgtcattctttcccacggcttcagctccgaatgtccagcctccgccctcatctggaggccgggaccgggaccagcagaaccatgtaatcagggttgttccgcgtaacgcacagactgcttcagtcccgaaagcccaacctcagccgtcatccggaggccgggaccaaaagaaccatgtaatcagggttgttccgcataacgcgcagactgcttcggagtcagcagcgtggatcttccggtcaatacaaatggagaggaaccaaaatgattcgtagctggttaccatatactttcgtgtcatctgatggtagcttagtgcagcattgcagtttacagggctacccgagctgcagattatggtggctcctgtattctgaccactgattgcgctttacccgatcgtcatagatattggatgatatgatcttgtgttctatgcagagttgtaagccaaagttgtgcccctgaagactgaagtgacagccctgaagttgggagtccttcctgattgtgctatgactggaattggtatatatataggttacttgaacggtttcactgtgttgagctcaccacacggccgcgcttctgtaacatacaatacaatagactatgagtggtacagtaggaagcagcagtcagaaaatgactgctggtaccatgctacggggtcgctatagattgatgtgtaccggtactctggttctggtagtatatgctgctgtataattcagtgtttaattatctatatattgtacattagctgtcaagcctgtaaggcattgtattgtgggcaatgaatttggttgcaaatgttcgtgtactgggaaccatcttttgattgtttgtgtttttg

SEQ ID NO: 36123 - DNA, 738 bp, Zea mays subsp. mexicana
  Clone ID: UC-ZMROTEOSINTE042B02_FLI
ctgacttgctctgggcatattgctgccgaaactgcaaacggtcactgcctctcttgttacatgaccatcgtatttgtgcttattatgctggaaggcgcaatcactatggatgtatttctgaatagcaactgggaagaggatttccccgctgacccatcaggcaagtttgaggatttcaagcacttcgtgagatcaaatttcgagatatgtgaatgggtaggcctctcagtggtggctgctcaggtgttatcgatcattcttgggatggtactcaggacccttgggcctgaccgtgagaccgactatgacagtgatgatgacgtgaccgtgcctgcaaggctgcctcttttgataaatcagtcccagcatggttcatactatgctgaacctaacacgtctggaaggagtgattcatggaaactgcggattttagacaaggtcaataactaagatcttaaggatctcatacaacagaccctccagtaaagactctctctccaaggggttcgggagaatgataagagtatacctttttcttcctctcatggagagatgattagcagcagcagtagaatagtttacacacatttgaatgcaatccaacatgcacaagtatttgagtagcatgtgacttgaccccccctacaaaacccccacaatgtaggggaaggatgtttattgtaccaaaatgtttcagaaaagagataaagggcatgaccggtggtgccttcactgacc

SEQ ID NO: 36124 - DNA, 820 bp, Zea mays subsp. mexicana
  Clone ID: UC-ZMROTEOSINTE042B03_FLI
ctccgcggcagcgcatcaagccggatctggagagggctacacgatcgctggccgcgtcaagatcgatggcatgagcgtgaagggctttggtcttgcaacaaagacatcaaacacaaaagtgatacttaatggcggccagagggttacatttgccaggccagacggctactttgcattccacaacgtgccagctggaactcatctgattgaggtctcctcaattggttacttcttttccccagttcgagtagatatcagtgcaaggaatcctggttatattcaagcagcattgactgaaactagaagagttctaaatgagcttgtcctggaacctctgaaagaagagcagtactatgaggttagggagcctttctccgtcatgtcacttttgaagagtcccatggggttgatggttggttttatggtcttaatggtctttgtgatgcccaagatgatggagaacatagatcctgaggagatgaagcaagctcaagagcaaatgaggaacaaccccgtatcattgtctggcttgctagccagagcgcagggctagaagtagcacatgaggatgctgcaagggtctagattctattatgtgtttaagggcagtactgaagtgcttgacatgccatgtcactcggagtaatttcctggggacaaggtggaaactctttcccctgtttttactgtattttaacttgcagtttttctgttatgtagaaccttctgaaacctctagctgagctagtcatttggcacgtcatataccacacattgagatattcttgttcaatttgtattgtatgaatcagctgaatct

SEQ ID NO: 36125 - DNA, 920 bp, Zea mays subsp. mexicana
  Clone ID: UC-ZMROTEOSINTE042C04_FLI
ctctcacttctgtacccaacagaagagcggcggcgcggacggacaaggagcaggcggaagaggagttgtgctaagccacaatgggtatctcgcgtgactcgatgcacaagcgccgagccaccggtggaaagcagaaggcctggaggaagaagcgaaagtatgagcttggtcgccagccagccaacaccaagttgtcaagcaataagacagttaggagggtccgtgttcgtggaggtaatgtgaaatggagggctcttcgccttgatactggtaactactcatggggaagtgaagctgttacccgcaagacccgtatcctcgacgtggtctacaatgcatcaaacaatgagcttgtgaggacacaaacccttgtgaagagtgccattgtgcaagttgatgctgccccattcaagcagtggtacctcactcactatggagttgacattggtaggaagaagaaaacccctgctgcaaagaaggataatgctgagggacaagaggttgaggcagcagctgaggaaacgaaaaagagcaaccatgtcacgaggaagcttgagaagcgcaaggagggacgtacccttgacccacacattgaggagcaatttggcagtggacggttgctggcatgcatttcttcccgccctggacagtgtggccgagctgatgggtacatccttgagggtaaagagcttgagttctacatgaagaagctacagaggaagaagggcaagagcgctgtagcttagagcattctcatggattgtcttgcaccgaaatgtgtgtcatgatgagtacactttttttggttagtcgtctcaagttcagagcgttatgccatgttttctgacctgattagtacactgttttctaaaagcgattgagctctagtccaatgtattgataatatctgctgttgtcct

SEQ ID NO: 36126 - DNA, 1137 bp, Zea mays subsp. mexicana
  Clone ID: UC-ZMROTEOSINTE042D07_FLI
ctcggcccaaagcatttggagaagttactgttgctagcaacgttcctggtgctgagttgctagatgaaaatatttcttcagaaggggaaagttcggacgatgagtctgatggttttgactctgatgatgagatggacttgacacctacccctcctggaacagaagaaaatatggagggttcatctgttgcaaacaaacatgatgccgatggagataccaaagaggaagatgatgcatctgatgatgaagatggtacggatcaagatgactccaacagtgatagtgatgaactagacgatgactctgatgtggatgtggatactgatatatctgatgaagacgaaggtgacgacgatgaactgaaagaaagcataaacggttcagaggatgaagctttagaccagaatgaagacagcgaagaggaagacaagtcaaaaggcagtggctctaaagcgcagaagaggaagtttcatgattatattggacagctaagttctgctgatgcaagccttcgagttctgaagaggttagcaactgccaagaaggctgaagaaccatctgatgaaactggtaaaattctatccgatgaagatttcaaacgcatcaaagaactcaaggctaagaaagaagcgaagctggctttggctcagcatgggctaatcaagggtggcgacacgagatctgtaacctttaagatgccatcatctgaccagctcagcaggaagcgtgtcgatccacttgagcttgaggctcacgtcaggagaaagatgtccaaggaagaaaggttggcaatggtgaaagctggaagagaggatagaggtccttacatggcaagggcggccgtgaaacagaaaaagaccggtggactgagcaataagcagaagcagcacaagaagaggatgccactggcagcgactagagccaaggcagcacgctcccggcaggagaagaagcagcagcgcaagcgctccgggaatcagttcaggggccgcaaggcgtggaagtgagagagcctctgctgccgctttgcgattcatctatctagccgagtggcccaaatttttgactcttttgtatcttcttctgccagataatgtttccatataataccttgattctatgagaaggcttttccat

SEQ ID NO: 36127 - DNA, 1179 bp, Zea mays subsp. mexicana
  Clone ID: UC-ZMROTEOSINTE042D09_FLI
caaaatctgcaatggccacacctgttcagatgcctgatttgatcgatacaggtgatcaagatggtctggcaacaagttctggacaggaaagcaatggacaaaaaaatactgggaaagcatatgtttcttcagttgatgatttgcttggtggtgaacctattgctgatacaagtgtcactgctgatagcaatggaagcgatccatttgcagatgtatcgttccatgaggtagaggctaaggagactaatgatctcttctcaggattgatagtagaagaaaaatcatcagctaccatgcacggcagttcttcatcaaacaaaaatgaattaccagatatctttggcagcccccctgattctttcatccaaggtagtgttactgaccaaggaactgtcaatgatttgatgtctggtttgaaccttaatggaacaggtcaggctcatcctccagttaaagcagaacccaatagcaccttcagtggttcacagttctttgatacaaacaatgagatcggccatgtggcaagtgctgcagcattgaatggcattgttggtcaaaactcgttttaccaacagcagcagactcccttgcagtacagcttccctcaacatatgatgctcaatcaatcatttcctgggcaacaattaaattatggtgctatggggattcttcttgctcagcagcagcagttactgcaaaattttggaaatttcaatgctgaacttgggaattcttctttcaattcgatgaacagtggaaatgcatcagtgcttccagatattttcaattcaagtaatcaacctcaaaatcatgttgcagcgatgagcagttcgaagaaagatgacactagagcttttgattttgtttcggatcaccttgcagcggcacgtgcttcaagaaagtgaaccaggaagcgatgagcatgtccatatgctggcaagagctcaagtgcttgatggacacaaaagctgggactccaaaagctgcatctcgtcacagcctcgcagattggctgcatgatcacacacggctggtttggcatgggatcgggcgcatgtttgaacagttgagaaagaagggttgttccatacggttgaaagacgggatgttgtgtcgtactatgtacttagacaaagactgtttttttactctgaaaaataaattgcatcttccgacttt

SEQ ID NO: 36128 - DNA, 1731 bp, Zea mays subsp. mexicana
  Clone ID: UC-ZMROTEOSINTE042E03_FLI
gaaccatttggactcaccttgattgaggctgctgcatatggtctacccatggttgccacccgaaatggtgggcctgtggacatacatcgggttcttgataatggaattcttgttgacccccacaatcaaaatgaaatagctgaggcactttataagcttgtgtcagataagcacttgtggtcacaatgtcgccagaatggtctgaaaaacatccataaattttcatggcctgaacattgccagaactatttggcacgtgtagtcactctcaagcctagacatccccgctggcaaaagaatgatgttgcagctgaaatatctgaagcagattcacccgaggactctctgagggatattcatgacatatcacttaacttaaagctttccttggacagtgaaaaatcaggcagcaaagaagggaattcaaatgctttgagaaggcattttgaggatgcagcgcaaaagttgtcaggtgttaatgacataaaaaaggatgtgccaggtgagaatggtaagtggtcgtcattgcgtaggaggaagcacatcattgtaattgctgtagactctgtgcaagatgcagactttgttcaggttattaaaaatatttttgaagcttcaagaaatgagagatcaagtggtgctgttggttttgtgttgtcaacggctagagcaatatcagagttacatactttgcttatatctggagggatagaagctagtgactttgatgccttcatatgcaacagtggcagtgttctttgttatccatcttcaagctctgaggacatgcttaaccctgctgagctcccattcatgattgatcttgattatcactcccaaattgaatatcgctggggaggagaaggtttaaggaagacattaattcgttgggcagctgagaaaaacaaagaaagtggacaaaaaatatttattgaggatgaagaatgctcatccacctactgcatttcatttaaagtgtccaatactgcagctgcacctcctgtgaaggagattaggaggacaatgagaatacaagcactgcgttgccatgttttgtacagccatgatggtagcaagttgaatgtaattcctgttttggcttctcgctcacaggctttaaggtatttgtatatccgatggggggtagagctgtcaaacatcaccgtgattgtcggtgagtgtggtgacacagattatgaaggactacttggaggcgtgcacaaaactatcatactcaaaggctcgttcaatactgctccaaaccaagttcatgctaacagaagctattcatcccaagatgttgtatcctttgacaaacaaggaattgcttcaattgagggatatggtccagacaatctaaagtcagctctacggcaatttggtatattgaaagactaaatctttgatctttgctggtcagcagaggaatcaaagcagtaggatcgaggagtgacaggacttccccactgtgcacttcgccgaaaagtaataatgggattgctatgcatggcccttgttgtacactagaaaattgggcacgcaaacttgtgtcagttttttcgctgttgcaaaattcagtgatggtgtttttgtaactataccatcctgtgtcagttttgccgttgttgcaaaactcagtgatggtgttttttgtaattattatacatccgaataataagactggtgtttccagacagactatgaaagctaaggggaaatcacgattttcct

SEQ ID NO: 36129 - DNA, 1791 bp, Zea mays subsp. mexicana
  Clone ID: UC-ZMROTEOSINTE042E09_FLI
agagaatgcattttgggcattgacaggcattatggatgactattttgatggttacttctctgaagaaatgatcgaatctcaggtggatcagcttgttttagaggagttagtcagagggagattcccaaagttagtaaatcatcttgattaccttggtgtacaagttgcatgggtcactggtccatggttcctatctatttttatgaacatgcttccctgggaaagtgtgcttcgtgtgtgggatgttcttctctttgagggaaaccgtgtgatgctgttccggacagctcttgcactgatggagttgtatggtcctgcacttgtgacaacaaaagatgctggggatgcagtaacccttttgcagtctttagctggttccacttttgacagtagccagcttgttttaacagcttgcatgggatatcaagctgtaggtgaagcaagactgcaagaattgagaaataaacaccgaccatctgttatctcctcaatggaacagagagcaaaaggtcttcgtgtctggagggacacggacaggcttgcatctaggctatataattttaagcgtgacactgaaccattggtgtcgttatcagaacagtcaaatgacttgacagatggcgataagaaccaagaagccaattgtagtaatgtggatgatatgtatcatggcctcactgtcaactctgagattgattctctgcctgatcctaaagaccaggtagtctggctgaagggtgagctgtgccaactgctagaggagagaagatccgctgttctgagggctgatgaattagagacagcacttatggagatggttaagcaagataacagacgcgaattaagtgcaaaggtcgagcaattggaacaagagttgtctgagcttaggcaagctctatcagacaagcaggaacaggaacaagcaatgcttcaggttctgatgcgtgtagagcaagaacagaaagtcacagaggacgcccgtatctttgcagagcaagatgctgctgctcagaaatatgctgcacatatacttcaggagaagtacgagggagctatggcttcacttgctcaaatggagaacagagcagttatggcagaaactatgttagaggcaaccattcagtaccaatctagtcagcagaaagcacagcttccatcgccctctccttctccaaggaccccaactcgagatgcatcaccaggccaagggaaccaagattcatcgcaggagttccagcctagaagaataagcttgcttgccccattttcttccctcggatggcgagacaagaacaagggcaagcagaacggctctgatgagtcaacaaacggtaagctcaataatagcaccgatcaaggggttgaaacacccaaaaaaagacgacgaaaagaaggccgactcgccaaaagagattgaacagattgtccgaacaccggaaagagacaatgaactgagactagggacacccaagatggatagtgaggtaccaagtgtggaaatggcggcaaacagtaccaatgggctggaggaccagttggaggagataaaattggattgatatcctttggctggtcgctaagccgcaacataaggtgccattaaattatgtattggtgtatccatcttccacctctattcttttaggtttatagattcttgtataacttgaggagagagaatgaataaactatgtttgccctcttataggtctgttgatcgcctgtaagctatcataagtacacatgaaaaagacgtaccaaatagaagattaccacgaaagcaatttttgg

SEQ ID NO: 36130 - DNA, 1093 bp, Zea mays subsp. mexicana
  Clone ID: UC-ZMROTEOSINTE042F07_FLI
gccaattcccaccaacaagaggtacagcgccgccaagatcttcagcagccctgaggtcgctgccgaggagccctggtatggtatcgagcaggagtacaccctccttcagaaggacaccaactggcccctcgggtggcctattggcggcttccctggccctcagggtccttactactgtggaatcggcgcggagaaatcgttcgggcgtgacatagtcgacgcccactacaaggcctgcctgtacgcaggcatcaacatcagtggcatcaacggggaggtcatgccggggcagtgggagttccaggtcggaccgtccgtcggcatctcttcgggcgatcaggtgtgggttgctcgctacattcttgagaggatcaccgagatcgccggcgtggtggtgacgttcgacccgaagccgatcccgggcgactggaacggcgcgggcgcccacaccaactacagcaccgagtccatgaggaaggagggcgggtacgaggtgatcaaggcggccatcgagaagctgaagctgcggcacaaggagcacatcgcggcctacggcgagggcaacgagcgccggctcaccggcaggcacgagaccgccgacatcaacaccttcagctggggagtcgccaaccgtggcgcgtcggtgcgcgtgggccgcgagacggagcagaacggcaagggctacttcgaggaccgccggccggcgtccaacatggacccctacgtggtcacctccatgatcgccgagaccaccatcgtctggaagccctgaggcatcccgtggccgtgtcgtgtcggtttgctccgcgtacggcgctggccgttgcatcgcagggcccagcggctgcgcaactattttcccttccccgttctgtttgcttgtactactactctaccgctagtcctgcatagcattttagctagaacacaacagccaaaaaaaaatattgttgcttgcttcgacgcttgccaccacttccattccatgccgtccgtccgcttccttcctgtgtaatcctcctccaataatagacgtgccatgttgcatcctctattcctctgcattgtatagaagtggtgtaattcttttgct

SEQ ID NO: 36131 - DNA, 923 bp, Zea mays subsp. mexicana
  Clone ID: UC-ZMROTEOSINTE042G06_FLI
ggcggcgcgggcggacaaggagcaggcggaggaggagttgtgccaagccacaatgggtatctcgcgtgactcgatgcacaagcgccgagccaccggtggaaagcagaaggcctggaggaagaagcgaaagtatgagcttggtcgccagccagccaacaccaagttgtcaagcaataagacagtgaggagggtccgtgttcgtggaggtaatgtgaaatggagggctcttcgccttgatactggtaactactcatggggaagtgaagctgttacccgcaagacccgtatcctcgacgtggtctacaatgcatcaaacaatgagcttgtgaggacacaaacccttgtgaagagtgccattgtgcaagttgatgctgccccattcaagcagtggtacctcactcactatggagttgacattggtaggaagaagaaaacccctgctgcaaagaaggataatgctgagggacaagaggttgaggcagcagctgaggaaacgaaaaagagcaaccatgtcacgaggaagcttgagaagcgcaaggagggacgtacccttgacgcacacattgaggagcaatttggcagtggacggttgctggcatgcatttcttcccgccctggacagtgtggccgagctgatgggtacatccttgagggtaaagagcttgagttctacatgaagaagctacagaggaagaagggcaagagcgctgtagcttagagcattctcatggattgtcttgcaccgaaatgtgtgtcctgatgagtacactttttttggttagtcgtctcaagttcagagcgttatgccatgttttcagtcctgattagtacactgttttctaaaagcgattgagctctagtccaatgtattgataatttctgctgttgtcctattgcggtgatgtttatttgccctgttcgct

SEQ ID NO: 36132 - DNA, 696 bp, Zea mays subsp. mexicana
  Clone ID: UC-ZMROTEOSINTE042G11_FLI
tttcaaccatgaagtgtagctgtggattatgccattatggtcaaattgagctttgttatgtatagtgtgacaaatttgacttaacatgcatgtatacgtttgaatgctcctcttgttatgtgatactttatagtgttacacttcatcattgccttaatatttttgttgctaatttattgtagtattatttgaatgccaaattcaaggagacagggcacaacaacatatacttccctcgggactgacatgtgaaggtggaaagtgaagatcaaccaacctcaatgaatgcattagaactgatttcactaaacttggcactgaatctagacaatttgtttgaagcaaaggaggtcaatcataattctcctgtcttcttggccaattttaggggtttccaaatttcattaccttactgttgtttgaaatgcaatctaggaagtataaatatatagtgatattaattctggttaaaaaatgacagtattgtaaaagagagacaagattcacctcatggtgtcccccaaaagagataatcacaaagatcgaagaagctgaaaagctgcttcgctttgatgttcggaagaaaaaatacatggtatttgctactgaagcctgttatgtacaattttcctcctgttgttttccacacatggtgtaaaatccgacatgaatatctagaaagtataacttttactc

SEQ ID NO: 36133 - DNA, 1031 bp, Zea mays subsp. mexicana
  Clone ID: UC-ZMROTEOSINTE042H02_FLI
ttgaaccagcatggggccgcaaggaattcttgaagttcattattttgatcaactccatctgtggcattcttgcattttgctttgctattggactctactacgtcactggaaaggagagcttccttgtcacaccactttctggtttccacggttgccttgctggctttcttgtggccctgaagcaactcttaccaaaccttgagcttcctatgtgctttttctggaaaataaaggcaaagtggatgccattctttgttgtatgtttctcaagtatcatggccttcatcgtgcctgattccattaacttcctgccaactttggtgtccgggatgtacgttagctggctttacctgagatacttccaaaggaacccactgactggacttaagggtgatcccagtgatgacttctccttccccagtttattcccagctgccatgagaccagttacggaccctgtggccaacctgtttgataggctgttgtgtgcaaggtccaggcctttggaagtcgccctcccgatatcagatcctaccaaggcttcaagaagaagggagcgtggcgagagggttcttgaggaaaggttggcggccgacaatgctggtgacacagaggcctcgcctcgtggccatggcaccgcggaagactgagaactttcttgtgaccatcagctcctcttataggagccatggctttgctccctccagcgtttatagctctgcacttttgtcttctggagatggagctattcagttcacagcgaacgaataatacgatgttcttagtttctctttttttccgcttctttgtctgcgaggatttattggttaaattgtgtactagtcaattgttatggtacagcgaaaaagagagaagagggtgatggcatttgcagcgaggtgttgagattccgttgtagccatgcatttgcagccgattgtttggtactggtcaaagttctgtagtagtcatatactctgcttaaaatatagaaagaagaatggcttcgtcagtatcagatgttgagatat

SEQ ID NO: 36134 - DNA, 1105 bp, Zea mays subsp. mexicana
  Clone ID: UC-ZMROTEOSINTE042H08_FLI
tattgaacaagatgacgacaccccttggttgaatgttgttcctgtggttgtgtttttttggttgaactttgatctagttgtggaaaacatgaaatttaccaataaactaggacagttactttaagtgagctcactgtttgcactcgtactagaactgtctgatctgtggaatccattatcaattggcaaatctcccattaagcaatgccttatgcaaatggattcatttttatcatatgagctgcaatttcagctctttattctttgggtaatcattatttgctgatgattttgagttgtttgattgcctactgtctttattggccttaccgccttatgctaggtgatagctgatccgatgtatgcattatataactttttaaatgattgctcaaaaaaaacatgaatatgctttttctttaccttctatacacacttccagaattgtggtgttgactaatgtgggatctgttgcgacattcaggtacacctgcatgcaggcactgatgaaccgctgaatatcacatttatgagagcaccttcttctgcacttctcaaaatagatgttcctctgatgttcattggagaggatgcctcgcctggtctcaggaaaggagcttacttcaacaccataaaacgaacagccaagtatctgtgccctgctgacatagtaccaccatacattgaagtggatctaagtgagttggatgtaggacagaaattgctgatgcgtgatctgaaagttcatcctgcgttgaagctgcttcattcgccagatcagcccatctgtaactttaccggatcaaggtctccagaatagaagaagggaaaataacttgcttctttgtatgagctgttttgagcacaataaggttttgtttcgtacttgagtgattcaggtgctacttgtcgtactgttaggatgaattgtagccagagacaccaatttttacctcaggaagggatcttttgagcaggtagatgctactacagctagacgcacttgcaaagtttcccaaatatggtcttctagtgttaacagaaacttatggtgcggcgagcaatattgaaaattgtttgcaatctaatttagcattgcgtattt

SEQ ID NO: 36135 - DNA, 1012 bp, Zea mays subsp. mexicana
  Clone ID: UC-ZMROTEOSINTE043A05_FLI
ctttggatgagatgcgcgagctgtatccttacctggttgatgaggccacgatccttgtcgaaccggcggtgctggagagagtgctcctcaacattgaagacatcgacgcccaggtgttggacaagaagatcaggaaggcgaggaagcagctcgccgatgccatcacggaatcggcaaggattaacgacatggaagtgcctacaatatttctgtttacatccagcaagcttcaaccagaaaagttaagagtggaaaatgagaataatcttttggttgatcatttggagaaaatggatgatgtggatatttgtgctaaacaacgattggcaagagtggaacgtgaagtaatggagttgagacagactgtaatagcttaccagtctcaggcaaagggtataatatgtgaatcagccaagggtggccttcaatcaattgtagctgaaaatcagactccagccaatatactacaaaagaagacagaagtaccaaatggcttgatccataaaaagaatgcggcggttacatcaaaatatcattgtgccgttccccacaatgttcctcccaataagccgaaaatgcaaggggtgatgttgccaccatctaaggcgtttcctggtatgcctaggaagattgacaaaagtccaactccacgcaaagcgatttggaaggggcccatatgttgactaggttctaaaggcgacgaccaggtttcccttgtaacatagctctactgtgtgtttgactaggttctcattttggtccaagctgcacatgatccagcacagcagtatgtatggctcggacggttctgggtctcataagactaccgcaccctgtagtgggtctatattttggtgaaatatctgcaaaaaggttatctagatgttgcagatgtcctgtcaaactgatgacattattagcaacgagtgtcctctggtgcacatgcactaagattgttgaactctggttgtaatcctagttaagcaatgaagctcacatctcatatgctgat

SEQ ID NO: 36136 - DNA, 838 bp, Zea mays subsp. mexicana
  Clone ID: UC-ZMROTEOSINTE043B09_FLI
cggatagagaaggaaaaatttccccaaaccctagcttcggatctcgatggcgaacccccgcgtcttcttcgacatgaccgtcggcggtgccccagccggccggatcgtgatggagctgtacgccaacgaggtgcccaagaccgcggagaacttccgcgcgctgtgcacgggcgagaagggcgtgggcaagtccgggaagccgctccactacaagggctctaccttccaccgcgtcatcccccagttcatgtgccagggcggcgacttcacccgcggcaacggcaccggcggcgagtccatctacggcgagaagttccccgacgagaaattcgtccgcaagcacaccggccccggggtgctctccatggccaacgccggccccaacaccaacggctctcaattcttcatctgcaccgtggagaccccctggctggatggcaagcacgtcgtcttcggccaggtcgtcgagggcatggaggtcgtcaaggccatcgagaaggtgggctcccgcagcggcgccacctccaaggaggtgaaggtcgctgactgtggccagctctagatctctggtctgtccggctgccctccctccgtcatcgtcgactccgcctgcgtccgtcccttttcatttccttcgatctgaataagatgatggcgatctgagtggtggtcttagttgagtcttcaagtcgtttgtgtctgtgtccctcgcggttttaatttagcggtttaggtgtggatctgtgaatcccgtggcgcctctgcttaatccttgtttcagctgttatgttatgggatccatgataatgctataaaactgaaattccgtttcgtgctt

SEQ ID NO: 36137 - DNA, 1431 bp, Zea mays subsp. mexicana
  Clone ID: UC-ZMROTEOSINTE043B11_FLI
gttctggtggatcatactcctccgggcctacacaaaaaccaccggtgatttgacgctggcagagacgccggagtgccagaaagggatgaggctcatactcagcctgtgcttatccgaggggttcgataccttcccgacattgttatgtgctgatggttgctgtatgatagatcgcagaatgggtgtatatggctaccctattgagattcaggcccttttctttatggcactgaggtgtgctcttcaaatgcttaagcatgataatgaagggaaggagtttgtagagaagattgctactcgccttcacgctttaagttatcacatgcggagttatttttggctcgatttccaacagctaaatgacatctatcgttacaagacagaagaatattcccacactgctgtcaacaaattcaatgtcattcctgattcaattccggattggctatttgactttatgccttgtcagggtgggtttttcattggtaatgtcagtcctgccaggatggacttccgatggttcgcacttggaaacatgattgctatactttcttcccttgcaacacctgagcaatctgttgctataatggatcttattgaggagcgttgggaagagctcattggtgaaatgcctctgaagatatgttatcctgctattgagaaccatgaatggcgaattgtgacgggctgtgatccaaaaaacactagatggagttatcataatggaggatcgtggccagtacttctgtggctgctgactgcagcctgcatcaaaactggacggccacaaatcgcaagaagggcaattgacctagcagaaaggaggctgttgaaggatggctggcctgagtactatgatgggaagcttggtcggtatgttggcaagcaggcgaggaaattccagacctggtccatcgcggggtatttggtcgccaagatgatgttggaagatccttcacatctcggcatgatctccctggaagaggatagggcaatgttgaagcctgttttgaagcggtctgcgtcatggacaaactgagatggccacaaaaattttagggaagcgaagtctgctgaaaacacgagttcttgggggtagcatctccttgtctgctgatccgtttcctttgacttccaaacatagatggtttgtgtcttctggattttccttggttgtacaatatatcagctcgttttctgagttgaaagaaaaagaagcaactgcagaaatgggcattttgttttcttctttcgcaatctctgtaagaagatactctgattcttgcttgggtcatcctataagttgtggatccttttggttagagtcaactttgttgtgccagtggattatacggatgagtaagctgattccagcttccctgtgaagcataagtgctctttctaacgaatgaataaagctcctttctctgt

SEQ ID NO: 36138 - DNA, 1444 bp, Zea mays subsp. mexicana
  Clone ID: UC-ZMROTEOSINTE043C07_FLI
ggacgacggccgttgctgacgttgtgtgagtgtcctcgaacaagatgtatgtagaggagtagccaaggttattaaaacgataaaacgttggaacgctcatggttgaaattttgacttttaaacgtttaaactttgtttaaacgtagttttaaacaacataggaaaaataccaatacattataatttcatacaataatataaagttaaatatcaaaatagagaggctagtggcttaccaaaacttcacccatgagctggattgaacctcaaaagtaactaatagactaggcccaaaagtagctaatggtctaaaatgcataaaacactgcgttttacagtttagaacgccaaaacgctaaaacgtggtttcaacctctaattagagttttgacgtagttttaataacactgggagtagcacatccggtggtgcaacgactaggtgtactacctcgttgatgagctcggggtgcacttcgtttggcagcccagccaagagtcatcggtactcgtcatgtcgtgcgtgtttgacgactactatatcaaggactatgacgtcatcttggcgccagaggtgacgcagaggaggaccgacaacaatgaccactcgccatcgtctgggtagcttttgtgccgttctgcctttaattctcttcgcaaacacatacacttgcttttttgtttaagtaagcgtgtatggtagtgcgtacctgatgactgataatgtacgagggaacttctaccggcaggtgtggcatatgcttttcaatgatgagaccatgcaaatcgtggcatatatcgaaatctgcatgatactgatggttgcaatgtagtagtgaaacagtaaattaaaataacaaaatttatatattgctaggattacaaatggattatgaaatattttttataacaatataagacacattttgtatataagttactatgttattatatgtttccgttgcaacgcacgggcactcacctggttttttttaagaagataactaaggaaccacaacggatgattcagcactattcaggttaatattttcagatgcttacatgtttacttatgtttgcaattttgtttagattttagagatcattgagtacatgacagttttttgcgtggttgaagccttcaaggcgtctgaatatttactggctattatatgtgtctctctgttaaatcagaagaatggttgttaagtgctaacctgtaaggccattaagggcaagaatcttgaaaatggagtaagggtttggcagagctccaggtccaaaaatctgctgagttgtttgtttgagcagttttccttctatcatagacaaaaattgtcttaggattcttaatttaagcacaaaaactccagatctaagatgaagcagttcttctagacaatgactaggaccatatcaccatatggaaaattaagagacaaggc

SEQ ID NO: 36139 - DNA, 1515 bp, Zea mays subsp. mexicana
  Clone ID: UC-ZMROTEOSINTE043C09_FLI
gtggctgtacgcctacatcctcaccatcggcggcgcttacaagaactctccgcccaagacgcaggtgcattgccgcgttgatcggtcgggccttatttcaggagcaccttggataagtgttccctatccctttcagtggggtgctccgacgtttgacgccggagaagctttcgctatgatgatgacttcgttcattgctcttgtagaggtttgtgtccaatactcggctggaaatggaagagaaaactgcattatatatatttatattcgtaatgtacctatttgatatcatacatgttgttactattttcgtgcaaagcttgtcaagtttgagaaagttggacttagtacacctcttgaggttggtttatttgggtcagaggtagtattactttacgagtagttttacaaatctgatatgttttaaccctgtagtcaactggcgccttcatcggtgcttcgagatatgcgagtgcaactatgattcctccatcgattatcagtcggggcgtgggatggcagggcattggtctgttgctcgattcatttttcgggacagcgaacgggacatcggtttcagtagagaatattggactgcttgggttgacacgcattggcagccggagagtggtgcagatatctgcaggcttcatgattttcttctctgtccttggaaaatttggagctttgtttgcgtcgattccgctgcccgtatttgccggcatgtactgtctcttcttcggatatgttggtggcgttggcctgagcctccttcagttctgcaacctaaacagctttaggaccaagttcatcatggggttcgctttcttcatgggcctatcggttcctcagtacttcaacgagtacacagccgttgcaagctatggtccggtgcacactggcgccagatggttcaatgacatgatcaacgtgccattcacgtcgaagccgttcgtcgctgggttggtagcctatatcctggacaacaccctccaggtaaaggagagcgcggtgaggaaggacaggggcaaccactggtgggagaagttcaggagcttcaagaaagacgcgaggagccaagagttctactcgctgccgttcaatctaaacaagttcttcccgtcggtctgatctcaaatggcgccgccgatgaatcaattctggaagcaacccttgttcatatgggccttaatgaggaacataattctgctggtctggccagtggaagcttctgtgtctccattgttggtcaattttgtgtgttttcggacgagatgggagtaattgaactgtagaaattattaggattgaagtataacgcgttctttttgtgatctacatgaatcagcgctgattaaatatttgtaggcgtagatactttgatcagtcaaatgttataggagcaaaccaatcatgggccttagggactagatgctaaaatagcccattagccgagcaatgtaagccaacaaggaccattaggtgagaaataaaaacaaactttttacgacccgc

SEQ ID NO: 36140 - DNA, 1143 bp, Zea mays subsp. mexicana
  Clone ID: UC-ZMROTEOSINTE043H01_FLI
cttcctcggcctcttcttcatggccggttcaattctcttgatctttcttacactactcgcgggctcgcgcaacaccaccccgcttaacgaagtctacttcctccaggccgatactggtaatatccctggcgcgccgtctacttcacggtggacattctggaatctctgtggggtgaccgatggaggtaggaacgactgcggtagctcacacccagcgttccccttggaccctccaagccatcgcaactttgatacgaccgaaaatgtgccatcgcaattcattggaacaaaccactacttcttgatgactcgttttatgtttcccttcatcattattggtctattcttcgccgtggtctctcttttcactggtctgctagctatgtgcactcgtatcggcagctacctttctggatttgtggcctggctcgccctgaccttccaggtcatcactacttgtctcatgactgctgtcttcgtgcaagcccgccacgcctttaacagcaacggccaaaactccaagctcggtgtcaaggctttcgcttttatgtggactgccagtgcctgtctattcctttcttgcctgatgtactgccttggtggcgcagtcggccgtaaggatgacggttacagtggtcgcaaggagcgccgccgcggtttcttcaattcggctcgatccaacagtgtgcgaagccagaagaaggaatcctacgcttaaaggagatatgatcatatgatctcaccccaactccctcggctctccgtatcacgaaaaagcaaagcaaagaatcgacggatacaggactgacagctaggctcacgttgacaaccttccatctattcaacgtctccgcttttcgcctcgtacacgattgttccactgcgttgatatcctgctgggtgctcttattcgtcgggttatccctctcagcttgtcttggtcttattgattatgcccttcagtgattcccgattatctggagtctcgcctcgcccacctttacgttccttaatgctgttacgaaaatctacgatcgttactgtaatatctattgatgttggtgaattgatgcgcatgccagtgcggcaatgacgttatcagcttgatgattcttttggtcagtgaatccatggatggttgac

SEQ ID NO: 36141 - DNA, 1098 bp, Zea mays subsp. mexicana
  Clone ID: UC-ZMROTEOSINTE044C05_FLI
gaggcaactccatgaattacatcgagtccatcccgcccctcaacggagggaattacgagttatggcgagagaagcttgagctggcgcttgcgttgttagatattgatctggctatcactgatccctgtcccatcgctccggtagacccggtgcaggaagagaacgagagcgatgatgatttcaacgctcgtgtgcgcaatcatgcaccaataaaaatgaagtatgacctttacaaggtaaaatgggatcaatcgaaccgcaagtgtctgatggtgattaagagctctattatggatacaatcaggggagcattcccagcatgtaccaccgctacagagtatcttagtaaggtggagagtcactttactatctcttcaaaggcttatgcatgcacaataattgaaaggctacttaccgataaatacactggcggtggagtaagagagcatatattgaagatggccagcatggcttccaagcttaaacctatggaaatggcgctcccagatgagtttctggtctatttgatttttgcctctctgcctaaagaatttgaagcttttgagattaattataactcacaaccagacaattggggcattgagaaactgattgccatgtgtgtgcaagaagaggaaagaattaaggcttcacgtggtgattctatcaactatgttgggatatataaggcacatggcaaggctccacagaatgatcaccatctgaaaaacaaagaggtggacatgaatgcttgctactggtgcgaaaagtcagggcatcatcagaaggattgtccatccttcctgaagcacttgatcaataaagggattccatacgaggaggacccttcaaagaggagaaagatgcattaaagtcgtcaatggtgttgataatgaagttgaagtgatagaacttccattattattgaataatagcttcattcttcacttgaataatgttctctatgtatcatctttcctgtcatgcgaatttaagctctctaatttattagaaatagatacatagatcctttcatgtaatgatatcgtgatattccatgttactccttttttgggtcgatgtagagacctccattgc

SEQ ID NO: 36142 - DNA, 1417 bp, Zea mays subsp. mexicana
  Clone ID: UC-ZMROTEOSINTE044C11_FLI
gtgattctgctgagagatctttgactaacgtcgcgtcagaaaacagagaagataaaatttgccatgaaaacactagctctggtgatgtctgtgctgaaccaaaagagtcgatgcttcttcaagaaaatggaataccagttgggactggaaacatggtagaagagaaggttgatgcacaaccacatgtggttgtccagcaatataaggaagaaactaacttatctccgttaacagatgccctcaagaagagcttgatgcaggaaaccaccttatctccatttgcagcttctcacaaggatagcttgacgcaagaggatggcttcatgcaagaagctgatttatctccgttgactgctaatcacagggatagcttgattgaagaaaccaaattgctaccaacaacagcttttcacaaggtcagcttgattgaggaaactggcttaactcagacaatatcttatgagaataacttgaagttacaatttaaggaaggaacaaagatcggtgatatcgatatgctgccacaagatgtggacctgattgagttgcccgatcaaaggaaaataattggtcatgatgttggtgctgaaactgtaatagaaatggaaaagggaaagctggatcaatctagctcactaaatctatccgatcttgacctagttcgtggtacagaggttgccgctgtacacaatagtccagcgttggtccagccatctgcagctggatcttctgcagagtcaaataataaacagcaagaaggtcctgaaacttttacaggcgccaatgccagtcatacatatgatttatgccagattccattagataataaggatgttcaagtaattgatatagaatgtggcacaccagttgaagttgatggatttgatttgtcaaagtcaaagaatgagatgatgtgctctagcatggatagcatgatggaccccggccatggaatacatacggatattcttcctggtattcaagatggatacagccttgcattttctgattttcttggttctgatataccatgctacccatcaatgcaatcagatcttcatgctggaataggtgccaacgactctgagggcattgctgtcatggatgatccaatatatgggtccctctctgatattggtttcatggacgtgtgggggcagcccactcaagactacgacaaattcttctaggctgccgccgggggccgaggttcagtgatttgacaggagaattagttgagttacctgagtacaggcgagaataaatagatcgggttatctcagagaaatgttgtaatcattcctaattgtagagctagagaaactctcttttttttcgatacccatttcgacggagttactgatccaaagactggtcttatgcgttcaatggtttgagtgcggtattttttcgtttt

SEQ ID NO: 36143 - DNA, 1060 bp, Zea mays subsp. mexicana
  Clone ID: UC-ZMROTEOSINTE044D04_FLI
cctccatcttcctcctcctcttccgactgccctcatccactccactcccaagtccccaccacccccaaccccggctctccactgcagcgcaggcttcgcttcggctacgctcggctcgagcagaagaaaatgcaacgggcagtgcaggccgtcaggtcacacggcaatgttcttaaatatgctgttctacaacacatcagcgctcccaagccagcaatgcttcctgctgccttttctcgtttcatgtcagtttcatctgctcgcctagaggatcgtggatttgaaactgccactgtagcagatgtcttgaagtctaaagggaagagtgctgatggatcttggctctggtgcaccacagaggatagcgtctatgacgctgtcaaatctatgactcagcacaacgtgggagctttggtggttgtcaaacctggacagaataaatcaatcgctggcattgtcactgagagagattatctccggaaaatcatagtgcagggaagatcttccaagtcaaccaaggttggcgacatcatgactgaagagaacaagctgatcacagtgaatcccgacaccaaggtcctgcaggcaatgcagctcatgacagaaaaccgcgtcagacacatcccggtgatcgacggcacggggatgctggggatggtctccatcggcgacgtcgtgcgcgcggtggtggccgagcacagggaggagctgaaccggctcaatgactacatccagggaggctactaggacggcgtgtgcagcgacgaccccctccgatcccgccagtcagtgaagtccgcctttgaaatccaataactcggaacaatgatgatgacgaaataggccgtgttttcttggacaatgatgttaagttcggcaaggttttcctttctcttttttttattctactgcgtggtctatgtgtatattgccaaaggcatgcgtgagccatgcgcccggtgctggggcgcagagaccatctgatggtggaaacaccggaaataagagcgtgccgctgtgtgtttcctttgaaggaatgaaaatggtgtttgtgttgtgc

SEQ ID NO: 36144 - DNA, 1079 bp, Zea mays subsp. mexicana
  Clone ID: UC-ZMROTEOSINTE044D05_FLI
gaggaggcggcggcggcggcggcggaggcggaggaggaggagccccggcaggcccagaaggtggcggcgccgccgtccacgcccaggggcaagaagcgcgacggcgtcagcggcgtgaccgaccccgcgccgccggccgccaaggctcaggtggtggggtggccgccggtgaggtcgtacaggaagagctgcttccagcagcagcaggcggcggcgggcgccaagggcaagccagcggcggcggatgagggtgctccgggtccggcgggcggcggggtgttcgtgaaggtgagcatggacggcgcgccctacctgaggaaggtggacctcggcacgtgcgggggctaccgccagctgcgggaggcgctggaggccatgttcctctgcttctccggaccgggctcgggctcgggcgatgcgtccggcggcggcagcccctccgacttcgccgtcacctacgaggacaaggacggcgacctcatgctcgtcggcgacgtgcccttcggcatgttcatcggcacctgcaagcggctgaggatcatgaaggggactgaggccagactaggcctcgggtcagccaagaacaacgactgagggagagggagacgacgaccattgtgcagacccgaccgagatccacgcacacggcggcgcggcttgtgcacgcgtgagcgggccctttttttgctctgggattgttgttgtccgtccgagaggcatggggtagtatgggcatgtgttgtaccatccccacctcgtctgccatcaatggagcagcaagatagaaaagcttttgtgcttgcttggaacaggagaagatgaagctgcttgcttggattggaacgagggggcggagatggagagagatagaaaaagctttaatttgtgcatccaaccaagtggagtggagtggaatgatgtgtggtcgctttgttcttttgtttttttaattattttgtggtactacgagtaggaggggtgttagcaatacaaaaggagtggagtggagttgaatctccatgcacgcgtgtctgtacaaaagctaaagatcactcttctttccctgtctgtcttaagtt

SEQ ID NO: 36145 - DNA, 1826 bp, Zea mays subsp. mexicana
  Clone ID: UC-ZMROTEOSINTE044E02_FLI
ctcgccctctcctcaaacacaagcctcagatctcagtcacctgcgccgccgcttcgttcgtgtggaggggagaagagaggaaatggcggcgaccgagggcgtgctcctggggatgggcaaccccctcctcgacatctccgccgtcgtcgatgacgccttcctgacaaagtatgacatcaagctgaacaatgctattctcgctgaggagaagcacttgcctatgtatgacgagttggctagcaagagcaatgttgaatatattgccggaggagccacccagaactctatcagggttgcccaatggatgcttcaaactcctggtgcaacaagttacatgggatgcattggaaaggacaagtttggtgaggaaatgaagaaaaacgctcaagctgcaggagttactgctcattactacgaggatgagactgctcctactggcacatgtgctgtatgtgttgttggtggtgaaaggtcattgattgcaaatctgtcagcggcaaactgttacaaatctgagcatctaaagagaccagagaactgggcactagttgaaaaggcaaaatacatctacattgctggatttttccttacagtgtcgcctgattctatccagctagtcgctgagcatgctgcagcaaataacaaggtaaattcatattataatgaaagtaccctttgaagttcttttagtttgattggtcatgctattttcaggtgttcctgatgaacctctctgctcccttcatttgtgagttcttccgtgatgcccaagagaaggtcctcccgtatgctgactacatcttcggcaacgaaactgaggcaaagatctttgccaaagtcagaggatgggagactgagaatattgaggagattgctttgaagatctctcaacttcctttggcttcaggcaagcaaaagaggattgctgtgattactcaaggtgctgatccagtggttgttgctgaggatgggaaggtatgctttttatcagtttgatgctaaactaatattacttgacataggctgagaaggtagattcaaccaaatatttttttgcactatttttttgtcaaatatgcatgcttttgcctgttggtcatgcaacaaaacataataaatttcttctgtacatgttttcttacaatctttttccacccctttctgtaacaaacactctttgctcttatggttccgcttgggatctttgatgtccctttggaaactaagttgattgcacaatggttgtttgcttgtccaaggattttgcatctgtagttttaacttttgtgcttgaatgaagaactgatatctgacatcttaagtgtttttgtagaggctgttgagtatgatgtactaattattatgctgataataggtgaaaacgttccctgtgatcctattgcccaaggagaagcttgttgacaccaacggcgcaggtgatgctttcgttggaggcttcctctcacagttggttctaggcaagggcattgaagactgcgtgagggcaggttgctatgccgcaaacgttatcatccagcgcccgggctgtacttacccggagaagcctgacttcaactagtgcaaaactgaggcacgtcatgagagggactgttataggcacacttaattgttaaccagtgcgtggttcggtgtctacacaccctgtattcttccgaggcttctcttctgatccggccaatatttttgccgtgaaatttgtgttctgcaactatggacgtctcctttgttgctgtataaggcatgatttgccatcattctgttgcttcggtgatgcttgcaatgcaatgagaatgtgttggaacgag

SEQ ID NO: 36146 - DNA, 931 bp, Zea mays subsp. mexicana
  Clone ID: UC-ZMROTEOSINTE044F06_FLI
cttggctcctcctagcccccagtgtcgaccgcccctgctcctctcggctgtgctcggcctccacctcaagccgtgccctaggatcgtcttccagcacccccttcacacccttgcctccagctcgccagcaccctccgttcggccggccatggccacctcgccgaggccccagccacgacgtcatcccccgctagctatcgaagtcgtgcctcgcataccgcctattcgatgaaatgcccaaacctgtggactgtcgacgccacatctgctccctctcctaacaccctgtcgcaatttcgtgcgttgccggtgagacatcggttttcttctgttcaattagttctttgcttggtgtcaatggttaactgcggtttatgtttgtgtactggtgtgtggtttggaggagaggaatcccatatgtgtgaggacaggaatccgtgcaatagttgtttgatgtttggggttatgcaaatcggaaatcgtcatcattatcccaaatattgatttggtttatgatatggtacgttaattgatcacgtgctatggaatacgagtggaattgatctccaagtgatgctgatggacgaagctaaaatggatgaatcaacaagtgccaggatagaagatgctcgtcaagtggtcgtcaattaacaacactaacttagtgttatcccaggttataagtttgttctgttgtggatggtgctaagtgccggtgggctcggccttcttatataagtatatcccatctttagcttctttattgaggactgtcacttaagctagcatgtattttaaaacttataaatgttttatacattcaaattgtaatctttttaaatcaatttcttttgtaatcactccgatgatgtataataaaatcttgatgtaacttgtaatcattttgtaataaagaatttatttccgctgc

SEQ ID NO: 36147 - DNA, 441 bp, Zea mays subsp. mexicana
  Clone ID: UC-ZMROTEOSINTE044G10_FLI
cctcatccgcgccggccgccaccgccgcctccgcgtcagccatcgcgcactgcgtgcagaccttcatcaccgccatggacgccgtcaagctcaacatgcttgccaacgatcaggtccgccccctgctgcaggacgtcgccgcatccatggccaggctcggttccttgctgccgcccgactttgaggggaaggtcaaggttaacgagtggcttgccaagctgcataaaatgggcgccgcggatgaactcaccgagcagcaggccaggcagctcaacttcgacctcgactcggcctacagtgcctttttggctgcgctgcccgccgctggtctgtaaccgggcgtggacctggttcgttctttacttctattacagtactatagatatctgtaatttcggtactgctattttattgttaataagaaagttctgttttctttat

SEQ ID NO: 36148 - DNA, 950 bp, Zea mays subsp. mexicana
  Clone ID: UC-ZMROTEOSINTE044H09_FLI
gccaatcccgagcagaggtgcgactcgagcgctcgcgccggtgaccataacaacgaggaagccgcggtagcactggtagcggcagcagtaaggggaagatgtcgtcggcgttcagcggcgatgagaccgcccctttcttcggcttccttggcgcctccgctgcgctcgtcttctcatgcatgggggcggcgtacgggacagccaagagtggcgttggcgtggcgtccatgggtgtcatgcgcccagagctcgtcatgaagtccatcgtgcccgtggtcatggctggtgtgctcggtatctacggcctcatcatcgccgtcatcatcagcactgggatcaaccccaaggccaagccatactacctttttgacggctatgcccacctgtcgtctggccttgcctgtggtcttgctgggcttgctgcaggcatggccattggcatcgttggtgatgctggtgtcagggcgaacgctcagcagccgaagttgtttgttggcatgatcctcatccttatttttgctgaagcgcttgccctctatggtctcatcgtcggcattatcctctcgtctcgtgccggccagtcccgcgcagattagaggcacgtttcagatgtcaacaccgtgccgccgacagttgcctggtcgtagctgggtcatgttctatatccatgagacaagaagctggagcactttgactctttgagaggcttacttttatgctgtctagttttccatcttctgttgagtcgagaaaacaagaaaggctgtgtagccaagggatgacttttacccttgtgccattcttttccctgtcgtggtggggggtgggttgcggttgatgcttatttatgcacagtttttgcttgggtcggggctggggctgggacgttggtgtaatgtggtgaataagcgagtgcatgcaacgcaattggaacttaagacatttttggt

SEQ ID NO: 36149 - DNA, 2255 bp, Zea mays subsp. mexicana
  Clone ID: UC-ZMROTEOSINTE045A10_FLI
cgaatgatggcaactggagagattgcatactccaagcaatcattctcttggccacaaaattaggcagaaggagcgtggttgatagggtgtaccggggaaaagggaggttggagaaggaggaattccctttcgctcgtaacaatgattttgtcggtaggaaaaaagagctttccgaattggaactcattttgtttggtgatgtcatgggagatggagaaagagaatattttgagctcacgacaaagcagaggagaaaaggccttgcagttaggcggtctgctaacaatcatgagcacatgaatactgatgacagcaaaggtaaggagcctgttatttggaaggagactgagaaagatattgagatgcagaggctgggtagtccattgtggcatgggcgtccactgagagtgaagaatggcgtaaggtgtggaaggaaaaaaagatctaggaagatactttatggtaagggtattgcttgcatatcaggggagcctggaattggcaagacagacttggttttggagtatgcatatagattctttcagagatacaagatggttctgtgggtcagaggggaaagccgatatattcgacagaactatttggctctgcggacttttctggaagttgacttaagtgtagatagtcacttgcatgaaaagggaagcgatcgatgctttgaagagcaagaagaggaagccattgccaaaattcgtcaagaattgatgcgtgacataccgttcttagtcataattgataatttggagagtgagaaggattggtgggataagagagtcataatggaccttctgccacactttggtggggagactcacttcatcataacaacacgtcttccacgagtgatgaacttggaaccaatgaagctttcttatttatctggtgctgaggcaatgactttaatgaagggaggtgtcaaggaccatccactggtggaaactgatgcactcaaaatcattgaggaaaagcttggaagattacctcttggcctaagtattgttggagctatactctcggagcttccaatcactccaactaggctacttgacacattgaatcgtacaccgctcatcaggaacttttcatggaatgatagagaagttatcagcttgaaaaatcatgaaatccttgtccgcctgctggatgtgtgcttatcaatatttgaccatgcagatggtcctaggagtctggcaactcggatggttcaagtatgtggttggtttgcaccctctgcagttccaattcacatgttggctcgtgctgcacacaaagtcccaaagaagcaatggaggggtccaaggtggagaaagtggtggcgaccacttacttgtggccttgcaacttctaggatgaagaaatctgaagctgaagcagctgcaatgttaatgaggtttggaattgccagatgcagtgcaaagcccgaacatgtacagttccatgatctgatcaggctatatgctcgaaagctaggaggcacaagaacagctccggccatggtccagtcagtgtacctccaaggctcaatcaaacattcctctgagcacctgtgggcttcgtgcttcatggtttttggatttggttctgatcctctgttggtagaactgagaccatctgaactaatgttctatgttaaacagattgtcatgccacttgcaatacacacatttataacatactcccgctgtaatgcagcactagagctgcttcgcctgtgcactgatgcattagagagagcagctgagtccatgcttgctcatgctggcaaatggagagaaacatcattctcctgctttaggcaagctcattcagaagcccagtacacttatctttggcaggagctggctcttctgaaagcttctgtactggaaacaagggccaagctgatgctccggggtggacaatatgacattggagatgacttaataaggaaggccatatttatccgtacttctatctgtggcgagcaccatcctgacactgtttctgctcgagaaactctcagtaaactcacaaggcttcttacaactgttcagcttagttgattcttatagtttaggagttcacaatatattcttttcagtgtgccttttcatgaacgccgtacaaaatgcaccagatcttgaaataacaaagtaaatttgtcttatatatcttgactgccttttgttgcttgatggttctgtctttctatcattcttggttcatcaatgtgcaacattggattgaactactgt

SEQ ID NO: 36150 - DNA, 1908 bp, Zea mays subsp. mexicana
  Clone ID: UC-ZMROTEOSINTE045B05_FLI
caagaagggaaggtgctggggaaccaataaaatatatgggatgtggtgactgtgaaaccacgagtcgttctatgacgattgcaggtgcaactgacagttttgtcactctccagagaattgcaaaacaattattttcagctcttcatcttgatgtgaaggaagttcgtggaattggactgtcactatcaaagcttgagcatgcagatttgggccggggagcatcgcaaggacatatgcttgaatcgtggcttgcttcaccagccgccaagctcaagaaacagcagagtgagatactggggaatgttaatgttgcagggaccagcggactgaaggatttgagatctggaccatcacatacagcagaagcgaaccttagaaatgataggtctactgtatttcacaatgtcgagctgcctccgttgtcccaacttgatttggaggtcctgaagaaccttcccccagagataatgtctgaaatgaatgaaatgtacaagggagaattacaaagtcttgtggacaccctcaatagtgacaagggcaaggaaaatagttcaaaatctcttgctttgcctgcagttattcgtaagtctgtacctgccgatgcaaagcttcaaggatacagagaccacagagactccatgcatttggaggaggaacatactaaggtgagctgtgtcactggaaataaagtggcgctggaactttttaaacaaagtgcaagcacgtgatttagttgctgtcacctcctcatcttgatatttggaagttggaacctgtttcacactattctaattttacctttacacccgtagggaaaatctgacaaacaactatcagaagctaaaccagccaataatgcttcatgctcaagagttagtgcatcaattgagaaaacaacaaaaagtgttacacaacttgatttgatgcctgattcgctaagccaggcagatctaacagttctgcaggaattacctgaggatgtgaaggctgatttgtttagtgcacttccactgcatagatcaggagatcctgcatgcagcacttccaatgtatctgaaagtaaatcacctaatgtggttagagctgaaaatagatcttctaatgatggtggaactgatgatctgaaaaccccaaggtcttttctcccaccaggaagttctcaaaaatggatcgaacagtttagagttagcagttgcctgattttgaacgtaattgcagagcaacacacagattccagctgtcaacgaccattgtcttctgttctagagcctgtagcttcgttcctacctttgtgtcctaacccaggtagtgaagaatggaatgaaactcattcatgtctctccgagcttcttagacactacatacaactgaaagttgaatatgatattgaagagctctacaaatgtttttgccttttgaaaagattctcgtcagcatcagagttttttctggatctacatgatagcatccttcctttcctacaggattctatcagccagcattacggtgggacactgcaattctagctccttgctcaagttgtagccattctattttgctagaaaggaagaagcaatgccgtgaatgtgcggagagacgtgttatgacaatctgcgcctccaagcagctactcaaatcccgtgctggcagattccttggacgcgtttataactttattataactaattgatgccaatgctggaagttttattgatatattcattgcatctatggatcaatagatgccatgtggttcgatatatcattcgtggagcaatggtttgaagggacctttgctgtgctttgatgttcccaggcgaatttcatgtttgcttcataacccatatgaatttcatgttatctttgtgttgctaccaaaaaggttcctggtttgaagttctttgcgtc

SEQ ID NO: 36151 - DNA, 752 bp, Zea mays subsp. mexicana
  Clone ID: UC-ZMROTEOSINTE045B08_FLI
gggatccactaatccaagtgtcaacataaatgacaattcactcaatcttgtttctagaccacctccatatgataccgatcctagatatgcccgtgttcaaagagagggattagtctccaggcgtgagaaatccataaatcttgcacaagaagagtcactggcccttagacgaaatgccagcagctctggtattgaacatttagctgctcagaagaaacgcaacagcactgaaaatgagggtgaatataaggtccatcgttctgaatcaactaagagtttgtctgcaaaagcttatagtagctatgctgttgtcgcttcagaagatgaggatgtctgccctacttgcctggaagaatacacgccagacaatccaaaaataataaccaagtgctgtcaccattttcatcttggttgtatttatgaatggatggagagaagtgatacatgcccaatttgtggtaaggaaatggagttttgcgagagcccatgatagcctttcggtttacatgatctcacatgaagtctgagctgcaggaaatggggttctgtgagaaccaatgatagcctttcgatttacatgatctcagatgggagcaagggaaacattctacagagtacaacagaatgctggagaattgtaaataatagttccttatgcatgcgatgtccaaatagatctctttctcgagatcagtttcttacatgtactgagatggttatctgtcttaattcatgctagaatttgcttggcc

SEQ ID NO: 36152 - DNA, 968 bp, Zea mays subsp. mexicana
  Clone ID: UC-ZMROTEOSINTE045C04_FLI
gcaatctcctcatttaacgagagaccaatcattcttgccctatcgaacccaacatcacaatctgaatgcacagctgagcaagcttacacatggagcaaggtaatggtttcaatccgcagtcacgtcaactttttattaaccatggttctgcaactgcactaacgatctgaattcacagggacaagcagtgtttgcgactgggagtccatttgatcctgtggagtacaatggcaagatacatgttcccggacaggcaaacaatgcctatatcttcccagggtttggcctcggcgtggtgatgtctggagctatccgcgttcatgatgacatgcttctggcagcatcggaggctctggcccagcaggtcacagaagaaaattttgagaaggggctgatttatcctcccttctcaaacatcaggaagatctctgcccacattgcagccagcgttgcagcaaaggcatatgaacttggtttggcaagtaggcgccctcggccaaaggacctggtgaaatatgcagagagctgcatgtacagccccatctaccgcaactaccgttgaattcggatcaactccagttatgtgcaaatcagcagcagccttgcgtcaactgcaagatttcctaagaatacaactcggttcagtctttcatactgtaataccctaagctctctagcaaaagctgtttcacgtcctcttctgcccctacatattccgcagcgtttatctcttgcgatgtcatgtaaatcagctccggttaggcttttggatgctagtcagtcatggtgctgctgccgtccttccggacaaggataaatttggaataaagtttgagtcgacgattcctccctcgttactgcgtgttcacctggacgttttttttgcttcacacagttgctgctgttttcaacaagtgcttggttgtatgcgtgaaggtaacaccaggaaaggttcttctttttcttcc

SEQ ID NO: 36153 - DNA, 1178 bp, Zea mays subsp. mexicana
  Clone ID: UC-ZMROTEOSINTE045C05_FLI
gttgcgtatgtgctgcctatgaccccatgtctcctttatggtctttactatggtggattccttatccagttcctgattgaaaagatgggcatgatgggatctcttccaaaaccatatggatattttgtgcctgatgttattgttggagctgtagttggattagtggttggttggtgttttggtcctctatcacctgttgctagtcgttggttgtcgaagacttcaattatccatggcttcctgcaaattacagtggttgctttggctatctcatcccaactgtttccttacagcactggagcaccaaaaagagttgttcttcaacatacttttgttacagatgctaataatatcgtggattcaagctatggtttctctgtggttgattctaactcattggagttccttttcaacaatgcacctgaggctgccaaatggctgaaggataactctgagttgtcctttgaagaaaaatatcggtctgatagaagctcatggttggctttgtatcctgtcccattcttgttctctggaagtttaaaattccaggcacaaactgaagagattaaaaagtactaccagcatttccctcagttagctgttcaggagatctgggataacaatggacagcgaagggtgcatctcaaacttgcacttggttccttatcagaaatttggacctctgtgctcaatattactgggccactatcaaattggtccttcgctgataacatgctcccagctcctcaaactgtaagtggtgggccaccatcatatatttgtcgactcagtggaaagagcgatgtggattggtctttctggttggaggcaaactcttctgaaagtctgagagtcgatgtcgcagtacttgatcagtaccttgttgatagtacaaagaaactcaagagcctcttcccaagttgggcagacttgacagccttcacaacatttttctcaacgtatcatttatgaggaggtcaagtatttgatgcccaacaagtgtaaatcattttctctttgtagccctacgtttcggggctatatgtggttttgtcaccatgatcagctggacctgagccccgaggctggtgtttgtaaaatctttgtaagcgtgccttgatgtattcatgaatcacacaagattgtaagaatctcaagtcagtcataaattttttacc

SEQ ID NO: 36154 - DNA, 1510 bp, Zea mays subsp. mexicana
  Clone ID: UC-ZMROTEOSINTE045C08_FLI
ctttttatttggtgctttcatcgttgagtgcccataggattaaccatggtccagtgttatagaattactagtttagactccaagcattgttttctatgtctggtcatgtgtacattgccttgtattaagtaatcctttttactacattaacaatttttcaaggttcaagcaaactttgagcagaaatacaagtattatattggtcaggatggaaatggaagtgatcctcaggcttctggagcatacatattccgccctaatggcacagttccaatcagtactgatggacaggtttctctcacagttctgcgtgggcccatattggatgaagtgcaccagcagataaattcatggatttatcagattaccagggtttacaaggcgaaggactttttggaaactgaatttatagttgggcccataccagtagatgatggaaatggaaaagaagtagcaactgaaattgttacgaacatggtgacaaacaaaacattctacactgattccagtggacgtgatttcatcaaaaggataagagattatcgatcggagtggaagattgaagtgcaccagcctattgctggaaactattatcctgttaatcttggcatctatgtggaggatggcagcaaagagctgtctgtactggtagacaggtcaattggaggttccagtataaaggatggacaaatagagctaatgctacacaggaggctactccatgatgatgggaaaggcgtcgccgaggcgctaaatgaaacagtctgtctcgataagcaatgtgaaggactcattatacaaggaaaatactatgtcaaaatagacccacaaggagaaggagctcgatggcgtcggacatttggtcaggaaatatactcccctctccttcttgctttcacagagcaggatggaggcaactgggcgaattcacatgtttcaaaattctctgcgatggattcaacttacagcttgcctgataatgttgcaatgcttacccttcaggagcttgaagatggaagtgttctccttcggtttgctcatctatatgaggccggggaggacaaggatctttcgtctttagcgagtatcgacctcaagagagtgttcccggagaagaagattggcaaggtcatcgagacaagcttatcggcaaaccaagaacgcgcagccatggagaagaagcgtttgaaatggaaggcgcaaggttctgcggctgacgagaaggtggttcggggtggccctgtggatccttcgaagctcgtcgttgagctggggccaatggagatccgcacattcatcgtcagctttgatcacatcagtgacaagcaacagctataatcgtctccgactagacgactatgtctggatgaagttgtcttgcggcttccaaataaaaaaataatgtggcctgctgtgtacctgtggttcaacccatgatatggcctgctgtgggtcagcacggttctaaagctaaggacgttttataaggcaaattttgctttagggtgtc

SEQ ID NO: 36155 - DNA, 418 bp, Zea mays subsp. mexicana
  Clone ID: UC-ZMROTEOSINTE045G03_FLI
ggcacgaccgggacttcatcggctgcctgcaggggttcgactcgtggtacagcgcgcggcaggagaacccgcacgacctcgtcggcgccgtcgtcggcgggcccaacggcgaggacgtcttcaacgaccaccgcggcgcgtacatgcagaccgaggcctgcacgtacaacacggcgcccatggtcggggttttctccaggctcatgcagctggaggggcagtcgccacgcccggcgccggcgccggcggaggatctttgataggagaggtcgttttccttgaaaggttcccagcgacaagtggtggtgcgaaataaacttttcaaaaaggattaaaaaaaagtgatattgatcgtttaggctggatgtatacatgatgattctttttgttgattcctagatactaccatatttgtttc

SEQ ID NO: 36156 - DNA, 1508 bp, Zea mays subsp. mexicana
  Clone ID: UC-ZMROTEOSINTE045H05_FLI
ggatcacagcaatggggacgttgcagcagattcgtaccacatgtacaaggaggatgtcagattactgaaggaaatagggatggactcctataggttctccatctcttggtccagaatactgccgaatggcacactcgaaggaggtattaatccatatggcatcaagtactacaaaaatctcatcaacttgttggtagagaacggcatagagccatttgtaacaattttccactgggacacgcctcaagcactggtagacaagtatggtggctttttagatcaaaggattgtaaaagattacacagacttcgctaaggtgtgctttgagaactttggtgacaaagtaaacaattggttgacctttaatgagccccaaacgttttcttctttttcatacggaaccgggctatgcgccccagggcggtgcaccccaggacaaaaatgtgctaacccaattggaaactcgctcactgagccatacactgttggccataaccttctccgagcccacgctgaggctgttgatctttacaacaagtattacaagggtgagaatggacgcatagggcttgcatttgacgtaatgggtcgtgtcccatacgaaaagtcggcgtttacggatcaacaggccgaacaaaggtcctgggacattaacctaggatggttcttggagccggttgttcgtggtgactatcccttctccatgagatcattggcaagggaacgactacccttcttcactgacaaagagcaagagaaactagtgggttcctatgacatgttggggttaaactattatacctcaaggttctccaaaaacatcgatatctcaccaaactactcgccagtgctcaacactgacgacgcatatgccagtcaagaaacgaatgggcctgacgggaatcccattggtccttggatggggaattcatggatctacctatatcctgaaggcctaaaggatctccttatgatcatgaagaacaaatacggaaacccacccatctacatcactgagaacgggatgggtgacgttgaccatggcgatctacccatggaagttgccttggatgaccacaaaagagtacattacctccagcgccacatcgcaactcttaaggagtcaagagacttgggagcaaatgtgcagggctacttcgcttggtctctgttggacaacttcgaatggttctccggctacaccgaacgttacggcatcgtctacgttgaccgcaacgatggctgcaagcgctacatgaagcggtcagcccagtggttcaaagagttcaatgctgcgaagaaagcggctgccaagaagattcttacgccagcttagaaatctttgcgcctgatgtatggtacggtgccacgtacgcatgaaagactgggcacgtttttctttgcactatctgaggaggcagcatctgttctctccagcaccgtggattgttcccgccagttcagtatttccttattatgcaataaatgaagtgatcgatttccccttc

SEQ ID NO: 36157 - DNA, 1380 bp, Zea mays subsp. mexicana
  Clone ID: UC-ZMROTEOSINTE046B06_FLI
cggggacggcaacgctccggcgccggcggtggaggccagttgctcctggtccggggatgggataggtaagagcaacggtggtgggaagagagatgatagacacaggatgcggcagtacaggtcgcagctcgaacaggaggtcaagaaattgcagaggcagcttgaagaagaggttgatctgcacgtggcgttggcggatgctgttacacaaaatgttgcgcctatactgaagtcttctatgaagcttccacacaaggcacaggagctactgattaacatcgcctccttggagattaccgtttcaaaccttgaaaagaagctaaatgatctgtactaccagctttgtcacgaaaggaacgaaaggttacttgctgaaaataatcagggatgcttgccatctacatcctccgatgagcaccagtcattgtcaacttgcacgtgtacgtgggaagagcacatatcatcgttgagagatttgaagtttgggggatctgaatcaatgagatcaatgagacaggacttattccccgagcttgaagatgaccaggatatgggagaagatcctgagggtcaacagatagtttctttaaacaggctgctagaaaagcaccgagattcttctttgaatagacttcttgaaaagcaccgagatgaagaggtccctttcatgcttaccttacctctatagttttaagaaccaactttggaacatattagagtatcaagaatttatttatctttcagcagatgcaagaatctggctccatggaaaatgaaggcaatgaaaatgagcagcctgacacgttatcctttgaacagtctattctaaagataactagcataaaaggagggaatctttggagcaacccaaatgagctctctgaggagatggttcgctgcatgagaaacattttcctacgcttgtctgaatccttgaagatatcgccgaagacatcttctgattgttcatcttcctccgtggagcgtctatcaggctccacattagcatctttctcagattcatccataatgccctcaatgctacggagtccttcagttgattctaatcacaatgacgagacgatgaaggaagtcaggaactttgatccgtataaagttaatggaaaggaaacccgaagagatatcggaaactatcgttcagcagctgaagtatcttggatgtctgttggaaaggatcaactagaatatgcatctgaagctttaaagaagttcaggtttgctgctgcagccttggctaaacctatgagtcctcatagatatatcacatgtctacaaactgtacaaaccttagtgcatatatacaaaaattttagcatatgatgtatacttttaaattttgttcagccttgttaatgttct

SEQ ID NO: 36158 - DNA, 645 bp, Zea mays subsp. mexicana
  Clone ID: UC-ZMROTEOSINTE046H09_FLI
gtccctctatatatacacatctcgaccctgttgctgggtcctctcttccacccactgcaaccccaaatctcttcttcctcacacacgcgaagctgagagaccaaagaagaagaagaaggagagagcaagcagaaagttagctagctgctagcgtggaagtgcccaaggcgagagagagagacaagctagctaggacggccgcgacaggctagccagccagctgctagctagctcctgcggacgagccgatggctggcgccgacgtcgacgtcgggacggagctccggctcggcctgccgggaggaggcgccgcggcggccaagaaggacaccatcgacctcaagctgaagctgcccaccgccggcatggaggaggcggctgccgccaggccggagccggcagccgagaaggccaagaggcccgccgaggcgccggccgccgatgccgagaagccacctgcacccaagtacgtacacatctgcacacatgcatgctgatttaatttgtctgcacgggttataggcttaaattgactgctagtagtagtactatcagttaccgtggctatttaaatcccgcgagtccgagatgcttctgtgtatggaataataatacaaaaatatatagcgtaatggcatttggcag

SEQ ID NO: 36159 - DNA, 730 bp, Zea mays subsp. mexicana
  Clone ID: UC-ZMROTEOSINTE047A01_FLI
aaattgcctccagactacaaagaattcctctcactcttgaggaggaagaaccttacaagggatgatgaattcttaattgtaaacaatgctgccctactacccatgaaaaaccgcactgaggtattcctgatgctacacgatagaattgtcaattttcttggtcagaaaaatcgagcaaagaagaagaaaatactctccaatctcccttacaagaacaactggttggatactgccacggcaaatgcaaagatcaaccagtgggttgtaaatgttcaaaatgagtacaaaaggactacaatcgatctactgcggctcaacagaaatgtaagaagccacttgcatcagtacaaccacgaagatgatattgaggaaattctgtattgtgaatggcccatgctgctcattgtcatggagaagatgttgcacttggaaggtgagctccaagacactggcatccataacaagttcggctagggttctactgcaaaacagatgaaagatgtattctgcatttccatgggttggtaagctactgttcttcgatcttcattgagaaagtttatcagttcacggtgatgaagtgtaatgctacctgtagttgttttctctggacacgtcaacttgaaggtaaagctggtcagcttttgtaaagcatgttgtaagatatcacattacaaactctaaaattgtgctgcaaaattgaatggtattgagtttgcattcatccttt

SEQ ID NO: 36160 - DNA, 941 bp, Zea mays subsp. mexicana
  Clone ID: UC-ZMROTEOSINTE047A07_FLI
gagacgaccaagaaagtggttcgctctttacaaattccaattggtttgcatttgacgaggacaaggcactgaatgatggtttggttagctcagaagcatccccatctccaaattcggaaatatccgcactaaaagaggatgatgaacacgatgaagtcattcttggcgaaattatagatgaaataaaaggttctgaaccaactctaccattctccaacaaagatgcagacaaagaatctggttccaccggcttggcaaatggtaccgttgacaaattcgaagatgatatcagaccaccaactccggatgtaaaagagagtcaacctgagtttgttgaatggaaggaggaagaagctgaacctggtgatgttgccgagaaggataccgcagttcctgatattgaggttgaaaatgagaagcagctggattccatggatgatgttatgctttgcgatgcaaagttaggagaggaaaagaagagtgatgagcttggcatatgaagtgaatttcagaggagcagaatttcagaggaagcacttggaactggtcagaccattattgcacaagcagtctgaggatcatatgtgggttctctgttgtacacttgaaggtggtcccggatatggagcctcaaagattcaacttgtctgatggattgatatgtaacataatttggtggtggttattgttatgtgcctatagtctttgggctacatcgagacgcaaaattctgaaagtagtcttccttctcctttcggtgggtctagttgtgacccaggtaaataactgataggtgaataggtgatgctatttgtacgaaaattttggctcaaatgcagtcgattgttggcatatttagaacttgtttcaaatttgtgtaaactaaagaatatagtttctatttttttccaggtacttaatgcataattcatttgttatat

SEQ ID NO: 36161 - DNA, 669 bp, Zea mays subsp. mexicana
  Clone ID: UC-ZMROTEOSINTE047C01_FLI
ctgaaattctagcaaatgtgaagttcatacaagagaaaaagctgattggaaagtattttgaagaaattagtcaagatacgggtaagtatgtgtttggtgttgatgacacactgaaagcccttgaaatgggcgctgtggaaacactgatagtgtgggaaaaccttgatgtcaacagatatgtgcttaagaatactgcaactggagaaactgttatcaaacatctgaataaagagcaagaagctgaccagagtcatttccgtgatccatctaccaatgctgagctggaggttcaggagaaaacttcgctcttggaatggtttgccaatgagtacaaaaagtttgggtgcacacttgagtttgttaccaacaaatctcaagaagggtctcagttttgcagaggatttggtggcattggtggcatgttgcgctatcaactggacatccgttctttcgacgagctttctgatgacgaaggtgtctatgaagattctgattaagcaaacgtcattcatatggctgtgctggaccctggattgatgcaattgctcgttttgttcttctatttttttgcttgattagtcggtttttgaggagatcgccacttgagacacttgctttgtttcctatgccgcagcatacaattgcaatgtcaagcacatcattacaatc

SEQ ID NO: 36162 - DNA, 801 bp, Zea mays subsp. mexicana
  Clone ID: UC-ZMROTEOSINTE047C07_FLI
acagacagtagcttagctgggtttcacattccatcggatcgacctagcctcggactcggagaacatgggaggtggaagggacaatcatcatgttgataaaggatgttatcctccaactgtctatcctccagtacattcaactggatcatatgcatttgcgcctccagttgcatatccatattcgtatgcacaacatggatctatggctccacccccattaggatcatatccatatccttcacctatgtactcttcacatagtggttacccaccatctggatatccaacatacaatcaaagtgtttacccatcaatgggtggctatcctggtgctagtttgcatgctactcaacatcatggtaatggatataacatgggggcaacactcattggtggagcagcagccgcagccgccgctacctatggtgtgcatcacttaacccatggccatcaccctcacaatcaccatttagggcattttggcaagtttaaacatcattataatggacactatggcaagttaaagcatggaaaatttgggaaacacaatgggttaggaggaaaacatggccttctagggtggaagcatcaccgtcatgggttctttggaggaaaatacaagaggtggaagtagttaaaatatagggaagggtatgcaattggatcctgcaagtatgataactaacatatgtaaaataaaaatggttggtttgtgttaatgctatacatgcatgtaatatttttataagttacttgttgtatgtgtcattatcaatatataataagaatacatactttgtt

SEQ ID NO: 36163 - DNA, 1466 bp, Zea mays subsp. mexicana
  Clone ID: UC-ZMROTEOSINTE047C11_FLI
gtggtggatcactgtttctatattccagtacagatgaatcaacacttccacaagatatatacaagatgttgagtcgtccttatgcttttggatgtgtaatgcgattgagaacatcgtcgcagttcaagattgttgattcttatggccatttcttcccagacccccagtacatgcatgttcagcacataaattgttgcgactcttttgctacatacagttatgactttgagtttgaaaaggattcccaattttccaggaagtcaagccctcccattattcaaattgcatttaagtacactgtgcttgtgcacaatggtgatatatcagatcttccaaattctgggtgcagatttaaatacttgttagaaaggaggctaagagtgcggactatccagtacaacacaactgctaatatctgggacctttacgattttgttgatccagatgttgttttgacaatattggtacaccaggttattttggcttctttaagtgatgcgctggaaacaaggctgtggctccaagattggttggtggttgtcattgctcagtacaacaaagcatacaagaatgtcacatctggaggtggtactgagatttataatattgatgtcaatttctcacactgctcgcaactgcagcctttgtcgcggtttgtgtttgctattctgttgagccccctgcttcaagtcagcagtgaaggcattcatccagattatgtgacatatttgcaatgcctcttgagtgcactggagccagcttcgcttcggcaggctatttggcctacgttgatttcatactcctcccccgatgtagaagcagaagtacatcaatcactaagccggaccgtgttcaccagcgagaggccaatatacattcttgatgcatacaaagaccttctggtgtattactcacctacagctagtagcgaaatcccttttcctccacgaaactgtctactgagatcaacagtcgatagactaaaacaagaaaggaatataacacccaaactggttttcattcacggagcacatgatgacactacagaatttgagaaataccttgttgaggatcagaccttggatgggtccccgttatctagctccacaggtttcagctcattccttgatgaggttagaagtaaagtggctgagcatggcatttgaggaccagtgtcacctgtcttccgattgctgaactgtgatgttaaacgggtgatgactgatgacccatgcaacccagaaatactgtcatgaatagaaagagtaagtgctttgctggtttaccggcaaacgtttttgtatgtgtgttgtgtgtttgatggataatgttcgccattttttaccgacagctagatgaattttaaagctttcctttacaagacagcgctatatgtttttgtaatatccatgcgctattatgtttttttgggtacattgcctgttgctaaattaagcatttgccat

SEQ ID NO: 36164 - DNA, 1445 bp, Zea mays subsp. mexicana
  Clone ID: UC-ZMROTEOSINTE047D03_FLI
ctggtggatcatactcctccgggcctacacaaaaaccaccggtgatttgacgctggcagagacgccggagtgccagaaagggatgaggctcatactcagcctgtgcttatccgaggggttcgataccttcccgacattgttatgtgctgatggttgctgtatgatagatcgcagaatgggtgtatatggctaccctattgagattcaagcccttttctttatggcactaaggtgtgctcttcaaatgcttaagcatgataatgaagggaaggagtttgtagagaagattgctactcgccttcacgctttaagttatcacatgcggagttatttttggctcgatttccaacagctaaatgacatctatcgttacaagacagaagaatattcccacactgctgtcaacaaattcaatgtcattcctgattcaattccggattggctatttgacttcatgccttgtcagggtggttttttcattggtaatgtcagtcctgccaggatggacttccgatggttcgcacttggaaacatgattgctatactttcttcccttgcaacacctgaacaatctgttgctataatggatcttattgaggagcgttgggaagagctcatcggtgaaatgcctctgaagatatgttatcctgctattgagaaccatgaatggcgaattgtgacgggctgtgatccaaaaaatactagatggagttatcataatggaggatcgtggccagtacttctgtggctgctgactgcagcctgcatcaaaactggacggccacaaatcgcaagaagggcaattgacctagcagaaaggaggctgttgaaggatggctggcctgagtactatgatgggaagcttggtcggtatgttggcaagcaggcgaggaaattccagacctggtccatcgcggggtatttggtcgccaagatgatgttggaagatccttcacatctcggcatgatctccctggaagaggatagggcaatgttgaagcctgttttgaagcggtctgcgtcatggacaaactgagatggccacaaaaatttttagggaagcgaagtctgctgaaaacacgagttcttgggggtagcatgtagcatctccttgtctgctgatccgtttcctttgacttccaaacatggatggtttgtgtcttctggattttccttggttgtacaatatctcagctcgttttctgagttgaaagaaaaagaagcaactgcagaaatgggcattttgttttcttctttcgcaatctctgtaagaagatactctgattcttgcttgggtcatcctataagttgtggatccttttggttagagtcaactttgttgtgccagtggattatacggttgagtaagctgattccagcttccctgtgaagcataagtgctctttctaacgaataaagctcctttctctgtgttgctggatgcc

SEQ ID NO: 36165 - DNA, 662 bp, Zea mays subsp. mexicana
  Clone ID: UC-ZMROTEOSINTE047D04_FLI
tgactagccacgagaccaccagcttgttcggcatagagatggaagccaagtactcctacactccatcattcgtcttcttcgtggtggctttcgctgtaaccttcgcctacagcctgctcgccgtcctcgtgcgcccggggaccaccgcctccagattagtgctcctaagcgacgtgacggtagggatgcttctgacgggcgccgtggcggccaccggcgccatctctcaggtggggaagagcggcaacgagcacgccgggtggctgcccatctgcgcgcaggtgcaggcctactgcggccacgtgatgggggcgctcatcgccggcttcgtctcgctgctcctctacttcctcatcatcatgtactccctccacgcggtcgccgaacccctgtgctcctgccattagaacggccaaacgcgcacactattcgttcgattatattcactaggtcatcgacgatgatccaatggtcggtccccagtgatacgttgttttccgtctcactactatatatatctgccgcactgttgagtcgatcaagggtcatttggtgctacaacactttactagcagctagctagtcgacaccactttggtgagctaactgctaatatagtaatatacatcgacctaccatcacttaaacaattcttttagaac

SEQ ID NO: 36166 - DNA, 568 bp, Zea mays subsp. mexicana
  Clone ID: UC-ZMROTEOSINTE047E08_FLI
aaggacaagcccaagaacaagttcctcgccttcgtcacacccaagaaggatcatgaagcttactgaagtgggttgcagtgatcccattcctcgaccatgtcccggcagcctgtagctgtagtgcactccactagatttctgttgtgtttgttcttgtctcgaaatagagcccgttcgatgtgtgtaagaccattctatatgtgtgacgtgtgagcatcaactctaacatggaatggagacaagagccaactttcggtgccgatgatgatgtgaatgtgtgaaatttatgtcattatacagtgttctaggcagacttttcactccgaataatttgtctgccttctctctctctctctctctgaaaacggctgtgtttttgttgctaggtccgaaatcttatgattaggtgcaaatttggagggagtcattaaaacatcaattaatattgtttcctaatggcctgtctccatgggccaaaaataagcccaaccctggtggccaatttcatataccagttgtagtttgtaatatacacacaccagtatgtacaatgagtataagttatggt

SEQ ID NO: 36167 - DNA, 1121 bp, Zea mays subsp. mexicana
  Clone ID: UC-ZMROTEOSINTE047E09_FLI
caggtttatgttaagagtacgctttttcctcattccccatctgcgtgcctcaagtggaaatctcgatcgggagctattcttacagaactaaagagctttgatgctgacttcatgtgcatacaggagttggatgaatatgataccttctataagaaaaacatggaaaactctggatattcaagtatttacattcagcgatctggagacaaacgagatggctgtggtatattctataaacctaaaagtgcagaactggtgcagaaagaagtaatactgtacaatgatttagtagaaaaatatgttcctagtgataatgtaaatagtgctctggaaaataattcttcagcagaagaagacaagaatgcaaagccagataatagcaagcgtggagatccaaatgatccacgcgttagattgaagcgggactgtgttggtttactcgcggctttcaagcttagtgatccttgtgatcaaattttgattgtggcaaacacacatatttattgggacccacaatggatcgatgtaaagttggctcaggcaaaatatcttctttcgagagtatctcagtttgagcaactcatctcaaataaatataattgtaaaccttcagtgatcattgctggtgacttcaattcgacacctggtgacaaggtatacaattaccttttatctgccaacctaggatctacggacgaagctccaatcaagttacgcagcctttatgctgcgaatggaggggagccagagtacacaaactacactcctggttttaccggaacactggactacatattcttgtcggatggtagttcgataaaacctactagcctacttcgtttgccgcgaggggattctgaggatgtgaaaggaggcttgcccaactttcgacatcctagcgatcatctcccaattggtgctgattttctggtagtcaacatctagtgcaggtgttcattgctttttcaacagaaataataaatgccgttgaataatttgtgttgttggctcaagtttcagagtttaaatgtaatatctcaaggaacaagcgtttcttttcttgtagagcaattaacaatgcgaattttattcatcaattttaatataataggagtattgtc

SEQ ID NO: 36168 - DNA, 789 bp, Zea mays subsp. mexicana
  Clone ID: UC-ZMROTEOSINTE047H03_FLI
cgccatcacagcaagctacgcgcactgaaatcctccaatccacaggacacagctctacttccgcagttcgcactcgcacgcaccaagccgctagcaacgaagcagaaatgtcgctggtgaggcgcagcagcgtgttcgacccattctccgtggacctcttcgaccccttcgacagcatgttccgctccatcgtgccgtcgtcgccgtcgtcggcggcggcctccgagactgccgccttcgccagcgcccgcatcgactggaaggagacgcccgaggcgcacgtgttcaaggccgacctccccggcgtgaagaaggaggaggtgaaggtggaggtggaggacggcaacgtgctgctcatcagcgggcagcgcagcagggagaaggaggacaagggcgacaagtggcaccgcgtggagcgcagcagcggccagttcgtgcggcgcttccgcctccccgagaacgccaagaccgaggaggtgagggccgcgctggagaacggcgtgctcacggtcaccgtgcccaaggccgaggtcaagaagcccgaggttaagagcatccagatctccggctgaagaagacatggacgcgaggtgaatggtcgcgtcgcgttcgcgtcgcggcgtcgggtcttgggtttcagcgacgcgactcgtgtgtgtggtactgtggttgctctgctttggtatgtctggtgtgtacgtgtgctgttcagtgtttcgtggtcatcgtctgtacattgtgctgttcggtgagctccccgactcagtgtgttgtgttctgcgagtgaat

SEQ ID NO: 36169 - DNA, 935 bp, Zea mays subsp. mexicana
  Clone ID: UC-ZMROTEOSINTE047H06_FLI
gcctgccaccgtcttcccggaaccccaccgagccgacgaccgaagccgacgcgaccctcctcgcgtcaccgcgcgcaagagtcccatggccacggcgggttcgtccccccctgccagccagcagcccttcaagctgatcctagggtcgtcttcggtggcgcggaagcacatcctcgaggagatggggctggagttccaagtcatgactgctgacatcgacgagaagagcatcaggagggagaatcccgatgacctggtaatggtcctcgcggaggccaaggctgatgctatcatgtccagattgaacattgatgattatcagaaagaaggcagtcaaccaacactcctgatcacatctgacatagtggtcgtccatgaagggattattagagaaaaaccaaccaccaaggaagaagcacggcaattcctgaaaggctattccggaggtcacgtgtcaactgttgggtctgttgttgtaactaatcttacaactgggaagagacttggaagtttggacaaagctgaggtttatttccacgatataccagatgaggtcatcaagagcttgatcgatgagggagtagtatttagggtcgcaggtggtttgctgcttgaacatccattgacgctgccgtttgtcgaagcagtggttggttctagtgacagtgtcatggggctgtcaaaggaggttgcaaacaagttaattcacgacgcactgtctacttagcgtagcaatttcagcactactgtttctgatcaaattcttactgcactcacctggagatgtgatcaagcagagagcatatctggggatacccatagtgattcatgtatttttaaacgttaaaccaagacaggcgcacctggcattgcaaattgtgatcaggttgtacttgccttctgtttcacttgaaggatacgttgatgcttctttt

SEQ ID NO: 36170 - DNA, 1106 bp, Zea mays subsp. mexicana
  Clone ID: UC-ZMROTEOSINTE047H09_FLI
ctctcaagcccataggtgttgtagaacaactcaactagcaatatggcttccaagagcacattgcgttcccttgtcctcatcatggggctcctgctgctctcgtgcagcggcatgagcagcgcggcgcggctgctggaggaggtggcgcctaaggaggagtacccgcaccctgaagtgccagagctgcccaagcctgagctcccgccgcaccctacggtgccggaactccctaagcctgtcgtgccggagctgccaaagcccgaggtgccagtgcaccccgccgtgccggagttgccgaagcccgagataccgccacattcgaccgtgcctgagctgccgaagcccgaggtgccggagctgccaaagcctgaggtgcctgagcaccccgccgtaccggagctgccgaagcccgagcttcctcctcaccccaccgtgcctgagctaccaaagcccgaggtgccggagctgccaaagcctgaggtgcctgagcaccccgctgtgccggagctgccgaagcccgagcttcctcctcaccccaccgtgcctgagctaccaaagcccgaggtgccggagctgccaaagcctgaggtgcctgagcaccccgccgtgccggagctgccccacccggacgtgccagagcaccctgcttccgtgccggagctgccgaagcccgaggtgcctgagcaccccaccgtgccggagctgccaaagcaagagctgccacctctacctgaacccgagttgccattgccaccaaaggccgagagccactacccggagccagggatggccaagccgtgatcggcctagcactacccggaggccggagctagagatgatcaagatgtgatcggcctgcattagtgaacacttcatgtatatgtatttacgtacgtatgctttatactttgatgtctgcatgcgatgctgtggacgtacgtgccccatgcacacaactcgctaggagcgtgatgatgtttgcagttattgcagtagtgtatttgtattccctttgtatgtatgcgtctgtacttttggttataatgtctatacagagtatatccatgtatcatacacgtttcatttatttatcttgggttaattat

SEQ ID NO: 36171 - DNA, 858 bp, Zea mays subsp. mexicana
  Clone ID: UC-ZMROTEOSINTE047H10_FLI
ccgcgccccaccgcttccccgttccccaccccgaccgactgctccccctcccccgcaccagcctcaaggcatcgccggcgccgcaacatcgctgaggaagcccgcacccctgcccggatccgatggccaacagcaacctcccgcggcggatcatcaaggagactcagcggctgctcagcgagccagcaccggggatcagcgcgtcgccctcggaggagaacatgcgctacttcaacgttatgatccttgggccggcgcagtcgccctatgaaggtggagtttttaagcttgaactctttttacctgaggaatatccaatggctgccccaaaggttaggtttctgacaaagatctatcatcccaacatcgacaagcttggtaggatatgcctcgacattctcaaggacaaatggagcccagcacttcagattcgaacagttcttttgagtatacaggctctactgagtgcgccaaatccagacgaccctctttcggataacattgcaaagcactggaaagccaatgaggtagaagctgttgaaacagctaaggagtggactcgcctgtatgcgagcggtgcatgagaacgcagtgatgttcttgatgtaataacccatcatacttcagtcctcatctattgccatttgtttgataaaaaataggctggagatatttgccatggaatgaagtctctacatgactatcactctgaattgtttggttgtacacctgtggtcggttccctttaccttggggcacctttgacaaatcagtatctgtggtagaacttgctgatactgtaatatatttgttacttcatgtagaagagcttctcaactgtccatattgttgaaactg

SEQ ID NO: 36172 - DNA, 1778 bp, Zea mays subsp. mexicana
  Clone ID: UC-ZMROTEOSINTE047H11_FLI
ggcgtgagctggaaccagaggaatacactaaatggtctcaatcatttaaggaggccaatagctcattgaatgacagggagtggaaagttgctgaggtttgccaaaagctagaacatagcttggagattctaggtgtcagtgcaatagaagatcgcctccaggatggggtaccagaaactatcgaaatactgaggcagtcaggaatcaacttctggatgttaactggtgataaacaaagtactgccattcaaattgctcttttgtgcaacttgatttcttcagaacctaaaggacagctcttgcatatcaatgggaaaactcaagatgaagttgctagaagcttggaaagagttcttcttaccatgaggattacgtcatcagagcctaaggagctggcttttgtagtggatggctgggcactagagattattctatcacgctatactgaagcttttactgaactagcagttctttcaaaaactgcattatgctgccgtgttacaccttcacaaaaagcacagctagtgaagcttctgaagtcatgtgactatcgaactttggcaatcggtgatggtgggaatgatgtaaggatgatacaacaggctgacattggtgtaggaattagtggtagggaaggtcttcaagctgcaagggctgctgactatagcattggcaaattcaggttcctgaaaaggttgattcttgttcatgggcggtactcctacaatcgcactgccttcctgtcgcagtactctttctacaagtcattgttaatttgctttattcagatacttttttcttttctttcaggcattgctggaacaagcttattcaactcagttagtttgatggcttataatgttttctacacaagcattcctgttttaacgactgtactggacaaggatttatctgaaaagacagtgatgcaaaatccagagatattactttactgccaagctggaaggcttctcaatccaagtacctttgctggttggtttggtcgatcattgtatcatgcaatcattattttcttaataaccatccatgcatatgctaatgagaaaagcgagatggaggagctctcaatggttgcactctcaggaagcatttggttgcaggcatttgttgtgacgttggagatgaattccttcacatctgtgcaacttctggccatatggggaaacctcattgccttctatgccctcaatttctttatcagcagtatacccacttctggaatgtacactatcatgttccgcctttgcagacaaccgtcatactggataacgctggtgttgatcagtggagttggaatgggtcctgtattggctctgaaatatttcagatatacatacagacctagcgtgatcaacattcttcagaaggccgagcgttcacgggggccaatgtacaccctgctgaatctagagtctcagttgagatctgatagtatgatggtagccggttccacagcgccagccaagaataagagctctgtttacgagccgttgctttctgactccccgatggcatccaggagatctcttgcaccagcatcttcatttgatatcttccagccagcacattctagaacatctcacccaagaaacataaaagccaattaattttttggaaccatagttaactcgtaacagtatggcataccagaatgacaaaaaaagatgtcagtcgaattagatatgttgcatatttctgttaatgatttagtagatattgcctaaaaatataaaccgaaaagtcatacttaagccttt

SEQ ID NO: 36173 - DNA, 777 bp, Zea mays subsp. mexicana
  Clone ID: UC-ZMROTEOSINTE048A12_FLI
cattggctcagcaaaaggtctagcatacctccatgaacttgctgatccaccaatcatacacagagatatcaaatcaaccaatatccttttggatgaaagtctcaatgctaaggttgccgattttggtctttcaaaacttgtgtctgacacacaaaagggtcatgtttctacccaagtgaagggaacattgggctatttggatcctgagtattacatgacgcaacagctctctgagaagagtgatgtctacagctttggagttgtcctgctagaactagtaactgctagccagcccatagagaaaggcaggtatattgtccgtgagatcaggacagcaatagatcaatatgatcaagaatactatggcttgaagggcctaatcgatccaaaaatcagggattcagctaaattaattggcttcaggagatttatacagttggctatggaatgtgtggaagagtctgctgttgaccgcccaacaatgaatgatgtggtaaaggaacttgagatcatcatacagaatgaaggggcacaattgttaaactcagcgtctttatcagttgaacaatttggaaatgaaaagagacgagatccttatgcagaacatttgcctatgaatgatgaaagcagcagcagcacttttgactacaacagtgggtattcatactcagctgttcaaccaaagtagataacagtctccactctttgtttttgttgagggatgtattatacgacattaatctttttcctgttgataaatcaatgaatgagtatttc

SEQ ID NO: 36174 - DNA, 1069 bp, Zea mays subsp. mexicana
  Clone ID: UC-ZMROTEOSINTE048D07_FLI
gtcgatactgaacttatcaacgtccaaggacacgtggcaccaagggagaagcatgcaggaagtttatcagagggtttttatcagactcaagttagtaccttggcagtcaaggacaatttactggtagctggtgggtttcaaggagagctgatctgtaaacaccttgatcgggaaggtattagtttttgctgtcgaacaacttatgatgataatgctattacaaatgcggttgagatatttaatacctctagtggcgctgttcacttcatcgcatcaaataacgattctggtgtgagatactatgacatggagagattccagctattcaagcatttgcagtttgaatggccagtgaatcatgcttctttgagtcctgacagaaagaccgttgttattgtcggtgatgatcctgatggtctacttattgatgccaactctggaaagacactccattccataaaaggacatcgggactactcatttgcatcggcttggagccctgatgggcgaacatttgctactggcaaccaagacaagacatgccgaatctgggacgcgaggaatctctcaaaatccgtccatgtgttgaggggtaaccttggagccatccggtccatccgcttcacctcggatggccagttcatgtccatggctgaacctgctgactttgtgcacgtctacgacgtgaagagtgactacaacaaaagacaggagctggacttctttggcgagatatccggcacatcgttcagcccagacactgacgcgcttttcgttggcgtgtgggataggatgtatggcagcctgcttcagtttggccgcctgtacaactactcgtatcttgactccgtgttttgatgtggaaccaaacggatgttggactgttgggtttggtgtgccgcggttctctgaatgttgtcagcatgattaggcggttatccttatatcaggattttaagttgacaaagataattgaattaataaatgttgtaccgtgcccgatgtgtatatataaaagaaatgtatacatatgcctattcagataccgagttgagatgtgacttggtct

SEQ ID NO: 36175 - DNA, 495 bp, Zea mays subsp. mexicana
  Clone ID: UC-ZMROTEOSINTE048E08_FLI
agaggccccacctcgaccgctacaagtgccttaagccaagctggcgcaggccaaagggtattgactcccgtgtcaggaggaagttcaagggatgcaccttgatgcccaacattggttatggttctgacaagtcgaccaggcactacctccccaacaagttcaagaagtttgtggtccacaacgtttctgagctggagttgctcatgatgcacaacaggacctactgcgctgaaattgctcacaacgtgtccaccaagaagcgcaaggagatagtggagcgtgctgcgcagctcgacattgtggtcaccaacaagcttgctaggctccgcagccaggaggacgagtagtctggtttcttgtctttacgacgaattggatgttgccattcctttctgtaggaaactactttgcttgtgtcttgttagtactgaaaaccagaggcactcctacctttttgcaatcagtagctactaaaatgtggcagattccactgtt

SEQ ID NO: 36176 - DNA, 924 bp, Zea mays subsp. mexicana
  Clone ID: UC-ZMROTEOSINTE048F05_FLI
cagacatggaccactcttccaagcatgaatagggcacggcagatgtgctctggtttcttcatggatggcaagttctatgtcatcggtgggaaatctgagagacacaatgagatccttagttgtgctgaggagtttgacttggagagcagcacctggcgcttgatcccagatatggcacagggccttaatggtggaagtggtgctccacctcttgttgctgttgtgaataatgaactttatgctgctgactatgcaacgaaggaggttaggaaatatgacaaggaaaataatgcatggatcactcttggattgttacccgggaggtatacatcagttcatggctggggcattgcgttccgtagttgtggagatatgctcattgtaattggtgcaatgagtgctggtggtagcggggtgattgaaatttgttcctgggtacccaataatggactgccagattggaagatcattggcacccgccgttccggaagctttgtgtacaattgtgctgtgatgagttgttgacataccagggctattacattatcaactgtacatcttgaccaaaaggaaggataaagaaggcaaattctgctgagtctgtttactccttgatgggtaacttctgcccacgggcattttaggctaagctgaaggtccgatagaacttctcatgtagcttcttacatgcctatgtctaatctcttcattttaattccatttggagggcctgcaattgatttctggaacgtggggcatgcagtgcagtattttagattaataatttggtgcaacctcaaaaattttgatcttccctgtgtatcttgatcaaagtttttttagctccagagaatagccttacattggcaaatcatttgcccatagattgtaagaaataaagaaaaaagaaatatctttgttgac

SEQ ID NO: 36177 - DNA, 1654 bp, Zea mays subsp. mexicana
  Clone ID: UC-ZMROTEOSINTE048F12_FLI
aaaagctcgtcgccgagtcgccgtacgggggctcggctcgggtgagcgagcggcggccggcgggtactgaggcctgagggcgaggcgatgggccgcctccgtgacgggcgagccttcctccaccgcgcgcttgtcctctcgtcgctgctccttctcgcctccggcgaaatcttcttcgaggaacggttcgatgatgggtgggatagccgctgggtgaaatctgattggaagaagagccaaggacaagctggaaccttccgacacacagcgggaacctactctggagaccctgacgataaaggtatacaaacaactggggatgccaaacattttgctatatcagcaaaattcccacaatttagtaacaatgaccggacattggtgatccagtactctctaaagattgagcaagatattgaatgcggtggtgcttacatcaaacttatgtctggttatctcaaccagaagaaatttggtggcgacactccttacagcttcatgtttgggcctgatatatgtggggatcagaaaaagaagctccatctcatactttcataccaagggcaaaactaccctatcaagaaagaactaaaatgtgaaacagacaagttgacacatttttacacatttattcttagacctgatgccacttatagcatccttatcgataaccgggagagagaattcgggagcatgtacactgactgggatatccttcctcctcgtaagatcaaagatgttaatgcaaaaaagccaaaagactgggatgacagggaatatattgaagatcctgatcaagttaagccagagggatatgattcaattcctaaagagatacctgatcccatggacaaaaagcctgagtcatgggatgacgatgacgatggtacatggaagcctagaatgatacctaatccagaatacaagggaccatggaagcggaagaaaattaagaatcctaactacaaaggaaaatggaagaccccatggattgtcaatccagagtttgaggatgacccagacctatatgttctgaaacctttgcagtatgtggggattgaagtatggcaggtcaaagctggttcagtttttgacaacattttgatttgcgatgacccagactatgcaagacatgttgtagatgaaacttttgctgcaaataaggaggctgaaaaggaggcctttgaaggagctgaaagaaagaggaaggctagagaagaagaggaagcacggagggcacgggaggaaggggagagacgaaggcgggagagggatagggaccgcggcagggaccgatacaaggatagatataagcgtcataggcactacgactaccatgacgagctatagatcatgtattcttttgaaatctgcacgatattggatgtctgtctacggagagcgcacgtgcaaaacttgtatgttgtactcacggatgaagacctgtgattttggcgatgggtagagattggccatcgcgtccgtaactaaatttccccgttgcgatgcaatatgagctgtagtactgtcctcgcactattatttaccgtttgtgatgcatatgtgatataaaccttcaagaaacacacacacgaagggtctgaatgagcacggcctttgttgtttgcttcttatcaaaaagaactgttttatc

SEQ ID NO: 36178 - DNA, 1239 bp, Zea mays subsp. mexicana
  Clone ID: UC-ZMROTEOSINTE048H12_FLI
gaaggtcttcctcgctctgatggcttcaattgcattttggtggtggtggatcgtctcactaagtacgcccattttattcctctacgtcaccctttcactgccaatcaagttgcttcagccgtgctcactcatgtggttaaactccatggtgtgcctgcttctattgtctcggatcgtgaccggattttcactagtgccttttggaaagggctgttcaaactgttggacacaaagctgttagtcagtacagcatatcacccacagacggatggccaaaccgaacgcgttaatcaatgtctggagatgtatttgcgttgcactatctacaactctccagccaagtggaaggcatggctgcctctggccgagctgtggtacaactcttcgtatcactcatccttgcaatgctccccattcaaggcattgtatggatatgaaccaaaattaccttcttttcctgtgctggctgatgtttccactactgatctttcctcactgatcaaggaaagggatcttcatctggaattattgaaacacaatttgctggctgcacaaactcgtatcaaacttcaagctgataagaagcgtattgatcggcagtttgcagaaggggagatggtacttctgaaactgcaaccttacacccaatcctctgtggccagtcgaccctttcctaaattggccttcaaatactttggtccttataaaatacttcagaagattggcgtggcagcttataaactggagttaccggctgggagtttggtgcaccctgtttttcatgtttcccaattgaagccctatactgctgactactctccagtatatgctgaccttcccaagatacctgatcttactcaaagggacctgcagcctcaatgcattctccaacgccgactggtcaagaaaggtggcgcggctattgtacaagtgctggtgcaatggcaaggacttccagctgattcggctacatgggaagactggacggtgatgcaagctcgtttccctgattcaagcgcttggggccaagcttccattccaggagggggtgatgtaacaccggcgccaaccatcaccggagttacggcataagtgtaatacgtgtttcattgtcgtttacgtattttgtaataaggttggtccactgtcaggccgtagggctttctgttaagacttgtataaggtgaacctcgtggagggagacacacagaaaaagaaaaatagaaatacctgctccac

SEQ ID NO: 36179 - DNA, 1359 bp, Zea mays subsp. mexicana
  Clone ID: UC-ZMROTEOSINTE049D10_FLI
gtcagggtctccaagttcaggactattatggcaatttctgcaagcgtgttcccaccgatattgatcttccagcgattgattctgacaaaactgtgatggtcacgtttaagcatgatgacaagttacctgaaaatgtggaatgtggcttccagtgtgcacttctctatactactgtatatggacaaaggaggatccgagtcataaacctttcactttcatgcacaaatttgcttgccaatcttttccggtatgctgatttggagacacagttttcatgcttcctgaagcaagctgctaatggcatcccgacatctccattacctcgtattcgggatgaagcaacaaatacatgcataaatattcttcaatcttaccgcaaacactgtgcatctgtaacttcatcagggcagttgattctcccagaggctctaaaactgctgcccttatatactttggcactggtcaaaagcttaggcttgagaaccgatgggcgattggatgaccgttcctactggatatctgtagcctcgtcagtttctgtagtactagctgttcctttggtgttccctagattgattcctatccacgatctcacatcaagggatgacgatgattctcttatacccagtccccttatgctcaatagtgagaatgtacaagaggatggagtttatttattggaaaatggtgaggatggtttaatttatgtaggaaacatggtaaatccggctaccctggaacaaatattcggtgtctcttctttggctgcattaccagcccagttggcgttggagcaatttgacaacgaactctcgaggaaggttaacgaagttgtaaatgaaataagacgccagaggtgctcatacttgaggttaagacaatgcagaaggggtgaaccatctggtgattttttccggtcatttttagtggaggacaaggcgcctggcgtcttctcctacgtcgagttccttgtgcatgtccacaggcaaatccaaagcaagatgacctgagggcccaagatcctggttgtaacatttcggtcagtagatggattgtatgtaccccgggagtttgatttctgcataaggagacagcaaagtggcgattccatatcaatgtggagcataaagagtgctcggataatagaactcaggaatagaggcttgtggtgtttacagcaccgtttttggagtgggtggtatatgtgttgtatacagagatgaggggtggagctttagtttttgtgttgtcttttatcatcgtgcatccttgtttatctcatgtgcaaaaagtgttggattatgttggttggaaggttatagaggtttcgtaataaaatgcacctagctaatcgatagt

SEQ ID NO: 36180 - DNA, 870 bp, Zea mays subsp. mexicana
  Clone ID: UC-ZMROTEOSINTE049E03_FLI
tcgagacctgctgtgatggcgacagagcaagcggcggagaactacacggtggaggacctcgtggccctgaacccctacaaccccgacatcctcaacgacctcgagaagttcgtcaatgagcaggtctcatctcagacatataacttggatgcaaatctcagccttcttcgcttgtaccagtttgagccagaaaggatgagcatacagattgtggcccacatactgattaaggctctcatggcaatgccagcccctgacttcagtttgtgcttattcttaatccctgaacatgtgcaaatggaggagcaattcaaggtattgatagttctttctcactacctagagactgctaggttcagtcaattttgggatgaagcagcaaagaaccgccacatatcggaagcagtgccaggtttcgaacaagcaatccaatcctatgcgattcatgtactttccttgacataccagaaagttccaaggcctattcttgtagaggcaatcaacatcgaaggtctcgcgttggacaagtttcttgagtaccatgccgcgaactcaggttgggtgattgagaagggtgggcagtctcaagtgattgttcttccgcgtaatgagttcaatcacccagagctcaagaagaacacagccgatatccttccgtttgaacacgtaacacgcatattccctgtccttggctgattcaggcgtgctgagagatctatacaaaactcagcgagtgaagcttctcttagtcattgcatcttcagtttgtagtgtaccctattgagattatctcggtataccagtcctttttatgccggagttggtttctgcaacctatggttattgttattactataacgaaatgctcag

SEQ ID NO: 36181 - DNA, 1021 bp, Zea mays subsp. mexicana
  Clone ID: UC-ZMROTEOSINTE049F05_FLI
atcaaaagcgaggctgcgagagcggagagagagagtgagggaggcgccgacgccgagtcctttcttcatcctgcatctgccgctgtttccgacaggatgtttctcacgaggacggagtacgaccgtggggtgaacaccttctctccggaggggcggctgttccaggtcgagtacgccatcgaggccatcaagttgggatccactgcgatcggtttgaagacaaaggatggtgttgtcctcgccgttgagaaacgtgtgacctcaccactgctggaaccaagcagtgtggaaaaaataatggaaattgatgagcacataggctgtgccatgagtggacttattgctgatgctagaacactagtggaacatgctcgtgttgaaactcagaatcataggttctcatacggagagccaatgactgtagaatcttcgacacaagctatctgtgacttagctctgcgttttggcgaaggtgacgaagagtcaatgtcacggccatttggagtctctctcctaattgctggacatgatgagaatggacctagcctgtactacactgacccatctggtacattttggcaatgcaacgcaaaggcaattggatcaggttctgagggagctgatagttccttgcaggaacagtacaacaaggaattaaccctccaggaggcggagaccatagccctttctatcctgaagcaggttatggaagagaaggtgaccccaaacaacgtcgatattgccaaggttgcccccaagtaccacctctacacccctgccgaggtggaagccgtcatcgcgaggctgtgaaacgcttccgagctcttgctatccacgtcatcaatcggtaatagacgacccttgtacgaagcgtgggcaccatggtccttgattatggctcgtcatcgtactctgttgttaactccacaaggacagtcgatgttagtttgattcacagctcagccgggctcacttgtctttttaaatttttatgaattagcgttgagaactttgtactgcc

SEQ ID NO: 36182 - DNA, 1335 bp, Zea mays subsp. mexicana
  Clone ID: UC-ZMROTEOSINTE049F11_FLI
ccacaggccagagaccacgccgtcctcttcaccccagggttgccgacgcggcgactccgttcacccaccaccgctgtcctccctgctgccgcctgtgccggggctagcccgccgcggagccatgtcgcggtccttgagcatgagagggagcatgaggtcgcgccgcgacctgcctcctcctgagaagacaattgaaaggcttgagagtatggtggatggaggaaatttctatgaagctcaacaaatgtacaagtcaaccagtgcaaggtatattgctgctcagaagtattcagaagccttggacatccttcagtcaggcgctttggtacaattgaagcatggacaggttacctgtggtggtgaacttgctgtcctctttgttgacaccctcatcacaggagagcttccatatagtgaacaaatttttgatcgtatcagaaagatgtatgaggcattcccaagggtaactgttccacatttccttggagatgactatgatgatgaggggcatcaattatctgaagctatttctgctgccaaagtgcgggcagagagttgctcgtcattcatgaaagctgcaatcaggtggtctgctgagtttggaacatcaagaaatggttcttctgagcttcacgttatgttagcagaatacatatattcggaatctccagagacggacatgactaaagtctcaagtcattttgttcgtggaaatgatccaaaaaagttcgcttctatgctggtgaactttatgggcaagtgttaccctggtgaagatgatactgcaattgcacgtggggtcctaatgtacctatctcaagggaacttgagagatgcaaatttacttatggatgagatgaacgaacaactaaaatctgctaactcggaatttccgaaaacagatttgattcagttcatcaagtatcttttaccaacacttgagagagatgcttaccctctttttagaacacttcgacagaagtataagacaagtacagatcgtgatgctgtgtttcaggagttactggatgaaatagctgcaaaattttacaatatacaacgccagaaccctttagaaggacttttcagcgaaatgttcaagatataatgcacgagaaaataattttatgtcgatgctttcatctaaaccattggctggaataatacaattggtcaacaaaggtgcttgctcaactatgaatctccaaggccatacatcatgctgcatgaagatatatacttagctctgcagcaaaatcgtcgattagtgtcagattgttactgagcatgtgtaactgaattttgttctctattacttgtttctctttgttgcct

SEQ ID NO: 36183 - DNA, 1613 bp, Zea mays subsp. mexicana
  Clone ID: UC-ZMROTEOSINTE049G07_FLI
gttcacatagatatgaaatttgttaattttgtagtctcagtttaaagttggagcttcttttttaaacaaaaaatcttctgaatgcttgacggcatatgccattttgtatgctggttatcccatttatgtagggttgctggatctgtttagttctttctcacgggtgggtggctgcttcaattgtcagaaaaagggtcataaagaacatgaggcgcagcattgcagatggaaatagttttgcatttctttgtgacaacatagatgagcttgagcactccgtccaatagaatttacctagagtctgtaattatgcctttgaagggctttggagaacataatttgcaaaattggcgaactcagattacatcaccttatgggggaccactggaattcctgtttgtcgtagagagcgaagacgatccggcttatcatgctgtttcccgtttgatcgcagagtacaaggacaatctggaggcgaaggtggttgtggcagggctgtcaacaacctgtagctaggaaattcacaatcaattgatcggcgttgaaaagacgcacagggatacaaagtatgtcttgtttcttgacgatgatgtgaggctgcatcctgggactattggagctgtcacaaaagaaatggagaagaatcctgagatatttatacaaactggatatccccttgacttaccttctggcagtttgggcagctattgcatatatgaataccacatgccttgctcgatgggatttgcaactggtgggaagactttcttcttgtggggggctgtatgatggcaagaccgatatggtgttgtcagtggattaagagatggttgttactcagatgatatgacactcgctgcaatagcagtgtagtggcgagaactgtctcacttgagtcaccaagtcatgggtttcaagctgcctctccgtatttgcggtgggaggacttacctcagtttatcccttccccaaaccctactcataggggtcttcggcactgggacagcacaagatgctcatatcttcacctcctgtctctgtgtttccacaccctcttgccagtgatcttagcttctcgaggtacagcgaatttgcattggaaagctacgcagcttatttgcgggcagtaaaagaaagagtaaatcacataagtccaattcattgtgtcacaacgacaaagtttctgtttgtgaagcattccgatcacatttctcccaatcaatcaattggtctggtatctgatactacttgagagatgggaaaatatgcaagatcgaaagagagaacagttcaaagtacagagaacagttcaaagtacactgatcttggagggaagcgtctatatggcaagagaacatacccttccaataaatcattgctcggttacctgtcaagaactctagtgcaatggcaccaaccaaagaaatacgacgtataggaagctgaaccccctcgatttggcggggcttcttgttgtacaaccctcttttgttttcgtttattggttattaggttcattcatattaaattttgtttgcacctcagctcttgtaacactatagatatgtaatgtaacgacctgtctgaagaagtgaaaatgttccatattgctg

SEQ ID NO: 36184 - DNA, 1204 bp, Zea mays subsp. mexicana
  Clone ID: UC-ZMROTEOSINTE049H11_FLI
gcccaggagaggctctgcattccaatggtgttcaccatgttgacgttgagactgggaaggttgtcgcagaatggcggtttgagaaggatggagctgatatcacaatgcgagacattgccaatgacagcaagggagcgcagttggaaccctccgggtcgacattcttgggcctggatgacaacaggttgtgtagatgggatatgcgcgacgccagaggccgggtgcagacaatcggtagctcatcagactcaccagtgctgaactggtcacagggtcatcagttctcgcggggcaccaatttccagtgctttgcaagtactggggatggttcaatcgttgttggttctgtggatggcaagatcagactctattctaagagctcgatgcgtatggcgaagacagcattcccaggccttgggtccccgattacacatgtagatgttacttatgatgggaaatggattctgggaacaactgacacatacttgatcttgatatgcactatcttcaaggacaaagatgggaaagaaaagactgggtttagtggccgaatggggaataggattgctgcaccaaggcttctgaagctcactccacttgattcagttttagccgggaccgacaacaaattccacggcgggcaattctcatgggtaacggagaacggaaagcaggaaaagcaccttgtcgctacagtcggcaaattcagcgtcatttggaattttcagcaagtcaaggacagcaaccatgagtgctaccgtgatcagcagggcctcaagagctgctactgctacaaagttgtcctcaaggatgaatcaatcgtcgacagccgcttcatgcacgagaagtttgcgacgagtgactctcctgaagctccgctcgttgtcgctacgccaatgaaagtcagctccttcagtatagcaaatcgacgctgactccgaagctcttttccccagttgtgcagaaataatctgagaagttgcaggtttttgttcagtttgttcctttttcctcttttagacggtttggttagttctgttggtacagaactgatcgaggttcctcccgagaagaactggtttttgtgtcgtgtgcatgtctggtcatttgtagcgggctagcggctcggtaaaatggtgtgtaatgtctgttggataaaatgtaccatgtgacaaaaaaaaaagtaattttgatttgagactct

SEQ ID NO: 36185 - DNA, 764 bp, Zea mays subsp. mexicana
  Clone ID: UC-ZMROTEOSINTE051A01_FLI
ccgccttatcgatgacatggtagcatacgcacttaagagtgaaggagggtatgtctgggcttgcaagaattatgatggagatgtgcagagcgatttcttagctcaaggttttggctcattgggtttgatgacatcggtactggtgtgccctgatggaaagacgatcgaagctgaagctgcccatggtactgttacccgtcattaccgtgttcaccagaaaggaggtgaaaccagtacgaacagtattgcctcaatctttgcgtggacaagaggacttgcccacagggcaaagcttgatgacaatgctagactacttgacttcacccagaagcttgaggctgcctgcgttggagccgtcgagtctgggaagatgaccaaggaccttgcccttctcgttcacggatcttcaaatatcacgaggagccattacctgaacacggaggagttcattgacgctgttgctgacgagctcagatcgaggctggcagccaactcgaacctttgaaatccttgccgaagttgtggtgctttcctgcgcgacgctttcgaaccgtttttattatgtcgccattttctttccctgtgccaccaccctgaatgaaggaggcctgagctaggcgaacatctgcaggctgcagcagtatgccaaatcattatcattaccgttaccattaccaattggagattgccgtagatttccgcgattatgggaactcatttacctgattatctgatacgtttgaaataaaaggtcgcccattcag

SEQ ID NO: 36186 - DNA, 1458 bp, Zea mays subsp. mexicana
  Clone ID: UC-ZMROTEOSINTE051E04_FLI
caaaggccaaggagttgtcgtccttgggtttcaccattgtctggtcaccaccaccaactgattctgtgtcacctgaaggatacatgccaagggatctatataatctaaactcacgatatgggtccatggatgagctgaaggaacttgtgaagattttccatgaagctggtatcaaggttcttggcgatgctgttctaaatcataggtgtgctcagtttcagaacaacaatggtgtctggaatatatttggtggtcgtatgaactgggatgatcgagcagttgttgctgatgatccacatttccagggaagaggaaacaagagcagtggagataatttccatgcagcaccaaacattgatcactcccaagagtttgtgaggaatgatcttaaagaatggctttgctggatgagaaaggaagtcggctacgatggatggagacttgactttgttcgtggtttctggggtggatatgtcaaggactatttggaagcaagtgaaccatactttgcagtaggagagtactgggactccctcagttatacttatggtgaaatggactacaatcaggatgcccacaggcagagaattgttgattggataaatgctacaaatggaactgctggcgcatttgatgttaccactaaaggaatacttcatgcggcgcttgaaagatcagagtattggcgcctgtccgatgaaaaagggaaaccccctggagtattgggttggtggccttcaagagcagtcacatttatagagaatcatgatactggttctactcagggccattggaggttcccctatggtatggaactgcaaggatacgcctacatcctgacacaccctggcactcccgcagtcttctatgaccacatattttcacacttacaaccagagatcgctaaatttatttccattcgacaccgccaaaagattcattgccgcagcaagatcaagatactaaaggcagagaggagtttatatgcggctgaaattgatgagaaggtaacaatgaaaatcggatcggaacattttgagccaagcggtccccagaactggattgttgctgctgagggtcaagattacaaaatctgggaggcgtcttcatagacttggcgggctgcgagtgccatataactgctcatagactaaacaggaagctacaagaaagcaaaatgctaggagatgacgcgtcagaatggtcaactggcgggggctgctgccgctgccgccatggagcagcaaaattcaacatcataagctatggaagcacttgccgtggcgatagggttatctaataggactactgttgaacattcgatatatccagaaccacccatcatttgcaggcacattggccattaaaatttagcttcgtccactattttggagctatgtaaaagcatgcacaactctatttatgtgtgaaataaaatttgaatcttcatcatgggtc

SEQ ID NO: 36187 - DNA, 682 bp, Zea mays subsp. mexicana
  Clone ID: UC-ZMROTEOSINTE053B10_FLI
cttctccggcaaggacccgaccaaggtggaccgcagcggggcctacgtcgcgaggcaggctgccaagagcatcgtcgccgccggcctcgcccgccgtgccatcgtccaggtctcctacgccatcggcgtgcccgagcccctgtcggtgttcgtggacacgtacggcaccggcgcgatccccgacaaggagatcctgaagatcgtgaaggagaacttcgacttcaggcccggcatgatcatcatcaacctcgacctcaagaaaggcggcaacgggcgctacctcaagacggcggcctacgggcactttgggagggacgaccccgacttcacctgggaggtggtgaagcccctcaaggcggagaagccgtcttctgcatgaggcgcctcctctgttttggaagaagcttttggtctggtctggtctggtctggtgtgcctgcgctctatcatgcttttttatggctcctacttgtgattcttgatctgccccttgcttatcatttgtactgtactgtcactgtcctaataagtggtacgtgtgcggggtcgtattgtgtctgcttattcacctagaggattatttctggttttgctgcttatgtaatgcttttaaaaccatgaaagaagctacaggctcctacagctgctttgagaagtaacggaacctcgtgcattttgggtt

SEQ ID NO: 36188 - DNA, 534 bp, Zea mays subsp. mexicana
  Clone ID: UC-ZMROTEOSINTE053D08_FLI
gttgttgcactactttagtaaaacttacaattatgatgtacttgtccagattattgaagaattccagaagtgccatctggatcaccctgtcaagaagttcttcggagagtgcacagaccttaaaatcaagctagatcgctgcttccgacaggagaaagctttgaagagaaaggcaaactttgaagagagcaagagatttaaagaacagttgaaggcttacaaaagggaaattgcagagaaaagcgaggaatgataacttggaacggaggacaaggccgtagaggctctatctgtgatgacctgcccttgattttgtgaaggatctgtcgagtgtttttgaatataatgtttctaaaaaatattatactcttttcctagtagcagctaaactttaacagcttaaagtttcttccatgactaccgaatatgtttccaatttgttcatgcatgcgtgcaggagtcttttgtatcaaatttggacaacccactcttgttgcctagtataagcagtttattggcgagttccttttattt

SEQ ID NO: 36189 - DNA, 1090 bp, Zea mays subsp. mexicana
  Clone ID: UC-ZMROTEOSINTE053E10_FLI
tatcagtgcattgccatttcctgagtacactgatcctcgatatggtccgctgaatcttacagtcaagctacctgatggtgcattgaagccagatcttggaccaaaaacttacatcgcttatggattttaccaagagttaggcaggggtgattctgtgaccaagcttcactgtgacatgtctgatgcggtaaatatattgacacacacagcacaagtgccctatgcgcgttatcaacttgagaagatagaggaaaccagaaagaaaatgaaagaacaagatcttcaggaactttatggtgtttcagaactaaacctatcatcaccttttactgattccaggaatataagtgctgatgaaatgtcaaagacctcatgtttggacgtcaatgatgtaccacctgttaatactgaatctgaggtacaaagtggggcaggccagtgttcagattacattgacaaggatagaagttatgctgggatgcataacggggagagaaccggtggtgccttatgggatattttccgaagagaagattctgacaagatacaagattatcttaggaaacatgccacggaattccggcacatcttttgcaatcctgtgaagcaggttattcacccaattcacgatcagactttctacttaaccgaggagcataagagaaagctcaaggaagaatatggtgttgaaccctggacgtttgagcagaagcttggtgaagcggttttcattcctgctggatgtcctcaccaagtgaggaacttgaagtcttgcattaaggttgcgatggactttgtctccccagaaagcgtcaacgagtgcatgaaactgactggagagtttaggcggcttccacctgatcacagggctaaagaggataagctggagatcaagaagattgctcttcatgctctgaaccaagtagtaaatttcttggatccttcctcggagtggtcgaagagttggtttgcccaacccaagaacaaaaaaaaggctggagctgaagaacaggagaagcctaaaaggaagcgtggccgcccatgtcgcaagtccaacgatgaagctgctggcgataggcacagaaagaag

SEQ ID NO: 36190 - DNA, 1159 bp, Zea mays subsp. mexicana
  Clone ID: UC-ZMROTEOSINTE053F02_FLI
ggcgcagagatctagcactgtgtaggatattccgtcagaaaacatgttgcgatgtgatgcagacatttcctgctctggtctcagtgagaaaccttgcattggctggtgaaggcagtcaagaatgtattcatttgtgggaattgcttgagtgctcaatatgcgatccacgagtgggtatcaggcctggacctcctgttgtatgtgcatcattctgtgatatggtcttcaaagcttgttcagaatcgtacttctccatagatacgaaaacgtaggccttgtctccttgtggtttagatgacatcctttgtggcaaaacacataaatgggtctctaacggcacagagttgtgccgtcttgctggtttctctgttcaaatttctgagaccagctctggtggagttggtgacactttctgctatggtgggaaagcaagtttggattccatatctgattcatggacttcttcaaaagaccgtccaacattaagtggtgtggcttcatgggacgttcaagattttcagagatgggcacgagaaatgcctatcggtgaaagagtttcgtgggcgattggaggaatggttctcacagctggccttatttttatcagcaaaagaaagagctacagccatcgccagaagcaagctgctattgctcgcaatatgagattgagaaggctggattctagagccaacccacaacaaacaaagcggagctaggaaggcataggcaacttagtgttactcatagaggattcttggacttgtgcttctacttttgtggatcggtataatcaacaactgtgaacaatagattgtactgtgtgtgtccatcttgttgcttagatgcaccagctacgacctccttgtcatccttctgtggaagaagagttctataagttgtcactgagtattcctggaatgcagaagttatgggctgtgaagagctcatgtacatattatttggaaatgacttttttgatgccatcgatatcgggcgacatgcctacatgatttgtgatctgtgagttcatctaaggcggtggagcatatgtatatgtatatctatggaaagaccatttctcacgaagcacgtctattttgttaaccaacttaatccagactcattatattctattatgtattcatttttcctttccaag

SEQ ID NO: 36191 - DNA, 797 bp, Zea mays subsp. mexicana
  Clone ID: UC-ZMROTEOSINTE056B09_FLI
tctccaaagctaagaataaaagagcggctatccaatccttgaagaggaaaaaactttatgaacaacaaattgagcaactcggaaattttcagttgagaattcatgatcagatgatcatgttagaagcagctaaagctacaacagagactgttgatgcgttgagaactggagctgcagctatgaaagcaatgcaaaaagcaacaaacattgatgatgtcgacaagaccatggatgaaattaatgaacagactgaaaatatgaaacaaattcaagatgctttgtcaactcctcttggagcttctgattttgacgaggatgaactggaagcggaacttgaagaactggaaggagcagagttggaatctcagcttctggagcctgttgcagctcttcctgtgcatccagtgcatgtcccaggcaacaagcaaccagctcgccctgctccacagaaagctacagctgaagatgatgagcttgctgcactgcaagctgaaatggcattgtgatcaggtttccactgaagaggtgaaatgtgtatatgaattgcgttatgctgaaagctgagtcaagctttattgtatttgccatgtgtgtataatcttggtggatatttggcaaccgtcaaccgaagcagcgaaaggccgctacagccggtatttgtttcagtgattgggctctgttttctttccacagacaatttagttaatgtcgcccggttaggtctatgctaactattcaggtcaccaacgtgcattgtttgtcacagtatttttcagttacccatattgtttggagcc

SEQ ID NO: 36192 - DNA, 1155 bp, Zea mays subsp. mexicana
  Clone ID: UC-ZMROTEOSINTE057B06_FLI
gaagaaggcaaggtagatgccctctaactcctgaagaggtgggtttgatgttgagagcgctgggctacagaaaggatgtccacatttatgtagcttctggagagatatatggaggtgcaaggactctggcacctcttaaagctctcttccctaatctccacacaaaagaaacaatatctagcaaagaggagctggctccattctctaaatattcttctcgcatggctgcacttgatttcattgtctgtgatgaaagtgatgcttttgtggctaacaacaacggcaacatggctaaaattttggctggacgaaggtatccgttgctgctatgtcatcagtggtttattacttgccctgaccatatttcgtgccctctgcaggagatactttgggcacaagagaacgatccgaccaaatgccaaaaggctctatcccttatttttgaacagaggaaacatgtcgtgggatgcattctcctcaaaagtacacatggttcagaaaggatttatgggagagcccaaagagctgaggccagggaggggagagtttcatgagaacccttctacctgcatttgtgaaaggactgatggcaaagcagtagccagagccaaatctcaagatgatcaagtattgaatagtgttgctgaccaaggcaaaggcattggcgagccagctgttcccaatcatacggatgaagaggcgggcgaacctgatgatgacggagatgtccctgctgacaaagaggttgttgacgctgaaatggttgacgatgtattggccggggatcctgagttagaacagattctttcagactagtatccatcatcagagatgtttgcacaaaccaatttttggccgagtgattgatgaattttgccacgtccctcgaaattgtacatactttttttttgcgatgtaaatgtacgtatacatccaatctactctagcttagctcgcagcctccttacacagtagctcttttgtaacgtttgtggattgttatagcttgtatcatgggttttgctttttgtgtagcaactctttgacgccctttttgtgtaagcatcttttggcatgtaggatgtgaggtgcttaagcacggataattaaggagagaacgttgttataccattttcataaatgagttacttgcct

SEQ ID NO: 36193 - DNA, 587 bp, Zea mays subsp. mexicana
  Clone ID: UC-ZMROTEOSINTE057C09_FLI
cggattactacgatatcacagaggacaggtcacacgcagggcaagtagttggtgaaagccaccgcataatgtccccgttgcagcgcgaagacggtctgcctcttttcaagtcgagcccaagctcgccgtacaggagcggcaacgctagtccgtcgatcttcatcctggagagcctgtcaccgtcggccccacgtaggtcgtctggttcatcgcctcagggtggtggttcaccgacgatgggccatagggcgatgaaggcgccagttccatctgttcttcaaagagagagtggaccagatcatgcacaggggtgatccaatgaagcagctaccgcttgccagtccaatgagatatgtatatttttgtaaaggagatacatcgtcggcagatattttttttctgtgctgtctttcttgttcgtaagaaatgtatagaccttcgagttctgttgtgcatttgagctccgtcatgcatggttgcttctgatgtgaggcacgattattgaagagacctctcgtttgctgctcggtatctgccgatgtgtaaatgataacagaagtgtgctggtgctgatagtcttactcaac

SEQ ID NO: 36194 - DNA, 1259 bp, Zea mays subsp. mexicana
  Clone ID: UC-ZMROTEOSINTE057E09_FLI
gggatgtccatggcggcgagccgccgcctcctccatctcctgccgcggctggagctgtgcctgcggtcccgtgcgcttagcatcccctcgtcttcgcgggcacaggggatggctcgttgccggcgcgagcctccgcgtcggaagcttgtgacctgccgacaaggtgtttttgaggaggggaatgcagcgagggataaggccgtgccgattccagataaagtgctccgtcattgcaagtacgccaatggcagggccctagacctagagcccattgaaaagaacttcgccaacgagtctatgcaattttctttcgaagaggagagtgacgatatggtgggcgaaattagcgaaagcgtggtgcgggatgtggagaaggctgcaattgaattgcttgctgccagagctttcactgtctctgagcttaggaagaaactacgaagtaagaagtatccttttgatacaattgatgccgtgattgctaatttcaagtcaaggggtttgttgaatgatggtttttatgctgaatcattttcgcgatcccggtggctaacatcaacatggggcccaagacgaataaaacaggcacttcaccaaaagggtgtgccagaggcagaagtagatcaggcaacgagaagagtgttccaggatggcgacgactatggaaaggaggcaacgttcggcatgtccgaagcttccatggatcgtctgtttgctcaggcgtccaaacagtggcagcgtgggcaaagcttgaccctggagagccgacgtgcgcgcatggtgaggtggcttcagtaccgagggttcaactgggctgtgaccaatgccgttatcaggaagctggaggctcagcaccctccaccctgactcttctgactagatgaatggcaacaaacatatcaagttcaaactgagaagttcaggcggatgctgcctcgccttctgttcttgtgctctgtttttttagggaaactgtgaaacgaagtgtggacgaccatgttgatgggcaggtaacacagggaggaacaactgaacaagttcatacacgctgaggctttggctaacggtgagaaacataaacaaattaaaaaaaacatgtactacattggtatgctaacatttcaaaactggatttgacaagttgagtgttaagaaccaattagattagagttagtagtctcagctgacaaagtaggaactaggcattagaactaactgtctgtttaatcatatatgcataaatgtgcaagatcgatcaatgg

SEQ ID NO: 36195 - DNA, 727 bp, Zea mays subsp. mexicana
  Clone ID: UC-ZMROTEOSINTE057H04_FLI
ggcttcatcactactctttcttcttcttcttcttcacacaagcgtcctcctgctcttgcgctaagtagctagctcacaacagaagaggacgagaggcagcaacaacatatatataccgccggccgtggcgccatgggcatcctggaccacatgtcgcatgtgtgcagcatcacggagacgaaggaggcgctcaagctcaggaagaagcgaccgctgcagacggtgaacatcaaggtgaagatggactgcgaaggttgcgagcgtcgcgtgaagagcgcggtgaagtcgatgcgcggcgtgacgagcgtgacggtgaacgcgaagcagagcaagtgcacggtgaccgggtacgtggagcccgccaaggtgctggagcgcgtcaaggccaccggcaagaatgccgagatgtggccctacgtgccctacacgctcaccacctacccctacgtcggcggcgcctacgacaagaaggctcccgcgggcttcgtccgcagcgcgccgcaggccatggcagaccccagcgctccggaggtcaagtacatgtccatgttcagcgacgagaacgtcaacgcctgcaccgtcatgtgatgcatgcatatgatatgtatagtctctcgatcgtcgtatcatgtgtagtacgagctagctagtgcatatcgatcttcgtactgtatcatatcgatcgaaagaaccttaatagccaatgcaagaggaatgtgaattaagc

SEQ ID NO: 36196 - DNA, 552 bp, Zea mays subsp. mexicana
  Clone ID: UC-ZMROTEOSINTE058A11_FLI
ggtcggcgacgtcccctggaagatgttcgtggaaacctgccagcgccttcgtctgatgaaaggttcagaggccgtgaacttggcaccaagagccgcccgatgaggcacactccgttgggcgttggcacgcacgcactggcgtcttgaaggaaagcgggaactctgctggtcttgatgaggatcttcacgtgagataggaacgtgtgtacagttgtcgccttatggtattgagttgaggaaacttggaagttccattacttgtctgtagtctctactttatatagatgcgaagaagcttgagatacacattgcctacaatgtcttttgatgaataagaccagacagcaccgaaccgaactcgtcctccacggttgctttgccatctaggtggttttgtggtggtggtcgtgcttcctataggtgtgaggctgatggcgtggctgccatttatacaatctttaatcgtgttttgttgagctttattatatggttttgtttgagagttcatggctctgcatcctgttcctacgggatgctggtcagcttttccct

SEQ ID NO: 36197 - DNA, 2080 bp, Zea mays subsp. mexicana
  Clone ID: UC-ZMROTEOSINTE058C07_FLI
cacaatggagattggtcttagaggtccaaccaatctatttggacatccaactgacaagcagatgattgaattggatcaagcattatcacagtggaatactgactttgacaaggttccagtgacaaaaatcgcatttgggcacttcccgttgtctttctcagcattaacagagtcaggaaaaagtatcaaggatgtttttctaaagcaatcattggcagcatatttgtgtggtcatcttcatacaaggttcgggaagaacttgaaacgatactaccatcgggcagtccaggaatcatcattatcagagcattactaccaacataacatgcaccaaggagatgcattccagggtaataaggaaaactgttctgaagaagcttctcatattgaagagttctgggaatgggagatgggtgattggagaaagagcagaagcatgaggatactagcaattgatgatggttatgtttcctataccgatatagatttcagattaggttcaaagagcataatcatactacctacctttccccttgattcaagattcatgcagagagcctctgcttttcgtgattttaaatgtcatgtcatgggggcatcatcttttgataccgtgagagctcttgtattctctaaacatgagataatatctgtttctgtaaaaatatacgactcaaggccaggaactcttgaaatagtctttgactctgaaatgaaaagagtggattccaatgaaactcgaggaaatatgtatttgataccatggaactggagggcatttgaagattcctctcccagccgatattggctccaaattgaagtgatggatataacaggtgacacaagtgtcagccagttgaggccattctctgttaacggcttgccggcaagagtgaactggacatggaaagagttttttgtgattggtattcagtgggcttcaatatatcatcctgcactgtggtgtgccttttctctaatcttttcgttgcttcttgtaccacaagttttagcagtggtattcaaagatcggttcacatataaatctctatgcgcatatggtgggcagaggacactgttgaagtctctagttggtggtttcatctgttgttttgttgaactctccaggctggttcttgtatggttattgctactgttatatgctatctatttagtttttataccttggttattcggtcaccctattactgaagatggtagcctgacttacatgacacataaaggctggattctaaaaggacccagtagtagcaacgaagtagtccatgctgggattccagatgtcatggtcattgttctacctcacctttgctttgtgttagtacccaccattgtgattttagctgccatggctgctgagagaacagcatatcgagagcattatctttctcgatcaggaaagaagaaagatgactaccgtaagagcaggacacagatagaacatgaaaacttttggaacggtcgctggattagcaaatttctgtgtcttctctgcgtggtggttctatgcaaacattggaagctttgcagagcgctcgtgaaggcttatgctatgaaccccttgctccatgcgccagtacttttcttcttcgttcctttactcatggtgtttgccatctacaagacacggtccatttagctgttcgggagttctgaagatgtgctgcactggactgtccaataaatggtgctccaactgtgaagactgaagactaacccacaactgaaggtgtgctacttcgatttctcaatttctctctttcagagagcagatttgttagattgtttaacaggcatatatagctttcagcattgcgctccgtataaatgagggactgcacggcatttcattagaatggaatagttaggatttggaccaaggaggaagagactaaactgctcaatatagtttttcctctttcttttgagaaagttctttttcccagctctgtttttgacctgccggctttgtttttctacatttatccttcttgtgagactttgaccatctacagtataatagcactgtcgcttgcggaatgcgtgtttacactgctcc

SEQ ID NO: 36198 - DNA, 1578 bp, Zea mays subsp. mexicana
  Clone ID: UC-ZMROTEOSINTE058D05_FLI
ctcgggtcctcacgaggatctctgataagctgcaactgcacagcatggccgatatcaagaaagaatccctcgccctgcatgagatggtcatctccagcggcggcgaacctgatgcctgcgtcgacgagatgtcctccttgctcaagaagcttaaagactgcgtcgtcactgaagcccccaccacagagacgcccaacgcccagtctacctccataaagcatacatctcctatcatccctgatgaattcagatgcccgatatccctcgagctcatgcaagaccctgtcatcgtttccagcgggcagacatacgagcgatctggcatccagaaatggcttgattctggacacaagacatgccctaagacgcagcagctcctctcccatacatcactgacaccaaactttgtcctaaaaagcttaatagctcagtggtgtgaggccaacggcattgagcttcctaagaacaaggcaaactcgcgagataagaaagcagcaaaaagctctgactatgaccatgctggtttagtatccctaatgaacaggctgaggagtgggagccaagatgagcaacgtgcagctgctggtgagatccgtttgcttgcaaagagaaatgtcaacaaccggatatgcattgctgatgcaggagctatccccttgctagtcaatctgctttcctctacagatccaagaacgcaggaacatgctgtcacagcgctccttaacctctccatccatgagaacaacaaggcaagcattgtaagctctcatgctatccctaagattgtggaagtgctcaaaactgggagcatggaggctagagagaatgcagcagccacactgtttagcttgtcagttgtagatgaaaacaaggttacaattggtggcgctggtgcaatacctccactcattaatctcctgtgcgatgggagcccaagaggcaagaaagatgctgcaacggcaatttttaatctgtgcatataccagggaaataagattcgagcagtgaaagctggaatcgtcatccatctgatgaacttcttggtggatcctactggcggaatgatcgatgaggcactcactcttttggctattcttgcgggtaaccctgaagccaaggctgtaatttcgcaatcggatcccatcccaccacttgtcgaggtcattaaaactgggtctcctcgcaacagagagaatgctgcagccattctatggtcactttgttgcactgatattgaccaaacgagggctgcaaaagctgctggagcggaggatgcactcaaggaactgtcagattctggcacagaacgtgcaaagagaaaagcttctagcattctggaactcatgcggcaagctgaagaagcatgaagctgaccgtagtagatttgcgaggttgtggttttgttatattgtactcttagacactaaatgtttctggatagtgttggtatttgagatatatctgtaggcagatgcgttaagaattttctgtaaacatataaattggatgtataataatgaaagtcagcccaaactttgtatgtgattcagcttggtggttatcattgtttcaggtttc

SEQ ID NO: 36199 - DNA, 1370 bp, Zea mays subsp. mexicana
  Clone ID: UC-ZMROTEOSINTE058G06_FLI
cctccacctccacggatgtgcgctctgcctccaaccctccatggatctaggtcatgtcgtccgacgtccgtagtccaccccagcccctcgccggctccctggctcccattgggtccacgtccacctccactactcggcagcggcgcagccgctacagtctaccttgacgctcacacaagacgcgaattggaccagtcaaagtgccgaactgccgaagtgaactggattgctgcactgttcttgcccgttggtcactgcttcatgcccacgcgagacgccacctcctcgacaacctattggcctgctacacaatgatgcagtgtcgtacaatgtgagttctcatgtttctcccctttccctacattatgattttagtaatgtactcctctatttcaaaataaaattcgttttggcttcttagttgatctatatgtgcattttatatatgtgtctatatttattattatttagttgaatataaatataaaatcaagagttaaaacgaatactattttaggacagaaaaagtatttagcttgaagagcttctcaaaattaccttcaatttttataaaatggcccgagtcgtcaattttatggagctccgccactgagcgtgatggaccagtccagccgcagcgccgccagcctgaagggaaggcgcgagcacacggccagccccgcgaggacgaccaacttctgcagcgtgtccgctgccaggaaccagaggttcatggcatacgagtcgttggtggagatgaagtggaaggatttgaatcaagtgatggcacagaggctgtggtcagagtatgtgttgtagatgacaagcttaaggctaagttggacatacttgtaaacccatcgaagactgttgctgactataggacacacatcactggtgcatctaagaaggatttagaaggagtcacatcatcattagttgatgttcagaaatcgctgaagagaatgttatccaaaggaaatattttgattggccatagcttacatagggatttatgcgccttaaagattgattactctcaagttattgatacagcatacatatttaagtatgcaaatttaccaactactgcatcaccttccttgaacagtctgtgcaaggctattttggagtattcagtttgagaagaaggagaacgacataattgcttaaaggatgtagaagctgcgatgaatctagttcttgcaaagcttaagactaagttttatgactatgtatgagatattgtctattattagtactggatgagatgtatcttattatgactatggatgagacttttgtgatgtaattgatgagactatggatttaaatattgttatgtgattgtgtgtgtgatgttttatgtg

SEQ ID NO: 36200 - DNA, 839 bp, Zea mays subsp. mexicana
  Clone ID: uC-zmroteosinte058g09_FLI
ccggacgagccggcaggtgcgcttctccaagcgccggagcgggctgttcaagaaggcccacgagctctccgtgctgtgcgacgccgaggtcgcgatggtcgtcttctcccccgccggccgcctctatcactacgcctccctaggcaccagcattgagaaaacattttgtcgttactgggaccttgccaacacagacattgatctcaatatcgaggcgcgagactcgagggacaactataatacacagtttcctgagaatggccagccagctgaaggctcgttatctgacctgctaattatgatggatcaatggtctatggaagaaaatctgaatgggctgagcatggctgggatagcaggcttggaggaagcattaacagtcgctctggcagttatcaggaacaagctggcgatgaaggtgactgggtgcggtgggcctaaacctgaagcacacacgctctttcagcggcggtaagaaggaagtaacaaaactgtattatactagcatctagctctggttctacaaatattggtaattctccagtgctgcagtacatgaacatataaggccatatgttcagagaggtgatggtttcttactgtcatgtaccgcgtgtttaattcatactggtgactggaaagaggaggaggcagctctctaaagtcacaactctgaacgtatggcttttaattcatactggtgcctaagcttggtcgtggctttcttgatcacaaagagaaagctctctgaggaataaagggggggccctcgtagacaggcgttgtgtaactggttctgatggcactacagtatataatttctctcaaacatttccacc

SEQ ID NO: 36201 - DNA, 584 bp, Zea mays subsp. mexicana
  Clone ID: UC-ZMROTEOSINTE058G10_FLI
atacgcccagtacattgcaacttggtgggccctatctgtcattgactattgatattctagcaaagggaaggtgttttttcggacctttggcttaaggccttcgtccatgtcgcagtctgaattcgttattttaacaaattaatacagcgaggggctactgttgggggccttcgatttccgaaggtcctcaaaaacatgatttaacaatgtttcccaagtgtaatatatgaacaggtaccttcagactcgggttaaaaccagtcacgatgtggaaagcatggtcgagatgaaggttgatgctgctccgaagctacgcgcaagggagcttcggctcagcggtggaaaaaggaaccgacttaaaggggaaaagcctatctagtcctcgttgggttgtccttaagtcaatagtaaatataaagggcatgaatgtaattttacacaggctgcgccctgtgcctataaatagatgaacagtacccccgtaatgttcacgctgacttgtattcgctcatgcgtcacgcttgtacttttaccttctatcaagtcgaaggtacaaatgtaattcaatactgttcttattcttc

SEQ ID NO: 36202 - DNA, 1289 bp, Zea mays subsp. mexicana
  Clone ID: UC-ZMROTEOSINTE058H03_FLI
gttcggtgctgtgacgaggtcgatcccattgccagggacattggagctgttaacacaattgttagaagacctgatggaaagcttgttggctataatactgactatgttggtgctatatctgctattgaggatggaataaaagcatcagaatcagaaccaacagatccagacaaatcaccactggctggaaggctttttgttgttataggggctggtggtgcgggaaaagcactagcatatggggcaaaagagaaaggagcaagagttgtaattgcaaaccgtacctttgcacgagcacaagaacttgccaacttaattggtgggcctgcattgactcttgcggatttggaaaactaccatccagaggaagggatgattcttgcaaatacaacagccattggaatgcatccaaatgtgaatgaaactcctctatctaagcaagcactcagatcttatgctgttgtgtttgatgcggtctacacaccaaaagagaccagacttctccgagaagctgcagaatgtggagccacagttgttagtggtctggagatgtttatacggcaagctatgggccagtttgagcatttcacgggcatgccagctccagatagcttgatgcgtgatattgttctgacaaagacatagtgaggtttgtccaaagagcaagcttcccttccatcgtaatttctgcacaattgattccagttgtgtcccctcctcgtccttcccgcatcttcctcaacttgtagaatccacattctttttatctcaggtgtggacatatgattcatcttatgacatttttcttattacctaccaagatagagtttcattctctttgaagtatttgaatgttgtttattcagcaaacaatacaccatttcaacaatgtttaagagttcttactcctctcatcaaggctgcaaggattgttagatctttgatttgtgcaagcagtgtgacgcaatcagttttatgtggctaaagtatgtgcatccactgactgatcataatgaatggcagctacttctacttaatagttcttcccttactttcagtggatgattacaaattccgagcaattgcaagttcattggacaatcctaacaccatgaagcctcgtctgtgagagattcatccatgcccacaaacttccttgtttttcctttttagattcggattcagtgatcagtttgcctctcagccattgtaaattaatttgatgttccgagctgaaacattttggtgtgccttatttgtatcagcatgaacagcagtgggtttgaatc

SEQ ID NO: 36203 - DNA, 964 bp, Zea mays subsp. mexicana
  Clone ID: UC-ZMROTEOSINTE059B10_FLI
cgacagtgagcccgtctacactctgactccagtgtctcgcctcctcatcggctcacagtcgtcgcagctggcccagactccgttggcggccatggtgctcgatccaaccatcgtctcccccttcttcgagctcggcgcgtggttccagcacgagctcccagacccgtgcatcttcaagcacacgcacggccgaggcatctgggagttgaccaaagatgacgcgaccttcgacgccctagtcaacgacgggttggcttccgacagccaactcatcgtcgacgttgccatcaggcagagcgcagaggtcttcgaggggataagctcgctcgtcgacgtcggtgggggcatcggtgcggcggcccaagccatctcaaaggcgttcccgcacgtcaagtgtagcgtgctggaccttgcccacgtcgttgcgaaggctccaactcacacggacgtgcaatttatcgctggcgacatgtttgagagcattccaccagcagacgccgtactgttgaagtcggtcttgcatgattgggaccatgacgactgcgtgaagatactgaagaactgcaaaaaggctattcctccaagagaagccggtggaaaggtgataataataaacatggtagttggagctgggccatctgacatgaagcacaaagagatgcaggccatattcgatgtctatatcatgttcatcaatggcatggaacgagacgagcaggagtggagcaagattttctccgaagctggatatagcgattacagaataataccggtcttaggtgttcggtctataatcgaggtctatccataaccatttgtgatggttcatatatagtggcatggatcggagcttgtgtggtgtggacatgtaatcttaataagtgggtaccccgctgtgatgctgatctatattgtgctctctgtcaagatatctattcagtaaacgtatattctatatgcacct

SEQ ID NO: 36204 - DNA, 690 bp, Zea mays subsp. mexicana
  Clone ID: UC-ZMROTEOSINTE059C11_FLI
ggaagagacccatcaactgactttagaggcgcaggattcatatccctggagaatcttttgttctttgccaagacgttctccgcatcgtttcagagacttctaaataaacagtgcggtaacagagccacatgggagtacccatttgcggttgctggtgtaaatattacattcatgatcatgcagatgctagatctccagtctactaagccaagaacatttgtgcgagccatttttatccaaatgctctcagaggatgagtgggcatttgatctgctctactgtgtcgcatttgttgtgatggataagcagtggctggacaagaatgcatcttacatggacttcaatgaggtgctgaagtcgacacgagcccagctggagagggagcttatgctggacgatgtaatccgcatcgaagacatgccgtcatacagcctgctttgctagtaaccaaaataccaaattcgccggagaacagaactgagttgatggttcaactgtatagtacctccctttgtctgatttctgggaggattcttttagcaacaaagtagagtgatgacgtactggtatcatgcttaatttgggctaatgatggtgatatgcacattctcagaagtgttacaatgttctgtacttgtctaagcatttgtcagatatctaatattgttatattgatcatttgatccaccc

SEQ ID NO: 36205 - DNA, 1257 bp, Zea mays subsp. mexicana
  Clone ID: UC-ZMROTEOSINTE059E01_FLI
cactaggctggaaacgagcttatacttgctcgagctcaccttgtcatttgtggaagcattcactgtctcctgataagggtgagcttcacatcttcagaacagacacgttgaaggaaatgagtatccgagtaccaagaatgaaagaagagcttttggatacaaatggcttctacaatgagcttaaaatatacacaggatgtcggaacgttctgagagcgcaactgaaaagattatgagcagcatcatggataccattgctgacaaccttcctaagcagaagtctgggaaatttgatccaggttcagtctctgacaaagtgaagaacaagctgtttggtcgtcagaaaaccttgcatggagttctgggtggtggaaaacctgctgatgtgctgttatggaggaacaaaaagatatcatcgagtgttctggctcttgcaacagctatttgggttttctttgagtggctcgactaccattttctgacaattgtttcatttgcccttgttcttggaatggttgtccagtttgtttggtccaacttctcaaacatgctaagcagcgggtgccccgagttgaattgcctgatcagttatttgtgaacattgccgttgcaatcggtgcccaagtaaacaagttcctgtgcttccttcaggatgtgtcttgtgaaagaaacttgaagcattttgtagtggcgatcgcgggactgtgggctgctgcggtgattggaagttggtgcaatttcctgactgtcatatatgtcgggtttgtttgtgttcacacgcttccggtgctctatgagaagtacgaagaccaagtggacgatttcctctacagccttcttggtctgctgcgagatcaatatcagaaactcgaccaaggcgtcttgagcaagattcccaaggggaacatgaaggctaagaagaacgagtagtttagcaggtggtttctcgtgaatgagatcaatatcgttttgacttgtgtcgattattacctaaggcgtgtgtgccattctgaacctggctgctagttcatcgcccaccggggttttaaactactaagctgcaatgcacaagtgatgaaatgtactagttcattgcccacaggccgtttagcaaaaaatgtgtagatgcgggggtttgacccacaacctagtgtatgagagacttaaacacacccatctatccagtgcgactgcaattttaatgtgttatatgttgaattcttatgctaaatatatgtaatctattatttttaaaat

SEQ ID NO: 36206 - DNA, 1276 bp, Zea mays subsp. mexicana
  Clone ID: UC-ZMROTEOSINTE059E03_FLI
atgcactggaagttggtcaggatgtctcatgcaagctatcattcatcatgtccttgttgcggaaccttgttggagaggggcatcatgttttaatattttcacagactcgtaaaatgctaaaccttattcaggaagccataatattagagggctatgcgtttttgcgcattgatggcaccaccaaggtttctgatcgggaaaggattgtgaaggacttccaagagggttgtggagctccagtttttctgctaaccacacaagttggtgggcttggacttacactcaccaaggcaactcgtgtcattgtagttgatcctgcatggaaccctagtacagacaatcaaagtgttgatcgtgcttaccgaattggacagactaaaaatgtgattgtataccgcttgatgacatctgcgaccattgaggaaaagatatacaaattgcaggttttgaagggcgctctgttcaggacagctacggagcaaaaagagcaaacacgttacttcagcaagagtgagattcaagagctatttagtttgccacaacaaggatttgatgtttccctcacacataagcagttgcaagaagagcatggtcaacaagttgttctggatgagtccttgaggaagcatatacagtttctggagcaacaaggaataaccggtgtgagtcatcacagcctcctattctctaaaactgcaaccctgcccactctgagtgagaatgatgcactggacagcaaacctgggggcatgcccatgatgccccagcaatattacaagggatcctcatctgactatgtcgccaacggggcatcttttgcgctgaagccaaaggatgaaagtttcactgttcgaaactacattccaagtaacagaagcgcagagagtcctgaagagataaaggcaagaatcaaccggctttcacagaccctctccaacgctgtgctgttgtcgaagctaccagatggtggtgagaagataaggaggcagataaatgagctggacgagaagctgacttctgctgagaaggggctgaaggaggggggcactgaagtgatttctttggatgactgatccaaggcatggagagtctgcgctcggcaaaagtaaagtgttttgaagttgttgctatacactactaatagctttagtcactgggttgtgactagcatcaatcaagtctgctctttttgctgcatctctgggttgggtctatcgtttatgcaatacaatgcttttttctgatgataattatatgaataatataatcctcagac

SEQ ID NO: 36207 - DNA, 612 bp, Zea mays subsp. mexicana
  Clone ID: UC-ZMROTEOSINTE059E07_FLI
atccgatttcctatttcaaatccttcgatcgcgcagcgccgcccgccctctcgcagctctctccgatggcccgcacgaagcagacggcgaggaagtcgaccggcggcaaggcgccgcggaagcagctggccaccaaggcggcgcgcaagtcggctccggccaccggcggcgtgaagaagccgcacaggttccgccccggcaccgtcgcgctccgcgagatccgcaagtaccagaagagcacggagctgctcatccggaagctgcccttccagcggctggtgcgcgagatcgcgcaggacttcaagaccgacctccggttccagtcctccgccgtcgccgcgctgcaggaggccgccgaggcgtacctggttggtctattcgaggacaccaacctctgcgccatccacgccaagagggtcaccatcatgcctaaggacatccagctcgcgcgccgcatcaggggcgagagggcctgattgctgctcttgtcttcctgtttctgtaatgtctgaactaggcgatggactctatcgcttcttgtgctgcaatcgtgtaccgatgttcttggcaaatcaatttggctgttatgaatgtgattcagtgatttgattt

SEQ ID NO: 36208 - DNA, 847 bp, Zea mays subsp. mexicana
  Clone ID: UC-ZMROTEOSINTE059E11_FLI
gctgctttgagttaactctggagattagtgacacaaagtggccaaaagcagatgagcttcctatcatctgggaacacaataggatgagtatgctcaatcttctagcaagcctaataaagtcaggggttcatggaaggatatttgcagcagatacgggcaggcctgtacccggctcagtgatgataaagggcattgattccaaggtaagcgcgagcagcacttttggagattaccatcgaattgttgcgcctggtgagacatatgaagtggtggcatcgatgcgaggcttccggcaaaaatctacacgcatcaggctggagcaggaagccgtcagcctggatttcatcctggacccggatggagccgatgggcagacgaagctgctgccccgtagtaacgaccggggctgccgctgcgacaacgacaacgccgccaagccgttccatgtccacgaagctcacctctggttgtacctccttatcgtgtccgttctcctggccctctacgtagtcttcaagaggaaaacggtgccgaggctgctggcgtatagacactcatcgtcactcagacggcctgttgctgtataagaggaactaattttgtggtctaggcggatagttttgtactacctctgttctcgaatagttgttgtccgctagttaatttttatagctagttcatttttatactaaaatgtgacaaatagaaaagaacggagggaaggagcaactgaagttagtcttctctttgccaaaacggtcggttgctgtataagttgaaggatgggtaatgtaccatggaaatgacattttttttgaatcaatgaaatacatgttgcgttgatgac

SEQ ID NO: 36209 - DNA, 1039 bp, Zea mays subsp. mexicana
  Clone ID: UC-ZMROTEOSINTE059F08_FLI
gttagtgcttatatattttgttgtccctcatcatggacaaacaaacataatggtgtacattggagtatgttctcttctgggatcactcacggttatgagtgtaagagctcttggaattgccttgaagctaacattgtcaggaacaaaccaattattctatcctcagacttgggcctttgcactgattgtagctacctgtgtgagcacccagattaactatctaaataaggcattggatacatttaatacagcagtagtctcaccaatatattatgtgatgtttacatcactaacaattatagccagtgtgataatgttcaaggattgggaccatcaaaatccaacacaaattgttacagagatgtgtggcttcatgactatcctatctgggacgtttcttcttcacaagacaaaagatatgactgatagtcctggacaatctttgttgacacgacggccaaagcatgctagtcagaatgcgtttgcaattgaagtgatgccactaaaatgtcaagattatatagatgacgagaccttgacgttatcacttcccaaggttgaaaatggttacctaaaggaagagtatcttcttagatacaaggactcgagtattgtctgatagataattcttcgccaacatttgacgggaagctcttgagaatcattctgcttccagacatgattgattgatgtagaactggagttggcagttttacctcaacctggccttggatagattgatattacagattgtaagttgtcaactgtggtttgtctatatctggattctggatgatgttttgagggaaggagcatgcaagaaggatgccacattgaggccaattaagtgctagtcatctaggaattgtggttccggaaaagaatttgaagtgtacttagatacaattgtgtcaccaactatactcttttccccctcttttctctctcattttaggacgccatgtgatagctgcaatgtgatcttatctgattcataggacgacgccatatagaaatgtcaagcatcgttttttcctgt

SEQ ID NO: 36210 - DNA, 712 bp, Zea mays subsp. mexicana
  Clone ID: UC-ZMROTEOSINTE059G10_FLI
ctccgtagtccctctcctctggaggtggcggcgctcctcccgtcttcttcttcttcttcctgtactatatatatatagcttcccctcgcaaattgtcactgacgttcattcggcttgcttgattgttccaggtattcgcagtcgaccgtgtcctcggagcacgatgaaggttgttgctgcctacctgcttgctgtcctcgctgggaatgccagcccctccgctgaggatttgactggcattctggagtcagttggctgtgaagttgacaatgaaaggatggaactgctgctgtcccaactgagcggtaaggacatcaccgagctcattgccgcgggcagagagaagtttgcttcagtcccatgtggcggcggcggtgtggctgttgcggcaggtgcacctgctgctggcggagctgctcctgcagctgaggcaaagaaagaagagaaggtggaagagaaggaagaaagcgatgatgatatgggcttcagcctcttcgactaggttgcacagtcatcacagtattgtttcgggcagtgaaatcaaagggaaaccagagtcatgtttagattttaaccttattttatgttggaaagtactgcaaagactgctacttgtctctatatttggtaattcagctgtagattgctatgatggttgggatttactcgtgaaccagagtttttctatcttatatcctgaattggttatccc

SEQ ID NO: 36211 - DNA, 855 bp, Zea mays subsp. mexicana
  Clone ID: UC-ZMROTEOSINTE059H01_FLI
gtgtggtagaaactcagtttagtttttttccctgcagccctctaggagagagcaaaagaggcggagaggtctataggctgtacgatgtaggaggccagagaaacgagagaaggaaatggatccatcttttcgaaggtgttaatgctgtaatattctgtgctgccattagcgagtatgatcagatgttatttgaggatgagacaaagaacagaatgatggagactaaagaactctttgattgggtgctaaagcaaagatgttttgagaaaacctcattcatgttatttcttaacaaatttgacatatttgagagaaaaatacaaaaggtccctttaagcgtgtgcgagtggtttaaagattaccagcccactgcacctggcaaacaggaggtggaacacgcctacgagtttgtaaaaaagaagtttgaggagctctacttccaaagcagcaagcctgaccgtgtcgaccgagtgttcaagatctacagaacaacagccctggatcagaaacttgtaaagaagacattcaagctgatcgacgagagcatgaggcgttccagagaaggaacttgatcgaggatgtggtgttataagccacaagacaagtaactaggatggtgtgaggagcagaaagtttacagtgtcgcggctttggccgattgtgattctttttacatgaggaacatttgttgatctttttgccccaccacaagccagtaaaagtatctgttttgcgctggtcttggggaggtttgggtcgtctccatttccccccaatgttaggacaaaatgtacttaccatcttttggagctctgcctgtttggcctcacaatatcaagttcattcgttgttgtc

SEQ ID NO: 36212 - DNA, 789 bp, Zea mays subsp. mexicana
  Clone ID: UC-ZMROTEOSINTE059H09_FLI
cgtcaaacacacaccgtacggatgcggcacatggcctgccctctggctgacagaccccaacaactggcccaccaacggcgaaatcgacatcatggaagccgtcaaccaagcggccagcggcaacataatggccctgcacaccaccgcggactgcaccatggccgacatccgccgcaacatgaccggcgccgcggggcagggcgactgccacaacgcgaccaacttcaacacgggttgcaacgtgtccggggcccccgccacgtacgggcccgagttcaacgccgcgggcggcgggatcgtggcgatggagtggcgggacgaggggatcagggtctgggtgttctcaagaggcggagataaggggggcgatccgttcccggcgcagggggtgccggacccgagcacctggggttcgccgctggcggatttccctgcgacgagttgtgacgtggggagtcactttcggaatcagagcatcattgtgaatattgacttgtgtggttacttgactaacgcggtttgggagtcatctgggtgtccttcgaactgcacggattttgtggcgaacaacccttcggctttcacgaatgcttactgggaatttggggcctttcaggtttacaaggcgcggtgaaagagggcatggccggcgagaagacctgtcggctggtgggatggattttgatatacaagttgtgatgccctcgaaactcaacactccagcaacaaactccttttgtagatcgctagtatacagattacttctgatgaccatccatctgtaccccg

SEQ ID NO: 36213 - DNA, 1175 bp, Zea mays subsp. mexicana
  Clone ID: UC-ZMROTEOSINTE060B05_FLI
ctcagatgtcgtcagtccaagtattgttgaactctaaagacttgctggacactgagcctgaaggaatacgtgaactaataagcagttgcaaagtcgggaacgctacaaaatcaaagttaagaaaagtggcagaatggatcatacacactaaatgtgctcttggggaaagtcatcatcagatgcaggtggtatctaagaactggaaactagcaaaagaaaatgaatcagcacattttttgtctatatcagagctaatctctcagagaaagttatgtaatataaacatttttgcatgcatcggcaagatggttctagtgagttctccgacctctcctttaaaggtaaacttgtcggacttgtcggtcatcgacagacgttctttcaaagagcacagtgatattgtcagagatttggttactgctggatgtaagctgtgtggtttgcctctatatcacaaaaaccttcatggggaaaacacgtctgcactcgattgtcctaataacccaaaatatctccatgttcctggtcagatatacaagccatttctgatatatatctatgaccaatctggacaagttcctttgcttgtgaggaatagagctgcggagaccttgtttgccaatatcactgcagatgatgtatctgaatgccacaacagccacatgctgtcagaaacctatgaatcgtgtaacctgagcacccctggtacggtagatggttgcggcaacgaagagatagcgaaaaggagaaaaacggaacgaaagcctaatttctatcttatttggcttactctggtcaagtgtctgctgagccaaggcagcaacagccccttctgcttccagatctcagtcaaccccgagaagaatgttgaggatggacgattcgaattggtttgtttgacaatgccaataccatgagatagattttttttcttatgcaacacatggtttaagctgaaccaactcgtttttttttcctagaaaaatagcaaagcctctctttttccccccacaagaatgttcattggtcattccattagttgaaatcttgctgacatactgtcctgcataggaacttggtttggatggcagaactatcggatgttggctgggcatggatatgattccacttgtacctaaccatttgaatactaaccttggagcccgctgaaagtt

SEQ ID NO: 36214 - DNA, 1522 bp, Zea mays subsp. mexicana
  Clone ID: UC-ZMROTEOSINTE060C04_FLI
cttttgtgcagcctggtgcaggttgttctgctgacccagaaattatcgtcaagcatgttgaattcgtgcaggacacaatggaagtagatacaatagaatcatgcaggacaaaactcatgggtgacaatattgcttcgacctctgatactagtactaagctagcatgttcttctcttctccatggcagagagctttctggtactagtcttgaggatcaggggccaggtcactctagtgaaagcctagctaatgagaagtatgatatgaaatatcacactgattgcacctacggtgtgaacgataagaccctattggttcaagaaattctttctggtgccgatatttggcctgaggacaaggattcagatgggtctgctggaatgcaagttgataatgaggcttccagaggtacttcagaatcactggagtgtcccccatgtggggtagatgacaaggcaccatctgatctttcattttactcgagtcataaattatgcacggatgttgcaattctgcccaaagtagtggagggaaaagtagagcaaagtagggatgaaaacatagtacaaactgtggaaaatgaagcagaatctgttgacacaaaaacaagaacatctatttcagtggaacctatgtcccatggtcaggagatcagctcaactattcatacaagaaacactggtgcaagctgtgaaagtgatgagctgaaagaacagaattctaagaacacagatgcttctttggataaaagtgttgctaaaatgcatgaactactaaaatttccttatccaagtggtaaggttgagatgtccacaatcagaccagaaaagcggagacataaactaaggctgcaccatccagcttatcttcctttcttaggcttcctttggtccgcttgtttcaagaagaaaatatgcaaagttgcacgtaaaaggaagtcgtaagagttgtggtgtacagaggcaatttggcctcctgccagaggacaacagatctatggtgccctttgactttatcttgtcggttcgctaaggccactccaagtcgtcagggtgatacgcatttcctgagtgggctactgtagggattcacgtgaagctgtggccacaaataggagcagggagtgctgcggttgatgtaaggacactcccatccaattgccaactgaaaacagcgtcctgggtcaatagcaggaaacctgtgccaatagttgcttgacacgaaacttgtgcccaatagttgcttgaaacaaaactgattcttgaggggactcagccttgctgtcgactgcattattcaaaggcggtatgatatcatttcttcctccccccaccaaaaattttgggagatgtcacttgtgattttggaagctcatcatatgagccagtgcggtggactggcagattttttttttttttttgcaagggatgctttttttgtgtgtttaattgcgaccatcatagggtgggtgagatgatcttttgtttctccaaatctggatgtaaattctaactgattgcat

SEQ ID NO: 36215 - DNA, 629 bp, Zea mays subsp. mexicana
  Clone ID: UC-ZMROTEOSINTE060E11_FLI
gtcgaggatctcaagtactgcctccccggcacctccatagtcgtcacggccaccaacttctgcgccccgaactacggccttcccgccgacgccggcggccactgcaacccgcccaaccatcattttctcctccccatccagtcgtttgagaagattgcgctctggaaggccggcatcatgccaatccagtaccgccgtgttaagtgcctccgtgaaggtggtgtcaggttctctgtcaacggtcggcacttcttctttacagtcctaatcagcaacgttggtggcgcgggtgatgttagatctgtgaagatcaaaggaacagagttgggatggctcccgatgggccgcaactggggccaggtgtggcacatcaactgtgacatgaggggacaacctctgtcgttcgagctcagctcgagcgatggcaagacactgaccagtttcaacgtcgtccccaaggattgggagtatggcaagacatatacgggaaagcaatttcttctgtagagaatgagcgccacaagatcagcttacagtttctcattttttgttctgatcctacgagttgggctgtggtgtacattctctgcacttctgcagaacaagtaatatcattattaggagaaaac

SEQ ID NO: 36216 - DNA, 882 bp, Zea mays subsp. mexicana
  Clone ID: UC-ZMROTEOSINTE061B12_FLI
ccgccacctctacctccaccaaaggttgatggtgatgaatcagggtcggactcagactcgtcgatctcatcctgccctgcttcaatgttatctgatgagagccaaaggccccgtggctctctaccacgtccagcaagtcttaatgcctttgatatcatatcattttcaaggggatttaacttatcagggttatttgaggagaaaggggatgaagtgaggttcatctcggctgagcccatgtcagatatcataaccaaattggaggacatagcgaagctgaagagcttcaagttgcggaggaaggactggcgcatctgcctggagggtacaagggaaggagttaaggggccattaacaattggcgcggagatatttgaactcacacctccccttgtaatggtggaggtaaaaaagaaggcaggggataatgaagagtacgagaacttctgtgacaaggaattgaagccagggatgcagcaccttgtccaccatatggtccgagctccaagtatgctgcttactgatgccaagtagatcgaaaggctttgaacttaacaacagcacttcgcacggagctactggtaacaggcgtgacattctgagcggcatgaggctagaggagacagttgagcacagcacagttgaccagaagagatagtcgccggaacaaaaaccttgaccagttccacagcgctgtagtttcgcagatgatgagcagctcggcatctcatgactgaataaacgcaatgcccgccatggagggacactccggtgtctttcttgtacctgaggtggttaagttgttactcgaatgctgtatcacgagtggtgtagtcctgctattcgtaatatttcgattaaccatcatgctattctgtctcg

SEQ ID NO: 36217 - DNA, 790 bp, Zea mays subsp. mexicana
  Clone ID: UC-ZMROTEOSINTE061E11_FLI
gcctgtcagtgtcgccgaacacaacaaccaccagcatcgcctgcactcccccacgccggcgtcggcgaccaagatctcgatccccatctcttcgagcgaggcggcgctgttcgggaagggtaggtacaaggtgtgggccctcgcggccatcgcgctcctagcgctctggtccatgttcgccgcctccgtcacgctgcgcttgtcctccgtcgatctcgccaccacgttcggggacgcgagcgatccgctcatcgacgaacttgatcccctggagatggagcaaagagaaaagctagtgcgccggatgtgggatgtgtacacacgcacagataatcatgtacggctaccacggttctggcaagaagcatttgaggctgcatatgaggagcttgctggtgatgatatgcttactactgatgcagctatatctgagattgctcgcatgtcaatccataggcctgaggtcgagcaatcgtggaataaggattaggtatgaactaactaactgacctatttgtgaacttagtggctgaatgctgtctccttttcttaggatgtgccatcaattcttaatgcagcatcttttttaaaacatatatgtagtgcaaacctatatgtttgcaccttaggaatatgtagtataaacctatgcagcaaaatattttgtctatttatgcttggtttgccttgtgagcacctcgttctgataattgattatcagcaataaagtcgcatcatattgtaaacttcagaagttaacgaaaaaatataataaagttactgcttctgc

SEQ ID NO: 36218 - DNA, 976 bp, Zea mays subsp. mexicana
  Clone ID: UC-ZMROTEOSINTE061E12_FLI
caagattcatgaagtggtacctacggatcaacagcctgagcttctgcagaaactgtctgaaggaagctttactctcaggcttatgtatgagcagttccaaaacattctgaaaatgggtcctattggacaggttaactacttcagtccttgaaatttctttgaacatcttgtcaaaacgaacatgaatcatccattaacatcatgggtcaggattttagtccttgaaataaaaaatgattttggtttatttgcaggtcttctctatgttgcctgggtttagcgccgaactaatgccaaaaggacatgagaaggaaagccaggctaagattaagcgttacatgacaatgatggattccatgactgatgcaggtaatttgtggtgcaagaaccatcctatatataaatttatttacttgagtagtgtgctacaattgtatttttcacccttgagttttcgtcccagagcttgacagcacaaatcctaagctgatgactgaatcacggatcattcggattgcacgggggtctggtcgtcctgtcagggatgtcatcgacatgctggaagagtataagcggcttgctaaaatctggggcaagatgaagggtctcaagatcccaaagaaaggggagatgagtgcactgtcccgcaacatgaatgttcagcacatgagcaaggtccttcctccgcagatgcttaaacagattggtggcatgggcggtctgcagtctctgatgaaacagatgggatcgaaggagatgagcggaatgtttggaggcatgggtggcgagcggtaattttacgtcctgtttttggtggatcgtcgttgtgaacttgtgatgctaaattgagagggtttagtgctgcggtctgatcatcgtcagaggtttccatgaagatcagcctgcgccatgttatggaacaggcttactgtagctccccatgcctgaaaatttaatttatatgattatgaacagt

SEQ ID NO: 36219 - DNA, 1512 bp, Zea mays subsp. mexicana
  Clone ID: UC-ZMROTEOSINTE061F09_FLI
cgacagagaaatgagaatgaaaaaaacaatgtagaagatggcagttctatggcaaataatacagtgcctttacctgagaggcgaagtatggaatcattagatactgctgagaaatggtccgagaaagtagcagaacttgacaatgtaaaggattccccaagtgcaatttccgatgaaaattttcctgagattatgccaataaggaaaggtgaaaatcgatttgttgttagtaagaaaaaagatcgctcattgacatcacagcagtacaaaaggcgcagtattctcgagcaggcagacagttctgattttgtcccatttgttccttttcctcctggctactttggcaagaaagatacgccaatagagagtactacagacacaggaattatgtcaggaggcagtcagccaaaaggtaacctgaataatgagaactggaacaggaattactatcaatatcaatcacaatcacaagaatttaggcctagtggtaatgcatatactggctctgggaacacaggcaactccgaggggaacatgaataggagtaggggtgaatctacttaccatgaagctaactctgaaaagcgatcttattataactcaggttatagcaacaacggttattggagcagcgataacaataacagcaacaatgcctggagtgacaactctaattatgacaacaataatgcttggagtggtaacaattcctataacgggtgtactaggaacgacaataccagctgcaacagcaatcgtgattataactacaatgatacatggaatgccagcagcaacaacaacaataaccagagtggtcaatttgctgacaatagcaatgtaactagaagcagtagttatgtgaatgctaatcacgcggttgacagctcaggttatggaggaaactcgaacagaggttatactggaaagagcttggaaggatctgctgtgaaggatcctgatcctctagacatgtctgaggaagctaaggttgagagatggtttaggagggcagctcagataaaggacatctctgagctggcgaatattcccgacgaggacttccctgagataatgccgatgaggaagggggtgaacagattcgtcgtgagcaagaggaagacgccattggagaggagattaacatccccgcaatacagaaggaacctgccaatcgttagttctgaaacggacaaagatgccaactgaaaacagaggtattattgcctgcataccacaacaccatttttacaccaaggtattactctttgtgacgataagggagcaatcagaaacaagaatcatcaagaataatgctccaggaaagtttttgtacggtaaaaattatgtccgcaatgacctagggtttgctggattgtgttcgctacatgtacactatacacatttgcgttgtactaagaaccttttaacaaaataatgccccaggaaagttttttttggcttgtctgagattacatgtgtaccgaatttgtttataaatactgatactac

SEQ ID NO: 36220 - DNA, 1597 bp, Zea mays subsp. mexicana
  Clone ID: UC-ZMROTEOSINTE061H02_FLI
tgattagaagaactttgattccatttatgatgatgtttattgatgatggttataattatgatctctggtatctccctgttgggggtcttcttcttcgccgaaggtcctcaaggcgaaaacaccttcggcaagataatataaaagcatatgcgacatgatgatacagatgaaagccgatgctatggctaaagaagcttcggcctagtattatgacgaagccgaaggtcgtcaccgactcaaggggaaagactatttagtccttgattattcatattatgattgtaagtatagtcagggacatgaatgtaattgtgttcgggctgcgtcccgtgcctataaatagatgaatagtacccacgtactgttcacgctggattctaatctctctctcgtgtcatctttgcattcacaccttctggcgaaccaaaggtattattgtattatgaatattattaatgttgattcttctctatggatataaatataaattaactgcgaagacataatcattatctatggtatttaatgttctttcgcattcctatttatatttatgattatatgctgaaatgatgaaggtatgtccttcatgaccttcgtctgaagatcattgcatccgaaaggaaataatgcttcggaggacaaaggtctttaactattaacaattgtgttgccttgttcttgatttatagaatttgagaagaagtgaccaacattggtgcccacctccggtgaactcacttccacaactgtgacgatggctctacaaagcaaccaaccttcggctatgaggctagtgctcccaatcacaggcagttcaacttctgaaccagctataaagaggtagaagaaagaagcacagagaagggtacaacatgttggagtgcaagggcccttcatcaggtcaaagtggtctcatattccaatcaccttctctcaggaagaccttcagcttaaggatcatcctcacaacgatgcaatggtcatatcttgtgttatcaagggatttctggtccacaatgtcctggtagacacaggcagtgcagcagatatcatctttgcaaaagctttcacacaaatacaagagccagatgacaagatacatgatgcaacacaccctctatatggcttcggagggagacaaatagtggaacttggcaagataaaaatgccagtcacctttggctacattcacaacacaaggacagagcaagtagtctttgatatttatccatacaatgcaatcattggtcgagggacgctcaatgccttcgaagctatcctccacctagcatacctttgcatgaagataccatcgaaacaagggcccattgctgtgcatgggagtcaagaagctgctaggagagccgaaggaagttggacggattcgaaggctattcataacatagatgaaaccggagcttatcagcagtataagcataaaagagaaaaagctactttggcagatcagccaaagcctatgcttttgtgtgaagatatagtagagcaaaaagtgctgctggggtctcagttatctgatgagcaagaaaagattttgttaaggttcttatttaacaacaaatatgtttttgcttag

SEQ ID NO: 36221 - DNA, 1797 bp, Zea mays subsp. mexicana
  Clone ID: UC-ZMROTEOSINTE061H06_FLI
gcgacgtcctcgtcacgccacgcaccgattttccggagctccgcctcgccacgccggggacgaggtggctgagggctcgagctgctggcaagcagcaggtcagggaattcgagcttgttcggggaagggcgcacacggggaagaagagttggatcgtcagctttgatggcgtcaacaacctggacgaggctaggcaaatagttggttcagctgtacttgtgaaagctcgagatagaccagaaattgaggatgatgaattttattcacttgaccttgttggaatgagagttattgtcaaggatacaggcaagctcgtaggaacagttggtcaggttttcaatttcggaggtggagatcttctacaggtgataatgggctcttctgagggtactgctgttgatccagattcagaaaatcaagatccaatttcatcacgtgagcatgtgtggattccatttgctgaagatattgtacctgatgttgatatggcaagcagagaaatgcggattacacctccgaaggggttacttgagctcaattctcgttctgacaagagatcgaagaaagaaaggcgtgcgatggagtggaaggacaggaaaagatttcaacgtcgtgtaattgcaggaaagaaggtactctccgaaatggaccaagtccatgttctggaaggtttggtatcaggggacaaggtccaaaaggcatcacttgcagagcagattgggagcattgactttcaattgttccgacatgcagtacattgtgttagcaagcagattgagagctcttcaatgaatttgctcgctaactcttcactgtcaaggaaaaaagtgatcaaaataccatacaagactctcatcaaccttggggacaaagctgaacatgcattcagtagtgaatttaaaaatggccttgacattcttttgaagtccaaagcagctattgtacttgttagaaacggctctgactctgatactgagtttctgagtttgctcaattcttttagtgaattaatgaaggttgtagaaaataaagtttctccccctttaattgtcattgccccagctggtcatgtggagtcagttcggaaatgcctggtagagaatgactattttggttttgacactcaaaaggtgtgggtgctggaagagctggagcttccagttgtcagtatatgctcggagggaagcagaaaaaaagttctgatgaagtctccctgggagataataaaaaaaccaacaggttctggagcaatcttcagcttactgttatcaaacaaaattttggaaaccctcaatgaaatgggtgtacagtatacacagatctgcagctcatccaacagaccaattatcgggcatcctttgctctttggggctgtcgcttcccgcggggctgatgttggcatccaggtctccaagaccggtgaaacattagacgatttcgacgtgatcctttccatcgaccagctgaacaagatgtgccgagatgtcacccagatcaggttctccgctcgccccgaacagaacgtgcacgtcgagcatgtcgacgggcagtgggtcgccgtccagccggaggtggcaaattcccatcgcctgcatgccgaggttacgagtgtcttagactcttgcgctcctgataagctgtgtgtcatggagattgttgagcaataaaagtttcttgcctgtgtactgtacataatcacaagtacttgatagatgcgtgaggtttttcttctgctattgttttgctatgaatttttaggggagcatctacgaagcggaataccagccacccactgcc

SEQ ID NO: 36222 - DNA, 564 bp, Zea mays subsp. mexicana
  Clone ID: UC-ZMROTEOSINTE062B11_FLI
cgagtccgacgtcgacctccgcgccgaggacctcgaggtggtgctccgggaggcgtacgcgcacccggccgtcgagggcgtcatcttctggggctgcatgcagggccacatgtggcgccaggacgcgtgcctcatcgacgccgacggcaacgtcaacgacgccggggagagattcgtcgatctccggagggagtggacatcgcacgcgcgcgggcagatcgacagcgctggacacttcaaattcagggggtaccacggcacgtacatcgtgcagctcgcgacggcgacggggaaggtgcacaagacgttctccgtggagaaaggggacacccctctcgtgctggacatgaacctttgacgatcacttctaccgttccctagttatatacagacacatatggcattgatttgacccaatggaacacaaacagaaagcagcactccgatgctagctacatgtatctatctatgattggtattgtaaggcaaacttaaggtattgtactccttaagaattattggtgatggtgaataaagtgaacgagctattcctcgttttgtagt

SEQ ID NO: 36223 - DNA, 1220 bp, Zea mays subsp. mexicana
  Clone ID: UC-ZMROTEOSINTE062C03_FLI
aaataagaatgctcttcaacaatatgctcaaggtccaagtgaccgacatattgagcaaatgtaccatggatccagttttcagcaggatactggaggtactactccctctaattattttgaagaaggaagagtagacggtggctcacagttatacccatctgatggtgatgctttacctggtattgagggatttcaaattgctggtgaacctagaccaggatgtcaattaacagcatgcggtttccctacaaatggtactaccctttgcaatttccaggtatgttgttttctgctcttttgttatgattttttataattgctataaatgtcaattcttgtaaataaaacctttcaccccattgatgttgctgttttagtgggttcgccatcttgaaaatggtatcaaacagtctatcgaaggtgccacgatgtatgactatgtggttactgcagatgatgttggtactcttcttgctgtagactgtacgcctatggatgacaatggccgccagggtgatttggtgacagaatttgctaataatgggaataagataacatgtgatccagagatgcagagtcatatcgatgcatgtatttctaaagggagagctgaatttgaagtttttgtcctggcttattctcctgaggaatgggaactggctacattggtgctcacacgacctaattatcagattaagttcaaacagaccggtaatgttgtaattgacgagaagtactcacaaagtctacagacaaaaattccaaatgggcgcacaactcagtttgttttaataactgcgggtacaactcttccatttaacacacagggaatatcagagccaaacaatgaggattacgatgttaggttacgtgatctaatcgtattagtcatgagaacttttcagaaaaaggctctagatgctaaaaggaaaggaaaggcttagaattcatgtaaatcttttacaaaagtagaaccgtagaagattttcctatttctgattgttttgtgcagtatttgataatttttgtccttgaggtggaatgagcttctcgatagagcaggaatttcaagagttacctggtgggcacataaatggttagaggaacgtaggatcgattcttatcctaattctttttttccttcgcattgcttactctaagttaagccatgtcactgcggtcagccagtgctgcaaataaacctatgagatgttctctgc

SEQ ID NO: 36224 - DNA, 828 bp, Zea mays subsp. mexicana
  Clone ID: UC-ZMROTEOSINTE062C09_FLI
gccgccgctggtcatcttcccgcagttccatcttccgctcactcccttcatcgcgctcggcacacaggcgacggcggcggagctcatgctagggctctcagcgaaggcatcagctgcttcccctcccgcctctcgccaatcgcctcccgtcctccgcacaccggccggtgatcctgcgtcttttcattcgtgatttcatactccaggtatctgcatcgcaggggaaatggcaagcaaagcaggtggtgatggcaaagaagccataaacgagcaagtagttgccaacacttatgccaacatgcgtaccgaaatgaaccagctctacaccaagatcacagagctggagatggaggtcagtgagcactccctcgtgattggtgcgatcgagccgctggacccctcaaggcgctgttacaggatgattggtggggtcctggttgaaaggaccatcaaggaagtcctgcctgctgtgaagcgcaacaaggagggccttgaagaagtgattgctcgcatgcatgaggcactggagaggaagaagaaagagatcaccgagtttgagcttaagtacaagatcaggatccggaaggctgacaatgacacagaggacgaaggcggcaagaaggaaggcactgcacagggagtccttgttgggcctgctggacagtaaaacttaattagatggattttgtgtaaaagatgaggaccgatatgaactgaagtagtttctttgtcacctcttcgggtgctgcagcaatccaagtttctgtttgttattgatgacacattgcaaatctcccaggactagaatctctgttcgtgattcctttt

SEQ ID NO: 36225 - DNA, 1250 bp, Zea mays subsp. mexicana
  Clone ID: UC-ZMROTEOSINTE062D03_FLI
cagtcccacaccgtccaggggtatgttggcaacaaatcggccgtctttcccctgcagctccttggctttgatgtggatccaataaactctgtacagttttctaatcatacaggatacccaacatttagaggtcaggttcttaatggcaaacagctctgggaccttattgaaggactggaggaaaatcagttgcttcattatacccatttattaacaggttatataggctcagtttcctttttagatactgtgctacaagttgttgagaaattgcgatcagttaatcctgatcttgtatatgtttgtgacccagttctaggtgatgaaggaaaactatatgttcctcaggagctaatatctgtttatcaacagaaggttgttccagttgcttcaatgcttacacctaaccaatttgaagttgaactacttactggattgaggatcacctccgaagaagatggtttgacagcttgtaataccctccacagtgccggaccacagaaggtggttataactagtgctcttattgaaggcaagctgctccttatcggaagtcacaaaaaaacagaggaacaacagccagaacaatttaagattgagataccaaagatacctgcatatttcacgggaactggagatttgacaactgctctcctactaggatggagtaataaatatcctgatagcctcgagaaagcggcagaactggcagtttccagtttgcaggcacttctgaaaagaactgtggaagactataaaatggccggcttcgacccatcgaccagcagcttagagatcaggttgatccaaagccaggacgagatccgaaacccaactgttacatgcaaggctgtgaagtatggaagctgaatccatagtacccccactgacaaaggtgccaacaataatgagcagtgcctgcaccgccgataagcgggtgcacctacttccatgactcttggccctcagttttgggatgctgattctgttacaccttagctccaaaatgagaaacaatcatatttctgaaaaaagggttatagacttatagggttatattcaggctgtgcgattgctgcagtctttgggaatgcgtggtggcctgagtgagattgtaaatggcccttgtcattgttgtcttcctcgttgtgttgttgttgctgctgctcccgctgagttgtggtggttggttgggaactctaggtatgctttgtttgaggcattacgaacatatggtgttgagatgtgct

SEQ ID NO: 36226 - DNA, 532 bp, Zea mays subsp. mexicana
  Clone ID: UC-ZMROTEOSINTE062E10_FLI
agaagatccaaaagtcgacccacccagaatcacagacgcagcacaagatgcaccagcatccaccaagactgatgtcaaggtggtcgatgcagctgcagccacagctgccaagccaaacacagcggagaatccttcgagttccaatgctgtcccctctccagtgcgcacaacagattctgattcacgtaagcatgcgtcatttcccgagcaggatagtcctcatgagaacaaaagcgcagccgtccatccaggtgaagcttctgcgactccaggtgttggttcaagccaccaccgccatgaagcacctgaggcccgttcagccagcttcacggaattgtttggttctgagtctggcatcgaatcagagtccgaagacttgatgccagatatcgtcgacggggaccctgactctgactaggtttgccgtcgtcatttgtgacatggcaatggaaattttgtgatgttcctgttttgttttgagcaaattgtacgacattgccggctgaaagatgatgcagtatttgattgatag

SEQ ID NO: 36227 - DNA, 1055 bp, Zea mays subsp. mexicana
  Clone ID: UC-ZMROTEOSINTE062G11_FLI
acgaagaaattctcggagaagctaggcgaaggtggctttggctccgtgttcaaagggtgtctaggtgactcgactactaccgtagtagcagtgaagaggctggacggcgctcgacagggagagaagcagttcagggcagaagtgaactcgatcgggatcgtccagcatataaacctagtcagactgatcgggttctgctgcgaaggcgacaggaggctgctcgtgtacgagcacatgccaaacggctccctggactcccatctgttccgaagccatggcggcgccggcgccggggcagctctggactggaacgttaggtacaagatagctgtcggggtcgcgagaggtctggcgtacctgcaccatggctgccgggactgcatcatacactgcgacatcaaaccgcagaacatacttctggacgcgtcgtaccttccgaagatcgccgacttcgggatggccaagttcctcgggagggacttcagccgcgtcgtgacgacgatgcgaggaaccgtcgggtacctcgccccggaatggatcagcgggacaccgatcacttccaagatcgatgtctacagctacgggatggtcttgctggagatcgtatcggggaagaggaactctattactcagcagtcttcaagccataccgaaggccaacaaggggactatttaccagtgcaggttgcgggcaagcttcttcgtggagacgttttgagcgtcgtggatgcagatctgcgtggcgacgtgaacgtggaggaggtcgaaagggtttgcaggatcgcgtgttggtgcatccaggatcgcgaattcgatcggccgacgatggttgaggtggtacagtttctcgaagggatttgcgagccggaaattcctccgatgccaaggctactccatgctattgcaggaggcggctcaaatcagatggccggagtcggagtgtgagtcgtagctttctcggcaaattcaacaatcgtctatgatatgtctgtcagttgttatggcaaataaatttgttttcaggaatatctaacatcttgtcatgtaatatttcg

SEQ ID NO: 36228 - DNA, 793 bp, Zea mays subsp. mexicana
  Clone ID: UC-ZMROTEOSINTE062H09_FLI
cagccacacttctcttcatgtggatgccagtggcacagatgtggacaaattaccttaacccaagtaacatcaaagggttgtcagctttcagcatgttgcttgcaatgcttggaaatggacttatgattcctcgcgctgtattcatccgtgatttgatgtggttcactggttctgcatgggcatctgtcctacagggttggggtaacctggcgtgcatgtactgctttaatagcatcagtggagaagttttctttgcaacatcagctggtctgcttctatggctaggatttactctatggagagatgccattgcctatggcaacagctcgcccttgtcttccttgaaggagctgttttttgggaagtgatgaaccgtcggcaaccttgtttctcttgcactttaagcagctaactgttcccgggtaggacgctctcctgcaataaatcatggtagctgttaagaacggtggttcagttgctcccatatggtctgaagaaacggtgcttcagtctttagcattttgaggaggaaacgtgaaatttactggtcagctgaaggctataaacattgccatggccctggactggaagccccaactttcccaagcctgtagaaagcgccgtgtgcctctacagaagccaccgcgtgatgaccagcttcatccggcagggtgggtacagtagcaagctatagccctagtctgataagaacaaatttatattatccatcccatattgtctttaattagattcttttttgaaaccaatgcaatttcagctcttgctgtcgtgc

SEQ ID NO: 36229 - DNA, 1142 bp, Zea mays subsp. mexicana
  Clone ID: UC-ZMROTEOSINTE063B01_FLI
gccgaatcctgagctggctagctcgatttacatcaagtgccagagcttgagcaattggtatggggtgatcccaacactgtggccaaacgtgaagtacatctatggcattatgacggggtccatggagccatacctgaagaaattgagacactatgctggtcacttgccgctgctgagtgctgactacggtgcatctgaaggatgggtcggctctaatgtaaacccaacgttgccacctgaggaggtgacttacgctgttcttcctaacattgcttatttcgagttcattcctctggaaaaaccaaaatgggaggaaacggagatctgttcctctgttcactacatagagtcggagcctgtaggcctaactgaggttgaggttggcaaaatctacgaagttgtaataacaaattttgcaggtctataccgatacagactgggagatattgtgaagatagcaggcttccgcaacgcaacaccagagctccagttcatctgccggagaagcctagtcctcagcgtcaacatcgacaagaacacagagaaagatctgcagctggccgtggaagccgcggagaagctcttggccgcggagaagctggaggtggtggacttcacgagcctcgtggacaggtcgagcgagccagggcactacgtcgtcttctgggagctgagctccgacgacggcgccagcgaagacgtcctgagcggctgcgcgagctgcatggacctggccttcgcggacgcggggtacgtcgggtcgaggaagacccagaccatcggcgccctcgagctccgggtcctccggaagggagccttcgcgcaggtcatgaaccactacctgagcctcggcggcgccgtcagccagttcaagacgccgcggttcgtgagccagtccaacagcaaggtgctgcagatactgagccggaacgtcacccggagctacttcagcactgcgtatgggctctgatcgacgatgctacggcgctacgcaccaagtactggtaggctgcaactggaagtatagtgatcgagagtgcatggcgcacgacgacgatccatcatgctggcagcctgggagttgcacgacggctgacagatgtatcatataactgtcggtgtaaatatgtgcctgtttgttt

SEQ ID NO: 36230 - DNA, 761 bp, Zea mays subsp. mexicana
  Clone ID: UC-ZMROTEOSINTE063B04_FLI
gcgaaggatggtccgaccggcgacaagagccatgtctccactagggtgatggggactcacgggtatgcagctccagaataccttgccacaggtcatctgaccaccaagagcgacgtgtacagctttggggtggtgctcctagagatgctgtcagggcggcgggcgctggacaagaaccgcccgaacggggagcacaacctggtggagtgggctaggccgtacctgagaagcaagcggcgcatatttcgcatcctggacccacggctgggagggcagtactcccttgccagggcgcagaaggctgcggcgctcgccctgcaatgcctctcggtggagtccaggcacaggcccagcatggacgaggtggtcacagcgttagagcagctccaggacaccaaagaaggaggtaaccatcacctacagaagaggccaggcagccggagcttggataacaatggcggcaaagcggcagggaaggggaagcctgctcctcatgtaaaaccagtttgagtgattggattttatatgccagagtatctctctcttttttttcgtccatttgtaggtgtaggtaatatagtagggttcttagagggatttgtaaagaggcaggcagagttctggatgttttctgtctatcatgtagtttttttacatcttcaagtctctgtaaagtacgctatgtaaatacataatgacatccagttcggagtgtgatgaattttagtccaggcaaaacagctcaaccgctgttaaaactc

SEQ ID NO: 36231 - DNA, 1419 bp, Zea mays subsp. mexicana
  Clone ID: UC-ZMROTEOSINTE063B10_FLI
gatttctgcactcatctcctttaatgcaggataccactggttcagtcaaattgtgggagatcactcggggtgctgttattgaagattttggcaaggtttctttcgaagacaagaaaaaggaattgtttgagatggtaagcatacctgcttggttcaccatggatgctcgattagggtgcttgtctgtccacctggatactccacagtgcttttctgcagaaatatatgcggttgacctaaatgttgctggagcacaagaagatctcaagattaatttggctcaagagactcttcgtggtttgctaattcattggagtaaaagaaagcagaaatctagttcacacagcttgtgtaatggtgatagttcaatagggaaagatgttccgtcgaaagactcgccccggtcaagacctgaggtcgacgatgccactcaaaaccatgcaactcatgtgcttccatcatttgagttttctacagtttcacctccatcaattatcacggaaggttctagtggagggccatggagaaagagaattaccgatttggatggaactgagggtgatcttccatggtggtgtgtggactgcattactctcaatcgatatccaaaggagaatacaaaatgcgggttttatttacaccctgctgaaggctcgcctgcaccaaacataactcaagggaagcttagtgctccacgaatattgcgaattcacaaggtagctaactatgtggttgagaaactcgttcttgacaaaccattggatggaggctctgatgcgtttgttatgggattgagttctgctcaatcacagctctcagttctagatagttcttcgcggcttggactaaagccatggcaaaaaacaaagccatgtattgagatattgtgcaataaccaggttctatcaccagagatgagtttggctactgtgcgaacatatatatggaaaaagccagaagatttgattcttcattacagagtggtccaaccgagatgatcacggcttcagatgtacatgctgacatggttctcagcatggctgcaccataaacggtgtggttgaagacacccttggcttagcgaggaaaccgtcagaaatattttgctcttgggctccggtagccgctctcctagaatcccgacttcgtttgcttctttgtaaagttccttcctgatcttgccctggtagtaagatgtatcatagcacaggtataaggccctctgcttgtacatgtagaagatttgggtgcttaataaaggtcaaatggattttttttcgtttttctttgacaaagtttgtaagaaaacgggcttagacgttccgacgtcgattattggatttaatcctgtcgcatcctcttgttttgttagcgtaagaggtggacgggaggtcgggagcaataaagctgtttttttat

SEQ ID NO: 36232 - DNA, 702 bp, Zea mays subsp. mexicana
  Clone ID: UC-ZMROTEOSINTE063C05_FLI
ccaaatgaaataagtactttggcagagtttacccatccttcaaagttgagaaaattggaggatggaacctcggtgcctggaatggtgaacagcagccatgctgtttatacagttccactgcaagcagtgggccctagcggaccatcagggagctatagtgctggttctgttaacttacagcaaccagggaatgaagagcagcttacgcctgatgtggagtcagctcttctgcagcaagtcttgcagctgacacccgagcagctgagttcgttgccaccagagcaacagcagcaggtgattgagctccagaagatgctttcagttagtaaatagaagcaactgagagctaacgcagcaaaaatgctggttgagaatctggcacatcacataatggcgagttggtaactagtggaaactggaaatgatcctcagatttgtttatgaagtcaccacgccgcctgtaacctgtaagcattgtcggcatcctgatgccatcaggatccatatggttttctttcttcagctcggagataaaagaaatgtgataggagaagagtagtgtggaaaaagggatacgcattatccatcactgttgtatcattatagggagaaaaaaaataatatgtattcaaaggaactatttttcagcgcttctcgaatgggctgtagcatcacacatttttgtccttagagttttcttgc

SEQ ID NO: 36233 - DNA, 597 bp, Zea mays subsp. mexicana
  Clone ID: UC-ZMROTEOSINTE063C06_FLI
gtcgactcctacagcgtgcaccgcctcctcattaccgccgtgctcgccgccgtcaagttcatggacgacatatgctacaacaacgcctacttcgccaaggtcgggggcatcagcctggtggagatgaactacctggaggtggacttcctgttcggcgtcggcttcgacctcaacgtggcgccggagacgttcggcgactactgcgccgtgctgcactcggagctgctgtgcgccgaggctgcccccgcgccgctcaggctgcagcactgctgcctgtccgaggatgacgccggggccggatgcagcgcccagcagcagctcgctgcatgaatgaaagaaacctaagcccatcatcgatcgatcgatcgatcgatcgacgactcatccggtggcttgggcgcaggagttgtaagccggtgcaaattgttccaaattattagatgttttgtcttttctagattataaagctttcgatatatacacacatctatatatacagtgtgtctagaggtgtagtggtggtgtaggtcgtcgtcggttgtaccagctgctacagtagattgtgtatacagtgctggtgtctttggtgactttctg

SEQ ID NO: 36234 - DNA, 1088 bp, Zea mays subsp. mexicana
  Clone ID: UC-ZMROTEOSINTE063F05_FLI
ccgagactggcacctgtggtgttgtcggttacatatggacaagtgttgatactgggatcatggaagaatggagacaatcaattgccccgattcctaaagaaaagcttgaagagctgcagcatgctgtgcctgatgatgataggtcagaagatgaatccaacaatccaactctaccagataaagatgattcttcagacagtctggttgaggatgatgatcatatttctaagtttgagaaagaggtggaagagacattccaacgagctctgggtggcggcgttaaccgagataatttgatactagagattaatggcctaaggttagcctacagccttcaacatgcagattgtgctggagctgtgttctattctgtcatgaagagtgcattactggctgcacaatctagtaatgatactcttttgaagacaactgctgatgcacttggcaagtggaaggatcttttgcgcaattacaccaagacagttgatgaagagatggagatacttttaaagtttgaggaaatgtgtcaagagaccacaaaagatttttctccgctgtttccaaagatcttgccatacctctatgatacggaggtagtaagtgaagatgcaattttgagatgggcggaagagaaagaacatgctgatgagtctgataaagtctttgttaaacagtcagaagcctttattcagtggctcaaggaagctgaagaggaggatgacgaagaagaggaataaccctggagttgagctggcactcgaattctttcatgcattgtgagcgcaggatctgatttgagtgggtcactcggtgagttctcgcgagcagcaagttttgcaacctgtaattgcctgtacatcaacacaacacaattttgtccctaaccgcaactggtggagagtagcaaggagcgatttggcgtgaatgaaccaaaatgatcccagtgtagatgacatgctataactgtgctatctttgcttggttgacgcttgggcgaagtcttcgccacatttgtttaactggccatcacctgtttcttggcacccagccggcactcgcacagatctttaataaaagcttgtttagat

SEQ ID NO: 36235 - DNA, 1155 bp, Zea mays subsp. mexicana
  Clone ID: UC-ZMROTEOSINTE063G08_FLI
catgacgagcgcctccgagctcttcaccgcgcgccgtgccgcccgtggggcccgcatctccgacctcgacctggatccgcacgccgacgcgctccgggaccagcacggacttggcgcccggcaccggcgccgcgggtgccgcccgcgacgccagctcgacgccgccggggacgtgcggcagcacctgcacaccggggccccgccaccgcgtcgccgcgggtcgtacaccgatcagatcttatcgtacatagacaacaacaaccttggggttggggattctgcagctcggaggaacagacttgataggctgatgttcaggacaaatgagcggcttcctggtgctgtactgcaagcacaagcgcgtgtcctggagagactcagaggcatttctcttggttcatctgcgtccaggccatccatctcattagatgaattttcagctagcgatgtattcagaatcatcgacttcagaaacagggaagcacggcatgaagcaaatcggcaccactcatcgtggttccacccaagcagtgaatcagacgaagaaagaccaaccgtcagttccactcactccaaccggtcaaccggacttaccaaggcagctttcctgcgtctgcaggtcgagatttttgaggctagcaaagatgatagcagagaggcatcgcctgaatgttctatttgccttgatggattttacgatggagatgagctgataaggttgcgctgtgggcacaggttccactcgacatgcttggagccatgggcgcggaaatgtgcagactgcccatactgtcgaacgaacatacggtcacgatcctgacgacaaacccttagttcagaataagcttataaccaccatggagtttcactgttgtaaaattcgctgttgtgggcatgccagttaatccggtgctcctatggcgacatgtaatttctaatatcctgaatattttgtgttgtgtcgctcagagaggtttatggtgttgtgtgcgagtggaggctgatagcagtatagcttagaaagcacccttttgtgtgtatgtagcgagggatcacgcaaatgattctgtactactcatgataatgttctgatgtctgaatttcagttgttactgcatgcttcttgttatggagggtgaggaacatgactttgct

SEQ ID NO: 36236 - DNA, 1044 bp, Zea mays subsp. mexicana
  Clone ID: UC-ZMROTEOSINTE064F05_FLI
caaaaaattcttgtatcttccagtgcaacaacttgcccatccaaccggagcgcttcttgttttgtggattacaaatagggagaaactgcgggcatttgttgagaaaaaactgcttccttcttggggagtggaagattccaccgtgttttattggcttaaggtgaaacctgatggctctctaattggtgatttagacttgttccatcacaggccctatgagtgcctcctccttggctacataaatgttaatgcaaatgctaagaaagggtcaaatttcaagttgttagaaagaagccaagtaatcatgagtgtccctggtgctcactcaaggaaacctccccttgagaaattactctcagaatatattccaggtcctaaaccttcaagatgcatcgagcttttcgccagagagttgtttcccagatggacctcttggggaaatgagccgcttcatttccaggataccatgtacttctcggagacatagttcgatagccaagagcaggatataagtatgtggattttgatgcaactgccacctaaggcaagtggttttgcaatagcattgtaccttgtgtttttcggcctttcttcaggtgatgaaaacgccccatctccagacgagtttgctgtctgctattgctgagtgctgacttactgtgtgacctctcgcttcccagcacttgattggtatcaagtcctttttttttggccaaaagctggaggtttggcgaatcctatttataggctgacctgaggggctgacatctcatattatttcttgcactatgcagttccctgcattgtagtgttcagtgtgcttctgggaatctcaggtcaagttgtaacgggcagtcagagagatggaaagaatttgtacacagctagattcgttgggctcatctgcatcctggttactttccctagaacaattcggaacgttcctgtaaagtagaacggaggtttccatttccctgagcggctgagcagaactggttcgaagacaatggatgcaggccgtatccagtgccgattcttttgctg

SEQ ID NO: 36237 - DNA, 603 bp, Zea mays subsp. mexicana
  Clone ID: UC-ZMROTEOSINTE064F12_FLI
aattgggtcaagggctgagcgcatccgtctaaggaatcaggcggcaaatggtactggtgattcttcaacgcacactgctatgtatccaaacaagaacgggcattgcagcgacactgaaggcaaggcatgggaccctcttgcgacgaagataacaggctcaactgctaggggttctcctgcaccaaccccaagcgtgtgcttctgattgtgttaagcatgtgattcacgcacacccatgaaccagtttatcttatagtgccatataattgccttgtgtgtcccagaaaactgagctgcccgtgtgcgataagtagaataagaggtgctaccccactgtttgctgtgttgctatggtcgatattgatgtattgatgctgctgcatttttcgttgtttttgttaatgtgtggtggcgtttctcgcttctgtaaagcagctgaagctgtcacatcatttgatcagttgaagctgtatgttagcccctgatcgtttgcttgcgactggccaatactggtatacgctagtatgtaccaaacactcaaacttgagaaagcaacatgcaaagaatggtgcaaccagagaagcagcactgtcgttctgctgc

SEQ ID NO: 36238 - DNA, 1113 bp, Zea mays subsp. mexicana
  Clone ID: UC-ZMROTEOSINTE065F10_FLI
gagtattgagatcgaggagaactgggacaaggttaagactatctttcttcccacagagaagcaaatgacacctgacgcatgtgctccattgattgccaccctgccattggaggtccgcacaaagataggtgatttcattagagctgtattttctgttttccaagacttggatttctcatttcttgagatgaacccattcaccttggtaaatggtgaaccgtatcctctggatatgagaggagaacttgatgacacagctgctttcaaaaacttcaataagtggggcaacattgtgtttcccctaccatttggaagagttctcagtccctccgaaagttttatccatgaactggatgagaagacaagtgcttctctgaaattcacggtactgaacccaaaaggacgcatctggacaatggttgcaggtggtggtgctagtgtcatatacgcagacactgttggtgatttgggatatgcttcggagctaggaaattatgcagagtacagtggagctcccaaggaggaggaggttctgcagtatgctagagtgcttttggattgcgctacctctgatcctgatggccgtaagagagcccttctaatcggaggaggaatcgctaacttcacagatgttgcttctacatttagtggcattattcgggctttaagagagaaggagtccaaattaaaggctgcaaggatgaacatttatgtccggagaggtggtccgaactaccaaactggactcgccaaaatgcgcaccctaggcgccgaacttggcgttccaattgaggtctatggaccagaggcgaccatgactgggatctgcaaagaagccattgattgcatcatggccgcgtaaatcacaaatgtggttgttccatttgaagtcacatccgttttgtactagacgttccttgtacgtgattgctctggtaaaacagagaacgatcattgtcatgagtaaactcggcctttgtaacacagttacgcaagtaataattaagatcttggtttggtgctctgccacccttctagggtgggccggtgaggtgaatgtacaaataacaatgcactttgtgatccaccagattgcagtgctctggtatttct

SEQ ID NO: 36239 - DNA, 1601 bp, Zea mays subsp. mexicana
  Clone ID: UC-ZMROTEOSINTE065G02_FLI
cttgacttccctaacattgttatcaaaggcagcgagctgcagcttcctttccaggcttgcttgaagattgagaagtttggtgatctgatactgaaggcaactgaaccacagatggttctttataatatatatgatgattggttgaaaagtatctcatcatacacagcattctctcgcattgtgcttattctacgtgcacttcatgtgaataatgagaaggcaaagatgttgctcaaacctgacaaaacaattgttactgaaccacatcatatatggccaactctgaatgatgaacagtggttgaaggttgaatgtgcactaagggacctcattctttccgattatgcaaagaaaaacaatgttaatacttctgcactgacacaatctgaaatgcgagatatcatccttggtgctgaaattgctccaccatcacagcagaggcaacagattgctgaaattgagaaacagtcaagagagacgactcagttaactgctgtaaccacaaggacaacaaatgtgcatggagatgaactcattatcacaaccacaagtccatacgagcaacaagcattcgcatccaagactgattggcgtgtcagagccatctctgccacaaatttgtatcttcgtgtaaatcacatttatgtcaattctgatgatataaaggagactggctacacttacattatgccaaagaacatattgaagaaattcatatgcatagcagatctgcggacacaaattgctggatttttgtatgggctgagtccacaggataatcctcaagtcaaagagattaggtgtatagccatccctccacagcatggaacacaccagatggtgactcttccagcaaatcttcctgagcacgagttccttaatgatctagaacccttgggatggatgcatacacagccaaatgaagctccacagctatcgccacaggacctgacatcacatgccaagattctggagaacaacaaacaatgggatggtgagaagtgcatcattctgacatgcagcttcaccccaggatcttgctcgttgactgcatacaagctgacaccaagcggttacgagtggggacgcagcaacaaggacaacggaagcaatccacatggataccttccaactcactacgagaaggtccagatgcttctgagcgaccgcttccttggattctacatggttccggataacgctccttggaacttcaacttcatgggagtgaagcacgacccacagatgaagtacaacatgaagctgggcatgccccgggacttctatcacgaggaccacaggccaacacacttcctcgagttcagcaacatcgaggagggtgaggccgctgaaggcgatagggaggacacattcacgtaggcgcctgttagaaactgctctgttttaacggcagtgtgtgtagctgtaacctgacttgacgggtgtcatctgttcgcctgttgcttaagcctgtattatactacctctttgttgtaagaagccctggtgagggattaaaattgtacaagtgcgcgccatggtaactagtcctgcaagtttgggccgtgcttactggccagcatgagcccggcacgaaatgg

SEQ ID NO: 36240 - DNA, 1894 bp, Zea mays subsp. mexicana
  Clone ID: uC-zmroteosinte066a02_FLI
acggaaccgagtggaggttccgccacatttatcgagggcagccccgcagacaccttttaaccactggatggagtgcctttgtcaacaagaagaagcttgtctcaggggacgccgtactatttttgaggggtgataatggggagctaagacttggagtgcgccgtgcagctcagcttaaaaatggatctgcttttccagctctttacaatcagtgctcaaatcttggttcactacctaatgttgcacatgctgtggcaaccaaaagtgtgttccacatctactacaaccccagattaagccaatctgaattcattataccattttcgaagtttatcaagagcttcagtcaaccattttctgctggttcgaggttcaaagtgagatatgagagcgatgatgcttctgaaagaagatgcacagggatcatagcaggaattggtgatgctgaccccatgtggcgtggttcgaaatggaaatgtttgatggtccgatgggacgacgatgtagattttcgtcaaccaaacaggatttctccttgggagattgagctgactagttcagtttcaggatctcacatgtctgcaccaaatgcaaagagactgaaaccatgtcttccccatgttaatccagactacctagttccaaatggaagtggtcgtcctgattttgcggaatctgcccaattccacaaggtcttgcaaggtcaagaattactgggttatagaactcatgacaatgctgctgttgcaacttctcagccatgcgaagcaacgaacatgcagtacattgatgaacgaagttgctccaacgatgcgagtaacattatcccgggggttccaagaattggtgtcagaacaccactcggaagccctaggttttcctaccgttgctcaggctttggggagtctccaagattccaaaaggtcttgcaaggtcaagaagtatttcatccctacagaggaactctggtcgatgcaagcttgagtaatagtggcttccatcagcaagatggttctcatgtgcctacgcaggccagcaagtggcacgcacagctacatggatgtgcttttcgtggcccacaagcaccagctgttccatctcaatcctcatccccaccatctgtcctgatgtttcaacgaggtgatccaaagatgtccccatttgaatttgggcatttccacgtgaataagaaagaggatagacgcgcaatgtttgtccatgctggaggcatcggaggaactgagcaaacgacgatgctccaggctcatcatgtttctggaggaacgcaaaacagagatgtgaccgttgagaaatctcatcccgctgttgcagctgcttcagacaacagggaagttagcaaaaacagttgcaaaatatttggcatatctttgaccgagaaggttccagcaatgaaagaaaagggctgtggtgacatcaacaccaactatccatcccccttcctgtctttgaagcaacaagtgccgaaatcgctgggcaacagctgtgccaccgttcatgagcagaggcctgttgttggtagggtgattgacgtttcaacagtggatatgatgatctgatgtattggaaaactgtcctggaggctgtgtcgcgtagtgtggacagtgtcggtttgatggttcggtatcgtgaagacgggatttgattgaggatgctggccagacttgtatcctagttgtagctgttaagagcactttgtatgacaaccgtgagtgctccgtgttatcagcactagttgctgctcacaacttgcctctatgttcataatctgtatgccatgtcagacccatttatagagggtttgtttgcttggcatagttctagacttaaagcattattatgagaacaaatttgctctggagcccattgacgcctc

SEQ ID NO: 36241 - DNA, 728 bp, Zea mays subsp. mexicana
  Clone ID: UC-ZMROTEOSINTE066A04_FLI
taatggaatagatgcttcgactagtctgcagtcagaccagaacgcagctgctgtgctgtatggtttagacaacgagacaagtgcaacgataaagacggagtcttgctattcgagcaatgctgattttgctttctgtgggaatactttcctggaatcgtgccagtcaataggcgatgcatctggtggtggatccttcagtagctcagagctgaacgggcaaccactaaacgattcaattctggatatggaatcatcgtcatttagcttcttgaaccaaatgccccaaagcttcatctttccggacttggcagacgatttcaaccaaagtgcagagataacaccatttctcaccccggaaacaaatttctccgattcgacagggggagaccatacaggttgagcggtcatgcacagcgcaccaaccatttgtacatacgctcatgggcagtcaaacctgcactgatgaagagcttgaggaccttttgatctagctgtttcttttttctactcttctcgtcttatattgtggtagtttatgggttggtcttctggtatgccctgcgatggcgtcgttatcgtgccttgtacattgccgtgcttgtgtaagaaacattaggagcggcgttgttcgcgtcagcattgatttggctaattcctccgcttggcttggcttgtacaacgaattttatcaaaatattaactggattctgaaatcgagattttcgccc

SEQ ID NO: 36242 - DNA, 404 bp, Zea mays subsp. mexicana
  Clone ID: UC-ZMROTEOSINTE066C12_FLI
ggcgccgcgccgctcgcgctcgcgctcgcggtcgccgcgttggccttcttgtgatctctgcatgtgaccactggacggcgaccttcctcggtagtaagtagcgcgcgcgacggccggagggagtctcagtcgacacatcgtgccgccggcgttccacgggttcattcatttcccagtgtacttatgcatatgctccttctgtgataataattttcacgtactggccatcatatatatgggctacacactagttctttcttggaatgtatggaagttctcttttgttgctttagtctttattttctcaaatctggtaattttagaacaatccttgtaagaaatgggaacgcagattcaagaagaatttgtaagtgtaatcagctgcaggtcattccagatttcgt

SEQ ID NO: 36243 - DNA, 507 bp, Zea mays subsp. mexicana
  Clone ID: UC-ZMROTEOSINTE066D04_FLI
gcgttccggccttccgggccactacttatccctcgtgttccgttctgacacggcgccgactgggactgagaagaaacctccaaacacctctctacctctctacgaactacctgccgccggaaaaccctagagcgctcgaccatggatccgcagcagccggagcctgtcagttacctctgcggagattgcggagctgagaacaccctgaagcccggagatgtcatccagtgccgtgaatgtggctaccgcatcctctacaagaagcggacccgccggattgtccaatatgaagcgcgctgaagagtgaagacaagggaaaacactgaagatggttgatctattactcgccacattacctatgtaaacagtcttctgggggaaatgaaaatgtcagacaacgtttgtatgtcgtgtgcctcctttgaacctgagctgtataatttgtaacgcttgaactggggactgatttgagaactgagacactgcagcaatatgttgatggatcct

SEQ ID NO: 36244 - DNA, 987 bp, Zea mays subsp. mexicana
  Clone ID: UC-ZMROTEOSINTE066D11_FLI
ccgccaccaggtgcagagtctttcgtcatctcttctccggcgaagaacccccagtcgcccaccagatcacttgttaaactttgttgaggggtgatggcggtttctttcgcaaacctcaactccgaggcagggcttaaaaagcttgatgagtaccttctcactcgcagctacatcactggctaccaagcttccaaggatgacttggctgtctacacttcgttttcgtctgctccctcgtccaagtatatcaacgtagcaaggtggtttaatcacattgatgcgctcgtgaggctgagcggaattactgcagagggccaaggtgtgaaggttgaatcctcagcagttccttcagccccaactccagatgttgctgaagcacaggccccagctgctgaggaggaggacgatgatgatgttgacctttttggtgaggagaccgaagatgagaagaaggctgctgaagagcgtgctgcagctgccaaggcttctggcaagaagaaagaatctgggaagtcatcagttttacttgatgtgaagccatgggacgatgagactgacatggccaagcttgaggaagctgttaggagtgtccagatggaagggctgctctggggcgcatccaagcttgtcccagtcggatatggtatcaagaagctgcaaatcatgatgaccatagtcgacgatcttgtctctgtcgacactctcattgaggactatctgtgcgctgagccagttaacgagtacgtccagagctgcgacatcgttgccttcaacaagatctaggcgtgactttcgatcagtccttcccctggggtgctggcgatggtggtggctgggcaatgcaccagcctaatttttccatagctatatgtctgctttgtgtggccagtgatattgccgtgagtatttttggatcctattcgagtcgaatgtaccagtaccagagttaatttgctttaattcgaaacaccgttccggttggaattc

SEQ ID NO: 36245 - DNA, 900 bp, Zea mays subsp. mexicana
  Clone ID: UC-ZMROTEOSINTE066E02_FLI
gcgaacccacagcacgtctccatctctggtttgaccgccgccgccgccgccctacgcggctacgccaggcgccgaggccttcgtcggcattttcgtcggcaagcactcaccaggtattcagccatggtttttcttgaggcagagatgtcatggaatgtgttgatctcacctagccagctggaccgcaagggcctcctgctccgcaaggctatcattgtgcgtcttctggaggatgtcacaaacaggagggcttcgaaagagcatggctactacattgctgttaatcagctgaaggcaatatctgaagggaaagtgcgtgagctaactggagatgttctgttcccagtttcatttacttgcattacacagaagcctatgaagggagaggtcatggttgggcacgtggacaggatcctcaagcatggcgtgttcctcaaatccggacccgtggagagcatcttcctggctgagaagtcgatgagtaactacaagtacataggtggggagaatgcgatgttcatgaacgaccactcgaagctggagaaggacaccgccgtgcgcttcaaggtcctagggttccgctggatggaggctgaccgccaattccagctccttgctacgatcgctggtgacttccttgggccgctgtgaactgcttccacaggtcaaacaggttctaatgtacattgctcgttagatggtggatggatgggtggatctgatgtgtagaattaaactttgctaccagtggtttggtctgtagaacctgagacatggtaggttttctagatgctgttgccggtgatatttagctctggtttgaacgtatcagtgtacctgtgtgatgaacaagcgttgtcgtggatgtaccttttctatgcttgcttggaagttaacgtt

SEQ ID NO: 36246 - DNA, 1180 bp, Zea mays subsp. mexicana
  Clone ID: UC-ZMROTEOSINTE066F06_FLI
cccagcccacgcccacgccgcgcagttcgacgccctcctctccgcgccgttcggggaccgcgggatgctgcattcgacgtcgacgaccggcgggatgctcggagggatggcggtggccgtcctcccgttggtgctccgcgggcaggcgcgggtgccgggcatgtactacccgagcccgtatcatctgatgagccccaggcagagacggtggcatgtggaggtagagagatccctgcatcagatatggttcttcctctgcgtgttcgtggtgctttgcttgctcttgttctgatttctgaagcagggcaccatcctgcgcctgcgggccacgagacgtgatctgtacatagcaaagggtgcgcgatatggatatggtgcggcagtgacctatatttggtgattgcatgacgggcgttcaagaagttaaattgagaaccagctgagttctagtcctagaaggagaaatcggtttcgaaactgcaaaggatccttgaggagattatcagaaggcatcgtccacatgttcatgcgcagacagtaacacataagctactggtaatatagagtgtcagaaaaaaatgcttcagtatctaaatgtcacgctaccattttgagcgctttgatgacctgtgcagctgtgctccctccatctcggtctcggtggtcaccagcaatgcagcatttaactctaaaagtctgcaatgtgtgcgaaaaaggaatgccactcgtggcagcttacatagctccctttgccaaaagaacaacagcaccttgattcaaaacgtcacttaagattgtgttaagatctatgatcatcttctgtcaactctgctgattttgcagctgattaatccggctgaggaatgaggatgttgccggagcgcgtctcaaaatcacgaatctggatgagagcacttcacgacaggacctgctaccaccgacgtgagtgtgatttgccattgatatacagcctgatcagttgcaactccacttagtactatgatgacgagtaacagagcgtctgtgaaagggagcacggccggctacaacagcagctgaagtagcgcataagtcacaagttacagtccactacaactgatcattcgagctttgcttcttttttttttgtaacggcaacagtcgttgatgactaacataacgaacaatacatgattattat

SEQ ID NO: 36247 - DNA, 1254 bp, Zea mays subsp. mexicana
  Clone ID: UC-ZMROTEOSINTE066F10_FLI
aacgagacgagaacgaggtccctgccgccgccaaagccgatgcatcagctccagctgcgtatggtcacgcccagcgagagctccgaggttttttcatcagaaacaaaggattctggtgtgaaaagaaaggcacatgcgatttctgcaactactgaatcaacaaaaatacaaaatgctgcaagggactggagctgtgcactctgtcaagtgagcgcaaccagtgagtctggtctgaatcagcatcttcaagggaaaaagcataaggcgaagctggttcaatgtggagcgatcaaggtgatggatactaataaaagtggtttacaagtaaccactggaaataacaatggtgcaggcccaagtgacgcacctaagaaaatccacatcctggtcgatggagaaatgcaccaggtcgtccaaaaaagcaaccgtgtatggtgtgagcgttgcagggtcagctgtaccaatgccggtgccatggctgatcatctgcggggcaagaagcacagtctattgaataaagtctgggcgtcgataaaagccgtgagaaggaacaatggagttaaggaagattcagctactgctacatgtgagagagaggtaaatgaaagcggacctactggaattccagaggacgaggaacgtaaggaggagggagacgcatacatggctagcgaattcagcggagatggttcttccgaaattcctatggaaacgaaggaaaccactgacatggccgaagaagcagatgcagatagtcacagcgtaactcatgtgggaatcaacaaggaagacaccgacactgcgagcaaagcaaccggaaattaccccgcgggaaccaagcaggaaggcactggcgtggtcatggatgtaaacaagaattctccgccgaaagttcatcagaaatcaaggaaggcatttccgttgaaagtccatcaggaatcaagaaaaaggaggcaaaataagaaatttctgtcgaaagtgcatcagaaggcaaacgagaatttgctgccgcaatgtgcatcagaatccaagaccaaaggattcgggaagtaaatggaagtagtagctctattgagattccagctgggggaagacataatgacgaaaccatagacgcatgcactgattttaggcaagaacctgtgcgggaggaggaataacacgccgcaccagtgttgtaatttggttagcagtaagctttcagtatcgtgcgacgaactctagtagaatccatccgtattatgggccttctgt

SEQ ID NO: 36248 - DNA, 487 bp, Zea mays subsp. mexicana
  Clone ID: UC-ZMROTEOSINTE066F11_FLI
ctcagacttgagaatgagaataccatatgagaaccttccgtcatgtgacaggctacttgacatctgtgaaggaatatatgcagcaagagctgaaggagagttagaagtggaagaagttctgtattggacattggtaaacatctatagatcaccacatatgctgcttgaatacacaaagcctgactagggcacccgttctgctaaggaagccattctgcaaaaaaattccatgtaatgtagtaatgtacaagtagaacacttctttcctttgaggtcacaacgaagctaacttaatcctctcccccccttgtgtcaggacaaaaaacgtgcaaataggctttgtagttgtagttcgtttttgctaacatgtatacggttgaccattatttttggagaagtatacatcaaagtttcattgtgaaagttatctcatgctactaaaatgtgttaagaaagttgcgaatgaagatgtaatccatgtcatcct

SEQ ID NO: 36249 - DNA, 735 bp, Zea mays subsp. mexicana
  Clone ID: UC-ZMROTEOSINTE066F12_FLI
cagaccccagcagaagaagcgaagtcgtcgccggagcaggaggaagagcgaggagcaacatgtcgtggcaggcgtacgtcgatgaccacctgctgtgcgacatcgaaggccagcacctcagcgccgccgccatcgtcggccacgacggcagcgtctgggcacagtccgagaacttccccgagttaaagcctgaggaggttgctgggatgataaaggacttcgatgaacctggaactcttgcaccaactggtctttttgttggaggtacgaagtacatggtgatccaaggtgaacctggagttgtcatccgaggaaagaagggcactggaggcattactatcaagaaaactggcatgtccttgattatcggtatctatgatgagccaatgactccagggcaatgcaatatggtggtggagaggctcggcgattacctgatcgaacagggcttctaagtttgtcataatgctattttggtcattgggcacttaagtttgcacctcatttggttctgtaatatgtgggcttgtgcatgtgcttggcgtattgcatgcagtgaataatttatcttcgcgttgggttgctgacaatgttgggaacggatttgaattggggtttatgcttgccatctcctcatatctcgaactcagctgctgtttcactgagtaatgtacatttccctggtaatggtacttgtgcactctgctgctttatggaaaagagtgcattttactg

SEQ ID NO: 36250 - DNA, 1461 bp, Zea mays subsp. mexicana
  Clone ID: UC-ZMROTEOSINTE067C05_FLI
gacgggagggtcccaaatccgagccgagctgcgctccccgcgcgaccgacacccaggtcttgtcgtcccatgcagatctgctcctcctcctgaggccatccatggatccgtggcacacaggaagttaagattaatctagacatgataatctacatgcttatgagggcttacataagttcatcttctctacggaaatctgcattgagggctcttgcaaaggcactgatgacagatcaactcttctacctaagagagcagtttacattattcggtccaaacaagagtggccatatatcattgcaaaatatgaagacggccttgatgaaaaattcctcgggtgcaatgaatgattctaggattcttgactttgttaactcaatatgcaatatccaatatggcatgattgattttgaagagttctctgctgcgaccattagtgtatatcaaatggaaggcctggagacctgggaagaacatgctcaacaagcatatgaattgtttgacaaggagggcaaccgaccaattgtgattgaagaacttgcatcggaacttggacttggcccttcaatctcatttcatgttgttctcaaagattggatcagacattcagatggacacccaggaagttgagttgcccccttgaccaggaggaatccacctaccatctggacgaaaaatgatcccatccatggggcagcgccaggtgtaccgaatctttggcacaacgatcagggatctatttcgcaaatgaacgaaaagatagcacaatttttttttatttttctttttgtgctagtgccagtattgtggaacgaatttataaggtttgtgggttgtgctgctaacatttatgttcgaatttggacgcctctctctctctctctcaggttggaaaggggttgctgaaggacgagaatgctcagaagcttgcgttgcagcactggccggaagcgattgacccgcggcaccggtacagccacaaccttcactgctactacgactgctggctccactccgaaagcaagcaacctttcttctactggccgcacttgaagaaatcttatatcagtttgaggaaaaactccaagctgaaagagaggaagctgctaggaagcaggaagtgttgcaagcacaactacaagctcaacaggccgcacttgaagaaaaccaaagtttgctgcgccaggcccaagaggaagtgaaggggatgcataccaagtttgaagagaccaatgcactgctacgagctgtcctgaaacttcagaaagattgaggtagggatgcataccaagtctgaggatgatgcctttgcttatggtttttctaccttgctagaacatatctgtggttagaactttgtccgaactacgtgcaatctgtttgaatgcttcaaacctttgtggtggaacctttgtatgtttgaacctctgttgtggaagaactagtgtgctggaattgtgt

SEQ ID NO: 36251 - DNA, 1167 bp, Zea mays subsp. mexicana
  Clone ID: UC-ZMROTEOSINTE067C12_FLI
tcgggatggcctcccaccattccgagcccctcgaccccgccgacgctgacgacccctcagataacaacccagaattaccatgcccctcctatcatatcgttaccaaacctggtcaactcccagtcgagtttcttgaaccctcagctgcccagaagttggtaattggatttgactgtgaaggtgttgatctctgccgcaatggtgctctctgtattatgcagcttgcattccctgatgctgtttacctagttgatgctattgagggtggaaaagaacttattcaagcttgtaagcccgcacttgagtctgatcatatcaccaaagttattcatgattgtaaaagggacagtgaggctttgtattttcagtttggcataaaactgcataatgtgatggatacacagattgcttattctctgatagaagagcaggagcaggaaggaaaaaagaagacatctgatgattacaattacatatcttttgtcagccttcttgctgataaacgatactgtggcatactatatcctgaaaaggaagaagtccgtacccttctaaggcaggaccctaacttttggacaattaggcccttgtctgatatgatggttcgagctgccacagatgatgtccgcttccttctcagtatatatgcgaaaatgatggaaaagttaagcaaagtatctttatggcgtctggcagttcgcagtgagctgtactgtaggtgcttttgcttaagcgacaaccagtttgcagattggtcacctcttcctcctgtccctgatgacattgaggctgatgtttatgttcctgaagccgatatcctgtcagtcttagatgtgcctcctgggaaaatgggacgagttattggcagaaaggggtcaacgataatggctgtgaaagaatgttgcaaggttgaaatacatattggtggtgctaaggggcctccagacagggtgttcatcattggaccagagaaggaggtcaggaaagctgaggccatctttcgaggccgaatgctggagttctagagatgttaccctttgcgatacaggtttcaactgctttatattttgaacgtaaaaaggggaatatccaaaaggtgtatgcgggaccgtggatcccttgaccgtctgtgaatcatgaaaacaaaataaaggatttcaacttggc

SEQ ID NO: 36252 - DNA, 638 bp, Zea mays subsp. mexicana
  Clone ID: UC-ZMROTEOSINTE068C07_FLI
aatccccaaccctagcagcagtgggcggccggaccgggacgggcggtagacggctccagcacgcaacgctgacaggtttggccgtgcgaggcgcgagggctagacaggtgtcgcggcgccaggcatccagttccagggctgcgtgggctcgaccagagcgagtctgcaatccgcccgtccttgtccccgtcggcggccgttcaccagtgtcaggtgcggaggtgacaacatttctgaaagaagtaagcaagcactagttatatggtgagtcatgtcaaaggcacgtaatgctgtagttgccactggattgctgctcttcgctggtgctggcttatcatttccgttccttttcgtgaaatcaaagaacaagcctattattgattcgacaaaacctctgccaccacaggctacttttcgaggaccatacgtgaatacgggttcacgtgatatcggacctgatcctaccaactatcccaagaagtgatttgaatcttccatgacatttcggagtcccatttcactcgactccactgctgtgaaattgttcgttttggggccatcttactgtgcacgtgccttgatattgcaaaaaaataaaataaataacaatacctaaataaagggtggttattgaagct

SEQ ID NO: 36253 - DNA, 1623 bp, Zea mays subsp. mexicana
  Clone ID: UC-ZMROTEOSINTE068D10_FLI
cgcgagcctcgtcgatcccccactcccctcccctcgcttcaagatgcagatctttgtgaagaccctcaccggcaagactatcaccctcgaggtggagtcttctgacaccattgacaatgtcaaggctaagatccaggacaaggagggcatccctcctgaccagcagcggcttatcttcgccggcaagcagcttgaggacggccgcacacttgctgactacaacatccagaaggagtcaacccttcatttggtgctgcgccttaggggaggcatgcagatctttgtcaagaccttgactggcaagacaatcacccttgaggtggagtcttcagacaccattgataatgtcaaggctaagatccaggacaaggagggcatccctcctgaccagcagcggcttatcttcgccggcaagcagcttgaggacggacgcacacttgctgactacaacatccagaaggagtcaaccctccacttggtgctgcgccttaggggaggcatgcagatctttgtcaagaccttgactggcaagacaatcacccttgaggtggagtcctcagacaccattgacaatgtcaaggcaaagatccaggacaaggagggcatcccacctgaccagcaacgtctcatctttgccggcaagcagttggaggatgggaggacccttgctgactacaacatccagaaggagagcaccctccacttggtgctgcgtcttaggggtggtatgcagatctttgtgaaaacccttactggcaagaccatcactcttgaggtggagtcttcagataccattgacaatgtcaaggccaagatccaggacaaggagggcatcccgccggaccagcagcgtcttatctttgccggcaagcagctggaggatggacgcacccttgcggattacaacattcagaaggagagcaccctccacctggtgctgcgcctcaggggaggaatgcagatcttcgtgaagacattgaccggcaagaccatcaccttggaggttgagagctccgacaccattgataatgtgaaggccaagatccaggacaaggagggtatccccccggaccagcagcggctgatcttcgccggcaagcagctggaggatggtcgcaccttggctgactacaacatccagaaggagagcaccctccatctggtgctccgcctgaggggcggtatgcagatctttgtgaagaccttgactggcaagaccataaccctggaggttgagagctctgacaccatcgacaacgtgaaggctaagatccaggacaaggaggggattcccccagaccagcagcgtctgatcttcgccggcaagcagctggaggatggtcgcacccttgcagactacaatatccagaaggagagcaccctccacctggtgctccgtcttcgcggtggttattaagccatcagtcgttgaagctgctgctgtatctgggttatctagtgtctctgccattgcccatggatggtgctgtctttcaaagtatttgtatggtttgtgtcgtgagtcgtgactgagctggtttcatggaccagttgtgttctcgttacccaaaactatcgtgcgaccgcatatggcttaatcatgaataaatgttgtttgaattt

SEQ ID NO: 36254 - DNA, 1476 bp, Zea mays subsp. mexicana
  Clone ID: uC-zmroteosinte068F11_FLI
ctcaactggtacaccagtcccgaggaggcggacgacagcgccgctaccttcgcctctgatgtctatagactgggtgtgctcttgtagtcttgttcgagctgttctgcacattcgaaacgatggaggacaagatgcgggcaatggcgaccgcgaatctgaggcaccgggtgttgccgccacagttgctgctcaaatggcccaaggaagcatctttctgccagttgctaatgcaccctgtgccagaaaccagaccgaagatgaggtgcgtcgtgtgctgtgtactatttttgtttctgccagttgctaatgcgtctcctcaaagctgggaactgatttgtttgttagtatatgtgttgtggtcgtacactccataagacagaacgtggattgacagacacgagcatgcagttgtttgaagatcaagctagcctgggaaattggctgaatcttgcagataggaaaaccaatattcatggggcagtaagaaacactagaattaaaacaaacacttagtatgctccgtagggtttgaccgagatagagagtttttttgcaactgctggtgtaaataagaagataaaagtgtttgagtataatatgattgtaaatgaacaccgtgatattcactatcctgtggtagagatgtctaatagatcaaaactgagttgtatttcctggaacagttatatgaagagccatatagcatctagagattttgagggtatagtgcaggtttgggatgttactaggagtcaagtttttgttgagatgatggagcatgagtgacgtgtgtggtcggtggacttctcaattgtggacccaacaaaattggtcagtgggagtgatgatggatctgtgaagctatgggatatgaagcaggctgggagtattggcactattaaaacaagggaaaatgtgtgttctgtgcaatttcaacctgatactgctcgctccattgccatcggctctgcagaccacaaaatttactgctatgatctacgtcacatacgagctccttattgtacactagttgggcacacaaagactgtaagctatgttaagtatctggatgcatcgacaatagtatctgcatctactgacaactcattgaagctttgggacttatcgatgagtccaggaaggataattgacagtccagttcaaacatttaaggggcatacaaatacaaaggccgcacttgaagaaatcttatatcagtttgaggaaaaactccaagctgaaagagaggaagctgctaggaagcaggaagagttgcaagcacaagtacaagctcaacaggccgcacttgaagaaaaccaaagtttgctgcgccaggccaagcacaactaccttgctagaacatatctgtggttagaactttgtcagaactacgtgcaatctgtttgaatgcttcaaacctttgtggtggaacctttgtatgtttgaacctctgttgtggaagaactagtgtgctgg

SEQ ID NO: 36255 - DNA, 2317 bp, Zea mays subsp. mexicana
  Clone ID: UC-ZMROTEOSINTE068G03_FLI
tgatctttccatggcgaacgaggccaagaaggctgcacttggccacgccgatgatgcaatgaagattgctgaagtcaatgcggagaaggtggagattctctcaaatgaagttgttcgcttgaaaggcttgcttgattcgagtgctgccagcgaagagagtaagagccgtgaagctgagcttcttgttaagaatctggagtctgaagtttcatctctgaaaggaaaacttgaggaggcaaaagtccttgaagacaggttagctgaagcagaaaaaatgattgaggagcttaaatcagagatagctaatgcgcagaaggtcgaggcagacatctgtcagcagttagaagaatggaaggataagtcaggatcacttgagatgaaattggaggttgttactctatctgagaagttcaaaagtgactcacttgcctccacgactgaagagctgtacaagatccagtcgatattgcaagatcgagaatcggaaattgaagttcttaaagggaaaacaactgccttggaaattgaggtggaaaggcttttagcagatgttactgattcaaatgagcatcttgatgcatcacagcaagaggtgtttgggctgcagacaacaatagatgttctgaggaacaagcttgaggctgcagaactagctgcctcagaggctttggacaatgagaggactgctaccacaaagattgaaggcctgactgaggagaaaatcaagctcattactgagctggatgacgctagagacagagaggagagagagaaaagggcaattgaggatcttactgctgcattggataaggtaactggtgaagcacaggaagcacatgataggtgtcagaagaaagaagatgattatgaacatgcccttgcgcagataggtgatctgaagatggccctgaagagtatggaagagacttatgaggtaatgcttgatgagtcagaacaggacataactggcctaagggaaactgtggagaagctggaagctgaggtgaacaagtacagagaagaatgtgaatctaaggagcttgaccttatcacgactaccaaacagtctgaacaagaaattgctgctcttaaagaagaagccgagcatgtatgtgcatccctgcgaggtgcagagcaggagcttgaagcagtcaatgaagagaaagagaggcttgaggggaaattggcacgcacagaatcagcagttgctgaagccaacgatgctgtgcaggaggcaaaagctgaaaatgagaggcttcaagagaaacttgcacacgtggaatcagaggttgctgaggccaacatggctgcagaggaatctaagaatgagatcgagaggcttcaagagaaactgacatacacagagtcggcggttgctgaagccaacaagactgtgcaggaggcaaaggctgagagttcgcagctgaaggagcgattacttgacaaagagaacgcattgcagagcataacccaggagaatgatgagttcaggatgcgagaagctgacgccatgaagaaaatagaggagctatctgccctgcttgccgaagccatgacaaagaagcatcccgaggaggaagagaagctggtggttgttgacgaggcacacaattctgggcgtgaagttacccgttctgtcgcagaaaatgaagatacagaagaaactgatgatagaaaaccaaagcttgaagctgatgcagtcgatacaaactccaacggagaaacgaagcacgaagagaaagacgacagcaaggtggaacaggaggaactgaaggctgagctcatcctacaggagagcgacagagctagctccgagaaggaagcacagtccgaaaacaggagacaagaaacagaaccatccaacgacgagttagacccgaagaaggacagcagcaccgagagcgccaacggaacggccgtgccagaggatacggcagcgacgactactaaagcggcaacgtctcctacgaaaccgcagcagaaaaagaacaagcctctgctgaagaagtttgggagcttactgaaaaagaaaaacagcaagtagccgaacggtagctgcacctgcactattagtgttgttttgattttcttctttttttttgggtctgtttgacgaggtgttgtgcttgctatgcgtcgtttaccgccaatgcctgtatttgtgggtgattggagaagtttgtgggtgtcgtgtattttttaacttggggacctatatggtgttggctgctgctgtctacacgtttgtggcagatcctcccatgtgtgtaaatggatctactcttcctgatcagaatgcatggctattcgtttctgg

SEQ ID NO: 36256 - DNA, 1148 bp, Zea mays subsp. mexicana
  Clone ID: UC-ZMROTEOSINTE069C08_FLI
gtcgacaatgacccgggaggagctgatgaccttcatgtctctaatggactactcggtatctcaagtaaacccacctggttttttggtacatgggtttgggaattatcatgttggcatccatgggccattcggatccgagctggtcaatactagcctgcttaacctttacttcctggatagcggtgatcgtgaaatggtgaatggtgttaaaacatatggatggatcagagagtctcaactcgcctggcttcgttctacttccctggagcttcagaaaaaaatacatgccccagcattagcgttcttccacataccaatcccagaggtccgagggctctggtactcaggcttcaagggtcagtaccaggaaggggtggcttgctcatctgtacattctggtgtccttgggacccttgtctccatgggagatgtaaaatctgtctttctgggtcacgaccatcttaatgatttttgtggcaatctcaatgggatctggttctgttatggtggtggctttggttatcatgcctatggaagaccccattggccaaggagagctcggataatttacagtgaactcaaaaaggggcagaggtcgtggttggaagttgactcgatctcgacttggaagctgctagatgatgtaaagctctcaaaaattgatgaacaggttatctggagacatagcacagatgattctgaccacagagtctacttgtgaagaccatgaacctaaaactacttcctgtatgtgtcatgtgtataatgtttgtcgcaaagattcctccaattttataggtcgattgattattggtagtatgatgtggcacggacctattttagatttcacatttggttcaatgttgatatgctaaccctggtttgggtcgctgacctgttttcgaccttcttgagaagctgccaattggtccccttgttttgggagcatcaccacatcataatctgtttcacaacagatgattcttattatttttctttttttttgtaattcacggcagatgatcctgactacaatgtttacttgtcaaggccagaaccataagacaacttccagcttgtgtcatctgttccatgtataatatctgtaaacaagtatggtccagttttgtttgtgggctcgttgaatt

SEQ ID NO: 36257 - DNA, 447 bp, Zea mays subsp. mexicana
  Clone ID: UC-ZMROTEOSINTE069C10_FLI
gcagcgtcttccacccggggagcaacctggccaccaagggcatgggcgccaacctcttcgaccggccgcagcccaactcccccaccgtctacgactggctctacagcgacgagaccaggagcaaccaccgctagatcgggcgagatggatggacagtgaagaggccatgtttgctggtccttgtggttatctaaaacgcatgcatgctctattatagctagtcatcactatatatatacttgtgtttctgtattgttgttcttgttctgctggtgtttgaggataaagactccgccgtttaagttgacctatgttatggagtgagtgatatatatgccgtcactcctagtatatagtagtgactagttggtatgtgtagtactgtactatcttttctccatatgcatgttttgccagcgcgtaatgaatggaatgtgtactgctact

SEQ ID NO: 36258 - DNA, 1075 bp, Zea mays subsp. mexicana
  Clone ID: UC-ZMROTEOSINTE069C11_FLI
cattgccatttcctgagtacactgatcctcgatatggtccgctgaatcttacagtcaagctacctgatggtgcattgaagccagatcttggaccaaaaacttacatcgcttatggattttaccaagagttaggcaggggtgattctgtgaccaagcttcactgtgacatgtctgatgcggtaaatatattgacacacacagcacaagtgccctatgcgcgttatcaacttgagaagatagaggaaaccagaaagaaaatgaaagaacaagatcttcaggaactttatggtgtttcagaactaaacctatcatcaccttttactgattccaggaatataagtgctgatgaaatgtcaaagacctcatgtttggacgtcaatgatgtaccacctgttaatactgaatctgaggtacaaagtggggcaggccagtgttcagattacattgacaaggatagaagttatgctgggatgcataacggggagagaaccggtggtgccttatgggatattttccgaagagaagattctgacaagatacaagattatcttaggaaacatgccacggaattccggcacatcttttgcaatcctgtgaagcaggttattcacccaattcacgatcagactttctacttaaccgaggagcataagagaaagctcaaggaagaatatggtgttgaaccctggacgtttgagcagaagcttggtgaagcggttttcattcctgctggatgtcctcaccaagtgaggaacttgaagtcttgcattaaggttgcgatggactttgtctccccagaaagcgtcaacgagtgcatgaaactgactggagagtttaggcggcttccacctgatcacagggctaaagaggataagctggagatcaagaagattgctcttcatgctctgaaccaagtagtaaatttcttggatccttcctcggagtggtcgaagagttggtttgcccaacccaagaacaaaaaaaaggctggagctgaagaacaggagaagcctaaaaggaagcgtggccgcccatgtcgcaagtccaacgatgaagctgctggcgataggcacag

SEQ ID NO: 36259 - DNA, 899 bp, Zea mays subsp. mexicana
  Clone ID: UC-ZMROTEOSINTE069D05_FLI
cgctgatctacgcgttcgtggcccgtggcacggtcatactggccgagtacacggagttcaccggcaacttcaccaccatcgcctcccagtgcctcatgaagctccccgcaagcaacaacaagttcacctacaactgcgacggtcacactttcaattacctcgtggaagacggattcacatactgtgttgttgctgttgaatcggtggggcaacaaattcctattgctttcatggatagggttaaggaggatttcacaaaaaggtatggtggtgggaaagctgctactgctgcagctaacagcctcaatcgagagtttggatcaaaacttaaagaacacatgcagtattgtgtggatcaccctgaagaggttagcaagctggccaaagtgaaggcgcaggtttcagaagtcaagggtgttatgatggaaaacattgaaaaggttctggatcgtggagagaagattgagctgcttgtcgacaagaccgagaatcttcgctcacaggcacaagatttcagacagcagggaacaaatgtcaggagaaagatgtggttacagaacatgaaaatcaagctcatcgtcctgggaataatcatcgcactcattctgatcattatcctctctgtctgtcatggtttcaaatgccattaagcacagaccagaatactgatacattcaactgcacctattatactgctgcttggagcaaaaaaaagtatgatcttttgttgtttcgctagtgtgctgtggcccggtcattatgcataggtgttttacattgtcgtagtgtttgataaatgatggatggtgactgggtttgttgtgtcaactgtcataactattgtgcatttttggacgctatatgtgtagccttgatatgaatagatttactgtacttat

SEQ ID NO: 36260 - DNA, 926 bp, Zea mays subsp. mexicana
  Clone ID: UC-ZMROTEOSINTE069F02_FLI
aatacttccaggctggcatcactaacagttgaccttggtgaagatgaaaaggaattgctccattccgaggctgagcaaaacaggagaaaaagaatcgagtcacttgttaatctgcagcaagaactaaacggcctgattgaaccaaagaaagacctcgccatacaaccaggaatgtacgtttctgttcctcccagcacgccagacacagctgaagaagagaatgctgatcccagccaaggcacggctacttcgacctcagaaactgagcaacgtggccaggcaagcaacgccagcagcaacaagccgaagaatccaggccatcgaaggagaaacagagctaatgcatcaagacgacagcctcatggccagggccagccagctaggcagcagtggcagaggaaagaagcaggcacttcacaccaataaaacaacatcgaagcaacgaggaggatgtgacctgtgagttgtttttgtcggctatgtacatcaatgtcgtgccttgctttcgtctcataataattgcgagccatggtatggcaatgttttggcgctaatatggaagttccatgcaagtgatactctggaaagaaccctgcaccggattctatgggagtagtataaagcacatgcatgcttggctggtacatacaatatatgtgtgtgtgtgtgtgtcattgccaggtactatgttcaaactgattgtccgtagtcagaaaagcaactgattacactgtttgttactctttgagttgcatcatgtgtttgaaatacatacattacagcttaggtcatgtgggacattacaatataaagcactgcatgcagaatttgcaggggtcggctatgttggtaacccaataacaatgcatatctgtaaggtgctattgttttgtccgctactaaatcatagcactccaaattacctc

SEQ ID NO: 36261 - DNA, 1336 bp, Zea mays subsp. mexicana
  Clone ID: UC-ZMROTEOSINTE069F08_FLI
gatgaacactccacaacctagcaaaatagaggacccacaaggaaacaaccaagcacatacactttcccatttgtcaaacatgatgcaagcaaatcctttgagcactagcagcctattggcgtcaaatcaaaatcatccatctcttcatggcatagagtttgatttgccttatcttgaagcaaaatataacgcaggctcgactacaaatcctagaccagccatatccatgcaggaggccctgaaagcaggggttttctccaacgctcggtctacgcagtctcttccaagtactagcattccgacggggcatcctctccctcagcaattagcacatcacccttactctcagccgactttagcacccatcacacattttccaaatatcgttggctatccgccgtatttgccacaaaactatgctgcttacctatcttcgggcaccttccagcaagcatacccgagcaatggagcattccatcagtctgctgccactttgctcggatctggtatgaagtactcggcccccgagtataagaacaacctgtctgccacaggcttacaacagcaacatcagccacaaccgcaaccaccttcatcagtcatctctggttatggaggctttggaagctcaagcaatatacaaggaaattttacccttaatcagagtaccggcactggatcaactcttgtgtttgatgatgcattgggcagacagtacaaagacaccagtcaacacatagctctccagcagcccgacaactctggaatgtggcttcatggctctggttcaagagcggcgacgcttccgcctaaccacttttatggttaccagggacagagtcagctgggtggctttggtcaggcgcagcagcaacagccttcccaattcggaggccacgggtacccgactttctaccagtctcagggtgggctgacacaggagcaccacccccagaaccttgctgagggcagcctgaatggcttccaggtcgcaccgtctcagccgtctcatccgagctggcagcatcagcacacctactgagcattgttctcccttgttatggtctgtctctttcgccgtcacaagccaagtttcgcgtgcttgtgcccttactcgatgcagagtaagctgctcggattttagctgagcttgtaccttcagcgctgagaagggtcccaggcatacaacagtcagagcgttttaacatgctgcgtgcgtgcgtgtgtgtgttgccagaccgatgccttgtggtttttcgatagcgagttatatgtgcggaggcgcagtcatgtattactgagacatgataacataacaaccaatcgtttcgcttgc

SEQ ID NO: 36262 - DNA, 1688 bp, Zea mays subsp. mexicana
  Clone ID: UC-ZMROTEOSINTE069F12_FLI
gtacctattccagatgaagatggaactgttggtgcacgaggctttgtcactggaagtgctgatcatgatgtcaagttctgggaataccaattggtgcagaagtctgataatgactctaagcagctgactgtaactaatgtgaggaccttgaaaatgacagaagatgttcttgctgtctcgatcagtcccgaaggaaagcacattgctgttgctctcttggattgccatgtcaaggtcttctacatggacacactgaaaccatctttaaacctttatgggcacaaacttccagttctctgtatggacatatcatctgatggagctttgctagttactggctctgcggacaaaaatttgaagatatggggtatggattttggggactgccacaggtctatatttgctcactcagacagtgtgatggatgttaagtttgtgtatagaactcattatatgttcagtgtggggaaagatcgcactatgaagtactgggatgctgataaatttgagttattgttaacacttgaaggacatcatgctgaagtttggtgcctcacactcagcagtcgcggtgattttgttgtaacaggttcacatgatcgttccattcggcgttgggatcgtactgaagaacaactgttcattgaggaagagaaggagaaaagattggaagaaacctttgaggctgatttggaaaacgataatgactatagatatgggcagaaagatgatgcccctgatgaaggttctgtgggtgttcctggtaggaaaacaaaagagacagtaacttctgctgatgcaatcatggatgcacttgacactgctgaggaggaactaaaacgcattaatcaacataaaatggaagagcaaattactgcgaaggcagctaaatttcaacctaatgttataatgcaagggcattcaccttcagattatgttctaaatgtagtttcaagcatccgtccaaatgatctggagcaggccctcttggcattgccgttctcggatgcactaaagctcatgtcttacttgaaggagtggtctttggttccttcaaaggttgagcttgtttgtagggtttgcttagtgctccttcagacacatcataatcaattaactgccacgccagctgcaagatccttgttgacagaactgaaggatattctttactgtagagtaaaggaatgcaaggatactataggcttcaacctcgctgcaatggatcatataaaagaattgttggcgttgagatcagatgcacctttccgtgatgccaaggcgaaactcatggaaatcaagaaggagcagtcgaagcggtcaagtagtaggcttgacggagatgaaaaaaggaaaaagaagagaaagaaagcgtccgctgaaagctgagccagtaaacaaaaacaaaagaatgttgtattgttgtccttaccttctgcaactactacatggacgtgctcgtttccttggttcacgagctcgcagaatttttgttagatgggtataatcggaaagtgcgtggacataaagatttctagaggttcgtcttgcgtatctgatggaagggaattatatcaggtggaacatatacattggtgtagtgtagtcgtgtaactaagggtgtgtttggtagggctttagcttgcccaaacacggttctagctctacttttttctaaaagcagcttgctg

SEQ ID NO: 36263 - DNA, 534 bp, Zea mays subsp. mexicana
  Clone ID: UC-ZMROTEOSINTE069H02_FLI
gttggtttcagcttgtgtattcccactcagtcgcagcgtcgcccgtcgccgctgagatcctagctaggaagaaatggagctctctcgcaagctcttcacggccgtcctcctcgtcatgctgctgctgctgtccgcagaggtcgggccggtggcggtggcggaggcgcggacgtgccagtcgcagagccacaggttccggggcccctgcctccgccggtccaactgcgccaacgtctgcaggaccgaggggttccccggcggcaggtgccgcggcttccgccgccgctgcttctgcaccacgcactgccactgattcgctcgcccagcggccggctggcgtcgccgtcgatcgcgtcgcgaccagtccatggctccatgcatgaataacaagggtgtgcgcggtttgtgttgtgatgccaaattgtatcctcgtcgtgtgttgagcagcggcgtgctgttgtacgtacgtctgcctctgttccatgtttcgggattttccatagcaaatgcatgcgtcgatcgagatctactccg

SEQ ID NO: 36264 - DNA, 652 bp, Zea mays subsp. mexicana
  Clone ID: UC-ZMROTEOSINTE070A01_FLI
gtgacaatagtcactgttgcacttttcattaagttgctgcagagacctatcagacaggcaccatcagggagcatgacagcatccacaccagcacgagcaccagcagccgatcccgcagccatggctgatcctgcatccccggctaatggtcagttctctcctcgtacaccccagcctttcatggagtacgtgaggaggaccattgatgacacaccgtactataagcgtgatgccaggaggcgattcaacccgcagaacacctactgagcatgcgtggcagcgtgtagtgtggactggttggtctgttgtaacgttcctgatttaggtccgcagttggtttagaaccacagttgtagttcttgcacgagtatgcccttgctgtgagaatgctgtaaaatttgtggttctagcagcacgtgcggtgaggggtggacatctattttggtagaagcctgttgtttgccattttgccaacaggtataggacatctgttttgttagaagcatgttgtttgacatttcgccatagatataggacatcaattttgttagaaccctgtcgttaattcttggcatgtaattttaggtctgtacattggagtacgggacaaccaaacccttggtttagacaactgttttagctcaattgctgc

SEQ ID NO: 36265 - DNA, 1569 bp, Zea mays subsp. mexicana
  Clone ID: UC-ZMROTEOSINTE070B02_FLI
ctcagtttgcgcacgacagcctcatcttcctcgcgcacaccaccggagccccctcctcttcctcgcgcacggcggcttcctctccctctctaagccgccgccgcccaccgcctcagttcgcggacgattcatcttcctcgcgtagaccaccggaaccccctcctcttcctcgcgcagagcaccggatccccctcttcctcgcgcagagcacgacacataggagatctgcaaagcctcatcaagatggcaggagatctacaaagttcaaatcagtaactatctgctgtgtaacaggtgcaagcataagttttttcagaagatcaaaggttgctcttctatggagacttccaaagaacaggcttccaaggactatgctgatttcgagaaaaaagttaagaggacgatatatattgaccacctttctcctcaagtaaaggaatcggccatcaaagctgctcttgcacaatgtgcaaatgttgtccatgtggagtttatcgtcaattacacgatcccatataaagatattgcttctgctgcattggtggaattggatgatgatgtgcaggctaaggctgctgtagaattgatgaatgatttcccgttcataattgggggaatgccaaggcctgtaaaagctatccatgccaaggctgagatgtttcgtgatcgccctccttgccctggccttcgaaaaggtttctgctgggtaaaacaaggagataaggactatgaagcgatgcagaaattgaaaaaccttgcaaagaggcaggaatctgagaacatggccctcatacagaaaatcttgaaagatgagaaggaactggcgactcggcagcaggaggtgcttgatggaaactgcaagaagtacgacatgctggaaactctagtgcagaagggagacatcactaaccttgctcaacaatacggagtgaacttgaacgactgatgagtcattcgtgtcttttccccccttccccttggagcgatggcggaactggtgtgatgatgatggaataggatagcatgccatagttttggtccggtagctggaccctccctctggtgtaaagactatcccaacttaggcttgggcttttcagccttctttggctctccaaaaaatctaaattagctggctctgagcctctgactttctgatcgatccaagctagctggctagctacaggttgtgtatatgaatcttgcaggggtgctgacgacgttgcaggaagggtgtagtggcccaaggaagaagagcagcggcagaggaggaggccgaccacgacgacaaggagcatgagtcggtggtggagtcggtgggattgttctccaacctggaagagctgctggtgttcaaccccagagccattctgtcctgctttgttgtcgtccacaaggcctagcttgagctgaactagtagtagtatatggctacatgtagggatgtaatatggtttggaaaatatccgtctggatccggattcgaagatggtgaacaatggttcggatggaatttttggatatccagactttttcggataacgaatcacacgagaaatcactttaagt

SEQ ID NO: 36266 - DNA, 1359 bp, Zea mays subsp. mexicana
  Clone ID: UC-ZMROTEOSINTE070B07_FLI
caaacgaggaggtccaaaaggctgcagctgctttgaagggttctgaccaccgccgtgctaccactgttgctgctagattggatgctcagcagaaaaagctcaaccttcctgtccttcccacaaccacaattggttcattccctcagactgtggaactcaggagggtccgtcgtgagtacaaggcaaagaagatctccgaggaggaatacatcagtgccatcaaggaagaaatcagcaaggttgtcaagatccaagaggagcttgacattgatgtgcttgtgcatggagagccagagagaaatgacatggttgagtacttcggtgagcaattatctggttttgcattcactgccaacggatgggtgcaatcttatggatcacgttgtgtgaagccacccattatctatggcgatgtcagccggccgaaccccatgactgttttctggtccaagacggcacagagcatgaccgctcgtcccatgaagggaatgttgactggtccagtcacaatcctcaactggtcatttgtcaggaacgatcagcctaggtttgagacatgctaccaaatagctcttgcaataaaaaaggaggttgaggatcttgaggctgctggtattcaggtgatccagattgatgaggcagctctaagggagggtctgccactgcgcaagtcagagcatgcattctacctggactgggctgtccactctttcagaatcaccaactgcggagtccaggacaccacccagatccacacccatatgtgctactccaacttcaacgacatcatccactccatcatcgacatggacgccgatgtgatcaccatcgagaactcccggtccgacgagaagctactgtccgtgttccgcgagggtgtgaagtacggagctggaatcggtccaggtgtctacgacatccactcgcccaggatcccctccaccgaggagatcgcggaccgcgtcaacaagatgctcgccgtgctcgacaccaacatcctctgggtgaaccctgactgcggtctcaagacacgcaagtacacggaggtcaagcctgccctgaccaacatggtctccgccaccaagctcatccgcacccagctcggcagcgcgaaatgagtcagatttggtagatccatggtttgttgaacacaaaagccagcagggccatttgtttcgaataatttgggtccttactcctgttccgtagcgttaggttagcctcattggtgttggtggggtacggcgttacgtgtccgtgttctaagtttggagagtgtgtttctcttttaggctgtttttgttggggtttgtgtgctttggttataaacagaaatggagtacgcagtcttcgaatcgc

SEQ ID NO: 36267 - DNA, 1292 bp, Zea mays subsp. mexicana
  Clone ID: UC-ZMROTEOSINTE070B10_FLI
aaagagctgctgctgagagagctcagcaagaagcaaggaagagagctgaacgagctgcagtggaaagagctgctactgaggctcgagaaaggcaggcagctgcagctgcagccgctgccaccgcagcagcagctgctgcttcaagagaaaaacagagcacaccagatgatcttgagtcattctttggtgtgggttctcgtgccaacagtgcgccgaaacagagggctccaacaccaacagtggattctatgtttggttttggagctcaaggcagaggaacaactaatggatcacagagagcagcatcaacttcggctcctgtgagaaaagtggcatcagccacaagttttggtgatgatctgtctgacttatttggagctcctgcatcttctgatgtttttcaagaagttgagggagaaagtgaagaaagaagacgtgctaggttagaacgtcatcagaggactcgtgaacgagcggcaaaagctctggctgagaagaatgaacgtgatatgcaagttcagagggagcaggcagagagagatagaattggagacactctagacttcgaaatcaagaggtggtctgctgggaaagagggcaacttgcgtgctttgttatcaactttacaatatatactttggccagaatgtggatggcaagctgtatcattgactgatttaattactggagctgctgttaagaagcagtacaggaaggcaacgctgtgcattcatcctgataaggtgcaacagaaaggtgcaacacttcagcagaaatatattgccgaaaaagtctttgacattcttaaggaggcatggaacaaattcaactctgaagagctcttctgaagcaacctccgtgactgtgaatatgcatatatgatggacagcttaaccgcataccaacatgagtcgccggagtagcaaggcacaagtgaacaaagtgaaagctccatctcagttaccatcgttcgacagattgtgttcagttgctccccccgtccactgtgctctgctgctcccatctgtatctgttcactccatggtacttgcactccacatctacgaatatacgtacgccatctttttttgttttagtttttgcagcgtgggttggctcatacaaccaagatttacactgtatggcttcttaaatactatctcgtgtacaatggaccacacatgtcgaaactacacttgctgtctaaagcccttgttgatttctaccggaagtgatgtagtacactgtacaggttgtaccattgttgatttgaaatgtgatttggtttactc

SEQ ID NO: 36268 - DNA, 527 bp, Zea mays subsp. mexicana
  Clone ID: UC-ZMROTEOSINTE070C03_FLI
ctgactcatcatctctgggacactgccaagtacgattaaggaaggatttgtaaatgccactttttggagtttctggccttttggtttagtcatcaagactctagctagcaattatctaaagaaacaaatgaaatgctaattgccaccaagatggcaaaattgccggaaaacagcagttgagggagaaacttcattgcaatgctaacaataccagtgcccagatcatgacaatcagagccagtagcaactgaaccttaagtagccaccaagtttggcaaaacttctgcaactctaattgagggggaaattttttgatgcgacttgttgatgcacaagctgaacggcccaagatttctgtagttgctgcttgaaatattcttgataggaagggcaattttgtagatgtctcgagagtgtaaaaaacatgcactgtagttctctttttacctgtaagataagattgtatgcagtatgcactatttgagttgtaacgggataagttcacgaaagtatattttttttatttg

SEQ ID NO: 36269 - DNA, 1639 bp, Zea mays subsp. mexicana
  Clone ID: UC-ZMROTEOSINTE070C07_FLI
ggggacaagctttccggcgccgacgccgacgcggacccggcgccgatacgatccggtggatcaagtgcatcacacctttagggaggccccttggacagcagtttgtgctgcaaattctatatagctctgtcgcagcatggcctcggtgggcgtggcacgctcttctttgggatttcagaatggcacaagttctagcagtgacccagatcgtcttcccaacgagttgggcagtatgagcataagggacgacaaggacgttgaagatattgtagtcaatggcaatggggcggagcctggtcatatcatagtgaccagcattgatgggagaaatgggcaggcaaagcagaccattagttacatggctgagcgggtggtaggtcatgggtccttcggaaccgttttccaggccaagtgtcttgaaactggtgagaccgtagctataaaaaaggttcttcaagacaagagatacaagaatcgtgagctgcaaaccatgcgagtgcttgaccacccaaatgtggtggctctaaagcactgtttcttctcaaagactgagaaagaggagctttacctcaatttggtgcttgagtacgtaccggagactgctcatcgtgtcatcaaacattacaacaagatgaaccagcgcatgcctttgatttatgcaaaactgtatatgtatcagatctgtagagccttggcatacattcacaacagcattggagtgtgccacagggacattaagccgcaaaatctcctggttaatcctcatacccatcagctaaaattgtgtgactttggcagcgcgaaagttctggtaaaaggcgaaccaaacatttcttacatctgttctaggtactacagagctccagagctcatatttggtgctactgaatacacaacagccattgatgtttggtctgctggctgtgtgctcgctgagctgcttctaggacagcctctgttccctggagaaagcggtgttgatcagcttgttgaaatcatcaaggttctgggcacacccacacgtgaagaaattaagtgcatgaatccaaattataccgagtttaaattcccgcaaatcaaagctcacccgtggcataagatattccataaaaggatgcctgctgaagcagtagatctcgtgtccaggcttctgcagtactcaccaaaacttcggtcgactgctttggaagcattggtccatccgttctttgatgaacttcgggatccaaacacccgcttaccgaatggtcgttttcttccgcctctcttcaattttaagccccatgagctgaagaacgtgccggcggatttcatggtgaaattgatccctgagcatgcacggaagcaatgtgccttcgtaggatggtgatctctggataagaggatgacggctcgatgattagctgaggaccaagttaatgtctgttagaaactgccggagatcgacattgccagatgtggtgtggtataagataggcaatatgtgtgattattttttgttcgaggttatcacccccttgccccagaaaagatgagaagatgtcgatgtaacaagccctctgcgcttctgtaagtagatgagtgttgctgcatgccccctgggtacatgtatcggtttgagcagaattctgtttgcctg

SEQ ID NO: 36270 - DNA, 1176 bp, Zea mays subsp. mexicana
  Clone ID: UC-ZMROTEOSINTE070D09_FLI
ctgaatcccatcatccagtgtttcggaatttctgttgcggtgtctgtctcacatgatctgttcgtgccatcaggttttcaggtctgccactcgctcggcggtggcacggggtctggcatgggtaccctgctcatttctaagattagagaggagtacccggatcgaatgatgatgacgttctccgtcttcccatcccccaaggtgtcggacacggtggtcgaaccctataacgccacgctctctgtccaccagctcgtggagaacgccgacgagtgcatggtgctggacaatgaggcactatacgacatctgcttccgcacgctgaagctgactactcccagctttggtgatctgaaccacttgatcagtgccaccatgagtggtgtcacttgctgccttcgcttcccagggcagctgaactctgacctccgcaagcttgctgtgaacctgattcccttcccacgcctgcactttttcatggttggctttgcaccgctgacctcgcgtggctcccagcagtaccgctccctgacggtccctgagctgacccagcagatgtgggactccaagaatatgatgtgtgccgcagacccacgtcatggccgctacctgacggcctctgccatgttccggggcaagatgagcaccaaggaggtagacgagcaaatgataaatgtgcagaacaagaactcgtcctactttgtggagtggattcctaacaacgtcaaatcgagcgtttgtgacatccccctcgtggcctctccatgtcttccaccttcgtgggtaactccacctcgattcaggagatgttccggcgtgtgagtgagcagttcacggccatgttcaggaggaaggccttcttgcactggtatacaggcgagggcatggatgagatggagttcactgaggctgagagcaacatgaacgacctcgtctccgagtaccagcagtatcaggacgctacagccgatgaggaggccgactatgaggaagaggaggcggcggcggagtgaggccttctgccatcagttggtgcggggttggctttggggttttctttgcacttgatgctacctcaacgtatgcaatatctcctgcttgatatatctgctgcttgtgtacgctaccgcgtacgttctgcactcttaataaatatatatatgttagttccgtacc

SEQ ID NO: 36271 - DNA, 1492 bp, Zea mays subsp. mexicana
  Clone ID: UC-ZMROTEOSINTE070E06_FLI
tggttatgtcagcaggaaaagacacaagagctaggcatgatgattttgttacagcaatcggctatcgcatattagaggtcgagaactacttgaaagaatccaatcttgcggacgggagggggccattgagctgggttcacttggatgaggatgaaagggacgaccttgcagctttcctatctgccagtccttttcaacagaaagacaaagtggtcacaattccttcagcaggtgacattgaagtgggcagcaatgcagcaaggatgaaaaatgatatatcaactgacagctccaaggattcagctggttccacagatttgatatcaggcagagcaaaggaagatttgcatcgtgggcacagaagagcagctagtgccagtgctgatataggctcatggagcatgtcaatccctaatgaatgtgaaggaactacagaacagttatctgatggctcagacaaattgcctttgcgtaagatagtgaaaacatgtgctttgacaagtaccttgcaatctaagactagaacgaagtggaaaaatggagctgttaggtgggcaggcagtaaccaacaggatgttgaagaggctatccctctgaatacttctcagttgagtcagggcttagaggaatgctttgaaaggaacaagagttgcttaagtacatgtgatgagcatacatacaataagaaacttcatggttggctcggagcccttcgtagacaacttcaaagttgtatgcatagtgaggacaatctggtgactatatttatttgctcatgattggatttctagcctcacaagatcagcagcttgtatggtaaattcactggcagttaagttactcttggtcaacttgatcctgaagcatgcatatgaggcaactatggtagaccattttggtagtcaaggttcaaaatcacgtataatgatctggttggggccacttatcttgccacatgttcagggcaggctgcctcgtccttggaagaacatctacaggacaatccttgcagcacggttgcttcgccacacttggatatgctcccgaatggtgccttgaacaattgatgcacctcgagaactcaatcctccgtggtgagttggtgactgggtggcacctatgcaatggcccagtataaattagtggtgcagtgggctggcgatcatgctgctagcaaccgaaattgcaagacttgtatcatacatcaacgctattgcttttaccgcctgacacggaagggtggtgatcatgcatcaatgctattgcttttacaacctgacacagaagggtgtcattttttttttgtaggagttgccatctgaactgtagagctccataggggataggttctgatcggaatgtgaatggcactagaaaattacttttactgtatctgcttgtgttgtcgagaaccgaatgaggtgcctggcagccttgactgtaccctctacactaaaattcgagaatgttgattgttgaagccctcagcagt

SEQ ID NO: 36272 - DNA, 559 bp, Zea mays subsp. mexicana
  Clone ID: UC-ZMROTEOSINTE070F02_FLI
aagctcaagatcatccccaaggacgtcaggtgggtggaggtctccaatgccgtctattacgcgctggtcaacgacttcatgaagccacgaatcgacgagattgatgagctgctatcgtatggtgtgaatgttactgtatacaacgggcagctcgacgtgatctgctctaccgacggcgcagaagcatgggttcagaagctcaagtgggacgggctcaggaccttcctgagcctgcccaggcagcctctgtactgcggccccggcaaagggaccaaggcgttcgtccggtcctacaagaacctgcacttctactggattcttggggctggccactttgtgcctgccgaccagccttgcatcgcgctgagcatgatcggcagcatcacccagtctccagccagttagaagggttttgtttatgtcatacgcaaagatcaaatgactctcgagtacagtgaaggtcgcatatatagttgaaagccaattcagttgatcatgatacatgcatacagttctccatcctgtgaaagaaaaaaaaatacagcactcgcgtgacagg

SEQ ID NO: 36273 - DNA, 1212 bp, Zea mays subsp. mexicana
  Clone ID: UC-ZMROTEOSINTE070G05_FLI
ctccgccatcagcgtcccagtcacaacgaagatattctcttacaggaagtgcaagtgatgggcgatatccagctgcttcgctgggctcaaactcagttccatcagcaataaggaggagcagattacctgtgagcagatcatctccgcctgatgtgtcacccagtgtcaccaaaacatatagtccttcatccatcaggaacaagaagctgtcaccgccttcatatcgcaaagcgcgccaagcaaataattgtaactacaaggttgagatagctgttgctccggatgctacaccaatcaaagtggtgacggaggagaagctgctggaaggaggcaatgtgagaggcagactggaggctaggagggcactcttccaaggcagccaggataggtcggccaagctggctggacacaaagcagggtcacgagttgttccatacgagggtggtggtaatttggaagagatttcagaagttgaaggtagatcggaaaggtatgcagttcagaaagatgagagcttatcagaaataaggacgcagctccttcagattgaaaatcagcaaagcagtttactggatcttctccagaaatttatggggaagtccgagaacggtatgcattctttggagacaagagtgcatgggctggagatggctttggatgagatctctcgtgatttggccttctcttcaggaaggatgtcaagcagagagcctgatgcaaagacgtgctgcattccgagcccaaaattctggagaaggcacaatggtggtaggtcttcctcaaggttttctgtctcagacgcagcaaacagctcagatgggagcagaacttcttacaagtgggagaggcagaggtttgggcttcagggtgggtttgtcacaaacccattagccgagccaaacatttcatctgcagggaaaacgatggttactcatgaaggcaggaagaaggatgtaactttacaaaagtgaagggcgggttaggcatgatgaagacattctgttccaagcgtgaactgctcgagtttgcttattatcatggaggcggctgtagttctcttttccaccgcgacctcttttttttttttctaaggaacgtacgttgtcatttttggaagcttctgaaagcatggcgtgcgcgtgaactatggatgtacgagtcactccgaagctaaactgtttgagtactatgctaagctgaggagctgcattc

SEQ ID NO: 36274 - DNA, 1429 bp, Zea mays subsp. mexicana
  Clone ID: UC-ZMROTEOSINTE072A06_FLI
ctgagatcctagggattcaggatgaaagatattggcccttgatgtctccattaccatcatacggctatggaagagagcacaagggacctcgatatggaagccttatacacggccaagacctgaagcatgtgactataacaggtcataatggtaccataaatggacaaggtcaaagttggtgggtaaaatttcggagaaagctccttaatcacacaaggggtcctctggtgcagctcatgcggtcaagtaacattatcatttctaatatcactcttcgtgattctcccttctggactcttcacacgtacgattgcaagaatgttactatctcagaaaccaccatcttggctccaattgctggagctccaaatactgatgggatagatccagattcttgtgaaaatgtggtgataaaaaattgctacatttctgttggtgatgatgggatagccataaagagtggatgggaccaatatggaattgcttatggccgtccatcagctaatattactatccagaatgtcgtaatccgctctatggtcagtgctggagtatcgattggaagcgagatgtctggtggtgtctcggatgttttggtagagaatgttcatgtctgggattcacggcgaggcgtgaggataaagactgcgcctggaagaggggcctatgtaaccaatgtcatgtaccagaacataacctttgaaaacgtacgtgtcggtatagtgataaagacagactacaacgagcacccagatgaaggcttcgacccaaaggccgtccccaccatcgggaatatctcttacacctcaatccatgggcatcgtgtgcgagtaccggtcaggatacagggaagcgcacagatccctgtgaagaatgttaccttccatgacatgtcaatcggtatagtagacaagaagcaccatgttttccagtgctccttcgtccaggggcaggtcattggctacgttttccctgtgccttgcaagaacctggacctgtacgacgagaggcgtgggctggttaaacaatcaacgttacagaatatctctgatatcgactacagtttctgacaatggcatttgatcccactgtactattgctgtaggtgtattcagtattcacagccgtcacagtcctatccacacatttagaagcaaaattttgggtagcttttacactcttcacctctcagtcaggcatgtatctaaggaagatcgacttgaccatactgtctcgtagagggacgccaggaatgttgccttttcactttttttatcactgtatgattacacttggttacacgcttggcagtacatttttgatagtgcctactgttcatggcagactacatttaccttgccctttttaaaacagatgtggatgtatatgtatttggtagtttgaacctggaatggttggttcttcttcc

SEQ ID NO: 36275 - DNA, 1565 bp, Zea mays subsp. mexicana
  Clone ID: UC-ZMROTEOSINTE072A08_FLI
ggattgctgcatcctcagccaggatttcttctgcaccccagactacatcacgcctgagatgccgcaggtggccaacgagttcgacgacgacgacaaggagaacatcccctgcccaaaatctccggagaagtcagcgaaccctcgtagcaagcggtacagaaccgattgttctcccaaagctcgggacgaccatcagattacgccggttctgtttgacagcctgactcgagatgattcggaagaagagcagccgaagcagcctgcgctggaaaagaggggtggttatgtctcccagtcagcagtggctctgcgttgccgggtgatgcctccgccatgcgtcaagaatccatacctcaataccgatccatgcatagatgctgctgtttacggtgggaggcagtgcaactcagcagtattttctccttcaattggtggtaatggtctttcacgctatcgaactgatttccatgaaatagagaaaattggttatggcaacttcagtgttgtgttcaaagttctgaataggatagacgggtgcttgtatgctgttaaacggagcatcaagcaattgcataatgatatggaaaggaggcaagcagtgaaagaagtccaagctatggcagccttaggttctcacgagaatatagttcgatatttcacctcttggtttgagaatgagcaactttatattcagatggaactctgcgaccgctgtctatctatgaatcggaaccagccagtgaagcgtggggaagccctggaactgttgtatcagatctgcaaaggcttggatttcatgcacgaacgtggcatagcacaccttgatgtgaagcctgataacatatatgtcagaaatggtatttataagctcggggattttggctgtgctacacttgttaaccggagtctagcaattgaagatggagattcacgctatatgcctccggaaatgctgaatgataagtatgaacatcttgacaaggttgatatcttttctcttggggcagccgtctatgagctaataagaggcaccccgcttcctgagtctggatctcactttgcaagcattagagagggtaagattgcattgcttccagggtgcccgatgcagtttcaaagtttaatcaagtctatgatggaccctgatccggtgaggcggccttcagcaaaggagatcctgagacacccttcgtttgacaagctccacaaggcctcatcgaagtagaagtgctgccgcgcccccatcagatcagagcagccggcaaagggaattccgcagctgcgtcacattcaccgtcagctgctcccaatttttgtgtatctatctatctatatgcgtgtgccacgtgccctgttctgatactgtagaagatggttggaaacgaagcagggatctgattttaactccaggaactggagcacgagcagcgtctgtaaaggactaaaggctgtggctgctgttgtgttaaggttgtgcctctcttttggtttctgatgcacgcttggaaccatcaaccctgtgccttttttttggggtgcttgttatcagttgcatttgggcagcg

SEQ ID NO: 36276 - DNA, 842 bp, Zea mays subsp. mexicana
  Clone ID: UC-ZMROTEOSINTE072A11_FLI
tctgccgcagcccctcttctctcggtctagagatccgtccgggcgcggcagcctcgctttcgtttcgcattcagtgacgcatttgcctatatcagccctgtggtcataactctagtagagaaaggagaagatgcaggcatctagggcaaggcttttcaaggagtacaaggaggtacagcgagagaagtcagctgaccctgacatccaattaatatgtgatgattccaacatattcaagtggactgctcttatcaagggcccttctgaaacaccttatgaaggtggtgtgtttcaacttgcgttcgcaattccagagcagtatcctctactgcctcctcaagttcgatttttaaccaaaattttccacccaaatgtgcatttcaagacaggtgaaatttgtcttgatatattgaagaatgcatggagccctgcatggacccttcagtctgtttgtagagcgataattgctctgatggcccatcctgaaccagacagcccacttaactgtgattcaggcaatctcctgcggtcgggtgacatcagaggctatcaatcaatggcccgcatgtatacaaggctggctgccatgccaaagaaaggttagatgtagaacatgtgccaagccaagagcctatgtcagtccatatgttgtcaggtttgctgtgtgctgtctgtctgtgaacttggtggttcttgtttcctaataagtcctaaccattcatgtgtgtgtattctgtattctgtatcccggattcccgatgcttggtctgtgatgtaataaatcctggaattcaacagttgttacttctgatctatttatttagttgctcagtatttccgtc

SEQ ID NO: 36277 - DNA, 1140 bp, Zea mays subsp. mexicana
  Clone ID: UC-ZMROTEOSINTE072B02_FLI
cacgtcttcccaatccatcaatcgtcctctcgcgagccagagccatggagaagagccgggtgctggtggtgggcggcaccgggtacatcgggcggcggctcgtgcgggcgagcctggcgcaagggcacccgacgctggtcctgctgcggccggagatcggcctggacatcgacaagcttcagatgttgctctccttcaaggcccagggcgcgcggctggtggaggcgtcgctggaggaccacgcgggtctcgtcgccgccgtggcgcaggccgacgtggtggtctcagccatgtccggggcgcacatccgcagccacaatctctccctgcagcataagctcgtcgaggctatcaaggaggctgggaacatcaagcgttttataccatcggaattcggcatggatccatccaagatggggcatgctcttgaaccaggaagggttacatttgatgaaaagatggacctaaggcgtgcaatagaagatgccaacattcctcacacctatgtttctgccaattgctttgctgcttacttctgcccaaacctatgtcagatgcgcacccttttgccgcccaaagagaaagttcatgtatatggagacggcaatgtcaaagctatattctgtgatgaagacgatgttgcaacgtatacaatcaagtctgttgatgatcctcgcgcattgaacaagacactatacataagaccaccagaaaacatcttgactcaaaacgatgttatctcgaagtgggaaaagctttccggaaacgttctggagaaaatccacattcctgcagatgaattcttggcttcaatgaaaggtactgacttggccaatcaagccggagtgggacactattaccacattttctatgaaggctgcttgacaaattttgaaatcggcgacgatggagcagacgctactctgttgtacccagaggttcagtatacccgcatggatgagtacatgaagagatatctgtaaccgctaaattgaactgttggcttgtccgaacgaattcatatatggtggtggttgtatgtgatgaccctttcagattattgatgctatgttgtgtattacctagtctcggtatttcatatttttaatattactcgcagctcctttgtttgattcatct

SEQ ID NO: 36278 - DNA, 1682 bp, Zea mays subsp. mexicana
  Clone ID: UC-ZMROTEOSINTE072B09_FLI
ggcttttgttgccaccgagcattactgttcaagaccctggcggattccatcaatctgccctgtcgcattgtgaagggatgcaagtactgcaaagctggtgctggcacttcttgcttggtgcgctttggtcatgacagggaatgcctaattgatttaattgggaacccgggattcttatctgaacctgactccctcttgaatggactatcatccatctctgtttcttcaccattgcgcccaccaaaacatgactcagctgatatttctgataatttcaagttgtttgccaagaaatatttccttgattgtcagtcgttaaatctcatgttcagtgatccagcagctggaacggttatcgacttagatgaggctatgggatcaaatctaggtctaaactcatcacatgcaacaaacagtgattgtcaagctacctttactcatcttaaggctggtactcgacgcagtagtcaagatgggagttttataatgcagaggagttccccagaggatactcaatctggactaagtgacccctttagcgatatgtcccttgagatagaagacttgattatcccatggagtgagcttgttctgaaagagaaaattggtgcaggttcttttggtactgtgcaccgtgcggattggaatggttcggatgtcgcagtaaaaattctaatggagcaggacttccatccagagcgtctcaaagaatttttgagagaggttgcaattatgagaagtttgcgacatccgaacattgttcttcttatgggtgctgtcactcagccacctaacctttcaattgtgactgaatacctatcaagaggtagcctatacagacttttacacaggcatgctgcaagggaaaatctggaggagcgccgccgcttgagtatggctttcgacgtggcaaaagggatgaactatcttcataagcgtaatcctccaatagtccaccgggatcttaagtcaccaaacctgttggttgacaaaaagtacactgtgaaagtctgtgactttggtctctccagattgaaggcaaacacatttctgtcttccaagactgcagcagggactcctgagtggatggcaccagaagttctacgagacgagccctcaaatgagaagtctgatgtttacagcttcggtgtaatcttatgggagcttatgacattgcagcagccatggagtaatttgaatccagctcaggtcgttgcagcggttggtttcaagggacaaaggcttgagatcccaagcagcgttgatccgaaagtggcggcagtaatcgagtcctgctgggtcagggagccctggagacgaccctcttttgtcagtatcatggaatccctgaaacttcttatcaagacattaccacccaatcaactcctcgaagaaaattagttaccaccgaagcaacttgcaaattatgtcacctctagagttttctcgatttgtttagatccgatattgcgccaggtctctcaaaccattcgtcttcggccacttgttccctgatgataaatattcaaaactacacctgtcacaaaaggggaaaaactatggttggacaataagattcatgaaaaaaatatgtgatccaaattaagtgtacatctcttttatcaaggaaccaaatgtaagttggtcaaatatatacatataagtactaatatttatggaat

SEQ ID NO: 36279 - DNA, 968 bp, Zea mays subsp. mexicana
  Clone ID: UC-ZMROTEOSINTE072E02_FLI
tgaaattgaacagctaagagaggtctccagaaatagtgatataactaatagggagttggaatccaaaggaagtgagcttcttgaggtagctgttagtatggagcgaatgattcagcggttaggatatcttggaggaaaagatgtactagaagataacaaacctgctagcacacaagctctcgtatcgaagctggaaaagctaataatagcttcaagtactgaatctgggaattctaaatccataatacaggagctgggagcaaagctgcagtcaagggaaaaggcagttgatgagctatcaacaaaagttaagatgctcgaggatttgtgccatgcacaactttctcagccagaacctagtaaagacagatcatttgaagcatcttcctcaacaattgggtcagatatgtctgagattgaagatgtaggaccagtgggcaagacaacatcagtttcatctgtttctacagctgcacatgctagaacaatgaggaaggggtcatcggatcatcttgttctcaacattggttcagagtcagaacgattaatcgctgcacaagattcagatgacaaggggcgtataaaatcacttcatacatctggcttcattccagctcagggaaagcacatcgctgatagggtcgatgccttctgggtctcggggagccaaattctgatgaaccggccacgagcaaggctagggcttatgttgtactggctggctgtgcacctatggttgatgggcagcatcttgtgacaccgcttctcaataccgagacccatctcataattgtacaatagcacgtattagcagtttcttcttccattcatacaatacatggtagatgttagaaataccatttttttcattgtcttcctcctgctgagatttgcacttgagcagtatgtgttgaatttttgcacacaagatgtaacgcgcagaaaaaataacgttgtcattctttgat

SEQ ID NO: 36280 - DNA, 1310 bp, Zea mays subsp. mexicana
  Clone ID: UC-ZMROTEOSINTE072E05_FLI
gcctgtctcaacaaaactcagcagcaatattgcacaaaacagtagtaaactgccgtaggccactgttgctgtaatctcagcacgtcgcttttgattctgagtagaagcttacaccagttacaactaaaagcactattagcagttcttacttacacggattctagtatctcttgatacaatatttgcaactttactctaaaagcctccatcggcctctgcttccttgccttgttctctaggagacggcaatggctgatccgaaccaccttctgttgcatctccaaaaagttccgcaacaacagcagcccttgctgacttcgctttttcatcatccccagacaggtcaggggttggagcttcctttgcctcatggctgcgaggctcgctcgatgattctaccatagcctcagcagacacgggtgtctcttgttttccagtgtcagcttcactaaattctgtatttctgccactaggagcaagttcggtgttcagccgtccatgcaaggcagcaggagtcttctcggtgtctgaattttcatcatttcccaaaatgtcactgctcggggcctcctttacgtcttggcagctgggtggcttattagatatatctaccatggcatcaccagaaggtgacaattgcagtcctagatcagttccaacaagttttgaagtttcatcaccaggtgaatgttcagtgtttagccgtttcatctcagcagtttcatcagttcctgaaggcccagagcttgcaacctccacttcctggctgagttgctccctagatatgtctaccattgaaggtggtggcagttgcagctccgtgccatcttcaccaagtttcgcgttttcacttgcatgagcaacttcagtagttagctgtctctgtgcagcagcagcagcagcagactcttccatctttgcatctttacgagccaccttttcgtcttggctgagtagctcgctggattcgtctaccgtggcctcaccagatggaagcagttcctgttctgtgtcagcttcatcaatctttgcattttcagcacgaggagcagaatcctcatttactgatccttgagcagcagcttcatttttcgtttcttcattattctccaaagggtcactgcttggagcctccacctcctggctgggcagctcactacacatacatgtcatggcctcctcaccagaggaaggtgccagctgcagttcagtgtaagcttcaccaagtttcatattttcatcaccatgagactgaccatcattgcatgcttcaccagatgcacgagactgggtatctttgtatacttcgc

SEQ ID NO: 36281 - DNA, 1797 bp, Zea mays subsp. mexicana
  Clone ID: UC-ZMROTEOSINTE072G12_FLI
ggcatgacaaggtcaatgatcattaaatttgtttcctcacttgatgaaaggtttcagatactaagttacttggttaagttctgggctaaggtacatgatctgaataccccaagacaactaactatgagctccatgtcaattatttcactagttgctttccatttgcaggtaccatgggttaattattattttggtttggttattaaattgcaagtaactgtcccattaccttttgttttaattaattgacctactaaccaatctgcatttgaagacacaaactttggattcatttgtatagaaaataagacgatacttattggggaaattatgaattatcttctttactatcgacaaattctggatatgctttatgccagttcagaaaacatgatagatacccttcttctacacttcctcagtctaaattcctacacttcatgctattgcattctatgtaccagaaaaaatggattttactccattttccttaatggtagtgtttgagtagcaactcattagatgcatggctaagaagataagcatcaatgtgcagtgcagacccggcatcctccaatattgcctgcgttctctgacttgttaaaagatgggttagattgcgaaagcattgagaggaatgctttacggtttagggattttgggagtagaaataaagaatctgtcgctgaactgtttgtatcattgataagtaaactattgtcagcagagagtttatgggagcatgggctgtgcgcaagcaattttgaagcgtcatggatctcaaagacctggaagaaaggagtaggcaatttaagtgttgaagatttcttggaccggtcgcaaaattttgcaaggtcagtgggaaaggtgcagatgcagaagatttgcaaatgccttagagaatgtgctttgaatttgttagatttcatgagagggaaaatggacacaacgaagctgaagacccttttatttgggcggcttagcccagacgaattagtcagcaaacctcgtctgaagcatgtcaagagaaaaaggaattgggaacggaccccgcaagggggaagatgtgtgctccagaagagtgcaaagcatgctggtagtgctactggcagtgattcattacccactcctaacaaggtcttgcatcatgcactccattatcgagttgctggccatcagtctagcattcatcagtttgtgcccattattcgatggccacgaatcattccttctggttttggctatggattatcgcttgggattccatcagttgctcctcaccttggcaagggaatactgggcaagccaccaatcattccttctggttttggctacggattgtcgcttgagattccatcagttgctcctcaccttggtaacggaatactgggcaagccaccaagtaatataacacccttagatcaacggagctcaactcaactagtgcacgtacggaatccacaccagcatacatgtcagcaatcatgtggcggagctatggagccgagcagctccggcgtggcttaatgataaggtccggtgatgagcagctctagtagcggttaggagtttgaggttagatttagggtgtgtttggtttgacttttggctttggcttttgccccctaaaagttaaaagccaaccaaagggctggatacaggaagcagcttttttctaaaagccgactttctcgtagtgtaaatctgaaagcacccctggacctgcttttagtggcttttcggatggaactatgaaaacatatatcgaagaatttttaacgacttttagtggttttc

SEQ ID NO: 36282 - DNA, 579 bp, Zea mays subsp. mexicana
  Clone ID: UC-ZMROTEOSINTE072H05_FLI
agagagagaaagagagagagagagagagagagagcaagtagtcgttgtgcgcccgtgttgcgtgaaggaacaagggcgagggagggctgtgagtccttgttgcgcgaagaagaagatggctgcggtgattgccagcactcaaaactgtcgcgttcgtgtgccaccactgatcgtgttcactgccgtgctgctggtgacggcggcggcaaccgtggagccggcatcagccacgggctggtccagcgtcaccgacagccgcagcggcggttactcggcgttcagcctgcagggggcaagaaagctactgctgcaggacttgtgcatacctcaagggtatccctgcgcccttgcttacttcggtctcgggtgctgcagtggcgagacctgttatgatgcacagcagatctgcctctagttgttgtagtttcagggagagggttcttttcttgccgctacagctttggtttcagtatggtgcgtgttcagcgatgaacaccgtgctttgtttccctcaattagtttttatgtattgtacgcgtcttttggttgagtaataaagcaatgcgcttctttgtttcc

SEQ ID NO: 36283 - DNA, 603 bp, Zea mays subsp. mexicana
  Clone ID: UC-ZMROTEOSINTE072H12_FLI
cagggcggcgccggcgtcgacggccactacgacgagctggccaggcgcctctacgcctacaacaggagctaccgcggcaggctcggggtgacgctgacggccacggtgcggtgcgcgtacccggacccgcgcgcgcaggcggcgctcgccacggggctcgtctcccgcgtccacgtccgcctgtacggcgacctcaagtgcacctggtccgaccgggaggcgtgggagaagtgggccgcggcgtacccggccagccgcgtgttcgtcggcgtcgtggcgtcgcccgaggcggacaaggacgcgtacatgttccagaaggacctctactacaacgtgctgcagttcgcccagaaggcgcccaactacggtggcctcatgatatgggataggtactacgacaagatgaaccactacatcagcagcagctaataattaagcttcccatccacatccacatccacatccacccgggttatcacctaataataagcttattgtaattttcttcttcttaactttataatacactgtaatgtaataatgtgatgatctgatgatccacaacggaataaaatggtcagcttccagccggtgggccgcgcc

SEQ ID NO: 36284 - DNA, 1669 bp, Zea mays subsp. mexicana
  Clone ID: UC-ZMROTEOSINTE073B06_FLI
ctgctatggtcaggacagcatccctcacatgctttgctggcatgacttctgatgtattcttctccctgcctgaaaataagagagactatgtgacctcttcttctgttcatgcggcgttaaatgatatggttcctagtgtaagatcagctgcatgtcgagctattggcattgttgcatgttttcctcagatattgtcaagctctagcctaccaggcaagttcatagatgccattgagttcaatacacataactcatcaactccagttcgtgtcaccgctgcatgggctttggcaaatctctgttcttgtattcgttttagagcactggaagtgcatacagatccctatgcaggtgtaggtgtattgagcaaatcaagcatatctcttttggttgaagttgctttgcgtctggccaaagatagtgaaaaagtaaaatcaaacgctgttagagctcttggttatctttcaagatttatcagattcaattaccacgccggcacaataaatgacccaagtgattcagttttttatggagatcctgtgtggcttgaaagaatggtgcaggctttgatgtcttgtgtgacaactgggaatgtaaaggtccaatggaatgtttgccatgcccttagcaacttgttcatgaatgataccttgagacttcaagacatgccttgggcatcaagtgtttatagcatacttctacttctaatccgggactcaaacaattataagataaagatgcatgcagctgttgctctatcagtgccagtgtcaaggcttgattacgacagctcatttccagatgttgttcgaggcctcgtgcatgctctcgagtcattgaactcaaacaattcatcgttaccttcaaatttcaaacagagagacaacctcgagaagcagcttacgtttactgctctccatttgcttagttttgtgtcaccaaacgacgatccaagcctgaaagattttcttaccaagaaatcgtcgttcctagaagactggctgagatcactatgcgcatcgttcaacagctccgagcgccagcccttgccaacggaggccacaaacgacgaggacggcttcagcccaaacgtgactcagaaaggcatgctgtcttccgccctgcagtccttgctcggcgtgtacgcgggcaggacccagcaggtcatcacccagagatttgagcaactggctagaagcgtcgcttgaatggtgagcagcgacgagcagtcaggtgtggtctccactccagcctccattaacaagcagcgatatattggtcgtcgtctacccctcaggacggacagcgcgtcaggcagtggatccttaaattctgccgaatcccatgagctccaggcggcacttgtctcggatcttggctgtcatcatgcacaggctctgcaagcctggcttggtcggtgttttcctcgttgtttacttgaaacatcgttactgtgagtacacatatgtatataagttggcagtcttccaagctcagcgtgaccagaccccagcagcactgggtatctcttaactacttttctggcgttcctgacaaacaggatggcgatgttatgtagatgggccttttccctggtcctgggacttcctgcttgcttgataaaaggttggtatcacccgaccacggtccacgtggacgatattacagg

SEQ ID NO: 36285 - DNA, 1669 bp, Zea mays subsp. mexicana; identical to SEQ ID NO: 36284
  Clone ID: UC-ZMROTEOSINTE073C01_FLI

SEQ ID NO: 36286 - DNA, 910 bp, Zea mays subsp. mexicana
  Clone ID: UC-ZMROTEOSINTE073E01_FLI
ctggagcatccaaatggcaccacccaacatagagaatcaatttgtactgtagcatgcctccactcgaagccgccataccagtctgcctctaaatcatttcactatcgcagattaccactgtatcgagttcatgatttgggagaagggatagaaggaaaaggaaaaccaaataggggaggaagagatgctcaggcatccatcttttggtgtcacagacctagttaattatgttcttggtagcactgatcttctagtaagatggtcttgatttgttttgttgggaaattggatgtcatggcctttggctgccgacgattccgccggggcgtgacctgggcaccggctccgcacagtcaccgaaatggtgaacgcacgtgaagtggtataaaaatggtgaatttttaagcccagatgatgaaaaggttgtaagagaaaagcttctttctcatcatcctcgtgcagaagaaaagattggttgtgggcttgatggtataatggttgacaggcaccctgagttcaagtcaagatgtctctttgtcgttagaacaaatggcgattgggaggatttctcataccacaagtgtctccgggcataccttcaaaagaagtatccatcctattcagacaagtttctgaagaagcatcttgttaacaagagctccaatcttttccgtgttcagaagaaggccatggtggatcctttgcctgctggcagttgacaggatcttaggtttccctgctatggttagggcttagaagtgttatatggtcttcggtgaacaaatttaatgtgtttttttttataaataaaaattaaactggttatgactatggcccaaatacatattttgggctgggatcgtaaggatgttgcatggtgaacagatttaatgtgttttttatagttgat

SEQ ID NO: 36287 - DNA, 1178 bp, Zea mays subsp. mexicana
  Clone ID: UC-ZMROTEOSINTE073E08_FLI
tctgatacttgtattgaagatggtgaactctgtgatacttcgtcagtgaagaaaaggatggacaaagtggcaggagcaaatgggttggaaggggtctcgatagagtgtgctaatttgttgaataatggcattgatgttttcatgaagcagttaattggatcttgcattgaattagttagagcaaggtctcgacatggcaaactaaggcatgagacattgaagcagcagctgtgccgaaagctaataaatggtgtatcagtgcataaccatgttcctgggcagagttctgttatacctccagagacaaattccatctccatgcaggacttaaaggcagtaatagagttaaacccttgtttgcttgggattaatgcatcactgctacacgaaaagatcaattcatatgactagtaggatggagctagttgtattcatctcgtcacaagatcctatgatcttgatggtctgtcttgtttcatggctgttgtaatcaagccataagtttattgatgggtggcggtgaaggcaagcgcattctgtgcagtaccctgattgttttgcatgtcatctccagtgcaatcttccagaatgaacaaaaaactgtgtacctgctgggtgcagtactaaaataattcatttcatccacctaaggagtaaggactacgatgggcgaaagtgctccagagataactatgttgctggactccagacaaattgaggaaccatatcaaagatttgatctgtttgggtgtcacggccccacaaagctttcctctgcaattgatacaaagatagggtagtgtgaaacaaagcctggtggctgtttcttcgtgctgtttgcccgagcgttggcaaagcatttgttcataatcatggtttattggcacgctcagtgttgcgtccccaggcactctccttacagaagtgcaataatgcggacaaaccactccactggtttttctatgttgattgttgtgtaaacgccgattgatttgtacaagtaaatcaatgtatcatgtctaaataactcatacatagtgttggtttcatgttttagttcccaagttttgcaaatatatgtttacggtattatgtttgtataaacaagttttgtgacgacacttctcgattcttcatgactacttgcattgtaatgcaataaagtcgtcatagtatcc

SEQ ID NO: 36288 - DNA, 1710 bp, Zea mays subsp. mexicana
  Clone ID: UC-ZMROTEOSINTE073F02_FLI
tgctctcaagagattatgttgtgtatgaagagtcgtgtagagacgcactattcacgaatagccgtttcttgtgttttttacatttaacccctagagacccctcaaaagacgggtattaaatgaggttacatataccattaagaaacagagaataaaaatacattctttgtaattcgatctagagatagttatgcctcatatactagtacggagggagtagtcaagtacactctgtagcgtggtgactttgtgtaagttaggatcaaaatctaagcaaccagttgctgtaggaattgtttttttggtggtattattatcgctatctatacgatctagagaaccatgttcaatctaatggaataaggtttcgtattgacctaggcaattttccctgggattagtcattttgttgaaagactctgtactatactctgtagcgtggtgatttttgctagatggcatgcttccatttaggaagaagagatacttttcatctgccctcatgtttacaattaccatgctgtagttgttctatataataaaagaagtgtttactctatcagcgatttggtttaaacagcttgtttcgatccgagatagggagcatgatagatttaaagcgctactgaaatcatgttctgggatttgactgtctggatattggctataatccaatcagtgaagttgtaaaaatgagcttttaaatatatttctatggtatagaacacagaatgcagatgtgattaggaaaagaagttcttcgctgttgaaaagccatctttaatcgacacgacaaaggtagcttatgccatgattcctgcaagtggcacttgcagcttggaccatggctaaccgtcaatggttcttgtttggaaatgttaacattcattgccatcttaagatcgttaaactcactttcggacaatattgttcctccaatttcaatagaaaattttagttgggccaacagttcagctgacttctctgtgagttggatagcatttgtccaattttctgtcacctttttgctaacttaaacgtggaaacacttgttgcaggggaccgctatttgaaaccattcgtcattccaaaaccagaagtcaccgttgttcctagggcgaaagatgacgactgcctcattcttgcaagtgatgggctgtgggatgtagtgtcgaatgaagaggcatgcaaagctgcgcgtcggcagatccagctgtggcacaagaacaacggtgtcacatcatcattgtgtgacgagggtgatgaatccaatgatcctgctgcacaagctgctgctgattatcttatgaggctcgcactgaagaagggtaccgaggacaatatcactgtcattgtggttgacttgaaacctcgaaagaaggccaagagcaactcataacactgggatggatccatcacggtagagctgaccatgatatgtccaaaggcttctgctgctagttgttggtcgtccgcaagagacttgaccccacaggtttttttcgttgggcctcaagaactgtaggtgcattttccatggagggttatgatgcttaaccccactctggtttctggtggctaaaacattctctccagtcggcttctaccatgagccctggcacttagtatatccctaatgttgtatgatagttgaacttgtaaagagacaagcggctgagacggtcactaaaattaacatattgttacttc

SEQ ID NO: 36289 - DNA, 2047 bp, Zea mays subsp. mexicana
  Clone ID: UC-ZMROTEOSINTE073G11_FLI
tgtcgttcgcggccgtcctcgcgcaggttgtgaatacaaagaatcgttcaggcgaaagattacagcctgcacttctttccaagatctgtacatcggcagtgaaggaatcattgagaaatatatatggtaacaagttagacagttttatgagaaactttgagaaatcattcagcagcacattgacaacgcttcatcttgttaatgagatgcctgtctatggacaaggtccagttcctcaatgttcttctaagcatgaagactctgaagcttcaagcaagttgagcactggtggtacacaaaatctaacgcgtgaaatcaagcaggagcgtttgaattcagtggaaagtcagcttgttctttatgctggcggctatcagcagatgactcgccgcgctcatagcttatcttctcctgaagctgatcagcgcatccttaatgcatttgagagatctttgaaagaacaaactcggtcaaatgagctcaaggaatttgagataagccttagcatgagaaagttgaagctaaaacagtctcaactagaacttaactcctattcacacatgttagacaagattaagttatccttgggatttcagaaagcttccttccaagtggaaaaattcaagactcagatgcaggacacgaggcatgcacaaataatgaggacactcatagattttcttgttagtgcagtgattattatgtcagtatgctttgggtatggaacttatacttattcataccaaaggataactgatattacagcagcatgttcagccacttcaaagggatctaaatcatggtggatgccaaattcagtgtcaaacttcaatactgggttgctcttcataagatgtcatgtaatagctgcaacacggatgttctttggtatagtaatgattttggcagttgtttggttagcgttccagcgctctgcggtgtctgtatcaagtatgccagtaacttttaacatcattctgttgggagttatttgtggctacgctggaaggttctgtaccaacacacttggtggtgatgggaacatgtggcttatatgctgggaggtactttgttccgtccatttgattggaaattgttatccatcggtcttgtaccgtgttctccatggtcctatatctgtatctcatagcaaggagtctgtctggttcccgtattggattcgccgttggatgttttatgctgtgctggggttttttatcccagccttgaatggcttactgccatttgcttctctttctgactggaataaccatttcactaaggagctaaaatccatcttcattgatgagagaatcgaagcctgaatgaatcatggatgcaacaattggtgcagtgttgtcctttttgtgccagcggtgcagccaaaggaaagcgaggactgaatgatctttagctgcaactagtgcacaatgtcaatgatttctgagaaatgaaatggttctgtttgagaagcgattcagaagttcagcttggtgttgtctcaagagaataatatatgggatggaagttataggcaccgttcaaggaataagttgactgtacactactgcaggagacgctagcattttgatccaactcaacgtgctttcatcagtgcctcctaccaccgcagtcaaagcttcagatgatctaggattttgacttttgagatcttcgtgtctcttcgacttcaaatgcctcgatttgccctaggcattttatgatgcaagtttacattacagttcagcgtgtaggcaggttcaccaccagttggaaattctgttgaattcgtttttgttgtctttgttgtagctcgataatttgtttttttcactgtaaatatcaagagccgtttatctggtactggctgcttactctttgtggttagtttatgtgcatgttatctccgggcttgagagaacacagcctgatgttgtacttgttcagtgtgttcatgtattgtaagtgcacttgcatttaagcccaaaaactaatgtaagattttgatgtgtacaatttttttatgggatcatatacccaatcatgt

SEQ ID NO: 36290 - DNA, 1352 bp, Zea mays subsp. mexicana
  Clone ID: UC-ZMROTEOSINTE075B12_FLI
cctcatgcagccacacaagctacaggcaaatctgctacagctggagaaactagaaatgcatggactaattttaatcgacctgttagtccaaatgtgcatccataccctactggccttaaaaagtcatggcatcagttatttagtcgttcagcatcagtgtctccttgtcctgacgttacaacttcagctcatgatatgattcggaaggcagaaccaaatggagctcaaatatacaatgctcatacatttctctctcagtatccgcctctggactacaagccaagttcaagccagtctatgcaatttccaggttttccaccgcttaatggagcacctcccagtaacccactacctcattttcctgctggacatatgcctttctatgatgatgcagaatcaacactacttgaagaaccagagcaatttgaggacccatgctatgatccagatgcaattgcattacttgggccagtttcagaatctctagataacttcccgtcggacttagattgtggatttttctcgagtgatgttgctaaagagtcacatgggaggccttcaccaattgagtctcctctctcaagatctcgtacggttgaagaaaagcctatcgagcccccacactcctcagttgcaagaggccctggtggttccattctacccgagtctagcagtgaacaaggcacatggcaaatgtggagcacaccattggttcaggaaagtttaggtctgcaaggtcctcagagccagtggcttcgacaaaacacaaatcaattcaaccatagtgccaaccttttcagcagcggaggcggagcaacaagtccccttggtactggtttgaatgacagtgatccatggctgcagaaagcacctttccagcaattgccacctgatacaccaagcctgttcctttcacatgaaatgccaggaaaattacacaatgacttggtttttgggtctccaaacaaatcagcccgtgagcacccctttggaccgcctggttatttgtggcccaaggaggaactggcgctgaatggagctcaggacggtggaggcgggcatatcctgtcgccgtctggtggcgcacgagttggcggcggcgttggcttattttcttcagcaagtcctgatgtacagtcactgtggtcattccatgaaacattcaatgaaaaagagagcatagaatgaacaaacttttataatagaaggaagggaaaaagtgtggagccaaggcttccttgcctcctctcttgtagggttttaccgtctttaccgaggtgataagctggactgtgttccttaatgatgcaaaaaaagaagaagatatggggtcattttgtttcctagcactc

SEQ ID NO: 36291 - DNA, 1083 bp, Zea mays subsp. mexicana
  Clone ID: UC-ZMROTEOSINTE075C10_FLI
ctcctttttcctcgacttccgtcccgacgccgccgccgccatgaagggacccggcctcttctccgacatcggcaagaaggaaggatctactcactaaggactacacctacgactagaagctgtccatctccaccgccagcgcctctggagtgaatccgttcgtcggagaggccatgggctcggcgcaggatccgttctacatcgtccgggaggagatccaggagtcgattgataaattgcaaagtaccttccaccgctgggagcaaactgcttcaaacacaggagaatatgttcatctgacaaaggagcttctgatcagctgtgaaagtatcgagtggcaggtagatgagctagaaaagacaatctcagttgcatcaagggatccggcatactatggacttgatgaagttgagctttccagacgaagaaactggactggttcttctcataagcaggtcggtacagtcaagagagctattgaaaagggcaagagcaatgcaacaacttcaaaataccaggatacaagcaggaccaaccactattctgcccaagataatgatgactttctttcttcagaatcagatagacagcttctactcatgaggcagcaggatgaagaacttgatgagctcagtgaaagtgtccaaaggattggtggcgtgggactaaccatacacgaagagctgtctggacaggaaaggatcctaaacgacctaagcttggagatggagactacttccaacagacttgatttcgtgcagaaaagagtggccatggtgataaagaaggccggcatcaagggtcagatcatgctgatcgtgttcctggttgttctgttcatcattcttttcgttttggtgttcttgacatagccaagtgcaccagggtcctcggttttctctctcatttgttgtgcctccctagtacgaacactagtaaattggtcgcgctccgcgtgagttgttgcttgatgtgcttacataagatgtagaatcttgttgctataggcatgtatcaacaggtgctagcagcttgcagttctccttctaacagaaactggtcgaagcagattttttgttctcc

SEQ ID NO: 36292 - DNA, 460 bp, Zea mays subsp. mexicana
  Clone ID: UC-ZMROTEOSINTE075G07_FLI
gttcaggagtagcattgtcagtagattttgcgttttgtacagcttataggatattgtctccggcaggaagacagctgaactgattggaacccggaatgtttatggattgctgcttctatgatggctgtcatggaagctgatggtagagcaagactacaaattgcttagataggttacaactcacaaggaggccaagagatcctgttgtaaagttcaattttagcagttcaaggctttgtgttttccccccctgcttctcttacatcatagatgcttgtaaccagattggtagtttcgttgtttttattcctctttaccccccttgcctgccccctctcaactgtattttaaacaataatgtaaggcatcttgtttgagtggctttcatgctttatttgggaaagaatcataattgagtgagtgatatagaatgtaaagattggcctctaatatttgtttc

SEQ ID NO: 36293 - DNA, 1059 bp, Zea mays subsp. mexicana
  Clone ID: UC-ZMROTEOSINTE076D08_FLI
tccccccaggtctccacatccgtggttgagccatacaacagtgtcctgtccacccactctctcctcgagcacactgatgttgccgtcctcctcgacaatgaggccatctatgacatctgccgccgctcccttgacattgagcgcccaacctacaccaacctcaacaggcttgtgtcccaggtcatctcatccctgactgcttccctgaggttcgatggtgctctgaacgttgatgtgaacgagttccagaccaacctggtgccctaccctaggatccacttcatgctttcgtcctacgctccagtcatttctgctgagaaggcctaccacgagcagctgtccgtggccgaaatcaccaacagcgccttcgagccatcctccatgatggccaagtgcgacccccgccatggcaagtacatggcatgctgcctcatgtaccgtggtgatgtggttcccaaggacgtgaacgctgctgtggccacaatcaagaccaagcgcaccatccagttcgtggactggtgcccgactggcttcaagtgcggaatcaactaccagcctcccagcgtcgtccccggcggtgacctggccaaggtgcagcgtgccgtgtgcatgatctccaactccaccagtgttgtggaggtcttctcccgcattgaccacaagttcgacctcatgtacgccaagcgcgccttcgtgcactggtacgtcggtgagggtatggaggagggcgagttctccgaggctcgtgaggatctggcggcgctcgagaaggactacgaggaggtcggtgctgagtttgacgagggtgaggacggcgacgagggtgacgagtactagaccctctactggcgcggcgtcgtcgggcctgtgtgccactgctatcctgtgatctgccctgagtggctcctatcgtgttatgtttctgtcggttcttatctatctgtcgttgtgtggtttacaacttgcgttgtactccctctgtctctaaaagaaagtcgtttgacttttctaagatcaggtttgacctgctcattttattcaaaaaatttcataattatc

SEQ ID NO: 36294 - DNA, 685 bp, Zea mays subsp. mexicana
  Clone ID: UC-ZMROTEOSINTE076H06_FLI
gcggagggcaagatcaaatacatcggcctgtccgaggcgtcggcgtcgacgatcaggagagcgcacgcagttcacccaatctccgctgtccagctggagtggtcgctctggtcaagggatgttgaagctgacataatcccgacttgcagggagcttggcattgggatagtggcctacagtccactgggcagagggttcttgtcgagtggtcctactctggtcgacaagttgtccgatcaagatttccgcaaggagctgcccagattccagccggagaacctggagaagaacgccgtgatattcgatagagtcaacgcgatggcggcgaggaaggggtgcacgccgtcgcagctggcgttggcctgggtacaccaccagggagccgacgtctgccccatacccgggacgacgaaggtcgagaacttcaacagcaacgtggcggcgctttcggtggagctcacgcctcaggacatggctgagctcgagtcttacgcgtcggcgggcgtccagggggatcgctaccatgacttcctcaacacttggaaggattccgagacacctcccctgtcgtcctggaaggctgatgaataacctacggcttcacacgcgttgttgtcccattgaaagatggatgaggtgatcagatggaataaataagagccaataaaaattctccgcacaatat

SEQ ID NO: 36295 - DNA, 1078 bp, Zea mays subsp. mexicana
  Clone ID: UC-ZMROTEOSINTE076H10_FLI
aggaggcggcggcggcggcggcggaggcggaggaggaggagccccggcaggcccagaaggtggcggcgccgccgtccacgcccaggggcaagaagcgcgacggcgtcagcggcgtgaccgaccccgcgccgccggccgccaaggctcaggtggtggggtggccgccggtgaggtcgtacaggaagagctgcttccagcagcagcaggcggcggcgggcgccaagggcaagccagcggcggcggatgagggtgctccgggtccggcgggcggcggggtgttcgtgaaggtgagcatggacggcgcgccctacctgaggaaggtggacctcggcacgtgcgggggctaccgccagctgcgggaggcgctggaggccatgttcctctgcttctccggaccgggctcgggctcgggcgatgcgtccggcggcggcagcccctccgacttcgccgtcacctacgaggacaaggacggcgacctcatgctcgtcggcgacgtgcccttcggcatgttcatcggcacctgcaagcggctgaggatcatgaaggggactgaggccagactaggcctcgggtcagccaagaacaacgactgagggagagggagacgacgaccattgtgcagacccgaccgagatccacgcacacggcggcgcggcttgtgcacgcgtgagcgggccctttttttgctctgggattgttgttgtccgtccgagaggcatggggtagtatgggcatgtgttgtaccatccccacctcgtctgccatcaatggagcagcaagatagaaaagcttttgtgcttgcttggaacaggagaagatgaagctgcttgcttggattggaacgagggggcggagatggagagagatagaaaaagctttaatttgtgcatccaaccaagtggagtggagtggaatgatgtgtggtcgctttgttcttttgtttttttaattattttgtggtactacgagtaggaggggtgttagcaatacaaaaggagtggagtggagttgaatctccatgcacgcgtgtctgtacaaaagctaaagatcactcttctttccctgtctgtcttaagtt

SEQ ID NO: 36296 - DNA, 1021 bp, Zea mays subsp. mexicana
  Clone ID: UC-ZMROTEOSINTE076H11_FLI
caacggcaaggagctgtgcaagaacatcaaccccgatgaggctgtcgcctatggtgctgctgtccaggctgccatcctgagcggtgagggcaatgagaaggtgcaggacctgcttctgctggacgtcacccctctgtccctgggtctggagactgctggaggagttatgacagtgctgatcccgaggaacaccaccatccccaccaagaaggagcaggtattctccacctactcggacaaccagcccggtgtcctgatccaggtctacgagggtgagaggacccggacacgcgacaacaacctgctgggcaagttcgagctctccggcatcccccctgcaccccgtggtgtgccacagatcaccgtgtgctttgacatcgacgccaacggcatcctgaacgtgtctgccgaggacaagacaacggggcagaagaacaagatcacaatcaccaacgacaagggccgtctctccaaggaggagatcgagaagatggttcaggacgctgagaagtacaagtctgaggatgaggagcacaagaagaaggtggaggccaagaactcgctggagaactactcctacaacatgcgcaacacgatcaaggacgagaagattgcgtccaagctgccggccgatgacaagaagaagatcgaggacgccatcgacgcggccatcagctggctggacgccaaccagctcgccgaggcggacgagttcgaggacaagatgaaggagctggagagcctctgcaaccccatcatcgccaagatgtaccagggcgcgggtgaagacatgggcggcgctggcggcatggacgaggacgcccctgccggcagcggcggccctggccccaagatcgaggaggtggactaagcggtttgttgtcagtcttgagtgtgctgcagttgctggctggcccagttgctgccgagagttatcgtcagttggtgcggtgtgtccgcttaaactttatttgtggttggttggtacttttgtggtggttatttttttggcccccgtgat

SEQ ID NO: 36297 - DNA, 579 bp, Zea mays subsp. mexicana
  Clone ID: UC-ZMROTEOSINTE077A12_FLI
ctactgcaaagagtgatagcttaaggatgtttgattatgaagatgttacaatcggcgcatggatgcttgctatgaatgtaaagcatgaagacaaccgagcaatgtgtgattcagtatgcacccctacctccatcgctgtatgggacagtaagaaatgttcaggtacttgtaacgtcgctgacaaaataaagcagctccataacaccactgtgtgctcaaagagcccaacgttgccacctgaggtggaggaggaagaatagaaaccgaaacagttttggcccttgaaagaactatggcggtgatactcactggttttgtcgtcgactgcatttccatactgctgtatcattagtgaccttctttcaacaccagaccagcgctggagagttcttggagaatcgacaccatcacattacatgtagtatttcgagtctacccaatatgggttcagatgaagtgttgtacttgtaccttttactaatcggtggaaccaatggggagcacagagacattcttggctgtatgatgtagtataaattgtacacagagtgacctatgtggtttcatccttcgctgacc

SEQ ID NO: 36298 - DNA, 1692 bp, Zea mays subsp. mexicana
  Clone ID: UC-ZMROTEOSINTE077B05_FLI
tgattcttgaagctcctaaggaagaagaggtttcccttcttctagaaattttcggaatatgtcttacagggggcaaagaagttaataatgctatagtgagcagtatacaggacctggcaaagtcattctcaaattaccatgatgaggtcctggtgaaacgtgaagagttacttcagttcacacaaagtgccatttcaggtctaaagaggaatgctgacattgtgaggatagattctgaagctctagatttgtggaagaaactacatgagaaggaggcatcacgagctcaatcaattggcgatcctgataaagttacagaaaagacttcaactattgagtctttcaaagaagcactcaacgaagtccgattttgctctagaatggaggaacttctattgaagaaaaaaacaattaatactggggattccttagagatccactcccaaaaggttgagaaattaaaggtattggcgacttcccttgctaattcatcctccaaggcagagaagcgtattttggatcacagacgccagaaagaagaggctcttaactttcgtgctaaaaaggagaacgaagtgattgctgttgaaaaggatttgactgctgagatttctgaattggagaagcaaagggatgaacttgaggctcagttgaagaaggtcaacatttcactgaatgctgctgttggtcgactaaagcagacaagagaagagagggaccagtttcatgaagcaaacaatcagatgatctttactttacaagcaaaggagaatgacctgtcaaaatctattgactcatgtaacatggaggccagtgtagtcaagacttgggtaaatttcctcgaggatacatggcaacttcagttgtcatacaatgaacagaaggaaactaaaacgaatgacgagctggagagatgcacaagcagttttctgaagttgaccaagcatcatctttcctatttcaaggaagttcttagcccatcaattgagcggatacgcacatacgtggataatttggcagtcttaaactctagggaggagtcaatagaacatggaggggatgatgagatttctgagcagacaagtccacaaaagtcccttgaggaggaatatttggaaactgaaaagaagatcgtgactgccttcagcattgtagatcgcatgaagaagatgttttattctgagcaagcggctaattctaggcaagatgatgcagaggtcaggaccttattttctgagattgagaaactgagggaagtgtttgagtcggtagaaaggccgacactagacattgaagtccgcaaggcaaaggatccaatgaaggacaagtctggatcgaatcgttcagctaaagacaaatctgaatcgagccattcacctgttcaggtgccctcttcacctaaagatgtgcccgtggagtctccgaaatctccagtgaaacctgagcagacgctggacccagattcagagtttgcaaagttagagctagaattcggaaaagttaacagagaccatgaggagataggcggttgggatttcgacgagcttgaagaggagctgcgagctgacatatctaaatcagccaatccaaaataaccacgctcatcccgacatctgtgaactttccttgtgctggcttcttctggaaatttgtagactttgaattgttgaatgtacatagtattgttgtttc

SEQ ID NO: 36299 - DNA, 1117 bp, Zea mays subsp. mexicana
  Clone ID: UC-ZMROTEOSINTE077D06_FLI
gagatgggataagatcttctacacaggtaatggaactgtaggacgtatagtgatggcagcagccgcaaagcatctgaccccggtagctctggagcttggtgggaaatcccctgttatcgtggattcaaatgttgatctgcatgttgctgctaagaggattgttgttggcaaatggggatgcaacaacggccaagcatgcattgctccagattacatcataacgacaaaatcatttgcaccggagctggtggcctctttcaaaagagttttggaaaggttctatggggaggatcctctgcaatcagcagacttgtctcgtattgtgaattcgaagcagttcaaaagattgacaaatttgatagaagaaaaaagagttgctgacaagattgtgtacggcggcaaggctgatgagaagcaactaaaaatttctcctacactattgttagatgttcccgaagattcagaaattatgacaggcgaaatatttgggcccttgcttcctattgtgacggtcgaaaagattgaggaaagcttcgacttgatcaatgccaagcctaagccactagccgcctaccttttcaccaagaataggaagctgcaagaggagtttgtggcgagcgtccctgcaggagggatgcttgtaaacgacactgcgctacatctcaccaacccgtacatgcccttcggcggcgtcggcgacagcgggatgggctgttaccacggcaagttcggcttcgactgcttcagccacaagaagggagtcctgatccgcggctttggcggggaggcgaacgccaggtacccgccctacacgacggagaagcaaaagatcctgaggggcctcatcaacggcagcttcatcgccctcatccttgccctcctgggcttccccagggagaagcgttagatgctccggcctctttttggtttcggtacagcctttgtagtccctgttcgtcgtcaggtgcatagtatacaccgtcatatgctgtcaaatagatgcaatgcaacgactgcgcgccgtgcttgtgttgcaagcgtggataatgcatatattatattgtagcattgacatgatgtgcgttattgcattttactgtacgtaagggagttggat

SEQ ID NO: 36300 - DNA, 1021 bp, Zea mays subsp. mexicana
  Clone ID: UC-ZMROTEOSINTE077E03_FLI
gtttctgtatgctttgatctggcagcatttgttgttcagcgtgacagaaccttcccaaagggtgaagccagttgctgcctcagatattatgtgggcagaagcaatggggaaacttgaatgcatggatagtgcagacagggagaggctgtggcctcagcttgtgcagggttttaaagacctttcccatcggcttaagcttcaagatgaagtccttgtttcggacactgatagattgagcatgactcactctaatgttaaaaagctgcaaaggcatttccaagctgacacgtatccttggatccagcgattgaagcaacaagagctggctattcagagacgtcttttaaggtttgttagaatagtggaggcattggagaatcggggctaccgctgtcctttaacaaaggaggaagctgacttgtatgaaagattggttgttatattaaagcggctaaaaggacataacgctgatctttctaagagggtcaatacacttgtttcgacgtcgcgtcttctggctagcagtggtggtgctggtgggtctgtttatattcccagttctgcaaaagttgatgagcggagtgttacagagcttcttgaggccttacaacaacaaacagaggcagttgccaagctaggtaatgtgttgaagagggatatcagggacatggagatcatccagtcagaaggtacggatatggctgaagacaatgtggggagaagggcacagaaaatataagattgaagcatggtctttgtcgtagctaagtaataagcgggtgatggaagggatccatcgtcgctagaaggatctgagcctccaacttatttggagtaatgggccagggaaatgatatccctgtgtaactgctgcaggcaagcttgattctgcattctttgggaagctaaccatggtcaatcagtagtggtatgtgtagattgtatgttgaactgaggcagtattcttagaactcagctttctcctcgtgccaactacatttacagtgctgttttgttgctc

SEQ ID NO: 36301 - DNA, 809 bp, Zea mays subsp. mexicana
  Clone ID: UC-ZMROTEOSINTE077E04_FLI
caacatgttgtcgaatgtggcaacacaggcagggggctctagtgctgatttgaagagcgtgatggaaggattacaaagccctgctattgtagatacgataagcaatatcgtgcagaatgtggatgagcaagacctgggggccatgtttggttcaggcagaggacaaggtggcatggatttgtcaaggatgttgcagcaaatgatgcccgttgtatcccaggctcttggtggtgcaggggggtgttctgctggtgcaaatggtggacagcataggtcgcggccacagcgcattgacggtgaaggaaatgcaccagccagcagttctcagattgatctccatgaagctcgtcaaagcattgaacagcatgaatccccagagaatatcttccgcgctgtccttgaaactgctgctcaggcccatggtgaagataacagcattcagggcatggtcgaagaacttgccactgatcaagagcttgccgatgactacatgaaacttttgatggaacaagttcggcagaggatacagtcagagtcgcagtcggggagccagccttgaaggattgggcggcagggtcgtgtagccagccattcgctctgcgatatttatctatgggaaagaacagaaccaaagctgttgtctgggcgttttcatgattaggtgcccggtgtacatgtggcgttgtaattttccgagataatgtatctgcagcagcatatctcgtactctggttagaactgtttttttacgaattttgctagaggtacatacaacgagttttaaaggtggtgacgtctgaatttcgtgg

SEQ ID NO: 36302 - DNA, 1045 bp, Zea mays subsp. mexicana
  Clone ID: UC-ZMROTEOSINTE077F12_FLI
cttcactgacaaggacaaggctgctgcacatctcaagggtggtgccaagaaggttgttatctctgccccaagcaaagatgcacccatgtttgttgttggtgtcaatgaggacaagtacacctcggatgttaacattgtttccaatgctagctgcaccacaaactgccttgctccccttgctaaggtcattcatgacaacttcggcattgttgagggtttgatgacaactgttcatgccatcactgccacccagaaaactgttgacggaccctcagccaaggactggagaggtggcagggctgccagctttaacatcattccgagcagcaccggtgctgccaaggctgttggtaaagttctccctgatctgaatggcaagctcactggtatgtccttccgtgttcccactgtggatgtctcggttgttgacctcaccgtcagaatcgagaagggggcctcctatgaggatatcaagaaagctattaagtaagtgatcaacaatttatttgttttaataaccactcaatttatttctaaaccattgtctgaaggtaataagcaccccttgttggattaatcgccactaccacatgttcagtgtctatgtttggtaatgcttgctgttgattacagggctgcttccgagggtccactcaagggtatcatgggttatgcggatgaggatctggtttctaccgacttccttggtgacagcaggtcgagcatcttcgacgccaaggccgggatcgctctgaacgaccacttcgtcaagctcgtctcgtggtacgacaacgagtggggctacagcaaccgcgtcgtcgacctgatccgccacatgttcaagacccagtagaggggttttttccccctgcttctcatggatggttgctgcttgtgtatgccgagaataaatgtggatggcgcgtgcctctgggtcgccaggttcatgctgagtctggacatgttttgcacttttgcttcccttcctgctaccatctgtgacagaaccgctcgctaatatgggacctgagattagctttttgct

SEQ ID NO: 36303 - DNA, 818 bp, Zea mays subsp. mexicana
  Clone ID: UC-ZMROTEOSINTE077G12_FLI
caactctctcaacatcaacagggctcaataggtcaccagacaacccacactcgggaggcactgccattcagagcacccagttctactgggacactgctaatcctagcagctgcagcagtagaggaagcagcggaagcaacggcttgggatttgagctgcaaagcacaagctcgcttctggagagtagtgttttcccatggacagaattaacaccagataaaaatagccaagttcaccttggggaagaactcaagtggcccgacttgctccacggaacattcacagacacacctgcaaccatgcagaatcttagccagtcactgtacgaagatgttatcaaagccgagagccaattcaacatagagggcctctgtgcagcctggtctcaaaatctgcagccacagcaacatctgcaggtatcagatttgtatgacaaggatttgcaaaggatgtccttgtcttttgagaatatctagacagcatgtttcagcatgcagggaacagagaaatagcagaaagctgagtcaatgaagccttaaaaaatacaatatttcttcacagattcatttgaaggctatgtggaggtgtgttttacgtaggtacattcttatgatgaaacagagatcaatactgataactgttcaccagtgtacatgaaaaaagggaaaaaatgaatctatattacagcataatgtatagactagagaaagtacatcctaggagtttacctcctttcatttaaaagttgctgtctttatctgtacatgcatgtagctcggcttttttgtataagtgagtcatggttgatctttctctac

SEQ ID NO: 36304 - DNA, 1562 bp, Zea mays subsp. mexicana
  Clone ID: UC-ZMROTEOSINTE078E10_FLI
tttcctttctcaattgcattgtcatggaaacaagactcgcagaacagtgcaccccaacagacccttgtatttccaaaggggaatgtaattcccagcattaaagctctaaccttctataaatccagtacatttgaagttgatgttttgtatgtggacacatgcgactcgcaaattccacagaagataagcacttacacaattggacctttccaaccctccaaaggtgagagggccaaactgaaagttaaagtgcgtctcaacatccacgggattgtcacagttgattcagctatgatgctggaggaggatgtggcagttccagtctcatctgctaatgaagctccaaaggatactacaaagatggacacagatgatgcaccaagtgatcctgtctctggaactgatgtgaatgtgcatgagcctgatactactgaggctgctcctgcagctgaaaatggaacacaaaatcccgaggaaaaatctgttccaatggaaactgatgcaaaggttgagccatcaaaaaggaaagttaagagaacttctgttccggtccatgcgttggtctatggtgccttggctgcagctgacctgcagaaggctgtagagaaagagtatgagatggctcttcaggacagagtaatggaagaaaccaaagagaagaaaaatgctgtggaagcttatgtctatgacatgcgtaacaagctctacgacaggtacaacgattttgtgacccctgaggagaaggaagggttgattggaaagcttcaggaggttgaagattggctgtatgaagatggtgaggatgagacaaagggagtctatatttctaaactggaagatcttaagaagattggtgacccaattgaggcacggtacaaggagtcgacagaaaggggttcctctgtagatcaactggtctactgcatcaacagtttcagagaggctgctttgtccagtgaccaaaagtttggccatatcgacatatctgagaaacagaaggtcatcaatgagtgctctgaagtagagaactggttgagagagaggaagcagcagcaggacgccctacctaagcacaccgatcctgtgctgctcgtatcagatctgaagaagaaagctgaagcacttgacaggttctgcaaaccgatcatgactaaaccaaagccagctccgaagccacagactccgccaccacatactccacctccacagcctgaagcccaagcatctgaccctcaaacaccagagcaacaacaaagcgggactggtgcagctggtgagccgggtagtgagggaggtgtgcagcaggcctccggtgagcaaatggacatggacaggcccgatgattctgcggatgttgcggcataattgtggttgtggttgtcatctgtcttatgatcgatcaaaattttctgtttgtctggtaggtggatgagttaaggcaacagcatattctcccaagcgatttcgttttagggtttggaacattgagattgaggtaatgcgtcttgtccagcgttgttttggtctggactgtgaatcagaatagaaacgttgcatgatcg

SEQ ID NO: 36305 - DNA, 1261 bp, Zea mays subsp. mexicana
  Clone ID: UC-ZMROTEOSINTE078G10_FLI
tgtgtctcctcctttggagctgatcaatttgatgacactgaccaagcagagagagctaagaagggttcattcttcaattggttctacttctgtataaatataggttcattcatatcaggcactatgatagtgtggatacaagataacactggttggggaataggctttgcgattcctactatattcatggcattagctatttcattcttcttctcagcttcaaataagtacagattccaaaaacctggtgggagtccactcacaagagtgtgccaggtggttatagcagcatttcgtaagtggcacattgaagtgccacatgatacatctctcctatatgaagttgatggccaaacttcagcaattgaaggaagccggaagctggagcacacaaatgagctcgagttccttgatagagctgctgttatctcatctgctgatctgaagagtgaatcctttaccgacccatggaagctttgcacagttacccaggtggaagaattgaagatcctaataagaatgtttcccatttgggctactactatcatattcagtgctgtttatgcccaaaactcttccatgttcatagagcagggcatggttcttgacaagcgcattgggtctttcaacattcctcctgcatctctctccacttttgatgtaatcagcgtcatcatgtgggtcccactctatgaccgcatccttgtgccactagctagaaaattcactggaagggagaagggtttttctgagctacagcggatgggaattggattagtcctgtccattctcgcgatggtatctgcagctctagttgagttgaagcgtttagagattgccaggtctgaaggtctcattcatgagaaggctgctgttccaatgagcattctttggcaaataccacaatatttcttggtgggcgctgctgaggtgtttacttgtattggtcaagttgagttcttttacgatcaggccccagatgccatgaggagtttatgtagtgcacttgcacttattacagtctcactgggaaactatataagctccatcatactgacattggtgtcgtacattacaactcagggaggagatcctggatggatccctgacaatctgaatgaaggccatctcgaccagttcttttggttaattgcagggataagctttgtaaatttgatagtttatatgggttgtgctgtcagatacagatataagaaagcctcttgattatatttatgtgaactcttgtaatgtgatttcc

SEQ ID NO: 36306 - DNA, 892 bp, Zea mays subsp. mexicana
  Clone ID: UC-ZMROTEOSINTE080B12_FLI
ggtttggtctgtcagcttgcccgtcactgttgtgaatgcaagtgacagaaacccctcgattgaagccagggatataatcggttggataatatggttggtcgggatatgtgtagaagcagcagctgatcagcagaagcttgtgttcaaaaattctccaagcaataggggaaaatggtgtgacgtcggtctttggaagtactctcgccacccgaactactttggggagatattcctttggtggggagtatttgtagcatcgaccccagttatctcagatgccgaatggcttgtgattcttggacctatattcctgactcttctgcttcttttcgttagtggaatcccactccttgagtcatctgctgataagcgctatggacgattggaggaataccgtgtatacaaaaacactacaagccctcttatcccattgccacctgctgtgtatggttccctgcctgcgtggttcaaggttgccttcctccttgagctcccgctctacaatcctgggccgggaggtgatccaatcaaactagaatgagcccattgatgggtcagcctgatgtttatgttgctattgtgtgcgtggcagttattccaccttcgattccaaggggttacagtggagtttggcccctgatttatcgctcgcgaggctcaaacatgtatcttgttggttgaaagttagatttcttttgttgccctccctgcctccatgtgcagatgaatagatgcttagaaacctgaacgtggaacgtgttcaccttcctcgctccaaaaaagtgggaacggaacaatcttgtccatatagtgttaaagtatatttttttttaagtacggtaccacgttcctgtttctggttcccatcaatccgataactgattagatgatc

SEQ ID NO: 36307 - DNA, 734 bp, Zea mays subsp. mexicana
  Clone ID: UC-ZMROTEOSINTE086E09_FLI
cgaaagccctagtcctgccccctcgcaaaaccctagctccaaccaccatgaagggcaaggccaacgcctccaagaaggatgagggcaggctccgggccggcagcggcggcgccggaaagcgcaagaaggccgccgcgagcggcaagcccaagcgccctccctccgccttcttcgtcttcatgtctgaattcaggcaggagtaccaggcgcagcaccctggcaacaagagcgttgcggccgtgagcaaggcagcaggggaaaagtggcgctctatgtcagagcaagagaagcaaccctatgtggaccaagctgggcagaagaagcaggactatgagaagaccaaggcaaatattgagaaggagagcacaagctcaaagaaggctaagactgatgacgacgatggctcgaagtctgaggtcgatgatgaggatggcggtagtgacgaggataacgacgacgacgagtaaatagtatctccgctgtcgtgaggtagcaaatcgattgttaggtccccaattagctcactggtttgctatctttaatgttaagttgtttggaacaggtgtttatgaaggggatctattagtttcgtgaggttgttagtttagtgcattagcaaagaaaaagccgaatgctgctagctattaatttgcttttcttttgctaatcacttgtgtcacaactttctgtacctgtttcattgactaatctagtgactagtcagttatgggttt

SEQ ID NO: 36308 - DNA, 533 bp, Zea mays subsp. mexicana
  Clone ID: UC-ZMROTEOSINTE086F06_FLI
gtcattgagtcatactttaacaagcggatagtcggttgtcctggtggcgagggtgaggacgaacatgatgttgtatggttctggttgaaaaaagacgagccgcatgagtgtccagtctgctcgcaatactttgtgcttaaggtaattggtgatggtggagatccagatggccatgacgatgaagatgatggacatcactaaggatgccttgtggttctgaaaataagaatctgatgaggcagatgagtccatcacacttcttttttcttgaaccagactgcacggcatccttgtttatgagcagacatttggccatcaagcgggtggtagttaatcacctagggattttgtccagacaaaagcttattgagatttgacccatgcatttctttaagagcatcatcgaataaaagatgactgcatcagattgctttcttttgttaccgtatggccatcgggtgtgatggacatgtaatattcagtcatggaatggaacagacccatttctttattcagtgtgctggggaatttgc

SEQ ID NO: 36309 - DNA, 1076 bp, Zea mays subsp. mexicana
  Clone ID: UC-ZMROTEOSINTE086F08_FLI
ggcaaaaatcgccccatcccctgactatcactggctcactgcccttccacctacaggttccaggttaagtttaagattgataaagattgccgtcctctccctgagagtagtctcaagcaagccatcaaggaaaattacaatgcaaagagcaaatttgatccagagctcaccacaaaacaagtccaaaggttacttttgctgtttaagcctgttagtgcacctcaatctgtttcaaataatcaccttggagaaaggcgccactatgaaaaacgaaggaagccatatcgtcattttgaagaaaggcggcctattgaagcagcgcgtcggccacggtttgatgaggaaaggcgccctgcggttagacatgttccttttgaggatccatacagggcaccacgctatgctccagttcctgttgactctcagcatggccattctttggctagtgatcaccacagatattatcaaccagcacttacacctgagcctcggcagcttcctcttgttctagagcctcgctatgttccgccggccctagatcatcatcatgtgccagagcttcgacatgccccacctgcatattatcgcactttggctccatctggtgattcatactatcggtctgtggagaatctggtgcctgagcgatatgcagacaggaccatggctgacttgaccgctagagatccaattattagggatcacacagcactaccaggggaggcacttgctcgagcagaccgcttggatgatctctaccgttctgatcgtgtggaggaactctaccgttctgatcgacttgttaaccgtgctgtggaccgccctcatccagcctattttacagctgcttatgagaccaaccctgcttatgctgaaacgagcattaggcctgtctctgcaagggtcaatggacccagtgcggcagtttcgtcactctattccttcagtggtggcccagtatatcggtaatgaatgatcatggctctgttgaaagccttagccagactaagaagacagggtattcgtctctttaactgcaactgttgtttgccttagcttctattcggtattttctt

SEQ ID NO: 36310 - DNA, 1780 bp, Zea mays subsp. mexicana
  Clone ID: UC-ZMROTEOSINTE087A07_FLI
gctggctcgagtgcctgcacggctgcgccgagctggagaggaagcacctattcggcgctgccgacgccgacgccgaggacgagcccaccgtcgccgccgccgcgttcatggcgtacaaggagaggctcgccaacctcaccggagtcacgcgcaggttcatcgggaacctcgtcagagcgttcaagaccaacctgccggaagtggtggtgacgctgacgccgccggcatccgacttgcaacacatagtgaagagtggaccaacgacggaaagacaaacggttggcattggaggcatcctttctacagcaactgtgacaccacctgtttccaacgtgtcttctttacaagggacatcagcactgcgaccttcatcgtcgtctctactagtctcacaggaaacggacattgcaaatgatagcgtgcaagaacgacacagccctacaagaaaccttgcccaggcccagcatccagttcgtcctggcggtcatggcggcttcctcagcaatccatacccgagtttctttggagaggctacctcaaccgcgggaccattgcaactctacatgccaaacatggtggtgtcaggtggcacgacatcgacgccctctctcgccttctctctgtctgcgcctggacagcctattacgagcacagctcttggcggctcctttggctcaaacactcgcactgcatggggcaattcagatatggctgctgcgtcgtcctctcagcctgaccgcatgggcatggatcaacaagcaggaaccggttctgccatgaatctgacaattgggctgcatcccaatgcccagcagccaccaccaaaatatgtcaaaatctgggagggagacttatacgggcaaaggcaagggcagcctgtgtttattagtaaactcgaaagttggggtggaacagtgtccagaaaagttgcagaggattggccagaaactatgcagattgttcgcctcatagcccaggagcatatgaacaagaaatattctgaaagtcaatacgttggaaacacagactttctaatatttcgggctttaaatcagcatgggtttcttggacaactacaagagaggaaactgtgtggtgtgatacagttaccgtcgcaaactctactactttcaatgtatgacaaaacaagtcgtatggttggcatgctcttccctaagaacatgctgatgttcaggccagaggccttaactcagtcatcaccagtgcagcaggaagaacttatacaccaacaacaacaacaactacaacagcaacagagaaacatacatcgtcttcaacgacaactcatacagaagcagcagcagcaacatatgcagaagctactaccacaacgacttcaataccaagagcagctacatttacagcaacagatgacacaacaaatacaacagcaacaacaatctctataccagcaacatcaacaaatgcagcatcaacagcaactgtggcaacaaatacaacaacagaagcatcagttgcaacacatggatccccaacaacaacagctgttgtctcagatggtgggtacagaattaggcagtgatgatgacacaagggaagattgggtcacaggggctgggccgcatgcctagggaatcagggagggttaatgagggcttacactcactcacttgagggttaagatgtttcctagtgtttgtcgttaaatcattaactggtaacttcaaaaaaaaaccagtcatttgtatagttatacggatggggtaagagtttaaataacaccgttatgttatcgaat

SEQ ID NO: 36311 - DNA, 1450 bp, Zea mays subsp. mexicana
  Clone ID: UC-ZMROTEOSINTE087A08_FLI
gtgatgaagaagtataatccaaagcttgtttatccagtccaatcgcggggtaatgttgcaaatctgagggatattgccatggatagcttggagaaatttggagtgggtatcgttgatcctgacaagatatatgagttctacaatgatcagcacagctacctttctagtgtgggtgtggatggcgtgaaggttgatgttcagaacgtgttggaaactcttggacgcggatttggtggtcgtgttgcagtaactcgaaagtaccagcaggctcttgaggaatcaattgcccagaacttcaaaacaaacaacctaatctgttgcatgagtcacaattcagacagcatctttagtgccttgaagagtgcagttgctagagcctcagaagatttcatgcctcgggaaccaacactgcaaactctgcacattgcgtctgtggcattcaatagcctattgttgggagaaatcttcatacctgactgggatatgttccatagcaagcatgaatcagcggaattccacggagcagctagagccctgagtggaggtggtgtttatgtcagtgacaaacctggggtgcatgatttcagtgttctaaaaaagcttgttctaccagatggttcgattctaagagcaaggtatgctggtcgtcctacacgcgattgtctgttcactgacccagtcatggatggcaaaagtctgatgaagatatggaacttgaacaatttcactggtgtcattggagtgttcaattgtcagggagctggacagtgggtttggccagttaaacaaactgcttatgttcctaccaacataaacataactggtcagctctcaccgtccgacgtagaatctctcgaggagatagctggtgatgactggaatggggagactgcagtatatgctttcggttcatgttctctttcaaggcttcagaaacaccaaagtttggaggtgtcactgtctactatgacatgtgagatctacagcatttcaccaataaagattttcagcgaagtcgtccagtttgcgcctcttggactgatcgacatgttcaactccggtggtgcacttgacaatatttcaagcgttgcagattcttcagctacgacagttcatataagatgccgaggaccagggcggtttggggcgtattcagacaccaggccagagctttgcagagttgatgaacacgaagtggagttcactcttgcagaggatggcctcctgaccttttaccttcccccttcttcctcccaggacaacctgagacacgttgagattgtctacaaagcatcatgaacgacatttacccttatgattcttacgctccagcatgcaatttctggcgtgctcttcagtaaccaccagacatgcacattgacatgatgtaacaaagaacccattttgttggatttgactgtgtatgctgtgctgcaaatacctgttttat

SEQ ID NO: 36312 - DNA, 636 bp, Zea mays subsp. mexicana
  Clone ID: UC-ZMROTEOSINTE092E11_FLI
cgacgtctgcaacggcctcctcggtggcttcgcggcgatcaccgcgggctgctccgtggtcgacccctgggcggccgtcatctgcgggttcgtgtcggcgtgggtgctcatcgggctcaacgcgctggccgcgaggctccggttcgacgacccgctggaggccgcgcagttgcacggtgggtgcggcgcgtggggggtcctcttcacgggcctgttcgcgcgcagggagtacgtggagcagatctacggcacgccggggcgtccgtacggcttgttcatgggcggcggcgggaggctgctggccgcgaacgtggtgatgatcctggtgatcgccacgtgggtgagcgtcaccatggccccgctgttcctggcgctcaacaagatggggctgctccgagtctcggccgaggacgagatggccggcatggaccagacgcggcacggcgggttcgcgtacgcgtaccacgacgacgacttgagcttgagcagcaggcccaaggggatgcagagcacgcagatcgcggacgcggccagcggcgagttctagtgtgttggatcacaaatctcagtatgctagtcctacatcatgattgtacaataacaaccatgagatatactcccttcgttctaaggatt

SEQ ID NO: 36313 - DNA, 1093 bp, Zea mays subsp. mexicana
  Clone ID: UC-ZMROTEOSINTE092F05_FLI
ggccttcctggccgttgtcaccggcatggccgcgctcgtcttcatccgcttcatcgtccacgaccacgacaacctcttcgtcgctgccgaggctgcgcacgcgctcggcataggcgtcctcatctacaagctaaccaaggagaagacctgcgccggactatccctcaagtctcaggatttaactgcattatttctagctgttagactgtactgcagctttgtcatggagtatgacatccatacaattctggacactgctacacttgtagccacactgtttgttatttatatgatacggttcaaactgaggtcaacttatatggtggataaggataactttgcgttgtattatgtggtgttaccgtgtgctggactggcactacttattcatccgtcaacatctcataacattgtgaaccggatctcctgggggttctgtgtttacttggaagctgtttcagtgcttccgcagttacgcttgatgcaaaatactaagattgttgaaccctttacagctcactatgtatttgcattgggagttgcaaggtttcttagctgcgcccactgggttctacaggttttggacacgcgtggtcgtctgttgacagctcttggctatggtttgtggccgtctatggtgcttttatcagaaattgtgcagacattcatccttgcagatttctgctactactatgtgaagagtcttgttggtgggcaactggtgctacggcttccctcaggggtggtgtaagaagtgcagaaggatactctgaataacagttatgctctagtgcccaacctgggagcctttttttagctgatgatgttgcaagtaatgacaaaattgctgcaagggtcctcttaaaacatagtttgtcattgagacttcatagctgcgccgtttcttgatgcccaatcttcgagtactagcttcgtgtgactgtcgtggtggtcttagaatcaggtggttagtgatctcattggattatataattctataatgctttcatatgaaacagattgatcttgatgtatcagcagaactagccacgtgaaaatggttggaccaaggtcatcaggtttgtatttactt

SEQ ID NO: 36314 - DNA, 1033 bp, Zea mays subsp. mexicana
  Clone ID: UC-ZMROTEOSINTE092F06_FLI
cgagaaaccatgcctgctactaatttggcttcagtaatttcaaacaaaatgagaaatgagaaaccatgtctattatcgatttgtcttcgtttattagatttacagagaagctatgactttgatatctaatgcctaactttgaaggaaactcattggatggagctaacttgttttctgtttggtccatttccattttgccgtaccattttatttttagttattgtttcattaatataagttgtgtaccaaatacaccttactgtcaaccgaccaggtacatatacaaacctgacctcccctgcgtttatttagtgattcaaacttcaaaacttttatcctaagttactaaccatatgcactgtttatgtcatttacagggaaaagcgcaaggttttattgcaaccgtgcagtctgtagctatattgttggcaccactatttaagagtccactgacctcttacttcatttcagaggaaacgcccttcgactgcaaaggtttcagctttattgtggcgagtttcttcttggcaatctcgttctgcctcgcttggatgcttaacccaggaatgaaggacaagggcacaaaagctgtcgtttcagacagcgctgatgaggaagcagcgcaagcaccactactggcaaaatggaccagaccatgactccagctccaggaaactgagctataaagctcagctggagtgtgcgtaaaattgtaggatatgtgaattagagtgccaacaacatagggcttgcttgtacctgtagtatagtgtctgtacatacctcagaacgagaaagtcgataaagctcggtgttttgtgccatccagccttcactgtttcaggcaaatggatctttatgttattacttcttgttaaaagacgctaggaaatagaggtatgtccgcacttcacgggactttatccatctcggcggcctgttgtgtttgcccccttcttcgccacccacggcggcctgttgttcaagtacctgtaagggcgacaacatctcgaataactcctgccaaatcgcc

SEQ ID NO: 36315 - DNA, 636 bp, Zea mays subsp. mexicana
  Clone ID: UC-ZMROTEOSINTE092F07_FLI
gtccactctggccttcgtgtcgttcttctccatcggcctcgggcccatgacggcggtgtacacctcggagatcttcccgttgcgggtgcgcgcgctgggctacgcggtcggcgtggcgtgcaaccgcgtgacgagcgtcgtcgtctccatgaccttcctgtcgctgtccagcgccatcaccatcggcggcagcttctttctctacgccggcatcgtcgctctcgtgggtgttcttcttcacgtgtctcccggagacgcgcggccggacgctggaggagatgggagagctgttcggcacgattgacgcgggcaccgaagcagatcgtgactccgccgcgagactcctttcgtcagagttgaccacatgatactccttttgcgctttggtttgtctgcagtaagcggtgcaatcatatgtgcaggggcgggtgccagagggagagaggggatgaggagggccaggcgcccaggcacacccccttgcttggtgtgtacgttattttctggctccccctaggtgtttgtgattatgaatgtactttactctttactatagatagcagtatgtctgtgttaaagttaggtggtattcagatatatagattaattaaaacaactaaaatatggtttctctgt

SEQ ID NO: 36316 - DNA, 1227 bp, Zea mays subsp. mexicana
  Clone ID: UC-ZMROTEOSINTE092F12_FLI
gaagagagtactgatcaatgcattcacagttcgtgcattacgtgataccttccctccggccagagcagctggaatcatggcactgagtgtcactagttcatactatgaaatgacagagattgcaactcgcatcctgcctaacattgttgtgctcacatttgacccaaatagtgatgtccgaaccaaggcttttcaggctaccgatcagttcttgcaaatagcaaaacaacaccatgaaaagcttaatacgggagacaacagtgtggctgaaagtactggtgttaagttaaagcctggaaatgcaggtttacttgggtgggccatgagttctgttacacaaaagggtaaaccttctgaccatgccccaatatctactgcaaatgccaataattctcaagcatcaacaacctcgactgccactccagacactcaggcttccacactagcgtatgcaccatccacatccacctcgcttgatcaagctgcatcagcatcagcaaggtcgtcagtagatgggtggggtgagcttgaggatggtaatatccatgaggagaatagtagcgataaagatggatgggatgatgtagacccatttgaggacaagccatccccatctcttctatccaacatacaggctgctcagaaacgtccagtggtgcaaccaaagcaaccggttgcaaactcatctaaaccaaacacactgaaagcgccaaagtcagaagacgatcctttgtggggtcctatagctgctgcaccacctaaaagtgcagtaaaatctgcagacatcaagccatcaacatcacataatgatgaggatgacctctggggttcaatagcggcacctccaaaatcatctgggaagcctttgaagccagctgtagcgaatagtgacgacttatggggtgccatcgcagcacctccaccagcaaccaaagccagacccttagcctcgtcaagtaggggccgaggaacaaagccagcgcaaccaaaacttggtgctcaaagaataggaagaacatcttcaactggaatgtgacgtcttatcatatcaagtgttgtacaagaatgctaagttttcctttttttttccctgccttgcgttgagtctgtccaggatgacattctttgtaaactagtaaaaagatttatgtatatgagcacagttttgaccaatgtattagtattattttaccattgtgtattaaaatagatccagaagttttttgt

SEQ ID NO: 36317 - DNA, 1534 bp, Zea mays subsp. mexicana
  Clone ID: UC-ZMROTEOSINTE092H09_FLI
aagatcattcattgcttgattatgctccaagggccattcagcttacataggcatcaggctgccaatcagtcctcaaatctctctcaattattaagtttctaaattagcaccagctaatgtccgcttcccattgacagcagatcagccactttcctggctaggtgttcctgccttcttagtcctgcggctaaactgctttccccacatgacacatgcacgatccaatgctattgatcaggttcttgggacttctttgacaatatttttcttatattttatgcctcatatgtctgtgcatattggtgggcatgaacttctataagaaacagcggtagtagtcattctttgttattgtaaaagcaataaacactaaatgtattttttcatcagtaagctgcttattcagaaacatgccaaacagctctctgctgtaaatgtctggcctaatgtacgctgtacccccctcccccaaaaaaggaaagaaaattccacgatgcctattgagtcttgacctgtgttttggccttttatcacaaacattggttaattacttaattatggcattcatgtacatgcagatagataccaaagatattctttttatatgtggtggcgctttcgtggatttggagaaaactatatcggagagacggcaggattcttctattggcttcggcgcaccagttcgtgcaaacatgagggtcggtggcacttcaagtgctcaagtgacatcatccttgttggaatcggttgagagtggtgatctaatagcttatggacttatcccagaatttattggacgtttccctatccttgtgagcctcaccgctctaaatgaggaccagcttgttcaggttctcactgagccaaagaatgccctgggtaagcaattcaagaaattgtttagcatgaatgatgttaagcttcactttacagatggtgcacttagaataattgccgaaaaggcgatgtcaaaaaatactggtgcacggggtttaagaaccatccttgagaatattctcatggattctatgtatgagattccagatgcaaaatctggggagaagcgaattgatgcagtggttgtagatgaagatgcagtaggatcagtggaccaacctggctatggagccaagattctttatggtgacggtgctttggatcaatatctatcccatataaaggtggcgggagatggagtcgcaagcgaaatggatggagaagctgagctttcaccatcccgagccattggcatgtgattcctggctctgaccgcactagtgtaacctgtaaaatctaatcccagttgtatccatgtaagtagcagccttgtaaatgaaataaatatgtgcagcgtccattgttcttttgacacccggcacacgttgcccagcagcgctcgcgccttgcatgatttgaagcaggattcggaagagtgtattcgagcaggttcatgtatgaaatttcctataagtcccagtagactccttgtgtctgattggaagaaaaaattgataaaaggcttcaatcttgg

SEQ ID NO: 36318 - DNA, 767 bp, Zea mays subsp. mexicana
  Clone ID: UC-ZMROTEOSINTE101F06_FLI
ctcgaagcgtcaagtggctctatcgtgtcaaagccatcaaggacccgtctcgagcaccggtccagagcgcggaatatctgtacttcccgcagcaggtcggaaagcacaatttgaaaatgactgacggcattcaaatccaagaaatgccagtcagctctggaatcatgttcccgtggacaaagcaagttgtcattcacaacggcaagattcgctgcaagggctgggcctattctggaggaggccgatggccagagcgcgtggaattgtctgccgatggcggctttaactggtacacgattcctctggagaatctatccaagaaacggaaatggacttggcgaacatggcattatgacctgccctgcgatgttgagggctgggttgagattgttgtccgctgttgggataatgcaatgaacacccagcctcctgagattcgtacagcttggaactggggcttgcatgttacgcactcttgccaccgcatttcggtgtatagtgtcaacaggacccgaccaaagactgacgctcgtcttaaagagttcgaagacaggggcatcccatttggccctatcacggtgccacttgaattcccctcgcagacttgggaagattatgagaagttttggagggggcatgatcctcgtgatgctgaagatgactgatctttctgggaaattggtaaatgtgttaccagataagtttttgaagtttttttttcttctctctttgaagtgatggaacagaaagggggggaggaaaagaag

SEQ ID NO: 36319 - DNA, 1203 bp, Zea mays subsp. mexicana
  Clone ID: UC-ZMROTEOSINTE101H01_FLI
gccttgagcacgactgcggggtgcaccggggtattggctactttcttgagccactaatactgcttggtctattttcgagggcccctatatcgattcggcttaaaggaatcactaatgatacaaaggatccttccgtggatactttccggacaacaacattgcatatgctcaagcactttggtgttcctctggatggtttcaatctaaatattgacagccgtggatctcctcctcttggtggtggtgaggtgtttctccgggttcgcaatataaatagcacattgacggcagcaaattgggtagatgaaggtatggtgaagaggataaggggtgtttcgttctccactagagtatctccacagttggaaaaccgcatcatttatgctgcacgtggaatcttcaatcgtttcattcctgatgttcatatacacacggatcatagatctggttctgctggtgggaggtcaccaggctatggtgtatcgttagttgctgagaccactacgggatgcctgctctctgtagatgtcactgtgagttatcctagtgttgatgaaataaatgaagaatctgagaagcctgagctgacttctccggaggatcttggtgttcaagctgcatcaatgctactagaagaggtggctcaaggaggtgttgttgactctacacatcagggcctcctatttattctgtgtgctttatgcccacccgatgtatcaaaggttcgtgtgggacagttgactccatatggtatagagacacttcgaaacatcagagattttcttgacgtcaagttcatcatcaagcctgatcccaattcaaacaccgttactttaaaatgcgttggcgcgggagtgaagaatcttgctcggaagatttcataagcaacatgaccattaatctgatgaaggattcatgccacatcaagagactactatgagaccctatttgtaactgcaaacaacagtgtaggagtttcccttagctgttactgctgaaattctattcgaggtccatgatgtcttagacatcaccgatgtacatcagtattagaatggattgttctgatcatgatgccctgtattgtcgacatatttttgcatcacattgcttgtcgacacattttgcatcacattgcttcaccaactatgccatgacatggtgatatatagaaatgaagaaaaggtggcaaacgtccagact

SEQ ID NO: 36320 - DNA, 645 bp, Zea mays subsp. mexicana
  Clone ID: UC-ZMROTEOSINTE111G06_FLI
tcggtgcagagagattcaggtgccctgaggtcctcttccagccatccatgattggtatggaggctgctggaatccatgagacaacatacaattcaatcatgaagtgtgatgtggatatcaggaaggacctctacggcaacattgtgctcagtggaggttcgactatgttccccggtatcgctgatcgtatgagcaaggagatcacttcccttgcaccaagcagcatgaagatcaaggtcgtcgcaccacctgagaggaagtacagtgtctggataggagggtcgatcctagcctcgctcagcactttccaacagatgtggatatccaaggaggagtatgatgagtctggcccggcaatcgtccacaggaagtgcttctaggttccgcaagttcctcattgttatctagtctcaagttatgcccccgtcatttctcgagatatgtgtggcagatttgcctgcgacgtttattttcatcggacctgagtcttctcggggttagcagctacctttgtatgttgtggctccctgtgcgagcgtgctgtgtcgtatcacctggtttgtgagattagttgttgtcaaacttgcttggtttgattggttgtgcgtttaagagctgatagttatatacatatattgctttgct

SEQ ID NO: 36321 - DNA, 1553 bp, Zea mays subsp. mexicana
  Clone ID: UC-ZMROTEOSINTE115B12_FLI
gcgcagcaaaccgatggagcctgatcgtctttttgattgtcttccaagtacacttcgaccatcgtctgaatctcagcccgaaggtgggaaaaacccatccgagaatcagcaaaacccagaggctgttgtatatagtcctcctgctcttattgagccaaagtttgttccactactctctaaattagcacaacagttggttcaagctggatgccaacagcaatgctcagaaatatatagtgaagctcgttcttcagctttagaatcaagtctgaagaacttgggcgttgaaaaacttagcaaagatgaagtgcagaaaatgccgtgggaaattttggagtctaaaatagggaattggattcatttcatgcgaattgctgttaaacttctttttgctggggagcgccaactttgcgaccaagtttttgagtgcagtcaatcgttgagggataagtgctttgctgcaataacaaagaacagtttggctacactactcagttttggagaggctattgctatgagtaaacgatcaccagagaaactctttgttctgttagacatgtacgagataatgtgcgagcttcaaacagagattgataccattttcgttggagaatcaggttcgcaaatgcgcgactctgcactgagtttaacaaaatgcttagcacaaacagcacaaaagactttcagtgattttgaagaagctgttgaaaaggatgcaacaaagaatattcatactgatggaacagttcatcctttaacaagctatgtgatcaactatgttaagtttttgtttgactaccagtcaactctaaagcagcttttccaggagttcaaggaagatgggacaggttctgagctggcagctgtaacaatgaaaatcatgcaagccttacaaaataatttagaagcaaaagcaaaacaatacaaggatcctgcattgatgcacatatttttgatgaacaacattcactatattgtcaaatctgtccgcagatcagaggccaaagatttgttgggtgatgactggattcaaaggcaccgaaggattgtacaacaaaatgccaatcagtatagaaggattgcttgggcgaaggtgttgcaatgcctctctggtcaaggtttgacttcatcaggtggtagtggtcatgtaggaagtgatggtggcaatagcagtggagcttcaagaacagctgtgaaggagagattcaggtctttcaatgtgttgttcgaagagatctaccacaagcaatgtggctggtccgttccagacactgagctgcgcgagtcactaagactcgcggtcgctgaaatcctgttgcctgcctaccgatcattcataaaacgttttgggcctctcattgagaatagcaaagcacctgggaaatacgtgaagcacactcccgagcaactcgagctgctgctaggcaatttattcgaggggaaacaagaacgtgcttgatagtttggtaccgcccgcagcaaggatgtgctgctcttctatgtaaaatacaaaataataaaaataaaaaagatctggaggccctgttagcgtt

SEQ ID NO: 36322 - DNA, 1305 bp, Zea mays subsp. mexicana
  Clone ID: UC-ZMROTEOSINTE115E10_FLI
ctttcttttccaataagctaagcagcaggtgcaaagggaattcgagatccagagagctagctgatcgatggatccgaaagttggcgttgctctgaccctctccctcgtcggcgggctaagcacctcccttggtgcactgttggctatcctcaaccatgcgccaaacaacagaacactcgggattctacagggctttgctactgggctcatgctcagcatgtctttctttgacttggcttacgatgctgtcaacgccatcggctttctgagagggaacctctggtttttcgctggagcgctgctgttctcaacaatcgcggacgttttccctgagccagactgcagtgcggcagatgaaaatgggaagcagcagggtggaaaggaactcatgatgagacatcgccgaagagttatatttagcgtcattgtcacagcaattgttgctggtgtgagtttgcaaaacttccctgtgggcactgctgcatttcttggaacaacaaagggcttccgtgttggtttgaacttggctcttgctatagcactacactacattccagagggtatttcagtagctctcccagcatactttgccactagcagcaaatggcaagccttcaaattagcaactctatctggttttgcagagccactgggtgtgattattgtggcatacctattcccaagcaacttgaaccctgaaatactggaaggtctacttggattagtgggaggagtcatggcttttctaacattgtatgaaatgctaccactagcatttgaatatgcaggacgcaaggatgctgttaaagcagtatttgttggtatggcctttatgtctatgagcttgtattttctagatgctagcctcccaaaggagatgagcgcttaacataatttgcgcctaaaccaattgatgtgatggtcaagagaatgtcatcataggtgctgcaacaaggtgttagtgggaaggacgtgcatccaactcgagatcatgagagatgagatgtttccagcaacagtacacaatacagcgactgacagatcaagcttttatcaatgtccatgggacatgtgaccaaaatggtttgcaacacaatcatatttatataaaaaagggaagtacaattgtacaaacaggcatatgctaacaacatatcatgtacatttttaattagattcggtcatatcatgtacataaagggtaagattaagtgtatatactgaataaagtaggcacaaaccactgatacgatgtaaaataatggaaataaacggttgcatacatgatgaatgattgaccgacgt

SEQ ID NO: 36323 - DNA, 945 bp, Zea mays subsp. mexicana
  Clone ID: UC-ZMROTEOSINTE115E11_FLI
gtcactcgttggggtgtcacccgccttccccgcaaaacccacaggggtctccgcaaggttgcttgtatcggtgcatggcatccggctagggtctcgtatacggttgcccgtgctggtcagaatgggtaccaccaccgcactgagatgaacaagaaggtctacaagatcggcaaggctggacaagagacccacgatgcctccacagagtttgacaggaccgagaaggacatcactcccatgggtggcttcccccactatggtatcgtgaagggtgactacctgatgatcaagggatgctgtgtgggtccaaagaagagggtggtgaccctccgccagtccctcctgaagcagacttcccggctggcgctggaggagatcaagctcaagttcattgacacatcgtccaaatttgggcacggtcgcttccagactaccgatgagaagcagaggttctttggtaagctcaaggcgtaaggtgctgcggtgcagcgaaagtcccatttgtcaaaatcatcaaactgtgaaacctttgtttgttaccttgctgtaccaagttttgtagcaggatgatttgggagcatgttctggtcttcaatggattgttctacgcttcagaactgcagtgactatgttttgtgctattttggttgttttaatgccctaatcactgcaagtgttttggtgtttgatgatcaacataactatttatattaattgtttgctagtgtttaagaatatagtttggacggtgcaacgtggatttggatgaagacatcgtggtgatcaagaaaatcatcttaaagtagtacagtagaagatttattgaagacttatgtagatcatgtaagtgtccacacaagacttctcgttggattttggcaaaaaagaaggaaataatagatctatttgggctcgtcgagaaggactacctttcgatgaagtcgt

SEQ ID NO: 36324 - DNA, 1661 bp, Zea mays subsp. mexicana
  Clone ID: UC-ZMROTEOSINTE117G04_FLI
ccttgatgttcctattgacctatccaaggttctatttgtttgcacagcaaacgtagtagagatgataccaaatccattactggataggatggagatcattgctatagctgggtatataactgatgagaagatgcatattgctcgggactatctagagaagaatacaagacaggcttgtggcattaagcctgagcaggttgaagttacagatactgctcttcttgctctcattgaaaactactgtcgagaagctggagtgaggaaccttcaaaagcagattgagaaaatttaccgtaagatagctctgcagcttgttcgccaaggagtatcgaatgagccagaccatgagtctgtcagtgcctctgtaactgaggaatctggtaatggtgataacaccacaacaaaagatgagattttgaaggatcctgctgtagaagatgcttcagtcgccaacaatgttacaaatcctgcctccgaggaagctaatgaagaaaatttgacaaatgaagcagcaaaagaagacaccgcatctaagggcaacaagggcactgatagagcagcggacaaggcaattgagaaggttgtggtcgattcatcaaaccttggtgattttgttgggaaacctgtgttccaggctgagcttatatatgagcatactccagttggagtggtcatgggtttagcttggactgctatgggtggttctactttgtacatcgaaacaaaaaaagtggaggaaagggaagggaaaggtgcacttgtgcttacaggacagcttggagatgtcatgaaagagagtgcccagattgcacacacagttggcagagctgtattactggagaaagagccagataaccatttttttgcaaactcgaaggtgcacttgcatgttcctgcagggtccacccctaaggatggccctagtgctggatgcaccatgataacatctatgctgtccttagctatgggaaagcctgtcaagaaggacctcgcaatgacgggtgaagtaacactaaccggaagaatcctcccaatcggcggagtaaaagagaaaacaattgcggcaaggagaagtgcgataaagacactcatatttccggcagcgaataaaagggatttcgatgagcttgcttctaatgtgaaggaaggcctcgaagttcattttgttgacacatacagtgaaatatatgatttagctttccagagtgacgccgggacagaaacaagctgagatgatttagctttatgggattgagattttttccccctagacccacgacagaaacaagtccgtcaagaggcaggcaaaccagaccattgtaaccaagatgggtggagttaattgatattcacgagaaaaatgaaatccttttttttttgcccccaatataacatcattgaatttaagagatttttggctaggttgtacgtactagtgtggttgcccatctaggtggtatagcctatattattagtaggaataagaaaagcagcatggatgcaccatctgttatttatatttattgatttaagagtgttctctaaaagcagcaggtatgccccagttgttattcattaaatttgtttcagtgagtgttagttacctttggatactgtactgtgcgtcatcaatttataggatgttttgattttttttggat

SEQ ID NO: 36325 - DNA, 579 bp, Zea mays subsp. mexicana
  Clone ID: UC-ZMROTEOSINTE117G07_FLI
ccggtgggctcgtacgccagaagatgaagtacctccgctttctccgcaagcggatgaacaccaagccatcccatgggcccatccacttccgcgccccgtccaagatcctgtggcgcaccatccgcgggatgattccgcacaagaccaagaggggggaggcggctctggcgaggctcaagacgtacgagggcgtcccgccgccgtacgacaagaccaagcgcctggtcatccctgacgctcttaaggtcctgaggctgcaacctggacacaagtactgcctccttggtgagctttctaaggaggtcggatggaactaccatgacaccatcagggagcttgaggagaagaggaaggagaaggccaaggtggcctatgagaggaggaagcagctggccaagctgcgcctaaaggctgaggctacagccgaggagaagttagggtcccagctggacattcttactccgatcaagtactgaatttgtggaacatctgatccatcgttttaaaattgtgacagtataatcttgagtgctattccgaacacattttttagccggtgaatgtattgtttgttttatc

SEQ ID NO: 36326 - DNA, 857 bp, Zea mays subsp. mexicana
  Clone ID: UC-ZMROTEOSINTE080C02_FLI
tctcggccatgaacaagctgaaaaatatggctctcagggagaatccagccgctcaaaaccggccgctctgtcctgattgcctggtgcttgtttgcattgccgccattctgggcagagaacgagcagggcatattcgaagaggttttgcacgggaggctcgacttcgacgcggagccatggcccagcgtctccgaaggcgccaaggatcttgtgaggagaatgctcatcagggacccgaggaagagactgaccgctcatgaagttctacgttggtggtttggctcctgacaagccgctggactcggctgttctttctcgcatgaagcagttctcggccatgaacaagctgaaaaatatggctctcaggtgtgaaaagtagcgctcagaagtcacttctgcacctttctgagcatcttgaagtttcgtcgccggcggcaacaacctgtctgtagcgattcgacgttcatgagcgccatgatacggtggactctgacattctcacgaaaggtgacaataatcccggggatgaccgagtcctgtatgcacatgggcagctttggctgcagcgacagcacatcattggacgggctgttggctatctgccttatgctgggtggcttacaatcgtcatgacggagaaaccagtcctcaagtatctgctaattggtgcactggggctgctggtggtagcatctaaggagtgacgttaaaggtaggatggatgaacagtgagaagagtatgcggagaggagaaaagctgtagagaaacacaattgttatgttgaagaaagctgtattgcatacatgatacaatgttgaagtacaagtatatataatatctcatcctgtgttaaact

SEQ ID NO: 36327 - DNA, 982 bp, Zea mays subsp. mexicana
  Clone ID: UC-ZMROTEOSINTE080E04_FLI
cccgtctacaaccacgtcaccggcctcctcgacccgcccgagctcatcaccccgccgaacatcctcgtcatcaacgggctgcacccaatgttcgatgagcgcgtgcgggacctgctagatttcagcatctacctggacatcagcaacgaggtgaagcttgcatggaaaattcagagagacatgggagagcgtggtgggcacagccttgagagcatcaaggcctccatcgaggcgaggaagcccgacttcgaagcttacattgagccgcagaagcagtacgcggacgccgtgatcgaggtcctgccgacgcagctgatcccgggcgacgacgagtgcaaggtggtgcgcgtgaagctgatcatgaaggaaggcgtggagcacttcgcccccgtgcacctcttcgacgaaggatccaccgtctactggatcccctgcggccggaagctctcctgctcctaccctggcatcaggttcgcctacggcttcgacacctacttcggacacgaggtgtcggtggtggagatggacgggcagttcgacaagttggacgagctcatctacgtggagacccacctgagcaacctgtcaaccaagttctacggggaggtgacgcagcagatgctcaggcacgccgacgtccccggcagcaacaacggcacggggctcttccagaccatcgtcgggctcaagatcagggacctctacgagcagatcgtcgcacttcgctgagagggtcgccatgacggccaaccctatagcaaggtctcgtgatgcctggtcgagccagtagtacgtgttgattggatgagagccggcgcgcatataccgatagctgcatcctggccccatgggatacacgtctaggttgcatctccatagatgcaggcaaaattatttgatttagcttggattgcatatccacacatgcaggcctcgtttttttgtcccatacaaacaatcaaacgcagaccgatacttgatc

SEQ ID NO: 36328 - DNA, 769 bp, Zea mays subsp. mexicana
  Clone ID: UC-ZMROTEOSINTE080E06_FLI
ccggagcaggagcagcgatgaagaagatcttcggcgccaagaaggacaaggggccgcccccctccatccaggacgccaccgagcgaataaacaagcggggtgagacggtggacgagaagatcaagaagctggacgaggagctagccaggtacgaggagcaacgcaacatgttgtacaaccaaacctacaatctcgaccaagttggctttgctgccgatggcctcaaggatgctcagcagactatgaatgcaatgaaggcagcaaacaaggagctcaagggaatgatgaaaactgtcaaaattgatgaaattgataatatgcaagatgaaatgacagatctgatggacgtgagcaatgagatacaagaaactcttggtagaagctacaacatccctgatgacgttgacgaggaagaactgatgggcgagctagatgctttggagtctgatatggaatttgactcagctgcagtcccctcatatcttcaaccagattctgactttgatgctgacctcaacttacctgctgcaccaagtcgccctgcaatggtcccagcaggcgggctgcaggaggatgagctaggattgccagcggtgcctcgggcatcacttcgcagttagaaataatcttgtgtttcgattttaagttgatgtgaaaactctgtagtttgtgtctgagtctgaacaatctaatgcttttcgtcatggtaatgcttcagtttattgcacttcctgttgctgctaatgtttcaggttcccttttttttgtc

SEQ ID NO: 36329 - DNA, 654 bp, Zea mays subsp. mexicana
  Clone ID: UC-ZMROTEOSINTE080E09_FLI
ctggcacaaggaaggaatcaaggaaagaatttgagaaaagccacaagattcatgacacgaagagcaaccatgacttatccttggagataaaaccatatatcagcaaacggatgcgtgtaggtgctgagaaagcttctgacaaagctgaagagcttggcagccacctaccgcagtaaacaggtgtacaacccggtggatgtcgtcgcgtgggcgtctctgcggaaaaagccgccagggcgcggcttgattagcgattggtttggtttccatgtcaggtcgtgcctgggaagcccgccgcgagtacggaatgccaagccagtaggggtagtttttgttctcggcacgaagccatttgatgttcgttttgtgcgggtacggtttgcggcttgatcgcgattggcctcgtagcctttttgaccgaacgagagaagcagcagctctgcaaagctacctccagcctccaggttcattcgagacgggaggctgggagggatagcgtcattgcggccaatggttttcggttcttttccacttgtgcacaacgtcataaacccgagaaactgtttacagcctcacagggcaccacctctcatagaaccagagactccggttccgttggggtaaaaccgtaaaatggccgccgcttgtcttgtt

SEQ ID NO: 36330 - DNA, 540 bp, Zea mays subsp. mexicana
  Clone ID: UC-ZMROTEOSINTE080G10_FLI
ctcccaccacccaatcgcgctcgcacggaggcggcgccggcgcggacggacagattccattcacctcccatccatttctcaccagaagcgaaggcggaggcggaggagcggaggtaggagatctcgagcaagccggaggcggaggagatgaagacgttcgacccgtggccggtcttcttccgccgggagtggaagcgcaactggcccttcctcacgggtttcgccatcaccggattcatcatcacgaagatgacggcaaacttcaccgaggaggacctcaagaactccaagttcgtccaggaacacaagaagaagcactgacgaaccaggtgaaggagttgtcagaaacgcatgtttggccagccagttctgttatgcttttgaatgaaaaatttagacccctctttctcgtttccttaatcgaaatgcttgcactctatgttccatttgtaatgtaataagaggcaaatggattgaaccaacaacaatcaacttctgattgaaaaatatcgatgtgtggcctgaatgttgtgggatcgc

SEQ ID NO: 36331 - DNA, 1367 bp, Zea mays subsp. mexicana
  Clone ID: UC-ZMROTEOSINTE080H05_FLI
cttgaccttggcggaacaaactttcgtgttttacgaattcagtttgggggcaaggaacaacgaatagtcaagcaagaatctaaaacggtatccattcctcaacatttaatgtccaggggatcaaatgagctgtttgattttattgctgctgctttagcgaagttcattgcctctgagggtgagggcttttatcttcctgagggcatgcaaagacaacttggttttacattctcctttccagtgaagcaaaattcagttgcatctggtactcttatcaaatggacaaagggttttgcaattgatgaaatggtaggaaaggacgtagtggcagaattaaacaaggctatcaaacgccaaggagttgatatggaagtcacagtactggtcaatgatacagtagggacattggctgctgggagatatgtggataatgatactgttgctgcagttatactgggtactggcactaatgcagcgtacatagaacatatggactcaattcctaaatggtgtggcccacctcctgagtctggaaacatggtgataaacatggaatgggggaactttaggtccacccaccttccactgactgaatttgatgtagccttggatgcagaaagtttgaaccctgatgaacagatttatgagaagttgatctctggcatgtatatgggggaaattgtccgaagggtcttgctaaaaatggctcaggatgcttctcttttctcagataatgtacctctggaacttgaggtcccatatatccttagaacatatcacgtgctgatgatgcatcaagacacatcgcctgatctcagaacggttggcaacaagctgaaagaagtcttcaggatagaagacacctgtttcaaaacaaggaaattggtagtggatgtctgcgaggttgttgccagtcgcgctgcacgacttgctgctgctgggatacacggcatcctcaaaaagcttgggcgagacgttgccagcccagacaaacaaaagacggtgattgctgtggatggcggagtttacaagcattatactttcttcgcccagtgcatggagagcactcttagagacttgcttggggagggagtggcgtcctctttagtgataaaacttgccgaagatggctcaggcactggagcggcgctcttgtcagcctcctattctcaacgtctccaggccgtggatgattaatttctgcttgtagttccttcagattctgaaggtatagcaggtatacaattgctccagtggatatttgtctataacggttataacattcaactgccacattcttttttctgtcaggcctgtgctcctgcagtgcccatttttaaggggttgtacacgtcacttaagactcc

SEQ ID NO: 36332 - DNA, 1223 bp, Zea mays subsp. mexicana
  Clone ID: UC-ZMROTEOSINTE080H06_FLI
ggatatttcatttggtctgcaacccctgtctaccgtcaagagcaaagagaccaagatgactggaatgcaatggttactctgactaaatcaatctgctggagaacagtggtaaagtctcaagatgtcaatggaatttgagttgttatatatcaaaagccagcatcgaattcttgctatgctgaaagaaagaccaatgagccccctctatgctccgagagagatggatcacgctttccttggtatgctcctcttgatagttgccttttcacaactgccattaccacttcagatgaaagatataattggcctgttccatggcctgaaagacttgatgttagctatgcaagtgtacctgatgattctgcttctaacaaagagaagtttgaagctgatacaaagtattggaaacagctcatttcagaagtatatttcagtgacttcccacttaattggtcaagcattcgcaatgtaatggacatgaatgctgggtttggagggtttgccgcagcactcattgatcaacctttatgggttatgaatgctgtgccaattggtcaaccagataccttgccacttattttcaacagaggtttgattggggcatatcatgactggtgcgaatctttcagcacctaccctcgtacctatgatcttctccacatgagtaatctcattggaaatcttacaaacaggtgtgacctcatcgacgtggtggttgaaatcgacagaatactgagacctggaagatggtttgtgttgaaagacacgttagagatgataaagaagatacgcccaatcctgaagtctctgcactatgaaattgtcgtcgtgaaacagcaatttcttgtggctacaaagagtttctggcgtcctggcaaaccagcttccacatgagggtgtgacatatagatcgtactttcaggggagtcttcaacaaccaacgattctattgattctttgagacctgatcaaactaattctttctacaacacagtcaatgtagactattagttgtataagtatagaaaatacatatggtaagttgaggtaataccttttttttttttgccaaagcataataacaaggatgttatagacttatgcagcagtaggcaagttttgacaaatacatacaaagcgaagggatcatgaaacgtgttgtgtatacttgctcgttgataacttttgtaaaaaggagtttgaaataaccttgtactcagtac

SEQ ID NO: 36333 - DNA, 1508 bp, Zea mays subsp. mexicana
  Clone ID: UC-ZMROTEOSINTE080H09_FLI
cttgacatcactgagcattaagaaatgtgctgctgttactgctgaaggagcaaaagcctttgcaaacttagttaatttggtaaacttagacctcgagcgttgtccaaagattaatggtgggcttatacatttaaaaggcttgaaaaaactggaaaaactgaatctgagatactgtaatggcataacagattcagacatgaaatatttgtcagatctcacgaatttgagagagctacagctctcttcctgcaaaatatctgcttttggtgtttcttatctgagaggtttgcacaagctaggtcatctaaacctggagggctgtgcagttactgcagtttgtttggaggttatatctgagcttgcttcgttggtcttgttgaatctgagtcggtgtggcatatgcgatgaaggctgtgagaacttgaaaggtcttacaaaattgaaggctctaagtttagggttcaaccaaattacagatgcatgtttaattcatttaaaagatttggtcaacttggagtgcttgaacttggactcatgtaagattggtgatgagggtctatttcacctaaaaggcctcatacagctaaaaaacctggagctttcagacactgaagttggaagcaatggacttcgtcatctctctggttgatttaaaacgcctgcagaaatgtctgcgtaatttgcagagcatcaatctctctttcacattggttactgacattggtttgaagaagatctctggcttgagttcactgaagtctcttaatcttgacaatcgccaaatcacagatactggtttagcgtctcttacaggtctcactggattgacacacctcgacctatttggagctcgcataactgattctggcatgaactgcttcagatttttcaagaatattcagtccctggaggtctgcggtgggttgattacggatgctggcgtgaagaacatcaaggacctgaaagctctgacgttgctcaacctatctcaaaacggcaagctcacggacaaaaccctggagctgatctccggcctgactgcgctggtgtcgttgaacgtgtccaactcccgggtctccaactcgggcctccaccacctgaaaccgctgcagaacctgcgctccctatccctggagtcctgcagggtgacggcaagcgagatggataagctccggctggtcgccctccccaacctgatcagtgtgcggccggagtgatacgaccgccagcgctcccacagcgacctgtaactgtggagcaagtggcgcctggctagagcaggccgccttgtacatacttttgcaagaacgaggtgtctgtacatattgttcgtcgtgtcgtgtcagtgtgcctgatggcaacgggctaatacgtccgtgccaacgtgtgcatggtatcccacggaccctgtgatggtaaggagcacttgtaaatatgccgtgcttcctctccatgtggggtgctgctgtataaatagattggtgcattgctaaatacctctgcttggt

SEQ ID NO: 36334 - DNA, 998 bp, Zea mays subsp. mexicana
  Clone ID: UC-ZMROTEOSINTE080H11_FLI
cgtccaccggcgcccacagactaccatgcctccgtttcccgacccttcgctccgacccacacaggcgtatgcgtacgaggttttgcaagcttgacgtacaatgccagcagcatgattggccacaatctcgaggggccgttgccagtccacattgtgaaggttctggatctcgtagtacatatgaatcatgctagaccgatgtcaacagcagcagcatcaaaggtgcctgttggagcccggaaggttggtctgaaggttgccatgatgagtcctggtttcgtatatgagccgtacagcccacgggaacgcattcccttctggaaaagatggtttacactaagtggctggagaaggacaaaggaggacatcattttggagatgaagaacgcatatgctgtttcaaggctgaggaagaaaactgggtataccaaaaatcaattctacgatcaagcattaaaaatatacaaggaggttaacactttgatggcacatggagacacatcatcgcttcggaaaattctgacagagaggatgcattctactataaaaaatgaactaaagagaagacagtccatgtggaattctgtacactgggaactggtggagcctgctgttagtatcagaactttgagggctcgcatgattggcctcgataagaatgacctggataaagcttttatacagcttacacttgagtttgttaccaaacagaaatttgaagcctataattcaaagggtgcagttgtgtctggagacaagtcgaaggaggtacttgtgaaagacatttgggtgtttgagaggtccctttttcaccccggagcatattggcgtgtatgcggaagaattacactgtaaccatatctgttttggtgtccacgttcaatttctcaccctggagctgaacaagagctagttcaataaaattttgccctgaactccttttttttcatccggttctaactgatgcctaacagggtctatgcagtgatgtagtattt

SEQ ID NO: 36335 - DNA, 1290 bp, Zea mays subsp. mexicana
  Clone ID: UC-ZMROTEOSINTE082B10_FLI
ttctgatgctgccaaactaggtccataagtattatttgcccatctatgatattgttccatgtacgactagaagttcaaatatatggaaaatgttctcttaacgtgatattagacagcaccccgatttaaaatatcttaaccttcagtattgtccatgtaacaagaacttgactggaacatcaagataagcaagtgtaaatacccaccttggaattggtagttttaattcaaacacatgccttttgtatgttgtgttcttgcctccttggtattataacatgcttgcattaaatgatttattgaaggtaaattctggaagtattgtgattcccataaaacgtgtccttacggatcatgtgttaagggtgtggatggttatgttgcctttttcacaaactcaatttatgatcaattgcaagcaagatgtggtatagctgttggaatgcggatcacgaaggtggtgtcttcactcttcagcatgttccaatgctgtgtgttccagatcgagttgctatcaggagtctattggtttgcatggaatcgatcaggtttagcttggattcatgaataattgatttgtgtcgtccggctgttcgagctacgtcatcatgattagaatctacattttttcctacgcttgtatttaaaatggagtttacaaagataatcgttagaatggaatcgaaggctcattttttgttctatctgataatagccgaacgaatgaaatgcaatttaaatttataagatattgaagttaataataataaatattgtttgttttcatgtaatcattatgtataaacattatatcgaataaattgtggttcgttgcaacgcacgggcactcacctagtaggtaatgaagatggatttgttttcagtctgctgtaacttttcttaaaattgagcacccaggtgccttttcagcaccatttaactgagcccttatctcactgaaaaaaaactactgtgctacattgttccacaaaatgatcctgagaactgctttggtagcccagttcaatattagggtgtctcacttcctgatttcccatatgcattctgctactaatgatttcttcatggccttacatagcatcctggaacatagaaacaaagctactgttggcattgggtctggcagtggaggcaacaaaagatactgtatcagtgtttgcagcttcatgttcacacaacagatgtgcttaaaggagggaggttgatgcggactggcagcttgctgtttctcctattcttcaaggaatgaggatgcatcatttgttctct

SEQ ID NO: 36336 - DNA, 1962 bp, Zea mays subsp. mexicana
  Clone ID: UC-ZMROTEOSINTE082B11_FLI
ttgttttgcgctcttattcaaaacccaaatctgtccctcctctcagattattgtgagtttatccccgcgccaatccatctgtccatggtccgcgtgggcttgtcttccgcgcccggggtcaatctgacagagcctatcttttacttctgtgctgcagcaaatcgataatgtttttgaccaactgatcaacaagatagaacatgcggattttgatacgcggcctttcttgaaacaattgaatgtgttaggccgctatgaaccaatcaagcggagtatccttgccaactagacttttgaatcttcactgtaatataggagtattgtttttctcaagataatttatttgcacatttgcctcgtttaattcttactgttcatcatcaaaatatcatattctgacacgtccttgttcaacatattcaaactttctattctatgcctcttttatcagtcaagttagtatttcatccaacatatcctgtaacttgactacattacatagtcctagcctgaagtagaaatcagtgcaggaacgaaactagcaattcaatactgtgactacaacagggatatgtcttaatgttatatcatttttctttttcttattgagagtggagtcaaattgtttttctagcttctgagttctgagtgaaaaaagagaatcgaaatattactataccttggtgaatttgaatatgtgcctttttatggatatgtccacatttttattgcctttaattctactaagatgtatattgcactaagagacgcattgaagattatggcatttcttgtcactgtaagccttctcctggttcatcagttgtgtgtggcagagactgccattgtgggtaagtttccaaacttgtaagacacactagagcattgatactgctaattccgtaaccagttctgttttctatatttatttagaaaaactggatgtgaaaaaacatatgaatctgttagctgttggattattacacctgtgagttttatcattattgagatattctgacatgctgaaactttgctgatgcagcatgcttttctcttgctgttcatcacaatgtgaatgtgatgacacatgcaccaataaatcattccagcacagacctcttaagaaaaccaaattgattaagacagagaaatgtggtcatggattggttgctgaggatgaaataaagaaaggagaatttgttattgagtatgttggagaagtagtaatatggtcattgatgcaacaaacaagggaaaccggtcccgattcataaaccatagctgtgaaccaaacacagcgatgcagaaatggactgttgatggagagaccagggttggaatttttgcacttcgtgacataaagataggggaggagctgacctatgactataaatttgtccagtttggagcagctcaagtttgtcattgtgggtcttcgaactgcagaaaaatgctaggcacgacgaagtattcaggaagctcacagaatcatcatgccaagaagaaaaagcggaaaacaagttgtgagaattgcatacagcagtttcttcggctgtggcatccacataaaaaaatgtatgttggttgttggataattgacttcgatcaagaaactaaaatgcatactctgaagttcaatgatctccatactgaaaagttcaatttgaaggaagaagaatggcacttcttagaggtcgattttgatgaagattgatcattgaaggtaactgcaagagtttgactgtcatggtttgtgacagggttgccatggtttgctgcaccgccggcctactagttgggggttcatttgcgatggcagcatagacagacggacggccagttttctcccattttggagtagtagtccaagcctgaactgtgacattcgtgcttgcttatattatacgtgaaagtgtacctgagagcagattatacgtggaagtgtatcagcgttgcatatgc

SEQ ID NO: 36337 - DNA, 725 bp, Zea mays subsp. mexicana
  Clone ID: UC-ZMROTEOSINTE082C01_FLI
ctcctgatgattcatcttcaaaagaacctaacaacattgaaaatgtagttgtcgatgaagagaagggctctgtagtgactgccaaccgacctgattccgtaactaggctcaaaagagcagcagctactgctgtttcagcagctgctgtgaaagctaggtttctcggtgatcaggaggaatatcaaattcgaaggctgacagcacttgtaatcgaaaagctgttccaaaaaatagaagtgaagatgtcgttgttttcagagattgagcaggtggtctttcgaacgagagagtacaccgagaagaccagaaagaagctcctgaaggaacgaaatgcgattattgcagctcggatgggcgcattgccgtctaggccaaaccagccaggtgtagccggaaacaggttaccacctgggtatggcaaccctcctgtaaggcctccaaacgcaatgcctcggcccaccagctgaggaaattccggattccggacacccagtgatctatacctaccccattcttttagaagcatacccgaaagactcaaacctgccagcttgttgtagcattttttagaaagtacattgtacaattgtctgtataactgcttctatgaaaattcaccaaacctccacaactgttttaaacattccatcagataggaaaattccatttctctacaatgaacagcccacttgaccgttagcaagattatttctgctcaatttact

SEQ ID NO: 36338 - DNA, 862 bp, Zea mays subsp. mexicana
  Clone ID: UC-ZMROTEOSINTE082C05_FLI
caatgatggccaatgcaagcatggtggttctgtggagcgaagtatctcaaaggtgtccagggaagtttcagaagaaccttggcctttaaacgatcttaattccttcaccgctatggatgtaaaggatgatcctgtgcaaacggctccagatacttctcctcgggcaaggcacatcacagatcattgttctattactcaagtagttgatccaccatacctgtcccgaccagcggcaaagattggtgctttcagaccatattatctaggacacacggaacctacccaacaagaaatgccaggtgctgtcgtcaagtttgactcaactcataaagtctcgactcctgaaagcgaggtattcaagtttgttgatcctatatgctttgctgctgaggtgccagacaaatgtgggtatggttgctgcggtgctcatgagcagcatcgtaagaactcattgctgggtcctgagttcagtgagtttgaaggtcatccacctgttttaaatattagctttgcttcattggtatcagaaattagcagcattgcctggatgagaagtggtatgcaaagcagtgattccagcaacttgatgcaatcaattccaccaacctgacaaagtaggaatcttatgtcagtggcggatccagaaacagatcaaatgaggggctaagttatggattggggaggctggagatggctgcaatgcgaatgaatggaaccaccatgtaaataatgtgcgaattacaaacgcgtgtgggttgctgtgtgccgtgcgcatgggtgatgaactgatggacctgcattgtgctgttatgcgcctgcatcttgtaatcgtgggccttcttcgtattactatgctgaaatc

SEQ ID NO: 36339 - DNA, 851 bp, Zea mays subsp. mexicana
  Clone ID: UC-ZMROTEOSINTE082C07_FLI
tgggaacaagaaatgcagcagcagcagcagcaagcgcagcaatatcagcagcagatggccgggtacacgcagagccaaatgccgggcaccgtgtggatggtgccgagcagcaacaacacgcagggtggtggtgcaccttccagcggcggcagtggcggaggcaccggcgagtctatctggacgttcccgcagatgggcagcgccaccgccgcggctgccgtgtaccgggggagcgtgccgagcgggctacatttcatgaacttcccggcaccggtggcgctgcttccagggcagcagcttgggctcggcggcggcggcggcgggggcagcggaggcgaggggcacatggggatcctcgccgccctcaatgcgtaccggacacaggtggtaacggatcccgcggccagtcatggcgggggaggcggaggcggcgggtctggccagcagcagcagcacggtggcgggcgcggcgaccggcacgagagcatgagcaccagcgactcgtagccgccgaccggggagtcgtcaccgaagataccatgcatcgctctggtgtggcttttgatctgttctttgtcttggtttcatttttttttcttgctttcctttttgtggtttccttcctctctcatccaagctagacgagacgatacacccctgcgaggattacacttagctgcactactccatggtatgcggtaggatcggaatccttacgtgagctgtacgattgttcatgggaagaagagaggagggaaacacagcagcagcagcagagagattgttcattttgttctttagttttagggtttgcattgatcaagtgcgagcagaagagatttttatcaagc

SEQ ID NO: 36340 - DNA, 487 bp, Zea mays subsp. mexicana
  Clone ID: UC-ZMROTEOSINTE082D03_FLI
caagtacatccggtgctcaaactgcgccaagtgctgccccaaggacaaggcgatcaagaggtttcaggtgaggaacatcgtggaacaggcggccatcagggacgtccaggaagcatgcgtctatgatggctacgtcctcccgaagctgtacgccaaggtgcaccactgcgtctcgtgcgcgatccacgctcacatcgtccgcgtccgatcccgtgagaagcgcagggaccgcaagccgccggagcgcttcaggcgcagggaggataggcctgctggtggacaaggaggcccccgccctggtcctggtgctgctgctccagctccagcaccggttgctgctcgcccataggctttagcttttcttaagtcttctgcccactcagtttctgagttgtcgcctatgggtgtgtgaagctgctatattagagttactttttgtctaaagcctgaatattttcaaagaatttgaatatctgaacatttgaat

SEQ ID NO: 36341 - DNA, 420 bp, Zea mays subsp. mexicana
  Clone ID: UC-ZMROTEOSINTE082D08_FLI
aaccctttggtctttgacaactcttacttcaaggaacttctgagtggtgataaggagggccttcttcagctcccaagtgacaaagccctgctgagtgaccctgtcttccgccctcttgtcgagaaatatgctgcggatgagaaggctttctttgatgactacaaagaggcccacctcaagctctccgaactggggtttgctgatgcttaaatagaccctatcctggagtgatacattctgctgcatgtggtcttttgcatctggagtcaatgtgaacaagcagattgtcgtattgtctttctcgtaataaatttgtcaatgttgagcccttaggcttgaattgtgggaccctttgttcgttttcctagactctgatgctgtatgcaactgaaacgagtaaatctatgatcttaaggctgc

SEQ ID NO: 36342 - DNA, 577 bp, Zea mays subsp. mexicana
  Clone ID: UC-ZMROTEOSINTE082D09_FLI
atcgccgccacctgcgtcgccattgggctccggggagtgctcctgcacgtcgccatcgttcaggctgcacttccacaaggcatcgtccccttcgtgtttgccaaggagtacaactgccatcctcaaatacttagcacagcggttatattcgggatgctcatcgcgcttccgatcacgatactctactacgttcttcttggaatttagatttctgggtaggcagagccgctaggattctaggaatgtagcagtgaacgaatgcaaagtgaagcaatatggatatcctgaagaccatcggagcagagaaataggggaagctaataggaccctagacagaaatgcagatgagggtgggaaaaaaaatccttgattctatttttttttgcatttcctgttaccgttttagattcaaagcaaagtttagagctttgagcatggaggattgaaccgttaaccgggcaacttggtactaaagattcctaccagttgattcctttgcccagagagacatgttctgcaaatttctgcctgatctgatctcatacaaattgggataaagtaatagaagtggttctcg

SEQ ID NO: 36343 - DNA, 622 bp, Zea mays subsp. mexicana
  Clone ID: UC-ZMROTEOSINTE082E02_FLI
acgggacctgcgacgccattcagcccgggaaaacgtgctacaggccaaacacaacggcggcgcacgccagctatgctttcaattcgtactggcagcagttcgagaagactggagcgacgtgctacttcaacaacctcgcagagcagactatcaaagacccaagtcatggatcctgcaggttccctagctcgttggggtcgccttgaagggcagaagcgggcgagaagacagcatttgggtcctgattttgtgtaaccagacgacttgggacctagtgaagtgtggagcaacgtagatgttctagctaacacagacacatagtactctctccgttcttgttttaaaaatgagttagcgggcgacaaatattcgataacggattcagcagacttgtgccatagtgaaggctcgctcggttgctcctgctcgcttgagaatcagaaatcgaaggtggaaacgtagttcgtttcagttttcagtacgtgtgagttgcagtgcatgagcctcttgggggagtacgtatcactgaaccctcgtgtcagtcgacaaggcggcttaacatgtggctttaatttatactggcttctattgcttctacattatttttatctctataaactat

SEQ ID NO: 36344 - DNA, 628 bp, Zea mays subsp. mexicana
  Clone ID: UC-ZMROTEOSINTE082G09_FLI
ctcgccttccgaggaaactcaccagcccaccacagacccgagcggaagaagccatgtccgggcgcggtaagggtggcaaggggctcggcaagggcggcgcgaagcgtcaccggaaggtgctgcgcgacaacatccagggcatcaccaagccggcgatccggcggctggcgaggaggggcggcgtcaagcgcatctcggggctcatctacgaggagacccgcggcgtgctcaagatcttcctcgagaacgtcatccgcgacgccgtcacctacactgagcacgcccgccgcaagaccgtcaccgccatggacgtcgtctacgcgctcaagcgccagggccgcaccctctacggcttcggcggctaggctgatgggctcctcgcgatgttctccccttctgcagatgcgacgttttctggccgtgcccacaagtcttgcggtcaagaaagtttcaggaactcttgttagttcatctctggctgtggtaggtttatctgaatcgtgagactagtaggtttatctgaatcgcgaggctagcaggtttacctgaatcatgaagcagtgatgaaattatgtgagcatcggatgttggaaatcgagcttgtaatgcaatttgttactcttgatgc

SEQ ID NO: 36345 - DNA, 1283 bp, Zea mays subsp. mexicana
  Clone ID: UC-ZMROTEOSINTE083B12_FLI
cgaaccgcaacaggcaagtcttcgcttcgctcctctctgcggctccctccggcgagcggcgatggccttctcacccccgctgatcgactgggaggcggagagctaccctgcctacccagatttcgcggccattccccttttcgtcgtcttcttcctcgtcgtccgtttcttcctcgaccgcttcgtattcgagtggttagccaggaagctgattttcaaggaggaggatgagaagaagcttggccctactacatatgcaggcaagagaaagatcaggaaatttaaagaatcagcttggaaatgcatgtattttctttctggggagttattggcattgtctgtgacgtacaacgagccatggttcacaaccacaagaaatttctgggttggaccaggcgatcagatctggccagatcaaaaaattaaattgaaactcaagacagtctatatgtatgttgctggcttttacacatactcgatatttgcccttttgttttgggaaataaggcgctcagacttcggtatttcaatgactcatcatgtagcaaccgtctgtctgatagcactgtcttacatattcagatttgctcgggtgggttcagttgtccttgccattcatgatgctactgatgtgttcctggagcttggaaaaatttccaagtatagtggccatgagttgtttgcagatgtttcatttcttgttttcgtcagttcttgggtactcctccgccttatatattatccgttctggattctctggagcacgagctatgaagttgttctgactctagacaaggaaaagcataaagttgacgggccaatatactactatgtattcaacagtcttctcttctctctacttgttctacacatatattggtgggttttaatgtatcggatgcttgtgaagcaaatacagtctagagggcacgttggcgatgatatacgatctgattctgaaggtgaagaggaacatgaggattgattgagctgtgtagagtcggaagataataagtaacatggggatggattgagctgtataagttccaaaggcgaaaaggaatacgtggatggattgagctgtgtaaattctgaaggtgtatcaaatcattctgctgtttttcttctgtccttgttcttgataagtaacaataaattagtgcccttctctaggtgagcatcatcgatagatgtcacttgggcattatcattatctattgatgtaaaatcaggtcacattgcatagcacacacacaacagttaatggaaaatcttagcagtgc

SEQ ID NO: 36346 - DNA, 1240 bp, Zea mays subsp. mexicana
  Clone ID: uC-zmroteosinte083d03_FLI
caaatgtttcgcttccaagtaagactctattgcccagattgtgacgaattgcttgacactagaggaagaaatttccttcatactgctattgagcataagaaatggaaagttgtctggcgtttctctggtactgcagatcttggaaggatggcaaatgtcatggattcagaaggcaacacacctctgcatcttgcaatcaagaatgcagaccagatgatagtgagccttcttatggcaacaaatagtgtgttgccgaatatagtgaacaaccagggcctcaccgccttagatcttgctgtactggcaactgacaaaggcataagttatacaatgaatcctcaggtcatcatactccgctgtttggcatggactggagctgtccttagtcctcgtcgccttgatcatttcatcgatgattttggcattggcaaaacttcaggaaacgagctcaagaaattcaccaacattgcacagaaaaagcatggaattgtatttattttttaattaggctgaaggaaattataacaaacaaatgcatcgaaacatgattatttaaacaaagtttcttatgtatgcttgttgagtgttgacactgtttttattagattcatatgctaactttggtacaattcttctcactgttgagtccatttataattgtacctcagtccccaggttcatgtggtttatttgcatgctgattttcaaaacatcgagttggcttgatatttgcacccttttttccctctaacattgtttgtgtcatcttaatagaaatggattattaactttaatcagcggttgccttattatgcttcaatcttatttgttcaatttcacttatggtcctgcttcacctgcagatcgtggaaagtttatgaagttttgttggggttctggatgcataagatagtggtgtatgtgatttgcccatagtttctgcagcctcattgttttccatttgggatgaataaagcttcatgctcatggatagggctgatacatcaggttttgttagtggtggtatacattacatgaatatccatgtgtattttcattttgtgtatactatgtgcttcctcggtggtgaagttgtaaagctggagttctgatctctgttggttggattaagtatctggtctctagacaacatatcgtggtggtgaaacaactaaattaaaataacaaaatttatgtatggataggatcacaaatgtattaagaaaccttttctcataac

SEQ ID NO: 36347 - DNA, 1192 bp, Zea mays subsp. mexicana
  Clone ID: UC-ZMROTEOSINTE083E06_FLI
ctcgctggccctcctcctcgccaccctcgtgtccatcctggtgctgggcgcagcggcggtcttcttcgagcacatccgcaagatcggatgcatgcactcgctggagaggtccgccgtctcggacgccttcttcgaggaccccaactcattcaagaaggtgccctgcccgtcggttttggatcctcctgagaaatatatttcgttgatagttcctgcctacaatgaggagtatcgactccccgaggctcttacagaaacactcaactacttgaagcggcgatcaactgctgacaagtccttttcatatgaggtattgattgtcgatgatggtagcactgatgggacctctaaagtcgctttcagttttgtaaagcaacataagattgataatgttagagttcttctacttggaagaaatcatgggaaaggtgaagcagtccgaaaaggaatgcttcattcacgtggtgaactattactcatgcttgatgctgatggtgcaactaaagtgaccgatttggaaaagcttgaagctcagattcatgcattggctaagaaagctaagtctagcccagggacatctactagttcatctcagaatctatctgatgttgaagttgctgtttttggttcccgggctcatctagagaagcaggctcttgcaacaaggaaatggtatagaaactttcttatgaaaggtttccatttggtagttttgttgactgccggtcctgggatcaaagatacacagtgtgggtttaagatgttcacacgagcagctgcaaggaagcttttcacaaatatcagattgaagaggtggtgtttcgatgttgaacttgtatacctgtgcaagcgcctcaggatcccaatggtagaagtatccgttaattggaccgagatacctggatccaaagtgcgcatgacgagcatcatgcacatggtattcgagctcctgctgatcaaagtaggttatggactggggatatggaaaatcggctcgtagatccttgacattctatgctgactagtttctgcaactcagtttatcaccactgtagcctaccgcaaaacctagttggtcgccagcaaatccatttggaggaatactgtacaattttccgagattttcaaatcgagagcatcaattcacatgtaccctagtgtttgatcatagagacgttgacagatgtaggcc

SEQ ID NO: 36348 - DNA, 1154 bp, Zea mays subsp. mexicana
  Clone ID: UC-ZMROTEOSINTE083E12_FLI
cgtcatcgtcttcaactcttacctgtggtggaggaagcagaaggatgacatgaggatgaaggtcatgtacggttcatttgaagatggtgatgcaaagctagacgagatggaaatggcggatggtttcgagatagctatcaagaaactgacggaatggcttgcagagaacattgacaagaacaagactaggatatttttcgcaggatcgtcaccaacacattcctgggctagcaactggggcggagaagacaagaacaagtgcctgaacgaaacggagccgatctacagacccggcgggtacaaggcggcaaccacggactacagcttgatggccaaggccaggtcctacttccggcggacgctggagccgagaggcatacgcgtccagatactcaacatcacggagctgtccgactaccgcaaggacgggcatcccacggtgttcaggaggcagttcgtccccctgacgaaggagcagatcgcggacccggccagctacgcggactgcacgcactggtgcctccccggcgtccccgacgtctggaacgagttcctgtatggctacctcgtgcagcagcgcaaatgacgatgcattattacaaagaagctagacgtcaggttcgttttacatggccttattatatgtagtgtagtacagtagagtacagattgtctactgctccgtttagattagggacgctctcatgctcttgtgcagagaatggcggccggacctgctgttacatgtagagacagacaggagatctgtctggcccaacattctagtatctgtaaatcttgttcttgttgtccaacattaattctaggatctgctgctaaccattttttttggatttatgtaaactgggtgattatctgaaatagaatgatctgagttggctgttccagtattgagcaagtaaaaaaaaacaaatcgcccaccgtggggcttgaaacattaattctaggatctgctgctaagtgctaaccatgttttttggatttatgtaaactgggtgattatatgaaatagagagatatgagtttgctgttccagtattgagcaagtaaaaaaacaaatcactaaccatgttttttggatttatgtaaactgggtgattatatgaaatagagtgatatgagtttgctgttcc

SEQ ID NO: 36349 - DNA, 968 bp, Zea mays subsp. mexicana
  Clone ID: UC-ZMROTEOSINTE083F07_FLI
gtggaagcacaaactctagcacagaggaaggcaaagaattgaatgatcctcgggtgctaactgatgttggagatgtccccattcaagagatccgtgactgtggtgtcgaagatgacagattaatgcatgtaattagtgagtctgtcaaaacagtgatggaggaggaacctcttcgaccgttggtgttaggaggcgatcattcaatatcttatccagtggttagagctgtgtctgaaaagcttggaggacctgttgacatacttcatcttgatgcacatccagatatctatgattgttttgaaggaaacacttattcacatgcctcgtcatttgccagaataatggaaggtggttatgccaggagactgctacaggttggattgagatcaatcaccaaagaagggcgtgaacaagggaagagatttggtgtggaacagtatgagatgcgaacgttctcaaaggaccgagagaagcttgagaacctgaaacttggggaaggcgtaaagggtgtgtatgtctcagttgatgtggactgccttgacccagcgtttgcacctggggtctctcacatcgaaccaggaggcctctccttccgcaatgtcctcaacatcctccagaatttgcagggtgacgttgtcgccgctgatgtggtggagttcaacccacagcgtgacacggtggatgggatgacagccatggtcgccgcgaagctggttcgggagctcactgctaagatctccaagtgagacggtcaggatcgcaccactcttcttgaagcaaagcgaaagggtgggttttgaacttttgatgtcctggtttctatgtatcgagcaccaaattgttcgacatgtgacaggtttatatgttaattaggttgcgataacaccataatggtttatttatgctggattctgaaatctaatctaccggattctagattaaaggatccgattgtcagggatttctcc

SEQ ID NO: 36350 - DNA, 1480 bp, Zea mays subsp. mexicana
  Clone ID: UC-ZMROTEOSINTE083H03_FLI
aaatttcgtccttagggacattcactgtgttatcctacaatattcttgctgatgcatatgctacaactgatgcatatagctactgcccaacatgggcacttacctggaattatagaagacaaaatttgctgcgtgaaattattggttatcatgctgatatcatctgtctacaggaggtacaagtaaaccatttcgaagattttttttcacctgagcttgacaaacatggatatcaggcgctttacaagaaaaggacaacagaggtgtattctggaaatcctatggccatagatggatgtgctactttttttcgtagagacaagttttcacatgttaaaaaatacgaggttgagttcaataaggctgcacagtctttaacagatgctattattcctgctgcccagaaaagagtggctttaagtcgattgattaaagacaacattgcactaattgcggttttagaagccaaatttggtaatcatggagctgaaaatcctggtaaaagacagctcctttgtgtggcaaatacacatataaatgtccatcaagacctaaaagatgtgaagctatgggaggttcataccctcctaaaaggattggagaagatagctgtcagtgcagacattcctatgttggtctgtggagatttcaactcaacccctgggagttctccacatgcgcttctggcaatgggcaaagttgatcagcatcatccagatctggcaatagacccccttggaattttacgccctccaagcaagttgaatcaccagcttcctttggtcagtgcatactctgcatttgcaagaatggtaggtgttggctatgatttggagcatcagcgtaggacagaccctgcaacaaatgaaccactcttcacaaattgcacaagagattttactggaactattgattacatattttacacagcggactcattgacagtggattcattattggaacttttggatgaagaaagcttaagaaaagacacagctctcccatcccctgaatggtcatcagatcacatagcactcttagctgagttccggtgcaagccaagaatcagacgttgacacattagctctccaggtcttgcagaaaaggtcattgtcatcatccttggtggtggaacaccgttccatgtgggaacttgaggcagggcggggacgcgggctctcggggaagcaaacaaccaagcagcctcaggaaggggaagaggcttgttgtaacatttgatttttaccctcctacatttgagctcatgatacttaagctgcccctgtgtaccattactttctatagaagaaaaatacttgagagaaatatttgaagggttataaggcccgtttttcttttttgttcactgcggtcgcgttcgattcctcttggctgtgtccatgctcgctgcctacaatacgcaggagtcctcgacttctgtaaattctgtaccaatgtaataccagttccagtttttgtt

SEQ ID NO: 36351 - DNA, 1524 bp, Zea mays subsp. mexicana
  Clone ID: UC-ZMROTEOSINTE084C03_FLI
gaaccgaacaggcgaacagacattggttttccccgccgcgcagcgcgcacacgcctgcctgccatttctagatccggggccggtcatcctctcttgtttccgtggcaaccgcgcctctcctccttccttgcagcgtgcccctgcggggggctgcgcgtggatctgatctcgtcaattgtcgtgctatgtttttctccagcggcacgaagtgaagaacacgtttttgtgacgccatggctgtggaaagagatatatttggaatttctgggccaacgtatctgaaatcaattgattggaactgtgagcataatcggagatctgtggctgcaagcttagttcaggctgtatatgtgttggagagagaccggcaactgaatcatcaatcttttgaagccttggcacctgcttggtgggaattcctccattttgagctgattcgcaagctgattgatgatgctgatatgtccatatttggtgcaatatttgaattcaaccctccaagggaggaagcttctggtgcaaatgctccaagatttgtcatcgcattcagaggcaccataacagagaaggatactatctctagggacctttccctggacctgcaccttgttcaaaatggtctccacaggacctcgagatttaatatagcaatgcaagctgttcaaaacgtagcctcggttttccctggatccacgatttggctagcagggcattcactaggcgctggcctggccatccttacgggaagaaacatggttaagaagggtgtgcttttagaaagctttctcttcaacccaccgttcgttgctgctccagttgaaaggatcagggacgaaagggtaaagcacggatttcgtattgcaagaagcgtgattactgctggattgactattgccatgaaagctaaaactgagggtagcagtcagagatccgtcgctgatgaatctttcagcattttgtcatcatggacgccgtatctgttcgttaatccaggggaccacatttgctcagagtacatagggtacttccagcaccggaagaacatggaggatcttggtgccggatttatcgagaagcttgcgacacagaattccatcggagacctgttcttcaaggcactagggtgggagtcagaaccgctgcaccttcttccgtctgccgatctaatcgtcaacgtgagcccttcgtctgatttcaagtacgctcacggcatcagccagtggtggcaacctgagctgaatttgcagtgcagtaaatataggtactcatagttgtacgtcactagaaatgatgtctcagaaacttagttatcctctctatcccttcagtttattcatgtggttcattctgtttgttgtagtggttggtttcccagctgtggtagactatttcagacattttgactgcattttcctgacctgcaaaatctgttgattgtgtggagtaaagttgtgacatccatcgtttatctgcactgtacagtatgtttatccatttatggatgatcgcatcctggattcctgc

SEQ ID NO: 36352 - DNA, 1361 bp, Zea mays subsp. mexicana
  Clone ID: UC-ZMROTEOSINTE084C12_FLI
tttgccagcagtgtgaatcttcatactaagggttagtttagaaacataaatcctagagattgagtggaaattgactaatatcgcactcaatccccggaatcccctatgttctggaactagccctaaatggtttatatgaatattctgttctaccgagttgtgaactgctgaactctagttctgtgtatttgttacgacacctagcactagcaggcatcaggactctataggtgtgacacttgaaattgttacagattaagacgcactgacggtaccctgcgctcagttgctcgatactcgaggcttgtaggtgattgtatccagtagtttgaagaactggttatctaattatttattttccgtggatccaccattttggatacgcttcatcaatatataaaagagctccaattatgaaagttaggagaaaatgacgatctctaaactattcttgagttgtcgtccagctcccaagactaatggaattgcagtttaatgtctctgatatattgtaacgtgtcatctcgctccaaacttatacgttggtctgctgttacatgccagttctgtaaggagaaatggcaccgattactacttgtttagattggacaagctctctcctcgtctctatttaatctcttcctctgtttttctctatttgccccttcgttcactctttctccccccttttcttgtctcgttatcgtctgctacgccaaaccctagccccaaatcagtagcttgaagctgcccacagcgctccaaattgggatccacagattctgcattcatgacgaattggggaattgtgtgtgctatcgtcatttaggcgcaggacgaaagggaagccaccgttgattactcctagactgaattgtaggcaaattgttgaggttcacgcggccatggtcgctatgacaatttctacatggccccagacacagggtaagttgaactgaagagctctgctcaaaagaagctttgttaactacgttgtgttctttttaatgtgacgtgacctgaatgcagcaagattgaacctcctgcccattttggcaccgggaggaaagttgcttgtatgctttgcaggatagctaaggaaaaggacattcttgcactgggacgacaacaaaggaagcgcacggagctgggcaattctcagtttagatgctcaagttgggactttggtgggtttaggttatgagtaacttggtcgttaaaatgcctcgtatttgctaggcagagctgttctttggatgttgttggctgtggtgattgagaaggaataaatgtcatgtaatataaagagtactatgtaacgcacaccaccttttgttagaatgtgaactaccttttgctac

SEQ ID NO: 36353 - DNA, 915 bp, Zea mays subsp. mexicana
  Clone ID: UC-ZMROTEOSINTE084D11_FLI
cggaacgattccaccaagaaccgcgggcaacaattcacaccgcgcttctcttctccagcgatgcagacgacggcggcggcggctgtggcatgggcgcctggcccatcggcgtccacctcgtcatcgtcctcgccgtccaccttcagggtgggggttgcgtcgacggccgtgcgggcttgttccgcgcccaggcttgttgcgtcctccgcgcccctgggctgtcgacggctgcgacaagtggttcaagctgttgccaatccagaccctgcgatcgagcttccattgactgctgaaaatgttgagatggtgttggatgaagtaaggccgtatcttatggcagacggaggcaatgttgcgttgcatgagattgatgggaacgtggtaaggttaaagctgcaaggagcatgtggttcatgcccggcttcagtaacaacgatgaagatgggtattgaacggcgcttgatggagaaaataccagagattgttgcagttgagcccattgctgatgaggaaactggccttgagttgaaccaagagaacattgaaaaggtacttgacgagattaggccataccttgctggcacaggaggtggcgagctcgagtttgtcacaatcgaggagcctattgtcaaggttaggcttacaggcccagctgctggtgtgatgactgtccgagtagcattgactcagaagctccgtgaaaaaatccctaaaattgcagctgtccagcttttgccataagattagaatcttttagaagccaggcaccagtcacagttgataatgtaaatgcactaccgcaataaatttaaggagttgtaatgtgtagcctgctgagcatttagctcctcttcagcgatattatgatcatcgatacacaatgttcaagtaaaggtgttggttggatttgtaacc

SEQ ID NO: 36354 - DNA, 776 bp, Zea mays subsp. mexicana
  Clone ID: UC-ZMROTEOSINTE084E04_FLI
ctaaggtcattcatgacaactttggcattattgagggcttgatgacaactgttcatgccatcactgccacccagaagactgttgatggaccctcagccaaggactggagaggtggcagggctgccagctttaacatcattcccagcagcaccggtgctgccaaggctgtcggtaaggttcttcctgaattgaatggcaagctcactggcatgtccttccgggttcccaccgtggatgtgtcagttgttgacctcactgtcagaatcgagaagggggcctcctacgaggaaatcaagaaagctattaaggctgcttctgagggcccactcaagggtatcatgggctacgtggaggaggatctggtttccaccgacttcaccggtgacagcaggtcgagcatcttcgacgccaaggccgggattgccttgaacgaccacttcatcaagctcgtctcgtggtacgacaacgagtggggctacagcaaccgcgtcgtcgacctgatccgccacatgttcaagacccagtagagagagatatttctgcctccctatcgagggtcgtccccaatggcctttggtgcgcagaccatctttgctgcttgtctatgctgagaataaatgtgaacggtgcccctggacgctggatccatgggttttggacactttgtctttttgtgtttaacttatctgctgccgtcctgtaacgaattcgctaagttttaggtgccgtttggttcacatatttgtaacgtaatgggtaacgaataacgttaaatt

SEQ ID NO: 36355 - DNA, 959 bp, Zea mays subsp. mexicana
  Clone ID: UC-ZMROTEOSINTE084E10_FLI
ccaacatctacccgtacctggcctgggcatacaaccccagcgccatggacatgagctacgcgctcttcacctcctccggcaccgtcgtgcaggacggcgcctacgggtaccagaacctcttcgacaccaccgtcgacgccttctacgtcgccatgggcaataacggcggctccggcgtgccgctcgtggtgtccgagagcgggtggccgtccggcggcggcgtccaggccacgccggccaacgcgagggtgtacaaccagtacctcatcaaccacgtcggccgcgggacgccgcgccaccccggcgccatcgagacctacctcttctccatgttcaacgagaaccagaaggagagcggcgtggagcagaactgggggctcttctaccccaacatgcagcacgtctaccccatcagcttctgaagaactaccgttaaccgtaccgatccaagctagctgctagctggccctggttgctagctccgaccgacgacggacgacgacgatcgacctgcagccgtatgtgtcgatccggccggccgtatacggatagtacgtagcatgtatgtatatatatggtatatgtgggcttgctttgcgaccgctgggagggagtatccgatccaatggtacggtagctactcccagatgcgtacgccgtgagtgatgctgagtacgtattttatatgtatatgttatacacatcgaaagggatctatcggagacgacgcgcgcggttaccgtatatattgataaatacggtaacatcgtacgtcgtcaattgatcgatgatctcccttcgtagctctagtagtatacagagagagagagaggttgtggtgatatggataagatacacatgcatgtacattatcacgcaccgtataaattaatatacggtttttaattaacttgagataattgtacgcgtacttcaatcaatctatcatccatttccct

SEQ ID NO: 36356 - DNA, 818 bp, Zea mays subsp. mexicana
  Clone ID: UC-ZMROTEOSINTE084E11_FLI
ccaccccgtccttgtctacatgcctgccggccgccttgctcgtgatatcgagaagacgtcggacgaggctgctgcccagttcgccttttctcagctgaagaagatccttcccaatgcagctgagccgataaactacctggtgtcgcgctggggctcggacgagaacacgcttggttcgtacacgttcgatggcgtgaacaaaccccgtgacctgtacgagaagctgcgtatccccgtggacaacctgttcttcgcgggagaggccacgagcgtcaagtacacgggcacggtgcacggcgccttctccacgggtgtcatggcggccgaggagtgcaagatgcgggttctggagcggttcagagagctcgacatgctggagatgtgccaccctgccatgggcgatgacagccctgtgtctgtcccgctgctcatctctcggctctaaaagcagacgagtagtagttgtgtatgggatggatcggcacctgagagtaggctgggacatcccactgattgccggagggaagcagggaggaagaagctcccctcccctcgcttcgcttctcctcggcatgaggcatgtgctggcgttacttgtggcgtgccaagtgccatatttccctaaacttattctgcgtgggaaccctctattatgtatgtatactgtgaatttgtgactctgtgttcaggtaacacgagttatcgtgacatcttcgtagagaaagataccgtatgtatgatgtatgtatgatatacatatgatattatgatgaacaattgtagtagtaataataataaataatacatatatgtgactt

SEQ ID NO: 36357 - DNA, 836 bp, Zea mays subsp. mexicana
  Clone ID: UC-ZMROTEOSINTE084F01_FLI
tgcaattctatgaatatgcagttatcgcaattgcctttagattgtaaaaggctgacttatgatgctcttgaaggagctaacgtcactccgacgtccttttacaacattggtgatcttgagattcaagataatctagcacgagtatgggtagacattggtattcatgagccattgcttctggacatcctgcttaatgccttaacaacaataagttcagatcatgttggtattaagcaagtacagtttggagggtcagagtttttgaactggagcgaggacttgaagacagaagaagttggatatagtgtgtgcaaaatctaaatagcacaatcccgagatttgcagaagcagctacctttttagctaaacgcaaatgcaacatctggttcgaagctagggttttaaccaccttgatcctgcaaacgagaagaagaaaatggtgacaacacgatgaaaaattgacgtccaaacatattaacttctgcttgaaaagaggttgccgtccttacaggactctgctagctacacatcaacacatcattggtaatccttctgcatacatgtaataatataatataactagattatctgatgtccaacgtgtattgactctacttagggctgaacataatacttatggctcgttagttcgcttggctcgacttagtttatttcaattttgttacgagctaagttagtattttagctcggtttgttaacgagccatctcgttagctcaaacgagctatcatttatcaacaaaataaagtcttcacttatgttggatgaactaataagtgattagttatattaatttggtgttgaatttatgtggt

SEQ ID NO: 36358 - DNA, 589 bp, Zea mays subsp. mexicana
  Clone ID: UC-ZMROTEOSINTE084H12_FLI
ttccaattgcacataaatcggcaggaccgatgatggacatcgtgctagatgaggatgggcatcaaacaggatttctagcctccgagaaggaggaattcactgaagcgattatcaaggtcttgaggatgccagagtcggggaggcaagaaatggcagctgcggctaggaaacgtgcacaaagattttcagatcagagattccaccaagatttcactgagaccgtgcgccctattttgtcagcaagggaaggctgactgacaagctgcagtttccacctaacaatctgaattctctgtcaagtttcacacggtacagtgaaagacttgcaaggggcactgaattggcagattattgctgctcccttttcccagactgcttgtgtattgtgctgcatcgtgtaacgctactgtgcagaaatagatcacagaaagaaaactttcgtcagcgatatagaattcaaaatggtgatcgtggtgcacggttttgaatctttcttgcggcactctagtaccaagttcatctttgtactgagcaaaagcttctgcttgaattgtgccactgactggcggacccatggactttttatact

SEQ ID NO: 36359 - DNA, 649 bp, Zea mays subsp. mexicana
  Clone ID: UC-ZMROTEOSINTE085B08_FLI
cgtcttcttcaacttctgggtgctcttccacctctaccctttcgccaagggcatcctggggaggcacggcaagacccccgtggtggtgctcgtctggtgggccttcaccttcgtcatcaccgccgtgctgtacatcaacatcccccacatccacgggcccggcggcaagcacggcggcgcgatcggaaggcacggcggcgacgcacaccaccatggcaagaagttcgacggctactacctctggccgtgaagcgccgagcagccagcatcgtcatgcatgcacatataccgcctgccctgatggtgacgatggtgagccgctagacaaggtgaagagtacacgttcccgttcatccatccatccatcgtctccgtagtaatgctgcccggtgattagtcgatgaagagtgaaggtgaaggctacacaccaacccacatttggtcgacgtacccgccaaaatttgaatttttttcttcccccttcttccccccctctcccttctcattcttttttcttttagttttgtccagaaatcgaaaggtgtgttgatttgatttagtttttttaattaccgtgccccgtggtaattaattatgtacgtacttatatatatatacattacgccgaagaggaaggagcactttgtat

SEQ ID NO: 36360 - DNA, 657 bp, Zea mays subsp. mexicana
  Clone ID: UC-ZMROTEOSINTE085D08_FLI
acgacgaagaggccggcggggagctccaaggtcagggttgtcccgagccgctacagcatcccacctggctcctccctagcagctgtgacacaaggcaaccgatgcaagcagtctctcccaggatcggctactgagaccagagtaaatctcactgagccgccgaacgacgagttgtctcctgaagaacttgccaaggttgcagagctgctcccaaggattaggaccatgccgccttctgatgcgagcccgcgtgactcggggtgtgccaagcgtgttgctgatttggtcgggaagcgatccttcttcactgctgcaggggacgatggcaatctcgttacgccctaccaggcacgggtggttgaacttgaatcacccgaggcagcagcagaagaagcagaagcttgagaagtttgtctttgatcaattccgaagtggcttgcatctgggcgtggcctctttttgcagtgtgtgctactacatagtctactgttacattcatatcatatcacatttcctattttttcccccttgagacattgcttagtacttttgtgttgccttgtgaaaagagagtggaaaggtttgcatctgctgatgctcttgtttcggattgtgtgttcctggttcgatgaagtacaggataatgctgtggtttat

SEQ ID NO: 36361 - DNA, 302 bp, Zea mays subsp. mexicana
  Clone ID: UC-ZMROTEOSINTE085E08_FLI
tacactttccatgacgactcgagaagggataagccaagcagaggtggacggtacaccgtgtaagttgcacacgaagaaggtcgttgttcggactggacagagggtgagagtggagttttgtgctgagatcggcaccagctttcatttaatacagcctcatcttacctgaggcaattttcgcacctgttatgatgttgttttgctctcagataggtttatgtagcacaagaaagatatgttggagacgttgacgattttgtatgcaaccaaatttctatcttaatatgccccgattcaacagc

SEQ ID NO: 36362 - DNA, 1262 bp, Zea mays subsp. mexicana
  Clone ID: UC-ZMROTEOSINTE085F02_FLI
aaaattcttgatgaactacttgacagcatgaaccattcatctgctcaggtaagagaagcaattggtattgccatgtgtgttacaacctcaaatatgagactttctgggttatttggcactggatgttcaccgcaaggccttcatggggatgtaagcatgattgaacaaacaggaaataaatattggtctgaacgtttgacagatggagctaatgaattagccgtaagtatacaaaatagtactcaatctaagcaactagaatcaacatcagattcggctgaagatagcatggatgatagagagcaggctgatgctaaaaggatggaaacgatatttcattttatgatcgcatctttgaagtctgggcgatcttctgttctactggacactattattaggcttgtgtacccaattctctcactacaggaaacatcaaataaagatttatcattgcttgctaagtcagctttcgagttgctgaaatggaggattctacatcggccttttcttgaaactgctattacgtctattcttcctttagtcagtgatcctaactggcgtaccagatctgcactgttatcgtatctcaggacctttacctacaggcacacattcatactttctggctcagagaaatcacaaatctggcaaacaatagaaaatttacttgtggacaaccaagttgaggttagggagcatgctgctggtgttcttgcaagcttaatgaagggtatagatgaagatctatcaaaggatttccgtgaacggtcatatgcacaagcccagcatatttttgttgcacggagaagaaatttgaagttttctgttggtaccatccatggtgcagtccttgctttgacagcttcggtcctttctgttccatacgacatgcctagctggcttccttctaatgtctcgctacttgctcgcttcatccgggagcctccccccataagatcaacagtcacgaaagctgttgcagaatttaagcgcacccatgctgacacatggagcatccagaaggacgcattcactgaagacgaactggaggttctccgtgatacatcttcctcctcgtcgtacttcgcttagattaaaatttcaaaggccataggatattctctggtactggtgttgtgtatatgaatttataactgttgaagtgtcggtgtttttcataaagtatatccttgtacgtacctagttttatttcatcaacagatgccttcgtacaactgagatgaagttatgcagtctactgt

SEQ ID NO: 36363 - DNA, 843 bp, Zea mays subsp. mexicana
  Clone ID: UC-ZMROTEOSINTE085F07_FLI
tgatgatacacaggtttccagtgatggacctttaagtcctgctcctggtgtagagacagtagttgtcttcccaaaaaatgctggcaaaactgtactagcaggtgaagaaactgaattactagttggtctgcaaaatgacggtgaatcaattttgaatgttgttgctgttcattcaactctccatcttccttttgaccacaatatgtatggccagaaccttactgttcagaatttcttcaattcatcagttcctgtttctgtgcaagcaaccttcccctacaagttcgttgtgagcaagttcttgcagcctggagcatatgatctggttggttacatagtgtatgagatcgaccagcacccttaccagaatgtattctacaatggcactatcgaggttgttgaggctggaggcttactcagtgttgagtctgtgttcctcatcacccttggatttgcacttcttggtctgtttggattgtgggcatatggccaggctcagcagctctcgaagaaaacaaagaaggcacccaaggtggagctcggaactggaacaactgatgccaacatcgatgagtggctggagggcacttcgtttgtgcagagaagcaaatccaagaagaagcagacctgaggctctccaggctagttaaatccttttgaggatctagaatgagacatttgagggtagcccttcacaagtgacttttgcagaaagatagatgcgtaaggaggtgctgaaaaccgtaaacatcttcgttgacattttcgaccttgtgtactttacatggaacaaaattttgttaaaagaaagtatatgctgttgccgctgtggtttctgatctt

SEQ ID NO: 36364 - DNA, 1084 bp, Zea mays subsp. mexicana
  Clone ID: UC-ZMROTEOSINTE085G02_FLI
taacttggtcctggagcattggagaaggagcataccacaaggaaaccaacacggtcagtcaaaaccaaatctagataatcatcatgctacttctatgttttatgtctgtttttgtctgctatgaagtgttcatgcaagtgttatcaagtgttcatccatgccaagatggttactaagcgaacacacgcagcatgagtggtctccatctgatcttgcttcattttgatttattatctctgaggagtgtgtgagttttaatggctttgacggagaaggctattaattggccccttttttggagtgactgtagcaaccacttctaattcattttctaccgcgacaactggcgttgcaagggttatgttgtgtaccttgtccgtgtgaggcgtggtggtaggaagaggcctttgcccaagtgtattatctatggctagcccaagcaccagggtatcacccaactcaagttctagaggtacaagaggtctctcgctgaggagagagctagacgcaagcttggtggactgagggttcttaactcctactgggtgaacgaggtggagctgctatttatggagaggagcgttgatagccattgtcctgggatggtagtccgcatggctgaacgagcactctgccatcaataaactcattagcaaggtggtttggagagcctgtaagggctgctattctgcaaaccgaggcttttcttacaaatgcaaaaggatatccttgtttatcaaagcgccatcagagtctgctaactggattttttaaacattctgttcaggtgataatatatggaagatcaaatcacaatgttttcccagtatctgaatgagtgctctcaggtgatgagagctacgcagaagcctctaatggacaatttggaagctcaaacttatgagacatttgagaaggatgttgtgaagtacactcaggttactgctatatgacgtgaatatgccttttgttttatatattataccttgtgaagtagcttcttttttttcacatttatttgaataatatgaatgtaaaatttaaaatctgaattgaacttcttaactatttccaccatgatttc

SEQ ID NO: 36365 - DNA, 396 bp, Zea mays subsp. mexicana
  Clone ID: UC-ZMROTEOSINTE085H03_FLI
gaacgaggcgctggagcggctggagcgcaacgacgtccgctaccgcttcgtcgtcgacgtcgccggtagcaacgtcgaggcggaggcggcggcggcggatgcggccagcaactgatggcaccgcgtcgtcgagtcgaaccacgtctgtgcgccgcgtgcaacgttcgttcgggtcgagtctgcgtgcaacgttctgcttcctttactagttgttgtctttccgccttcttgccgttctgttctgggctttgagatgagacgatggatggtcagtttttaatgtcagactgaataactacgtatagtactgtagtattactcggagtacgccagaatgtggtgtggtgtcagtgtcaccagcaatctggatttgccaagtgtttctattttttcttc

SEQ ID NO: 36366 - DNA, 651 bp, Zea mays subsp. mexicana
  Clone ID: UC-ZMROTEOSINTE085H06_FLI
cggcgaagcacgcgacattcctgccgcactccgcggggcgctactccaagaagcggttccgcaaggcgcagtgcgccatcgtcgagcgcctcaccaactcgctcatgatgcacgggcgcaacaacggcaagaaggtcatggccgtccgcatcatgaagcacaccctggagatcatccacctgctcactgacgccaatcccatccaggtggtcgtggacgcgattatcaacagtggaccacgtgaggatgccacccgtattggttccgctggtgttgtgagaaggcaggctgtggatatctcacccctgagaagggtgaaccaggccatctacctcctgaccactggtgccagggagagcgccttcaggaacatcaaaaccattgctgagtgccttgcagatgagttgatcaacgctgccaagggctcttccaacagctacgccatcaagaagaaggacgagattgagcgtgttgccaaggccaaccgttgagtggagcttgtatcctggtgcacttgcactagtactacgtttctggcagtcgtatttttttcttgtgtttttacccatgtttagactttgagacctatatctaaggttttggttctcagtgaacaatgaaaattactgtgaaatgcagttgttttggtgc

SEQ ID NO: 36367 - DNA, 779 bp, Zea mays subsp. mexicana
  Clone ID: UC-ZMROTEOSINTE086B01_FLI
cttttatgtttcagcttttttgtgatacagaagtggaccattgtaaggaatggaacagcaaccgccaggagaaaggagaaccagcatatgatactaatatatttgaagatcttgtaagtagatttgagaagccagatagacgcaatcgttgggattcccctctttttgaattgttcccatctagagatgaattagtggaaacagctcctgttattgctgaagctgtgtcatatttgacaaaaaaagtggattccaaaacaagagatgtaaaagttctccagcctacaatagccactcagacggtgcgaacaacagaggctaattccctctatgagatggacaaggcaacgcaggaggtgatcaatgcaattgttgaagcacagtcatgcggtcttgggcttgctgtgaataagatctccattggacccaacttgccaactatcaagcttgagagatctgttggcctacctgagctcagaagcctgcggagaactttcatcaagctggcagggcagtacagtctgagtgggccaccaccaccgacagatgctgacagcgcaaagaggatgtttgtcgactacttaaaccgtgaacttggtgcatgataattttcattcgcctgcgttgcatgaacactatgtagcatgtggttaactttggggaatagataattgaagacaatttgattgtacttgttccttgttttgtggaaatgtttatatgactatcttaacgtccttgacgccttggcggacatgcaacaggaatattttttttct

SEQ ID NO: 36368 - DNA, 1167 bp, Zea mays subsp. mexicana
  Clone ID: UC-ZMROTEOSINTE086B05_FLI
gcataatagctctccaacagactagccatctaactttctaatctatctggctctctaaattaactttctcactagccaaatttggctagcaactctcgctatctaagctatcttgtatgttggagagtctgttggaatgagacgttatatatagagtttaatatttatagagatacaaataaagatttaaatagagagtaaaaaataaagagtctcttggagatgctcttatgagcagatacgtagttaaatgagcatggaacgttgcatattgattttcgatattgatgtgtattgcaggatgttggtaaggttcttcctgatttgaacggcaagctcactgataatgagttcctgggaggcgaaagctagacagtttctgttagaggaggaaaaagaggatgatgaactcttcttagtaattgtccctgctgttctcttggccatgcaagaagagaaacggtcagtacgtacttccggtacctcagcacatggaagcgcgaaaaagtggaagaaaagtcatgttgcaagtgttctggaagactatttggagcacaggaagaagcaaacggagaagactgtagaggcgttacttgagaagaagagtcgtgaagaggagtactctgttgagaggtgtcttgacacagttgatgcattggaggagttgacggatgaggagaaggccaccgcagcagaggtgttcaagaatgaagtgaatcgggagatgtttgtgattgtgatgcaaacaaatccaaatgtggggttgatttggcttcggaggaagataagtaggattgcatctacctgagatggataaggtgcgactgatggagtgatggctcattgagttgcttgctgtgtgcgtgtgcatttgttttctatgcccgacgatgagtagcttgttgtggtgcctgatccaagagctcacaccagtttattcagttcagttcagagcttgcatgctccatataagcagtccgctgcatgctatgtgttgttaagcttaagcagactggtacattctgtacggagtttgcatgctccatgtactgttgcatgccgcttgttgctgatcgaaaattttagtttgcgaactacatgttgaggacagatattttgtaaactgctactagcactgatgcatgcttgcaccgcagtttagcatct

SEQ ID NO: 36369 - DNA, 917 bp, Zea mays subsp. mexicana
  Clone ID: UC-ZMROTEOSINTE086B12_FLI
cagagtccagacgccagacgccctctacttctctctagttagtgtacatttcaaactcttggccgccgcctcggtctctgttcgccgcgccccgccgcagaaatggcgctgccgaatcagcaggttgtggattaccccagcttcaagctcgtcatcgttggcgacggtggaactggcaaaaccacatttgtgaagaggcatcttactggcgagtttgagaagaaatatgagcccaccattggtgttgaagttcaccctctggattttagcactaactgtggcaaaattcgcttctattgctgggacactgctgggcaagaaaagttcggtggcctcagggatggctactacattcatggtcagtgtgccatcattatgtttgatgtcacttcgaggctgacatacaagaatgttccaacatggcacagggacctgtgcagggtgtgtgagaacatccccatcgttctctgcggaaacaaggttgatgtaaagaacaggcaggtcaaagccaagcaagttacattccacaggaagaagaacttgcagtactatgagatttctgccaagagcaattacaactttgagaagcccttcctttacctcgcaaggaagctggcaggggatcagaaccttcactttgtcgaagccgttgctctgaagccaccggaagtgcagattgatatggccatgcagcagcagcatgaagctgagcttgcagctgccgctgcgcaacccctccctgatgacgatgatgacctgatcgaatagatgttccatggcccttgttgatgcgagggggagagcttttattacaaatccgtggtggttcagttcttgtcaggcctagccgtacgtgatttttctgttatgtaacctgctgttgacgagggtttttggtgatccttgattttggtaat

SEQ ID NO: 36370 - DNA, 1165 bp, Zea mays subsp. mexicana
  Clone ID: UC-ZMROTEOSINTE086C07_FLI
ctcgggatatctcatgataaagggttcgacatttctgaccccaatgttgctggacagaatgatttactgattgtgggccctggtgttcttgggcgaatcatagctgagaagtggaaaaaggagcatccaagttgcaaagtttatggccagaccgcaagcaaaaatcatcacaacgagttaacagatcttggcatcatcccctcattgaaaggcaccactattcatcagaaggttccacatgttattttctgcgctcccccgtctggttcagatgattactctagggatgtcagattggcagcatcaaattggactggtgaaggatctttcctgtttacatcaagtacagctctgtatgattgcagtgacaacagcatgtgcaacgaggattgtctgtcagtgccaattggcaggagccctcgtactgatattcttctaaaagtggaaaatgttgttcttgaggcaggaggctgtgttctcaggctggctggactttataagatagacagaggtgcacatgttttctggttgaggaaaggaactttagacacacgaccagatcatatcatcaaccagattcattatgaggatgctgcctcccttgctgtagcaatcatgaaaaagggactgcggagtcgaatatttctgggctgtgacaacaagcccctttccaggcaagaaataatggatgctgttaacaatagtggaaaatttgacacgaagtttggaggctttactggtactgacggtccattggggaagagaatggagaattcaaaaactcgggctgagatcggttgggaaccaaagtatccaagcttcaccgagttccttggtatcagcagttaacatccttgcatactgttcagttagtctgactcagctgagtagcaaccgtgattagattgtaccatcgtttgaatttttatggtctgaactggtgatggtgtacatctcagcctactttgggcctgtccccagtatttttgatctcacactatttgagctgtgaaccagacagatgccaccccatcccaccggacaatatatactgtcacgtgagtggatttgtcgatcatgaacctacgtggctacatagatttcaacaaactgaaattgttgcagagaattgacagtcaactaccgaataaacgaataatcaacc

SEQ ID NO: 36371 - DNA, 1468 bp, Zea mays subsp. mexicana
  Clone ID: UC-ZMROTEOSINTE086C09_FLI
gattcgtatgtgtcctaaaaggaggcaaactatgcttttctctgctacaatgacagaagaaattgatgaacttgtaaagctttcactaaacaagcctgtacgccttgaagctgatccttctctgaaacggcctgcaacattgactgaagaggttgttaggatacgacgagcacgtgagtcaaatcaagaagctgttcttcttgcactctgtttgaagactttcaagcgaagtgttatcatttttagtgggacaaagcaatctgcacacaggttaaaaataatatttggtctctctggcatgaaagcagctgaacttcatggcaaccttacacaggcccagcggcttgaggctctggaacttttcaagaaaaaagaagtagattttttgattgcaactgatgtcgctgctcgtgggattgatattgttggtgttcagactgtaataaatttcgcatgcccaagagatgtgaaaacttatcttcatcgtgttggccgcactgcgcgggcaggaagagaaggctatgccgtgacatttgtaaccgatgatgatagatgcctcttgaaagcaattgcaaagaaggctggttcacagctgaaaagtcgcattgttgcagagaaacctgtggctgagtgtgcacgactgattgagcaactagaaggccaaatttctatcatcattcgagaagaaagggtggaaagagaagcaagaaaagctgaaatggaaatcgcaaaggcagaaaatatgatagctcataaggatgagatatactcacggccaaagagaacctggtttgctactgaaagggagaagaaacttttggcagcagcggctaaagaatctttggatcacggtaagagtacctctggagttattagtgctaagaaggccgaagaccttcgtctaaaggagaaaaggagacgagaacatgagaagaatctaccaaggaagaagcgccgaagattggaggcccagcgtgagatattggaagatgaggatgacgagaaaacaaaggaaaatgatagagggaagcaaccaatgaaaggccaatctctagtggatgctgcttaccgaaaggcaaaatcattgaaggcagccagcaaacgggcccctggtgcaaggaaaggaaagaaagagaagaatgaaaggcaacattctgagaaggctccgaacaggcatgaagagatgcgtgacctgttccaaaatgatatgagtgaatggaaacagggacgctcaaagaaaaataacaaatttgcgtccaaaaaatcaaggaactcttttaagagcaaagcaaggtacaagcggaagtagaagactcggccatctccgggtttatattacattcccttgtctcaattttgactgactgatcctgaagaaatatctgggatccagatgtttgcagtcaattcaagtttgctttaaacatattctcatatcatgtattgaaactcaccgttttctggggtc

SEQ ID NO: 36372 - DNA, 800 bp, Zea mays subsp. mexicana
  Clone ID: UC-ZMROTEOSINTE086E02_FLI
cccgcaccacggcggcgggggcgggggcggcgccccgcctgtgaggcagcagacgtacaggatctactgcaaggctggggaggaccagtacagcctcgcctcccgcgacggcaaggtctgcctcgtgcgcacggaccgtgatgacgacgcgcagcactggatcaaggacatgaagtacagcaccagggtgaaggatgaggaaggctaccctgccatcgtcctcgtcaacaaagccactggagaggctctcaagcattcccttggccagtcacaccctgttcttctgacccgccataatccagactccctggacgagtctgtcctgtggacagagagcagggacgttggggatgggttccgctgcattaggatggtcaacaacatctacctgaactttgatgctttacatggagacaaggaccatggtggtgtgcgcgacgggacggcccttgtgctgtgggagtggtgcgagggagacaaccagcgctggaagattgttccctggtgaacaaggaaatgtgtgaccgagcccgcaccaaggaggagctcctgccgtaataagtgaagtgattggtactgaagtttctggaaataagaggctcttctgagatgcctgtttgtgtgagtatttgcgtttccattccgttttcatgataataaaacgcattgattattaatatatgtaatgtgatgctacactgagtggcagcgttggtatatatttgtaagaattaagaacccattgttgttggactaagcgtgacgagtgatgtactgatgtatgaacctttgcttgatgc

SEQ ID NO: 36373 - DNA, 481 bp, Zea mays subsp. mexicana
  Clone ID: UC-ZMROTEOSINTE087B03_FLI
gtgggagctcgaggcgccgcgcagcaggatcgtcttcgtggcctgggccccggaggcggcgggcgtcaggagcaagatggtgtacgccagctcctgcgaggggttccgcaaggagctggacggcgtgcaggtggacctccaggccaccgagcccggcgagctgacgctcgacgtcctcaacgaccacgcctcctgaatggtcgaggaggatgaggcgcttgctttgcgttgccgtccacggtccgtccattccgtcaccgtcacgtacgtgcgtgcaaggtggtggtgtgccgtgtacggagggcgtttgcgtagttgcattcgtgcgtactactactgtataataataccgagtcagctcataccgtgcttggattgttcccttcctgttattgctgtatgcgtgtacgcgaacactcgtactatgctcattgatcagcgtgcatcacaagtgctgttgcttgctgctggccacggcttc

SEQ ID NO: 36374 - DNA, 1229 bp, Zea mays subsp. mexicana
  Clone ID: UC-ZMROTEOSINTE087B06_FLI
ggcgtatgctcccctccgccgcaccgtctttcctccggctcccgaggccgaccagccggctccggcgcgccacgcaggtcgccgcggcggggggagaggcggacgtgctgcctggtccgggggccgagggtgaggcggcggttccggggaggctggaggagcagcgggacgagccgctggcgggaagccagctcgacatcggagggctcgccttccagggcgacgtcggcgggggcttcaccggcggcggagcgggctccggggcctccggcggtggcggcgacggcaacaagatgctggaccggggcatcaatacggccatcgttctcgcggccagcacctacgcgctcaccaagctgctcaccgtcgaccaggactactggcacgggtggacgatcttcgagatcctgcgctatatgccggagcacaactggtccgcgtacgaggaggccctcaaagctaacccggttctagccaagatgatgatcagtggtgtcgtctactcccttggtgactggattgcacagtgctacgaaggcaagccaatctttgatttcgaccgtgctcggatgttccggtctggtcttgttgggttcacgcttcatgggtcactttcacattactactaccatatctgtgaggcaatattcccattcaaggattggtgggttgtccctgcaaaggttgcattcgatcagaccgtttggtctgcaatctggaacagtatctacttcgtggtcttaggtttccttcggttggaatcacctaccactatctacagtgaactcaagtctacattctggcccatgcttaccgctggatggaagttgtggccttttgcacacttaattacatatggtgtggtccctgttgagcaaagacttctatgggtcgactgtgtggagcttgtctgggtcacaatattgtcgacgtactcaaacgaaaagtcagaggcaaggaattctgatagcacctccacaccagatgcttcaaaggacaactccagatagcagccctagagaccttggagagctgattcgcccttccatcgcttcaggggttatgtaaattgtacaattagccgcagcaactctgcaggtgtaaccctttttttggtagatatgtatatattcatgaaacatcaattgtgtagtatgtgccatagaatattacgaagaaagtagcgaacttcattcgtccgttctaaaataagtatatttctagcattc

SEQ ID NO: 36375 - DNA, 586 bp, Zea mays subsp. mexicana
  Clone ID: UC-ZMROTEOSINTE087D12_FLI
gcgagcatgtaggaccatttaacctgggcaaccccggcgagttcaccatgctggagcttgccaaggttgtccaggacaccatcgaccccaacgcacggatagagttccgtcagaacacccaggacgacccacacaagcgcaagcccgacattggccgtgccaaggagctccttgggtgggagccgaagatccccctccgcgagggccttcccctcatggtcaccgacttccgcaagcgcatcttcggcgaccaagacaccgcggctgccaccaccggaaaccagcaaggctaggacggaagaggagcacgggacctggaaatttttggtggcctgcttctagctgcttggtcggccctcctctccttactgacaaaagctatggccatgtagttcgtcggaaatgtgtcgctgaaataccttggttgatgctgtaatgctattctttctcctgtattttctctctctctctctctctctcagttcgctcagcccttagctatacaaaaaaaaattccagttgaaccgttggggataaacctggatgatctaattctttgttgagagcatagcatcatatatatggt

SEQ ID NO: 36376 - DNA, 1054 bp, Zea mays subsp. mexicana
  Clone ID: UC-ZMROTEOSINTE087E02_FLI
gtcaagtgcaacatgcaggtggatcctagcaagtacagggacattacatctgcctttggtgtcatgctccatgagcaaggaccccgtggcttgttcaggggatggatggccacactggttgggtacagctgccagggggcctgcaagtttgggttctacgagttcttcaagaagtgctactctgacattgctggtcccgagaacgctgaaaggttgaggactttgatctaccttgcagcttccgcgtccgctgaggtgattgcggatgtagctctctgccccatggaggctgtcaaaattcgggtccagacacaaccgggatttgctcgctgcctggtcgatgggcttccgaagattgtccaatccgaaggtgcctttgggctttacaaaggtctacttcctctttggggccgccaagttccctacactatgatgaaatttgcttgctttgaaactattgttgagatggtctacaagcatgctgttccgaaaccgaaagaccaatgcagtaagccactacaactagcagtgagctttgcagggggatacattgctggaatattctgcgcggctatatctcatcctgcagacaacctcgtatctttcctgaacaatgcaaatggagccaccgtggcagatgctgtaagaactcttggaatgtggggtcttttcacacgcggccttcctcttcgtataattatggttggtactctcacaggagcgcaatgggcagcctatgacgcgtttaaagtgtttgttggactgccaacatctggcggagtggttcgtagctgtgctgctgtgcctcctattcgcgccaagagggtgcaccgagaagacgtgctaaaccaacggagagtagacgtaccgcattgagaagatgtgctgaaccaacaaagcagaataggaaatgtgttgcgatttcactgagttttgtaggagttcgaaaccagttgtttaagttttagctggtagagcaaaagagcattcactttcaaggggcttttattggaacctcttgaacaacagacattgtaatgataaacagctttag

SEQ ID NO: 36377 - DNA, 769 bp, Zea mays subsp. mexicana
  Clone ID: UC-ZMROTEOSINTE087F03_FLI
cccagctttcagaacagatatcaacattgaatgaaaggatggatgagtttacctttcgagttgaagaactcaactcgaaatttacagtgaaaaaacatttgcccagtcagcagaacttagctcttccaaatgatgcttgcaatggttccacgcctacaaatctctttgtctctcatttaggcaatggtactctgatacctcattcttcatcatcaaaccaactttcaaaggattccccgatgatagaagagattatgaacataacaagaggtcagcgccaggttatacatcagctcgacaatctgacaaatctgcttcacgagcatttggtcttaacacgccagactaataataccgccagcaggaaccgggtgctggatagcgacacactcatctgtccacttatttgcctgactgttgccagtatcggttacttcatgtttaaaggtctcagtaggggctgagcaaagtgagttggcccaaacatgtgctccgaggctcaccaccaagttttggcagaactggagctaaaggaagacagttcttgaaccgtttacatcaggaagatcatatctaacagcttacggtcttattaagacaggtaaacccatataccagcacatggaacaaagctttcgcttttcagggagttattactcccaaacgcagaaaatggtgtaccagaagcatacacttctgtaacaggcactggcagttcccagtgccaataaattttggaggttaaaataatgctcagataatgtcgaag

SEQ ID NO: 36378 - DNA, 908 bp, Zea mays subsp. mexicana
  Clone ID: UC-ZMROTEOSINTE087G12_FLI
ctcctgcggaaaccaatatcaactcctttccactacatgagtctagtgctggacagaatgatgcaggatgcagtctgaatatctctcataatttttctgcaatggttgaagatttgaaaaatgatctcccagtaattggtcgatatcttgagggaaacttgcttccttcagatgttgcaagcttcctagagagggtgagcacgatgatcaagagttataccccaccacagggcagccgaaggaaagatcgagtaagtcatggccacgctgacccagtcaggtcaaagaacccaagaaaaaggggaagacattcactctttcaagattcttttcctcatcggtatctaagcaccccggtaaacatagtgtttgatggcaccattcctctactaaatgggggtgaggcactgaaggaacaagtggccatggatccctggcgggtctcccagtcccatttgacgatgaccacatcttcttcatctctagactcaagctcaccagaatcaatgaagcggaggcgggaaggtggggatgaaattccaatcacaagggacactgattgcctccaaagtggaaggctctgtgtgcagctgaaaatgttcaagcacagagatggagtgaatgccgaggcagctaatccgattttccgctgacgaagacaaaactttgcttggtcttcatattgtacaaagtagcaaagaaacatgacttgtttgctgcactgctgacagttagctggccacaacaccgctctgcggtattgctgtctgcaatttgcgaggattttcctgtgtttatatcgttgtgaaacagttgcctctgtgaaatagatgccttttcagaagcgatagagttgtaactgtttatgacaattaacatggctattaaaggggcaagtcttttggcac

SEQ ID NO: 36379 - DNA, 766 bp, Zea mays subsp. mexicana
  Clone ID: UC-ZMROTEOSINTE088A08_FLI
ggcaaccacgctgcgacgccggcgccatcggggacgccttccaagggcaagtcggcggcagcgcaggccgcggctttgggccacggttcctcctcccaccaccactctgccggtggtggcggtggtggcgctgacgcgtccgccaccaccctcaagcgcaagcgcggcgtcttccagaaagacctgcaacacatgatgtatggctttggggatgatccaaatccacttccagaaaccgttgcacttgtggaagacattgttgtggaatatgtcactgacctggtgcacaaggcgcagaacgttgcctcaaagagggggaagctcctgacagaggattttctttatcttatacgcaaggatttacggaaactgcaccgtgctactgaactactgtccatgaatgaagagctcaagcaagcaaggaaagcttttgacgtggatgaagagacgctggctacgactaacatatgatgtcttcctagtcgtaaaatctgcgtgttactgtaaccagttgtacaatgcactgcatgtgtcggactattgttggcgtcgacttgtaactgttccgctacagactttagctattttcttgacagttactgcgttaatgtctgtatgccctgctcagtgaagaagtccgctggttccacacattcgcaatgtaaaaatgcacagttttttttgcttgctttgaataggacaattcatgaaaattactggtggaggagatattttgaagtaaaattgccagacaatttacagattt

SEQ ID NO: 36380 - DNA, 2311 bp, Zea mays subsp. mexicana
  Clone ID: UC-ZMROTEOSINTE088B05_FLI
gttgtgggtcgtgggtcacggaacaggattatcttcagcgcctagaccccagctggagcaaacacggagtcgaggaagaaggccaagaaggcagaggaggagagggacgctgagctagcttcaggactgcgtgtaatccagaaccccagagatgagatggcgcctgtggagccccttccggaggctcccaacgacggtaggcccatcgtgtgccccatgtcagacttctgccctctcacgatcgatggggtgctgaaggagtcgttcctagagacactacgaaagaagcgaagatggagtggcttgcgatttctgcactgtgaactgattccacaattctactagcttttcagttgcagaaattacaggcgggtccttgtataggggatatatcatcatcatgtgctctgcaaacatggaatgtcagcattcagcaacagaaaattccaacagtgaaaaggtcccttctgggactggaaaggctatacttagagtgcatgaggtgagttgatatcttgtctttacgttaaaaaaattgatatcctgccttcctattgcactgccttgtcaaaaaagaagctttgtagtgtgcaaattttgtcaaagactgactatattattgttttttaaatgtattaaattttattatgatctcccataatagttatgagattatgcaagcaaacataccatgaacaatacactttattcatagaacccctcagttttaaatttgtttttgaaagatctagaacctttgattctagcttatattaataagaagaagaaaattgccccagtttataggggaaactgggttagtttaagtaaagcactagaaaattattctctgtatctcaagagcagttgttcttgagaccgtgatagtttatggtaggtaatcttcagatattttaatacatcttcaaaggtctggattggaaacagaaaccatgttacatgtcataactcacaaggaccatacaatacattgtagatggtaacctgaatgaacatcaaaaaacacagtaacaaagtagtgctaaaaacactttgtctggatttgctcagtttgcgaacacaaagcatagaatgatttcccatgaataaattggttggtcaatcacaacagattgcctaagaactattataaagaagaactgaaaagataaagggtagaaatatcaccttcgcattgaacctcaatgagctaatgtaccccttgacatcatttgataacaagtagttggggtccaggttaaaataacttgaagaaattttcttccatgaatttctctgtgatcaaattattccatagatacttgtaacgcattagttgaagcctaccataatcagatgatcatctatcatatagacttcatagatcatactaagataatcgtctatcatacaaacttcatagatgttatcgctctcaatgtttttccaattgcattataccatcttgccacttgtttgctaactgctctggactcaaagttactgctgcagtaacggtcaaactctttacacggcaacaccacttgcatgtatataaataggatcaatctatttttgatccggccctgttattgatttattttgcatgctactctgatttggtcagaaaaccatcactgagaaaaattctgtgggcatgttctttctaagctttcctgtgcatcgatttgaacaaaataattcagtgagtatacaaattaatgcctttttgcctcttttgtttttctttttgtttatttttacaagcttctattaatactaggttgttgctgcaaaggaccctaacaatgctttctttaaaagatgcgatggttttcaaccttgtgaagtaaatgaaccgaaagcaggaacccattattttgccatatatgcagaagctacgaagtgtggaggcaaaaacaatctgctctgtctaaatttgagtctgagtatcaagaggttttggcaaagttcactgagatgactaccagatatactcaagaaatgcaaacggtatgtgcatatgtgggcgaccgccgataatgtcctgcaactgtaatttcttttagaaagatgatactgagattaatgttgatgttgtggctccggcacctcagattttaatcaaacatggtctccctgggattgaaatatattgtcgtacaccttctaagctgctgcatatatagactagatgtcatcttcaaggactgctttcttcttgagattgtacctgcatttaggaaactgcatatatagactagatgtcaccttctaaactgcagcttcggaacatgatcttatgtttacc

SEQ ID NO: 36381 - DNA, 1415 bp, Zea mays subsp. mexicana
  Clone ID: UC-ZMROTEOSINTE088F07_FLI
ggggcacgcagcgacattcactcgtcggcttagggaccccccggtctcgaaacgccgacaataccggtccatgataggttcattgctttatttatgtgctagtagaccagacattatgctaagtgtatgcatgtgtgctagatatcaatctgaccccaaagaatgtcaccttgtggccgttaagcgaattcttagatatttagtttctacgccttgcttcgggatctggtatccaaaggggtctacctttgacttgattggatactcagactccgactatgccgggtgcaaggttgataggaagagcacatcggggacgtgccaatttctagaaaggtccctggtgtcctggagttcaaagaaacaaacatccgttgccctatccaccgctgaggccgagtatgttgccgcaagactgtgttgcgcgcaactactttggatgaggcaaaccctccgagattttggctacaatctgagcaaagttccactcctatatgacaatgagagtgcaatccgcatggcggataatcctgttgaacacagccgcactaagcacatagacatccggcatcacttcctgagaggtcaccagcaaaagggagatatcgaggtgtatcatattagcaccgagaaccagctagccgatatcttcaccaagccattggatgagaaaactttttgcaggatgcgtagtgagctaaatgtcttagattcgcgtaacttggattgatctatagcatactgtgttctatgcctttgatcatgttactttatgcatttaaatccattattgtggtgctcaagttgtacatgtgatccccggacctcacaagtccatttgcaagtgatacacatattaaggggaagatgtgctacaacttgaccttttgagactaacctggttgtttgagtatacttgatgtagtctaaaaggtgcttgaaaagggaaatgtggacttggacgatgcaaagacttccactgcactctgtacccaatgattcagactcatctgatgcttctgcttccttacatgaacatgcatcatacccaatgattcagactcatctaatgcttctgcttccttacatgaatatgcattagcagagatactattgcaaaatacagccacagcatgaaggaccttgctcaacaaattgttgtgcatcatctcagaaaatctgagcctgccaccatcttatatacaagaggcggttggagaagttttccagaacattactattagctactattctccgtgtccacaacctgatcttgctcttgggttacaatctcatgataaacaatgcttgttctagtttcagttcttcagtgtttttatgattatatctatattgtttaattatgaacaacttgtatctgaatctgaatgtaacagattactaaattttacgac

SEQ ID NO: 36382 - DNA, 1291 bp, Zea mays subsp. mexicana
  Clone ID: UC-ZMROTEOSINTE090A08_FLI
tgattttgggtccaaggctttggttggtgaggggtcatatggaagagtatattatgctgttctggaaaacgaacaacatgtggctgtcaagaagcttgatacttcagcagatcctgagcctgataatgaatttctagcacatgtatccgttgtttcaagattgaagcatgaaaactttgtggacatgcttggttattgtatccaaggagatcaacgtctattggcttacgaattcgctacgatgggctctctacatgatattttgcacggaagaaaaggtgttgcaggtgcacaacctggacctgctcttgattggatgcaaagagtcaaaattgctgttgatgctgcaaaaggtcttgaatatcttcatgagaaggttcaaccttccatagtccatcgagatatacggtctagcaatgttcttttatttgaggattacaaggccaaaattgcagacttcaatctttcaagccaatctccagatatggctgctcgtctacattctactcgtgtccttggaacctttggatatcatgctccagagtatgctatgactggccaactgactcaaaaaagtgatgtatatagttttggggttgtccttttagagcttcttactggaaggaaacctgtagatcatacaatgccaaggggccagcagagtcttgttacttgggcaacaccaaggcttggtgaggacaaggtgaaacaatgtgttgatccaagattgaatggagagtaccctccaaagggagtagcaaaggtacatcccgttctctcgctctatgtgttatttatttgtgagacaaaaatccacatttttcaaatcgcctactgaaatctgaagtcattagtataaacaaaatcagcactggctgcaacacatttgtgaaataccaagccatcagcaattattatttcctttttttgttgttgctgcagctagcggcagtggcggctctctgtgtccaatatgaatctgagttcagaccaagcatgagcatagtagtcaaggcgttgtctcctcttcttgtgaatgcaccgtatcagccggctggtgctcctgatgtatcttcagatgcctgacagcatgcgcaactgaaaacccatgtaaagaaacaccatttactttcggtatgccattttttcacgaattattcatctttcgtaaaatcagaattgtgtgtgtgtttattggagaggaagggaagaggaaagagtaacgcatttgttttgaacccatgtacttcgtgcttgagagctgctgcagttgaaattaattacttaatct

SEQ ID NO: 36383 - DNA, 1454 bp, Zea mays subsp. mexicana
  Clone ID: UC-ZMROTEOSINTE090C12_FLI
ccgggctcccttggtgcctccactgcaattcgggaatgggttcgtgtcgggggctgtcggtcagcagcgaggtggtcccgtgccccccgcggtatcgcccaggcctgtgacggccagcgcgttcgggaagatggagggagacgacttgtcatccctgtcgccatcaccggttccgtacattttcggtggtgggttgaggggaaggaagccaccggctatggagaaggtagttgagaggaggcagcgccggatgatcaagaaccgggaatcggccgcgaggtcgcgccaaaggaaacaggcatatatgatggagctggaagctgaagtggcaaaacttaaagagctgaatgatgaattgcagaaaaagcaggtatgcttatacaatgtttgcatttttgtttcttggggcgcattaacttatgaaagtatttctcctgaaatagtgaaattcaaatagtttgttaatattcattcctgaattcgagaacctttggaattccagagaaccttttgtactttagcacattcttacatctttttcatcaatacttgtacattgtttactttattaggttttcaaaagtcaagttatcaatttttttacattttttgtcaatcatcacagtgcatttagtgttttttagcaaaaaggcactctggagcatttttggtgacgatgatttaatggtaaattggtaatcaccatagagcatttgacaaagtgaaatgcagtcgaagtccatctgataactgaaccatagatctttagtgtccatcagataaaaggcactatggagtagttcataagagttgtccttttcttctgtattttcttcttaaattagtttatcagacaaggaactgctgtaacttccatttgtgaatagttgcttcttggattctgatttatgacaatatagcttattgtcagcaatatttctgatgaactagaacatgtcagctttgcagccttatatgactaagttctatgtgtagtgagatcgcattctttatatctgctgttgtttagtaaatgactatcttttctaatttgcaggttgaaatgttggagaagcaaaagaatgaggtcctggagaggatgagacggcaagttgggccaacggcaaagagaatttgtctgcggaggacattgacaggaccatggtgagctgtagacccgtacggctgtacctattagcagtatatatgtagtaggtgaaggtgaacacacaaaggccagagttgccctggttgacacagccattaatccggagcttcggtctcgtaggcggatagattgcctgtgatttccacttcataggttttgcccatttgcaacaacaaaaaaggaaaaggaaagaaagaaagttcgggcgaatagaggagtttgtatgtagaaagaaagtttagattgtttgactcttataatgcgagatgaagacttattttgggac

SEQ ID NO: 36384 - DNA, 895 bp, Zea mays subsp. mexicana
  Clone ID: UC-ZMROTEOSINTE090G05_FLI
gctgttgggattgatgttgttagcgactgtaaaggggtagttcattcctggttatctatgaagctttcatcagaggaagctaatagtgctttcagagtattatctggttgcaaggtgaacaaagtttgtccactggagtttgacgaaccttcttcagtcgttaaggcgtgtggcaaggcatcatcttcaacgttatcatgctgcgcagcattgcactcttacattggaactaggcaaaaacagatatttgtcacaaacctgcaagcaattaattgtgcaacaatgtttggatcaatgctacagaaagctggtgtggtggatgacatttatgggctttgcgacattgacttgaaagatttcagcttgcaagattttggacagcaaggctgtctacttcggagcttacctacagatattgtgttcgacaacactacaggcattagctttacatgcgatttgagtgacaatattgcagcaccatggccatcctcatcttctgtccaatcattgtcactttgtgctccagaaatgtcgctgcctgctttgcctgtctcgccgaaatcagaaagctcaggtccctccagaactgggatcggtgttttgttgctgcttgtattcctcactaccatcactatctgaggaatacttccatctagtgagccagaagcttcttacccctgttgtatttttttccatctgtgcaggcccgcgtgtaaattgtctgaattacattcttgtaaatgagcctcccccttgtgtctctttttggtccagtggatagatcacagtgctgttgtgttagagatgactgttgtaccattttgtgtctgagcactggttgaaagtaagctagatctggagcttcaccgcagatgatgatcgaatggcatttaac

SEQ ID NO: 36385 - DNA, 1616 bp, Zea mays subsp. mexicana
  Clone ID: UC-ZMROTEOSINTE090H10_FLI
cagcagctgcaccagcgtgtgctgccggtgatgcgcctgcatcaggtggtggggcatgtgccgctggcggtctctgtaccgcagcttcgtccggtgccgccgcagccagtccagcgccccccggtcgccgttcccttgaaaccagagtcaccaaaactacgggcaagactgtacgaagggaaagatagtactcccacgaagaagaagtgctgcaactgcaggaactccaaatgtttgaagttgtactgtgaatgctttgcttctggtacttactgtgatggttgcaactgcaccaactgttttaataatcctgataatgaggttgccaggcgtgaagctgttgaagctatattggatcgtaatccagatgctttcaggcctaagattgggagcagcccacttatgcataggaataatgaggtgcctagtgatctccctttagtagggaagcataataaagggtgccattgcaagaagtcaggatgtctcaagaagtactgtgagtgcttccaagctaatatactatgctctgaaaactgcaagtgcatggattgcaagaattttgaaggaagtgaagagagaagaaatcttttccaaggggatcacaaaaatgcaattaacatgcagcaggcgacaaatgcagcagtaaatggtgctattggagcaacaggattcccttctccttccacatcaaggaagaggaaacataatgatccttcacttgaccatttcaataaggaacatatagcgcacaagaattgtcacatacctcaggtcagaaaacgaaggaagagagggtcggcgagaaggaagatgaaatcggagggcagaaggaagatgacagggtaggttccctagcattgacaaaccatgatagagaaggaaataatcaagatcaagatcaaaaagcaccaattgatgaccattcaagcagaggaactcatacgggcaaagctattatagaagaatccagacctaactgcgttgatgatcataagacccatagacctatgtctcctgtaacactagcactgatgtgtgatgaagaagcatttgagaaaatgtgtgacgaacaagatacaatgtttacgacttctcaaaatgctgctcctcagcagacagtaattgtcaaccataaccaatctgcactgtatgcagaacaagaaaaggttgtgctgacagaattccgggattgcctccgcaagtttgtgagatacggaagaatgaaagaggaaaggtactccatggcaatcaaatctgaaacatctggtcatcctggacaggtaaatggtgtttctcaagtaccatattcaaaagtagatgtgcctgctgtaaaaacatatccacagagttccagcagtcatcttgttgctggaaaacctgttactggccttttggacaaaaactgaagccttggcgttccagatttgtacttggggtgttgcaaggatcaagggaatagtatttttaccctattaacatgttgatcagatacatgtatcagtcttgatagataatttaggtgttagagaattccaattttttctcattggtcagaataagtgtaatgctggaatctggatagttagtttagtaataaatgccaaccttgtaat

SEQ ID NO: 36386 - DNA, 672 bp, Zea mays subsp. mexicana
  Clone ID: UC-ZMROTEOSINTE091A03_FLI
tgatggttccagatccaaggctagatgtttcacatcacaaaggagctgaccaagttctcacttcactattggaattcaatcctagcgaatggggcctgccaccttttgtggattagattattttcagagacatcaagcatgtttcacagacacacaagccctacaaccacacagtaaacgcccgtattcatattagggaaatttttttggttgcatatagttagaaatttcaacataaaaaaaggaacacacctgtttctgcctagtaatatactggtgtaactactactaaacatctgtgctgctactgcagtttacagtatttttaagaaacattcttcatatataaattttattttaatagaaatttcaattgattttggaattagtagcaaaattttcaattttctacctgcttgccacagaaaatattatgactccccataagtagaaatttcctttgttgaaatttaatacaaggttcaagaaaacaccgttggtatgcacgcgttaggctagcgcctagcgcccaggacgtttaaagatagattaatcgtgtttaaacgtaacacattgtacatgagcatagtaataaaaacaatatgtctattctcatgtcattttcagtccgttatcatacaatgaaagactcatctgaatctgtttgggagt

SEQ ID NO: 36387 - DNA, 1149 bp, Zea mays subsp. mexicana
  Clone ID: UC-ZMROTEOSINTE091B10_FLI
cgaggttaaacttttcttgctcctatctgttttgctgcttcctgattataatgcatgactgctaaatcatacaaatatattccagcgcactatctacatcccacaaccaacctggggaaatcacccaaaagtcttcaccctatctggcttgaacgttaggagctaccgctattatgatcctgcaacatgcagccttcacttcgaaggactcctggaagacctcggttctgctccttcaggttcaattgtactgctgcatgcctgtgcccacaaccctactggagtagatcctaccatcgaacagtgggaacagattaggcagctgatgagatcaaaatcactgcttccgttctttgacagtgcctatcaaggctttgcaagtggaagtcttgacaaagatgctcagtcagtgcgtatgtttgttgctgatggtggtgaacttctcatggctcagagctacgctaagaacatgggattgtatggagagcgtgttggcgctttgagcattgtatgtaaaagtgccgatgtagctgttagggttgaaagtcaactcaaacttgtcatcaggcctatgtattcaaaccctcctcttcatggtgcctctatcgttgctaccatactcagggacagcgagatgttcaacgaatggactctggaactgaaggccatggctgataggatcattaacatgaggcaacaactatttaatgcgctgaaatccagaggaacccctggtgattggagccatatcattaagcaaattgggatgtttactttcactgggctgaatagcgaacaagtcgcattcatgaggcaggaataccacatttatatgacatctgatgggaggatcagcatggccggtttgagcatgaggactgtgccccatcttgcagatgccatacacgctgcagttactcaactgaaatgaggatagtatcgcagctttcgtgaataaaacctgaatcacccacaacaatgttctaagtactcagccagtggtatttactggttgacctactgtagtttgcgtcggaatagatatgtttttttactcttcgtggggcagttttgtactggtggattcataaggactctgattatggtgcgttcggaacttataataataagcacatgaaattttgcttc

SEQ ID NO: 36388 - DNA, 1565 bp, Zea mays subsp. mexicana
  Clone ID: UC-ZMROTEOSINTE091B12_FLI
caattcgacaagttcagacgacaggaagacgggagcttcagcagcgacatagctggcgacccaaagggcttgttaggcctatacaacgcagctagccttttgaaccacggcgaggaggtgctcgaagaagcgctcctgtttgcgaggcggcacctggaatcgatacgacggggtggtggcctccacgactccccttatttgtcggaacaagtcgggcgctcccttaagatcccactgccaaggaccctcaagaggctggaagcagtgtcctatatcccggaatacagcagtgccgacgacacaacgtacatccaccctgagatactggagctcgccaggctagattttaacctcctgcagcatgttcaccagaatgaactgaggacagttactcagtggtggaagggtctttgtggtgtcattgggccagactacgggagggatcggattgttgagtgctacttctgggctttcagtatgtactacgaggaagagcatgcacgggcacggatgatccttgccaggttgatcatgctatcatctttgttagatgacactttcgatgatcgtgctactttggaggagtgtcgggagctcaacaaggctatagaaagatgggatgagagtgatgatatttctcttctacctgagtgcatacagaagttcttcctcgaggtgatgaggaacttcgcagagtttgaggatgagctggaagcgcacgagaagtaccgcgttgcttacgctaggaaagcgttccagctcctatccaaaagctatctccaagaggtggaatggtgccaccagggctacacaccaagcttcgatgagcatgtcaacttgtccactgcgtcggcaggtattcaggtgctgtgtgttgggatgcttgtgggcatgggcgatgccgccaccaaggaggtattcgagtggatgattggtagcaataaccgtgtcgtacgagcgtgtgcagaggtcacacgattcatggacgacatggcagatttcaagagaggaaagaacaaaaccgatgtcgccaccaccgtggagtgctacatgaaggagcagaatgtcacgggcgaggtcgccatggacaagattgggtcctttgttgacgacgcatggaagacactaaaccaagcagcactcgttggggaccgtgctctgcttccggttgtgcaacgagtcgccggcctcgcgatgagcatgatggtgtttttccacggcaaggttgaccgttatacggacagcgagcacctcaaggaaacgctggaagacctgttcgtcaaccatgttcccctctactagctagcagtggccggaatatatatggattacttaccgtacgtaccatctatgttgtgtgtgtgaaggatgtgttggtaataataatacacagaccttggtaaatgggacatgaggatatgtatccattgtacgtacgtgtttgcatgggaaacctatatatattatcttgtcttagtttgttcttatgtgtctccacgtattggtgttgtgttctattgatatcattcttaaactcataatggagagctggattatcctttggc

SEQ ID NO: 36389 - DNA, 343 bp, Zea mays subsp. mexicana
  Clone ID: UC-ZMROTEOSINTE091C10_FLI
cttatttcaaagtgcctacgtcctccttatggagtcctgtacgtggcttccaagaagaacttggttggttccaatggtggcgccaggcagcttcgagctctcatggaagaggaaggtgtccttggtggccacttcttgactgaggtgtgtgacagggagatatggaagttctttttcaagtgagcaaatataggaagtgggaagagaaggaaatgagttctgacgttgaaacccagtttttatggtttctatctgcagcgatgtacataccgcgaggcatagttccattaattctttggtagtaggttgaaacttcaagaaatatctgcagttgagcttgcac

SEQ ID NO: 36390 - DNA, 1038 bp, Zea mays subsp. mexicana
  Clone ID: UC-ZMROTEOSINTE091D01_FLI
ctgaagctgcatgccagcaaaggctttcctttgctgaagtggaactagaagagttaaggaccaaagtagatgcatctgaaagagatgttgtggaacttaaggaggcaataagaattaaagaggctgaaggagacgcctatatttctgatatcgagacagttggtcaagcatatgaagacatgcaaacgcaaaatcagcatcttcttcaacagcttactgatagagatgactttaacataaagctagtatcagatagtgtgaagatgaaacaagcttgtagttcccttctatctgacaagcttatgctagagaagcaactccagcaagttaacacttcactggagtcatctaaactgaaaattgcccgtggcgaagagcagatgaagacttgtgtagcgcaagctataaaaacttcagctgaaaacaggcatcttactattagcctggaaaggattgcgctggaggtatccaacacagataaggaactcaagtggcttcggtcctccgttggatcctctgagaaagaatacgagcaaactcagcaaaagatatctgagctgagagcgttactggagcacgagaggagtgagaggcggcggcttgaagaacaatatgaagaggtgaaaaatgaagttatggagctgacctctgagaccgaagagactactgtccggaaacttgaggatgaaataaaagaatgcaaggctattctcaagtgtggtgtatgctttgaccggcctaaagaggttgtaatcaccaaatgtttccacctgttctgctcgctatgcatccagagaaacctcgagattcgccaccgaaaatgtcctggctgtggaaccccattcggacaaaacgacgttagggaggtgaagttatgaacctcaccaaagtgacagtgacaaaaccgacttgcgtgtgaacagcagcaacaaactcccttgtgaatatcgtctgttatgttgggatctaacttgctttattactgggattaaaattaggatacgaattggaagaaatgaagttcctaatttatttgtt

SEQ ID NO: 36391 - DNA, 842 bp, Zea mays subsp. mexicana
  Clone ID: UC-ZMROTEOSINTE091D03_FLI
ctgctgggaagcataacaataatctttttgatggccacccaagtacattgaaaagagtaaaatcagatggcaccattcttcatgaaagtaatgcttctatatctggctctggtcgttgccataatgaacagttaagtgcatcgcagcctgatgtccagaatgggtttcaattcccaacttcagaatccgattcacttcatgaaaatgaaatttcatcagcttgtggaagtggaatagcacacctaaggtatactcccacagcctctgacgtgcttcatgtcccaagagctaaagttgaatattgccatgattctggtgattcaaactttttggatcttgaatggctttccacttcaggcaactcaagtgatgaaaggtctattgcaactagcacgccagatgcaaacctatcaaatgagaatgtcattagtggcataactcctgatatcatggaaaaccatcttgctgaaatgcagtatcagaagttacctcggaattttgtgcagtgggttaatcacggtgataccttttggtactaagatcgcaattactggaattcaatatgtcgccagcttcccagggtgggcattaacacggatctgagtagtagattatagagtgatatggatgctgcggcaaggcatttctcccgtgatatactccgcaccatccccaaagtcctttattggtccacgtgtttttacaatgggtgagtagatagatatctttctgttgaaagaaaatagagatgataattaggcttattattgttgacctgaaattgtcattattcatgggaacatgtcatattttcttgtgtaaatatatatgcttgaggtgcc

SEQ ID NO: 36392 - DNA, 466 bp, Zea mays subsp. mexicana
  Clone ID: UC-ZMROTEOSINTE091G08_FLI
cgatatttatgctcgagtggactctgttcctgtggctgctcggtaagaccatcggcttctcgtgaagaagacggcgatgaaaagaagagaggtgtcctgtgtccaacgtccggatggtcgtttttgagaggtttcgcatgtcgcggttgccctttttggggatggatttggatgtggtttgtttttcggtcatcgtggaagggctttttttcgcgtgagcctggctgttggcacgggagcgttgcgcgtgtacacctcaacgcctgtgtatgatagcgattttgtatgatgtgtgtgtataaattgtgaaccgtaattgtccttgtaaatgagcgttgtacagtcgtacacgggtaatgctggtttttacaatctcgttgtaagccaacatgttgtagcgagaatttagattgtaaagataaagattcttgtttttttaaatcttaggagggtatgaaattagttc

SEQ ID NO: 36393 - DNA, 870 bp, Zea mays subsp. mexicana
  Clone ID: UC-ZMROTEOSINTE091H01_FLI
tcatcaccgagtttctgtccggcggttctctgagggctttcttgcgaaagctggagcgtgaaactcttcctttggagaaggtcatttccatcgctctggatatcgcacgcggcctggaatatattcacctccaagggattgtgcaccgtgacatcaaacccgagaacatcttatttgatggagaattctgcgctaaagtcgtcgattttggagtggcgtgtgaagaaaaatactgcaatttgttaggcgatgatccaggtacttatagatggatggcaccagagatgtacaagcacaagccatatggccggaaggtcgatgtgtatagctttggacttgtcttgtgggaattcgtcagtggttcgctcccttatcaagatatgactccgcttcaggcagcttttgcggttgttaataagaacttgaggccggctattccattgagctgcccagcagcgctgaagcttctgatcgagcaatgttggtcctggcaaccagaaaggaggcctgagttccagcaaatagtttcagtccttgaaaacctcaagacagttcttgaaagagatggaacactcgacaagatcccaagctcgatctgccaggccctggaacccaatgaccagaacaagaagaaggctggcaactggatccagaggctgtcatacgctcaacctgctttctccggacctccacccccaaagttactgtagttacacgtcttcttgttcttagcagcttggtatctggtactccagatagcaagcgtgtaaattgaatctttcttggtttcgctgggagaccagagatttcttcatggtatatactcggatacagtacatacatcatttttgggggcagtgggagcacagt

SEQ ID NO: 36394 - DNA, 789 bp, Zea mays subsp. mexicana
  Clone ID: UC-ZMROTEOSINTE092A10_FLI
tccctgtctgggtccttcatgccaaccgaaaacggcgggacacgaagtcgatcaggtgggatgagcgtgtctctcgcgagtccagacggtcgtgttgtcggtggcggggttgccggcctgctggtggcagcgagtcctgttcagattgtggttgggagcttcctgccaagctaccagatggagcagaagaacaagaagccacgggtggacgcggcacctgctgccgccgtcccgcagacgcctcccgcagtcccgatctcgagcacagacacccgcagcagcgagcaagggcagcagagctccgcgtcccagagaggggtgaacatgacggtcccgggaggaacctacggcgcggaccagagctgggtgttgtcccctgctccgcagcagccgatggccgaggtgtccaggacgccgtcgtctggggacctgaagatgaccacgtccggatcatgagcactctgaaacccagccggagctagccacccacgcactgactgggagccaaggtccccgctggaagatggaaggatggggtcatggattggttcatttgttcctgactcttgctgcaaatctcgcactagggcggtctagtctagttgttgctgtatgatgagcgcgccaggcaggaggaggggagtctaacaactgcacttgctgccattgtcggggagtgcgtgtgtgtagtgcagcagctattaacaccacagtttgagtgtgctagcggcgtgtgtttttatttaggctacattgtcgattaaattcttgtgtcgggattattacctt

SEQ ID NO: 36395 - DNA, 667 bp, Zea mays subsp. mexicana
  Clone ID: UC-ZMROTEOSINTE092B03_FLI
gagacttcacaagagtatagctgtatctctatagcgccgatagatccatcctttctttccactcctactagctagctaacatatccacacatggcggccagttccaaggtcgtgtgcgcatgcattctcatcgttctcgtcatctcaagccacgccgacgcgaggcggctggtggcggcgacgtgcaacggaacggaaggagcatgcaagggtggcatcttcgtccaaggaaatggaggcctcagtgcaaggcagaaaatggcggccactgcaacgagcactgagcaggtcgtcgtcggcggcgatggcatgccggcgaccaccacggactcccggcctacggctcccggcaacagccccggtattggcaacaaagggaagatcaacaactagtttaattgccgtgtgttcttgtacgcgttcttatctaataagcatccaattaagctgagtgctagtagtgcaccgtactcgtttattgtataatcttgtgctttgccagcgccaccatatttatgtcctcattattttctcttttcatttggtattagtagtttcgtgctcgtctctgtgtacaatgttcagttcacactgtgcattatgaacttttgtattattatcttgtaaccatgcatatgttcgcacaaattaaataaagttctgcgtc

SEQ ID NO: 36396 - DNA, 1249 bp, Zea mays subsp. mexicana
  Clone ID: UC-ZMROTEOSINTE092C10_FLI
cgacaacgtgtcccggccgctgtacgacgggctcaagtgcgccttcatcttccccgaggtggcctgtgacaagtatggcaggaaggatgtcatgtaccagcactggagatggcagcctcatggtcatggatgcgacatcccaagattcgatggcatcaagctgcttgaagagctgaggaacaagagactggtgtttgtgggtgactcggtgaacaggaaccaatgggtctctctcgtgtgcatggtggaggcctcgatacctgacgacaggctcaagatgcgcatcttcaatggctcgctcatctccttcaaggcactggagtacaacgcgacgatagatttctactggtcgccgctgctggtggagtctaacagcgacaaccccatcatccaccgggtggagtaccggatcataagggcagacaggatcgagaagcacgccagcgtgtggagggacgccgacgtcatcgtcttcaactcttacctgtggtggaggaagcagaaggatgacatgaggatgaaggtcatgtacggttcatttgaagatggtgatgcaaagctagacgagatggaaatggcggatggtttcgagatagctatcaagaaactgacggaatggcttgcagagaacattgacaagaacaagactaggatatttttcgcaggatcatcaccaacacattcctgggctagcaactggggcggagaagacaagaacaagtgcctgaacgaaacggagccgatctacagacccggcgggtactacaaggcggcaaccacggactacagcctgatggccaaggccaggtcctacttccagcggacgctggagccgagaggcatacgcgtccagatactcaacatcacggagctgtccgactaccgcaaggacgggcatcccacggtgttcaggaggcagttcgttcccctgaccaaggagcagatcgcggacccggccagctacgcggactgcacgcactggtgcctcccaggcgtccccgacgtctggaacgagttcctgtatggctacctggtgcacgtttagattattattagggatggacctgctgttacatgtagagagagagagacagacaggagatctgtcttgcccaacattaattctagtatctgtaaatcttgttcttcttgtccaacattaattctaggatctgctgctaaccattttttttttttttggatttatgtaaagaatgatctgagtttgctgttccagtattgagcaagt

SEQ ID NO: 36397 - DNA, 1019 bp, Zea mays subsp. mexicana
  Clone ID: UC-ZMROTEOSINTE092D05_FLI
cttcggcaaacccaggggttttggaacaaatgacaagggagacgatattggcttcaacacagaagtttattcagcttctgagatcgatcgtattgcacgagttgcatttgaggtcgctcgcaagagaagagggaaactatgctcggttgataaagcaaatgtgctggaggcatccatgctttggaggaaaaaggtgactgcactagcctctgaattccctgacattgagctctcacacatgtatgttgacaatgctgcaatgcagcttgtcaggaatcctaagcagtttgatacaattgtcacaaacaatatttttggtgacatattatctgatgaagcatcaatgattacgggaagcattggaatgcttccatctgcgagtgtcggtgaatctggacctggtctttttgaacctattcatggctctgcccctgatattgctggacaggttgagatgacttctgtttcaaaaatttctgacaccagaatacttgatggggtttaaattatgtttgtttggaatttgcttcccctcctgttattatgtgttgagtgcaggacaaggccaatccattagctacaattcttagcgcagcgatgctattgcgatatggcctaggagaagaaaatgctgcgaggagaattgaagctgcagttacagaaacactgaaccatgggttccgaactggggacatatattctcctggaacaacactggttggatgcaagcggatgggggaggaagtcttgaagacagtggagtcactgaaggaagtggctgctgtgaactgatgcatgctggtacttgattcattgcattttattagaagtcgagccgagcgtaagagagcatggtgtctgggttattgttgatgttgaattgaaagtttagtggctgaaccgatagccacttcgcatttctgtggtttgtttgtctccctgtagttttttctttggtacaaggaaaggataggcatatgtttgctcaataaaatgggatagtttatgccgctttgaat

SEQ ID NO: 36398 - DNA, 2145 bp, Zea mays subsp. mexicana
  Clone ID: UC-ZMROTEOSINTE093B01_FLI
gatgaaacaatttgccaagagtgatacttctgttctcaagcaacattatgaaaagaagttaaccgacttggagcaagaaaagaaagctcttcagaaagaaatagagaatcttcgccatgcattaaccaacatatcttcttctatggatgataatgctcaaaaagtgaaagaaaactatcttcagaagctgaatgcacttgagtcccaggtccatgagctcaagaaaaagcaggaagctcaacaacagcttctaaggcagaaacagaggagtgatgaggcagcaaagcgcttacaagaagatattcagcgtataaaatctcagaaggttcaacttcaacaaaagatcaagcaagagtctgaacagtttaggtcttggaaggctgcccgtgaaaaggaagtacttcagctcaagaaggaagggagacgaaatgaatatgagatgcacaagctcttggccttaaatcagaggcagaagatggtcttacagaggaaaactgaggaagcagctgctgctacaaaaagattgaaggagttgctggaagcaaagaagtcatcacgggaaacatatggcagtgcaaatggttcggggatgcaggccttaatacgagctattgaggatgaactagaagtcactgtaagagcacacgaattgcgctcatattacgagcgacaaatgcaagagagagcagcaatatccaaggaaatagcaaaactaaaggaggaatcaaagcacaagatcagtgattgtcctcaagctatgtcacctagtgctagaagttctaggatatcagcattagagaatatgttgtgctcatcatctagtgctatggtatctatggcttctcaactgtcagaagcagaggagcgggagcgtgtattcaatggtaaaggtagatggtacaatgtcaggtccctcccagaggcaaagaatataatgaattaccttttccagttagcatcatctgcaaggtctcaagtactggataaagaagtaatttgtaatgaaaaagaacacaccattactgaattgaaggaaaaggtggttgtgcttaatggtggaattaggcagttagaaacacaagtgagggatctaaggagccaaaatacacagcttttcactgcattgaacaatgcaaagaaatctgctaggtcgaatggcactggatttgctcagcgtaagagcgttcgatcttcccagcattttggttatagtaaggacaacttcaattgggtggatgatatggacatttcagacagtgagcactcggatgagttagagaatatgagtgatggatccgattcagactgggtacagtcgaccaggaaagccaaaaaacaccagagaagagtgtctagccattcaaatcctaacctggattgtcaaaatacacaaggcaatgcagaaccagagaagccctcagatgaaaagtgcattttgcccaaatatatttcatcagacggctgttcatgctcaaaatcctcctcatgcaagaccaacaaatgcgagtgcagaggctcaggtgcacaatgcggtgcaggctgtggttgtaaggattccaaatgttcaaacagggattcttctactatagaaaaagccaatcagggagccatgcttcttcagaacgcgttttctgagaaggattcccaagatgcaaagccaaggaagcctttgattaacattggtaataatatggttaaccaaactgccgagacaaagaagcccaggaaaaactggcgcaagtcgacaattcaactcgtcccaggacctctcctgccgtccgagccagtggccaccgaagctgcccctcgggacagagccgacattcccctcaagctaccgagagccatgtcctcggtgactcctgtggagagcaaccctcctcccctcacagaccgcaatgctgccaaaccggacgaatcagtgagcaccggcagcaagaatagcaccggagctgcagtcacgagggcaccgtctcagctgagaaaaaacgcaaccaccgagaaggagaaccagttgcgataatccgattgctgacatgcagtatccgtgtcgcttaaggccttgttcgtttgtgccggattggtgggtcggaacgattcgtaaccggattgcttctctaatttatataaactttgattagctgg

SEQ ID NO: 36399 - DNA, 863 bp, Zea mays subsp. mexicana
  Clone ID: UC-ZMROTEOSINTE093D10_FLI
gcgggcgcctccccgacgtccccagcgccatacgggggcgcccccccaccggcgatgtcgaagacggccgagttcgtggtctctaaggtggacgacctgatgaactgggcgcgtaagggctcgatctggcccatgaccttcgggctggcctgctgcgcggtggagatgatgcacgccggcgcgtcccgctacgacttcgaccggttcggcgtcatcttccgtccgtcgccgcgccagtccgattgcatgatcgtcgccggcacgctcaccaacaagatggctccggccctccgcaaggtttatgaccaaatgcctgagcctaggtgggttatttcaatgggcagctgtgccaacggtggtggatactaccattactcctactctgttgtacgtggatgtgaccgtatagtccctgtggacatctacgtccctgggtgcccaccaactgctgaggcactgctgtacggcgttcttcagctccaaaagaagatcaacaggcgtaaggatttccttcactggtggaccaagtgaagcatgctcctgctatttctcggtcgctatgttttctttgcatttgacctgcttgtcacatctgaaataaggacacacttcgctcggatttgcaagttctctttttttttttcttggtgtgtctggaaggatgtatgtccaggttgtttgatgaaacatataactcgtgtaccagcagacttgctgtgaatctattttcgagcttctagtcttccactgtaatacagcaaatgcaccatctccttgtctgctaagatacaggcttacagtacacgtcttgtcttttattatcagatacctaactaatgaatggtactgcatatttttcgtcc

SEQ ID NO: 36400 - DNA, 534 bp, Zea mays subsp. mexicana
  Clone ID: UC-ZMROTEOSINTE093F06_FLI
gttcgacttcatcagcggctccgaggacaggcagcggttcgggtcgtcgcagctgctgcacgattttgtggcgtgagcggctggactggacgtcgttggggaatggggaataacgtgcgcggacggcgtcagaagcctgggatggccggccggcgccgccgcgggtatacctaccaaccatatgatggccgtcatggtacatggtctcaaattaaccagcaaggttaagcatgcatatatacatacacatatatatatataaggtgtggtaagtgaggtagcataagcagggtaagctgtatatgatatgaggtgtggtataaagtaagtgtagggattattattggtattatttttggtagcttgaagattcgtctaatgatgattcaagtccggccagatatggtgtggtgttgttggacctcaagtgagtccatgtacacacaaatgtttcatgttttgtactgtaccagttgttcagttcagcgctaacaacaatgcagaaacattaagcatactactctacttttctat

SEQ ID NO: 36401 - DNA, 1487 bp, Zea mays subsp. mexicana
  Clone ID: UC-ZMROTEOSINTE093H11_FLI
ctgtggttaatgttccttcctgacccacatggtgtttatttgtagttacttgatgattgttgccgcacttgtgtgactgcattacttgttcttgcatcacttgttcactagtcactacacatgaacattgagataagagtatagttactaagaaagatgcaataaatgttctgtcctgtcttccatgctgcacctgtttcacattacaccagcacgttttaaacaatatacaaggattatgtcccacagtgctcatgaaggacataatggatgagaatattttatttcaacttctgctgttatgtctttctataatcttttaaactagtctcacttgctctatattcttaaaagctgctagcgatgtgtatcatctttattggttcttgacacctctaagctgctcattttgtagtgtgatctggtggccacttggaaagcatgataaactaattagcattgatgaccgaaatatttttctttggaacgtagacatgtcaaataaatcagctaaggtgatctcacagggatcagctgacatgcttccaaatttgagtggtggggcttgggatccacacaatcataattcaattgcttcaatatctgattcatcacttcatttgtgggatctacgttctatggaaaaatcatctgcaattgaacatgcacatatacgggatgtggattataaccccaagaagcaacacattattgcaacaacagaagatgactttggaatttgcttgtgggatctcagaatgcttaagcttcctctgaaagacctccctgggcactcacattggacatgggctattcagcacaatcctgagtatgatgagctgcttctgagtgctggaacagattcaactgtaaatttatggttggctaaagttagcaacaatgattctgaacctaatagcccttctggttcacccaatagacaagaagaaccattacttaactcatatactgactatgaagacagcatctatggtattgcatggagctcccatgatccatcattattcgcttctttgtcctatgatggaagggttgtcttggaatcagtcaagccctacttgcagagaaaatgaatcttgctggtctaacttttggattgtaagcaatggcagaaaaaacataataaggatgttgcagaaatcatcctgcttgacatcaggtcttcaaccctcttgattgaagccagcaatggctccaaaacactcagatctagcttcagttgagatattacagcacagttgagattgtcagcagtttcctttcctgtatcttcaaattttgtccactaggatttcatgttcagttgctagaaatttggctgtgaagatctgatctgtatgttaataactgttgcccatctgtctgaaatagttttctatacttgattcttaggatgttgtatatttgaaaagtgttcacaaaaagatattgcggtatatgatgaggtggagttggactgaatttgt

SEQ ID NO: 36402 - DNA, 846 bp, Zea mays subsp. mexicana
  Clone ID: UC-ZMROTEOSINTE094A05_FLI
ccaccgacccgctctccccgccgtacgactacctcccgggccacccgaggccagacgctaagcacaatgaggtgatcctcgccgtcccgcgcgcctcttcggggcgccacgtagccgccaaggagcgcaaggccgggcgggtccccgccatcgtgttcgagcaggagaacggacaggagggcggcaacaagcgcctcatctccgttcgggccaatcagatccgcaagctcgtcgaccacctcggccggtccttcttcctctccaggctgttcagtctccaggtctggtcagaacatgccgggcagggcgaactcatcgaaagcgtccgcgtcctacccagaaaggtacacctgcatgcaggcactgatgaaccgctgaatatcacatttatgagagcaccttcttctgcacttctcaaaatagatgttcctctgatgttcattggagaggatgcctcgcctggtctcaggaaaggagcttacttcaacaccataaaacgaacagccaagtatctgtgccctgctgacatagtaccaccatacattgaagtggatctaagtgagttggatgtaggacagaaattgctgatgcgtgatctgaaagttcatcctgcgttgaagctgcttcattcgccagatcagcccatctgtaactttaccggatcaaggtctccagaatagaaggagggaaaataacttgcttctttgtatgagctgttttgagcacaataaggttttgtttcgtacttgagtgattcaggtgctacttgtcctactgttaggatgaattgtagccagagacacctatttttacctcaggaagggatcttttgagcaggtagatgct

SEQ ID NO: 36403 - DNA, 515 bp, Zea mays subsp. mexicana
  Clone ID: UC-ZMROTEOSINTE094A06_FLI
caattgctgagaagatcaaggactggagcaacgtagttgttgcctatgaaccagtttgggctattggaactggtaaagttgccaccccagctcaggctcaggaagtgcacgcctccttgagggattggctaaagaccaacgtcagccctgaggttgctgaatctactaggatcatctacggaggctctgtaactgccgcaaactgcaaagagctagcagcacagcctgatgtcgatggttttcttgtcggtggagcttctttgaagcctgagttcatcgacatcatcaacgcggccaccgtgaagtccgcttaagatgttacgctgaagacgaacatacttttttttttgctcaactgtgctatgtaagctagtagcttttgcgcaggagcagagactgttttgcctgcccccaacttctagcttgagcttgctaataatgtttacctctggacgtatcaataatggtgcttatgtatcccctttttttttgtgccgaattacggtggatccgtc

SEQ ID NO: 36404 - DNA, 344 bp, Zea mays subsp. mexicana
  Clone ID: UC-ZMROTEOSINTE094A07_FLI
cggcaacccggaagtcagggtaaacaaggcagggagggcagccggcgtgcttgagaaccatgaggaggggaggcgttacgccatgcatggcctcagaagctttgtgcacgacaagacccccgagatcatgccagctatcaacaagttctttactgaccccaagtgaagcaaagcagctttggttggctgctgatgacgatggttctgctacttggggattgtgtacactttttatggcaatttgatatgtgaatgagttcgacggtccctgtttgatcctcgtactcacaaatcatgtggatttgatgcacttcagtgataaaactgtcagccaacgttcatat

SEQ ID NO: 36405 - DNA, 865 bp, Zea mays subsp. mexicana
  Clone ID: UC-ZMROTEOSINTE094B11_FLI
tcggtcccacccctgctccggctgcgcagcaagaccagaggcgagtgctcttcttgctgtttccctttgctagatttggcaaccaagctgggttttgttcgagtgcttcgttttatttttgtgattttctggtgtcgatcgatgcagcaagggagagaatcctcctaccgtggatggtaccgatatgggtgacatcgactcgggctgggttatcctcaagaactcggatgtcgtttccgcggatttggcagccgccgccgtctgtggcggtcagcgtctaggctcttctacgattcctagctgggcacggtgggttctcggaggtgtggtttacacgctcgtgccgttctacaacagagttaggcatctcgaagacgagacggtgggattcgtggagaatgctgtggaggttgtggagcatatagctgaagtaacagagaagctagctgcgaatgtggctaagcaacttcctgaagatggatctctgcagaaagcagtggaagaggttgaacacattgctgaggtagtggatgatgatgcggagaaggttgaaacagtcactgaaaagatcgacaaggtcagtgatgagattgatactgctgtggagccggtcatcgcggagcttgaaaaggaactcgatcagagcacaacctcagacgatggagttgacacaaagaattgatcaactgcatgttaggtgtgctcttcattgtacatagcgtgtgtacgtgtactgttgtttttcttctctctctcccctctttgaagaaactgcttgtatatatgtatgtatggaccatgaagattattggaaatctatcaagtcactatccataaataaatacactttggcctgtgaaaaaat

SEQ ID NO: 36406 - DNA, 1144 bp, Zea mays subsp. mexicana
  Clone ID: UC-ZMROTEOSINTE094F09_FLI
cagagcacggaggaggagcggtaccgcatcagccccgtgtcctacctcctggtggacggcatccctcacgaggaccacatgaaccacaccgctctggtgctcacctgcacctcgacgcgctacatcgaggcggggatagggctggcggagtggttcaagagggacgtggtcacgtcaccgttcgaggagctgcacggggcgactctgttccacgagagcatgagcagcctcgacgcagatttccacgacatggcgagcgaggccttggacgcccacgacaacttcggcatcgagatagctatgcgggagttcagggacttgttcgaggggatccagtccatgacctactgctgcggtaacttcggtgatgacaagggtgccagggccattgtcaaagccttcccacacataaaatgcactgtgctggcccctcccaagatcattgccaccaaaccggccgatggagcgatgataaactatgtcgaaggtgacatgttcagtttcattccacctgctcaaactgtcgtgctaaagcttgtgctgcaccacctgaccgatgaggagtgcgtcaagctcctggctcaatgccggaaggcgattcctccacggaaggacggcgggaaagttataatcggtgatattatgattgaccactctgggcctatgctggaaactcacctcctgatggacatcggcatgatgaccatgacaaaaggacggcagagagatgaaaaagaatggagcgagctcttcaccaaagcagggttcagcgaatacaagatcctgaaggaatttggagctcgtgttgccttcgaagtctatccgtgagattgcacctggactatacatatatatttacagacatatatgtatgtgtgtgggtgccttgcgtggcttggcgtgatgatgtcataaataaagagggtgggtgtgcttgcggtattcatggatggccatggatctgagcacatgacgttggatgctttcttaaggctctcgtggatcttctatatttggaagaagctgtaaaataatatatcgccatctagtgttggcgttggcttgtatgtactttgtacctgctttgttattttgtgtaatatcgagtaacctaatgtatacttgcttactactatcactaccg

SEQ ID NO: 36407 - DNA, 855 bp, Zea mays subsp. mexicana
  Clone ID: UC-ZMROTEOSINTE094G03_FLI
tgcttccagtgagatcaaagaatgctcgtggccagcaaggctcatatccaattaagctgttctacacttcaaacatgcccatcattcttcactctgctctgattaccaacctctattttatatcccagcttctctacaggaagtacagtggaaacttccttgttaaccttcttgggaagtggaaggagtctgaatactctggccattctattcctgttggtggtcttgcttactatgtaactgccccatcaagtttggctgacgtccttgcaaatccattccatgcactgttttatgtggtcttcatgctgtcagcctgtgctctgttctcaaagacatggattgaagtttctggttcatcagcaaaggatgttgctaagcagctcaaggaacaacaaatggtgatgccaggccatcgtgagtcgaacttgcagaaggaacttaaccgatacatccccactgctgctgcatttggtggtgtatgcattggcgcattgaccgtcctggctgattttatgggtgcgattggttcaggaactggtatattgctcgctgtgacaatcatataccaatacttcgaaacctttgagaaggaaagggcgactgagcttggtttctttggtttttgattagtagctggaaccttaacttggctatagctgaattttcttgtaagtccctgtagtgcttagccagttgtaacttaaagagttctgtttaggttgccttcttgcggccacaatcatgtagcagaatgtgagtgtgtttcaggttagcgtgggggtatgtgcatctgtccaaagagagtctgcaatttggcaaccggatattttgttatcaatttcagttacttcg

SEQ ID NO: 36408 - DNA, 1071 bp, Zea mays subsp. mexicana
  Clone ID: UC-ZMROTEOSINTE094G06_FLI
tctccactgagtttgagacctgtagcactgaatttgctgtcagagagagaaaaggatgaacttgtgcaattagttgatactatggtctcctattcagttacatacagaaacacaaagtttgtccctcaagaaaaggcaaacctatctgtagtgccgcatgaagtttcatcactctctctttatcctccaattaatgatgtcataaattttgagggctatcaatcagagcacattggactgtctttagccatgaaacaggttttggtgcatgaggtggagaagcaaaagatcattaaagatagcgctggcaaattgttgaaccaatctaatgatggaaatatgaagagcgaagctttatcaactataaggaagaaaacagtagctaattccatccgtccagctttacattcttccaaggatagttccaagtgcaattcatctacacttgaaatgcagtcaaactcagcctctattgtgaatgataacgattctatatctgccaaaaaacactccagccgtgcagcaaatttctttgacagatttaggaaggaaagaccagtagacgcaaaaactcatagtgatgtggggctgcaaagagcaacacttcagagggattcacgccctctgatcttcaaatataatgagggtttcacaaatgctgtgaaaagaccagtgagagttagggatcttctgctcagctaggcccgcttggtacctgcacttctgtaaagttatctttgtgtttatgaattttcatttactgtatattgattgtatcatgaatattgtatcatgtggttgtgattggttgcctggccggatccctggctaggtcgaactcagcaacccgccctgctgtttgattgtctgtatcttccgttgccgttgagctaggacgacctcatgcaaatagtggtctggagccaggctcaggagggaagactattttggccgtatgaactcagcctggctggacacagaaaccaagaaatagttttaattagttttcttgttacatctcttgattaatgcatcaaattaagaaactgattttacttttgtgtttctgat

SEQ ID NO: 36409 - DNA, 1456 bp, Zea mays subsp. mexicana
  Clone ID: UC-ZMROTEOSINTE094H01_FLI
tagggatccaggccaacttactgatcctgattcctttgtcaatggtccctactcactatcagtatcctcacctctccatcccccaaaatttaggtcattggagataacttcaaattttggttcagtagccaagcaatacttctcagattgccattccctgaatctcttgttcagtgattcttccacaggtgttgctaatagcacagtaatttctctggaccatccctattctaagaaacatgttgctggggatgatgttattaacagctgggtgccaggaaaagggcaaggaataatgaagccagatattatggtgccagaagctcctcgggtggttttgccacttgttacttcctccaatattaagcttgaacttgacaaaaagaaagaattggtgactacacagttgcggaatacagtcagtgatctgtcacttgctgcggatgatttgatcattccatggaatgagttgattttaaaggagaagattggtgcaggttctttcggaacagttcatcgtgctgattggcatggatctgatgttgcagtcaaaatacttatggagcaagattttcacccagagcgtttcagggaatttatgagagaggttgcaatcatgaaaagtctgagacatccaaatattgtcctattcatgggtgctgttactgaaccaccaaatctatctatagttacagaatacttgtctaggggcagtttgtataaacttttgcacaggagtggtgcaaaggaagttctagatgaaagacgccgattaaacatggcatttgatgtggccaaaggaatgaattaccttcatcgacgcagccctcctattgttcatcgtgatctgaagtctccaaatcttctagttgacaagaagtatactgtcaaagtatgtgactttggcctttcaagactgaaagctaacactttcctgtcttccaagtctttggctggaactcctgaatggatggcacctgaagtgcttcgagatgaaccatccaatgagaaatctgatgtctatagcttcggtgttatcctatgggaactaatgacactgcaacaaccatggtgtaacctgaatcctgcccaggtggttgctgctgtaggtttcaaaggaagaaggcttgaaatcccaaaagatctgaatcctctagtagccgtattaattgaatcttgctgggccaatgaaccatggcgaagaccctcgtttgcaaatattatggacactttgaaaccattaataaataaggttccggcacagttgatccgttcagattcgtagcctgttctatacgggtacgggaagatgtattttactgagtggtcctgataacatcaacatgagtgtcctaatactgatctgctataattgaataatccttggatggtattactcattatgataatacaattctcataatctttcaaatgaagtgtgcctggcaatttcttt

SEQ ID NO: 36410 - DNA, 967 bp, Zea mays subsp. mexicana
  Clone ID: UC-ZMROTEOSINTE094H04_FLI
agctaacgaggtgactccccaccgcgcccatgggtgacagccagtactccttctccctcaccaccttcagtccgtcggggaagctcgtgcagattgagcacgcgctcacggctgtcggatccgggcagacctcgctcgggatcaaagctgccaatggtgtagtcattgccactgagaagaagctgccttctattttagtggatgaaacatctgtgcaaaagattcaggcactaacacctaatattggagttgtctatagtgggatgggtccagatttccgtgttctggtgaggaaaagtcgaaagcaggcacaacaatattatcggttgtacaaggaacatatacctgtaacacagcttgtacgagagactgctgctgtcatgcaggagttcacacagtcaggtggtgtgagaccatttggagtatcactgttgattgctgggtatgatgacaatggcccgcagttgtatcaggttgatccctcaggatcatacttctcctggaaggcatcagccatgggaaaaaatgtgtccaatgcaaagacgtttcttgaaaagagatacacagaagatatggagcttgatgatgccatccacactgcaattttgactttgaaagaaggatatgaggggcaaatttcctccaacaacattgaaatcggaattattcgagctgatcgtgagttcaaagttttaagcccagcagagatcaaggatttcttggaagaggtggagtaagctgtctgttgatgatactagttcagacaacaatagcagtgtcacttatgagcagccagcctgaagattgtcttggttttattactctgtaaactgatttgctccagcgccatgtggtggttacatttgaaccctcctcaacgcatactgtagacaatgagataacgtaggatgaatgctgtatttgacatactttgcagcttgtttatgtgatgcacgttcttgcggcc

SEQ ID NO: 36411 - DNA, 754 bp, Zea mays subsp. mexicana
  Clone ID: UC-ZMROTEOSINTE095A05_FLI
tgcagctcctcttcgcagccatctcgctggccgtcatgtcatccaccgccgacttcgccagtgtctccgccttctgctacttaattacaacaaccgtcttgcaatgtgtgtggagccttacggtagctattgtggacatatatgcactgcttgttaagcgttgtttacgaaatcgtcgggctgttactctcttttccattggagacgggatcacatggctagtgtccttatctggagcatgcgctgcggcaggaatcaccgtcctgatcgacgcagatctgatcatgtgctcagagaacccttgtgctagttttcagactgcagtggcaatggggttcatgtgctgtttttctctcttaccatcctttctcctgaacttttattcgatcgcatctagtcacggctagctgaaaagaaagaggaggatagaacctgatctcggagcagtttgagcatccaattgcggttttagtgacaacaggatagagtggcacagctgttagtattagaattggaaggtgaagtatgtgtatggctcaccatatctagtttaacctgtaaaaaagaaatagggaacggcctgtttggccgcagctgcattaccttgcagttctgtggtactactatgtaaaatgcttgaaaatgttatagttttaacgtgtcctgactcttcaaccatgtatattgcgagtgaagaggatgggaaatggtgctgaagaatttcgtagcagttcatggcaggactcacttccgt

SEQ ID NO: 36412 - DNA, 1275 bp, Zea mays subsp. mexicana
  Clone ID: UC-ZMROTEOSINTE095E02_FLI
gcccaatcggttcagtttcggcggtaacaagatcaactgcggtcgccagtcgattctgtgagcctgccagccatggagttgtccagttccgtctcgtccacggcggcggcggcggcgcaggcgcggctgctccggccgccgtcgtttcgccagccggggccggcgggattcgtgtcctgtaggagttacgctataaggagcaaactggtgagggcgatgcctccgatccttgctagcttccagcctgcatctcctcggtacccaagctttcaagacgcaaatggcaaaagacgaaatgttccttgttatcagagacaacaaaccccgcaggtagaagccaggtcgatggaggaggtatatgacgctttggctgaacaccttctttcggtcttgaagaatattgaacatcttgattcaaaatacattgttggtctagctggcccacctggtgctggcaagtccacagttgcctctgaagttgttcgacgtgttaatacattttggtcccagaagcacacaaagggtagtggagcaccgcttcctaccaaggaaattgctgcaatgcttccaatggatggtttccacctttatcgtgcccagcttgatgcaatggaggatccaaaagaagcacatgcaagaagaggagcaccctggacattcaatccatcactgtttctgaaatgtctacatacactaagaacagagggttcagtttatgctccatcatttgatcatggtgttggcgacccagttgagaatgacatatttgtaaagccacagcacaaaatagtgatagttgaagggaactatctgttactggaagaagatgtttggaccgaaattagagacttgtttgatgagaaatggttcattgacattgacatcgatatctccatgcaaagagtgctcaagagacatattgcaaccggaaaagagccagatgtagcagcatggaggatctcctacaacgaccgaccgaatgcagagcttatcctggaatcaaggaagaatgctgaccttgtgatcagatcagtagacttctcaagctagtgttcaattctttcaataggaaatagcattgtggttctagagttggaggttgttgtgggctgtttccgtggagattcctgtacatataataagctgaatgcctgtttcaaattttcatggtgattgtgttgcatgtaataagatattccttcactatgtaccgtggaggattgttaagtaatttattgacattttttaatagaaacacccttcagatttgtgtcc

SEQ ID NO: 36413 - DNA, 848 bp, Zea mays subsp. mexicana
  Clone ID: UC-ZMROTEOSINTE095F07_FLI
cccaccgcagccacttcccgtcccgccgcagccgttgcccaagccagagctgccggtgccaccggagcctctccccgtcccaccgcagccacttcccgtcccaccgcagcccctgccgaagcccgacgacatgccggtgccacccgagcccctccccaagcccgagctcccggtcccgccgcagcccctgcccaatcccgagttgccagtgccaccggagcccctcccaaagcctgagctgccggtgccaccgcagcccctcctcaagccggagctccccgtgccaccggagcccctcgcaaagcccgagctccccatgccaccgcagcccctccccaagccggagctccccgttccaccagagcccctcccaaagccggagctcccggtgccaccggagcccctccccaagcccgagctccccgttccaccggagcccctcccaaagccagagctgccacccccggtgctgcctggcgagcttccaccgaagccagagccagaggtagtcccgccgaaggctgagataatgccgtcgctgccgaagccatgatcgatgagctacgacgacttcacttcacgggcgcacctatatatatcgatcgacactgcgctccacgatccaaatatatatatacgatttgtctactttccattggattttttttgctgattcatccgagtgtttggtttggattggacgaggtgtgcatagctaggtagcgcatcttatcagaattgcagcgtggagtgtatattgccatgccatctgattcgtgaccgcgatctgtctatgtactcttgctgagatccatatgtatatacctaataaatggattcgtttgtat

SEQ ID NO: 36414 - DNA, 466 bp, Zea mays subsp. mexicana
  Clone ID: UC-ZMROTEOSINTE096A02_FLI
ccgcacgcccgcgcacgccaggcagctgaggatcaccgactcgccgttcccgctcggggacgacgacggggactgtgggcaggtggacctggacgccgaggatttcatcaagaagttctacgaccagctgcgcacgcagcaggccctcgccaccgccacgccggactactgcggcgggtatgcgcgaccggtctctggcatcgcctagaattcaacccacgcatccacacgcgtatgcatatgtaatatatatgtgtccatagagtatttgtctgaacatgcatgatgcatgcatggataaagcatgttcgtttgagagctagctactggtggtagagctagtctagagcttggtcttggtgatatgagggagagattttgtacaacatcatcatgtttgcaagctagatccatgcatgtatagtactcctatatatgtgtacgctgtatgtgtatattttgttgt

SEQ ID NO: 36415 - DNA, 1156 bp, Zea mays subsp. mexicana
  Clone ID: UC-ZMROTEOSINTE096C07_FLI
ctcagggccgtcttcgaggatgccgacaagttttacctcgtcatggagctctgcagcggggggaggttgctcgatgagatcgccagggaggggaagttttccgagcagcgtgctgccattgtgatcaaggatctcatggcagtgctcaagtactgccacgagatgggtgttgtgcacagggacgttaagccggagaatattttgcttaccaaggctgggaaagtgaagcttgctgatttcggactcgctgcacgggtcactaatggtcagaaaatgtttggtgttgctgggagccctgcatatgtggcacctgaagttctttctggaagctattcggagaaggttgatatatggggtgccggtgtgctactacatgtactactacatggttcacttccatttcaagggggctctctggacgcggttttcgagtccataaagacacttgaacttgatttcagcagcaccccatgggaatcaatatcagttcttggacgggatcttattgggcgaatgctaaatcgagatgtctcttgtagaatgactgctgatgaagttcttagtcacccatgggtcgtgttttacacagaatgccccctgaaggtggtagctgctaatttgtgtctccctaacaaggttatagcacccaaaattccatggggcagacacaaatcagaatgtgactcattgtcagacgcaagccaaaggtcagaggatcaggatgagtgtggcatagttgacgcattggcggcagcaataacacgtgttagaatatccgagccaaagagaagtcggctttgtagccccgcaattaccattcagcaggaatgctcgtcaaacttgaagaataatctttgcacggctttctgacctgacctagtttatagcacctgatcggagtggcgtctattcttctcgctgagaaggtcgttctgatttaggtgttgtagaggcgaggataataactcagcttttccagccagcaacaaacgtctggtatttagtgtttctttcagttttcctgatgaaccccgcagttgtagctgctgtaaaattctgtaaatagcatggtcctttctcaagctgtgcctgggttgctaatttgtgccaccaaaaccttttcacgcaatgttcataattcatgatcgagttgtgc

SEQ ID NO: 36416 - DNA, 1676 bp, Zea mays subsp. mexicana
  Clone ID: UC-ZMROTEOSINTE096C09_FLI
gtgagatctttggattgaaccaatccttatttcagagccccacccttctatcaaggttctagaaacaggatatgagttttcctggtctgcctgtctctttaccttttttatttttaacttcattgagtttgaaacttatcaaaatacaatgattcaccatattctttatagctgtatagtttcattagtactgcaattgtatgcaagtattttcatcacctgatgttttgttaagcaatctatgtcacagtgagtcatccatgttttgactgtgttgatctgtgcaataaccaataaaatgcaattatagcttcgaaaactacagaggcctatatcatatttttgagttccttatgtgagtcatccatgttttgacttgtgttgatctgtgcaatgaaatacaattatagcttggaaaattacagaggcctatatcatatttttgacttccctacttttgagtacctttttctttcaggtcatgaatttaattggcgacgtgaaaggaaaagtcgctatcctgattgatgatatgattgatacagcagggacaatcactagcgcagcggctttgttaaagcaggagggagcagaagctgtatatgcttgttgtacacatgctgttttcaggttttctagttggctttattgaatgtacttctggttttggtattttttatggtcacatcctatatgatgtggcttcatctctgagcactttctaatattttgctgcaagaacattcacaacactgtacaaaaaagtacaccaggggtaatagtatctgttaacacctgtagctgtaggccatattaactttgctaatcttgggggcacccatattatcatcagcatcaatcctaacgatatgattgcttgaatcttatgcaatatgttttctacctcgtggtatcttattgtaggaaggtgcctgagaaatcttttcggcgtagtcacttgtctaaatttgactgctttcaataaatttgcctgtttgatgctcagtatgctactttatttcagaaagtagcaggacgctttatttggtttgaacaatttgctgcctttatattccgacatgcttattcccttagaagatttgtgtattaacatggttgacttttcagccctcccgcgattgaaaggctgtctggaggcgtctttgaggaagttattgtgacaaactccatcctgctgccggaagacaaatgcttccctcagctgactgtgctttcgatggcgaaccttgtgggggagacaatttggcatgttcaccgcgatggctccgtcagcagcatcttccaatagcagaaacgagcgcgtagcatcatcacctcgccttgcgttcgtgtgcttggtatagagaaggcacccagtgcctgtgctgcttgcgtattttcgtagggagtcaattttggcggcaaggtataataaggttgtattgcccgatgtacggggtgataaataaggtggttattgccagtttacgtgggataataaggttgtatgctggtgtaggtgttctgcaggctgcagcgtgttactaattaagtgcagctcttgtcctatcatgtattgctgaggtagttgttgtcgagttgaagtttcagtgtctcagatacatgggatagtgatgtacccagcacttggccactattgaagtcctggtcattgg

SEQ ID NO: 36417 - DNA, 1469 bp, Zea mays subsp. mexicana
  Clone ID: UC-ZMROTEOSINTE096E05_FLI
gctcaatgtgccacccgggcgctggctcacggcgcccttcaacctcaccagccacatgacgctgtttcttgccgatggcgcggaaatccttggcattacggatgagaagtactggccattgttgccagcattaccgtcatatgggtatgggcgggagcgcaaaggaccacgatttgggagtctcattcatggacagaatttgaaagatgtagtcattacaggacataatgggagcataaatggccagggtgaagtttggtggatgaagcatcgcagaagaattctgaataacacaaggcctcctcttgtgcagctgatgtggtccaaggacattattgttgcgaatataacattgaggaactcacctttctggcacttgcatccttatgattgcacaaatgtgactgtttcgaatgttactatcctgtctcctgtttctggtgctccaaacacagatggcatagatccagattcttgtcaggatgtgcttattgagaattgctacatatcggttggtgatgatgcaatagctataaagagtggttgggaccagtatggtattgcatacggtcgcccatcttctaacatttcaatccgcaatgtaaccgcccgttctcttgtgagtgctggaatttcaataggcagtgagatgtctggcggagttgcaaatgttactgtggagaatgtgcgcatctgggaatcaaggagaggtgtgaggataaagactgccacaggaagaggcggctacatccgtaacatctcgtaccgcaacataactttcgacaatgtccgtgctgggattgtgataaaggttgactacaacgagcacgctgatgatggatacgaccggactgccttcccagacatcacgagcatatcattcaagggaatccatgggcagggtgttcgggtgcctgtccgagctcatggcagcgacgtcattcccatcaaggacatcagcttccaggacatgtcggtaggcatcagctacaagaagaagcacatcttccagtgctcctaccttgaggggcgtgtcgtcaggcccgtgttcccgaaaccatgtgagaacctggacgtctatgatgagcaagggcagcttgtgaagcgggcagtggccctgaacagcacagaacttgactacgatatatgaggtgcacatatcataccacagctttgatagttgtagtggaaattggtgctctctaccctcagaaatcaattttctccgattgtccatggctttttgggtctagaattgtagatagagaggagattctcctcttgataggtttgctgcttacagtggctgaatgtatctcaccggcgatttactgatttgtccatgaacatttgtaatcgccagaaccttcctggcgacaaatgtatgctgtcaatatattgtacacctgaagattgtattggagtatacacagtacatgatctctaaatatctgccagcagatttttct

SEQ ID NO: 36418 - DNA, 1099 bp, Zea mays subsp. mexicana
  Clone ID: UC-ZMROTEOSINTE096F02_FLI
tgcaagataagggcgccgtgctgcggcgaggtatttggttgcaggcactgccacaacgaagccaaggactcgctggaggtcagcgtccacgaccgccacgtgcttccccgtcacgacatcaagctggttatctgctctctctgcaacaaagaacaggatgtgcagcaagactgtgcgaactgcggagcatgtctcggcaaatacttctgcgcgaaatgcaacctcttcgacgacgatgactggtggcgcagagaatttctatcactgtggcagatgtggatgctgctacgcgactccgctgaaggattctcaccgctgtgtggacggagctatgcatcacaactgccctgtctgcatggagtatctattcgactcgatgaaagctatcagcgtgctccactgcggacacaccatccacctggaatgcctttacgagatgagagcgcaccagcagttttcatgcccggtgtgcctgaggtctgcctgcaacatgtccgacatctggcaaaagctggatcagcaggtacacggcttcttcctctcccgaccacgcgtcgtcttgatctcatcctgcgacttcaggcaccagaccagtccaagtaaaccgtttcattccttcaggttgcagcgtccccgatgccagccatctatcagaagaagatggtatggatcctttgcaacgactgtggcgtgacgtccaacgtgcagttccacatcttggcgcacaagtgccctggatgcagctcttacaacacccggcagacgaggggcgatccagccgcatgctctagagtttgagagcaaataaaactgcagtactgcactgcacataaactcgtggggttgtgtggtcgatcgataggtagcttgcagggaggaaattaaagactaccattgcgcatggacacgattggtgccggcagttgagtacatgtattaggcctgtcatatgtagatgtatcatatgctatgccttcacaaagaagaatttggcgcagcggacagggtatatatttttttgttgctatatacacataatttttgttgcgcggtgcttgtgccaatgatggagagttcgtacgttgtttttcttatattt

SEQ ID NO: 36419 - DNA, 1784 bp, Zea mays subsp. mexicana
  Clone ID: UC-ZMROTEOSINTE096G06_FLI
atgctcggaaagataagtcaaacaatgggtctccttggctcaagttctcatacagccaagcagcaatacttgaccttgcatttcaggatagctttggtcgggtgggtgaaaaaaataaagaagcactcaagatgtcaaagcatataactaaacttttcccaaataaagtgacaattgaatcacctgaggatgaaacggaactctcccagtggaaacagctattgggtcgtgacattgaaattcttaaggcaaaggctaattttttgaaaatacaatcttttctaacccgccatggtatggaatgtactgatttagaatcagtggtttgtgtcaaagatcgtaatctgacaagcgaatgtgttgataaaatagttggttatgctttgagttatcaactcaaggatcaccctattcaaactcctggaaaggatgcgagagttgtcctttctggtgtaagccttaagtatggaattgatttgttggaaagtatccaaagtggccctaagaagaagagcacaaagaagtcactcaaggatgttgtcacagagaatgaatttgaaaaacgtcttcttctagatgtcatccctccagatgagattggtgttacctttgaggatattggagcattagaaaatgtcaaggaaactttgcaggagttagttatgcttcctttgcaaaggcctgagttgttctccaaaggacaacttatgaagccatgtaaagggatattgctttttggtccacctggcaccggtaagaccatgcttgccaaagctgttgcaacagaggctggtgctaattttatcaacatatcaatgtcaagcattgcttcaaagtggtttggagagggagaaaaatatgtgaaagctgttttttcacttgcaagcaaaatttctcctagtgttattttcgtggatgaggttgatggcatgctgggtagacgtgagaatccaggggaacatgaggccatgcgcaagatgaaaaatgagtttatggtgaactgggatggtcttaggacaaaagacaaagaacgtgttctggtacttgctgccactaataggccatttgatcttgacgaggctgttgtcaggaggctccccaggaggttgatggttaacttgccagatgcacccaacagaaagaagattcttagcgtgatactagcaaaagaagatttggcagatgatgtagatctggaggcgctagcaaacctgacagatgggtattcaggcagtgatctgaagaacctgtgtataactgcagcacatcgtcccataagggaaattcttgaaagagagaagaaggagagaaccttagctgaagcagaaaataggccagccccacctcagtgctgtagcggcgacgttcgctccctaaagtttagtgatttcaagcacgcacatgagcaggtttgtgcgagtatatcatcggattcaaaaaatatgaatgagctcgtccaatggaacgacctctacggagaaggcgggtcgaggcacaagacaccgttgagctactttatgtagcctaacgtttttttagatgatttgtacatacagaagcagcctttgtataggtgtgtttccagttaaatttgctggaaacatttattcatgtcgggtttcgtttctataatcaactcagcttgtgtctgcatctagtgtagcctgagcttctgattagttattaatttatttcagtccgttggatcttgcgtcctggtatagtctgtgaaaggtttcgacggagattcatttggatttatttaatagtctggatgatatggt

SEQ ID NO: 36420 - DNA, 1134 bp, Zea mays subsp. mexicana
  Clone ID: UC-ZMROTEOSINTE097B02_FLI
ccgagtacatcacaaacaccttgtgtctttggttggctattgcatttctggaggcaagaggctgcttgtctatgagtttgtccccaataacacattggaattccacttacatgcgaaagatcgaccagcaattgagtggcctgctagattaaagatcagtttgggtgctgccaagggtttagcttatcttcatgaagactgccatccaaagatcatccatcgtgacataaaggcatctaacattcttcttgacttccaatttgaagctaaggttgctgattttggacttgcaaagttcactactgataacaacacccatgtttcgacaagagtaatgggcacctttgggtatttggcacctgagtatgcatcttctggcaagctaacagaaaaatctgatgtattttccttcggagtcatgcttcttgagcttattactgggcggcgaccagttgacacaacccaaacatatatggatgacagcttggttgactgggcaaggccattactgatgcgagcacttgaggatggtgaatatgatgctttagtggatcctcggctgggaaaggacttcaatcctaatgagatggcaagaatgatagcctgtgcagctgcatgtgtacgccattctgcacgtcgtcggccacgtatgagtcaggttgttcgggctttggagggcaatgtgtctttggaggaccttaatgaaggtgttcggcctggccatagccgcttctttgggtcatacagcagctccgattacgattctggccagtacaacgaggacatgaagaagttcaagaagatggcattcaacaacaactataccagcagccaatacagcgcgccaaccagtgaatatggacagataccgtctgcatcaagcagcgagggccaccagacgcaggagatggagtcgggtgcaatgaagaaaggtggctacagtggtggctacagttcaggatacagcggagcctcgtaagggaattccctccttttttttgtttttcttttgatgttttcattgctgcatttgtaaagtctggccgaattatatgaccaaagctgctgacttgtgcgtgatgtatctgagtttgaccgagtatagttctatgtagctgcaattgtttattcttt

SEQ ID NO: 36421 - DNA, 1518 bp, Zea mays subsp. mexicana
  Clone ID: UC-ZMROTEOSINTE097E05_FLI
gtcaggtctcatgatgttgcttactgggcacgcagctttgaccaggatctggataaagcatgcatagagcaatacagccaaagatgttggacaactgggtttggtttaaattttagagttattgccctttcacctgggtttagaagactgtctctagaacacctagcctcgtcttataagaaggctaacaggaggatgatattcctggactacgatgggacccttgtgccgcagacatcacacgacaaatctccaagtgctgaacttatctctacccttaacagcttgtgcagtgatatgaagaacacagtatttatagtcagcggacgaggaagagattccctaagcgagtggtttgcttcatgcgagaacctcggtatcgctgccgaacatggttactttatcagatggaacagagcagctgaatgggagacaagtttctcaggtatttattctgaatggaagctcatcgcggaccctatcatgcatgtatacgtggaaacaactgatgggtccttcatagagccaaaagagagcgctttggtatggcactatcagaacacggatcatgactttggctcgtgccaggcaaaggagctagtgggccatcttgagcgagtcctatcgaacgaacctgttgtcgtgaggcgtggccatcagatcgtagaagttaaacctcagggagttagcaaggggatttccgtggacaagatcatccggaccttggtcagcaaaggggaagtaccagaccttttgatgtgcatcggaaacgaccggtcggacgaggacatgttcgagagcatcaacagagccacctccatttccgagcttcctgccgctccagaagtattcgcctgttccgttggccccaaggccagcaaggcaaactactacgtcgatggctgcgacgaagtaatcagactgctgaagggtgtcacagccgtttcgctccaaaaggatactgccggccatagccatgcggccttcgaggatacgcttgaggttgtcagctgatccacacaagtagtcagtcagctcaaactagctacgtccagtgtgttcagcgtgccagtctcaaatctccactgcatgcaagctactcatcactccaaaccatatgtgccacgtggaacaactctaaattggacggggacaagtatcgccattgctgacacagagacagaacagcggtcacaaactgcaagttccagcgaatggcgtcgcagttgatgattcaatgacgacaacggaaatcacaaaccgcaagttttcaattcgtaggctaagacaactagtgggacaccatacattttgtaggcggctgatctggtggtgaaagggtggatgtccctgctagagccccagcttacggcatctgggagagccttggaagttggaccccgacgcttgtgctgcactgagcactgttacactattttctttgtacagaacaaacaggtgtggttaggcgattagcgctgtgacgattgattgtaattcacccacgtaccattgagg

SEQ ID NO: 36422 - DNA, 882 bp, Zea mays subsp. mexicana
  Clone ID: UC-ZMROTEOSINTE097F02_FLI
ccagagtgcttgctgcaacagttgcacattttggcaagctcgacattcttgtcaacggtgcagctggcaacttccttgcttccccggaggatttgacgcccaagggattcagaactgttcttgagatcgacactttgggtacatacacaatgtgctatgaagccttcaagtatctgaaaaagggtgggccaggaaaaggcccgtccactggtggactaatcattaacataagtgcaacactgcattacagtgcttcttggtaccaaatccatgtctctgctgctaaggtacctggttcttctctgaatcactccttaataagagaaaataattggagtaagcagattcgtttgtataggctggggttgatagcatcacaagatcactggctctggagtggggaacagattatgacattagagtcaacgggattgcacctggaccaattcaagacaccccggggctgaggaagcttgcacctgaagaaatgagcaaggggcttcgagaaatgatgccattgttcaaatttggggagaagcgggacatagcaatagctgcgctctaccttgcttctgatgcaggcaaatatgtaaatgggacaacactggtggtcgatggaggtctttggttaagtcaccctcgccatattcccaaggaggaagttagggagctgtcgaaggtggttgagaagaaggtcagggcctctggtgttggtgtaacatccagcaaattgtgatttgcatttgtgtgatctgtagcatcgatcaatatgttattacagaactttattgtctatgtggctcttgttacctaattagcgagttcgtttagttgagtaacttgacatatttacagtgcatttatttcttcaaagttccattt

SEQ ID NO: 36423 - DNA, 664 bp, Zea mays subsp. mexicana
  Clone ID: UC-ZMROTEOSINTE098B11_FLI
ccgggatcaggtccaagtctcactgtctttgctctcgacctcattcttcctgaagatgcctaatgctcctccacctcctcctaaggacaaggataaagatggagataagaatggaggtggccagtgtgggtgatcactgatcaagtttgtgaaaaataggagcttacctctcatgcagcatcaccacagctgcttatgttatgtaggtgattatgttgtggttcttcactgtatttgtggcagtaaagaggtgatcaagtcatttggattggtgggcagagaagactattcagataggtgcggatgtactgatcgggaggcaaataaggtgagcgagattggatggaattcattgcaatagcgtattggatgactaccaagtctgtgtgttgtacctaaattacacacgaaatgggctcatctgtaaagtttccatgccatatatgtgaatatgcgaggtgccaagagagatgcagcatgctctttgtgctgttgtgccatgggaataagggtgagcctcttagggcttcatcatgctctttgtgctgttgtgccatgagagtaagtgtgagtctcttagggcttgtttagttgtatggggattaaaggggattgagggacatacaattccttgctagttaattttggagggggattgagaggc

SEQ ID NO: 36424 - DNA, 668 bp, Zea mays subsp. mexicana
  Clone ID: UC-ZMROTEOSINTE098D01_FLI
cgacaatgtcgctcgtgaggcgcagcaacgtgttcgaccccttctccatggacctctgggaccccttcgacaccatgttccgctccatcgtcccgtcggcgacctccaccaactccgagactgccgccttcgccagcgcccgcatcgactggaaggagacgcccgaggcgcacgtgttcaaggccgacctccccggcgtcaagaaggaagaggtcaaggtcgaggtcgaggacggcaacatgctggtcatcagcggccagcgcagcagggagaaggaggacaaggacgacaagtggcaccgcgtcgagcgcagcagcggccagttcgtcaggcgcttccgcctgccggagaacaccaaggtggatcaggtcaaggctggcctcgagaacggcgtgctcacggtcaccgtgcccaaggcggaggagaagaagcctgaggtgaaggctattgagatctctggttgagcatccaatccaatatggacgattggacgtggaaggtttcctgtgtcttctacgatataataattggtcgctgtcctgtgtggatgtttcctgtgtcttctacgatatattaatgtacttctgtctgtttcgtttcgtatgtacaatcttccgggtatcgttcatgtatccctttgaataataacaaataaaatcgggtttgtc

SEQ ID NO: 36425 - DNA, 1977 bp, Zea mays subsp. mexicana
  Clone ID: UC-ZMROTEOSINTE098E04_FLI
ccgaggacgagctacagttctgcttcgagagcggtgatcctgatgtccagacgatggaagcagttgatgcagtgttcgtcaactcaggggacaaccccttcaagcttctgaaagaatccatcaagatgttgtccaagatcaaaggaactttcagtcatatagaggacaaggagatcccttcaaatttggactggtttgggtggtgcacttgggatgcattttacaaagctgttaacccaagtgggattgaggagggccttcaaagtcggcgtgaaggtggtgtgccgccaaggtttctgattatagatgatggttggcaagaaacagttgacgaaatcaaggaagtggatgaagccctccgtgagcagactgtatttgcgcagaggctggctgatctgaaggagaatcataagttcaggggggaaacctgcaagaatcttgaggaccttgttaaaacgataaaaggaaaacatggagtcaagtgtgtctacatgtggcatgctttacttggatattggggaggtaccttagcaacatccgaagtgatgaagaagtataatccaaagcttgtttatccagtccaatcgcggggtaatgttgcgaatctgagggatattgccatggacagcttggagaaatttggagtgggcatcgttgatcctgacaagatatatgagttctacaatgatcagcacagctacctttctagtgtgggtgtggatggcgtgaaggttgatgttcagaacgtgttggaaacccttggacgcggatttggtggtcgtgttgcagtaactcgaaagtaccagcaggctcttgaggaatcaattgcccagaacttcaaaacaaacaacctaatctgctgcatgagtcacaattcagacagcatctttagtgccttgaagggtgcagttgctagagcctcagaagatttcatgcctcgggaaccaacactgcaaactctgcacattgcgtctgtggcattcaatagcctattgttgggagaaatcttcatacctgactgggatatgttccatagcaagcatgaatcagcggaattccacggagcagctagagccctgagtggaggtggtgtttatgtcagtgacaaacctggggtgcatgatttcagtgttctaaaaaagcttgttctaccagatggttcgattctaagagcaaggtatgctggtcgtcctacacgcgattgtctgttcactgacccagtcatggatggcaaaagtctgatgaagatatggaacttgaacaatttcactggtgtcattggagtgttcaattgtcagggagctggacagtgggtttggccagttaaacaaactgcttatgttcctaccaacataaacatcactggtcagctctcaccgtctgacgtagaatctctcgaggagatagctggtgatgactggaatggggagactgcagtatatgctttcggttcatgttctctttcaaggcttcagaaacaccaaagtttggaggtgtcactgtctactatgacatgtgagatctacagcatttcaccaataaagattttcagcgaagtcgtccagtttgcgcctcttggactgatcgacatgttcaactccggtggtgcacttgacaatatttcaagcgttgcagattcttcagctacgacagttcatataagatgctgaggaccagggcggtttggggcgtattcagacaccaggccagagctttgcagagttgatgaacacgaagtggagttcactcttgcagaggatggcctcctgaccttttaccttcccccttcttcctcccaggacaacctgagacacgttgagattgtctacaaagcatcatgaacgacatttacccttatgattcttacgctccagcatgcaatttctggcgtgctcttcagtaaccaccacacatgcacattgacatgatgtaacaaggaacccattttgttggatttgactgtgtatgctgtgctgc

SEQ ID NO: 36426 - DNA, 630 bp, Zea mays subsp. mexicana
  Clone ID: UC-ZMROTEOSINTE098E10_FLI
gcgagaaggcacccgcaccgccgaagcaaactggtgaccatcaccaccagaggcgaccacgtcagcagacggcgctggtggaggaggccacctggcgcgcgtactgcaacggccgcaagtgcggctacgcactgcggcgggactgcggcgcggacgagtggcgggtgctgcgcgccgtggagccggtctccgtgggcgccggtgtgctccccgacggcgacaacgtgggcacgggagccgccgccgccggcgagggcgacctcatgtacatgagggccaagttcgagcgggtggtggggtccagggactcggaggcgttctacatgctgaaccccgacggcggcaccgggcccgagctcagcatctaccttctcagggtctagatgacaaaatagacatgtataacatagtataataatatgctgttcgtttgcgtgccttttgctttttattattgtgaaaacaacatgggcttctttctgcgtgtgttttggttgttttggctgcattgtgcatgcaattactggctaatttgatagtgtcactttgtcattgtctcgattctctacttagactactcatgcagtcatgccccttttagaatgcacgaattttggagaaatcgtttag

SEQ ID NO: 36427 - DNA, 1435 bp, Zea mays subsp. mexicana
  Clone ID: UC-ZMROTEOSINTE098G01_FLI
gtgtacagatcgctaccccttggacaagatcggagacggaaccggtattggcagttttctgcatcttcatcatcctatgaccctggttcgggaagagtcttttttgaatctagagatggatattggagggtcattgattcatctgaggcgtttgaagctttggtatcttcccttgatactcgtggcatccgtgagtcacatctacactcaatgttgcaaagtatcgagccaacttttagggaagctgttgagaggaagaagtgtgttagtttagaacacacaactgggtggactgacaatggaagtaatgaaagtccaaactgcaacaatgagtttggaagtccatgcagtaccctttctggtgttgcttctgataatcttatggcatattcagatactttcaagatagaaattgggcacaacgaagctgagaaaagttctatctcgaaaagggcttctgtgtttctgaaatggatgtggagagagtgctactgtcaccaatccacgtacaccatgaaatatggaaagaagcggtgccctgagttgattcaatcttgtgaccattgctaccagatatacttagctgaagaacaacactgttcttcttgtcacaagtcattcaaacccattcacaatttcttggagcacttatcacaatgcgaagataatcagagaacaaatcctagttggaagacacaaattgtgggcctttctgtacccgtaggattgagattgctgaggttgctcttagctaccattgaggcttcagtaccggcagaagctctcctacctttttggacggatttgtatcgaaaatcttggggtgtgaagttgtattctgcatcatctgctgaagaagtcttgcagatgcttagtgtgctggaaagtgcaataaagcgagattacttatcatctaattttgaaacgacaactgagttgcttaattcaaacacacaagatgctacccagaattcagttggaggttctggatctgccactatacttccatgggttcctgacaccaccgctgctgtcgccttaagattgttagacttggatacttccatctcatacaaacttcattcaaagttggtttcaaataaggagcaagaagctggagatttcatgaagcttccactgagatacccttctattaataagaacaaacaagaaatagaacagttcatacctattggttttgatcaacaggatggaacattgctaactaacagcaatggccgtagaggtcgtggacggggaggtagaggtggaaggggaagtagaggaggtagcaggggaggtagttctcgtggtggtggtggtagggttcccaggggtattggtagctcatccaggattcagttcagggatgacaatagtgtgccctatgggagagcccctcgaaagaatgtacgtggtgggcgtacccgtggcc

SEQ ID NO: 36428 - DNA, 1874 bp, Zea mays subsp. mexicana
  Clone ID: UC-ZMROTEOSINTE098G12_FLI
ccgagaagcacactttgatcagttcaatgctgcgtcgtataggtctcgtcggagtttctgtggtcaggcagataggcgtgtagagcttcctatgatggagaggttgacttaagtttgatctgtcggtttgacaataaacttctgggcaagtagtcaactactgcattatcgaattgattttcacatccatcgccatgttgtcttgacttgttcaatagtgccaagttcctttatcaaaaataaaatcgtgccaagctgctaagctctgaaccagtgcaaatctagacgccacaaatttcgatgcatgaataggacttcgaatgtactgagttgaacactattttgtagtattatcctcatggtcatcatggagttggcaaagaggggagacatgtttacattgaaaggcttagaaaggttgacccaagaaaacttatgaatgtcacaacgatggatcattacgtgcgataccatgtgaaggagtttgagaggagcttcttgattaaatttctagcttggtctcttgtagcaaaaaagcacattgatttcagcacgacaattctggatgtccacgacatggtatgtcactgaagatttagtctttcctgatgcctctcttcatgcaacttcacaattgatgagagctagtatgatatctatgctttatatgggttgaaaaatttcagcaaaaccgcacgcaaaataataattcagcgactacagaaaattgacaatgataactacccagaggtatgagcctcaattcatttttacactctttgttgttgttttttcttgcttggaatatattgggttaatttgttgtgtttccagactctataccaaatgtttattatcaatgctggtccaggcttccggctacttggaacactctcaagtccttccttgatcccaaaactaccgccaagatacatattcttgggaacaaataccaaagtaagctgcttgaaaatttgatgctagtgaaatgtcagaattccttggtggcacttgtacttatcctgaatacggaggttgccttaaggctgaaaagggacaatggtaggacccaaacatacttaaggcatgtgtcattagagcatgttattgatcctccaactatttgttatttgctaactgggaattataaccttctcattctcatgtatttattatttgttacccattgtactgataccaatggtggggttcattgtgctcgtcaaattgtaactatttccaatggtgaggaaaaattagtatttatgcaaattgaagtgccttgcgtaactttcgaatcaatcttcattgatttcatttccagaattttctgtatcaaaagtttagtaatgtgttgctttgttaaaaacatgctttaatgtggaatgacagatgcgagggagtggcacatcaactgctgagtctggctcagaagttgatgatgctgtctccgtacaagctctcagaactgcaacatcctaagttgacccgagttcgtgaagaggctgtggatgctacatgaaagagagagcaagcatgaaaggcaccattcaatccccaagtttaagctctgcaaggtgaggtctgttcagtttggctagaaaggcatcccctacctgaacacctacgactgtcgcaccatccgctaccccgaccctctcatcaaggccaacgacaccatcaagatcgatctagagaccaacaagatcatggatttcatcaagttgtatttgccctttcatggacttcaccaagttatatacttagttaggctcaatgttagcacaaacagttgatgagcaagtttaaatttagagcacacttatgtatgagttatttgacaatgcttatttatgagatattgaatgttattt

SEQ ID NO: 36429 - DNA, 1745 bp, Zea mays subsp. mexicana
  Clone ID: UC-ZMROTEOSINTE098H08_FLI
cagaaaactacaaccatcaaaacaagtagaagcaatccacaaaggaacatcaagacagaaggtttttgtgatcttcggaggggacacttcagaacggcaagtatcacttatgagtggtaccaatgtatggcttaatcttcaaggttttgatgatcttgacgtgacaccgtgtttgcttgcacctgcacatggatatttctcctcacgtgatcaagatttcagtgacagttcaagagaagtttggacgttgccatattcattagtgttacgacataccactgaagaagttcatgctgcatgtgttgaggcaactgagccagaacgagttgaaataacaaaacgtttgcgtgatcaagtaatgaatgaacttgggtcagcattgagcaaacatgattggtttgcgggctttgacatagcttatgaacaacctatcaaatactctctgcaacagtggatcgaccatgtaaaagaaactgaagctgtagtctttatagcagtgcatggtggcattggcgaggatggtaccattcagacattgttggaatctgcaggagttccttacacaggaccaggaccaatagcgtctagaacatgcattgacaaagttgcaagttcacttgctgttgaccatcttgctagttatggaatccgtatcattccaaaggatgtaagagcaacagaagaagtactgaagtcatctcttgttgatatctggaatgaacttaaagcaaaactagaaacagaaacagtatgtgtgaaaccagctcgtgacgggtgctcgactggtgtagcaagattgtgctgtccaaaggacctagaagtctatacaaatgcattgaggaggaagtttcagcatctgcctgctaattgcctgtccagggcacatggtgtaattgagatgccagtcccttctccagagtcactaatatttgagccttttattgaaaccgatgaaattatcattgcaaataaattagaggatggtagtgcccgccatcttgtatggaaaggtgaaaatgactggcttgaaataaccgttggtgtagttggcaaacgtggagaaatgcactcattaaatccaagtatcacagtgaaagaaagtggtgatattttatctcttgaggagaaatttcaaggtggcactggaatcaacttgacaccacctcctgcaacaattatgggcgaggatgctctgcagaggtgcaagaagagtatcgagaccatggcaaacgctctaggtttggaaggcttctcacgcattgatgcatttgtcaacgtgcgaagcggggaggtgctgctgattgaagtcaacactgtacctgggatgactccatccaccgtgctgatccaccaagcactcgcagaggaaccgcccgtgtacccccacaggtttttccgcactcttctggatttggtgtttgcaagggcaaaatagctatctcacatttatttttctttttacggtgcgtcggtttgattctgtatcagtccagtagtatttttatttatgtttgtgggaaaaaaatcgtcttctccgtgttgatgcgatgaaaaataaacatgtatagcgttgcgcggtcgtcgtgcacatcagagcagagcagaagcaaccctccacggacgtcaagtcaaaccaacacgtccgggccacaatatggaaaactagctatacaagtatcatggaatataacctctcaaacttaccaagttttcatcacatcattaatatagaggtttagttctcg

SEQ ID NO: 36430 - DNA, 535 bp, Zea mays subsp. mexicana
  Clone ID: UC-ZMROTEOSINTE099B01_FLI
agatggaaaaaatgattttggtgataaaaaatcttaagaaggacaatgaatttctgaagggaaaatgtgagaactcagatattgctcttgtgaagctcattgaagagcgtgagctaacgaagaagcaaatagagaaattgaaaaaccaaaaggagacacttgagtccctgtgtcgatcactacaggcagaaaggaaacaaggccgctccgccagtattccagacgccccttctagccaagaagacatgccagcgacaagtcaagaatcttagcatatgtgcttgtcaatataccgttggtgtccgttacagcttgccgggatttctgaagcctgagaaatgaatatgttactgatatcttgttttgtttgagtttgcgggagttctggtcccatttaacacatactcagctgtcaacctactatccatctcaggcctttggggattgtaactataacctagaggtgcattcctctacaagtaactcggtattgttactaaccatataagctatccgttgttccttgttttttgtt

SEQ ID NO: 36431 - DNA, 517 bp, Zea mays subsp. mexicana
  Clone ID: UC-ZMROTEOSINTE099C10_FLI
ggctatatcacagtggacgaactacagcaagcttgcaaagagcataacatgccggatgcttttcttgatgatgtcatcaacgaagctgatcaggacaatgatggccgcattgactatggagaatttgttgccatgatgaccaagggcaatatgggagtcggtcgaagaacaatgagaaacagcttgaatatcagcatgagggacgcacctggtgcgttctgagacttaacacgatgtacagcttgttgcttggctacttcctgccttgctgccctacgaaaccttctgcattttttcaagatgttgtcaagtgtctgtgtggatgtgtttttctggggattctgattcaactctggtgattgattccatgaaatgcataacaagatgcccatgttacgcaagaagccagattgtaaatgctgctgcccctttgactctcagaaacactaatgctcagtgaaaagaaatcgctccctattgattgatggcatccgttcttggatgcacgctgtatctc

SEQ ID NO: 36432 - DNA, 1450 bp, Zea mays subsp. mexicana
  Clone ID: UC-ZMROTEOSINTE099C12_FLI
tacaatttctgtttgctagactgcagatgcaattgcaataactgtcaaccaatcagcgcctagcttgaagcctggcgttacccctgtggtagagtattttcctggtacgtggaaatcatcaaaccacctcatttgttgtgtcccgcaacgcacgtacccagacctgtggacaggacgcctcggaccagccagcggtcatggccatgcacctgccagcctcatagtaatcaccttgaagcttgacatactatgctactcatcaatagactttccagtggcggctgctgtatctgaacttgttattccaggattagcagatcagatgattgtaatgaagagaattattgcttcagagataactcaacaagcacagcttcaaccattccattttattccttctggttggcatgttccagtaacagctatatacaatacaagatatggtgagaccgaggagaggcaaagtgagctgcgaaaagaactgcatttaaggctaggacttcccttagatcggcctttgttgcgaatttctaatgcattgactttcggtggcatgggaaggaggaagaaaagcatgccaagaagtggttcttcgctgcttcgagacatccacagagaacttccatctagtggtgtatccggaggtgttatgtctttgattgatggttcatatgagtattatcattatcttcacgatggtattgatgacaatggatggggatgcgcatatcggtctctacaaacaattgtctcttggtacagattgcaacaatattcatcaataaatgttccttctcacagggagattcagcaagttcttgttgaaattggtgacaaggatccatcatttattggatcttgtgagtggatcggagccattgagttaagctttgtcctcgacaaactgctgggcgtgagttgtaaggttatcaatgtgaggtctggcgatgagcttcctgaaaagtgcagagaacttgccaggcattttgaaacccagggaactcctgtgatgattggtggtggagtcttggcttacacccttttgggagttgattataacgaagccagtggagactgtgcatttcttatccttgatccgcactacactggtactgacgatctcaaaaagattgtaaatggcggatggtgcggatggaagaagtctgtcgacagcaaaggccgaagcttcttcttgaaagacaagttctacaaccttctactaccccaaaggccaaacatggtgtgaaacctatggtgttcaatatgttaatagtgcagacgtgcaggttcacgaggcacacatatttatgcttgtgatagaggtttatggttgcaatagcagaagttatgatttgtaaaaaaaaattagtgagacattatattgttttttttttataaatttgtagtgagtaaattaaattaaattaacgaatttgagagttttacaggc

SEQ ID NO: 36433 - DNA, 281 bp, Zea mays subsp. mexicana
  Clone ID: UC-ZMROTEOSINTE099F01_FLI
atttttctctctatggattgcagctgcagcagtccaaacagctgcaacagtgtcggcttgtagccagccgaacacgcccatagactcaatcaatagatcgaccaggagaagtacacaccttgtaacgcgattcctgttctgagtggcaatgtagagacagcgcgcagattcctagggtcaatcaggattaagggttgcggatagggcaaggcgtggtaatggaattgtagggtcctaaataaattttagtttaaaaattaatataaatagggtttgattct

SEQ ID NO: 36434 - DNA, 491 bp, Zea mays subsp. mexicana
  Clone ID: UC-ZMROTEOSINTE099G11_FLI
tcgctgtcgtcgtcttcgtcgtcgtcgtctgtggtgttcgacgcgccgccgcccgtgggcctgcggctggacctcaacctggcgctgccgccggtcgagatggtgatgtgattgctgccgtccaggaggctaatcgattgctcagttaattagtcaccattagtagctaatcgatcaaggtagccgtcaggcagaggtgtaaataggatgcagatttgctcggttttcgttgactgttgtggcatggtttgcttcttcgctgcgactctgcgagtcacgcaacaatgcaaaagcaaaatgaaaaaaaagagagagagagagagggataattatgccccagcggctctcattttattccttcgattcacttctgagctctcgttttattttttacttgacccacttctgaaacctctcaagttctgagagctgaaccgtaatgtgtgagacattgttcgtttgtgtcggattggtagattagaactattcct

SEQ ID NO: 36435 - DNA, 1353 bp, Zea mays subsp. mexicana
  Clone ID: UC-ZMROTEOSINTE100A03_FLI
caaggtatcgcgccttatgcaaatctctaccattatgacctcccattggcactccatgaacagtacctgggctggcttagcccaaagattgtgtaagaattgcaaactagacgacatcgagaaaccaaatttcaaattgattcgaccatgtgtcagtcagtctgacccagctgcacaccgtgcccaatcgaagggaggcgtttgcagactacgccgagttctgcttccacgcgttcggagacagggtgaagaactggtttaccttcaacgagccgaggtgcgtcgctgctctgggctacgacaatggcttgcacgcaccgggaaggtgttccgggtgccccgccggaggcaactccaccacggagccgtaccttgtcgcacaccatctcatcctttctcatgcagctgcggtcaggcgataccgcgacaagtatcagcttcaccagaaggggaagattggaattctcctggatttcgtgtggtacgaacctttcagcgacagcaatgcggaccaggctgcagcacagcgagccagggacttccacctaggctggttccttgaccccattgtacatggacggtacccgtactcgatgcaagagattgccaaagacaggctaccgttgttcagcgatgaagaagccaggatggtgaaaggctctatagactatgttggcatcaaccactacacttctttctacatgaaggaccctgggacatggaacctgacgccagtcagctaccaggatgattggcatgttggttttgtctacgaacgaaatggagttcctattggcgctcacgcaaactcctactggctgtacattgtgccgtggggcatcaacaaggctgtcagctatgtcaaggaaacttacaaaaatcctacaatgatccttgctgaaaacggaatggaccaacctggtgatgtcagtattactcagggtgtgcatgacacagtaagaatccgttattacagagactacataactgagctcaagaaggcaatagatgatggtgccagagtcattgggtactttgcgtggtcgctgcttgacaacttcgagtggaggcttgggtacacttcgcggtttggcttggtgtacgtggactacaagactctgaagaggtaccccaaggactcagctttctggttcaagcatatgctgtccaagaaaaggagctagagaattgcagacaagaggaccactggcttcaggtgtcatacaaaagttcactctgcaaatcctcttagtatgtcagatttagcttaagaaaccgtgcagacaattgagtctcaaggctcgacatctctagcttcgttaattgttgcaaggcaataaattggtatcttcg

SEQ ID NO: 36436 - DNA, 551 bp, Zea mays subsp. mexicana
  Clone ID: UC-ZMROTEOSINTE100B06_FLI
gccctacttcatggccgtgctccgcgccaagatcagcgccgccaacgcgctccgcgacgtcgtgctcaggggcaagaaggtcaaggccgcggagggcaaggagatgggcatagtggatgccgtctacccctctgcgctcgagacggcggaccaggccttcaagtttgccgagcagctcgcggcgaggaagtgggacggaggcgtctacgcgtccataaggatgtccatgtaccctgaggcctgcaggtcagttggaatcgtcgaggagagcgatgacgagaagcggaagcacttcgcttctaagctctaacttcgtgattggcgagagggtttctgtggaagcatggatgaacctacacattctgtatctgtacatcgtccaaccattggcgctgtcgctacgtgtgaagtacacaccgtgtacttgtgcagaccttgtaatttttacttgcctggtagtgggaaataaatcgaagctcctctcaccccttgcttgaagaatttgccccagtagcattatcgatatgtgttcatgtgttgtgcttgattcc

SEQ ID NO: 36437 - DNA, 1127 bp, Zea mays subsp. mexicana
  Clone ID: UC-ZMROTEOSINTE100D02_FLI
gttcgtaccacacctactgtcaaaaacatttttggaatgttatgttcaagggaacattgaaccaagtgaagcaaaatctatcgtagaagaaatcgaaaacactatatttactacgcccaattctttgttcaaatccatgtctccatcagaatatcttattaaaagggtcatcatgcttgaaaatgacttgaaatgctactaccaaactgagggattaaaccagaagaatgagaattcatcagttatccaatatattcaggtgcatcaagatgacgccattttgaatatcaaacttgagctgttctctctaatagcaaaacagccagccttcaaccagctacgaactgttgaacaacttgggtatataacaagtctttctctgagatccgactatggagtcctggcactccaggttgttatccagtccacagtaaaggatccttcatacctcgatgttagagttgatgagttctttaagatgtttgaaagcaaaatctatgaactctccgacaaggatttcaagagaaatgtgaaatcattaattgattctaaactggagaagtttaaaaacttatgggaggaatctcatttctactggggagagattgaggcaggaactctgaagtttgatagggtcgagtctgaggtcgctatgctaagagagctcaagaaagaagaattcatcgagtacttcaaccagtatataaaagtggacgcgcctcaaaggaggacactaagcgtgcaagtcttcggcggcaaccatttggtagagttcaagaaggcaatcaacgaagccgacccgcccaaaatgtacagaattacagacatattcggcttcaaacgatcgaggccgctgtacagctcactcaagggaggtccgggcaggatccccatggactgacagccggcaatagcatgccttgtttttcatgtatgtagtgtaatggccagtgcatacgaatgatgaattcgattctgaatcctgctcctgcatcagattcggttgcatgattgatctatacttcactgttggtttcacgaccagcgtgtccctttctgggcaaaatctagggagctgtataaagtcatgtatgttcacatgtttgtttgcgtttcttctcacagct

SEQ ID NO: 36438 - DNA, 1096 bp, Zea mays subsp. mexicana
  Clone ID: UC-ZMROTEOSINTE100D05_FLI
cgcaaaccaggcgctccaggaaatattggattctcttagtccattcgttgatggtttgaagttctctggcggatgccatagtttgatgggaaaggagttggttagagagatcactgatctagcacacaggcatgacatttatgtgagcacaggtgattgggcagagcatttgctgcgccaaggaccctcttctttcaagcaatatgtagaggaatgcaaggccttagggtttgacacaattgagctgaatgctgggtctctcaacctccctgaagaggctctgttgagactagtccgcctcatcaagagtagtggtttaagggcaaagccaatgttttcggtgaagtttgacagttctgatattcctgcgtctggtgatagggcctttggggcttacatagctccagtcaaagggaagacctcagaaagagttgaagatgttgacctgctgattaggagggcagagagatgcttggaagcaggcgctgatatgatcatgatcgatgctgatgatgtttgccagcgtgctgaatctctgaggacagacatcatcgccaagattgtaggccggctcgggcttgataaaaccatgttcgaagcttccaactccaacacctcggagtggttcgtcagacgttatggcccaagggtaaatctctttgttgaacactctgacgtgatgaatctggagcgcctccggggcttcaacatgcgcagaagcaactcggcctcccgttttgcctcgccgttcttcctgatctaatgggataatggccattcccgttcctgagatgtggaagatacttctacatgttctcaccctcgcagagcttgttatggcctagagatgtaaccgcctttgttaatgcctcgatgtagcccccagcgagcagcgcatagcacctgttatgttgtcagcgtcgctactgataatcggttctgttggtcaatgctactacaataatcggttgtggtgcaagtaatgtgaatagtgtaagagtgttttgtgttccattgcatcggtgaaccaggtccttggattcatgtttgtactattgtatgcgtgtgaaatatcggaactttcagtttccagggc

SEQ ID NO: 36439 - DNA, 1441 bp, Zea mays subsp. mexicana
  Clone ID: UC-ZMROTEOSINTE100D07_FLI
accatccataccaaaggaacaacacaacagtgtggcacatttccttgaatcgcgtggcatgttggaggaagcccttgatatagccactgaccctaattacagatttgatctggctgtgcagcttggaagcctcgaagttgcaaaggaaattgctattgaggcacagagtgaatcaaagtggaagcagttgggggaacttgctatgtccactggaaagctcgagatggcagaagaatgtctccttcaagctacagactttagtgggttattgcttctatattcatcacttggagatgctgaagggataacaaaactggcatccatgtctaaagaattaggaaagaacaatgttgctttcctttgcttgtttatgttaggcaaattggaagaatgtcttcaattgttggttgatagtaatcgtattccagaagcagcactgatggcacgatcttaccttccaagcaaagtttctgatattgtctcaatatggaaaaaggacctccaaaaggtgaattccaaagctgcagaatctctggcagatcctgctgagtacccaaacctgttcgaggactggcagattgctctgaatgtagaagctactgttgctcccaagaggggtgtctacccacctgctgaggagtacatgacttatgcggagaggtccaatgacagccttgtggaagttttcaaaagtatgaatgtggaagaagtaccaagtgataatggagatcctgttcatgaggtcattgaggatgacggagtcgagggaagtatggaggatgttgttgaagttgaacccgatgattcaacagatggcggtgtccttgtgaatgggaatgatggtgaggaacactgggtgcttactcctgaccagcagtagagatatcacgacaacattctgcaccagcagattagttgcctattgtaaaaaattgtaggtcgccacatgttcagactcgatagtcatgtaaaagaagttcctccccatttgtacaaggcgttgtgcgtggtctagtattgcggttacagaaacagtcttggatggtaattagcatttggtctagataagaaattttgtaattcgattcattttgggtgggcattgtagatttgtggtatgttatagattatctacccttgtatgtttaccacatgatacgatactaacattctttaaggttggaatttgttcaccgacacatgggctgcgacctgcatagcatgtgaaagttgtatttttggttccccagttgtcgataacttgatccttggtttctgccatgtattgtactgccttcttgtaacttattttgccttttttagatgtactgtttttagtatatagtgtatttagatacaatgtataaccagttgtataataaaaactagttaagtgtccgtacgtcgctacggcacataaattatacgttcttttgttcac

SEQ ID NO: 36440 - DNA, 1006 bp, Zea mays subsp. mexicana
  Clone ID: UC-ZMROTEOSINTE101A03_FLI
cttgccaccaagctaggtgctcgtctcaccgaggtccgcaagaacggaacctgcccctggctcaggcctgatgggaagacccaggtgacagtcgagtaccgcaatgagggtggtgccatggtccccatccgtgtccacaccgtcctcatctccacccagcacgacgagacagtgaccaatgatgagatcgctgctgacctgaaggagcatgtcatcaagcctatcatccctgagcagtaccttgacgagaagaccatcttccaccttaacccatccggccgctttgtcattggtggacctcacggcgatgctggcctcactggccgcaagatcatcattgacacctacggtggctggggagcccatggtggtggcgctttctccggcaaggacccaaccaaggttgaccgcagcggagcctatgtcgcgaggcaggctgccaagagcatcgtcgccagcggccttgctcgccgcgccatcgtccaggtgtcctacgccatcggcgtgcccgagcctctctccgtgttcgtcgacacgtacggcaccggcgcgatccccgacaaggagatcctcaagattgtcaaggagaacttcgatttcaggcctggcatgatcatcatcaaccttgacctcaagaaaggcggcaacgggcgctacctcaagacggcggcctacggccacttcggaagggacgaccctgacttcacctgggaggtggtaaagccactcaagtcggagaaaccttctgcctaaagcggccttttttttcagtaagaagcttttggtggtctgctgtgcttaatcatgcttttatatggcttctacatgttgtggttctttcttgatctgcaccgcgcttatcgtttgtgttgtactgccgtaataagtggtgcttatgaggactgtttctggttttgctgcttatgttgtaatgctttgaaacaatgaaagaagctacaggccacagctattttgagaagtaatggaacctcgtgccgttttgatt

SEQ ID NO: 36441 - DNA, 794 bp, Zea mays subsp. mexicana
  Clone ID: UC-ZMROTEOSINTE101A06_FLI
tcggatgttgtgaccagataaccgacaatgcattcatggacggggaaggatacgggtttcagtctgaactgagagttttgaagatcagcagctgtgttcggctcacagttgcaggggtcggcagagtgattgaatccttcaaggctctcgagtacttggatgttcggtcatgccctcaggttacaagggacagctgcgagcaagctggagtgcagtttcctgctggctgtaaggtgaatttcgatggtagtttgctggaatctgatccatctgctgagatgttcttctaaaatgtgatctcggttgaaatcagatttagtgtgaactgcaaaactaagatttgaagagttcggtcatggaggcgagtgcttgacattgctgctgatctttcaccgtcaaaatctatgcaagaacctgagaccacaacggatgcaagccatgatcatattcagtacccaattcaatatgcatgtgatttaatctgtataaagtagcgcaaaagaccatgaaataagttgtctgaccaaagaacgtatttgcattatgtattatgccagtgcagcgggtgtattaaaaaaatgtgcattttaatagactggtttcagtggattgtacgcagttctgttttttatctgcatcgctggtatagatctttgttttggcgttatgccaaacagggaaacagtgttcggtctgttgtcttatgctcaaacactgctcccacctaccagaattggtgggatgtaagccgcatattttacgatactatataaaagtattcgatattaaggatc

SEQ ID NO: 36442 - DNA, 969 bp, Zea mays subsp. mexicana
  Clone ID: UC-ZMROTEOSINTE101B06_FLI
cttccgcagatccgccttcgactcggggctagagacgcgtggggagaagggggagccgtggacggaggtgctgtcgtgggagccccgcgcgttcgtgtaccacaacttcctctccaaggaagaatgtgaccatttgatttcactggcaaagcctcatatgaagaagtcaacagtagttgattcagcaactggaggcagcaaggacagcagggtgcggacaagttcaggaatgtttcttagaagagggcaggacaaaattattcggacaattgagaaaaggatagcagattacaccttcatacctgtagagcagggtgagggtcttcaagttctccactatgaagttgggcagaagtatgaacctcactttgattacttccatgatgattacaacaccaagaatggaggccagcgtatagcaactcttcttatgtatctttcggatgttgaagatggtggcgagactgtgttcccttcgtcgacaacaaacagcagctcgtcaccattttataatgagctgtctgaatgtgcaaagggtggtctatctgttaaaccaaagatgggagatgcgcttctgttctggagcatgaagcctgatgggtccctagatcccacaagcctgcatggtggatgcccagttataaaaggcaacaaatggtcatcgacgaagtggatgcgtgttcatgagtacaaagtttagatacaaaaagacacagacctgaggtcatgcaccggttcaaatgcgtggacattttggcacatgtcgagagtttcgattttccatagaggattaatttacagttcatcttttctagctgttactctgaggcaatgtcttaggctccgtgttgtacattaacatgttaggctgatgaacataaacgataaacctgatgattcagagatggatgtgttgggtgtatgccattgcccttgttcgaatcaagataggatgtcttattgatgttg

SEQ ID NO: 36443 - DNA, 808 bp, Zea mays subsp. mexicana
  Clone ID: UC-ZMROTEOSINTE101B07_FLI
cgaggtctcccgccgcgacggcgccgtcagctggtccgtgcaccgccccaccaccgtcttcggatactcccctcgcagcgccatgaacctcgtcggcagcctctgcgtctacgccgccatctgccggaaggagggcgcgacgctccggtggcccggctctcgggtcacttgggagggcttcagcgacgcctccgacgccgaccttatcgccgagcacgagatctgggccgccgtggatccgttcgccaagaacgaggccttcaattgcagcaacggggatctcttcaagtggaagcagctgtggccgatactcgccgaccatttcggtctggaatgggctggctacgaaggtgaggagaacaggttcaagctcgaggaggccatgtccgggaaggaagctgtctgggcggagattgtcagggagaacgaccttatagccacggagcttgacgagatcaccaattggtggttcgtcgatgccatgtttgctgtggagacccagcttctggacagcatgaacaaaagcaaggagcatggcttcctcggcttcaggaacactgtcagctctttcaacacatggatcgagaagctgaaggtcttcaagattgttccctaataataatccatccttgctattcacttctatactgttcttctgcatccttattatcctgctcatttatcagcaccagttctcttgtaatttagttccatttcaaacatcttgctatctgtgccaggtttgcgtgttatatactagggacaaataaagatcaacacattgcaaaataggttattcttgtccagc

SEQ ID NO: 36444 - DNA, 690 bp, Zea mays subsp. mexicana
  Clone ID: UC-ZMROTEOSINTE101D08_FLI
cttctcccggggtgaagatttacacggctaacaacgtgagggaagaacttcaagacgcacagcgtgatttcattagagcatcggtaggagtgagtcggaaagggaagcttctggcccctaagatactgcactgctttgcccgtggctttgtcgacgacaacagcttccctatctggatctcgcatttcctaccccagcagcaagctacgtttgtcgatcactgcgtgtctcaacggcggcaaagtctcctgggcacccgtactttcggcgtcgttccatttgattctcggtttcgctacctcttcctgccagatgcgggatcgttaaattaactgctatccgagattcagatgcttccctgcctagacaacctgaatgacagcctaactgccaacagaagtgatgaagtccaaagccctgatagaccgctcaacagtgtaagagctgtctctcgagttaccatcatgtctggaaaagtaagtttatatccagcgaccatgggagtatcaagatttgagatagcagtcactggattgacccgtgtcattggaagtcagatgcatatctttggaattccttaatcggttcgtccgtctcgacatcttgtcgagtttccttaaaaaaaaaaactgtacataactcctactcccagataaaaacttaagttcatcatggtgctatttatgcatt

SEQ ID NO: 36445 - DNA, 1134 bp, Zea mays subsp. mexicana
  Clone ID: UC-ZMROTEOSINTE101D11_FLI
ctggtggtttcctgcatccactcatgcccctagtggtaaacccattgagtgcagagccagctaagtctgggaacagcaaggataatagtttaaacaagaaactaaaggaaattgatggatctgctgtgtcaagtggcaacagtgagaaaacaagtggggatcacagcctagaaggatccagtgatggaaacaacccaaaggtgagcggaactccaaagaagaggagcttagatgataggactacatcagaaacatgtggagtttcagcaattaatgacacaccaggagaatcaggaagattgccagctttgtccagtgtgcgcattccagacacaacgatgaaaccatgtgtgagcaccggtagtgacttcaaagttagtggtgcaacatcaaccgaatggccagctaaggacgacaaggcatcgaagcgtgaaaggaggaagcagtcaaacagggaatctgcccggcgctcaaggctgaggaagcaggctgagactgaagaactggctagaagagtagagctactgaccgcggagaacacgtccctccgaagcgagatcagcaggctaacggaaagctcccagaaactaaggatggagaactcggctctgatggagaaactagcggacggtacatcagatcaagcacaagaagcttccgccggccaccagacaccaacggcgccatcgtcggcttgcgtcgtcaaaaacttcctctggatgatggacggcgaaggcgcgtcaagaggcggaggcggcagcggctgcagcagccggcgcagggatcacggtgcgcccatgctccgccagctcctgagctcgggtcctctggcggctgacgccgtggccgcaagctgatcagtgccgtgcttcccttgtgccgagcgcgtgtggactggcgatttttgttaaaagagcgcacaagccgccccgcgagactaacgcacggacgacctgtaaattacagtagctatgcctatgtatgaggcatcgttccggccactctgctgagagccgatatacggatcccgtcactgagcttggtagctctctgtcgttagagtggctgtgccaaactgaatcaactgacacgattcagcagtactaataataaccatcaggatgtttgcctctg

SEQ ID NO: 36446 - DNA, 1658 bp, Zea mays subsp. mexicana
  Clone ID: UC-ZMROTEOSINTE101F05_FLI
cttaaaggaaatggagctacaggccttgctatctcattacttggtgctatggcacaatctttttctgcactcagcattagtattgtcaagaaaagtgccacggtctgttcatgggattaaggaggcctgcagattctatacgattgaaagtgcatttgcccttacagttgcttttctcatcaacatatctatcatatctgtcagtggttctgtctgtggttcaggtaatttaaacccagaagatcaagcaaattgcagtgatctggacctaaataaggcttcatttttgttaaagaatgtccttggaaactggagctcaaagttgtttgcagttgctttgttggcatctggtcagagttctacaattacggggacatatgctggacaatatgtcatgcaggtttttggaacttataccttatttcagttctagttcgcaagttgaatggcaggttgttttatgatgcatattactcgaggcctttgatgttgatcagaagtaatcaagcatttgcttgcttgcaacattagtttgtttagctgttagatatgaaaagtacagaaaataaattagtacataactcttagatttgcaatgaacaagcttgggcttatgagtttcagtgccaacctccaaggttctcttggtcagctagattgcagagaaaaaggacagatacggggtaagcttaggtcaccaccattattaatgtctcccattatttaatacagtacgctgctaattgtcttcccttgtctcaaataacgcgttgaatcattttaattatttttattgttttgcctaaaggaaaactaagtaatcaaccaagcattttggacttgtgaaacttcatttgctatatactaacatttactcacctaatctaggggtttttagatcttcggatgaaaccctggatacgcaatcttgtcacgaggtccttggctatcctgccaagtttgatcgtgtcaattattggtggttcttcagcagctggccagttgattatcattgcatcgatgatactgtcatttgaactcccttttgctttagttccactccttaaattcaccagcagcaaaacaaagatggggcagcatacaaattcaatattcactgctgtgctgacatggatgatcggctcgtttattgttgtcatcaacacctactttctgataacaagctttgtgaaattgctcgtccacagcgggctgaccaccatttctcaagtattttccggtattttcgggtttttgggcatgctgatttacatagttgcgatcctatacctcgtctttaggaggaacaggaagtccacccagccattgctggagagcgatgctgagcttgcagtatcgggtagcagtgctgatgccggagcagaatgctcgctgggccatttgctccgtgaggacatctccagcatgcaacttccgcagcagcgttcagcttctgatctagattagataacagctgccaggaaaataaatgttttttttgttttttatatagtatagtaattacagaatagggtacgtcaggtattggcttctgttcatcctactgatgatgcttaaggaatgtatacaagaggacggatatctatgctgccaaacaaaaaaatggggcacaaaagaatttagtgcctgtttttggg

SEQ ID NO: 36447 - DNA, 667 bp, Zea mays subsp. mexicana
  Clone ID: UC-ZMROTEOSINTE101H05_FLI
tgctcatatccaacagctagatcagtttatgaggaagcttgaagaaatccggcaagaaaaagaggcagctgcagctgttactgcagggactgctgttgctattactgccactccaaccgtgaatgctggagcgacaactgctgatgctactctaaagagtggacgatctggcgaaagaggcagagggggtcggaagaaggccaaggtacccacggagcagccagtgccagttccagtgccactgccacctattgacttagaattgcctgtggatcctaacgaaccaacatactgcctctgcaaccaagtcagctatggtgagatggtggcatgcgacaatcctaattgcaaaatcgagtggtatcactatggctgtgtgggcgtcaaggagcaacccaagggaaagtggtattgcccaaactgcatcgggttccagaagaagcgaaaaggcaagtgatatgcagtccacaggctgctgtgctagtgtgtccttgcttgttaattgtgttgctgatgttgggtaacaaatgtagtagtagttgctgcctgtgacagtgcataccgttgtagatccagtgttctgtacatgttactcctccttcggcgctcgtagtttagggccatcgaccatttgttaacttcatggccttttttggcgattctgccc

SEQ ID NO: 36448 - DNA, 1011 bp, Zea mays subsp. mexicana
  Clone ID: UC-ZMROTEOSINTE101H11_FLI
ccttcagcggaacccatatctatacagcggtacaaagtttcggtatggaggaaatgccttgcactacaaagatgactcagatcatgatcttgagtactgtgtctcacttcatttgggtctcacagactacaggacatttgtgggaacaaatctcaatccattgtgggaattttttttggttccatctgaagatgattctgtacattgccaacacttgtcagatgcactgggaaatggtgctatagttgaaacatctgacaaaaagattattgtattgcaaaggagctacaatgtggcggactttccaggatactatgttttccctggaggacactcggagccgcaagaaattggaatcatgggtcatcaaactgatgaagaagactttgctagtctcaatgaacgagtttcacaagaaatgtttgaaggagtcatccgtgaagtggttgaggaaactggagttcctgctagctccctaactgatcctgtcttcattggagtttcccgccgagaagttaacgctaggccgactgcgttcttttttacaaaatgtaacattgattccagtggcgtaagcgagctttattctagagctcaagatggctatgaatctactaaactctacacagtatctgtggaagaactacaaggaatgaggcagcggatgcctggatgccacaacggtggtattgctctgtatgagttgatgaggaatgctgcaaaaaaaaagtgaagacgtcattgatgaatagttctgatggtgctattacaccagaaacaagtgtggagctattacaccagaaacaagtgtggaggtattcgtatctcgtacaaacacccgtgcagaacactgcatgtgacatccatcagattgctgttctttgcagtagatgagccatttcatgtttgttgagcctgacataggtctccttagaccgctgcataagttcccacaaagaaataaggtagtgtttggttgaagagccaattagaacggagccgttctatccc

SEQ ID NO: 36449 - DNA, 821 bp, Zea mays subsp. mexicana
  Clone ID: UC-ZMROTEOSINTE101H12_FLI
ctctgagccgtgccgccctccaactgatggagaaagtggactcctaagagctgacctttccaaggggatcacagagagcagcgccaggttccctaaactcttgattgatggaccatatggtgctccggcgcaagactatcgggaatacgatgtgctcctgctcattggactgggcattggagccactccattgattagcattgtgaaggatgtacttaaccacacccagcatggaggatctgtttcaggcacggagcctgagggcagtggcaaggccaagaagaggccattcatgacgaagagggcctacttctactgggtgaccagagaagagggatccttcgaatggttccgaggggtcatgaacgaggtggctgagaaggacaaggatggagtcattgaactccacaaccactgctcgagtgtgtacgaggaaggggatgcacgttctgcactcattgtcatgctccaagagctccagcatgcgaagaaaggggtcgacatcttgtctggaactagtgtcaagacgcacttcgcgcgtcccaattggcgaagcgtcttcaaacatgttgcagtgaaccatgagaaccaacgcgttggagttttctactgcggtgagcctgtccttgtgccacagctacggcagtggtcagcagacttcacccacaagacgaacacaaagtttgagttccacaaggagaacttctaatggcataactggagaagctctggacgtggtcctctaatgatttcagaatgtgaattaccagggttgtaatatatatacgagtagaataaaatgatgggagttattttgttgt

SEQ ID NO: 36450 - DNA, 1928 bp, Zea mays subsp. mexicana
  Clone ID: UC-ZMROTEOSINTE102A08_FLI
tccgcctcgacaagcgtcggcgagatggtgaagaggagcaagaagagcaagagcaagcgagtcacgctgcggcagaagcacaaggtgcagcgcaaggtgaaggagcaccaccgcaagaagcgcaaggaggccaagaaggcgggcaaggccggccagcggaggaaggtcgagaaggaccccgggatccccaacgagtggcccttcaaggagcaggagctcaaggcgctcgaggcccgacgcgcgcaggcgctccaggagctcgagctcaagaagcaggcgcgcaaggagagggctcagaagaggaaggcaggattgcttgaggacgaggacattgctagtttggcatctgcagcttccgcacagggcagtgagtttgcagcaaaggagaatgctcccttattagtggcaaagatcaacgatcattcagagaggtctttttacaaggagcttgttaaagtaattgaagcttccgatgtgattatggaggttcttgatgcaagggatccgctgggcacccgttgcattgacatggaaaagatggttaggaaggctgatccaagtaaacggattgtactacttctcaacaagatagatcttgttcccaaggaggcggcagagaaatggcttacatatctaagagaagaattgccaacagttgcttttaagtgcaatacccaggagcagaggaccaagctgggatggaaatcttcaaaattagataaaacaagcaacatcccacaaagcagtgattgtcttggtgccgagaatctaatcaaattgcttaagaattattccagaagccatgagctcaaactgacaattacggtgggtattgttggacttcctaatgttggcaagagcagtctgatcaacagcctgaagaggtcccgagtggtcaatgtcggttctactccagggattactagatcaatgcaagaagttcaattagacaagaaggtaaagttgttggattgtcctggtgttgttatgctcaaatcttccaacagtggtgtgtctgtagcccttcgaaactgcaaaaaggttgagaaaatagaagatccagtcgctcctgttaagcagatcctaagtatttgcccacatgagaagttgctgtctctatacaaggttccaaactttggttcagttgatgattttcttcagaaagtagcaactgtacgtgggaaattgaaaaagggtggtgtagtggatgttgaagctgcagcgagaattgtgcttcatgactggaatgaaggtaaaataccatattttacactgccgcctaaaagagatgctggggaggactcagatgcagtgattatatccgaggatgggaaagaatttaatatcgatgagatttacaaagctgaatcttcatatattggtggtttgaagtccattgaggagttccatcatattgagattcctcctaatgctccactggcgatcgatgaagagatgctagaggatggtggcaagaaaccaagcgaagccatccaggaaagccgggacagggaggagcaaatgcccgacgtgaaggactcaggaggaagcaaggcagccagcgccagcacgcagaacgacaagttgtacaccgccgagggcgtactcgaccctcgcaagagcaaagcagagaagaaacggcgcaaggcgagcaggcccagcgcgctgaacgacatggacgcggactacgatttcaaggtggattatcggatggaggacggtgggagcgagggtgcacacgcggatgatgaagatggcggagatggatccgaggataatgaaccaatgaccggtgtcgatgatgcatgaattgtcatgtcgagtgccactttgccagaaatgatttgtcccaatgggggttgggaaattaacccacgacagttttgtgcttagtttgtttcttcaatgaaagatgacagttgcgtttt

SEQ ID NO: 36451 - DNA, 1084 bp, Zea mays subsp. mexicana
  Clone ID: UC-ZMROTEOSINTE102B06_FLI
cacgaacaagagaagctttgtggtctacctgacattgggggccatgtaatgaaaatacctcttgtggctttccaagtattgctttgtatgcggttggagggcacaccaccaagcgctcgctacatcccaatatttgctcttttctcgccactatttattctgcaaggtgctggtgttcttttctctctagcaagattagtggagaaggttgttctgctattgcgtaatggaccagttagtcctaattaccttacagcctcatcaaaagttcgcgattgctttgcttttcttcatcatggttcaaggcttcttggttggtggtctattgatgaagggagcaaggaagaacaagcccggttattttatactgaatctactgggtacaataccttttgtggctatccgccagaggtggttaggaaaatgcctaaaaaggaccttgcagaagaggtttggaggctacaggcagctttgggagaacaatctgaaatcaccaagtgtaccaaacaggaatatgaaaggcttcaaaatgagaaggttctttgtaggatttgttatgagggggagatatgcatggtgctacttccctgccggcacagaactttatgcaaatcttgtgctgagaaatgcaagaagtgtccaatctgccgtgtgccaattgaagagcgcatgcctgtatatgatgtttaaacctcactaactcagcttaacaatacaaatttgtgcatgtgggttctgtcatgctgtgcatttagtctcgatcacaactttaagctgattgaggtttgcacttcagaaagggtctgcaatatatgggggaaatacaagtatatcatgtctaaccaaaagcatggatatgtggttgatgagcattgtcgttttggaccagttatctactgtaagtatgtggtcagtgtatttcccttccctcttgtgattggtagatgagtcagatagtcttgttcgcgtagcagcattttctcagggatatgcagttgttgagaagaaagtgaaacaaaaacagactgtaaataaaaacactgccttgtttgaatctagtccttgtttgagaagaaagtggaac

SEQ ID NO: 36452 - DNA, 1252 bp, Zea mays subsp. mexicana
  Clone ID: UC-ZMROTEOSINTE102C01_FLI
gatggaagtatgatgatttatgggattagttagctgtgaacgtatcgtaattgtagctactcctattttagagtgatttctgcaaaatgaacaaaaacatattgattccatctgctcattattttttacctttaatgtcataagatgcataactgttagacaggaaatacagagaactcaaaataatttcaaaatcgaacagtggtattttttatttcttctaatgaaaatggttaccatttcagtcccttttatttcttttctactagaaatatttttcttgtaaggacctttaattgtataagtttttgttcacagtggattgcagatatctgaagccctcaaactgcagatggaggtccaaaagcggctgcacgaacagttagaagtacaaaggcagctgcagttacgaattgaggctcagggaaagtacctccagaagatcatcgaagagcagcagcgcttaacaggtgtgaaatctgaaactcctgctggaggtgcttctgtcactgtatcaagtgatcaattcccagactcggagcggactgagccctccacacctgcaccagcatccgagtctccaactcaagttggtgcttccaatagggacactggagaccgaactgaagcaaccaagagcacctgtcatggtgattctctttcccgcaacgagccactaacccctgattccaactgccagaacggttctcctgtcgctagtccaaaccatgaaagggcagccaagaggcagcgaggcagtggtactgaattcttagattctgaggctgagttttcccttccgcgccacatcttcgagtcgagttcaggctcagagttccaacaatactcaatgtcctactcaggacagtagcttctgatgttcacatcatctctgcaccgttgctagcttgttcagcacgatgcgcatggtccgtaggtctgggtaggttgatgtctcaaggagcgtgttgttggtaaacaaagctgtaggtgttcagtgattgtctacatggtatacgtgaccagctatttaagttcctaggtttgtaacatgtatgtccgcctgcagttcagttgagatgcttcaaggctaaggttctgttgtgtgacctgtagacacgaggctgtcagcttgtattctcttggtaatgtgtgtcagcagagcgttagcattaagtctaattgaacagtgctgttatctgtaacgtctgagtttgatcagaaactgaagttaattgaggaagacatcaac

SEQ ID NO: 36453 - DNA, 1325 bp, Zea mays subsp. mexicana
  Clone ID: UC-ZMROTEOSINTE102C08_FLI
cggatcggaagcttccataagtttccatcgggcgtcgccggtatggcgatccgcaaggggtcttcgtacgccgtcgcggcacttctcgcgctcgcctctgtcgccgccgtcgcaggggaggtcttcttccaggagaagttcgaagatggctgggaaagtcggtgggtcaagtccgagtggaagaaggatgagaacatggctggtgaatggaaccacacttcgggaaaatggaatggagatgccgaggacaaaggtattcaaacctccgaggattacaggttctatgccatttcagccgaataccctgagttcagcaacaaggataagaccctggtgctgcagttctctgtgaagcacgagcagaagcttgactgcggtggtggctacgtcaagttgctgggtggtgatgtagaccagaagaaatttggtggagacacatcttacagcattatgtttggaccagatatctgtgggtacagcaccaagaaggttcacactatcctgaccaaggatggcaagaaccacttgatcaagaaggatgtgccttgtgagactgatcagttgactcatgtttacactttgatcatccgtcctgatgcaacatacagcattctcattgataatgaagagaagcaaactggcagcatctacgagcattgggatattcttccccctaagaaaatcaaggacccagaggctaagaagcctgaggactgggatgacaaggagtacattcctgaccccgatgacaagaagccagagggctatgatgatattcccaaggaaattcctgaccctgatgctaagaagcctgaggactgggacgatgaggaagatggtgaatggactgcccctaccattcccaacccagaatacaagggaccatggaaacaaaagaaaatcaagaacccgaactaccagggtaaatggaaggcacctatgattgacaacccagattttaaggatgatccatacatttacgccttcgacagcttgaagtacattggcattgagctgtggcaggttaaatcgggcactctgtttgacaacatcatcatcactgatgaccctgccttggccaagacttttgcagaggagacctggggcaagcacaaggaggcagaaaaggctgcttttgatgaggccgagaaaaagaaggaagaagaggatgccgccaagggtggggatgatgaggatgatgacctagaggatgaggaagacgatgagaaggcagacgaggacaaggccgactctgatgccgaggatagcaaggattctgatgatgagaagcagcacgacgagctctagatggcgaggatgatgtt

SEQ ID NO: 36454 - DNA, 474 bp, Zea mays subsp. mexicana
  Clone ID: UC-ZMROTEOSINTE102G04_FLI
gggcccgaaagcagccatggcttgtgcagtccttggctgtttgatgtaaaccacagctggggagcttggttggggtcacgtgctgggctgttctatatgcatggtacttgagttattctgcactactacttacgttactaaattggagccttggagtctggagcaaaaaaaaagtggctgtattctcaaggaacatgagaccaccgagctctggagtgaatgaagggcgtcgtctttggaagttagacatcacctagagctagggtgtccagtcttggtaggaattagacatgtttctcctaggaagagagtcttgagattgatggacgcatgcatcttcaattcctgtgtattgtattactactcgtacaatctgtaatgttacactgatgatgaattgatgatggctgatgagcaaacaccagacagctctgtcgaagcctgttgctgacggttcaacatttcagcaacatc

SEQ ID NO: 36455 - DNA, 699 bp, Zea mays subsp. mexicana
  Clone ID: uC-zmroteosinte102h01_FLI
ctcctcgcatttccttgcaaccgattgcctatccccctctcaacccaagaccgatggcgcccaaggcggagaagaagcccgcggcgaagaagccggcggaggaggagcccgcggcggagaagacgaccgccgggaagaagcccaaggcggagaagcgggtccccgcgggcaagtccgccggcaaggagggcggcgagggcaagcgtggcaggaagaaggggaagaagagcgtggagacgtacaagatctacatcttcaaggtgctgaagcaggtgcacccggacatcggcatctcgtccaaggccatgtccatcatgaactccttcatcaacgacatcttcgagaagctggccggcgaggccgccaagctcgcgcgctacaacaagaagcccaccatcacgtcccgcgagatccagacctccgtgcgcctcgtgctccccggcgagctcgccaagcacgccgtctctgagggcaccaaggccgtcaccaagttcacctcctcctaggcttgcacgctcgccctttgtaggcttctcttgtgttgatgttcccccttgtgttgtagttagatgttgctggtttctctgtcggcgctgctcgtaactgcgtcatgtaacccagcaaggacttgtttaattgtgaatcagcaacactttgttgttgatcactttatgttccaaattctgagtttgacgctcg

SEQ ID NO: 36456 - DNA, 648 bp, Zea mays subsp. mexicana
  Clone ID: UC-ZMROTEOSINTE102H03_FLI
cttcaactcgaaaccgcagctggtgcagctattcggttcttcgacaaagcgattggaattaatgttccccgctcaaggtttctcccagtgaaggctacatctgatctgttgcttgtgcagtctgatctttacaccttggttgatggctttgtcatccgcaacccatccagagcgaatccagctaacccttcaattgagcttggacctgagttcaagaaggttgccaatttccttggtcggttcaagtccatccccagcatagttgagcttgacagcttgaaggtttctggtgatgtctggtttggctctggaattacactcaagggcaaggtgacaattatcgccaagcctggagtgaagttggagattccagatggagacgtacttgagaacaaggatgtcaatggccctgaggatctttaagcaatgtttatcatcaccagttttcccaaggacatgtcacaggaactgccaagcctaatcactcctactgagctctatattttgtaattttcatgtgcattccgattccgctgtgagggtcatgtgagcccgctagagaataattgtaatcttctttgctgcgtctgtacttctgtttttgtgcgccaggacgtatatttttactgaaatgatactccgaagagc

SEQ ID NO: 36457 - DNA, 1519 bp, Zea mays subsp. mexicana
  Clone ID: UC-ZMROTEOSINTE102H09_FLI
cagcactcagaatataaagtccttagaaacagcccttgcatctcagtcttttctccagctgggactgcttacaggattgcctatggtgatggagctaggtttggaaaagggtttccgtgcagctctgagtgattttatcctcatgcaattgcagttagcatcagttttcttcacattctcacttggaacaaaagcacactactacggccgtactattctccatgggggtgctaaataccggcctacagggcgtaaatttgttgttttccatgcaagctttactgagaattatcagttgtattccagaagtcattttgtcaaaggatttgagttgatcttccttttgatagtctaccacatctttaggagatcttatgttagcaatgtcgtgcatgtgatgatcacatactcaacatggtttatggcagtggcttggctgtttactccttttctttttaacccagctggttttgcttggcaaaaaattgttgacgactgggctgactggaataggtggatgaagaatcaaggaggcataggagtgcaaccagagaaaagctgggagtcatggtggaatagtgagaatgcacatctacgttactcagtattgagttctagaattcttgaagtgttgctctcactacgcttcttcatatatcaatatggacttgtttatcacctgaatatctctcaagacaacaagaatttccttgtctacctgctttcatgggtcgtaattattgccattattggttttgttaagcttgtcaattgtgctagccgtcgtttgagcacaaagcaccaactcgtcttcaggctcataaaacttttgacattcctctcagtggttacttctttggtccttctctattgtctctgtcgattatctatcatggatttgatcatctgttgtctcgcattcataccaactggctggggtctcctccttattgttcaagttttgagacccaaaatagagtactacgcagtatgggagcctattcaggtcatagctcacgcttacgactatggaatgggatctctgcttttcttcccgatcgctgtgcttgcatggatgcctgttatctcggccattcaaacccgggttcttttcaacagagcattttcccggcaactacagatccagccttttattgcaggcaaaactaaacggagatagcataaccgatggttttacatcgcatattggggatttgtgaatatgatctattggttggtcatcagagcaataagtttctgtactctggtagcataaatgtcgtgtgcagtgtgatccattattctttggcctaagcctgtgccacatctaacatagtaataccttggtttcggtttttattgccgtgtaactttacatatcatttctgtaaaaaagaaacagctctagcattgctcttagatgagttgagactgatgaatctcatgatacctacacagttacaaaggtactaccttattttcatgtgaaatacgacacttattgtactagtgtattatt

SEQ ID NO: 36458 - DNA, 1258 bp, Zea mays subsp. mexicana
  Clone ID: UC-ZMROTEOSINTE103A03_FLI
gccgagagcccgagaccaatcgccgccatctcccggaatgacggggtgacgaaaccgcgccgcaccagacaagacagaggagccgccgccgcgacccacaggccaccgggtcgccgaggaggggatccagcgagccatgtcgaccgacgtgcccatgagccccgagctcgagcaggtggacggcgagatccaggacatcttccgcgcgctccagaatgggttccagaagatggacaagatcaaggactccagcaggcagtccaagcagctggaggatctcacggccaagatgagagagtgcaagcgcttgatcaaagagtttgaccgtatactcaaggatgaggagaaaaagaacacccctgatgtcaacaagcagctcaatgacaagaagcagttcatgatcaaagaactcaactcctatgtgaccttaaggaaaacgtaccagagcagccttggtaataagaggatcgaactattcgatacgggtaatgaccaggtggctgagggaactccagttcaaatggcatcagaaatgtcaaatcaagaactcattagcaccggaaggaaacaaatggaccaaactgatcaagctattgagcgctcaaaaatggttgtagcacaaactgttgaagttggagctcagactgctgcaactctgacacagcaaacggaacaaatgaagaggataggcaatgagctagattctgtccacttttcactgaagaaggctagtcaaatggtgaaagagattggccgtcaggttgctactgacaaatgcattatggcgttcctgtttctgattgtctgtggtgtcattgcaataattgttgttaagattgtcaacccgcataacaagaacatcagagacattccgggcctagcacctcccgccatgaacaggaagctgctgtccatcgacgctgcaggactctgagcgttgtgaatggctgcctcccgcagcacagcgcaacgcagcgcgtcagagttctcttatgagccacgatacatggcttcgcgattcttttgtgcttgtagtttacgtccgcccattctttccctattgcattggtgagtagtagcctcaggtttgtagcgggactcttgttgtttattgcttgcgagcccatagctttctggttgtttgtgtatatgcggtagtgatgtgaatgtgagagtcgagtggagattcttcatggttcgttcttatgagttgtgactggtttgtgagcttgtggtgaaaggttcgcagcttgcttgg

SEQ ID NO: 36459 - DNA, 929 bp, Zea mays subsp. mexicana
  Clone ID: UC-ZMROTEOSINTE103B05_FLI
ggctggcggagtggttcaagagggacgtggtcacgtcaccgttcgaggagctgcacggggcgactctgttccacgagagcatgggcagcctcgacgcagatttccacgacatggcgagcgaggccttggacgcccacgacaacttcggcatcgagatagctatgcgggagttcagggacttgttcgaggggatccagtccatgacctactgctgcggtaacttcggtgatgacaagggcgcgagggccattgtcaaggccttcccacacataaaatgcactgtgctggcccctcccaagatcattgccaccaaaccggccgatggagcgatgataaactatgtcgaaggtgacatgttcagtttcattccacctgctcaaactgtcgtgctaaagcttgtgctgcaccacctgaccgatgaggagtgcgtcaagctcctggctcaatgccggaaggcgattccttcacggaaggatggcgggaaagttataatcggtgatattatgattgaccactctgggcctatgctggaaactcacctcctgatggacatcggcatgatgaccatgacaaaaggacggcagagagatgaaaaagaatggagcgagctcttcaccaaagcagggttcagcgaatacaagatcctgaaggaatttggagctcgtgttgccttcgaagtctatccgtgagattgcacctggactatacatatatatatttacatacatatatgtatgtgtgtgggtgcgttgcgtggcttggcgtgatgatgtcataaataaagagggtgggtgtgcttgcagtattcatggatggccatggatctgagcacatgacgttggatgctttcttaaggctatcgtggatcttctatatttggaagaagctggcaaataatatatcgccatctagtgttggcgttggcttgt

SEQ ID NO: 36460 - DNA, 711 bp, Zea mays subsp. mexicana
  Clone ID: UC-ZMROTEOSINTE103B12_FLI
tggcaaaactgcacaggaagttgttaatgaggtcaggagacaatttatcgagaggcctggtattatggactacaaagagaagcccgattatggacgctgtgtcgcaattgtggcctctgcatccttaagagaaatgataaaacctggggctctagcaattatatcacccatggccgttggcattgtcttccggattttgggccactccactggtcagcctcttcttggagctaaagttgtagcctccatgcttatgtttgcgacggttgctggtattcttatggcactcttcttgaacactgctggcggcgcctgggataatgcaaagaagtacattgagactggtgcccttggtggcaaaggcagtgagtcccataaggctgcggttacaggcgacacggttggagacccattcaaagacactgcaggaccatcgctgcacgttcttatcaagatgctcgccacgatcacactggtcatggctcccatattcttgtgattaaccaaccagatttatcaagcttgccattaaccctgcggagatgtatctatgcgacttgtagatgaggtgtttacctgcatgtgatgtaatgatccaatcggttttagtgtgactacatgttgtacccaaagaaagaaagaaagaaagcagcgatctgtacccaggttttaatggtccaatcagttttagtgtgactatatgttgtaccc

SEQ ID NO: 36461 - DNA, 950 bp, Zea mays subsp. mexicana
  Clone ID: UC-ZMROTEOSINTE103E06_FLI
gtctcggccgagaaaaccctcgaactttggcccccatcattaacagaccgggtataacttcccactctgcaacggctcagtcggagggttgcacacaggacattgatgcctgagagcgagcggagcacagcgaggggatttttttgggtgtggaaccaggggtcgaatccctgatctggtgaaagggacaacgccgccttcaccactgggctatcaacccaactgcaggttgttggtcatgttactgaggcatccctcttcctatttgaagataaataacttcggggaagcattgtttgacattagttatcttttctgcaagcagaccacatcatttgacacaatttatgttgttgcagattttaagaatcttgtttctcttgaagtctgtggtgggttcgttactgatgctggagtgaagaacatcaaggatctgaaggccctgacgttgctgaatctttctcaaaatgctaatctgacagacaaaaccttggagctgatctctggtattgttcttccatgttggaataagtgtacttcttttttacagttaaaatctcatggccatctggtttacaggcctgactgctttgatcaacttgaacgtgtcaaactcacgggtgtccaatgctggtctcaaacacctgaatgacctgcacaacctgcgttcactgtctctagattccacccgggtgacggcaaacgagatgaggaagcttcgagcaacagtgctgcctaatctgatcagcatgcggccagagtagtacccatttggcacctgctgtaaataatcattaggttcgagcaggctgttctgttggtaagtattgccttcgttctcgaatatttgtcgtccgctagttcatttttgaactagaccgcgataaataaaaaagaacggaggaaatatcttgtaagaacctgaattgaaggcaggcatataattatat

SEQ ID NO: 36462 - DNA, 1500 bp, Zea mays subsp. mexicana
  Clone ID: UC-ZMROTEOSINTE103E09_FLI
gccagatgttctgtctcatgtgtcagtccgagcaaggaatagcaaggtactgtttgcgacctgttttgaccacaccactctatctgaacttgaaggatatgatcagaaactgttttccttcaagcctacttctgcagatataacctatagggagatcacagagagtgaacttcagcaatcaagttctccaaatgcagaagttggccatgcagtaccatctatttcattggccaagaagaaatttcttggaaaatatgcaatatcagccgaagaattctctgaggaaatggttggggccaagtctcggaatatagcatacctcaaaggaaaagtaccttcatgggtcggtgtcccaacgtcagttgcgataccatttggcacttttgagaaggttttgtcagatgggcttaataaggaagtagcacagagcatagagaagcttaagatcagacttgcccaagaagattttagtgctctaggtgaaataagaaaagtcgtccttaatcttactgctcctatgcaattggttaatgagctgaaggagaggatgctaggctctggaatgccctggcctggtgatgaaggagacaagcgttgggagcaagcatggatggctattaaaaaggtttgggcatcaaaatggaacgaaagagcatattttagcacacgcaaggtgaaacttgatcatgagtacctttcgatggctgttctcgtgcaagaagttgtgaatgcagattatgcttttgtcattcataccacaaacccatcgtctggagattcttctgagatatatgctgaagtggtgaaagggcttggcgagaccctcgtgggagcctatcctggtcgtgctatgagctttgtttgcaaaaaagatgaccttgactctcccaagttacttggttacccaagcaagccaattggtctcttcataaggcaatcaatcatcttccgttccgactccaacggtgaggacctggaaggttatgctggagcaggattatatgatagtgtaccgatggatgaggaggatgaggttgtacttgattatacaactgaccctcttatagtagaccgtggattccgaagctcaatcctctcaagcatagcacgggctggccatgccatcgaggagctatatggttctcctcaggacgtcgagggagtagtgaaggatggaaaaatctatgtagtccagacaagaccacagatgtagtatgtatgcatctattagacagctcaataagcactgttgtacgcttgtatggttgggacatatgggcgttatggcatgtatagttgtatgcctagatgtacaacacgtgtactcgtatatatatatatataaatgctgaaacaagcattggtcctgtactgtagtttctacatttcattgtcaccaataattaagtgtactcctatggctgggagtctatgaaaatggacgtgttgacttattgggtaataaataatttatatatatacttgtgcaagaattttctc

SEQ ID NO: 36463 - DNA, 561 bp, Zea mays subsp. mexicana
  Clone ID: UC-ZMROTEOSINTE103F04_FLI
tcgttcccctcctctctcagtccaaccacgcttctatctccggtgagactcgtgacaccctcgtcaaccgcatccagttcggtggtgatgaggtcgtcaaggccaaggacggtgccggctctgccactctctccatggccatggccggtgctcgcttcgctgagtccctcctccgcgccgcccagggcgagaagggtgtcgttgagcccaccttcgtcgagtctcccctgtacaaggaccagggcgttgacttcttcgcctccaaggtcgagctcggccccaacggtgttgagaagatcctccccgtcggtgaggtcaacgagtacgagcagaagctgatcgacacctgcctcgtcgacctgaagaagaacatccagaagggtgttgacttcgtcaaggccaacccttaaataatgtctccttctcttatcactttgtaaaactaccccacctctacccatctttcctggttcagtgagtcttggatgacgggaaaagatggcccatgtacttttagatcgatatgcatgccataatcaatgtcggtcttgaagcaccgtt

SEQ ID NO: 36464 - DNA, 574 bp, Zea mays subsp. mexicana
  Clone ID: UC-ZMROTEOSINTE104A06_FLI
cccgcaccaagtccgggcgctgctcctcctgcggccacggcgaggccgtcttcttccaggccactgcgagaggcgaggaggggatgacgctcttcttcgtctgctgcaacccgagctgcggcaaccgttggagagaataatggatggttcctctggcgcaacagccaggacgacatgatttttttgaagattttcatccgacagacctgctgctcccccccatatgagcatgtcaactgattggattggattggattgtactactatgttcccagtgcgttcagacatttcaataacttgtcggcagggtaaacttccctgtggcctgtgcttcattcatttgcatcaaagaaaggatgagatgaggaaaactttttccatgttcgaatgattccctctgcacctaaaggatgagatgaagaaaggatgagatgaggaaaattaccgtcaggtgaggtggagaaactgtcctcacttcacatgacacagggttatgcaagttctctctctatatttctgttttctttttaccaatttctgcagctcatggttatgcaagtacaaattcttgaac

SEQ ID NO: 36465 - DNA, 1029 bp, Zea mays subsp. mexicana
  Clone ID: UC-ZMROTEOSINTE104A11_FLI
cgcaatcagaaggaggttgggctggctttacagaaactatttgaggatggcgtggtcaagcgtgaagatctgtttgtcacctctaagctatggccaggtaaccatgctcctgaagatgtgcaggaggatctttgctcggccctcgaagatttgcggctcgactacgtagatctgtaccttattcatggcccaatccgtatccagaaaggaaccatgtttatcccggaaaaccttatccccaccgatatccctgctacttggggagcgatggagaagctataccacgcaggcaaagctcgcgcgatcggtgtgagcaatttttcctgcaagaagctgcaggatctgctcgctgttgcgcgtgtgcctccagcggtcaaccaggtcgagtgccatccagtttggcagcaagacaagctacgcaagctgtgccagtcaacgggtgttcatctttctgcatattcgcccttaggctcccccggatcacctggatacagtgggccaaacgtccttagcaaccccgttgtcatgtctgttgccgagaggttgcagaaaacgcctgcccaggtcgctctgcgctgggggattcaaatgggccagagtgtgcttcccaagagtgccgacagaacaaggatcggagagaacttcgacatatttgattggtccatccctcacgatctgatggcgaagttctctgcaatcaaacaggttaggctgctaaaagtcgagtttgtagttcacccgaacagtggatacaataccttggaggatctttgggacggtgaagtggaatacgaggacgaaagaacagagaatcaggaccattctgatttcttgagatgcttttcgtgaacagtcgagaatatcgccttcttcgcgtggagaaacccctgaggaataatggcctctatgctgctcctcttatatgtatgtagagttgtgtttcaacaagattatccacatgtgactgctgcttgcttaacaaatactactacagttcgacttcagagtataacaaggtgttatcgtagt

SEQ ID NO: 36466 - DNA, 942 bp, Zea mays subsp. mexicana
  Clone ID: UC-ZMROTEOSINTE104B02_FLI
cggaaacgaagtatctcaggttgcgtggtgcgacaaaccgacaagccaacaatggcgtcgtcagctgctacgaccgcgaagctgatcgcgctcccgccggcgccaacacgcggcggctgctgctgctggaggacacgcaggcccgcgatccccgcggcggcggcgcgcctcaaggtctccgcctccgccgcctcgtcggacgtgccggacttcctctcgtccaattggcttgaaacccgcaagagaaagcccttcggtcccaggttgaattttagtgcagaagaagcagtcgaataccagcttgagtccttaaagtacaatgatctgccccgcccagattatgggatagaggtcatgtaccggtttgcaggctttgaccccttcgagaggtcaacttactttggacgacagtttgatctaggacagttcgagcgcttccggcgtctgtttcaccactcaacctacagagtgctgctgggccacagagagagaagaatattgagcagtttatgggttgaagagaaccagttcaagcaaagagtttgggtacaaggagcccgtcccgaggaagaagagatatttcaattcacaatggttcagagggtcggaggatcatgggatggttactggctgacagagagcttaataaacgatggagacgcgttctcgggtgggattgcttactgatgtagtgatgattggtgtaaatcgatcaggtgcagactagcaggtggcgtgaaaaagctgagagacatgttggtgtgtagaatttgccctggctttctggagatgtttggcagtgtcggacacgctagtattgtacaggaagagacctctcacggcgcccatagcaccagatggccaagcatgcatatctgtggagtacttttctgttgtacgcctgctgcttgcctggtttggtcagaggaagacccgttgtcc

SEQ ID NO: 36467 - DNA, 711 bp, Zea mays subsp. mexicana
  Clone ID: UC-ZMROTEOSINTE104B11_FLI
ggttgatgaggatcatacagtaaacccaaagagcgagtctgccaaattaagatataacgcagaaaaaggatggctgaatcttattgatgatccaaaactgtcagcttttgtattccgtttaggtggaatatatgggcctggaagaagtgctttggacaccttagcgaagagcaaatctttgtcacggaaacagaagttgcgagaatctaagcaatatactgcacgaatccacgtggctgacatctaccaggctgtcttggctagtatgagcatcagatgtgcaaggaaaatatttaatgtggtggatgacgaccctgccccaagagctgaagtttttgcgtttgctacgagtttgatacagaggagatatcctgatatgataactgaaaccattgatgccaagcctgcaggcttagattatcaagagatgatcgtacctgcagagaaacgggtttctaatgctcggatgaagcaggaacttggtgttaatctgcttcatccaacttatagatctggtctgcagagtatccttgatgcttggcaaattcagcctccacttcccaatacaagtcaatgatgatttagttttgaaaggcatataggtgtatgtacatgtatttgtgcttgatttggttcagatatactaccttcgttcctgaatatttgtataaaaaagaacggagtgaataataatttagtgacgttgtagct

SEQ ID NO: 36468 - DNA, 818 bp, Zea mays subsp. mexicana
  Clone ID: UC-ZMROTEOSINTE104C08_FLI
gttctcttggatggcagcccagctccacggcttaagatatgtgattttggctactccaagtcatcagtactacattcaaggccaaagtcagcagtggggacaccagcatatattgcaccagaggtgctttctcggcgggagtatgatgggaagcttgcagatgtatggtcatgtggagttactctttttgtcatgcttgtgggagcctacccgtttgaagatcaggatgatcctaaaaatattagaaagaccattcagcgaattgcagcaattcaatataatatcccagacaacattcgcatatctgatgattgcagacaactcatttcacgtatctttgtcagcaatccattaaggagaatcaccatgagggaaataaaaagccatccatggttcctaaagaacttgccgagggagctcacagaggcggtgcagttatcctacttcaggagggacaacagtgtctctgcattttcagaccaaacaaccgaagaaatcatgaagattgtcaaggaggcaagaaccttgccaaaatcgtcgagatcaggctatggctacagtgaagaatgctcagatgaggaggaaaaggaagtggagagcgaacccaaagaggaggaagaagaagctgagtgtgataagacagttagggaggttcgcgagagcggggagctggatatgacctcactgcacatctaaatgctgcctgtgaggctgtgacgtgtctgtagataattggctttattgtctgctgaatttggtagaacttatgcaattctggcgtcagatatagtggtctatataagccttttccatcctgt

SEQ ID NO: 36469 - DNA, 614 bp, Zea mays subsp. mexicana
  Clone ID: UC-ZMROTEOSINTE104D07_FLI
ggcaccacggacgcttgcaacagggccaagctctcccacaacgcggtcagcatcgccgggctccggcgcgtggccacccggagcgaggcgtcgctggccaacgccgtggcggggcagcccgtggccgtgtccattgaggccggcggcgacaacttccagcactacaagaagggagtgtacaacgggccctgcgggaccaacctcaaccacggcgtcaccgtcgtcggctacggccaggaggcggccggcggcgacaggtactggatcgtcaagaactcgtgggggcaggggtggggcgacggcggatacatcaggatgaagaaagacgtcgccggcaagccggaggggctctgcggcatcgccatccgcccgtcctatccactaatgtgacatggtgcatggtgtgcatctgttttcgttttaattatcattttattttattaattaaacaataaataagtagtcaacatatggatcgactcaaacttttgcagttacgtgtaccagtacacttgttgtaaataataatccatggcatctcgcgtgtaaactttattctggtgcgaaaacgacttctgcaaatgaaggattgtacgtgtacaattttgtcgtct

SEQ ID NO: 36470 - DNA, 1084 bp, Zea mays subsp. mexicana
  Clone ID: UC-ZMROTEOSINTE104E05_FLI
gcgcctcctccgcctcgacgagctccagctgtcggaggccgagaaggcccgggtttaccagttctacatccccgtcttcctctggtgcgaggaccaggtcatagagcatagagccaagtacagcgagggcgacgacatcccgccattggtgatcggggtcagcgctccccaaggaagtggaaagacgactctggtcttcgcacttgattatctttttcaggttgctggtaggaaatccgccacattgtctatagatgacttctatttgacagcaaaagagcagaatgaactgagggacagataccctggaaatgctcttttggagctccgtggaaatgctggaagccacaatctccaattcagtgttgaaacacttgagtcactgatgaaactaacaaaagaaggcatcaagatgaaggttccacggtatgacaagtctgcttttgggggaagaggtgatcgtgctgatccttctgtgtggccggaggttgaagggcccttagaggttgttttctttgaaggatggatgcttggatttaaacctcttccaaatgaagttgtgaaagcagtggatccccagctcgaggtggttaacaacaaccttgaagcatactatgacgcttgggacaggttcatcgactcatggatcgttataaaaataagagaacctagttctgtctaccagtggaggctgcaggcagagatagctatgagagcagatggaaaacctggaatgtctgatgaggaggttatggattttgtatcacgctacctaccagcataccacgcatatttgcccaagttgtacaaagagggaccgaatggttcaaagccagaccatctactggtcatcgacataaacgaagggaggaatcctatatggggttgaaatcctaatgagggctcgtttgttttgctctcaattcgtgtaaattgggtgggattgagttggtttaaatcataaacaagtcaaaatctttcatatttttttctaatctcacccaatccacatgggatagaaataatcgaacaaggcctaggtgtttttcatgtacaatgtacacacagtggagcatgggcaaat

SEQ ID NO: 36471 - DNA, 752 bp, Zea mays subsp. mexicana
  Clone ID: UC-ZMROTEOSINTE104F01_FLI
cgggccgcacgtgcccgatcagccgccccaggggtcgccgtcgccctacagggtgccgtcgcagatgaccccgcctcatcaggccgccacgttgttctacaacccccagttcgggtactggtacccacctgattatccataccaacaggcattgtacaattctcaagtgctacaacattactaccctcagatgtatggtccagcctctccttcaggaccagcctaccaatacatgggctatatgcctggtggcccaagtccaaggactggattctcgccgatgcagcaaccaatgcgacaacccttctttcagcaggcaacgacacagatggatggttctttcccatcagtcccttcgcttccacctaatttcagactccagctgccccctcgtgcagtctcaagggaatctgatgatgcatctggctcccagtcagcccagccaattgcttcaactccagctacagtcacaaacaacgaggaagattcgaggcctgtagtgtctgattcaggtccaaacacaccaaattgacttagtgagaatcctggcaacacgatgtgacttcaatctggtgcagactattggtagtctgtaacagagtcttcatgatactctaacatcttgactgaaaaagttcccaaagatttgttctttcattatttctgattcattttttttttcgaattcttgcattgcatttcttcaccgaatccattgtacggacgactgaatttcaagttcaaacttcagg

SEQ ID NO: 36472 - DNA, 755 bp, Zea mays subsp. mexicana
  Clone ID: UC-ZMROTEOSINTE104G12_FLI
cccattcctcgcgcggcgaccacccgattcgaagcgtgcggagagaccgaagaagcgggagagatggctcgtaccaagcagactgctcgcaagtccacgggagggaaggctcccaggaagcagcttgccaccaaggctgcccgtaagtctgcccctaccactggtggagtgaagaagcctcaccgctaccgccctggaactgttgcactccgtgagatccgcaagtaccagaagagcactgagctgctgatcaggaagttgcccttccagaggctcgtcagggaaattgcacaggacttcaagactgatttgcgtttccagagccatgctgtgcttgccctccaggaggctgctgaggcataccttgttggcctgtttgaggacaccaacctgtgcgccatccatgctaagcgtgtgaccatcatgccaaaggacatccagctggcaaggagaatccgcggcgagagggcctaatcgccacctcaaacatcgtgacaaaaaacatgaagtcctggggttattgttaatctggtgccattgtaaggacatatgagtagggtttgttttgtggatcgcaagtttctcttctgctactgttgctgctacctttgctggtgttattgctagggtcgaatacttaagttaactatgcgctgacagtctggaccagcagtgttatgtgcgctgctggacttcgcgcgcagagctgtggccgatttgttcgttaatgtcaagaattgtgttacagtgcgtgt

SEQ ID NO: 36473 - DNA, 1594 bp, Zea mays subsp. mexicana
  Clone ID: UC-ZMROTEOSINTE104H06_FLI
cagatctacaacgatggtcagtcctctccacagatcctgatgtttgttggcacacttgtcaagaaatacgcggatggactgtgcttgtctggaggctcaccctgtaagtggtacattaatcctgatgttcctgaagcaggtgccctcatggctagtgcgacgaaagcacatagtcccattaagtggaacgaagttctatcttccaatcagcctatgtctgatgttcctgaggaccagaaaatcgcttatatcagagatctgcacccatttgagaataaggatagggaattcttggtgacagtcactgtgaaaaagattggtgataggtggtggtacaatgcatgcaaaaaatgcacccgcacagctgtggctcatggggattcctacaagtgcagcgatcaagtttgcgctaacattggcacgcccagccagaggtacaaactgcttctcgctgcaggggatgagacgggtgacacagacttcatcctctttggtcggatggcgcaacgcatcatcaagaagccgtgcgatatgctcattgccaacaatccgatcggctttattcctgatccaatcacagatctgctcgagaagacgtatatatggaatgtgagtttctctgaccacacaatcaatactggaaatatttgtttccaggtcaacgcagtcgtggcagagataggtactgcaaaggacttcatccaagaatctccatcaaggccaaaacagtcacaacctgtgttgttgcaagacgcacccagtggcgttgaagacactcctaacaaagcctctaacttggtcatgccttcgaccccgctcacaccacaaagttccgcaaccagtgtgcaagataagactttttgtgttggcagcagcactgtggttccaggtgctactcccgctataacaaaggaactgacatccacgcctaggaagaggacaaggtcttcgccatcaaagacagttacaaagaggttgttcaccgacgtagatggaggaatcactggctccaaggatgccgcggatagcgctgctgcccctagccctaccaaagatgcttagtcacagaggggcacatgtcttttgggctcacagttgcagttgttcgctcttttggatgatcgttgtctactgcttttgtatccaagctgctatgtacatatgctttcggaaggatatatgatacacgttcatgtccacacgctcgatacaggttggcccagagcagacttaacaaggttattactaaatcagtgttcgccatcgatgctacgcataggccacgctggatttctatgcttgttgacgtgaacgtgtttcgctcccttcatgtttaagcctaagcagcttgatgtgcttgtgccaaagactttttaagaactacgcaacaaaccaacgcttacaatacgcttttgtatacaatgatcatctgcttgttgcaccgtacatgtatagtctatggagctgcagactgttagagttatgtaatgttgtactgatcactgtttcgtaactgcatgtacactgtcttttatagacagttgtggaacctgcgtccgcgccatatgtattatattatcgtattgtatccttc

SEQ ID NO: 36474 - DNA, 1330 bp, Zea mays subsp. mexicana
  Clone ID: UC-ZMROTEOSINTE104H09_FLI
caagaactgctccgaggggccaaggatgtgatgtcgcttgcgcagggagttgtttactggcaacctcccgagtcagctatggataagatcgaaaagatcatcagggaaccaatagtcagtaaatatggttctgatgatgggcttcctgagcttcgagaagcacttctcgaaaagctaagcagagagaataagcttaccaaatcatcagtcatggtcactgctggtgcaaatcaggcttttgtgaacttggtcctcactctctgtgatgctggtgattctgttgtcatgtttgcaccgtattatttcaatgcctacatgtcattccagatgacaggtgttactgacatattagttggtggctgcgatcccaagacacttcatcctgatgttgattggttggagaaggttctgaaagaaaatgagcctatccctaaacttgtcactgttgtgaatccggggaacccctctggagcttttattccaaggcctatgcttgagaggatttcagatctgtgcaaaaatgctggtgcatggcttgtggttgacaatacctatgagtactttatgtatgatggaatggagcactactgcttagaagatgctcatattgtcaacctcttctcgttctcaaaggcttatggaatgatggggtggcgtgtaggatacattgcatttccaaatgaagctgatggcttccacgatcagctcctcaaggtgcaagacaacataccgatctgcgcctccatcatcgggcagcgcctggcgctctactcgctggaggccggccccgagtggatcaaagaacgggtgaaagacctggtgaaaaaccgggcgctgctggtggaggcgctgtccccgctcggcgaggacaacgtcaagggcggggagggcgccatctacctctgggcaaagctaccggacagctgctcggacgacttcgaggctgtcaggtggctcgcgaacaagcacggcgtcgccgtgatccccgggagcgccagcggaggacccgggtacatccgcgtctccttcggagggctcaaggaagaggacaccaggctggccgctgagaggctcaggcgcggcctgcaggagctggtgaccgatggaatggtacagtgacggctccatgcgtgtaagtaaaagctccaattttccaacggtgtaattccgccgtgattaattcgggagaagaaaaggaacttgttttcaagaatgcactgcgttgctcggacgagagacgggacggaataaaatgcgtctggtctgctgagtcacctatgttatgaatcatatggtagtgcatatatatcatgagtgagtaattgtttct

SEQ ID NO: 36475 - DNA, 590 bp, Zea mays subsp. mexicana
  Clone ID: UC-ZMROTEOSINTE105D05_FLI
accgcgacgacccccgctacgtcatcaccacctacgacggcgtccacaaccacgcaagccccgcagccgctgccatcagccagtacggcggcggtggattctatagcccgccgcacagcggctcgccgtcggccgcctcctactcgggctccttcgtcctctgacttctccgggccttgacccagagtgatctacctgctttatcccagtcgtaggatgagaagagtgttcagacttcagagacatcagttcagcagccggctaaattcggacctgattgtagaatttttacacttgtgcagtacaagttatactatttaagctagaagcgaagcgtactctacttacacctcaattattggttacctcttgtgacgactgacgaggcatcataatcgtcactaggataattgatcacgcatgtttttcgcttaattagtttctgtgtatacatatgaagtttgccgtatagctgataggctgctgatttaacttgacttctctttgttcggtattagaccccaagatcaacatttacgccgaacagatgcattgtaacagtgaaggaatattttatggttttttcagat

SEQ ID NO: 36476 - DNA, 1122 bp, Zea mays subsp. mexicana
  Clone ID: UC-ZMROTEOSINTE105E03_FLI
aagagtaatattttcctcttttttagagtattagatgcagcgctaaaaggaacagagtccatagtgagcattttgtagtcctatgaaacccaaaacagcaaagcttgttgagacaatgcaaacatgaatgagcaggggtaggcacatttgacattgctaggtagacctgctggcgttcttctgtgagttctattgtagataaattatgttgtgcatcttaatggcacttccatagtattttctatgttcactttcatatgtaaggtttcttctaactatagtatttccttctatgtagtatactgcaacattccagaggcttgagtctaggccaaacaacccagctcaaggggttgctccactgggatccactaatccaagtgtcaacataaatgacaattcactcaatcttgtttctagaccacctccatatgataccgatcctagatatgcccgtgttcaaagagagggattagtctccaggcgtgagaaatccataaatcttgcacaagaagagtcactggcccttagacgaaatgccagcagctctggtattgaacatttagctgctcagaagaaacgcaacagcactgaaaatgagggtgaatataaggtccatcgttctgaatcaactaagagtttgtctgcaaaagcttatagtagcagctatgctgttgtcgcttcagaagatgaggatgtctgccctacttgcctggaagaatacacgccagacaatccaaaaataataaccaagtgctgtcaccattttcatcttggttgtatttatgaatggatggagagaagtgatacatgcccaatttgtggtaaggaaatggagttttgcgagagcccatgatagcctttcggtttacatgatctcacatgaagtctgagctgcaggaaacggggttctgtgagaaccaatgatagcctttctatttacatgatctcagatgggagcaagggaaacattctacagagtacaacagaatgctggagaattgtaaataatagttccttatgcatgcgatgtccaaatagatctctttctcgagatcagtttcttacatgtactgagatggttatctgtcttactaaattcatgctagaatttgcttggcc

SEQ ID NO: 36477 - DNA, 774 bp, Zea mays subsp. mexicana
  Clone ID: UC-ZMROTEOSINTE105F04_FLI
acggggaggagcaagaacacccagcccacgccgtgctggaagtggtccgtgctcctgcagcggcggcgggaggaagagggaagcgaggggatggcgcagccgagcaaggagccgtgcaagaaggaggcgtgcgacatccaggcctgcctctccaagaacatgttcgactccaggaagtgtgtgagagttattcagttacttcagtcatgttgtgagcagtgtgagtacaaatcaacacactgtggttccttgtccggattactcaagaacatttctaagtgaggaacaataccgacatagtttactgcagccattgaataaaagtttcttttaggttagtttagtactttatggggctcgtggcaatctctcttacggatcaaggatgattcgcggggcttcaataatgcagacacccctcaacctgcagaatgatgctctggtcgctgagttgtatggtaccgagtggaaacagcaaagtggtttgttaatgatcgattttaatgcctgtatacctgtggtatccttcgtagttcgtgtgctcttgtacaaatgtaaccccatgttcccgtcttgaaccgctaaataagtgaaccccatgcatatggagatattttggtgagcccaaagttgtgtataccatttcattgctttaccctaccatgttctgtggcaagagaatcaaatctggataaacatctgggatgataatttatctcttgggcaaaaacctgtgatgtaagatatgattcaaataaacaactttgtggggcc

SEQ ID NO: 36478 - DNA, 719 bp, Zea mays subsp. mexicana
  Clone ID: UC-ZMROTEOSINTE105G10_FLI
ggggaattcaactagcagaagctgaccagaagattgcagtatttcaggttacttcgacaaaaaaataaagaagttaatgggtacagacacaagacagtcttatattaggactcgatcagcttcatgtttgggaaagatcatgcaaccggtgaagcggcaaagaccccagctgatgacgcgagagatataaggaagaggaaaccggtaatgaggttacttcattaacaacttcagaaagcttaaagaggcagcgatctagtgattccttcacctcaatgatggcggagaattagacaagttcactgaagctattatggatgaagcaccaaaaaggctggcatcaaaagaaatttttagcatattggaagagatagatgagttagatgaaaccacattttaagacttatttgatatcttaataggtgatgggcgcaaatatgagtctttattggcaattctagtgatcctgaggaagagatgtctactgaagcaacttaaaaagtgaaccgagttgtggttggatgaattgaactattgttgggtgtcttaatgttgctatcttagtatatgttaggtgaattgaacatcacgttgagtagcaagtaatgtgttcgagtgatatgtagacatttgagacaaatctacattattattgatattctcgtgatgcatgcttcttgataaattgtaggggtaaaactagtctataatctttgcac

SEQ ID NO: 36479 - DNA, 1185 bp, Zea mays subsp. mexicana
  Clone ID: UC-ZMROTEOSINTE106A11_FLI
gatgggttctcgttcagcacagtcctttctgggctggcggtgaccgcgagcttggcgagcggtctgcaagttcacgcccagctcgtgaagagtggcttttgtgacgatgtgtgcgtggggaactccttggtggagatgtatatgaagagcaaatgcctagcagatggcgtcatggcattcgccgagatccgctgcaaagatgttgtgtcgtggacagggctcgccgctggatgcttacactgcggcgagcctgccaaggccattggcattctcggtcagatgatgctggacggagtcatgcctaacaactacacatttgcaacgtcagctaatgcctgcgcgagcctcaccgatctggatgaaggaaggaaagttcacgggtatgtgatcaagctgggagacgactcagacgttggtgtcaacaacgcgctcatcgacatgtatgctaaatgcgggtcagtggcctgtgctcacaaggtgttccagtcgatgcaacagcggccagtcatctcctggacggcgatgatcatggctttcgcgcacaacgggcgagctcgggaagctgtggaggtgttcgacaacatgctgctgagaggtgtagctcccaaccgcgtcactttggtctgcgttctctatgcctgcagccaaggtgggttcgtggacgagggttggatctacttcaacgccatgaaggacaagtttggtattcagcctggggaggaccactacgcctgcatggtcgatctccttgggaaagcaggccaaatcgaggaggctgaagagctgatatcagggatgccattccggcctggcgtgctggtctggcaggcgttgcttggcgcctgtcatcttcacggaaacgaggctgtaggcaggagggctgcagagcatgcgcttgcgctcgagaacgatgacccgtcgacatacatgctgctgtgcaacacgcttgccggccagcacgattgggacggcgcacgaagtgtcagagtgctcatgggatcacaaaccctgaagctgcccgggtcttcatggtttcagtccatgtctgacagaagccaggcatgtatcagatgaactctgttctgatggaatggaagctagttctgtattttggctgaatgcatcaagctatggaaagaagccagttctgtatttcagttcataattccatatgatgcgcttgat

SEQ ID NO: 36480 - DNA, 940 bp, Zea mays subsp. mexicana
  Clone ID: UC-ZMROTEOSINTE106E02_FLI
cttgaaacccatcggagtatggtctggattggatattggacacgtatcaggtactggaagtctagttcaaaacaagctagttggtgctccaggcgggggatcaagtccacatgtagtacaaaatgccgatatccctgttaagcaaaccactagctcttcctcacgtgagcagtcagacgatgatgacatggaaggagatgctgagactactggaaatggaaaccctgttcaacacagattacagagaaggaagcaatccaaccgagaatcagccaggcgttcgagaagcagaaaggcagctcacttgaatgaactggaggcacaggtatcacagttaagagttgagaactcttcgcttctaaggcgacttgctgacgttaatcagaagttcaatgaggctgctgttgacaatagggtgctaaaggcggatgttgaaaccttaagagcaaaggtgaagatggcagaggactcagtgaagcgggtaactggcatgaacacattgttccctgccgtgtctgatatgtcgtccctcagcatgccattcaatggctccccatccgactccgcctctgatgccgccgtacccatccaagatgacctgaacagttacttcgccaatccaagcgagatcggaggcagcaacggttacatgccagatatagcttcctcggctcaagaggacgacgatttcgtcaacggggctcaggtcgccggcaagatgggcagcactgactcgctgcagcgggtggcgagcctggagcacctccagaagaggatgtgcggaggcccggcttcatcggggtcgacctcctaggttcctactccatcggatatgataaaggccctgatgcccacggcaagaatatgataaattaacagtttcacatactttgtagtggacattgctaatgctgcgatgcgcattcgttcgttgtggact

SEQ ID NO: 36481 - DNA, 2582 bp, Zea mays subsp. mexicana
  Clone ID: UC-ZMROTEOSINTE106E08_FLI
gacagaacactttggagactactcaagatcgatagatcagagccgtcagagcttgtgatagacgagtgttctactgtatatactgaaagtgaacatcctgacttgttgaagggtcttgatgacgagcacaggtcaactggcggagtaaaatttgttacaaagttttatggcataattggttttatcaaattccttgggccatattacatgttgattattactgagcagaaaaaaatcggggaaatctttggtcatccagtgtatcaggtgaccaggacttcaatggttgaattagcaaattctaagacaagatctacttttcaaaacttcaaggacgagaacagatacaggaagatcttgaatgcacttgatcttaggaaggatttctttttcagttactcataccacattatgagaagtcttcagaagaacttggctgatccacaggatggatggaccttatacgagactatctttgtgtggaatgagtatctgacacggcggatccgtaattgtctcagaaatactttgtggactgttgcattggtccatggtttctttaagcaggataaattctcaatatctggcaaggatattatgttcacactcatcgctagacggtcgaggcattatgctggaaccagatatttaaagaggggggtgaatgagaagggaagagtagcaaatgatgttgagactgagcaaattgtctatgaagctgtgcctggacctactgaagtaagttctgttgtgcagaataggggctcaattccactattctggtcacaggagacatcaaaattgaatcttaaacctgatataatattgcatgagatgcagaataattatgaagctacagagcttcattttgaaaatcttagagcaagatatggaaaccctatcattatcttaaacttgattaagacacgtgagaggcgagagtctatactccgccgagaatttgataaggcgatcaagataataaacaagagcctgtcagaagagaatcatctgaggttcttacattgggatcttcatcaaaactctcaaggaaaacctacaaatgtactcgacgtccttctaaaagtggcatttcgggctctgaatttaactgagttcttctattgtcaagtcgcaccaaattctgagacttctgcacaatgccccaccctattgaatggtcttgatcaatatttatgtgatgacaacaatagtgacgacacggaatgcactgagattgttggtgatgtatcccaagaggatatctcaggcagctctgattcctctggtaatgcaaccacagaagataaatttgagaatagtggactgccaccaccaaaaccaccaaaattccaaaaaggtgttttgaggacaaactgtatagattgcttggatcgtacaaatgttgctcagtatgcacatggtttagctgctcttggacatcaattgcatgcgcttggttttatagaatctccagaactaggtttagaagctcccttggcccatcatttgatgcacttttatgagatgatgggtgacacacttgctgtacagtatagcggttctgctgctcataacaaggtattctctgcaaagagaggtcacttgaagctttttattcagtcacaagagttctttaggacacttcagcggcactacagcaacacctgtatagatgctaacaaacaggctgctataaacttgtttttgggatacttccagccacagcaggaaaaacctgcactgtgggagttagaatcatctgctgggaagcataacaataatctttttgatggccacccaagtacattgaaaagagtaaaatcagatggcaccattcttcatgaaagtaatgcttctatatctggctctggtcgttgccataatgaacagttaagtgcatcgcagcctgatgtccagaatgggtttcaattcccaacttcagaatccgattcacttcatgaaaatgaaatttcatcagcttgtggaagtggaatagcacacctaaggtatactcccacagcctctgacgtgcttcatgtcccaagagctaaagttgaatattgccatgattctggtgattcaaactttttggatcttgaatggctttccacttcaggcaactcaagtgatgaaaggtctattgcaactagcacgccagatgcaaacctatcaaatgagaatgtcattagtggcataactcctgatatcatggaaaaccatcttgctgaaatgcagtatcagaagttacctcggaattttgtgcagtgggttaatcacggtgataccttttggtactaagatcgcaattactggaattcaatatgtcgccagcttcccagggtgggcattaacacggatctgagtagtagattatagagtgatatggatgctgcggcaaggcatttctcccgtgatatactccgcaccatccccaaagtcctttattggtccacgtgtttttacaatgggtgagtagatagatatctttctgttgaaagaaaatagagatgataattaggcttattattgttgacctgaaattgtcattattcatgggaacatgtcatattttcttgtgt

SEQ ID NO: 36482 - DNA, 698 bp, Zea mays subsp. mexicana
  Clone ID: UC-ZMROTEOSINTE106F02_FLI
gaaatagaacggatggtgatggaagcctcgcgttcagaatatctggccaaggagaaaaaacttaacataagggaatcatcgacatcaggggcagaaccatcttcatccgctgcaattagtggttcctctcgatcagttgctggagcggacagaagcagcgaggactactttgtgcttccagacactgtactgactcgcagcatgcagctgcttctcgcaatgggcttcggctacaaccaggtcatggaggcctacagcatattcggcgaggatgtggactcgatggtctgctacctggtggagaccggaggagcctcggcaggtggtagcaatcgccggaaaggaaaggctgctgagtgatgtgtgcaccttcattgctgtgaatgtaattgatggaaaacgttgggcacaactcataccagataatgacagccttatgagttgagatgtcgatatacctgctaccttatgggtgatgaataaatggaactcacaactcttctcgatgccttctggtgatcaagttaaataattaatgatagttggtggttgggattctgggaaaatttgtgggtcaccctggtgctcattgtgatttttgtgggaaccgcgaagctcgtggtgtggtgtatgtggagtgtgaacattatctatatttttttcatctttaacaatgtctcctaaattcggttctctat

SEQ ID NO: 36483 - DNA, 1016 bp, Zea mays subsp. mexicana
  Clone ID: UC-ZMROTEOSINTE107A05_FLI
ggctccgtcgtcgcgtgccatcctagggtttctttccccgtcggcgcctccccagatttggacgccgccgccgccgccgccgccgccgctgacccaggttgtcttgatggcgcccgctgtagaagccgtgaaggagacaggctcgttccagaaggttcctgccttgaacgaaaggatactgtcatccatgtccaggaggtctgttgctgcacacccttggcatgatctggagataggtcctggtgctccaaccatattcaactgcgtcattgagataccaaggggcagcaaggttaaatatgaacttgacaagaaaactggactgatcaaggtggaccgtgtgttgtattcatcagttgtttaccctcacaactatggattcattcctcgcacgctttgtgaagacagtgatcctttggatgtactggttataatgcaggagcctgttatcccaggctgtttcctacgtgcgaaggccatcggccttatgccgatgattgatcagggagaggcagatgacaagatcattgcagtgtgcgctgatgatcccgagtacaggcattacaatgatatcaaggagctcccacctcaccgcttggctgaaatcaggcgcttcttcgaggactacaagaagaatgagaacaaggaggttgctgtgaacgactttctaccagcgagcgccgcttatgaagccatacagcactctatggatctgtatgctacatacatcgttgagggcctgaggaggtaggattctgatggctaggaaaggtggggaggatattgacgaaaaactgggagaccatttaccgcatggaacgagtaccgttattattttatttgtgtcgtgtatactgctagtagtgaaccctcaatcaaagaccgaaatcccctggggagtcggagtcgggagtagctgaaactagtaacaaggttggcgaaatattatttcctggcctgactgcctatatatgttgtacgtgattggtatcgtaatattcattcgcttttgtgat

SEQ ID NO: 36484 - DNA, 974 bp, Zea mays subsp. mexicana
  Clone ID: UC-ZMROTEOSINTE107B08_FLI
gattttttgaccaaccctccaaccggtgcggcttcgatctttcctctcctatcacctgaatccctcgagtattcatcgagagattctgatatttgccatcagtaagaaacagtattcatcgccggcgcagtgcggtctcttcccttcgctggagaagggggaaggggacacgaacggagcagaaggccatggacacgatgcggggcgcgctggagcgggccaagatgctggtgggcatggaggtcgacgaggagtccgcgttgccaccgcccgaggagcagtccttcttcgacgacatcaatcggcactgcaccctcaacaccactcagaggctctatggtttcgcgatatgcttggctgccggactgacgtgcacattcttgtcaatgcttgtcttcttcaatccagtgaaatttggggtagcattcacccttggcaatttgatggcccttggaagtacagcatttctcataggccccaaaagacagtttgatatgatgcttgattctgtgcgaatatatgccactgctatatatattgcaagcatcataattgctctattctgtgctatctacgttcgcagcaagctgctgactctagtggccatcattttggaatttggtgcccttatttggtacagccttagctacatacctttcgcaaggtcgattgtgtcgaaggtgatgacatcgtgcttcgacactgatttctagaccaatcttcattgcctatgtctttcactgtggggcgagtagatattgtaatctagtgacaagtgaagaggaagtggcagtgaccttaaattacccctccaacaggctcttgttgtaatcatcgtgaatcgagctgtgcattttatgctaagataagactagaagatcgtgttgatattgcatgttctcttgatgcatgtacacttgcaatccacgcttcgctttccatctgcgaggagtgcccagcaatattgttctgcc

SEQ ID NO: 36485 - DNA, 913 bp, Zea mays subsp. mexicana
  Clone ID: UC-ZMROTEOSINTE107D12_FLI
aagaactcgtcgtcatgggcgaccttaaccgccgtgccctacgacgacggctacgagtggaggaaatacggcgagaagaagatcaacgggacgctcttcaccaggagttacttcaggtgcacctacaaggacgacgccggctgcctcgccaccaagcacgtccagcagatggacagcgacgacaacagcagcccgcccatgttccacgtcacttaccacaacgaccacacctgcagcagcgccaaagctgcagccaaagccaacacaggaggcagcagcagcaacaacaacagccacctcgctgcattgctggcagactgctgcgacggcagcggctgcaacaagggactgacgaccaccaccaccaatgggcatgctgctgctgatgctgctgccatgaacatgaacatgaagcaagaaccgtcgctgctgctgccgccgcctcttctggccgagcctccttccgcctgctttccttatgaccaaatgccacagcagtgccatcagctgctatttcctgtaagcatggagcagcagttccccggcaatggcgaagaaatcccgtcggctgctggttcgtgcatctccggcgagaccagctgggatgggtattattattctggggacatggcggcagctgaagacgaccgtttccacaatctcgagcgtttcctcctgggcgatagcttcatggactaccagtactagctagctcgatcgacatgaaacagaattattgttaacagggggtttatgaaagtagaagaatggttttggtcttcctttttttttgattcttagggcagtagtgccaataataaagtgttctgtagggaaaaaaattaggcgtgcatgagatgtaaaaacaagcgatcgttttattgttatataaaaatgtccggcactttactct

SEQ ID NO: 36486 - DNA, 597 bp, Zea mays subsp. mexicana
  Clone ID: UC-ZMROTEOSINTE107G09_FLI
tggcgaaagccttcgtggagcactactaccggacgttcgacaccaaccgcgcggcgctggtggggctgtatcaggagacctccatgctcaccttcgagggccagaagttccagggcccatccgccattgccggcaagctcggatctcttcccttccaggcctgcgagcaccagattgtcaccgtcgactgccagccgtcggggccccagggaggcatgctcgtcttcgtctccggttccatccgcaccggccccgaggagcaccctatcaagttctcccaggcattccatttgctgccggcagctgggtccttcttcgtgcagaatgacatgttccgcctgaactatggctaaaagacagccgaaaactcttgtgatgaacgaatttgttaagggcttcatgttgagacgatgaataccgaatgtcgccgctactctcgtctcctttgtatctcctctgttggctgattaactgttattacaagaaattgctggacttgtttttttttccagttgttttgaatcatgtattatggttgcatgggcaccatttcttcgtggaatgtgaattgaaacagtccaaatcaattggtgtggc

SEQ ID NO: 36487 - DNA, 698 bp, Zea mays subsp. mexicana
  Clone ID: UC-ZMROTEOSINTE107G12_FLI
ctcagcgttgtttgataggcaacaggagtatgtcaagcgacaaacgcgttttgtctcaagaaaaccagctaagactatagtagctacaattgaagttgttgccgagtcaatgagtctcaaggtccactcccagaattacaagctgcggcttgaaggtgcatcatggaacagaacgagccaatttgctgttgttctagaggtttttcaagttgccccttctctgttcatggttgatgttcgaaaggtcgccggtgacaccctggaataccacaggttttacaagaacctatgcagcagacttgacagcataatctggaggccaatcgaagtttctgcgaaatctaagctgctgaggacgaccacttgctagcccagcactgagctactgtaaatggcaaccaacaagagacgtggttcctagccgttagaagaggggggaacttctgttaaatccagcgtatagctcgtggagctgggattcacgaggatttctgcatctcgctttctcaggtgatgcatgtaccatagctgtcttcgttagatcagacgaggcagctcaaagcaccaggtgtttgtatatatatattttttgtaacgctattgtagatagcctgtgtagctccagccgtgcagctgtatgtagcagaaacctgaatgtccgaaaacgcccctgaatgtcaggtagaatcgttgcttgc

SEQ ID NO: 36488 - DNA, 367 bp, Zea mays subsp. mexicana
  Clone ID: UC-ZMROTEOSINTE108A02_FLI
cgctcgggccctggcgcagcgtcatcgaggagctcaacggtgtggcgctgctcaccgaggacgaccaccccaacctgtgccggtggaccagggactactgcgccttcgaggctctcaagccgtgcatgccggatcgggagaagctcctcgcctacttcactaagaacttcgataggtacaaggcggccgtcaatgcgacgctatcgcaatcgcagcagtaataagtaataactggccaactgggtacacctctgcccggccgtatggcgggcgtttctttttttttttcttcagaataacgtaactatgcccagtactcatgttttcaattctgcaaagtgcaaatcaacaagtcgctgtgtggttt

SEQ ID NO: 36489 - DNA, 1201 bp, Zea mays subsp. mexicana
  Clone ID: UC-ZMROTEOSINTE108E03_FLI
cgagaaccaaggttttataccaaggtatttaaagagggccattcatttgatcaagatggaggttcgtttgaactttctctagtgacctgtaaatgtattggggcttatgtcaaaaacaagaagaatcaaaaccagatatgctggttatgggaaaaggtaaaatcaacagaagacagagattttcaaagattcctggacaacgtgcaatacaaaacaagtgggatattacgttatgagcgtgtctttggtgaaggttttgtgagcactggtggaatcgagactacaaaggaatttgtgggcatgctcgatcttaaaccgggccagaaagtacttgatgtcggatgtggaattggaggcggcgacttttacatggctgcaaactatgatgtccatgttcttggtattgatctttcggtgaacatggtttcatttgcaattgaacgtgccattggacgcaagtgctctgttgaattcgaagttgctgattgcaccacaaaggattacccagaaaatagttttgacgtcatctacagccgtgacaccatccttcacatacaagacaagcctgctctgttcagaagcttcttcaaatggctaaagcccggcggcaaagtcctaatcagcgactactgtaagaatcctggaaaaccatcagaagaatttgctgcgtacattaagcagagaggctatgaccttcacgacgtgaaggcttatggacagatgctgaaggatgctggttttcataatgtcatcgcggaagatcgcactgagcagttcttgaatgttctacagagggagataggtgaagttgaaaagaacaaagacgctttcctggcagacttcacccaggaggactatgacgacattgtgaatggctggaacgcgaagctgaaacggagctctgccggcgagcagaggtgggggttgttcattgccaccaagtgatttggcctggcagcaggagggctcttcggaataagaatggatgtggctgtaactctgcttctagaccggtgatggttcagcttagaagcaggggatcttcatcatcagaataaaaacgtgtgctgttgtgttgctgtgtctacgccactagtatttctgttgttacttatgttctaggtaaactgcgcagccagagcagagctgaagaatatgtactgcttgctcgctcttgtgtggttgtgtctaccctactagc

SEQ ID NO: 36490 - DNA, 663 bp, Zea mays subsp. mexicana
  Clone ID: UC-ZMROTEOSINTE108E10_FLI
caaggatgagccgagaggggaaggtcagcgtcaccagcaaccccggggagacgcccaccatgagcgtgccccggagcaagcgccaggacctcgacctcaccgtcgacgacttcgaggaggaagagatcgaccccgagctgcgctactccttccagcggaacagcaggtttctgaagagagtttttagcgtggacacacttgtcaagcctcttcctcctgtaatggcatacagtgtatcccgcaatataaacttcttcttccggatcttcacacagttctgggatgaagaaggaattgccaatgcccagaagtcccttggactggggaacgaggacggctcccgccgaatgcgctgatcgtggtcaaaccaagttttctgtaccgggttcagaactcttttgccctagacactggagacgtgttatacgcctcgaaagacatggcatgggacgtttcttaaggttggcttgcaattttgtttatcctagtgtgtcggtttcatgtatgtttgaagtccagatcttgtgcttgcaaaatagaggagtcgaggaggcacatcaaactccaggccaatggaacgaaatgcctacctgttcatttccacttcaacagttccattgtatactagtcaaagacgagcttgggcatatcttttcctgcttc

SEQ ID NO: 36491 - DNA, 623 bp, Zea mays subsp. mexicana
  Clone ID: UC-ZMROTEOSINTE108F02_FLI
atgcctcagccgtcttcgttcagagttcctgaagaagcggaagaaagggaagctaccgaaggatgctcggacggtgttactagagtggtggaacacgcactaccgctggccttatcctacggaggaagacaaggtgaggctcgcagcaatgaccggtctcgacccgaagcagatcaacaactggttcatcaaccagaggaagaggcattggaagccatcggaggacatgcggttcgcgctcatggagggtgttgccggtgggtcttctgggacgaccctctacttcgatacaggcacaattggaccctgaatcatacaccacttgggatgacaactggccagctcatattagtaataagatctggcatgtggagtgacgatctgctcggtgaaaattgaaaataaatctgctgagctgaggttgatcagactagtcagttgccctattattttacaagatcatgtgtatatggtgccgtcgtatcagaacaaactgtatgcatgtatgggcgaattgagacctgcaaaaggagtttaattagtagtttcaagtattggctcatggatttgtaatactcgctacccaatttaattgttagataggctgaagggcttataaaggt

SEQ ID NO: 36492 - DNA, 1209 bp, Zea mays subsp. mexicana
  Clone ID: UC-ZMROTEOSINTE108H08_FLI
gccaagatgggatggatggggaagattcatggagccgattacatcgaagattccgctgatggtgatagaggggaaccatgagattgaaccgcagggtcacggtggagaggtgaccttcgcgtcttacttggcacggttcgctgttccatccaaggagtctggatccaacaccaaattctactactccttcaacgccggtggcatccattttatcatgctcggtgcctacatcgactacaaccgcacaggagttcagtactcgtggttggaaaaggatttgcagagggttgatcgacgagtcaccccttgggtcgtggctgcttggcacccaccttggtataacagctattcctcgcactaccaagaattcgagtgcatgaggcaagaaatggaagaacttttatatgaatatcaggttgacattgttttctcaggacatgtacatgcatacgaaaggatgaaccgagtatttaactacacattggacccctgtggcccgatttacatcggcattggagacggcgggaacattgaaaaaattgacatggatcatgctgatgaccctggaaagtgtccctcaccaagtgataaccaccctgaatttggtgggctctgccatctgaacttcacttctggccctgccaagggcaaattctgttgggaccgacagccagaatggagtgcatacagagagagcagttttggtcatgggattctagaggtcctgaattcaacatatgccttatggacatggcaccgtaaccaggacgcatatgcagagaacagtgtgggagaccagatctacattgtacgacagcctgacaagtgccttctgcagccagctagtgcgtcgtctctcaattgatagccccattggaggatgcccttctctagtgagtagtaacagctccggtgggtccattacaaatggccagctctcctacaaaatgtttgtaattatgtgtgtagctttaatgtgaaagagttaggtggtctgagcagtactcatctcctttttaatataatactttagggttgttttactctcggcgggtcgaattttttttgtgtagctttaatctgcacagttgaaggaacatttcataccaccattacttttcttgattttataattgtagagcggcagaatgcaagatgcaccttactgaatattatactgcaaggtttgttgagtctttttttgtgttt

SEQ ID NO: 36493 - DNA, 982 bp, Zea mays subsp. mexicana
  Clone ID: UC-ZMROTEOSINTE109A05_FLI
ctcgtcttctctttcaacttcgttcgcaagaagctcagaagtcagatcagaagccgccgaggggaggcgccgacgccgagtttttgctccatcccgcatccaccgccagaatgtttctcacgaggacggagtacgaccgcggggttaacaccttctcgccggaggggcggctgttccaggtcgagtacgccatcgaggccatcaagttgggatccactgcgatcgggttgaaaacaaaggatggtgttgtccttgctgttgagaaacgtgtgacctcgccactgctggaaccaagcagtgtggaaaaaatcatggaaattgatgagcacataggctgtgccatgagtgggcttattgctgatgctagaacactagtcgagcatgctcgtgttgaaactcagaatcataggttctcatacggggagccaatgaccgtagaatcttcaacacaagctatttgtgacttagctctgcgctttggcgaaggtgacgaagagtcaatgtcacggccatttggagtctctctcctaattgctggacatgatgagaatggacctagcctgtactacaccgacccatctggtactttttggcaatgcaacgcgaaggcaattggatctggctctgaaggagctgatagctccttgcaggagcagtacaacaaggagctggcccttgaggaggcggagaccatagccctttctatcctgaagcaggttatggaggagaaggtgaccccaaacaacgtcgatattgccaaggttgctcccaagtaccacctctacacccctgccgaggtcgaagccgtgatcgcgaggctgtgaaacgctttcggagctcgtgttattcatgtcatcaatcggtaatagacgatccttgtacgaagcgtggacatcttttgttcttgattatggctgtcatcgtactctgttgttaactccccaaggacagtcggtggtactttgattcacacctcagcccg

SEQ ID NO: 36494 - DNA, 912 bp, Zea mays subsp. mexicana
  Clone ID: UC-ZMROTEOSINTE109A12_FLI
gaggctctggacttgatcaatgagccaaagaggccttcagacaagcccctgcgtctcccccttcaggatgtgtacaagattggtggtattggaactgtccctgttggacgtgttgagactggtgtaattaagcctggtatggttgttacttttgggcctactggtcttactactgaggttaagtccgttgagatgcaccatgaggctctccaggaggcccttcccggtgacaatgttggcttcaacgtgaagaatgttgctgtgaaggatctgaagcgtgggtatgtggcctccaactccaaggatgaccctgccaaggaggctgctagcttcacctcccaggtcatcatcatgaaccaccctggccagattggcaatggctatgccccagttctggactgccacacctcacacattgctgtcaagtttgctgagctcgttaccaagattgataggcgatccggcaaggagctggagaaggagcccaaatttctcaagaacggtgatgctggtatggtgaagatggttcccactaagcccatggtggtggagaccttttctcagtatcctcctcttggtcgatttgctgtccgtgacatgaggcaaacggtggctgtcggagtcatcaagagtgtggagaagaaggacccaactggagccaaggtgacgaaggctgctgccaagaagaaatgatctatatggctggtgctgtgcttgcttgttggttacctcgtggaagcttaaaatatctcgtcttgttgacatccttgcagttgtcgcgtgaacaagtaatctatgatggcaatgtttgcctggtcatgaagtattattactttcgttgaaaccgtgatgctattaagacttaattttttttatggaacatcgaatgtaaggcatacatggttatgagtt

SEQ ID NO: 36495 - DNA, 686 bp, Zea mays subsp. mexicana
  Clone ID: UC-ZMROTEOSINTE109B01_FLI
ctctctctctttccccgagctcctcgaaaccctaggtgcgtgccgaccggcggcggcggcgaggtgatggcgatggacccggacgcggtggcgaaagccttcgtggagcactactaccggacgttcgacaccaaccgcgcggcgctggtggggctgtatcaggagacctccatgctcaccttcgagggccagaagttccagggcccatccgccattgccggcaagctcggatctcttcccttccaggcctgcgagcaccagatcgtcaccgtcgactgccagccgtcggggccccagggaggcatgctcgtcttcgtctccggttccatccgcaccggccccgaggagcaccccatcaagttctcccaggcattccatttgctgccggcggctgggtccttcttcgtgcagaatgacatgttccgcctgaactatggctaaaagacagccgaaaactcttgtgatgaacgaattggttaagggcttcatgttgagacgatgaataccgaatgtcgccgctactcttgtctcctttgtatctcctctgttggctgattaactgttattacaagaaattgctggacttgttttttttccagttgttttgaatcatgtattatggttgcatgggcaccatttcttcgtgggatgtgaattgaaacagtccaaatcaattggtgtggcag

SEQ ID NO: 36496 - DNA, 932 bp, Zea mays subsp. mexicana
  Clone ID: UC-ZMROTEOSINTE109C02_FLI
ttccttagcccaacagatgagattggtgaaaaccagttgtttagtggccagaagacagtgcagcttgttctacttctgcttgctctggtgtctgtgccttggatgttgattccaaaacctcttctattgaagaagcaacatcagcaaaggcatcaaggtcaccagtacgcaatgcttcagggcgttgatgaatcagtgggagcagagctgggggaacatcatgaggaagcacatgtccatgaggagtttgagttcagcgaagtttttgttcaccagctgattcacacgatcgaatttgttcttggtgcagtctcaaacacagcttcgtaccttcgcctttgggctctgagtcttgcacactccgagttgtccactgtattctacgataaagtactactgatggcatgggggtttaacaatgttatcatccttattattggcatcatcgtcttcatctttgccacggttggtgtcctgcttgttatggagaccctgagtgcattccttcacgcactgaggcttcactgggtggagttccagaacaagttctatgaaggtgatggttacaagttcgccccattctcctttgcgctgattcgtgaggaagaagattgagatcgtcccatgtagccgatgtacaatctttgatggcctttgttcccggaacaaatcattttttcatctgttgtctcggatggatcataaacctcagtcccctttgtttagacatgggacgaacagcaccatttttccttgtttagctatgcagaggatttttgggtcggttggggtgatatcaccattgtatgatgctaataagtagttgccgattgggcggtgtgttggatataaataagcactgtattgaaggttaaacattccgctacgttcgttgtcaataaagagtgctatttacgctgctggcgttagtc

SEQ ID NO: 36497 - DNA, 856 bp, Zea mays subsp. mexicana
  Clone ID: UC-ZMROTEOSINTE109C05_FLI
aggggtccaaggtggagaaagtggtggcgaccacttacttgtggccttgcaacttctaggatgaagaaatctgaagctgaagcagctgcaatgttaatgaggtttggaattgccagatgcagtgcaaagcccgaacatgtacagttccatgatctgatcaggctatatgctcgaaagctaggaggcacaagaacagctccggccatggtccagtcagtgtacctccaaggctcaatcaaacattcctctgagcacctgtgggcttcgtgcttcatggtttttggatttggttctgatcctctgttggtagaactgagaccatctgaactaatgttctatgttaaacagattgtcatgccacttgcaatacacacatttataacatactcccgctgtaatgcagcactagagctgcttcgcctgtgcactgatgcattagagagagcagctgagtccatgcttgctcatgctggcaaatggagagaaacatcattctcctgctttaggcaagctcattcagaagcccagtacacttatctttggcaggagctggctcttctgaaagcttctgtactggaaacaagggccaagctgatgctccggggtggacaatatgacattggagatgacttaataaggaaggccatatttatccgtacttctatctgtggcgagcaccatcctgacactgtttctgctcgagaaactctcagtaaactcacaaggcttcttacaactgttcagcttagttgattcttatagtttaggagttcacaatatattcttttcagtgtgccttttcatgaacgccgaacaaaatgcaccagatcttgaaataacaaagtaaatttgtctt

SEQ ID NO: 36498 - DNA, 1889 bp, Zea mays subsp. mexicana
  Clone ID: UC-ZMROTEOSINTE109D11_FLI
taatatcatgatccgtggatattgctctttaggacagttggaagaggcagtgagactgctcaaaaagatgtctggtagtggtcttcaaccggatgttgtcacttacagtcttctgatacagtattattgcaagattggaagatgcgcagaagctaggagtgtctttgattcaatggttcggaagggtcaaaaacccaattctactatctatcacatcttgcttcatgggtacgccaccaaaggagctcttattgatgtgcgtgatctccttgatttgatgattcgagacggtattccgtttgaacatcgtgccttcaacatcttgatttgtgcatacgctaaacatggagcagtggataaggcaatgactgcatttacagaaatgcgacagaatggtttgaggccagatgtagtcagctacagcacggtaattcacattctttgcaagaccggcagagtggaggatgctgtgtaccatttcaatcagatggtcagtgaagggttgtctcctaacatcataagttttacctcactaatacatggtctatgttccattggtgaatggaagaaggttgaggaactggcttttgaaatgatcaataggggcatccaccctgatgccatattcatgaacacaataatggacaacctatgcaaggaaggaagggttgtggaagcacaagatttctttgatatggttatacacattggtgtgaaaccagatgttgtttcatataatacactgatagatggatattgcttcgttgggaagatggatgaatcgattaagcaacttgatcgtatggtctccattggcttgagacctgacagttggacctataattctctgcttaatggctactttaagaatggaagggttgaagatgcattagctctttacagagaaatgttcaggaaggatgtaaaattttgtgctattacatttaacataatgctgcatgggttatttcaagctggaaggattgttgctgcaagggaattatacatgaaaatggttgacagaggaacacagttgagaatcgaaacatacaacacagttcttggaggactctgtgaaaatagttgtgttgatgaagcgctgagaatgtttgaggacttgcgttcaaaagaatttgagcttgatgttcggactttcagtatagtgattaatgcattgctgaaagttggtaggattgatgaagcaaagagcctgttttcagctatggtgctccgtggtccagtgcctgatgtgataacctacagcttaatgatcaaaagtcatatagaagaaggtttgctagaggagtctgatgatctttttctatctatggagaagaatggctatgctgccgactcacacatgctaaacatcatagttagaagactacttgaaaaaggagatgtgagaagggctggaacctaccttaccaaaattgatgagaagaacttctcccttgaagcttccaccgctgcattgctgattcctattgtttcagagaagaagtaccagaaagaagtaaagtttcttcctgaaaaataccactctttcatgcaacctagggatgattgagacctttcccggtttttctgtgctggacattagagattgctaactagacttatttcagaagatcaatttgaaaacatgaaatcttctgcataacttgggcacaaatgaagtggagagttacctggccttgaaggattttcttgtttctagagattgtctttcatatttaataaccacgcttgcatttactctgtgcctatcaaataccgtgtgcaggcttgtgtgggtagtgtttacccaatagcatccctatcggctatcgtgattgatggaaattctgaaactccattatgccttctacttttttgcgtcttcacat

SEQ ID NO: 36499 - DNA, 1953 bp, Zea mays subsp. mexicana
  Clone ID: UC-ZMROTEOSINTE109E09_FLI
cacggcagagcaaggaacgagtggcaaatgttaggtttaatagggacggcagtcttgtggtatgccaggtggctgggaagacagcagatatttatagggttcttgatgaaacagaggctgcacgtaaggccaaaaggcgggtgaacagaaagaaggagaaagcatctgcgaaatccatgattgctgaagagaatggcactatcattgatcctttaccagttcaaaacttacaaaatcctactgttattgtcaccgatgtatttaagctatttcaagttttacgtgcaagcaaaaaaatatgttcgattacattctctccaagtaatcctccaagaggatgccttgccactttgtctctatcactcaacaataacatgcttgagacatattcagtggataaggagaaggtatcaaagatgtactcagttgagatgcatggacatcgttctgacatcaggagtgtctcccttaattcggaggacaacctccttatgtcgactagtcataacgctgtcaagatatggaaccctagtacaggggaatgccttcggaccattgactctggatatgggttgtcaagtgctttcgttggaaatcggtatgctcttgttggtacaaaaagcgatgaagatggaactgttggtgcacgaggctttgtcactggaagtgctgatcatgatgtcaagttctgggaataccaattggtgcagaagtctgataatgactctaagcagctgactgtaactaatgtgaggaccttgaaaatgacagaagatgttcttgctgtctcgatcagtcccgaaggaaagcacattgctgttgctctcttggattgccatgtcaaggtcttctacatggacacactgaaaccatctttaaacctttatgggcacaaacttccagttctctgtatggacatatcatctgatggagctttgctagttactggctctgcggacaaaaatttgaagatatggggtatggattttggggactgccacaggtctatatttgctcactcagacagtgtgatggatgttaagtttgtgtatagaactcattatatgttcagtgtggggaaagatcgcactatgaagtactgggatgctgataaatttgagttattgttaacacttgaaggacatcatgctgaagtttggtgcctcacactcagcagtcgcggtgattttgttgtaacaggttcacatgatcgttccattcggcgttgggatcgtactgaagaacaactgttcattgaggaagagaaggagaaaagattggaagaaacctttgaggctgatttggaaaacgataatgactatagatatgggcagaaagatgatgcccctgatgaaggttctgtgggtgttcctggtaggaaaacaaaagagacagtaacttctgctgatgcaatcatggatgcacttgacactgctgaggaggaactaaaacgcattaatcaacataaaatggaagagcaaattactgcgaaggcagctaaatttcaacctaatgttataatgcaagggcattcaccttcagattatgttctaaatgtagtttcaagcatccgtccaaatgatctggagcaggccctcttggcattgccgttctcggatgcactaaagctcatgtcttacttgaaggagtggtctttggttccttcaaaggttgagcttgtttgtagggtttgcttagtgctccttcagacacatcataatcaattaactgccacgccagctgcaagatccttgttgacagaactgaaggatattctttactgtagagtaaaggaatgcaaggatactataggcttcaacctcgctgcaatggatcatataaaagaattgttggcgttgagatcagatgcacctttccgtgatgccaaggcgaaactcatggaaatcaagaaggagcagtcgaagcggtcaagtagtaggcttgacggagatt

SEQ ID NO: 36500 - DNA, 1208 bp, Zea mays subsp. mexicana
  Clone ID: UC-ZMROTEOSINTE109F10_FLI
caggtctccagcgaagcaggctcaggcgcaacgcaacaacacaaggcggcggttatggcctctgctgctgcgacggctacgatggggacggggaaggtggtttgcgtcaccggcgcatcagggtacatcgcgtcctggattgtcaggctcctactcgaccgcggctacaccgtccgcgccaccgtgcgagacaccgctgacccaaagaaaacattgcacctgactgcgttggatggtgctaaggataggctgcacttatttaaagctagcctgctagaagagggttctttcgatgctgcagttcatggatgcgacactgtatttcatactgcctctcccttttatcacaatgtcaaggatgctaaggcagagttacttgacccagcagttaagggaacactcaatgttctcggttcatgcaagaaagcttctattaaaaaggtggttgtaacatcatctatggctgctgtagcctacaacgggaggccaaggactcctgaggtcacagttgacgagacatggttttctgatccacaaatttgtgaaacaaatcagcaatggtatattttgtccaagacgctggcagaggaggctgcttggaagttctcaagggataatggacttgaaatcgttactataaacccagcgatggttattggtcccctgctgcagcctacactaaataccagtgctgaagcaatcctgaagttaatcaatgggtcatcgtctacatatcccaatttttgctttggatgggttaatgtcaaggatgttgccctggctcatatccttgcatacgaggtcccctcatcaaatggaaggtactgcatggtggaaagagttgttcactactcagaactggtgaacattatccgcaacatgtatcctacccttcctcttccggacaagtgtgcagatgacaagccgtttgtcccaccctaccaagtatcaaaggagaagataaaaagcataggcatcgagttgattccactggagacgagcgtcaaggagaccatcgaaagcttgaaagagaaggggttcgctagtttttgactcgagcaagctgtgaaacataagtgttactgtactacgtgatgttgcattgtatacatgcatcggacttcgcagttcccaagctattttggtagctttggtctgtaagattacctaaaataaactgagccacgttgccacgctgtagcttttgg

SEQ ID NO: 36501 - DNA, 754 bp, Zea mays subsp. mexicana
  Clone ID: UC-ZMROTEOSINTE110C01_FLI
gtgaattatcatgtccacaggatggtggcatcgcagtctacgaggggcctgagatggtgtcaccagagagccaaactgatgctcggaaagaaaacatccattcagatgtcgctgagacagatgaatgcactaagactcagaaggccgctctagcaggcacagagggagaaaattccgctgaagattctggtgtgcctctctctgagatggacaaatgcaacgagatgccgaaggatgctccgacactcacagcagcaggtgcaaatcctgctgaagacgaagcttccctgaaagacctctttgtgcagacagtgaacaaggcttcttctgcctccccagctcctgatgatccgaaggccagcgacgagaagacgctggcagaagagaaccagaagctgaaagagcttctgcaaaagcttctggcgtccggcaacgatcagatgggggtcatcacggacctaagtgagaaggtcaaggtgctggagcggaggctggcacgcaagaagagaccaaaggtgagggtgcacaggccatccaggcatgcttcctgtgtccactgaaaggataagtctgtaaggttttgaggttttatgttgtatggatccccatgttgcttcctttgtccagctattgtgcactgtgtaggtatagccatgctgtggcactgtgcttcgtcttggacaacacaaggtgtggcatgttctgtattttatgtctgtataatgcatccaactacatctagtgttctgtgagc

SEQ ID NO: 36502 - DNA, 1003 bp, Zea mays subsp. mexicana
  Clone ID: UC-ZMROTEOSINTE111F01_FLI
caaattacaattcaaggctcaagtactaatttaccttagttacatttttttttgcacttgcatgattcagattcatgtcttgcgatgcttcccagttcccatcatacatgatatttgttttcatgcataagttgatactgggttttgcacttatgtggttattcagatggtgggtattcttcattttgatggtgcttcaaaagggaacccaggtaaagcaggtgctggagctgtgcttatgactgaagatggaagagtgatatctcggcttcgtgagggtcttggtgtcgctactaataatgttgctgagtatcgaggcctgatcttaggactgaaatatgcgattcggcatggattcaagagaattaaagtacatggggactctcaacttgtctgcaatcaggtgaatggtgtttggcaaacgaagcagccgaatatgatggagctgtgcactgaagcgagaaagctaaaagagaacttccattccttcgagatcatccatgttcgacgggagtggaatgctgaggcggatcgtcaggcgaacatcggtatcacgcttgcaagtggcgccgtgtttgaggagcgtggtgacatctgatacatagctagcaacgtatgtatttaactaactagcttgacctttgacttgcacctttgtcgagcttctatgctgctctgcagcagccatcaggagctgaggtgatggcctgccgtctagtaggcactatatccaattactttacactagttggacctatttcaccatcaagctgctacggaagcctgatttctgctatggggcctcagtttgatgtgaaactgtgctttggaagcttgatgttgctcgataagttgatctatgaatggagaattttaatttgtcagctagcctttagatcgctatttagattttggatttgaacactctttgaaccagcattcttaggctatcttcaacaccttactcataatcatactcatattcaaactttattctgtgaat

SEQ ID NO: 36503 - DNA, 1161 bp, Zea mays subsp. mexicana
  Clone ID: UC-ZMROTEOSINTE115F01_FLI
ggcgaggcgctgcgctgctcctggtggccgtcttcgccgtggtcgccgtagcgaagggtcgtgctgatactccaccagctgaaacaaatagtgatagctctactgcacagccaggccttgggaaattggagcagcatgagcaggcaaatcctaataaggagcatgcaacccaccaggaaggaggagtcagcaatgatattggtgacaacaacaagaaggataactcaacagaagtaaccaacatcagaagagatgactccatacagcagccaaagcacaaagatagcatcatgacaaagtcttcacaaccactagatttcttggaagattctcttatcaaggagtgtgatccatcacatagatgtatcattgaaaacaagaaattcatcgcctgcttaaaagtttctggagaagactcattggctctgtcacttctgatggacaacagaggcataaacccactagatgttagcatcatggctccagattatgtcactttagctgaagattccatccatgttgaagcaaatggtcacaatgagacacaagtgagagtttctgtcaatgatgatgcaaatagcacgacaatagtcatcaaagttgcagaaaaatcctgcaacattagcattcacagtgcaatcacaagggagacggctggcagtggcagagtcatacggatgccacttacaccaacatacacgctactgccagtcttccttctcctcgttgcggtggcagtgtgcatcgtggtccggaggtggcgcaaccaggacggcgaccctgcgtatcagaagctagacatgtcagacctgccggtttcggttggaggcaagaaagaacatgacgatcggtctgacaagtgggacgacaactggggagatgactgggacgacgaggaagctccggtgacgccatccaagcctctgcccaacccttcgtccaaaggtctcgccccgaggcgatcggcgaaagatggttggaaagattagttagccacatgacgccacttaaaaggagcattgcggaaatagttccagcgcatgcagtatatttttaccttcatctttgttgttaaatatttctggaggatgctaatgtcagagagtgcaatacattgataccaagcagaaaattttgtgatctaactggcagctattgaat

SEQ ID NO: 36504 - DNA, 1678 bp, Zea mays subsp. mexicana
  Clone ID: UC-ZMROTEOSINTE115G04_FLI
attgatctagactatgtgcctgcctgtgagggtgaggaggacatgaacaaattcgagctacaagacagcttcgagttcatcatctagagcatccaggacctcatggaggatccagggaacaacaacgccttcgggatgccaaccaaaatgagctatagccaacatcgttaactataccagtagaacatttgcccgacgcggatgttgctgcagggaaggacatgcaggggatcccgtcggagaagatgctcttcggtagagataaataccaggagatgagaatgaaggtcttagaaattaccagaatataagttacataaagaaagaccatcgtcaaaaaccatctccgcatcaccaaacggataaaccatcaaaaaagcattctagcttaatctcggacagattaattttcaaagcattatcataatcataatatctcagccatactctagaaagaggttttaccagatacgatatggatccatggcaaaagccaattccaaagtgcatttcaacaggggctgcaaatgacaggcaaacactttaaaaggatctatgggacatcagtggcaaacactttaaaaggatctatgggacatcagtgcatttcaagccatcatcctgcatggtgcagacctataaccaaagtatcagatttttatagcatttttaaggaaataaggagctggacagtatcctactggtaacatgacagttttaaaaacatattgacatttcatttcaataacctctttaatacatatatatgcagctcactcattgttgtttaacaattgtaggaaactcccaatgataaaggtaaagagatcgagcctcctcttcatcggttagaaaaacagaaaacgaaagcaactacgctcaattgcttttgttgtcttcagtataaacagaacattgtagttacttctctaaaattaataatgtctgataattaaacccaatattcattgaataaacaatagtaaaaacatatattcagatgcgatgaagccccaagcagttgggttgcaggtcctcaaaacgaaggtggatgtcttggctatcgtctcccttccatatcttactctgtagtactcgcttggtttgcccaatggatcaagttaaaatgttaaaaaataagtaaaagtagcagctctctgcctgtgaactccagtatcaactgtcatccaccttgcctgcagtctgcggctcggcgctgcactcaactaccaccttctcccaaattttcactatttatttttctaaatgttatttatctcttcttttttgttcttcagtttagttcatacaagacttctcggattactcttcttctttaattgatctaggctttaaataaatgttgtggttggcgaccttttattccttggacgacaatatgggtggtgatttttccaacgatgtctttcgcaggtatgatcgctttatcaatacagcagaggtccttcacatgtatgattgctttgtcaatacggcagaggttctggagcgggtcacaactatagtctcatatattgtttattgaggatgccatcgctttggtgtgagatctgtaagcagttcttttattcacaaacaagttggtactagatggcttaaagtatagtttgtaatttattaaaactattacatgaatattttggctctgcttctatgt

SEQ ID NO: 36505 - DNA, 669 bp, Zea mays subsp. mexicana
  Clone ID: UC-ZMROTEOSINTE115G07_FLI
ccggccaacgcgagggtgtacaaccagtacctcatcaaccacgtcgggcgcgggacgccgcgccaccccggcgccatcgagacctacctcttctccatgttcaacgagaaccagaaggagagcggcgtggagcagaactggggcctcttctaccccaacatgcagcacgtctaccccatcagcttctgaagaaccgttaatcgtaccgatccaagctagctgctagctggccctggttgctagctccgaccgacgaccggacgacggacgacgacctgcagccgtatgtgtcgatccggccggccgtatacggatagtacgtagcatgtatgtatatatatggtatatgtgggcttgctttgcgaccgctgggagtgagtatccgatccaatggtacggtagctactcccagatgcgtacgccgtgagtgatgctgagtacgtatgtattttatatgtatatgctatacacatcgaaagggatctatcggagacgacgcgcgcggttaccgtatatattgataaatacggtaacatcgtacgtcgtcaattgatcgatgatctcccttcgtagctctagtagtatacagagagagaggttggtgatggataagatacacatgcatgtacattatcacgcgccgtataaattaatatacgggttttaatt

SEQ ID NO: 36506 - DNA, 1159 bp, Zea mays subsp. mexicana
  Clone ID: UC-ZMROTEOSINTE115G10_FLI
agaagtgaggcgagaaaaacagcaagccttagtggtccactttcactgccaactcgtgcttctgcaaatagtctgtcagctcctattcgatcttcaggaggttttgtagattcatcaggtgacaagtccaaacgaagtgtagtagagattaaaggccgcttttcagttacatctgagaatgtcgatcttgcaaaggttcaggaaggtccacttagtagcctctcacggaaatcaccagagggttcactgctaagaaaatctgccagcactggtgattgtttgattaatactaagctgatgcgtaacgctaatcagctgaaggaattctgcaatagttctgtatcatcttcagtattaattccccaccttaacaaccttgtgcaacagaccatgtttcagcaggatgtaatcatgaacctacttagtaacttgcaacaggatgagaaagttgatagaacacagcctggaatatcttctcaagtccgaacgatggagaatggtaaagtggctgatacagctaactctgagaaggaacggtcattacttgttaaaatttcagaattacagtctaggatgataacactgactgatgaactaattgcagctaagacaaaacatgttcagttgcagcaagagctaaatgcgttgtactaccgagaagaaattgaggatattagggatgaggatatcgaagaaacataatgtatgaattatctgcctctccctgaggtcaggggagaacaagagaaggaaagcggcagggagaacaagcgatggaaagtggcgatgccgcaaatatttgctggatctagagaccagctgcggttctacggaatttgttctttgaaggttgccgtgcccctggcctgctgccatccagtgtgtataaccgtcttagttcggtttttttttttgtgaccacaagattgaggcgtggtcatgcagctatttcggccataactatcattgggagtagctgtagtccgtaggctaccgggtggttatctatgcagaatttcagaagactgcaaaataaactgtattttatctagcaataggatgtatattggcgcattcgttgatatgtatcatatagggctattcgcaaacatccaaacagagttgtttgcacatatctaataaagtatgcatttactgc

SEQ ID NO: 36507 - DNA, 1013 bp, Zea mays subsp. mexicana
  Clone ID: UC-ZMROTEOSINTE115G11_FLI
gttcctaccttcttccctccgtctcccagctcgcgcaggcaggcgacacagcgacgctaaaaaccctagtcttgccaggccagcggtttgcgatgacggcaccggcggacaaggggaagaaggccaagaccgatgccgacggcggcgaggagaacgagcaaatcgacggcgcccttgtcttctccatcgagaagctccaggagattcaggacgagctcgagaaggttaatgaggaagcaagtgacaaggttatggaggtggagcagaaatacagcgagattcgcagacctgtctatctcaagaggggtgacattatcaagaccatcccagacttttggctcacagcgtttttgagccatcctctactaagtgagcttcttactgaagaggatcagaagatattcaagtacttggattccattgatgtcgatgattctgatgttaaggcaggatattccatttaccttaacttctctgagaacccgtactttgaagacacaaagcttacaaagacctattcctttgttgatgatggaacaaccacaataaaagcttctcaaattaagtggaaggatggaatgggacctgcaaatggaaatggtattaacaagaaggggaacaagcggccattagtagtggaaagttttttctcctggtttagtgatacagagctcaagagtcttgctgatggtgtgcaagatgaggtggcggagatcatcaaggaagacttgtggcctaatcctttgaagtacttcaacaatgaggttgaagatgaatttgaaggagatgaagaagatgatgacgacgacgacgatgataatttggatggtgatgacaatgacgatgatggagaccaggagaactgagccctcgcgtttaggcggggaattatgtgacccgtttgggggattttttttggttgtttgacttagctggaactcaacttagggaactgtttagtgccttatgaagtcaaccaacttgaaaggagactgctatatcataatctcggt

SEQ ID NO: 36508 - DNA, 2090 bp, Zea mays subsp. mexicana
  Clone ID: UC-ZMROTEOSINTE115H07_FLI
tatttttcttgtgtttattccttgctagtacatgtattcgacgccgattaattaaatgctaatcttgtgtatatgtgtatgcttatgtgtgggatgtgaagagaaatatcatatgtatgaaacgagacaagtcgtgagatgattgtttgatgttcagtgttatgctcaaaccagaaatcatcgtctactcggtgaggtcctgctattgttgttttacctcttcctttctgtacccggtgtcgatttattagatactaatcgtgtgtatgttattgtgtgctggtgaggagagaaatccctggaggtttggttgaatgaaagcgaaatcccgaggtgttgttcattaggtgctcgacgtatgggctaaagtgtagctcgacattgtgcttatagtttccgagttgaatttaattttgggtgaattcctttgctatctataattgtcagcttgaatgatgggttaaatagttaggtggtcgatgtcttttgtgattagcataggtatttgtggtgatgtttgcttatggaatctgattgtccctgagctgaattttgctgcacacatcatctctgttgtggggtaataattgagtgaattaaattatattttctgtagaagtgttatatagaaaagttatagataactcctttatcttgcttgtgtaaaaatttcatgaccataggtttagtagtttaggagttatgatttttctaagtacagtatacgaatctgtccagattctgtactgatttcgaaaattgccttgtttgactaaattaaactgagaattagcccttagtaattatagacgaattgtagtacttttcttaagctttccaacaatttttggagcaccctttttggtggtctagaagtcaagttatgactatttgaaaggtgatgttcgaatctgtcagaagtctggacagcaatgtgtgtttgaattaactgacttcgatacacattgaatcacctggagatgattataaatgagttgtagaaaattttattagctttttaaaaagtctaggatcacatgttttggatgtctacatctctgattatggatttttgaagtgagtagtcaaattatgtccaaatctgggaatgctccacttgagtaccatgcttgccatatgataaagataacatttcttgttctgaggcatatatgaaaacaatcaaacatatattgggctgaccgaaatcccattgttcctaaggaacggaaattggtattgatgcaatatataaagcatgtgcttgctgaacgtcttttctattcgtcatcacatttcttttctgctttcctaattttctcgaatgcttctttgcaaatacaccatggattaggattacctgtgggtttcaatcttttttttaggttacgcctaatctttatggcaatttggtggctaacatggctgcaggtattgttggagggacaagcatcatgcctggaggtagggattgcagctaattctttattatttgttgttttcccctctaaaaaaattgttctggcagcgtttcatttctgtaatttattacaaaaaataatattttgggcatgacttatctccctttgtccctacattgttacatatttgtaaagactttgtggcatatggaacttcttggagctttttgctatggtcttcatcaagttaatttattacaaaaaataatattttgggcatgacttatctccctttgtccctacattgttacatatttgtaaagactttgtggcatatggaacttcatggagctttttgctatggtcttcatcaagttttctaccaatgacttatctccgctacctcgacccgctcatcaaggccaacgacaccatcaagatcgatctggagacaacaagatcatggacttcatcaagtttgacgtcggcaacgtggtcatggtgactggcgggaggaacaccgggcatgtaggagtcatcaagaacagggagaagcacaagggcagctttgagaccatccacgtgctgcttggagctttttgctatgtctagttttctcctatttgttgtacaggaaaacatagaatataattcaaatttggtggtcgc

SEQ ID NO: 36509 - DNA, 1459 bp, Zea mays subsp. mexicana
  Clone ID: UC-ZMROTEOSINTE115H12_FLI
gatggagagaggcgatggcgggagcgggaggccgccggccgagaggaaggcggcgtggagggacggcgccgtcacctacttccacctcctcttctacatcgccatctccggcggccagatcttcttcaacaagtgggtcttatcctccaaagagatcaactttccctatcccgtggcactgactctgctgcacatggtcttctcctctgtagtgtgctttgcaatcacaaaagttttcaagatcataaagattgaggagggaatgactacagatatatatattacttcagtcattccaattggaggaatgtttgcaatgacactttggctagggaacagtgcgtacctctacatatctgtcgcatttgcacagatgttgaaggcaataatgcctgtagctgtgtttcttctgggagcagcatttggcctggaagaaatgagctataaaatgctttctatcatgtctgtgatcagtgttggagttattgtggcttctgttggtgaaattacaatcagttgggttggagtggtttaccagatgggtggagttgttgcggaagccctaagacttatcttcattgagatatttctgaagaaaaagggtgtcaagctcaacttgatatccatgatgtactatgttagcccttgcagtgctgtatgcctctttattccctggctgttcttagagaagccaaagatggatgatagtatttcatggaacttcccgccattcacattgttcttaaactgcctgtgcacctttgtactcaatatgtcggttttccttgtcatatcaaggactagtgcgctgacggctcgagttactggtgtcgtgagggattggtccgtagttttgctgtcagctgccatctttgctgatacacagcttaccttcataaacataattggttatgccatagccatagctggtgttgttgcgtataacaactacaagctcaaggtaaaaccccaagcgaacccacagcaaggcgacgagaacaaggtcatctcaggaagcactcaagatgtggtgttatcagtgagctcagcaaaagaaacttcgtagcaccaaaagtagcacgattttgaaacaattttatttttcacaaaggagaattgcgctctctttcgttgggttggccagctctccttggactatacattctttttccttcccctgggtctggagggaagatattttgtacaatgatatgctcaagatgatgatacgctgccttcactgtcgtaatattgctgctcaaaaaggtgggagcacgccacacagatggaaattaggccatgtaaagttgtgttttctcttgaactggtgtagcgactcatcaggtgctccaaaaatggcagccctgaatctttgtacatggttgcttggtggtggtcatgagatgtgatgtaaaacgatatatgtaagcctggcagatcaaaagaattcaagatacgc

SEQ ID NO: 36510 - DNA, 839 bp, Zea mays subsp. mexicana
  Clone ID: UC-ZMROTEOSINTE116A09_FLI
tcgccctttgtttccctactcctgggaagaagccatcggtgaatcgttgcttgcccaagctgacagtggcagactaaaggaggagacatttgtcatgtgcaagacactcaagggggctgggaagttccttgtgctaactgagaagctgcttctgctagtctcaagcccatacttagtggatctaggatcgcctcggttcatcggtgttcctcctgacccgcagtggtcgatcgacacggagatgcacctcaagagcgttgttcatctggacaggtctcaggaggtagtgaacattgttgggagcaacggacagacctcacctagggacaaaagaggtggcacgagaaacagggtcatgagctcggccttcgtccccctgtttcacctcagcatagagctgccaaatgaggaggatgcagaagggacggtgcaggtcctacaggcactcatcgagaagggcaaggcacggaggtgggacaagaacatcctacaccggagcaacatcagttgaggttttcacaacagtagtagaggttggtgttttgattgaagtggaagataaactaaattccacctggattaaatatacaaacaaggcctcaaggcagagcagtcaccagcatatataagcttagtgtgaataagaaaacaaagtgttccataggtgatcaccgttggacacgtgcttcggtttttttttgcggtctaggtgtagcttctagaagttttgtcgacggctcttgtaaatgaagtgtgagagggcttatgttatgtgtagcaacaccactgttttatgccacggctatgtttacaaacttcgccgttcatgggccatggat

SEQ ID NO: 36511 - DNA, 983 bp, Zea mays subsp. mexicana
  Clone ID: UC-ZMROTEOSINTE116B03_FLI
gaaatgctgaggtcaagaggctctttcaaaaatggtacacttgctgatccttgtgctcccagaggatattcacgcaatgaaggtgcttcaaggtcaacattagagaaccagtatgttaataatgggactggaaactttacagagtgcatatcttcttcacaacttttactgcaaaaaggaaaggaaaagtgccagtatcaacaatgtcacctgggatctacttttgtacctgagctgcgtggatacttcttgggaactgaaaatttctattttacttcaaagttctttggacttaagaagtcttcatcactatctgatttcatgtttgctggagaacaattttgcaatcagcatttgtcgagtcttagaaaaaagcatcctaataggtcagatgaggatttttcacggtattgcttctcgatggcatacattgtggctctactgcatgacagtcttggtgtaccactggatgacaagaggattgagtattcaaaccaggttggagacattcaggttgaatgggctctaggagctttcatcacactgatgcaaaatacgagtttaaagccattacacaccaccgcagaatcaacccatagcaatagaccattgtttgctgtgctgggaatgtttcttttatgtggagtactctttgtatcaagatggaggaagcccaagacgaaaatcatatacgacttagagaaaggccgatacatcataacacgcatcagctgacgctaaatcttgtgcagaagaactatatttatacgacatgaatagatgctgtgttgtgcaacgatgtacgagttcaattctttgtgttctatctttaggtagcagagctgggtgggtggagcaggaagatagcgcatttgtgcgtatagaagaatgatgtgtagaacaaattgccatgtgttaattgaattatttgatgaataattatagttgctttgttcatctaatgaggtcgatatttctcacac

SEQ ID NO: 36512 - DNA, 650 bp, Zea mays subsp. mexicana
  Clone ID: UC-ZMROTEOSINTE116C04_FLI
gagtaaaccaataaccaacgatcagtacctttcaacctacccaccaaagatgagcatcctggaggacgtgatccacaagatgaaaactccggtcgtttacttgaacataacgagaatggctgactacagaaaggatgcacacccttccatctaccgcaagcagaacctgactgacgaggagaggagatcgcccgaaagatttcaggactgcagccactggtgcctccctggagtaccagattcctggaatgaactggtttatgctcaacttctgatcaagcagcatcaaatgcgccaacaataaaggcaactgcggttttttgctgtgtgcctgtatatgatctgttgttttctaggataaatggataatagtcaacacggtggtcgaagtaaagtcgacatgagaccgaggattttcttaaatcccggcttgttcgctgcggctttaatccggccgtggcttctacagtattttgtctctctatagattgcaactgcggctgccagccagctgatgaattcctcagttagggctacctcccaatacccacataaattcctcagtagaggtttctgggacatcatattgtaaagttcatgtctatcggtaatctgaaataatatgaagaatagtatagatgtgatgatat

SEQ ID NO: 36513 - DNA, 1372 bp, Zea mays subsp. mexicana
  Clone ID: UC-ZMROTEOSINTE116F06_FLI
ttcggacaaatgcttgccttgcacaaaataggaaattacgtcgtgattttgtcgcataaaatgggatatttactttgcaaaatgttggtttcgtggtggatttcttgcggggtttagttttttctctatatattatccttttttgttttgaaccttaacaagtgaaatgatttgtttatttgcacactgacatgagcaaactgaatgagaatccataatggatgatgcaggggacacgtttaaggatcttgtgggaagtgcatattatgttgctcccgaggtattgaagcggcactatggggcagaggctgacatatggagtgctggggttattctttacatccttttatctggtgttcctcctttttgggcagagaatgaggatggcatatttgatgctgtcttgcacagtcacattgatttctcttctgatccttggccttcaatatctaatggtgcaaaagatttggttaagaagatgctgcgacaagacccaaaagaacgcctgactgctgctgaaattttgaaccacccatggattagagaggatggagaggccccagataagccacttgacattacggtcatcagtagaatgaaacagttcagggcaatgaacaagctcaagaaagttgcattgaaggttgtggcagagaacttatcagatgaagagattatgggcctaaaagaaatgttcagatccctggatactgataacagtgggacaattactcttgaagagctaagatctggtttaccaaaacttggtactaaaatttctgaatcagaaatcaaacagttgatggaggcggctgatgttgatggaaatggtaccattgattacgcggagttcatatcagccacaatgcatttgaatagattggagaaggaagaccgtatactcaaagcttttgaatattttgataaggaccatagcgggtacataacagtagatgagttggaagaagctctgaagaagtatgatatgggagatgataaaacaataaaagagatcattgctgaagtagatacagatcatgatggaagaattaattaccaggagtttgttgccatgatgaggaacaatacccctgagattgttccaaaccggagacgcatgttctaactgtcatgtacaattttattgaatactttcaagaccaatatgcacccttagacataatcctggccccattttcttttgggaacaactgtaaggactcaatatttttttagatcaatttctctgcagccgggacatatttgtaccaaaataggtggtgttatagtgactcgtacttcgatgtttggagcatcatggactcatgggtggcaatgtttattcccattgtactcggagctctgctttttc

SEQ ID NO: 36514 - DNA, 1479 bp, Zea mays subsp. mexicana
  Clone ID: UC-ZMROTEOSINTE117A08_FLI
gtatcgttcaccagctagttactagcgtcaaatgtttcatcagagtaccatcgtcagctgcttgaaaataccatgttatgtggtggcaccgcatcaatgactggttagttgccttttgtttttgatgtgcacctttgctctattcaaccttgtgaggtataggtcaaatagcgaaagggcctctaacgtaatggttaaggcttccgagtagcatcttcaggtcttggttcgatccctaatttcgggcttggttaaaaaaatcccctcgctgtgtcccatccgttctcggttatgtcctgcgcgtcacccctctggctgggccgttgcagagtgggcagaatggattttatcggtcaagaccatgtttcgatctcttcttaatttaatattgggagggcggtctttccctacccggccgagtttttttagctataggccaaatgcatatcaattagctgtatagggtaagtaatatcattttgttttaaactaacatatgttttctagttgaacgcagcttcattcaagatgaaaatctgccttcggtatgaactgattgtatggatgccaacctatgcaccactagtctgggacattctctgttgttatgttccctaataataaacagtgccagctttgatgttctgttagaactttaaagtttcatttgatacctgtcctttggataagtagtcaaacattgtagtgaatatgggtagcaatagcacaactggaagtggaaagtatgttggttaagtaagaattaggtagcaatagcacaactggaagtggaaagtatgttggttaagtaagaattaggtagcaatagcaacaggcaacagctacatttcatgtcatggttacagctttgcatgttcaattggctttcttggacagttgtgtatacaacgtgttgatctttatgcatatatttaatctaaactcttgtagttttgcttagactcattcaatcactaaggtttatctcacttttttttcctcaaggctttgaggacaggttccagagagaagcaaatctgtctgcttcagcaatctgtccatcacttgtgaagcacggggccgtccattgtgcacaagaagtgcttttagagacaaactgccttgaactagcacggttgtgttgtgcaccatttgctgctgttcatgtcacagctgtgccgatgcaggtgccgatgcttgagtccactgtacgccagccacagttcatacctgactgttgcgaagtgttggtgcatctggtttagggtatatttagagtgcaatagagtgtaacattggcacgtattcgttagaagttttagctagtagcccatttgcacctgtaggagaattagctgagatttccttttcaacttacattatgattcattatctcttcagctactgctagcgaaagagttgtttgggtcatgcccacaaactaagcacgtcacagattcttgggcatatgtttttctt

SEQ ID NO: 36515 - DNA, 604 bp, Zea mays subsp. mexicana
  Clone ID: UC-ZMROTEOSINTE117A09_FLI
ctgaaagtgagagcaaggccgagctggacaggttctgcgacgctcttatctccatcagggaagagattgcagagatagaaaacggcaaagcagatgtgcttaacaatgtcctgaagggcgctcctcacccaccgcaactcttgatgggtgacacatggagcaagccgtattccagggagtacgctgcgttccccgcggcatggctccggggcgccaagttctggccaacaactggtcgtgtggacaacgtctacggggaccgcaacctcatctgcacgctgcagcaggcgacccaggtggccgaggaagccgcggccgcaactgcaaccgcgtaatctcgtccgagaaccacgataattgatcgcggcgtgcgaaacatcctcaagaaaatataatgcatgcttcctgtaggagggaagcatcgtcatcttcctcgtcatcctttctgcagtgtatatactagctcatggcagcgcctgatcccccaccaccaccagtccaccacacacacacaaagctgccaccttgtaattttgtacattactttattgcttctctgttattcccatttaataaatcaaaaaaaaggaatagctttttattg

SEQ ID NO: 36516 - DNA, 2887 bp, Zea mays subsp. mexicana
  Clone ID: UC-ZMROTEOSINTE117B01_FLI
gaacaattgctctgttgggatggttttttggcgaggggagggggaaaggggataaattggatcaaatgtgctttgcttgttgcctcattgagaatgtctttcaaaggtgaattagtttgattagacggaacggcaggaatcgtttagttttcacgcgctaaagaaaggttgtctagaggaggtttaagtcatatctgtccatcatggaatgcaatgttcaatttgaggagcagcctgtaccgataaatggaccctgctttctcattgccccacatcgtgatgaatttgtttcatgcagcaagttgagttgatagagaatagagaccatgttttagatttttgaagaaacatagatagcgtgcttgaatatattatatatattctatttgtgtgtgctgcaagtctgcaactaccaatgttggttgttgttctgttgctgtcttgcttattctgaataaatgaacctttatgaactcagccaatcctgtattgtcaatttaattgttatctctggtagtaatgaaatcttagtctcatctgaagtctttgccttattttatggtctctcttccaggacgactttttgccaagaacaccgactccgctagagtacatttttggttctatcttctggtaactagatcatgttcactttctccagattcttatttgttcaggaaaaagaacaactgcatgtatgatcgagtttttcaccaggcctttatgctttggacagcttgccctgcatgctatttctcatctgcttgagagatacatttaaacaagacaagataaaatttaaagatccaagaagattgtatgcacctgggcgaatgtatcatatcgttgagaggaaattttgcaggtaatgtatcatgtcattgcaaatagtatcttcccctgcttgcgaattgctcttttctttttttatgtcataaataatataaacaaaaacctactcttctagtatatgggagctcctgcggtcctgcctatggcttataatccatactacagtcttttcatgatttaaagcaaatatttttagtccttgtattttttctagcagaaagcagcaaagcttcagtctgctcatgcatgagagtatggaggctccaatcatgtattcttctatattgtttgaacagatgaaggctaccttcctcaacttccttacatttctgctggtcaattaaaagataaaatgaattacaaatattaagaataagttagagttcaggagcctagtacagataggttgtttcgaaattggcgagttatctggagattatcggataatatatctttttagggcctattatcatggaatgtgatccatgccagtacctaggtttgatgtatgttggtacagcatgatctgcataatacattttttttttcgcgagcgggttgagacccgtatttcattaagagggaaggagttctattacagcatgacctgcataatacaatgcttaaggtgttttatttaacattttttttcattgttgtacacgaaagtatgctatgacatttttaatggatatagttctactcatctgcagatgtggaagattcccacctgaggttagaactgcaattccagtggaagggcgctttgagcatgttgtgttatcatgcagtaccacttctgatcatggcatttattggattgaacgagaatcacaaaaggctttagaggtataaactcattatactacatgtcccagatttatttttacaatttaacatgtactttccctttctctctgcaaactgtagtatcttgttgattacacatttatccaattgctaaatcttggccatattatatttacggttgatataccattgtacttacaagaaattgttagaaaatgatagggaagttcccctaccatatatgtaatataaatatccaatataagaacgaaatagcatcacaagatatgtaccaactcctaaatagcagatgttcaacaagaaattgtggaaccatgtttgtatcactaacttatatgattttgccatatggaaaaccaaggaaaactctgccaaaactgtatttttccaagcatctacttgtttgagatttggctttacattttatctttttgtttgcttcccctatttctcttttgtgcgtatttttcttcccctaaaagctgttgtaaaattaagaagtacactttgtgtcatctttcttttgttgtaaattgtatttggaagatgtctaccttttaccaatattaataaacttggaaaaaggctgagctacttgggaacaaagtgttcagaaatgtacatctttgttgcagcaaactcagcagagcttcaacttctatatactggaacttgtggttgcttgcagcattggtatgctaacttttgcagtgaatatttgttgttgattacagatttatgtttttttgcagctaatgataaacagcaagaaggaaacgactccacctccgcagcaaaagatggagagattgcaaagttttgaggaggaacacaagaatgctctccagagagcaaagaccctggatgttcctcatgctgcggacctgtctgaagaggagattcaggaggaggatagcactgcaccaccctctgatactcatagcgaaacaaccacggaaacaaaatctggaggtagaacgagttgggacgaactgatggagaagcttttcaccagggatgaagatgggagacttgtcgtgaacaaggacgcgatggcgagggaaattgttgtcctgtaacgagtgccgagactgctctgtccgtggtagtttattctattagcgagctgtataaaagagtaagctgcggttgtgatatatttaaaactgtattcaacaacttatctatacccatatttatattc

SEQ ID NO: 36517 - DNA, 740 bp, Zea mays subsp. mexicana
  Clone ID: UC-ZMROTEOSINTE117B02_FLI
cggcttcatcactctttcttcttcttcttcttcacacaagcgtgctccttctgctcttgtgctaagtagctagctcacaacagaagaggacgagaggaagcaaggcggcggcggcggcagcaacaacatatacaccgccggccgtggcgccatgggcatcctggaccacatgtcgcatgtgtgcagcatcacggagacgaaggaggcgctcaagctcaggaagaagcgaccgctgcagacggtgaacatcaaggtgaagatggactgcgaaggttgcgagcgtcgcgtgaagagcgcggtgaagtcgatgcgcggcgtgacgagcgtgacggtgaacgcgaagcagagcaagtgcacggtgaccgggtacgtggagcccgccaaggtgctggagcgcgtcaaggccaccggcaagaacgccgagatgtggccctacgtgccctacacgctcaccacctacccctacgtcggcggcgcctacgacaagaaggctcccgcgggctttgtccgcggcgcgccgcaggccatggcagaccccagcgctccggaggtcaagtacatgtccatgttcagcgacgagaacgtcaacgcctgcacagtcatgtgatgcatgcatatgtatagtctctcgatcgtcgtatcatgtgaagtagtacgagctagctagtgcatatcgatcttcgtactgtatcatatcgatcgaaagaaccttaatagccaatacaagaggaatgtgaatt

SEQ ID NO: 36518 - DNA, 606 bp, Zea mays subsp. mexicana
  Clone ID: UC-ZMROTEOSINTE117B03_FLI
agcacatggcctacctgagggccgtgacaaaagagtccctccggatccataacgtgacgccgctcctggccccgcacctgtccatggatagctgcaccatcgatggctacacggtccccgccggggtgcaggtcctgatcaactcttgggccatcggcagggacacgcgctactggggcgacgacgctgaggagttcgtccctgagaggttcatggatggcggcagcgccgttcatgtcagcttcaaggggagtgacttcgagttcctgccattcgggtctggacgaaggatgtgcgccggggtgaatttcgcgatggccacggtagagctaatgttggcgaacctcgtgcatcgttttgactgggatttaccaccggggcaggagggtcgcgacattgatgtgtcgcaggtgttcggtctagtagtccgccggaaaaagaaacttctcttggttccaaaattacgtgtatactagcgcatccccctccccgcacccaagatatactgggctgttgcatatatatggatgtactgcaataaaggttgcgtatatgtaagcttacgacattacttatactgggtatataatgcaataatgttattag

SEQ ID NO: 36519 - DNA, 1347 bp, Zea mays subsp. mexicana
  Clone ID: UC-ZMROTEOSINTE117B06_FLI
ggaacactgcgaaatgcatgccccttgggaagaaaccaaaaaatctcagccatggtggcaagtagctgatgtcgatggtttggcttcccttgtcgctgaaagagcaatggaaaacattgtcaacaatgatctgccaagacccactcagacagtccgggttcatggacctcaagtgaagggccctgaaaacaaggatgattatgggatgtctgttgtttctgggggccaagagccagatcctgtacatgacactatggagtgcagctacagtgtttcaagcaccaccaatgacatgaattcttctgacgggggacgttggcagcaccacgaaagaaataatgtgtccggggatgcacggggttcttatagttccaccaacagtacaccgggcagcaagccaacatatcaggatgcttctgagagagccaagctgctagatgctctccggcactcgcaaacacgtgctagggaagccgagatagctgccaagaaagcgtatgacgagaaggaccatgtcatcaagctactgttccgtcaagcctcacacctcttcgcatgcaagcagtggttgaaaatgctgcagctggaaaacatatgccttcagctcaggttcaaagaacaccagatagcaaccatgttcccggaccttccatggatgttggtgaaggaaaaggtagcaccgtctcaagagcacaatgaaggggctaggaagaaaggcaaaaggccaaacaggaaaggtggcctctgcgatgccgttgcatttgctgttggtgttggtatcgttggtgctggattgcttcttggatggactcttgggtggctactgccctagctggaagttccatcgacttccatgaccgtaaaggtgacaggataaatgcctcctgtgcacactagattgaatggcaatacattgcatggcaataggtaagttccaagtgtgtgcttcatggagagagagatggggcagctttttggtattcttccatgatactctgttgatttggtgatgatagcttgatgccttatgttggttcatgcatatataggaaggatctggtgtacgtactgccagaaactggatacctaggttggtagtgtgggtgtggatgcgatggttgtctgtgtgctgtacataggggtcagtggtggtctggtggaaagatgaaatcagccgacttcaacaacacatgtgctagtactgtaaatctgtagcttttatttgcttaatgtagcccgaattgtcctaatccgcttgctgtaatgtgtggaacgtatttgcatgtcttgtttacttctggtggatatggacccagtatctatttatcattctgtggattcagtttc

SEQ ID NO: 36520 - DNA, 1263 bp, Zea mays subsp. mexicana
  Clone ID: UC-ZMROTEOSINTE117B09_FLI
gttaaactatgtcctgcatatagtagagactgtgagctgatattatgttttcagctaatcattaaggatgggaaatcttcatacaaattccatctctactgaccattcacttgctgcagcttttgtgatccttaagacggaacagataattgcttatttaaccacgttggcttctaacgtgtccattaggctttaagtttaacctgatgacatgccatatatttgggactttttagttgcccctatggcttatatgctgtgcctgtgggatgaacacgtcccaacattcacctcatttttttcactttgtcagctaatagccatacatgtttagctgattgttaagattgggaaatgtacgcttttcatactgtgttgtatatgctctgtttgcctgcttgaacatatcttgttttgagagtaaatacgttgccccgatggtggcaatggtgcctgtgggatgagcaggtctcgatgtttgccaccattttgctcagttgttgttattccataaaccatttgttggtcattcgtgacttggaaaaagttaagtgtatattttgtagccttctgttttcccagttctataccttgaatgtgatttcgtggtggctgatttgtttcttcgtgtttctctaaagttaagaggtgtttttctttaacgaagaggtgaatcacctcctagcccagtgtttttcgtgtttcttctatgcatcagcagcaagcttgtgcttgccttaaagctacagggggataataggctgaacttttagccttggtaatgttgtatgtttacacaaatatcctggcaggtgcacttgctgctgctgtgattctgatgctactcgacttagtggatttcaatgaagctgaaagatgttgctgccttgcagaatggtgtgatggtgtctaggcacgactcagtatgtattctaatagtgtgtttggttggacatacaaggaatgatggaagagggtggacacattttctataatgtttggatgagagtcatcggggagtgaggtgaacgccagggcaacttttagtggcggtgtggtaaaaaaatcgagcagactgtctctctgagcagactctctcgtctcatcctactttgacctcaaacgaaacacattctgactttgactagtgaagaaactctattgtcttggttagttagaagaaaagaatgtctgatgtgtttcatactcgcaccggagcagactgctctgtcaaaatgtttaatgtgtacaacttgttttctg

SEQ ID NO: 36521 - DNA, 778 bp, Zea mays subsp. mexicana
  Clone ID: UC-ZMROTEOSINTE117B10_FLI
aggattgcttctgagggtctgaagcacagagtctttgaggtttgcctagctgatcttcagggtgacgaggatcaagcttacaggaaaatcaggctccgtgctgaagatgtgcagggcaggaatgtgctcacaaacttttggggtatgaattttaccactgataaactgagatccctagtgaagaagtggcagacattaatcgaagcccatgttgatgtcaagacaaccgacaactacatgttgcgtttgttctgcatcggcttcaccaagaggcgcccaaaccaggtcaagaggacctgctatgctcaggcatcccagatccgtcagatccgccgtaagatggttgagattatgatcaaccaggcttctacatgtgacctgaaagaacttgtttcgaagttcattccagaagttattggtaaggagattgagaagtctacctccagcatcttcccacttcaaaacgtcttcatccgcaaggtgaagatactcaaggcccccaagttcgatcttgggaagctcatggaggttcacggcgactacaaagaggatgttggtgtgaagcttgagaggcctgtcgagggagatgaggctgggcaggaggttgctgctgccgagtagtttgtttgctagttctatatctaggcgagtctagacatgaggttgcttatgacgtgaacttatagagttgtcttggctacgtgttttcgtctggccctaagattttgtcttgaaacaagtttaaaattaagattatttgtaacaagtgtttaagatt

SEQ ID NO: 36522 - DNA, 638 bp, Zea mays subsp. mexicana
  Clone ID: UC-ZMROTEOSINTE117B12_FLI
cgtgtctcctagctctggccatggcagccatcgtcgtggcgccgtgcacggcccagaactcgccgcaggactacgtggacccacacaacgcggcgcgcgccgacgtgggcgtcgggccggtgtcctgggacgacaccgtggccgcgtacgcgcagagctacgcggcgcagcgccagggcgactgcaagctgatccactccggcgggccctacggcgagaacctcttctggggctccgccggcgccgactggtcggcgtccgacgccgtgggctcctgggtgtccgagaagcagtactacgaccacgacaccaacagctgcgcggaggggcaggtgtgcggccactacacgcaggtggtgtggcgcgactccaccgccatcggctgcgcccgcgtcgtctgcgacaacaacgccggcgtcttcatcatctgcagctacaacccgccgggcaacgtcgtcggcgagagcccctactagactgtcatgcatactacaattatatatatacgcttaatattaatttcagcatgcatgcatattataaatagtgttgtcaactctgtatatcattatattacgatgattatattgttgatgaacataataagtcaataaaaccatgcaggcgatttgtgagcc

SEQ ID NO: 36523 - DNA, 429 bp, Zea mays subsp. mexicana
  Clone ID: UC-ZMROTEOSINTE117C02_FLI
tcacgcgcgacggcttcgacttctggttcatgggcttcgtcaggtaccaggcgtccctgcaggagctggagaaggccgtcgcgcagtcgcagtcgcagtcgcggtcgcaatgacctgaggcgatccgccggccggcccggcgtttgttgtgctcctgtgtcgtctgcttcatctgtgttcatatgtagtagggtttcggttttcttgatgatggattgcttggcgtttttggcattggagcaagtccggtatacattgattatacaggagaacaaaaaatgggatattagattgattacgtgatcggtgatgctgagtaaatcttctacggcgccagcgtaaaagtgtctcggatgaggtttacatgtaacatgtgtcatgaaaaccacaaatgcttgtgcgacgaaatagattgtgttaactgaactc

SEQ ID NO: 36524 - DNA, 705 bp, Zea mays subsp. mexicana
  Clone ID: UC-ZMROTEOSINTE117C04_FLI
tggaacagcattaacatcactgatggatgttgagaggaggcacggcaagttcaagccagtgatcaagaaggctatggtggaacttgatgctgcacctttcaagaaatatgcatcgatgcgtgatgagtgggccctcaagaacagatacatcagccctggccccatccagttcagtggccctggaagtaatgactcgaaccatactttgatgctggaactcggtgctgcgctatagagatgcgtcctttactttgttcttacagtttttgggagtggagactggcactggagcagcctgcaggtctccatattgtgtgtgaaattgtttaataagaggtttgatgggagttttctgcgtagccgactggatgtggactgtggtagcaaaataagaactgggtttttagtttttttttgtatgatttacgcaccaactgaccggtcttgtagctccgattctgttccccctggctggctggttgcaatctcttgagaatgaacaaaatgaagtcgaaccatgagactgattcagttcgcttgcttccagtagcaggttattacacattgtcgtttctgaggtccagagatagtacgtgtcctactcttgaataatgtattcactctgttttaagttataagtcgagacttcactttacattatggaactagttgcatagtaaagcattgcaatctgaagctcacagt

SEQ ID NO: 36525 - DNA, 877 bp, Zea mays subsp. mexicana
  Clone ID: UC-ZMROTEOSINTE117C06_FLI
gggaggatgagtatgcaaggattgaggcagagggtggcaaggtcatacaatggaacggttatcgagttttcggtgttcttgcaatgtcgcgatcaattggtgacagatatctgaagccatggataattccagtcccagaggtaacaatagttccgcgggctaaggatgacgagtgccttattcttgccagcgacggcctctgggatgtaatgtcaaatgaagaggtatgtgaaatcgctcgcaagcggatacttctgtggcacaaaaagaacagcacaagctcatcatcagccccacgggttggtgattccgcagactcagccgctcaagcggctgctgaatgcttgtcaaagcttgctcttcagaaggggagcaaagacaacattactgtcgtggtagttgatctgaaagcacagcgcaagttcaagagcaaaacttaaccgtgacaagcgtagcaacaagttgctaagaacctatagattcggacagtcccaagttcggtcattttagttcgctgctttagtgcattgcttagcccagttccttatttttctcagttctttttaagccatgccaagggctgtattccccgtatacggtacagatcgcgaaatccctatcagggatggtttggtgatatcagggtttatatgttttcctgaccgtggtgactgtcctgttttcattcttctttcttcgctgccctgtattcattttgtcaagctggggcaggcatccaagtatttggcaatgtatatttgagcttgcaggatacaaaggaaacgaattgttatgaagggtacgtatcctgcctgcctgaatttgggaatctatcaactgcatcagctggtaatataagtatggactcgcaatctgg

SEQ ID NO: 36526 - DNA, 951 bp, Zea mays subsp. mexicana
  Clone ID: UC-ZMROTEOSINTE117C12_FLI
cgcctacgccctcgtctccgccgtcgcactgattcagctcgtcaggatccagcgccgggtgcccgagttcggatggaccacgcagaaggtcttccacctcatgaacttccttgtcaacggggtccgtgctctggtattcggcttccatgtccacgtcttcctcctccgcgcaaaagtatacaagttggtgttgctagatctccctggtctgttgtttttctccacctacaccttgctcgtgctcttctgggcagaaatataccatcaggctaggagtctcccaacagacaagctgaggcctgcatacattgccgttaacaccatcatatacgttgttcaggtttgcatatggatataccttgggataaatgataatgctgtggtcgagctagccagcaaaatattcatcgtagctgtctccttcgttgcgcttcttggcttttcagtatatggtggaaggttatttgtcttgctgagacgtttccctattgaatctaaggggcggcaaaagaagctttatgaggttgggactgtgacagcaatttgtgttacctgcttcctgataagatgtgttgtggttgcattatctgcgtttgatgccgatgtatctctcgaggttttggaccatccagtcctagatttcttctattatatgcttgcggagatactgccttctgcgctagttctcttcgtccttcggaagcttcctcccaagcgggtttcggcacaataccaccctattaactagagagttttgttttgttttttatgatgttacatgctaagaactccggataatctgaaactactggaaacctacagccggctgtagttggatgcttttgcttttgcttgtgctgttatgtttatggaagcatcagtgttggcgatgaatataatgacgatcattctatatggggaagtggtgctaatgaatgaatactccttttt

SEQ ID NO: 36527 - DNA, 1136 bp, Zea mays subsp. mexicana
  Clone ID: UC-ZMROTEOSINTE117D03_FLI
gcgccgtcatgcttgcggcgtcggcgcggcggctgtccgccgccgcctcgttttcctcttcttccatgcgctccagccagctcgccgccgtactgaaccaacagaggtggatgcacgacaggaacaagaaggcgatggagctggtggccaagggatggagtgcgctccaggaggtcgaccgcgtcatcgactacgccgatctcaacgacaagcgcctcatcccgcttctaaggggcgctaaggaaaactttgagctggctttggagattgacaatggtaatacacatgcgaggtattggctgggaaaaatgcatttcaagtatcatgttcctggtgcttgcaaggcagttggtgctgctttgttggttgaagctgcaaatatgggtgatccagatgcacagtatgaacttggatgtcgactaagaattgagaatgactatgttcagtcggatcaacaggctttccattacattgagcaagctgttgatcagctgcaccctggtgctttatatcttctcggtgctgtatatctaactggggactgtgttaagagagatatggcttccgcgttgtggtgttttcatagagcttcagaaaagggacatgctggtgcagctatcgcatatggatccttgcttcttaaaggtgctgaaatacctgaagttattacaaggttcaactcaggcaagagtccatcaactgggaaaatgcggaaaaggacccaacagcaggatccagtaaagctagcgaaagaacagtttcaaattgcagctgaggcaggctgtgatctcggtctgcggtggttgaagaggcttgaagcttatgaaaaccaagaagaaaagctaaagcaggttcagcaatgatatccactgaaagaatcccattgcatttgtcgcatacaagtatggtatatggcagcatggttgctgcacataggtataccaataatttcctttcctgccttcattatgttggaggctattcgatcctcggatgttcgggtcaactttgcaggaagatatactgaaatttggatatttagactaacttcttggattataggcgattggatgttcactttgtacgatgtattagcgttgacattactggaagccctaattgtgagaagtagaaac

SEQ ID NO: 36528 - DNA, 456 bp, Zea mays subsp. mexicana
  Clone ID: UC-ZMROTEOSINTE117D04_FLI
cttggccatggtgcatgtcaatcgccattgtttctttctttccttccccctctctttattctttctttcttgctgtccttttgagcgattgagtctgtgtatattgcatttgcatgatctgcacaccctccccccacccaccccagaaaaaggaaacaactgcagtgagagtgagctactggtgaacagaacagaacagaagcgcatgcatccatggtgtgtccgtctgcaaaataattaagtggtggcctcgcaaccgaaccgacgaaggatttttgccataaccatatatatgatatgttgttgtatgtatagtagtgcagcagtgtacatgaatcaaacaaagttctcaacgtacgtatttccttgtgctcccgtacgtatgtaatgtaaatgatgaatggtactatatatgaatctatgatggatggtccatccatcccgcattgtgcatgc

SEQ ID NO: 36529 - DNA, 1592 bp, Zea mays subsp. mexicana
  Clone ID: UC-ZMROTEOSINTE117D05_FLI
gtttgtcaagcttattgacaattttgatgctcaatatcaagttgtggccaatgatggtgatgaatttacatttttgaccaataaaagtgcccctaagaataagctggtaagggtaaatataaaaatccagagctgtggactgatgttctctcagagcatgaaaaagatgtgctcgaatcagccgacgccgttaacaataaccaacttttggtgaattatatgtcagatgttaagcatattctgcagataagagaccttagaactggaaactttattcatcagttgcctttggagatcggttctgtttcagagatctcgtgcagacgagaagacaaggaagtatttattggcttcacaagctttctttctccaggcattattttcaggtgtaacttagcatctacaatccctgaaatgaagatgtttcgagaaatttcagttcctggatttgatcgcacaagttttcaagttaagcaggtttttgttcctagcaaggatggaaccaaaattcccatgttcataatgtcgaagaaagatatcgatcttaatggatcgcatccaactttgctatatggttatggaggattcaacataagcataacaccttcatttagtgttggtcgcgttgtgctatgcaagaacatgggctttgttgtctgtgtagcaaacattcggggtggtggagagtacggggaggagtggcacaaagctggagcacttgcaatgaaacaaaattgttttgatgactttgctgcctgtgctgaattcctcatttctaatggttacaccagttccagacgtttatgtattgaaggcggaagcaatggtggtcttctggttgctgcttccattaatcagaggcctgatctctttggatgtgctctcgctcatgttggcgtcatggacatgctccgttttcacaagtttacaattggtcatgcatggactacagactatggttgttcagataaggaagaagagttccagtggctcattaaatattctccccttcataatgtacggagaccttgggagcaaagctctggtaataactgccagtatccagcaaccatgttgttgacagctgatcatgacgatcgtgttgtgccattgcattcactgaagttattagcaactttgcagcatgtcctgtgtaccagcactgaggacagcccgcagacgaatccaataattggtcgcattgatcggaagtcagggcatggagctggcaggccaactcaaaaaatgattgacgaagctgcagacagatatagctttatggcaaaaatgttaggggcttcgtggactgaatagtgaattttgtccagcttagtgtggagatggtgagcaagattactctatgcagtcaaagtaaagtggctgtaaaagttatattgcttatgttttgctcttgcttggatgatcatccaccaaatagtatagtgtttatgcttcggtttgagataagggttcagggagcattgtcatgcttggcgttggtgcaccatttctttcatatatatcttttgattgttaaattttatacgttactacttcattgattctaaattataagatgttttggttttttc

SEQ ID NO: 36530 - DNA, 963 bp, Zea mays subsp. mexicana
  Clone ID: UC-ZMROTEOSINTE117E11_FLI
cagggttgaagggctattgcctgaaaaggcacttgataacctcagctataggtttcaaagtcttgtgcctggtgatgcagaacacattcaagtatatggtcctgatgcacttggatctcatcctcgtgattctcagaatatgtatcatcttctacagggtaggcctcctatgatggcacctcaccctatgatggatcacattgttaataggaaacagccagctccatttgatatggcacagtcgatacaccatgattctcaccgttctttcccatctaatgtgaatcatatgcaacataatcttcatgggccaggggtccctcacttggaccctgctggacatattatgcgacaacacatgtccatgcctggaagatttcctccagaaggcttgccaagaggtgtccctccatctcagcctgtgcatcacatggctggttatagacctgaaatgggtaatgtaaataatttccatatgcaccctcgccagcccaactatggagaatttggattgatgatgccaggcccatcaggtccagaggtgaggggcaatcatccagaggcgttcgaaaggttgatccagatggagatgtcagccagatcgaagcaacagcaggtgcaccaccctgcaatggccgctggccgtgtgcctagtgggatgtacgggcacgagcttgatgcgaagttgagatacagatgatggatgcctggatgcttcactccgtacagaggacctggagggttgtagcatgtacatctgaacgggtgatggaacggagtgggtctaagatctgtaggagcggaagtctaccgggaaaaggggttatggtgtgctgaatggaagacgtggcgtcgacgtcttagcagccacatgtgtaatgacgttttctgtctactgtttctgacgactatgcagtttccattttgtataagctctgttatgcaaaaggaaaaaaaaagaag

SEQ ID NO: 36531 - DNA, 765 bp, Zea mays subsp. mexicana
  Clone ID: UC-ZMROTEOSINTE117F07_FLI
cattttccaggaggtctatgaagctgactggaagtccaaatttgaggctgctggaatatggtatgagcatcgtcttattgatgacatggttgcgtacgcgcttaagagcgaaggaggctatgtgtgggcttgcaagaactacgatggagatgtgcagagtgatttcttagctcaaggttttgggtctttgggtttgatgacatcagtgttggtgtgccctgatggaaaaaccatcgaagctgaagctgcccatggcacggttacccgtcatttccgtgtccaccagaaaggaggcgaaaccagcacgaacagcattgcttcgatctttgcatggacaagaggacttgcccacagggcaaagctcgacgacaacgctagactactcgacttcgctctcaaactcgaggctgcttgcgttgggaccgtggagtccgggaagatgactaaagatctcgcgattcttgtccatggatcttccagcgtcacgagaagccattacctgaacaccgaggagttcatcgacgcagtcgctactgagctccgatcaagactgggagccaactgagcctacaagaaactttgcatggcgactttgaatgcttcgtcaccgtcaccgatctgctagtcgtcttttctgttatgaagaagtgaatgtgcgtcaccgcagtttcgatgcaagctaattatagatgttgtgtcacgtgagcgctcaaaataaaggatacacatgattaaattgtttttatgtcagtactaagctcagtc

SEQ ID NO: 36532 - DNA, 1431 bp, Zea mays subsp. mexicana
  Clone ID: UC-ZMROTEOSINTE117G10_FLI
gtcgagaaagattgctgtgtttctattgatcaatacagcctacatgtttgtggaatttggctgtgggtttgtgagtgatagtcttgggctgatctctgatgcttgccatatgttgtttgattgtgctgcactggcaattggtctctatgcgtcctacattgcgagattgcctgcaaatgggatgtacaactttggaaggggcaggtttgaggttctgtcagggtatgtcaatgcagtgttcttggttcttgttggtgtgctgattgtgttggagtcgtttgagaggattcttgagcctagggaaatatcaactagtagtcttttgtcagtttcgataggtggacttgttgtaaacataatcggattggtgttctttcatgaggagcaccaccatgctcatggtggtacctgttctcactcacattctcattcacatcatggtcatgaacatcatcaacaccatggccatgaagagcacaaacatcataatcatgatcatcacggtgcgaataatgtgaaggcatgttgtgatcatcatggagatgacaaccatcgccatgatcaccatgggaatagtaaaagtgagggcattcataacaatatcatggataacacctgcaaggagaagcatagccatggccatgagcatcatcactatgaacattcggaacattgccatcagagcagagagcattctcatcaaaattgcaacaatattactgttgagcaacagcttcttgacattcctcttagcaatatatcttctcatgacacagaaagtcactcttcaaaagaaggattgagaccatcagattctggaaacagtaataagccaggacaccggcaccacattgatcacaacatggaaggaatcttcttgcatgtcctagctgacacaatgggaagcgttggtgttgtaatatcgaccttactgatcaagtacaagggatggcttatagctgatccgatatgctcagtattcatttctgtaatgatcgtatcttctgttattccattgttaaggaattctgctgaaattctgttgcagagagtcccaagaaatcatgaaaaggatttggctgtagcattggatgatgttatgaagatcgaggacgtccttggagtcaacaatgttcatgtatggaacttaactaacactgacactgtaggtacttttcagttacatgtatcagcagaagctgacaagtcttccataagaaataaagcttcacggatatttcaagaagctggggttcaagatctgactatcgagattgagtgtgttaaaaggtagcaagagttgttgaatgttgatagtatgataggatttgacatagagaagttttttgacactccatacaggagccatccgtttcaaatgtatcatggaagtatttttgtttcatctaaatgcaagtatgcagcttgtcg

SEQ ID NO: 36533 - DNA, 1868 bp, Zea mays subsp. mexicana
  Clone ID: UC-ZMROTEOSINTE118A11_FLI
cgaaaatgagcagaggaaggaggcagccaccaaacaaaagattgaacatctccgtgcacaatgtgcagtattgactgataatgacatatcacattttcagaaggttgcagataagaaaatgttagagttggaagcttcacgagatctttcaaagatatggcttcacactgacatggatgccttttatgctgctgttgagacattggagaacccatccttgaagggaaaacccttggcggttggtagcatgtctatgatagctactgccagttatgaggcacgcaagtttggagtgcgtgcagcgatgcctggttttattggatgcaaactatgtcctgacttggtttttgtcccaccaaactttgagagatatactcattatagcgagctgacaagaaaagttttccagaggtatgatcccaacttcattgcaacaagtctagatgaagcatacctcaacataaccaatgtttgcattgagagaggcattacaggcgaggaggttgctactgaacttaggtctgccattcaccaggaaactggtctaacatgtagtgctggggttgctccaaaccgtatgattgcgaagataggtggcataggtaaggtaacagaacagatgttacatcaggttcttggaatcagtacatgtcaggagatgctgcaaaaggctgcttttttatgtgctcttttttcggaaagctcagctgatttctttctgtcggttggtctcgggttaggaggtacagaaaccccagaacaaaggcaaaggaaaagtatcagttgcgagcgaactttcacagcaacaaatgattcttctttgcttttcaaaaaaattagctagccttgcagaaaatgtatctgatgatttgcaaaaggagggtttcaagggaaaaacactaacactcaaactgaagactgcagattttgaggttcggacaagggcagtaacaacacggaactacatcgactccaaggaagatattctggtctatgctacaaagttgattaaagctgaaatgcctatttctttgagattgatggggttgcggatgtctcagctacatgatgagaaggatgatccatctacttcaacacaaaagacactagatatattctttcgttcatcaaactgtaactcaaatggcaatggaaccaatgttcagagaaccactaattccccagggcaggataatgattctattagtctcacagccaaggaagagtacttggcacttgatgctggaacaagtgtttccacaggccaacaggagttcttcctacatgatgagatctgttttattcccgaacaacaacggagtttagacaacgatattaaagaggctgtcctaagcgacccgttaggtggaacaaagtcagatgatgtgtcttccagtgcaaaggttacgcccgctaagaagttggatgaacctgatcccttgatcagcccgaaggctgtgtcttcatcaagtaaacctgaccagcagtcatggattgatggctacatttgttccatctgtggatttgaactgcctccgggcttcgaggaggagaggctggaacattcagattttcacctggctgaaacactccagcaggaagaagcagtggacggcacaagactcatctcaaacgagagctggctggctgaaagaacacgctctactgcacccacgcccaagaagaaactcaagtcttctaaagaaggaaagcatattcctattgactctttcttcacaaagtgtaataagagcccgtaaccgtaaggtaggacttgccggcaactctgtaactatgggcatgctagccaagtgttgtacgtgttaactttattcttgatgagagcaatatatgtaaatatcaccctc

SEQ ID NO: 36534 - DNA, 2321 bp, Zea mays subsp. mexicana
  Clone ID: UC-ZMROTEOSINTE118B09_FLI
ttattaccctcagtgcatcagcaaacaaactttccaagctcaaggaacgagctgatgagtacacggcactcataatggaagaacttgaccgtgacagccttggatacattgagcttgaggatctgaaggcacttttgctgcaatcaccttctcaagttgttgcaagatcaacaacgcatagctcgaaacttagcaaagctcttagcatgaagcttgcatcaaacaaggacacaggtccattttaccactactggcaagagttcatgtacttccttgaggagaactggaagcgcatttgggttatgactctctggctctcaatctgcattggcctctttatttggaagttcatccaataccgtaatcgagcagtatttcacatcatgggttattgtgtgaccactgcaaaaggtgctgcagagaccctcaaattcaatatggccctggttctttttcctgtttgccgaaatacaatcacatggattcgatcaaagacaaagatcggtgctgttgtgcccttcaatgacaacataaacttccataaggtaatagcagcaggtgttgcagttggtgttgttttgcatgcaggtgctcacctgacatgtgattttcctctgctgctgcatgcaagtgatgctgcctatgaaccaatgaagcctttctttggagacaaaaggccaccaaattactggtggtttgtaaagggaactgaagggtggacaggtgtggtcatggttgtacttatgactatagctttcgtattggcccagccatggtttcggcgtaataagctcaaggattctaatcccctcaagaaaatgactggcttcaatgccttttggtttactcaccacttatttgttattgtgtatgcactgctcattgtccatgggacctgtttatatctaagcaggaaatggtacaagaaaacgacttggatgtaccttgctgtccctgtgctcttgtatgtaagtgagcgcattcttcggctatttaggagccatgatgctgttaggattcagaaggttgcagtatatccagggaatgttttggctctctatatgtccaagccacctggattcaggtatcggagtgggcagtatatcttcataaaatgcagtgctgtctctccatacgaatggcacccattttcgattacatcagcacccggagatgattatcttagtgtccacattcgcacaaggggtgattggacttcacgtcttaggactgtcttctctgaggcatgccgccctccatctgatggagaaagtggactccttagagctgacccttccaaggggatcaccgagaccaacgcgaggttcccgaaactcttgattgatggaccatacggtgctccagcgcaagactatcaggaatatgatgtgctcctgctcattggactgggcattggagccacaccattgattagcattgtgaaggatgtacttaaccacatccagcttggaggatctgttgcaggcacggagcctgagggcagtggcaaggccaagaagaggccattcatgacaaagagggcctacttctactgggtgaccagggaagaggggtcctttgaatggttccgaggggtcatgaatgaggtggctgagaaggacaaggatggagtcattgaactccacaaccactgctcgagtgtgcaccaggaaggggatgtacgttctgccctcattgtcatgctccaggagctccagcacgcgaagaagggagtcgacatcttgtctggaactagtgtcaagacgcattttgcacggccgaattggcgaagcgtcttcaaacatgttgcagtgaaccacgagaaccaacgcatcggagttttctactgtggtgagcccgtccttgtgccacagctacggcagctgtcagcggacttcacccacaagacaaatactaagttcgagttccacaaggagaacttctaatggaggaactggagaaaagctctaggcgtggccctctaatggtttcagaatatgtgaattacgatggttgtaacatatatacgagtagaagaataagacgatgggagttgttttgttgtacatgtcaagagtagatgaattgtctttgcaagcatacaaccttaaaagttgtaacacatgtcaactggttttgacaggtctgtttgttttgtctgctcctgttggagtgttgggcatacactgcttctgtcttttaaagcaccaccactacattgaaagccctgaggaaggtattttacggcacaaatgagtcaggttcacttgtgaattgtgatcctcaactcctgatgctgagtaactggttgtgccttccgt

SEQ ID NO: 36535 - DNA, 328 bp, Zea mays subsp. mexicana
  Clone ID: UC-ZMROTEOSINTE118G09_FLI
ggcttcgcggaatctgcatgagtgtggagagcactctcatctttataaagacgataccctatgtattagggatgtgtagtttattgcctatccactacatgccaacagtacgctgcaaataaatcggtggccaaaattgctgaaaccagaaacgtgaacagtactgctttctttgtttctggagaagagcaaatggatgcttcaagacatgcatgtccgatgtgtattgagaaatagagcgatgagtgctgctcgatcgtcttgaaagttgtttgttcagggtagcacagcttatcacttataaaataatttgtggatcgccttttat

SEQ ID NO: 36536 - DNA, 1668 bp, Zea mays subsp. mexicana
  Clone ID: UC-ZMROTEOSINTE119A03_FLI
ctttgggttgctcaggcgctgttgcgcaagggatctgtgaagaccgtgagtaaacgaattcttatattcaccaatgaagatgatccttttggtactattacaggagcagtgaaaactgatatgattaggacaacacttcaacgtgcaaaggatgcacaagatcttggcctgtctattgaacttcttccactgagcccgcctgatgaccagttcaacatgtccctgttttatgcagatttgattggtctggatggagatgagatgaccgaatatttgccatctgctggtgataagctagaggatatgactaatcaactgagaaaacggataatgaagaagcgcagagtcaaaactctttcatttgcgattaccaatgatgtgtgcatagaagtcaatacatatgcgctggtccgtcctactactacagggacaatcacatggcttgattcactaagtaacctcccattaaaggttgagaggtctttcatatgcaatgatactggggctctacttcaggatgcacagacacgtttccagatgtacaatgacacaattgtcaaattttctgtacgtgaactctctgaggttaaaagggttgcaagccatcatcttcgccttataggtttcaagccattggattgcttgaaagattaccataacttaagaccatcgacatttatttatccgagtgatgagcgtatatttggaagcacctgtgttttcgttgctttacatagctcaatgttacgtcttggaaggtttgcacttgcattttatgggaatccaactcgaccacaactcatagcccttgttgctcaagaagaggttacttcgtctggtcgtcagtttgaaccgcctggcatgcacatgatctatcttccatactccgatgatattagatatcctgaggaagttcatgtgacttctgatgatgcaccgcgtgcaacagatgaacaaatcaagaaagcttcgaatatattcaaacgtattgatctgataaatttctctgcatgccaatttgctaacccagctttgcaaagacactatgggatcttggaggccttagctttaggcgaagatgagatgcctgatataaaggatgagaccctgcctgacgaagaaggcttgtctaagccaggggtagccaatgctattgaggaattcaagacttcagtctatggtgaaaattatgaccaagaggaggcagaagcggcagcagggaaagcttcccgtggtaatgcttcaaaaaagcggaaggaggtcactgatgcagctgcgcagataagtgctgcttatgattgggcagaacttgcagacaatggaaaactgaaggaaatgaccacggtggaattgagatcctacctgaccgcgcatgatctcccggtttctggtaagaaagatgtacttatcagcaggatcttgactcacctgggtaagtgaagccgggtatccgaactgttagtttcctgagacccgactgacatctgtagtgctgtctcacggatccttgtggaccgtaatcctcccccgtgcaggctacgtgccgatcttttgtatagcgacaggacagcaccagttgccaatgtaactttgtgttaagtttcgtcttgtggtatcatctgcttgtcattgtcaacatgaaacataatgtaattcggatattaaagc

SEQ ID NO: 36537 - DNA, 911 bp, Zea mays subsp. mexicana
  Clone ID: UC-ZMROTEOSINTE119B07_FLI
caacaatatgatgagaaaaatatacgacgaagagtttatgatgctttgaatgttctgatggctatggacattatatctaaagataaaaaggagatccagtggaagggcttgccgcgtactagtataagtgacattgaagaaatgaagacggagcttgtgggactgaaaggtaggattgaaaagaaaagtgcttacctacaggagctacaagaccaatatgtaggtctgcaaaacctgattcaacgaaatgagcaatcatatggttcaggaaacacgccttctggtggagtggctttgccatttatcctagttcagacccgacctcatgctactgtggaagttgaaatatcagaagatatgcagctggtgcattttgacttcaatagcaccccattcgagctgcatgacgactcatacgtcctaaaagaaatgcgattctgtggaagagaacaacatgacagcactcaagagtcgatatcaaatggaggtgagagctcaagcgtgtcaaatatttattggcaacacgtacagcatgtggaaaggccaaacaatggcacaggtaggttaccgagctcaccgcctattccagggatcttgaaagggcgtgcgaagcacgagcactaacgctagggtgttggttcactttccttttcgtctgagcagttggttttattgcatttctccgttgtgtaaagggccctgtaaattattaggcaagcgggagcgtagcttgatctaatttagctctgcaccagattggtagaacgacgggtgctctaagtagttgtgtaactataactatccttgaatcggtttctttagtatggttgagagaagggttgacatgtaattttgtagagccttgtaaaattaaaattgttgatttctatcagggtgaaatttctgggcac

SEQ ID NO: 36538 - DNA, 1106 bp, Zea mays subsp. mexicana
  Clone ID: UC-ZMROTEOSINTE119B10_FLI
aacttacaaggtcagaatttgttgaagcccaagaggctttagctcagatgaaaaactggtttactcgcttccccacaattcttcaaggttgcgaaagtatcattgaaaatttaaggggacaatatgcacattctgttggctgcttcgatgaagcagctttccactttcttgaagcaaaaaagctgacagagagtaaatcaatgcaatcgatgtgtgaaacctatgcagctgtgtcatatatttgtaagggtgatgcagagtcgtcttcacaggcactagaactggttggtcctgcctatagaacaatggactcatttgttggtgtgcgagagaaaacctgtatcatttttgtttatggactattacttatgagacagcataatccgcaggaagcacggaaccgccttgcaagtggtttgaaaatagcgcaccaacagttgggtaacatccagttagtttctcagtatttgacaatactgggcacattggcgcttcagctacatgacgcagcacaggctaaagagatcctgaagtcttcgttgaccttagctaagacgctatttgatattccaacccaaatctggatcttgtcagtatttacagagttatatcgtgaactggaagagaaggaaaatgaaatggagaactctgagtacgaaggaaagaaggaagacgatctgcagagaagactttctgaagcttattctcattcttttcaccatgagctggtggaaaaatcaagaatccagccgctgcacatgtcaagtaagcagccagagatggctgttccatcagctaatggtgatcttgacatcccagaatcagtggggctttccgctccccagccattcctcaaaagacttgttgaggccgagccgatgaggcgcagtaccaggaggcggcggtagtaatgaaactagtactgtaattaatagcgtagtgaatttgttggttaagtgttgttatgacttgtaacttttagcagtttaggtttttattttcttttgtttgttgtgttgattatgtgtatcttggtttagaatttatagatttggagaactgttggattgacaacattctgagtggtaaaataccaattattccac

SEQ ID NO: 36539 - DNA, 1127 bp, Zea mays subsp. mexicana
  Clone ID: UC-ZMROTEOSINTE119C09_FLI
ctacgaccgcgcagagcaggccctcccggcgcgggacgaggtccgcaccctcttcatcgctggcctccccgccgacgccaagccgcgcgaagtctacaacctcttccgcgatttccccggatacgtctcctcccacctccgcacgggcaaatcctctcaggcgtatgcgtttgctgtgtttgcagatcaacagtctgcactagctgccttgagtgccacaaatggaatggtatttgatcttgagaaaaattgttctcttcatgtagatctcgcaaaatccaattccagatcaaagcgcttgagatcagatgatacttcaccttattctcctgaaaaaagaaacaggaaaccaaggggatttcctgattcaggtgctggaagcaatatttacatatctggaatgggtagtacttcacacagcttgagtggttatccttctgcacaaagttacacaagccttgagtctagtacttctctcagcaaggacccatccacatttgcccctcaaaataatcctccatgccctactctttttgttgcgaacctggctccagcttgttcagagcaagagctgatagatgttttctcaagttgtgcgggatttgtgaaactcaagatgcaaaacaagcttggagctccagttgcatttgttgatttcaaggatgcaatcagttcaactgaagccataaatcgtctccaaggagttatcctgtactcatcatctggcgagggaatgcgtttagaatatgcaaaatcacggatgggccttcggaagcgtgataagcacccctaagtgcagctgaaagacgacacgacagttgtattttcattcagcacaagcggcagctgagcgtgctcaatgatgtctaatagcagacgacctgtcctgacacctgagtccaatgtcatcttcatgcagcgaacgttttgctcatgagttaggctatgaggtccttcagctgcgtaacattatgttacttggtctggttgtatcacttattattacatgtgcacctcttttttccctccttcggaccttgcctcctagtcatcttcagattttaagctaggattatcctttatttacagttgagttattattagaatctattgtgcctgaaaggatc

SEQ ID NO: 36540 - DNA, 1175 bp, Zea mays subsp. mexicana
  Clone ID: uC-zmroteosinte119c10_FLI
agttggatgcattatacagacataaaatacagaacatgccacaccttgcgttgtccgagaagaaccacagtgccacagcatggttatactcatacagtgcacaatagatggacacaggaagcaacatggggatccatacaacataaaacctcaaaaccttagacttatcctttcagtggacacaggaagcatgcctggatggcctgtgcaccctcacctttggtctcttcttgcgtgccagcctccgctccagcaccttgaccttctcacttaggtccgtgatgacccccatctgatcgttgccggacgcgagaagcttttgcagaagctctttcagcttctggttctcttctgccagcgtcttctcgtcgctggccttcggatcatcaggagctggggaggcagaagaagccttgttctctgtctgcacagagaggtctttcagggaagcttcgtcttcagcaggatttgcacctgctgctgtaagtgtcggagcatccttcggcatctcgttgcatttgtccatctcagacaccggcacaccagaatcttcagcataattttctccttctgtgcctgctagagcggccttctgagtcttagtgcattcatctgtctcagagacatctgaatggatgttttctttccgagcatcagtttggctctctggtgacaccatctcaggcccctcatagactgcgatgccaccatcctgtggacatgataattcacagctacctgaaccagggaagactgttgtatcgtctgcctcttctccgaggcttgggtgactcttctcaatgtcagattccttcctcgatgcctcacaaagaggatcctcgcaatttgcagaacctcctgttaccttgtcaacaacaatagttacagttttctcatccacatgtgcttcctcatccttgccagaaacaccacattgcattttatcgtcggattcatccaagacggacagttctgggacagagacagactccggtcttggttccagcaaggtaggttgatcattcttttctacatcagcagaagtacccagttctaattcatcatccgttgaagcctctattgttctatctggtacttcgccagaatctttcatggaatccacatcctgtgcctgcaagctgatatctctggcttcttgttggtcttctgtgtta

SEQ ID NO: 36541 - DNA, 854 bp, Zea mays subsp. mexicana
  Clone ID: UC-ZMROTEOSINTE119C11_FLI
gttcaggtttacagatgttggcaaacttcctccacctgtgctgcagtttgttgaagtcaagtttgggtatacaccagataatctcatatacaagagtcttgactttggagttgatcttgactctagaatcgcattggttggtcccaatggtgcagggaagagcactcttctgaagcttatgactggtgaccttgctccattagatggcatggttcggcgccacaatcacctgcgcattgcacagtaccatcagcatcttgcggacaagctggatctggacatgccggctctggcttacatgatgaaggaataccctgggaccgaagaagagaagatgcgagctgctgttggcaggtttggcctatcaggaaaggcgcaggtgatgccaatgaggaatctttctgatgggcaaaggagccgtgtcatctttgcatggttggcatataggcagccgcaactgctactgctcgatgagccgacaaatcatttggacattgagaccattgactccctggcggaggcactgaatgagtgggatggtggtttggtcttggtgagccatgatttcaggctgatcaaccaggttgctcaagagatttgggtgtgtgagaatcaggcggtgacaaggtgggaaggtgatatcatggatttcaaggcacacttgaagagcaaggctggtttatctgattagagggctttttccagcaaccatgagctttttaactctgtatcacgaagtcccagttttccaatagcgaactatcagagttactttattgtatcggatttcttttgacttgcattgcaacctgattaccttatactacctggaatatttatttatatatcttttg

SEQ ID NO: 36542 - DNA, 754 bp, Zea mays subsp. mexicana
  Clone ID: UC-ZMROTEOSINTE119D03_FLI
aaacaacccggatctggatctgacgcgtggtttccgtagtttaatcggacgtagtctgggtgactacgttctggtggtttaccatgatccatccctatagccgctagactatgctagtctgctttaatttccatctgcaattttcttctgttcatcaatcatcagtggactggagtggagtgtctgtggtggtgtcagggaggcaggcggcttggattttgcctgtggggttgtagggcggtcatgttgatgcagccctgtcctgggtcacgggggaaaccatgccaggctggactgaaccgcagagagattaattgatttgactgcctttctgctcaattcaattgtaatcaatgcacatgttgcttaatttcacatttctgctcaattcaattcaattggaaaggctactagtttttcaggccaggcagttttccgagaagtttaagtgttcatggaatcatcacggcttcatttgatcgtaccgactcgatcaaacgacgttgcacgcgttgtgctgtgctttgtaacaaaaagtaaatctgtatgatgctctcgatcttctctagcacacgctcgatggctatgcttctgtctgtgtccaactgtccatgtctgtatatggatgggaaatgtaacaggtgggttgttttgctgtgaacaactttaccttgtctgaaatggtgtctgtactgtattactttcctgatgaacgaatataaccatgtgagaggggtggtgatgttagcagcag

SEQ ID NO: 36543 - DNA, 635 bp, Zea mays subsp. mexicana
  Clone ID: UC-ZMROTEOSINTE119D06_FLI
ccagcgtccgcttagatccctagtaaagaagtggcagacattgattgaagcccatgttgatgtcaagacaaccgacaactacatgctgcgtttgttctgcattggttttaccaagaggcgcccaaaccaggtcaagagaacctgctatgctcaggcatcccagattcggcagattcgccgcaagatggttgagattatgatcaaccaggcttctacatgtgaccttaaagaacttgtttctaagttcattccggaagttattggcaaagagattgagaagtctacctccagcatcttcccacttcaaaacgtcttcatccgcaaggtgaagatactcaaggcccccaagtttgatctcgggaagttgatggaggttcatggcgactacaaagaggacgttggtgtgaagcttgagaggcctgtcgagggtgatgaggctatgcaggaggttgctgctgccgagtagtttatttgctacttctttatctagacgaatctggacaggaggtcccttatgacgcgaacttcataaaattgtctggcgacatgttttcttctgtccctgccctaaactctaaacccaaaggttattcgtaacaagtgttttaagattatttttgtttatgtttgggttg

SEQ ID NO: 36544 - DNA, 1630 bp, Zea mays subsp. mexicana
  Clone ID: UC-ZMROTEOSINTE119E07_FLI
gttggggccatgactccatgcatgaggctttatgcatatctaggcaaagaactcatggttttccttaaacaagatgaaaatcatccatacaagaaatggattaacacatatgcatccagtgattttgaggacaccacactccaaatagaagaattgctagacaaactaagtgtctcattaactggtgaggaacttgagattattggcaagctctaccagcaagctatgaaactggaagtggagttcttttcttctcagcttatagaccaacctgttgtagctccactttcaagatactgtgatccaaaatataaactcttgatcttttctgattttgatttgacgtgcactattgttgattcatctgccattttggcggagattgcaattttgtcattccaaaaggcaaatcaaagtgggattgataataacctcgaccgtgcaaaatcgggagacctgagaagttcgtggaacatgctctctaagcaatacatggaagagtatgagaaatgcatggaaagactacttcctccagaagaatcgaagtcactagattatgataaactgtataaaggcctggaggtgctagctgagtttgagaagcttgcaaattctagggttgtcgactctggtgtgctgaggggaatgaatttggaagacatcaggaaagctggtgagcgtcttattcttcaaggtggctgtaaaaatttctttcagaagattgtaaaaacaagggagaacctcaatttggatgtccatattctttcctattgctggtgtgcagaacttataagatctgccttctcatcagccggttgtctagatggtttgaacatacattcgaatgagtttgcctttgaggattctgtttcaactggtgagattgacagaaagatgcagtctccgctagacaaagttgaaaagttcaagagcatcagaagtgacgtggacagtacagtgccattcctatctgtttatattggagactcggttggagatttgctctgcttattggaggctgatattggtatagtcattgggtcaaccacaagtttgcgtagggtgggcaaacagtttggtgtttcgtttgtcccattgttccctggtctagtagagaagcagaggcaactggcggaggaagatgcatccgtattcaaggcacggtctggagtcctctatacggtttctagctggtcagaaatacacgccttcgtactgggaagtgatttcagctgatggatgtgctgcttcttttcttccatttttttttccgcttgagaagcaaaattgccggccgatgctgatgcacatgatacgtgaatcctcaatgtggtcattttatgaaagccacatgtcaattctggctaccagtatgtatgaatgaataccgataccagtttgtggtgtggaatgggttgagtttgtacccttgaattgtgatcaatgtttcattgattcgtctgtccttttttccattcgggactaatttctgggtggttggtggcattatactgcaccaccaacaacagtataaacatagagtggtatatatcccaagtccaagtgtaacgacaactgcataaatgtagagatgtttgtttttaattggcaataaatgaaatgtgatgag

SEQ ID NO: 36545 - DNA, 1147 bp, Zea mays subsp. mexicana
  Clone ID: UC-ZMROTEOSINTE119E09_FLI
gcttggccatgcctttaaatatagatattgatctgttcaagctggatattgatgagctgatagctgattattccaaggagaactgtacatcactctttgaattcaaacgagtatggatgggcaagaaattttcttatatctatgaaggcagacctaagacaaactcaggtttattcatgcagtccctctttctgcattgtattggtcatttgacttctcaaagttcactgcaccaaagattggctgggctatactgcctttactgtctgtatgagtgccagccatacaagccgcagttcaagatttacttgtctcttgaggagtgcaggcaactgaaggatatcgttgttatggcgaagcaaaatggactgcagctcgtgcctgcacttgtcaaaaggatgctggataaagacatgtttttgtttggctacatgaatttgatcaacgacaacggggacaagcaggtcgaggaattgaccgcattgcagaacaagcaagtaaaatttgcatgtgacaagttatttgcaaatagccaagcagaaagatatatgcacatggacttgggtgctgagttcgagcttgataccatcaaaaaattgtcaaaggagtatgcagaagcaaaggaactggcccttgcagaggcaagccaaactgtcgaagttgaagatgctaagcacctccttcagagtgagaggctgttgggcgacaagatagatgaagtcgtcaaagaatgggatgtccagaaggaggggttctacgagagaactggattatcctcatcccctggtgaccagctcatggcggtcgacaacgatgaatcaggagctcaatgtcacaaggatggatcctgtggcgatcagctcatggcggtcgacaatgatgaatcgggagtacaggatcacgaggacctcgacgatgaagacgatggctttgccgagttagaactgctgctagagtgaagaacatatacaagtctgtaaactcttactaccgccgtataaccgtgtaatcagaacaccgagagatgtaatcctcgctcgtctttactaggctctcctttttagttgccagaccttctgttcatctacactggctgcagtaactgtacattgaaataatccagttcgccagcctatgcgggggagag

SEQ ID NO: 36546 - DNA, 466 bp, Zea mays subsp. mexicana
  Clone ID: UC-ZMROTEOSINTE119F05_FLI
ggcgccgtgccctgcgcgaccgtgctcatcagcggccgccccgtggtgatacagccgttccttggcactgtgcacgcgctcgtggcggcctggctgccgggaagcgaaggccagggcatcaccgacgtgctcttcggggactacggattcacggggacgctgccgcggacgtggttcaagtcggtggaccagctgccgatgaactacggcgacgagcactacgacccgctgttcccgctcgggttcgggctcaccacacagggcaagaaggggtgctagaagaaggcgcggggagcaatagatggggtggtacttggtagagataggaaattggattaaacagtgctctggcgaggggacgtgaactgggagttcttgtttccttgctttatgtcgattaattttgttgtatgctcagttctcgctgtggtgtagcatccaacttttctcaactttgacttttctc

SEQ ID NO: 36547 - DNA, 1284 bp, Zea mays subsp. mexicana
  Clone ID: UC-ZMROTEOSINTE119G06_FLI
gtcactttgaaggctatatttaaatcacatgtgctgagggtgcacaaatccaaatttgcacagtttatcatgttttatgcttgttccctgcatcctgagattggcgatggctttgctaattttcttactgatatttttattgacaaggacaaaaacgaggatgcaattactagagtgtctgcagtttcatatgttggaagctatctgtcccgggcaaggttcatttccgtaaatatagttgtttctgtactcaaaaggctagtggactggtgtgattattattgtggccatcagctggacaatggggtgacatcaaatcctataaagcaccagctattttatgctagctgccaggctgtgatgtatgtcctatgctttcggttaagatctattatggactacccaaatcttaaacaacaactttttcgaatgcgaatccgggatatcttggtccacccattgcagccattaaaggtgtgcttgccttcaatagtgaatgagttcctgagacaggctacagctgcgagcctgttccatgcacctgcgatctcaatgcacgaagatgcagttgaatccgatctatcgaaggcatttggaggacttaataggcttgacatgttcttcccatttgacccgtatctacttaaagagtctgacagatatatacggccaaattttgagttctggtccttggtcaagacgacatacagtaacgacaacagcgatgaggacgacgaagagcttggcgacattgacgcacctggaatgaatgtgggcagcttggatgatcacttcgaaatagattttaacagtgacgatgacattgagtataagatgaataagatgtccataacgccgcaacgcactttctaccatccactggctacaaacagtgagtccaaccgcatgcctgcgaggatcagaccttcagtgagccccccatcatagcaaggttctgctcagctctttacttgactgatgatgacacaaaaccagatgctaggaagttgcacgtgccaagaagggaccaggggatgacgaccaaacatacaccggagtgtattctatttattattccagttgctagtagggtcaaaactttaatgcagagtgtatatgtgtttcagggcaacgcgtggaaaaccggtttgtgattgtatacttggtagtcagcccttaggaacaggtatgtgtttgtagcaagacttacgacgtgaaatgaggattctcttggggacattaatggtataacgtgcgaatgttagaacctaattttcaattatc

SEQ ID NO: 36548 - DNA, 1147 bp, Zea mays subsp. mexicana
  Clone ID: UC-ZMROTEOSINTE119G07_FLI
ttgttgtccattatccacatgtgcactttgatcaatcatggggaaatatatcgttattaaagctcatgttcaagatgttcacacagtttcataatttcatggaggtagagtaccttcctgttgtctaccctcctgagatcaagcaagagaatgcccttcattttgcagaggataccagctatgctatggcacgtgccctcaatgccttgccgacttattattcatatggcgattctatgattatggcacgagcagtagaagctggaaaggtgaactgctcaaattacatggtagaaatggcttgggttaaagatgtttacggtataagcacagcagaagtgatggaactattggaacatttcctggctatgaatccagataacgatggacgtgtgaaagctgaagatttctgggctcattttggtctggattgcagtcctctgtgcaagaagatatttcactatttcgatttagacattaaggggttgattacgttccgtcagttcttggttgggtgcgcgcacctgaggaagcaaccactgttccagggttcctgcgagaccgcctttgagaagtgccggggtcctgaaacgtctgagatctccagggcacagctagctgatctcttgcggttaagcatggtgccaccttctgatgataagatgctggagctgttcaagacgttcgacgtagatggcgacgagaagatcagcagggacgacttcatggcgtgtcttgggaggttcccgttcctgatcgcgttctttgctgccctgatcaatggggaagtgtacatcgagatagtctgaatgaatgcctgaggcaaagcgatgccgcgtaaaaggttggagctgccagtgccaggcgtaggcaggggatccctccgtttatgcaatgggatacccaccgggcgagactacgctttgagaccaaagcaactgtagtattgggtattgggttgcatcaagtggctgaccagtgtagtgcgtcgattttgttgagttgcttcgttcgaactattattggccatttaccgagtctgttgagatacgcgctggactagtagattgtcgatggaactcagaacgcaaatagaaagcatctgtaatctgaactaactgagaaaacattttttttttggctctct

SEQ ID NO: 36549 - DNA, 1557 bp, Zea mays subsp. mexicana
  Clone ID: UC-ZMROTEOSINTE119H08_FLI
cgcgatgcattttatgctgatatgaaaagcgtccagcaaaaggaaagtttgacaagtgagctgaagaaacatctatcattggaatgtgaccttttgaacttctttgagcagtttgaaagactgttatgtgatcgtcggtctgcagagatggaggctgatgtgaatgctaatcagagtacaaagaagccaccttctatgcgaatgttaaggcaagctgccaatgcatatacaccttctgcctttaaaatgtttgagagggaatttgaattgtacatggattgcatgctctacatctgtggtgagatgagcacaattttcgagtatagaataagtgttgaggacaaatcaagagatcactttgttaaatttgattcactcaattccatgatgaattgtacttgtaagacatttgaatttattggcatcccatgtcgccatatgctgaaggtacttgacatgaggaatatcaaggaccttcctgcccagtacatcatgaaaaggtggaggaaggatgctaaatcaggatcctcaaatggtggttgtgctttcttgtttgatggtgatcctgacttttctcacataaaacgttataattttttgtgtcgtatgttcagtgtagcagcggctagagctgcaacttctgatgaatcatttgcatatatggaaaaccagtcaaacatactgatggatcaaatagagcaagttattcaaaccaggccccctgacatagctgatcttattggtgctaattgtgatcgaacacagaatccagttgacaatattgtcgctgaaggcattcaaagtcatactaattttcttaatggctccactgatggctctctaacatttccattcacattgggtgctggcacattggattaccgctgactggtacctactgttaggatggtactgcagtacagaacaaagtatttctgtctcgccatgaacaacaatatgtgtcgtttttaatgttttacaatgaaaccatggttgtatggctgcatcatttactcattactcacctgaccttttgccacaagctatttagtttattttttcatttgctgaccaagtctttttaggcatgcagaatgacataatggatgttctactaatgtgtctgtggcttcacattggctgcagagctgcaaataacaatggtacacctactgcacaggtagttggcaggcctgatattgtctgccttaacttctcacccaaagaaaggaaggatttttcccccttcgccagcactcattgtatgtacttcatgggaaaggatgtttcatgaggtagcacccgaaatatcacctggttttccagcctggtgattgtgcacagggtgttccgggtaatttgagggactccgcctgctgtgttgccagtttacaaggtgatgatgctgagcttaaccaacgcgagcccatctgatttttaaccagtgctgtacgcctgtagcgtaatgctgttgcgatagccttgtcatgacagttgtgcaatgtacagtttttttaacccattacgtaaatatattaacatgtgatcactggtttc

SEQ ID NO: 36550 - DNA, 637 bp, Zea mays subsp. mexicana
  Clone ID: UC-ZMROTEOSINTE119H11_FLI
gcttgaagtaaaccggctttgttgattcttcagctagctagtttcatcaccttgttcttggagctagatagcagcaatggccattgaaatgccatgcaacaaccgtatgagcacagtggctctagtggtagtagtcctgcttgtcgtagcctgtcaaatcgctccagctcattgcactgctcctaccacggtagcaagtactcctagaagcagatacctgctggtggtgcagtcgtcgtcagcgaccaccgctactgcctattccaccacaaaggcaggcatgatcgagggcacagtcactccctcagaaggcggcgctcctggggcgaccgaggacgttcgccctaccaacccaagccacagcccgggcatcggccatgcattcacccacaacaagatcgggaggaagctgcttgctgcgatcagtcaatgagagggttcgttcgacagcaggcatgcagcaggctgcagttgcaagtagcttagttgtttatttgttcgtttatcccagctctttcgtacgtcttagcttgtttgtggctcttcctccttgatcgatcgtccttcttcttattagtcaccctttgtaatactagtaatttggcatatctatatcattatcatgtgaaaatttgtc

SEQ ID NO: 36551 - DNA, 765 bp, Zea mays subsp. mexicana
  Clone ID: UC-ZMROTEOSINTE120A09_FLI
cgacccatcactctctgctcgcgcactctcacctgcccgcgccgtcttcgaccgccaccaagatgaacaaggagaggctcatgaagatggccggcgccgtccgcaccggcggcaagggcaccatgcgcaggaagaagaaggctgtacacaagacggtcaccacggacgacaagaggctgcagggcactctcaagagagtaggggtcaacaccatccctgcaatcgaggaggtgaacatattcaaggacgatctcgtcattcagttcttgaaccccaaagtgcaagcttccatcgcagcaaacacatgggtggtcagtggatctccacagacgaaaaagctacaggatgttctccctgggatcattaaccagcttggccctgacaacatggagcacctgaagaggattgccgaggagatgcagaagcaggtggctgctgccggtgcggcagcacaggtcaaggaagacaacgatgacgatgttccagagcttgttcctggagagacttttgaagaagtagctcaggagacaaaagcctgatcatcggctctaaatagtgaaatgttactgcaccaatgctgtgaggtcatggttttcgtgtgatggcactcttcttcctcccctcctaggccagccccagccactctttgtgttcgctgttggaaacttttagtttctccatctcaagcttttacctaaggttgtgcatgttgagatgccatggaatccattttgctgattatttggtttgtggtcgcttcacaac

SEQ ID NO: 36552 - DNA, 1577 bp, Zea mays subsp. mexicana
  Clone ID: UC-ZMROTEOSINTE120B02_FLI
gtctttttcggaaacgtcttgagtgctaatttgggacaagctcctgcaaggcaagccgctctgggtgcagggataccaaacactgttgtttgcaccactgttaacaaagtctgcgcatctggcatgaaagctactatgtttgccgcacagtcaattcagctgggtatcaatgatattgttgtggcaggtggcatggaaagcatgtccaatgccccaaagtacattgctgaagctaggaaagggtctcgttttggacatgacacacttgttgatgccatgcttaaggatggactttgggatgtatacaatgactgtgccatgggaatgtgtgccgaactttgtgctgacaatcatgccctcacaagagaagaccaggatgcttttgctatccaaagcaaccagcgtggaattgctgctcgtgacagtggtgcgtttgcatgggagattgttccgattgaagttcctgttgggagaggaaaaccacctgtacttattgagaaagatgaaagcctggataagtttgacccagcaaaactgaagaaacttcgcccaagtttcaaggagaatggtggtaccgttacagctggaaatgcttctagtataagtgatggggcggctgcattagttttggtgagtgggcagaaggctcaagagcttggcctgcaagtccttgcaaggatcagaggatatgcagatgcagctcaagctccggaactttttacaaccaccccagcacttgcgataccaaaggctatatcaaatgctggattagagtcatcccatgttgatttttttgagattaatgaagcattttctgctgtcgcacttgcaaatcaaaagcttcttgggattccttcagaaaagattaatgtccatggaggagctgtgtctctagggcatcctcttgggtgcagcggtgctcgcattttggtcacccttcttggtgtccttagggaaaagggcggcaagatcggtgttgctggtgtctgcaacggtggaggtggagcatcagctcttgttctcgaactcgcataagaagtattggcttgaagcactggatatgtagctaattcagtcgcattctatacatgatgaagtattgaaaaaaaagaccctacgatatccatgccgggtgccactgtcttcttaattcaacagaatatgattgtgcaatcattctgccgtgccgcttttgaccttaggaacacggcgtcggaggctcaatcattctggcaattagcaccagctagctccctgaggggcgaccttgtactctctacattgatgtatgtgtagtgctggacattcttaagttaattcggcaataaagtgtgctgtgcttctgctacctgcatcttcgacaagagaaatggagcagcctctttgatcagttgaattcatctttacatcccacttggagactccggtttcaagtttttttttgtgaactgaagctcgtctgcttaaactctgagcagacatgtagagcaggacatggtgcaagtcagttttgtgttactgatgcttccaaaattgccttggtcagctacttatcaccagttctcagattttctttc

SEQ ID NO: 36553 - DNA, 1655 bp, Zea mays subsp. mexicana
  Clone ID: UC-ZMROTEOSINTE120C08_FLI
ggcggagtcaagcggatagggtatttctccggaccatggcgtcggcggccccggtggaggagccgacggcggcggccgaggcgaaggggcggctgaccggtgactccttcatccggcgccacctcaggaccctcgccccgtatcagcccatcctgccctttgaggtgttatctgctcgccttgggcgtagaccagaggacataatcaagttggatgcaaatgagaatccatatggtccacccccggaggtcgctgcagcactaggtagtctcaagttcccctatgtgtaccctgatcctgaaagccgccaattgcgtgctgcccttgctgaagattctggacttgaatctgattacatacttgctggatgtggcgcagatgaactaattgatttaattatgagatgtgtgcttgaaccaggcgacaaaattgttgattgccctccaacattcacaatgtatgagttcgacgcttcagtcaatggtgcacttgttatcaaggttccaagactgcccgatttttccctagatgttgatctcattgtcgaagtggttgaacaggaaaggccaaaatgcatatttctgacatccccaaataatccagatggcagtgtaatcaatgatgaggatcttttaaagatacttgatctcccaatacttgtagtgctggatgaagcttatattgagttttcaagccttcagtcaagaatggcatgggttaagaagcatgataatttgattgttctccgaacatttagcaaacgggcaggtttagctggtcttcgtgtgggttatggtgcatttcctctgagcattatcgagtatttgtggcgggccaagcagccctataatgtttctgtggccgcagaagtttcagcatgtgcagctttacagaatccaacttatctggagaatgtgaaaaatttactggtaaaagaaagggagaggttgtttaatcttctcaagggaataccattcctgaagccatttcccagtcattctaacttcattctctgcgaggtcacgtcaggaaaggatgcaaagaaaataaaggaagaccttgcgaagatgggagtgatgatccgccactatgacaagaaggaactgaaaggctatattcgtatctcggttgggaaacccgagcacactgatgcactaatgaagggcctgaatgcacttcgattgtgagagcttttgcacacgatcaagcttttgcacactatcaagcttttgcacaccatcacatcaatgtaaacagtgtattcctttgcggatatatatccgtcaggctggatgcagtctataagaggagattgcatcactccaacgcatgtgaagcccaaacagacaagggtcgtgtgggtttcactatccttttgtttaccatgttgaagtctgtttttgttattcagcgacataacagctattcacaagattatcttgttcagaacaagtgtagcagttgaattcctggtaggtggtttctgatgttgggttgagacttgagagaactgaacattgtgtaggtataaataaaggccaacagagcaatgctgttgtcttagtacttgtatcaaaggtcattcagtcgttgcaaatttcgaccaaataaagggatgaaatgaaagcttggaaacggaacagattctcatccat

SEQ ID NO: 36554 - DNA, 765 bp, Zea mays subsp. mexicana
  Clone ID: UC-ZMROTEOSINTE120C10_FLI
cgacagcctgaaagacctgtacaagtcctttgtttatgagtaccctatcgagtcgatcgaagacccatttgatcaggatgactggagcacttatgccaaactcactgatgagattggacagaaagtgcagattgtaggagatgatcttctcgttaccaaccccaccagggtcgccaaggccatcaatgagaagacctgcaatgctctcctcttgaaggtgaaccaaatcgggtctgtgaccgagagtatcgaagctgtcaggatgtccaagcgcgccggatggggagtgatggcaagccacaggagtggcgagacagaggacaccttcattgctgacctctcagttggcctgtctacgggccaaatcaagacgggagctccttgccggtctgagcgcctggccaaatacaaccagctgctcaggatcgaggaagagctcggtgatgccgcggtctacgccggagcaaagttcagggcaccagtggagccctactaagaaaggaagaggatgaggatgttttcttgtggagctatactagctcgctgctgccttttgttacaatgtttgtacggtcgcaataaatgtatggtcgtgtttgctcgagagctactcaggtgattttgtcgtgggagcaccaaaagcagaaaagaactgtttttttcttctctctctctagattctgacgagtggtggtctgcactcgtcgtaatgtcgtttgcctaaactgattttgatggaacaggaaatcttgctggtcttgccat

SEQ ID NO: 36555 - DNA, 1563 bp, Zea mays subsp. mexicana
  Clone ID: UC-ZMROTEOSINTE120E06_FLI
gttacagcggttccatattttgttttttgcaaggaaggaaaaattgttgatactttggagggagcaaacccagccagcctggccaataaggttgcaaaagtagctgggcctgctagtgttgctgagtctgctgtacctgctagccttggagtcgctgctgggcctgctgtacttgaaaacatccaaaagatggcacagcaaaatggatcctctgctgctgaaagcacaaactctggcagtactcaagatgcattgaataagcgattggagcagcttgtcaattcccatcctgtgtttttatttatgaagggaaccccagaacaaccaaggtgtggtttcagccgtaaagtggtgaacattttgaagcaagaaggggtcaaatttgggagctttgacatccttacagataatgatgttcgtgaaggtatgaagaagttctccaactggcccacttttcctcaactgtactgcaaaggcgagctgcttggtggatgtgatattgttattgctatgcatgacagtggtgaattgaaggatgtttttgaggagcacaatattcccctcaaaccacagggtagcaaaaatgaagaagcaggtcagcccgagtctgcaactgagaagggtgctgcagttgctgaaccaatggggcttactgatgctcagaaatctcgtttggaaagccttattaattccagcccagtgatggtattcatcaaaggtacaccagaggaaccaaagtgtgggttcagtgggaagttggtccacatacttaagcaagagaatattcctttctcaagttttgacatcctttcagatgatgaggttagacaggggctgaaagtgctctcaaactggcccagttaccctcagctgtacataaaaggtgagctggttggcggctcagacatagtgatggagatgcacaagagtggtgagctgaagaaggttctgtctgagaaaggggttattccaaaggaaagcctggaggacagattgaagtccctggtttcctctgcaccggtgatgcttttcatgaagggcactccagatgctcctcgttgcggcttcagttcgaaggttgtgaacgccttgaagaaggaaggggtcagctttgggtccttcgacatcttatctgacgaggaagttaggcaaggtttgaagacgtactccaactggcctaccttcccccagctctactacaaatcggagctgattgggggatgtgatatcgttcttgagatggagaagagcggagagctgaagtcgaccctgtcagagtagacacctagctagcattcttgcttcgctggcgtttttaccatattgcctgcattggatcactctactctggtattcatgccattgtattcatagatccacgttggtacttgtctgcagtgccacattgctagaattgtgacacatctgcagaaggaataacttacgcttgttcggtactgattgcattgttcttatatcaccagttctatttagcgggtggaagcttttttgttcgggtattgtcacaatttatagacggatgaagtaaaatatttatagagt

SEQ ID NO: 36556 - DNA, 580 bp, Zea mays subsp. mexicana
  Clone ID: UC-ZMROTEOSINTE120G02_FLI
gacgcgcactgcgccacgctgctcaagaactgctacgacgcgctgccggaaaatggcaaggtcatcgtcgtcgagtgcgtgctgccggtcaacacggaggccacccccaaggcgcagggcgtcttccacgtcgacatgatcatgctcgcgcacaaccccggcggcaaggagcggtacgagcgcgagttccgcgagctcgccaagggcgctggcttctccggcttcaaggccacctacatctacgccaacgcctgggccatcgagttcatcaagtgaatacggctaccaccgtcgccgcgatgagatggcttgcttgcttggtcctcgtatcgtacgtcgccgtcgtcgtcttcttctcgctctcgcgtatgcatgtacttttgcttaattttctttcttcatatcatgcactctggctggcctagactgcccctgatccatggtggccatgtcttcggtacgtcttgtcgagctcttgcatgtcgtggattctaaattcttcttctgcgtcgaattgtctctgccatgtgcgagtaataacaatcaaggttatacttaccatacaattacatggtggttt

SEQ ID NO: 36557 - DNA, 239 bp, Zea mays subsp. mexicana
  Clone ID: UC-ZMROTEOSINTE120G05_FLI
tgaaatgcgggatgcaaacaagcctgacgaggagcagtagtagccaaacatctccatcgatcatgccatgccatgccatgcttgtacaaggaccattttcgtgtgtcctttccttcaatcgtcgacctttcgttttgttgttatactgctattgtggaaccctgttactgttactgttagtgtatcctattggcaataatcaaatgtggtatggttgactactatactaatgggtgatc

SEQ ID NO: 36558 - DNA, 656 bp, Zea mays subsp. mexicana
  Clone ID: UC-ZMROTEOSINTE120H02_FLI
ctttgcaggcatctgatcctgccaggttccagaaccttatgcagacattggatttccgttatcaggcgcttgctagtggcataggacaatatgccgagcaaagaaaaattgaaattgagagagagaaatctgagaaggcaaatgcacagtgacttaataaatcatttctggccgcccttgtttttgccattttgccagtataagccattggtggctggtcaatttcctgtgatttgcaggtcgagttttgcagccttagccaacctttaagggtaggacaattttaggctcgcaaaattctatccttgtgagaaagcatcttggataatctgtcacgtcggccatgttcttcgtggcctgttgttgccgtcttggttgcgcaagaaagtttctctcgaggacagttgctccgtcttgttgaaatttttttgggggggcttgtaagagcatttgttatagaaactcacctcaggtggtggggttgcgttctccgagttgtcaaagtttattactggttcggagtagattgtatatggtttcggttggtaagacaacggttgtacggtatatgtttttttttgtcaacaggacattgtaattgggttttgttctttggtcggcgagagcaagaaaaattggcattgttctgcggagtt

SEQ ID NO: 36559 - DNA, 1758 bp, Zea mays subsp. mexicana
  Clone ID: UC-ZMROTEOSINTE120H06_FLI
ggcgagcgcgccaggatggcatcgtttgttggggccatggcaatctcggatttggtgaagaccacattgggcccaaaaggaatggacaagatcctgcaatcaactggcagaggacgtaatgttactgttacaaatgatggggctaccattttgaagtcacttcacattgacaatcctgctgcaaaggtccttgttgacatctcaaaagttcaagatgatgaagttggtgatgggacaacttctgttgttgttctagctggagaacttttgaaggaggctgagaagttaattaacatgaaaattcatccaatgactattattgcaggttacagaatggctctcgagtgtgccagagattctttgctaaaaaagaccatggacaacaaagaaaatacagataaattcagatctgatctcatgaatattgctatgactactcttagttcaaaaatactttcccaagacaaggagtacttcgctgaacttgcggttgatgctgtcttgaggcttaagggtagcaccaacttggaatctattcaaattctgaagaaacctggaggatctcttaaggattcctttttggacgaagggttcattcttgacaagaaaattggcattgggcagcccaagcgcattgagaatgcaaaaattttggttgcaaacactgctatggacacagataaagttaagatatatggagcacgggtccgggtggattcaatgtctaaggttgcagatattgaagctgctgagaagcagaaaatgagagagaaagtccaaaagatcatagcacacgggatcaactgttttgtcaacaggcagttaatctataacttccctgaggaactctttgctgacgctggcatacttgcaattgagcatgctgactttgagggcattgaacggctggctcttgttactggtggtgagatcgcatcaacttttgataatccagagtctgttaagcttggtcactgcaaggtcattgaagagattatgattggggaggacaggctaatccatttctctggggttgcgatggggcaggcttgcaccattgtcctaaggggggctagtgagcatgtgctcgatgaggctgagaggtccttgcatgatgccttgtgcgtgttgtcccagacggtaaatgatacccgtgtcttgtttggaggcggatggcctgagatggtgatggccaaagaagtggatgaacttgcaaggaagacccctgggaagaaatcccatgctatcgatgctttctcacatgctctgcaagccatcccaacaatcatagctgacaatgctggtttggatagtgctgatttgatctctcagctccgagctgagcaccacaaagagaactccactgctggaattgatgtcatcacaggcactgttggggacatgcaaaagctagggattcaagagtcgttcaaggtgaagcaggccattcttctgtctgcaacagaggctgcggagatgatcctcagggtcgatgagatcataacctgtgccccgcgcagaagagaggataggatgtgatattacacgctgtttctcgatgtagcgggatgctcattaccctagttttgaggggtattatggtttaggggcgctcaagttggtcagatttcgagtgtttttggcccctaagcaactggtacttgttatttggttgaaacaatcagtcttaggtttgtgttctacattctcatgctgtaccgtttggtagcgagttacgtcgtacaatatgcttgttcc

SEQ ID NO: 36560 - DNA, 941 bp, Zea mays subsp. mexicana
  Clone ID: UC-ZMROTEOSINTE120H07_FLI
tatagatgcaatagtaagagcaagccagttccccctgtcaattgttcttgttggggttggtgatggaccatgggacatgatgcaccagtttgatgacaatatacctgctcggtcatttgacaatttccagtttgtgaacttcacggagattatgtcaaagagcatagcagctgacagaaaggaggcagaatttgcattgtcagcgctgatggaaatccctacacagtacaaagcaacacttgatctccaactcttaggccgccgccaaagaataactccaagaattgctctgccgccaccaacaaggactgcttattcacggactactagctttagccaacagtctggtgtttattcgcgatcaagtagctttgaccaacaaacaagtgtctcccagcaacgttctgagagcttgaaacagcagcagcctgcagccccaaagggacctgacacttgcgcatcagaaagtgctttagaggacagaattctgtgccccatctgcatgtataaatcgaaggaccttgcatttgggtgtggacatcagacttgctatgaatgcgggagagatttggagcgctgccctctgtgccagcagcacataaccacgaggatcaggctctactgatttgaagccaatgggattgaaaaatgttcagaaccagctttgatgctactgtgcttcatcattttgtaattggtgtgttcgtcttgctgcataggcatatactaagaactagtaccagttttagtgtttggtaacactgtctcagtagtttcgctacactagttatgccaaaaggaagcgcaccagaaaataatgtacatatttttcctccttttatctcttttgttaggtaaataagttagacagcagtaaaattctgaatgagatgagataatggatattgtgaagcaaaactatcgccatttctgagccatgg

SEQ ID NO: 36561 - DNA, 515 bp, Zea mays subsp. mexicana
  Clone ID: UC-ZMROTEOSINTE129C11_FLI
cacaaagcatgatgggaaaattgacaaagaagaatggcgcaatttagtagtgaggcatccctctttattgaagaacatgacactacaatatctcaaggacatcaccactacatttccgagctttgtcttccattctcaggtcgatgatacctgaatttctgaaaactaatgaatgtcagaaggtggactgcttgctttgctaagcaaactttcagtgcctgtttgatggttgaaaaatctcatcgtcctgaaggcatcaaatcatcgtttgttgttaataatctttttccttgttttgtatttggaattcttgctggatcctgtgtgaatcctcttctattttccctctccattgttcctttattctatttcggttttgatggccagtacttgagtcaggtaatgtgtacaaagttgcgtctgatgctgcctgtcattgaattgtatggcatgtgaggaagatttaaattgtatattcaacttttgtggtcatgatagttgcacatatttttacc

SEQ ID NO: 36562 - DNA, 556 bp, Zea mays subsp. mexicana
  Clone ID: UC-ZMROTEOSINTE129C12_FLI
cacgctcgttctcaacggcatccagcctgtgctgtcaggtgtcgccgttgggtgtgggtggcagcagttcgtggcctacgtgaacattggctgctactacatagtcggcgtccccctcggcgccctgctcgggttcgtcttcaagctcggtgtgaagggcatttgggctgggatgatcggagggacttgcatgcagacggctattctagtgtgggtcaccttgagaactgactggaacaaggaggtagaggaagcacagaagaggttgcacaagtgggaggctaacaagacgacggagccccttcttgctggggtcagcaatcacaaataacgtaactgcatgcgcggggatatgatgatcggtcgatccagaatatcaatcaatctccggccttcaccagtactagttcccttcatgcataatgtgtgggaactggcgtctttagatttttctgtgcagtaaattaaatgaaccacggtaacgtcaatgtaaacgaatcacgcatgtttggtttgcttatttcttccgttttaatgcttaacgcacgacgcgacc

SEQ ID NO: 36563 - DNA, 680 bp, Zea mays subsp. mexicana
  Clone ID: UC-ZMROTEOSINTE129E03_FLI
gagattttttgcgagagcttagattttctgttagaaaattatgcaaactgtaacatgttttcctttccttcgtcttgttcttgtgctgaaacttgccgccttggatcacccaccactaatccatattgtggatgttttttattaagtgtgcacaaattagcatcatgaatctaccattggccaaattctatttatgcattgtcaacttctatacaacctttagactgcaaactgcattttcttgaacatccaacctttagacattcttggtgttatattggagtggtgacttcttgaacatccagcttcacagtatcaggaggctgacaaatgcagctcaagcatggataacctatgaagaagctagggagaactcagcggaagcattggtccaacaaaagaaactgacttctttgtgggagcaaagggcttgggagcttggatggagacccaagaatgtcaaggcacttctaaagtagtaaaaccagtggaaggtgttggatactatgtgtagtaatagatcttattgcaaatacgggcccactaagagctcgagacgatgaggaaacaaatgtgtttctggttgagcggactcgactcacttgacatgccaaggggcctacttgtccatagtaaatttatattcaatttgtagtataattccattgttgtttgtgaac

SEQ ID NO: 36564 - DNA, 1349 bp, Zea mays subsp. mexicana
  Clone ID: UC-ZMROTEOSINTE129G01_FLI
agatgagcaacctgcaccggtactgcgacatcgacagcaggaagggcgtccagttccaggagttcgtcgtgctcctctgcctcgcgtacctgctcttcgggccagacgtcacgcgacgcgtacgtttcggagttcgagtccggcaagctcaactacgtgttcgacgagctcatcgacgcgtacatcttcttcgacaaggacggggacggcatgctgcggaggagagacgtcacccacaggatgaacgaggcgtcgcaccaggagaggacacccagccacataacagcacagctattcaaggagatggatctgaacaggaacgggaaggtgaacctcaaggagttcctctactccatgatcagatgggctggtctcgggaccgaagacgatggcagcgatgaggcctcaccatgatgtaactttttttttcttttcttttggtctgcattttaacagttgaataagtaaaatgtatgttgacaattgaaagtaaaaataaaaaatatcatgaagaaaatcgaaggtccaaatctgattcgataaacctcgttatttcgttaaccaaaccaaccaacattatgtaataatcgatggcactctgatttagcacatctatcagatggtgactagaatctttatagacgtagcaattggaaggtatcaaaataaactttaaatgtttctggtagaagctatcctatatcgcatctagcggatgaacgaatagtataacaaacgaaaataaagcatcacaaataatcataaaacgagatattatagctctttagagctagtttggtaaccacattttcccaacgaaaattagtgggaaaatagaaatcccatggaaaaatacagtctccaaactaatccttactatgattatcttcgtcactgttgggggccttcggctccgaaggtcctcaaaaacagaatttaacagtgtttctggagtataatgtgtgaacaggtatctttagacccgaatcggtaccacagtgggagaagctcaaagaatacgaaggttgatacaccgccgaaggagtgagcaggaaagcttcggcgtgactgcagaaaaggaaaccgacttaaagatgaaaaggctatttaaacctcggtggattactatagaactactaccaaatgtaaagggcatggatgtaattttatatgggttgtgttccatgcctataaataggagaacagtacccccgtactgttcacgctgacttggcatttgctttttgtgtcacgcttgtacttttacttccttccaagctgaaggttcatctgtaacttgatgtcgttttgattcttcaataataataatgcagaaatgaattgataac

SEQ ID NO: 36565 - protein, 147 aa, Zea mays
  Clone ID: LIB3078-056-F6_FLI.pep
DRALLRRGAAERVEDVMLPRSPERMRRLMQLAYHRPRRFTPGFVLRDLAQYLYSDKVEEKKELIKGITLGNKDKFQLTPLPQEVLVLWGEHDQIFPVEKAFQVARKLGANARLEVLKDTGHMPQEEDPKRFNEAILNFLLPAPKSSL

SEQ ID NO: 36566 - protein, 397 aa, Glycine max
  Clone ID: LIB3039-032-D4_FLI.pep
PHHPTTFPPLVLFLEMACETKSWLVMFLVFLVANCMQHCVHGVSQVPCLFIFGDSMSDSGNNNELPTTSKSNFRPYGIDFPLGPTGRYTNGRTEIDIITQFLGFEKFIPPFANTSGSDILKGVNYASGGSGIRNETGWHYGAAIGLGLQLANHRVIVSEIATKLGSPDLARQYLEKCLYYVNIGSNDYMGNYFLPPFYPTSTIYTIEEFTQVLIEELSLNLQALHDIGARKYALAGLGLIGCTPGMVSAHGTNGSCAEEQNLAAFNFNNKLKARVDQFNNDFYYANSKFIFINTQALAIELRDKYGFPVPETPCCLPGLTGECVPDQEPCYNRNDYVFFDAFHPTEQWNLLNALTSYNSTTNSAFTYPMDIKHLVDHEIKMELELTNESTSQLSATE

SEQ ID NO: 36567 - protein, 337 aa, Zea mays
  Clone ID: LIB3078-057-B3_FLI.pep
AGPPAPAAKRKEGGKAVNLFTAVNQALHIALDTDPRAYVFGEDVGFGGVFRCTTGLADRFGKSRVFNTPLCEQGIAGFAIGLAAMGNRAIAEIQFADYIFPAFDQIVNEAAKFRYRSGNEFNCGGLTIRTPYGAVGHGGHYHSQSPEAFFCHVPGLKVVIPRSPREAKGLLLASIRDPNPVVFFEPKWLYRLAVEEVPEEDYMLPLSEAEVIREGSDITLVGWGAQLAVLKEACEDAAKDGVSCELIDLKTLVPWDKETVEASVKKTGKLLVSHEAPVTGGFGAEIAASIAERCFQRLEAPVARVCGLDTPFPLVYEPFYMPTKNKVLDAIKATVDF

SEQ ID NO: 36568 - protein, 413 aa, Glycine max
  Clone ID: LIB3039-052-E4_FLI.pep
IRFFFPFISNLIFVSIQKMALSRVAQSSPSQSNLLKPLSSYLSLRRRSVSTSSEPLTVETSVPFTSHNCDAPPRAVETSSAELFSFFRDMALMRRMEIAADSLYKAKLIRGFCHPYDGQEAVAVGMEAAITRKDCIITAYRDHCTFLARGGTLIEVFAELMGRRDGCSKGKGGSMHFYRKEGGFYGGHGIVGAQVPLGCGLAFAQKYCKDENVTFSMYGDGAANQGQLFEALNISALWDLPSILVCENNHYGMGTAEWRAAKSPSYYKRGDYVPGLKVDGMDALAVKQACKFAKEFALKNGPIILEMDTYRYHGHSMSDPGSTYRTRDEISGVRQERDPIERVRKLLLTHEIATEKELKDIEKEIRKEVDEAIAKAKESQMPEPSDLFTNVYVKGFGVEACGADRKELRATLP

SEQ ID NO: 36569 - protein, 185 aa, Zea mays
  Clone ID: LIB3078-057-D7_FLI.pep
FLNTVVTDILHLHGRKLHAYKGDYDTFERTREEHLKNQQKAFETNEKARQHMQTFIDKFRYNAKRASLVQSRIKALERMEHVDAVVSDPDYKFEFPTPDDRPGPPIISFSDASFGYPGGPTLFKNLNFGIDLDSRIAMVGPNGIGKSTILKLISGGSAANFWNSISLSQGSHGLYSISIMLMALI

SEQ ID NO: 36570 - protein, 382 aa, Zea mays
  Clone ID: LIB3079-001-F5_FLI.pep
RGAAEPGMKIQCNACGAAEARVLCCADEAALCVACDEEVHAANKLAGKHQRVPLLTDAAAAAAAAAPAVPKCDICQEASGYFFCLEDRALLCRDCDVAIHTVNSFVSVHQRFLLTGVQVGLDPADPVPPIAEKHVNAVGGSVNQPVRHQPRRSPTVQFSVEGSASVPTKNVTNGDCSRQNFVPTARAEVVDWTMNNSTIRSVESPPKYISEESPTLLQSSQTTTVFSNQINGNSDGAYHLSFSGGNVTDSLPDWPVDEFFSNSEYGPNFGFSENGSSKGDTAKLGGAGGSPQCRLAEGSVAEELLGQVPGLITDEYMGRVPENSWTVPEVPSPPTASGLNWHGNLCFPAYDSTMFVPEITSLQNSQSHFTVPSSFKRRRREY

SEQ ID NO: 36571 - protein, 135 aa, Zea mays
  Clone ID: LIB3079-002-C4_FLI.pep
AGAGSATLSMAYAAAKFADACLRGLRGDAGIIECSYVASQVTELPFFASKVRLGRCGIEEILPLGPLNEFERSVFHTRTYNYSGSCCELKVACSALFNGHFTHAFRRVIYLSKLVCSATFRLQQQVHLAHSSDPP

SEQ ID NO: 36572 - protein, 518 aa, Zea mays
  Clone ID: LIB3079-002-G12_FLI.pep
WGTSHVNESMVTGESVPISKEVSSLVIGGTMNLHGVLHIQATKVGSGTVLSQIISLVETAQMSKAPIQKFADYVASIFVPIVITLSFLTFLAWFLCGWLGAYPNSWSAESSNCFVFSLMFSISVVVIACPCALGLATPTAVMVATGVGASHGVLVKGGDALERAQNVKYVIFDKTGTLTQGKATVTATKIFSGMDLGDFLTLVASAEASSEHPLAKAILDYAFHFHFFGNLPSGKDSIKRRKEEILSQWLLEVVDFAALPGKGIQCWINGKKVLVGNRALITENGVNIPEEAERFLVDMELNAKTGILVAYDGDFIGLVGITDPLKREAAVVIQGLKKMGVHPVMVTGDNWRTARAVAKEVGIDDVRAEVMPAGKADVIHSLQKDGSVVAMVGDGINDSPALAAADVGMAIGAGTDIAIEAADYVLVRNNLEDVITAIDLSRKTFIRIRWNYFFAMAYNVIAIPVAAGALFPFTGVQMPPWLAGACMAFSSVSVVSSSLLLRRYRKPRLTTVLQITVE

SEQ ID NO: 36573 - protein, 344 aa, Glycine max
  Clone ID: LIB3040-011-H8_FLI.pep
VAAAMDLASNLGGKIDKAEVLSAVQKYEKYHVCYGGQEEERKANYTDMVNKYYDLVTSFYEFGWGESFHFAPRWKGESLRESIKRHEHFLASQLGLKPGQKVLDVGCGIGGPLREISRFSLTSITGLNNNEYQITRGKELNRIAGVDKTCNFVKADFMKMPLPDNSFDAVYAIEATCHAPDAYGCYKEIFRVLKPGQCFAAYEWCMTDSFDPQNPEHQKIKAEIEIGDGLPDIRLTAKCLEALKQAGFEVIWEKDLAVDSPLPWYLPLDKSHFSLSSFRLTAVGRLFTKNMVKVLEYVGLAPKGSLRVQDFLEKAAEGLVEGGKREIFTPMYFFLARKPDSDRN

SEQ ID NO: 36574 - protein, 423 aa, Zea mays
  Clone ID: LIB3079-003-D6_FLI.pep
SRVAPPDLDEFKTRAIAERGPGISSQPGNIIHRREPSGKLYNYAAASKGAKVLDFNKEAKGASNILDKDKDKYLRNPCSAEGKFVIIELSEETLVDTIAIANFEHYSSNPKEFELLSSLTYPTENWETLGRFTAANAKLAQNFTFLEPKWARYLKLNLVSHYGSEFYCTLSVLEVYGMDAVEKMLENLIPVENKKTEPDDKTKEPIEKIYLKDPAGGKEFSQETLDEDEFELEDDKPNGDSLKNGANDPVSEARTLQAGRIPGDTVLKVLMQKVQSLDVSFSVLERYLVELNSRYGQIFKDFDADIDSKDVLLEKIQSELKNLESSKDNIMNEVDGFLSWKLVASSQLNQLVLDNALLRLEFEIFRQKQTDMENRSLAVIFLSFVFACLALAKLSIGIMSRFCRFYNFEKFHNVRSGWLVLLL

SEQ ID NO: 36575 - protein, 84 aa, Glycine max
  Clone ID: LIB3039-023-A5_FLI.pep
AIGTGKVATPAQAQEVHADLRKWVHDNVSAEVAASVRIIYGGSVNGGNCKELAAQPDVDGFLVGGASLKAEFVDIINAATVKKN

SEQ ID NO: 36576 - protein, 179 aa, Glycine max
  Clone ID: LIB3049-004-C5_FLI.pep
QKVVVNYYPKCPQPDLTLGLKRHTDPGTITLLLQDQVGGLQATRDNGKTWITVQPVEAAFVVNLGDHAHYLSNGRFKNADHQAVVNSNHSRLSIATFQNPAPNATVYPLKIREGEKPVMEEPITFAEMYRRKMSKDIEIARMKKLAKEKHLQDLENEKHLQELDQKAKLEAKPLKEILA

SEQ ID NO: 36577 - protein, 309 aa, Zea mays
  Clone ID: LIB3079-003-E1_FLI.pep
ISHEFFRRRRRRLNAKTLARPPQFPISATPSLPPRLHPCFRLPVPATPVEAMDSSLASAAAIADQRQKIEQYRHILAYVLSSSPPDISQAKRFLDHMVSDEVPLVVSRQLLQTFAQDLGKLESDAQKEVAHYALTQIQPRVVSFEEQVVVIREKLAELYESEQQWSKAAQMLSGIDLDSGIRMLDDTNKLSKCVQIARLYLEDDDAVNAEAFINKASFLVTNSHQEVLNLQYKVCYARILDLKRRFLEAALRYYDISQIEQRKIGDEEIDENALEQALSAAVTCTILAGAGPHAPVFLLLCTRMKDARS

SEQ ID NO: 36578 - protein, 381 aa, Glycine max
  Clone ID: LIB3049-040-F2_FLI.pep
IIHFNSSQATPFLAPMAALYLPISMLALIVVVSLGLWSGVQGAPQVPCYFIFGDSLVDNGNNNQLQSLARADYLPYGIDFPGGPSGRFSNGKTTVDAIAELLGFDDYIPPYADASGDAILKGVNYASAAAGIREETGQQLGGRISFSGQVQNYQSTVSQVVNLLGNEDSAANYLSKCIYSIGLGSNDYLNNYFMPQFYSSSRQYSPDEYADVLIQAYTEQLKTLYNYGARKMVLFGIGQIGCSPNELAQNSPDGKTCVEKINSANQIFNNKLKGLTDQFNNQLPDARVIYVNSYGIFQDIISNPSAYGFSVTNAGCCGVGRNNGQITCLPMQTPCQNRREYLFWDAFHPTEAGNVVVAQRAYSAQSASDAYPVDIQRLAQI

SEQ ID NO: 36579 - protein, 155 aa, Zea mays
  Clone ID: LIB3079-004-A2_FLI.pep
NSRRGQKPWPVCTDGVTFIHSSTRPVCTDGLVILRSRCLSAGAEDFIVKPLQSKDVQRLRNCSAAARPSKGAAPCEAAVVAKRNQKPPHPAGAASPSGRRASLAGVAMVLHSSGVEYLPLLLKLVVLAYAALCLGELLHRWASSDGRCSLSPWCA

SEQ ID NO: 36580 - protein, 125 aa, Zea mays
  Clone ID: LIB3079-005-F10_FLI.pep
TRDMLFCHAVRNPGLIIDIVQDIRLMNGEAIHATPRKTGIIVLGGGLPKHHICNANMFRNGADYAVYINTAQEFDGSDSGAHPDEAVSWGKIKGSAKPVKVHCDASIAFPLLVAATFARKVHNSK

SEQ ID NO: 36581 - protein, 317 aa, Zea mays
  Clone ID: LIB3079-005-F4_FLI.pep
RLHKSLQPQEPPQVRLVPRKAESRTGRHGIPRRRHHVRSPLRLPLRAAVPRPDVRGVLPLLQGADGAGRGREREDPEEGRHPRPQLRRHGRARVRPEHSAGVAARAHRAPRPGRADAPRRVPGAGAQLRVRDGHPLRASDDAAGHASHVEELRERHRELPVAGRVRAPAGAARGHQGAELLRVRARHGALPRRRRLRRGRGALQETGRPQDGQLRGADGAHDVHQRGRQQDAAAAGVWGEDFDAAPEVAAYGDGDGKINLISVLAFEKEMRRQPEQKKQFKSIKINKAQHSTIVTDDFALHRVIQEIVEANNQKIPS

SEQ ID NO: 36582 - protein, 119 aa, Zea mays
  Clone ID: LIB3079-005-H8_FLI.pep
EVLKLYLSIIFVVLWNCDQLVYNILGKFYLVDAGYGAKPGFLPPFRVVRYHLNEWGNNPVQNEKELFNLRHSSLRVTVERAFGSLKRRFKILDDATPFFPFSSMKHRLMREMLMLFLVL

SEQ ID NO: 36583 - protein, 130 aa, Glycine max
  Clone ID: LIB3039-033-E11_FLI.pep
CQMAASRSTFPLMKYLRVRVDALPRNTPLTLAPNFLIRRFCEEVRGCFLDKSEVTDRVISCVKNFQKVDPSKVNPNAHFQNDLGLDSLDSVEIVMALEEEFGFEIPDNEADKINSIKLAVDFIASHPQAK

SEQ ID NO: 36584 - protein, 198 aa, Zea mays
  Clone ID: LIB3079-006-B1_FLI.pep
MDLSNISIQWFRIHPKESNKEIISGATRPVYALEPHDVGRYLQAEIDVGGEIAVAKTAGPVDPDAGLVDYVETLVRKPETEFNVVVLQSNGVDQPKESVHVLNVGRLRMRLTKGKSVVAKEFYSSSMQLCGVRGGGEAASQAMFWRPRNDLSLVLAFESTRERNAAIMLARRFAVDCNVCAFTKRYIILAGPGDKTPW

SEQ ID NO: 36585 - protein, 280 aa, Glycine max
  Clone ID: LIB3049-022-F9_FLI.pep
LAVVLLNKGFSVCFFTFSRFNRNQNKNMGRKFFVGGNWKCNGTTEEVKKIVTTLNEAKVPGEDVVEVVVSPPFVFLPVVKSLLRPDSHVSAQNCWVRKGGAYTGEVSAEMLVNLGIPWVIIGHSERRQLLNESNEFVGDKVAYALQQGLKVIACIGETLEQREAGTTTAVVSEQTKAIAAKISNWDNVVLAYEPVWAIGTGKVATPAQAQEVHADLRKWVHDNVSAEVAASVRIIYGGSVNGGNCKELAAQPDVDGFLVGGASLKPEFVDIVNAATVKKN

SEQ ID NO: 36586 - protein, 115 aa, Zea mays
  Clone ID: LIB3079-006-B9_FLI.pep
LCGANTKMLPAKVSFVFLIVYCAVTFSLGQIAVGEACTVDQRDKITTDCREFIKLKGPVTAPSYTDDCCVAIRAVPNLDMECIIRLLSNKQKKKYDVDKIRRLGSVLCNPHPVMT

SEQ ID NO: 36587 - protein, 171 aa, Zea mays
  Clone ID: LIB3070-004-H2_FLI.pep
DRDRHPWTSTRLASNIITHFIKPIHTNRKYTTHSLSLGVRETWRGSILHRRGNGCTVLRPLPTPSSVQFPGAGLPPNPFLRSSMKLEERSLMLDGTLGACGIRGRSPLRLGTRAPLCSSAPATDDACRFRNSDFFLSNEAPPLPSCAGRSSLIVTVLLVTFVSSAFATAGA

SEQ ID NO: 36588 - protein, 173 aa, Zea mays
  Clone ID: LIB3079-010-C9_FLI.pep
QHFPDRRGWNHNQFEGKEFLIDAQVDLLGKDRNGCSGRRRRARVAGDEVIVGVPTAGGLADLGIPGELRVEAVEGPEAVGAQREAPRRLSALAPLLHLVDMLPPNLVALVRVLHQTEDHILREVHDETHRRLRSPSSPSPVSLGSAGASVSLCPRRVGALGGGRSRDFCNHSL

SEQ ID NO: 36589 - protein, 291 aa, Zea mays
  Clone ID: LIB3079-010-E5_FLI.pep
TSKAESDGMKKGMKIPKVEPDVMDWKTPKAGSDVTKKGLRSPKAECCQPVIESVKLKLAEILNTISTQDDCKMLQHQLDTQRKRARYKKMIRRHMDFRMLHSKIKSGAISGTKELLRDILIFINNVITFYPKTTLEHMAAVELRDFACKTVKQSASLFLKSHRETRTAGAPVIKKNARALHFSRTSLHSGDARASKVSSRDAAAKEGDGKRPCSDELANQKTTKRNEPAKKRGVGRPPKSGQRIAGAQENSPIKGRKSSAGAQVDSPSKGRKRSVEAHDDSSSKGGKRSRR

SEQ ID NO: 36590 - protein, 181 aa, Zea mays
  Clone ID: LIB3079-013-H2_FLI.pep
SGLGLLPGAGLPVPPRRDLRRRQRRLLAGAAPRVPAPVVLHLRRELQVPQHVLHRRPLLRLLGQAAQADLHHRPRRLVGARPAHRLVHQRPPPPRALRRQRRLQLLLHDLHLVYGRDGPPGHDLEQDHAEIVDVDLVAIGGHPAVRWILASSSSSSSLHRCSKQKGRKKERTRAAPLRLRM

SEQ ID NO: 36591 - protein, 117 aa, Zea mays
  Clone ID: LIB3070-010-E9_FLI.pep
PIAGRQSSGPRFFTYLLIINQMTSRESASRAGTGQRPPHLSSIMMQPALPAQNPILSTKPESTQRLKWYFPVAVSQHHLPPASAWWDSRTRPRTSTMATKQHLSCPVLPSIETKPCS

SEQ ID NO: 36592 - protein, 207 aa, Zea mays
  Clone ID: LIB3079-013-H8_FLI.pep
ANSQAGSGSSINERTNSGFSRGSSEAGLDEDQSSTGKSGDSSFFAGFLKKGFKDLSLLNKSMDSVKVSINGHPISERALKKAEKKAGPVDPGSYWYDYRAGFWGVMGRECIGIVPPFIREFNYPMARNCAGGDSGVFVNGRELHQRDLDLLVGRGLPRTSGKSYSLEMSGNVIDEDTGKKLRSLGKLAPTIEKLKRGFGMHVPEEFR

SEQ ID NO: 36593 - protein, 145 aa, Zea mays
  Clone ID: LIB3078-014-H2_FLI.pep
LHRAARAEPAREAVPPGLPHGVRALLHPRGGPRGDRRAAAQPGPVGRGRGGVAHGAAPVRQHVEQLGVVRAGVHRGQGPDAPRRPRVDDRIRLRVQVQQRGLGVHRAGAHRRGALGGERQPLPRGHPRGAQALAAIPWTSGRACM

SEQ ID NO: 36594 - protein, 289 aa, Zea mays
  Clone ID: LIB3079-015-A10_FLI.pep
LIDCSLYPINSTHLLLGRRRALGRRALREPVLIGAVVVDHVAGLRPAELLLAGAVELLRHPCAVGARAGGGVRRGAPGGGVPAVRRDEGRLGPVGPDAPPLRGPLLRVPHAGVHPHRLRRRERHGPVAAAPELPDGDAVHVEDDVGGVPQHGVGVEGRRGVEPHPELLLPPALPLAVHVRVHRVRLPARVPQELEVDLVVLRTLRRKIEGGDGAGGVPRDELELHVEAAVEVLGLGLEARAGGPVHGQRQELAVVEDLAAAVAPGDVHVLVEVAAGARGSPVLQQQHRR

SEQ ID NO: 36595 - protein, 293 aa, Zea mays
  Clone ID: LIB3076-031-H5_FLI.pep
ISGAAAELLAPAGSCNLQPEPEFRPPMWEVLQSLVRQRLVQRANMARTQSHSRRHGEPVTASRDVLVVCSSTGWTDEKHMLYLRLLEETFVHQLHGSGCIFKGLFNCSPRYCRQMKSSKQIVKYTTPGQGCAIVEGGKVKSCIKAEHVESPSCCGNQQDEKVRSLEDNASTTKPMEKATSHARAASPGQASTCYVGKHRHSPSRSAEGSDQNFDEETQGTGESKHEYNPKRLKSADGTRDHQVVNAEAHQVGCLDVSDKNSENFSASSKVLAASLDVEAGSPSGDCKDHGPKG

SEQ ID NO: 36596 - protein, 60 aa, Zea mays
  Clone ID: LIB3079-015-B11_FLI.pep
RKRMPWRRRRECLMSKTGFWGRFASELFILYRRNFVVVVWLFCEAAKPGYCYENLSSVSM

SEQ ID NO: 36597 - protein, 224 aa, Zea mays
  Clone ID: LIB3078-034-G10_FLI.pep
HNRALVEERELLSREIQAGKDEVRHLNVIIADINTEKEAYISKLMDKRRKLEAELGASEHLCDEVRHLRGEIDKLVTARKELSAEAASLVEELNREQSVKQQLPVLKTEIDGLQQELVHVRTACGLEQKGNLELLEQRKAMEKNMLSMAQEIEQMRGELANFEVRPRGPGGAYGMQIGSSEVTFTKNPYEDGYNAYVGVPEKDPLHPPEYASWGTYDRSRLQYR

SEQ ID NO: 36598 - protein, 187 aa, Zea mays
  Clone ID: LIB3079-016-A7_FLI.pep
FLLGTMFFYQTEVLRLDSSVIGLSKVFGQVALLAWSMSYNKYFKTMSARKLLSVLQFVTALVMLSDVLFVQGVYRKVGIPDSIYTIVFSGLLEGLMFFKVLPFSVHVAKLCPAGCEGSVMAFVMSALALATIVSGYLGVALAAFMGVSGDDFSALPACLLIEAACTMLPLCCSSLIKERREKEKKQE

SEQ ID NO: 36599 - protein, 238 aa, Zea mays
  Clone ID: LIB3078-035-H5_FLI.pep
PAFSARPLGFSLRLKPSPAMAAAGVGGNGPPTAHGDSIGSSRIGEVKRVTKETNVHVKINLDGTGVAECSTGIPFLDHMLDQLASHGLFDVYVKATGDTHIDDHHSNEDIALAIGTALLEALGDRKGINRFGHFTAPLDEAAVEVILDLSGRPHLSCGLDIPTQRVGTYDTQLVEHFFQSVVNTSGMTLHIRQLAGKNSHHIIEASFKAFARALRQATEYDLRRQGTVPSSKGVLSRS

SEQ ID NO: 36600 - protein, 466 aa, Zea mays
  Clone ID: LIB3079-016-D7_FLI.pep
QKPTASSPYSSSPPSSVSLSAAATAQEASSCLYRPVMAMLSRAASSAARRPLLPPPRLLAVRAMASSLFGHVEPAPKDPILGVTEAFLADPSSDKVNVGVGAYRDDNGQPVVLSCVREAERRIAGNLNMEYLPMGGSVKMIEESLKLAYGEDSDFIKDKRIAAVQALSGTGACRLFADFQKRFLPDSQIYIPTPTWSNHHNIWRDAQVPQKTFTYYHPESRGLDFSGLMNEIKNAPDGSFFLLHACAHNPTGVDPTEEQWREISHQFKVKKHFPFFDMAYQGFASGDPERDAKAIRIFLEDGHQIGCAQSYAKNMGLYGQRAGCLSILCEDEMQAVAVKSQLQQIARPMYSNPPVHGALVVSIILSDPELKSLWLKEVKGMADRIIGMRKALKENLEKLGSPLSWDHITNQIGMFCYSGMTPEQVDRLTNEYHIYMTRNGRISMAGVTTGNVGYLANAIHEVTKPN

SEQ ID NO: 36601 - protein, 107 aa, Zea mays
  Clone ID: LIB3078-052-F7_FLI.pep
DMMKKKISMPAHLMFDGQDDKLFEHFSMVAQRLGVYTARDYADILEFLVDRWKVADLTGLSGEGNKAQDYLCTLASRIRRLDERAQSRAKKAGTLPFSWVYGREVQL

SEQ ID NO: 36602 - protein, 202 aa, Zea mays
  Clone ID: LIB3079-017-E8_FLI.pep
TGVYSPKAVDNKQLPSHPSLLHASLGMPSPGRMSPRCVESGSPMNSHLAAALAQREKQQQTMRSLSSRDLGPSAARASALGSPLSTSWSKWGSPSGVPDWGVDGEELGKLRRSSSFELRSGGDDPDLSWVHTLVKESPPEKQVTTSESINSVGPSPLMPPSMNNGGEGSGLNTQLDGRDQAAVLGALLEQMQLDQQIGSLAT

SEQ ID NO: 36603 - protein, 156 aa, Zea mays
  Clone ID: LIB3076-037-G11_FLI.pep
PRSAVQCSSVLPPQSSHSITNASLPLKLGASLRSDGVQEAAAGGAVRGGGGAARRAVGGPRPGGLRKQRRDAGDADLLQARGRGAPGGPGRVLHARRHHGREAGGHVDPDHHHRHHGGGGGHLRRGRHYCCVAAAQVRVRGRRRGLRRGCRGRGRH

SEQ ID NO: 36604 - protein, 358 aa, Zea mays
  Clone ID: LIB3079-021-F3_FLI.pep
QRSQRMRQISSLLQGLARSLSVGRDRDRDRDRKGNGAGDRKTAVPAVLRTSGTLWGDGSDTFAAVCSRRGEKGINQDCSIVWEGFGCQEGTIFCGIFDGHGQWGHYVAKAVRDSLPPSLLCHWQEALALASLIDDGEKKLGDCQFDLWKRSYVAACAAVDDELRRSRRLDAVQSGCTALSIVKQGDLMIVANVGDSRAVLGTTSDDGAIAAVQLTVDLKPNLPQEKERIRRCNGQVYCLADEPGVHRVWQPSRESPGLAMSRAFGDYCVKDCGVISTPEVTQKRISSSDQFIILATDGVWDVLSNDEAVHIVAGTPDRAKAAKRLVECAVRAWRRKRRDIAVDDCSAICLFFHPPPPS

SEQ ID NO: 36605 - protein, 114 aa, Zea mays
  Clone ID: LIB3076-039-B9_FLI.pep
LANAIGGQALRLEDLETFRPEEGMILANATSLGMYPNVDGTPIPKKALGFYDVVFDAVYAPKVTRLLREAEECGVKVVSGVEMFIRQAMGQFEHFTGGIEAPESLMREIAAKYT

SEQ ID NO: 36606 - protein, 122 aa, Zea mays
  Clone ID: LIB3079-022-C1_FLI.pep
TQSPHVLVVDHSRVDCLVASIVLNSFNIRVTVAGGAMEALEFLDANNSHVDLILTDYCMPDMTGYDLLREVKESPRLKHIPVVITCTDVIPERIIECFEGGAEEYMIKPLKVSDVPRILSYM

SEQ ID NO: 36607 - protein, 352 aa, Zea mays
  Clone ID: LIB3079-024-D6_FLI.pep
ASSHRLRSSSHHHHHRRSSHESRHTQTARTLAGGGMTRRCSHCSHNGHNSRTCPNRGVKIFGVRLTDGSAIRKSASMGNLSLLSAGSTSGGASPADGPDLADGGGGYASDDFVQGSSSASRERKKGVPWTEEEHRRFLLGLQKLGKGDWRGISRNFVVSRTPTQVASHAQKYFIRQSNMSRRKRRSSLFDMVPDESMDLPPLPGSQEPETSVLNQPPLPPPVEEEEEVESMESDTSAVAESSAASALMPESLQPTYPMIVPAYFSPFLQFSVPFWPNQEDGGDLPQETHEIVKPVAVHSKNPINVDELVSMSKLSIGEPGQETVSTSLSLNLLVGQNRQSAFHANPQTRAQA

SEQ ID NO: 36608 - protein, 115 aa, Zea mays
  Clone ID: LIB3075-007-C6_FLI.pep
RLRSRRRRRRRYAPHLASFRVAKMTKRTKKAGIVGKYGTRYGASLRKQIKKMEVSQHSKYFCEFCGKFAVKRKAVGIWGCKDCGKVKAGGAYTMNTASAVTVRSTIRRLREQTEA

SEQ ID NO: 36609 - protein, 56 aa, Zea mays
  Clone ID: LIB3079-024-E4_FLI.pep
FRIGVSWLLWFWQCDAITAKSCNNIRHCRMIYCFFSHNTQQYHSNSARYFISSSSS

SEQ ID NO: 36610 - protein, 168 aa, Zea mays
  Clone ID: LIB3079-024-H4_FLI.pep
HAVRRNWERTPQGGRCVLQKSAKHAGSATGSDSLPTPNKVLHHALHYRVAGHQSSIHQFVPIIRWPRIIPSGFGYGLSLGIPSVAPHLGKGILGKPPIIPSGFGYGLSLEIPSVAPHLGNGILGKPPSNITPLDQRSSTQLVHVRNPHQHTCQQSCGGAMEPSSSGVA

SEQ ID NO: 36611 - protein, 452 aa, Glycine max
  Clone ID: LIB3051-037-H9_FLI.pep
GHRTELAAAISHFIFHTSTMAKTFKYIILGGGVSAGYAAREFAKQGVKPGELAIISKEAVAPYERPALSKAYLFPESPARLPGFHVCVGSGGERLLPEWYTEKGIELILSTEIVKVDLAAKSLISAGGETFSYQILIVATGSTVIRLTDFGVEGADAKNIFYLREVDDADKLYAAIKAKKNGKAVVVGGGYIGLELSAVLKLNNIDVTMVYPEPWCMPRLFTAGIAEFYEGYYANKGVNIIKGTVAVGFTSNSDGEVKEVKLKDGRVLEADIVVVGVGGRPQTVLVKGQVEEEKGGIKTDAFFKTNLSDVYAVGDVATFPLKLYGELRRVEHVDHSRKSAEQAVKAIKAAEEGKTVEEYDYLPYFYSRSFDLSWQFYGDNVGDTVLFGDNNPASSKPKFGTYWIKDGKVVGVFLEGGTPEENQAIAKVAKVQPPVADVNQLAKEGLSFASKI

SEQ ID NO: 36612 - protein, 199 aa, Zea mays
  Clone ID: LIB3079-025-E12_FLI.pep
EAQENKPKTLPVSNNELSLVYSIPYNSWLRRTSHTDQQGTNEPCLEFRSCSVTGRDTAFSGVANGGEVALAPDVVHHKLAYGPSSYRRQDVASPVQVGPRGGVELEVVAGHRRPVLVPDLVWDQLVIHPWRHDRSQRVHVLDEMVDEHLDRSGGDHAATTGTDCSHQLPVLDNHGRSHGRERPFQGADEVGRCRRWRIL

SEQ ID NO: 36613 - protein, 91 aa, Zea mays
  Clone ID: LIB3079-025-F12_FLI.pep
FTDNSPRLVCISVMYNPNQNLQCGVYPHNWKKAPSFTSVALIWERPCQLHMIKGSFQAIALNSRIASSKTTSVCLGRIRFDLVLDECPKLL

SEQ ID NO: 36614 - protein, 133 aa, Zea mays
  Clone ID: LIB3079-029-D7_FLI.pep
AMHADVMRNVLPQVESLLRSTARVLLYQGVRDLRDGVVSTEAWLGGVRWDGLRAFLDAERAVWRTAAEGGELAGYVQRSGSLTHVVVYAAGHLVPADNGRAAQEMIEGWVLGTGMFGRGCGDRVRDGVRSAAT

SEQ ID NO: 36615 - protein, 211 aa, Zea mays
  Clone ID: LIB3079-030-D3_FLI.pep
RPPVLCIITEFMHGGSIFDFLYNRRGNFQLPDVIRIASDVSKGMNYLHQINIVHRDLKTANLLMDDQVVKVADFGVARVKDQSGVMTAETGTYRWMAPEVIEHLPYDHRADVFSFGIVLWELLTGKLPYEDMTPLQAAVAVVQKDLRPTIAVDTHPMLAELLQRCWQKDPALRPTFAEIVDILNSIKEAVRSSVHHKRHSCRSHSGRRRGC

SEQ ID NO: 36616 - protein, 157 aa, Zea mays
  Clone ID: LIB3079-031-H3_FLI.pep
EEEHRLFLLGLKKYGKGDWRNISRNFVQTRTPTQVASHAQKYFIRLNSGGKDKRRSSIHDITTVNLTDDQPPSPSQSSLITSQSNAPAPSPAPAPAAGICQVPLAADVKRHGAGTLPFSSPNRTSAVPAYRMEFHDQQGLQCGPLHDQLLASQSVLF

SEQ ID NO: 36617 - protein, 365 aa, Glycine max
  Clone ID: LIB3040-049-D9_FLI.pep
EKKEEEEEEMANELPVKAFGWAASDTSGTLAPFHFSRRENGVDDVTLKILFCGVCHSDLHTLKNDWGFTTYPVVPGHEIVGVVTEVGNNVKNFKVGDKVGVGVIVESCKECENCQQDLENYCPRPVFTYNSPYYDGTRTQGGYSNIVVVHQRYVLRFPENLPLDAGAPLLCAGITVYSPMKYYGMTEPGKHLGVAGLGGLGHVAIKLAKAFGLKVTVISSSPNKQAEAIDRLGADFFLVSSDPAKMKAALGTMDYIIDTISAVHSLIPLLGLLKLNGKLVTVGLPNKPLELPIFPLVAGRKLIGGSNFGGLKETQEMLDFCGKHNITADIELIKMDQINTAMERLSRADVKYRFVIDVASSFSSF

SEQ ID NO: 36618 - protein, 206 aa, Zea mays
  Clone ID: LIB3079-037-D6_FLI.pep
ACYPGSPPHAREPAATTSMPLTGWNPLAPVLQTVAAFSRHILIAPDAGLDDHRLRPLLALSLSPPSPAPPQPEVRKEKKDAKEAPLTKEEVGRATWMLLHTIAAQFPDEPTRQQRRDAKELMHIISRLYPCKECADHFKEVLKANPVQAGSQADFSQWLCYVHNVVNRSLGKPIFPCQRVTARWGKLDCPERSCDLEGSIDIMPNR

SEQ ID NO: 36619 - protein, 188 aa, Zea mays
  Clone ID: LIB3067-028-F7_FLI.pep
VVSQYGQQILDLLLAETQPAKICSQVGLCTFDGTHGVSAGIRSVVDDEAGKSNGGLKSDPMCNACEMAVVWMQNQLAQNKTQELILNYINQLCERLPSPMGESAVDCGSLASMPDIAFTIGGKKFKLKPEQYILKVGEGQAAQCISGFTAMDIPPPRGPLWILGDVFMGVYHTVFDYGKLRVGFAESA

SEQ ID NO: 36620 - protein, 180 aa, Zea mays
  Clone ID: LIB3079-037-F7_FLI.pep
NDEVQAARSLCILVKTGTCNITITYTGSLVTVSNQGRNICQPLFVGTTYPPEVCDWDFGLSSQKYHLKCGSHCTPCRITLHLCSLSTSTEVHVHLLDDPDAEQRFQTKQSKSNKVEYLQNTRMDYSVTKQIRELYFASRILDEDNLSILSKLYISFIKQKGAQLTPTKAFTLIRSIAGKI

SEQ ID NO: 36621 - protein, 115 aa, Zea mays
  Clone ID: LIB3079-039-A3_FLI.pep
HYKMVTGKVAVVLLACWTLVLYQPVLGRLPCNNDQKREILRECDPLNSTPDYTPSRHGACCVAVRKVPGTNMLCIASILSLADKAKYSVRKILGFRDACAPSHPHHQVVNTRSIT

SEQ ID NO: 36622 - protein, 271 aa, Zea mays
  Clone ID: LIB3067-030-E10_FLI.pep
FGSALARYARDSPPRARSPRRHPDSSARFPSPHTQPRRHPDSSVRFPSPVPAPAAPAAIPIPPPASPPRARGPAAIPIPPPAAVPKGKKREAEDEIEMAVSAKKQKAAPPAKAVPTSKKDAKEDAKSKKQPPPKKAENSSSDSEEDPESEEENFYNLIESGRVDGDEEFDEDEEDGFEFGDADEAMQCVVMAESSTTAAALRAHTQDYEALAAHKRKALAEEQPQREEGPKRPRPDQLSEAEAATMFDQLMEGFGLRRKRRSKDGKRRGRK

SEQ ID NO: 36623 - protein, 283 aa, Zea mays
  Clone ID: LIB3079-039-C9_FLI.pep
VVMARFDVDAVLAAIERHRVTYLFCAPPAMIALAKHSRGGRYDLSSLRCIGSGAAPLGKDVMVAMADRFPGVDIIQGYGMTETCGIISLEYVQKGCARQFGSTGALVTGVEAKIVNAKTMKHLPPSQLGEICVRGPNIMEGYFNNVQATESTIKNGWLHTGDLGYFDERGQLHVVDRLKELIKYKGFQIAPAELEGLLLSHPEILDAAVIPYPDAEAGEVPIAYVVLSPKSSLAEADVQKFIEKQVAHYKRLRKVTFVGSVPKSAAGKILRRELIAQVRLSKL

SEQ ID NO: 36624 - protein, 129 aa, Zea mays
  Clone ID: LIB3079-039-G2_FLI.pep
KYLTRCCSTAVASLNTKLSKSQQEQPPDFCSSCAAAPEADEPLAGLRFMSTMSSCFPDESASSPGRDPAILRNRGLTLNPAFALVSMNIAPCSCALASPSSVDTFLLSTRSVLFPTRKMSTSPPLCVFT

SEQ ID NO: 36625 - protein, 58 aa, Zea mays
  Clone ID: LIB3067-040-F7_FLI.pep
TQKIIILIKDNGIVMLQCRHSAVHTYRSLKPQLISKTKKNTAGRVDTQKKSSLRIKPV

SEQ ID NO: 36626 - protein, 208 aa, Zea mays
  Clone ID: LIB3067-042-G8_FLI.pep
SLAAKFRNSGQTCVCANRILVQEGIYEKFAKAFIQAVQSLKVGNGLEESTSQGPLINEAAVQKVEKFINDATSKGANVMLGGKRHSLGMSFYEPTVVGNVSNDMLLFREEVFGPVAPLIPFKTEEEAVHMANDTNAGLAAYIFTKSIPRSWRVSESLEYGLVGVNEGIISTEVAPFGGVKQSGLGREGSKYGIDEYLELKYICMGNLG

SEQ ID NO: 36627 - protein, 392 aa, Zea mays
  Clone ID: LIB3079-040-C4_FLI.pep
PSKFLVVCLNAIRDAVAPEEGGGSIHGAGDWGVELWRCCSAQAPSDVLDASGACATVAQTAWLVSTACDIVARKERHGMVVSCPFLLYLVSSQDKAAQVRSICKPLKPLGIHSVSLHPGASIEHQISGLKTCEPEFLIATPERLLELVSLKAIDISGVSMLVIDGLKCFVDHNVSDKIFSIRDAISNNLQITIFTDPSDKNIATMAKNLLRGRITKLSINDSVSSRSAFIAQHVHFCPSEELKTTKVKEILEQILQDHPKKTSKVLLVAASDKKARLMSLSLKLENCTVIDDSCGNSFTICSSVGLMNVIVKDRENMSVTDVEAFETVLVVDLPPSVDEYIEILTGAALHVIGGEVHSIFCNTDASVAKPLAQLLADCGQVVPEFLKSLKSS

SEQ ID NO: 36628 - protein, 92 aa, Zea mays
  Clone ID: LIB3079-042-G11_FLI.pep
QQLQQVTVARSVAAAAAAATNLELNPFLEMDTKCFFTGGPFATLDMKCFLPGSLQQMLEAQQRQMLATELNLGYQLAPPGSDAADNNPHHQF

SEQ ID NO: 36629 - protein, 124 aa, Zea mays
  Clone ID: LIB3079-043-A12_FLI.pep
LRTSSTFRVSDLHSRITIPSLQLHIHIYSMHKGLQGFFFLRTNWSDCATSSCPVPVLSSRPLLLACFRGGKDLQLGPPERRQPRRRSDRRDTHGLPQPGGDLPHARPSPRVALHAGPDHLADDR

SEQ ID NO: 36630 - protein, 230 aa, Zea mays
  Clone ID: LIB3069-015-B8_FLI.pep
ISNLCVCPFPAFLSNGEMYSDQISTGRKRSIHDRLDGDLPAGTGAGGRVRHTVSKRQRQIDEKWKHDLYREDDEPASKSTDPKDLRLKLQRRSFQQDFTSTRSSGVRDLREKLSGIMNPQPSNADPPKPKPKPVSEVVNISRRQIADEMHARQNKKPPKQTSSKKTSQPKAESPLDSFLSSLGLEKYSITFQAEEVDMAALRHMTDSDLKALGIPMGPRKKIILALESRA

SEQ ID NO: 36631 - protein, 29 aa, Zea mays
  Clone ID: LIB3079-043-D5_FLI.pep
LFTSASYYTSPILCSQLTFCQTVVLFSFV

SEQ ID NO: 36632 - protein, 103 aa, Zea mays
  Clone ID: LIB3068-043-F2_FLI.pep
EIRMAFLVHLYSNKTLNAARVHEHSDLAPHRLRREVRLELGADNAGVAVRTGDLTPDAPVAGLTALGLGLVDVRHALASVPRDVLLGVHPLDLHKRRGLVLVR

SEQ ID NO: 36633 - protein, 236 aa, Zea mays
  Clone ID: LIB3069-002-D3_FLI.pep
LALGQINTARNIIAKISKDYLRLLKYGDSLYRCKCLKVAALGRMCTVVKRISPSLAYLEQIRQHMARLPSIDPNTRTVLICGYPNVGKSSFMNKVTRADVDVQPYAFTTKSLFVGHTDYKYLRYQVIDTPGILDRPFEDRNIIEMCSITALAHLRAAVLFFLDISGSCGYSIAQQAALFHSIKSLFMNKPLVIVCNKTDLQPLEGLSEDDMKLVMEMKAEAMKTITQAVGPNEEGG

SEQ ID NO: 36634 - protein, 407 aa, Zea mays
  Clone ID: LIB3079-049-B9_FLI.pep
DGSIRARTRAPVHRIASVLPSPQRHRTAITRAPPAMTPAAAISGSSSHVVVSSARLRQPFTLPPRTACPIAAAASPVTRRGVAVAAVSSPVVSAAAGKDAKQAPKDFLQIIDFDKDTIMKILNRAIEVKALIKSGDKSFQPFKGKTMAMIFAKPSMRTRVSFETGFFLLGGHAIYLGPDDIQMGKREETRDVARVLSGYNDIIMARVFAHQDILDLAKYASVPVINGLTDYNHPCQIMADALTMLEQIGRIENTKVVYVGDGNNIVHSWLLLAAVLPFHFVCACPKGFEPDANTVEIARSAGISKIEITNSPREAVKGADIVYTDVWASMGQKEEADYRKQKFQGFTVDEALMEIAGPQAYLMHCLPAERGVEVTDGAIEAPNSIVFPQAENRMHAQNAIMLHVLGA

SEQ ID NO: 36635 - protein, 219 aa, Zea mays
  Clone ID: LIB3079-049-H5_FLI.pep
PTLQPVRLRSFLSYHLNPSSIHRRRSAVSSLRWRRGKGTRTEQKAMDTMRGALERAKMLVGMEVDEESALPPPEEQSFFDDINRHCTLNTTQRLYGFAICLAAGLTCTFLSMLVFFNPVKFGVAFTLGNLMALGSTAFLIGPKRQFDMMLDSVRIYATAIYIASIIIALFCAIYVRSKLLTLVAIILEFGALIWYSLSYIPFARSIVSKVMTSCFDTDF

SEQ ID NO: 36636 - protein, 90 aa, Zea mays
  Clone ID: LIB3067-026-G8_FLI.pep
LLSPGPPFHRPGLALLRLAFPFLAHTTRRNHPSRVLPFPAQPKRSTPPASKGSASLALILVALFLLFYKGLRRSGDPCRHSPTLSLAAYD

SEQ ID NO: 36637 - protein, 178 aa, Zea mays
  Clone ID: LIB3079-050-C5_FLI.pep
SLAESSRQQEPDIVSARSSSSGSGAASERKKRASEERTSTVKKSKQEGSKPSPPKQQQVPKVKIGEKITALQQIVSPFGKTDTASVLFETIKYIKFLHEQVQLLSEPYTNSSRSKGNNHFPWGDHRAAAETSKQGDEAEHDLSDRGLCLVPVSWTPQVYRDGTAMDYWTPAYRGCLYR

SEQ ID NO: 36638 - protein, 123 aa, Zea mays
  Clone ID: LIB3068-029-A3_FLI.pep
TRKSRKRILSMHCYICMLLSLASLSRSMSLLNSMFIAARVARRIVIVAQIFGALEEEGPTKPRQKSHNMISSLTCCPMAILTRYVVVVSSFAAPKWISNQNNLRLVKSLIEGINILTVYFIPS

SEQ ID NO: 36639 - protein, 211 aa, Zea mays
  Clone ID: LIB3079-051-G1_FLI.pep
LDKVCVLSCGISTGLGASINVAKPPKGSTVAVFGLGAVGLAAAEGARIAGASRIIGVDLNPSRFEEARKFGCTEFVNPKDHNKPVQEVLAEMTNGGVDRSVECTGNINAMIQAFECVHDGWGVAVLVGVPHKDAEFKTHPMNFLNERTLKGTFFGNYKPRTDLPNVVELYMKKELEVEKFITHSVPFAEINKAFDLMAKGEGIRCIIRMEN

SEQ ID NO: 36640 - protein, 120 aa, Zea mays
  Clone ID: LIB3068-045-D5_FLI.pep
SLSQGKNISGMHQFVKLRRKRNKEKRGQKVCRIKNMPTHRDARSHVSLSPLRLFLGLRAPGRLTECSRRRRRRRRPRGRRRRRARRRRSRWWGPEPEPPRRAPRWPPRRRRGRRRRSSSS

SEQ ID NO: 36641 - protein, 101 aa, Zea mays
  Clone ID: LIB3079-052-C7_FLI.pep
NNGRSLHQAFRGPPPARLLHRDARRAGDYGVGEEVRVAELPLQGTLLEGRQLRKRLPDRRFHRRRVQGPTPPLLLHQGLLVLPRLASPRLVSCVCIAAADQ

SEQ ID NO: 36642 - protein, 264 aa, Zea mays
  Clone ID: LIB3079-053-D7_FLI.pep
IYRGVTRHHQHGRWQARIGRVAGNKDLYLGTFSTEEEAAEAYDIAAIKFRGLNAVTNFEISRYNVETIMSSNLPVASMSSSAAAAAGGRSSKALESPPSGSLDGGGGMPVVEASTAPPLFIPVKYDQQQQEYLSMLALQQHHQQQQAGNLLQGPLVGFGGLYSSGVNLDFANSHGTAAPSSMAHHCYANGTASASHEHQHQMQQGGENETQPQPQQSSSSCSSLPFATPVAFNGSYESSITAAGPFGYSYPNVAAFQTPIYGME

SEQ ID NO: 36643 - protein, 162 aa, Zea mays
  Clone ID: LIB3069-004-B9_FLI.pep
ASSPLVVFMLCLVDPLLQVLAELPAPVLNGTMLTVEDLHQELKCSINIKHRDEFDEEKEPDRMVLVGWSGPVDKQTTNNGETKSVPSSSNTEDVDGTAEDISATSGMKRKLNEILETKENFDALENLSGVDSSSAQVVEDDNDDDLVMFDEDPRQSKKKRLQ

SEQ ID NO: 36644 - protein, 205 aa, Zea mays
  Clone ID: LIB3079-054-B6_FLI.pep
SRPIRTDSVASPLHSPQAAGRRRGDRSKMFFHIVLERNMQLHPRHFGPHLRDKLVSKLIKDVEGTCSGRHGFVVAITGVEDIGKGLIREGTGYVTFPVKYQCVVFRPFKGEILEAVVTMVNKMGFFAEAGPVQIFVSNHLIPDDMEFQSGDVPNYTTSDGSVKIQKESEVRLKIIGTRVDATEIFCIGTIKDDFLGVISDPGAAV

SEQ ID NO: 36645 - protein, 148 aa, Zea mays
  Clone ID: LIB3069-004-C10_FLI.pep
TLNRNIITYSKQKIYCAGRRHLTGCRGDSVLSFHDTSGAPSQFAFDIQALLAMLLDSQSRPSYRPSPVVAQVLWMYQCRCRRECNPNLSVISAAFMALGRSCLLAKTSSTASRSSSSFSILCSSSLASTTRSRSLLSTTKIRPCVFWK

SEQ ID NO: 36646 - protein, 136 aa, Zea mays
  Clone ID: LIB3079-054-D4_FLI.pep
LSPLVFRAQYDFVSHCNILNNDFTSYNKHYYGCPDDKTFQHMASVYSRSHYNMSLSKEFEGGITNGAFWYPIYGGMQDWNYIHGGCFELTLEISDTKWPKADELPIIWEHSRMSMLNLLASLIKAIERRGTPCHLQ

SEQ ID NO: 36647 - protein, 154 aa, Zea mays
  Clone ID: LIB3069-022-H2_FLI.pep
ETEALSILEQDEALQKIDSDQKQKEVEEIESQNDELQVDEQKHEDKRDDLAKEPLVEYQNFENRASNNTKDNDAFKVEQTEAANSEILKNKALHISKESTPSIMAMKVENIKETSEGTEEDDAAKNDNKDEQENAENVDIVSKTSTNEQGQTTD

SEQ ID NO: 36648 - protein, 103 aa, Zea mays
  Clone ID: LIB3079-054-D6_FLI.pep
FYSLPIYCMQIWVCSKTRWLRFCQYGSIYCSLSLVENVTRVLLQVSFHLASEPEMLLDSLFWRQQPYLTPSFLFHNLYEQMNSVDAAIDRRISESRLAGRMAL

SEQ ID NO: 36649 - protein, 139 aa, Zea mays
  Clone ID: LIB3069-046-C8_FLI.pep
TKLPATSPRAPAATTSPAPRAPRLHPARRRQISRVRVQTASSPVPYLPSFSWRPLSLLWRRLGDLPAPAALRQVPRSSSGPSPKSSQQVSMAQKMATVERVEELLEKLRAASWDHAVKGLNLEDGHAHCLDVIFTRADY

SEQ ID NO: 36650 - protein, 285 aa, Zea mays
  Clone ID: LIB3079-059-B2_FLI.pep
DMGQALGLIQVDQSTVAIKETFGKFDEVLEPGCHFLPWCIGKQIAGYLSLRVQQLDVRCETKTKDNVFVNVVASVQYRALADKASDAFYRLSNTREQIQSYVFDVIRASVPKMNLDDAFEQKNEIAKAVENELEKAMSMYGYEIVQTLIVDIEPDEHVKRAMNEINAAARLRLAASEKAEAEKILQIKRAEGDAESKYLAGLGIARQRQAIVDGLRDSVLAFSENVPGTSAKDVMDMVLVTQYFDTMKEIGASSKSSSVFIPHGPGAVRDIAAQIRDGQLQASLL

SEQ ID NO: 36651 - protein, 407 aa, Gossypium hirsutum
  Clone ID: LIB3083-009-H11_FLI.pep
NSARAELKGCINDVKRMYKCLTERYGFSEEDITVLIDTDNSYDQPTGKNIRRALNDLVRSAEPGDFLFVHYSGHGTRLPAETGDDDDTGYDECIVPCDMNLITDDDFRELVDKVPKGSRISIVSDSCHSGGLIDEAKEQIGDSSKPQDSESESGSGGFRSFLHHTVQDAFESRGIHVPSRLRHRDHHHDKEEVDDRGVNEDYDDSGYVKSRSLPLSTLIEMLKQKTGKDDIDVGKLRPTLFDMFGEDASPKVKKFMNIIMTKLQGSGDDGEGGGFMGKVGNLALQFLKQKLDDDEGYGKPALETEVSSKQEAYAGAGKHSLPDSGILISGCQTDQTSADASPSGNASKAYGALSNAIQTIIADSDGSITNKELVLKARQMLKKQGFTQQPGLYCCDHHVRAPFVCEY

SEQ ID NO: 36652 - protein, 162 aa, Gossypium hirsutum
  Clone ID: LIB3083-062-G8_FLI.pep
IITPTMATSSGSSATQINSGSEEALMDERKRKRMISNRESARRSRMRKQKHLDDLMTQLTQLQKQNHEIITNINFTTQHLLNVESENSVLRAQLNELTHRLQSLNEIISFLNDVHGDDDDDDDKTSIDFTQPAVADNIFLIPFHLAYLNQPIMASADNTFQH

SEQ ID NO: 36653 - protein, 195 aa, Glycine max
  Clone ID: LIB3050-025-F7_FLI.pep
IELCMYMLVGERGLTIEGKFIKFTGIGVYLEDKAVPSLAAKWKGKTSEELVHTLHFYRDIISGPFEKLIRGSKILPLAGAEYSKKVMENCVAHMKSVGTYGDAEAAAIEKFAEAFKNVNFAPGASVFYRQSPDGILGLSFSEDATIPEKEAAVIENKAVSAAVLETMIGEHAVSPDLKRSLASRLPAVLSHGIIV

SEQ ID NO: 36654 - protein, 112 aa, Glycine max
  Clone ID: LIB3087-001-E10_FLI.pep
FSHTLVSSFRPWQRRGPFPETLNERKSIRQRFPFVTTSFTDNSDGFVVRMLLLKLLSELGHENEESAWRSLWLVRILSSFLRLLPSSTSALALQPAIGGFGVGFGFRHGENR

SEQ ID NO: 36655 - protein, 215 aa, Glycine max
  Clone ID: LIB3087-004-G10_FLI.pep
CEPFATYARAPLPLSSAPLMRLLSAPLVTTRSICVTNLLVDTFGLALLTPLMFHAVTYVKTHLVLNAFFYCEIDGSSLCLQCDMIVHVGGKRTHGRYLLLRQRVQFPCDKPAQMEELGLQPMDQNESRRDESQSLKLKIRDSQQNHSVSPVPRQENNIDGHGKMDKKLIDLNTRPLRLNGAAPNNQERGMDILRGNNHKSASVPPVESFKQESEK

SEQ ID NO: 36656 - protein, 285 aa, Glycine max
  Clone ID: LIB3087-004-G4_FLI.pep
MGNQKQKWTQDEEDALIAGVEKHGPGKWKNILKDPQFAPFLTSRSNIDLKDKWRNLSVSNGAQGSKEKSRVPKPKAFSAPPATTATTATPQNASPAPQSASSDAAVAPDASQNDQDAKNPPRYNALIFEALSALKDSNGSDMNAIIKFMEQKNHQVNQNFKRALSTRLRRLVSQGKLEKVPNGYKVKKEASSGTKSPSPKAKDVRPPQPQRQSPASLFMTNDTLKEAADTAAYRVADAESKSYLAAEAVKEAEKISLLVEHSDSMLQLAKDIYEQCSRGEIILLA

SEQ ID NO: 36657 - protein, 553 aa, Glycine max
  Clone ID: LIB3055-008-E8_FLI.pep
SPPTPTKMAPSPQEIIFRSPLPDIPIPTHLPLYSYCFQNLSKFHDRPCLIDGDTGETLTYADVDLAARRIASGLHKIGIRQGDVIMLVLRNCPQFALAFLGATHRGAVVTTANPFYTPAELAKQATATKTRLVITQSAYVEKIKSFADSSSDVMVMCIDDDFSYENDGVLHFSTLSNADETEAPAVKINPDELVALPFSSGTSGLPKGVMLSHKNLVTTIAQLVDGENPHQYTHSEDVLLCVLPMFHIYALNSILLCGIRSGAAVLILQKFEITTLLELIEKYKVTVASFVPPIVLALVKSGETHRYDLSSIRAVVTGAAPLGGELQEAVKARLPHATFGQGYGMTEAGPLAISMAFAKVPSKIKPGACGTVVRNAEMKIVDTETGDSLPRNKHGEICIRGTKVMKGYLNDPEATERTVDKEGWLHTGDIGFIDDDDELFIVDRLKELIKYKGFQVAPAELEALLIAHPNISDAAVVGMKDEAAGEIPVAFVVRSNGSEIAEDEIKKYISQQVVFYKRIGRVFFTDSIPKAPSGKILRKVLTARLNEGLVVAN

SEQ ID NO: 36658 - protein, 232 aa, Glycine max
  Clone ID: LIB3087-005-D1_FLI.pep
RNKKTSLITIMAPRDHKTSNAKANGNGNSGVKEVHFRGVRKRPWGRYAAEIRDPGKKSRVWLGTFDTAEEAARAYDAAAREFRGPKAKTNFPLPLENVKNSSPSQSSTVESSSRDRDVAADSSPLDLNLAPAAVASARFPFQHQFPVFTGAVPAANQVLYFDAVLRAGMAGPRGFAFGYNHHPVAASEFHATTSDSDSSSVIDLNHNEGEVKGNGSRIFDLDLNHPPPHEIA

SEQ ID NO: 36659 - protein, 463 aa, Glycine max
  Clone ID: LIB3087-005-G2_FLI.pep
EVKNNNINHSSPLLSPTIVMGQSLSCSGNYDHGLFTAVQHGDLEIVTTLLDSDPSLLHQTTLYDRHSPLHIAATNDQIEILSKLLDGSLNPDVLNRHKQTPLMLAAMHGNIACVEKLLQAGANVLMFDTSYGRTCLHYAAYYGHSSCLKAILSSAQSSPVSASWGVSRFVNIRDGKGATPLHLAARQKRSECVHILLDSGALVCASTGGYGCPGSTPLHLAARGGSIDCIRELLAWGADRLQRDASGRIPYMVALKHKHGACASLLNPTSAEPLVWPSPLKFISELNPEAKALLEQALMDANREREKNILKGSSYSLPSPSHSDGVADNMSEVSESELCCICFEQVCTIEVQNCGHQMCAQCTLALCCHNKPNPATACLTPPVCPFCRSTITRLVVVKTECHDETDQDSADINCSKLSKSSRKLRHLNDSGSSSFKGLSSVSSFGKLGSRSSGRIAAEWLDKQ

SEQ ID NO: 36660 - protein, 344 aa, Glycine max; identical to SEQ ID NO: 36573
  Clone ID: LIB3040-020-C3_FLI.pep

SEQ ID NO: 36661 - protein, 161 aa, Glycine max
  Clone ID: LIB3087-005-H8_FLI.pep
PGVGLLARKRTEQNHRYEHQHHATCRQSYHLGESSLEPPWIPLTVLDETALKARQRLHKKLGHFFSSYRSSENPRKEGKVNQSSYEKKDGGIGRKLLESSWLLRGNKFKKDRKVCAVCLEDLGQEQQVMNLSCSHKYHSACLLPWLAAHPHCPYCRTPVQP

SEQ ID NO: 36662 - protein, 218 aa, Glycine max
  Clone ID: LIB3087-006-C9_FLI.pep
SVSDLAVENQNLKTAKRKEREKKVKASSKKSKSVAAADEISGDGEKLPYVHVRVRRGQATDSHSLAERARREKINARMKLLQELVPGCNKISGTALVLDKIINHVQSLQNEVEILSMKLAAVNPVIDFNLDSLLATEGVTPMDCNFPPTVAPVMWPEIPQNGNRQQYQQPWPFDALHQPLWGREEDNTNFMTPENSLLSYDSSANSVSLHSNQLKMEL

SEQ ID NO: 36663 - protein, 151 aa, Glycine max
  Clone ID: LIB3040-026-H3_FLI.pep
KAVIKETLRLHPATPVLIPRESMQDTKVMGYDIAAGTQVLVNAWAISVDPSYWDQPLEFQPERHLNSSIDIKGHDFQFIPFGAGRRGCPGIAFAMLLNELVLANIVHQFDWAVPGGLLGEKALDLSETTGLSVHKKLPLMALASPHHLSQN

SEQ ID NO: 36664 - protein, 84 aa, Zea mays
  Clone ID: LIB3088-001-G12_FLI.pep
NGNICSSLLYVKWLTVFLLEQLGCPLLLLPPGRLLLTEPSVPGPTRLQVKQPAYGRAGTGPCYSSFVLRYRPLFFFFSLSLSLL

SEQ ID NO: 36665 - protein, 419 aa, Zea mays
  Clone ID: 700333206_FLI.pep
PQQQGQGGPGSGGWTPEQFWSLLDKADRRFARVRDLPSFGRQEPDEFAKAFRAYTQLWRMQQEHRHRLLDAGLRRWQVGEIAARIAHLYYAQYQRTADTALLSEAFVFYHAVLDRAYFQDADHHLAPAKHLRFLARFLLVALLLGRRSHTVPRLASDIRTLLDDSKKSFQDAEYKEWKHVVQEIARFLRADSPFMNMRPLRYSYAFDPPPDTLRTVPTTVKKRGLVLSDTILCSYYPNEVKFTDLSIDVFRMVQCLEWEPCGSFALNDGYSAHDESGQNQPNLLKDLRDAALPPNPLKTILYRPSVTHFLTVLSTKCEELPSNGIMLIYLSATGEMGTSGFCPDTGENVLSNFNKFDISSLSHTSSKENKEPCLWLGCRETEGSNCIYPGDLIPFTRRPLFLVIDSSTSYAFKAVYSWY

SEQ ID NO: 36666 - protein, 241 aa, Zea mays
  Clone ID: LIB3088-001-G6_FLI.pep
ILMTFFLGDTTRERSCRPSSRLDWELRLRGGLGRRYHDRAPDDVLARHPLQVPLGAGDGRRPVPPHRHGEALLLVRPGEPQHRGPHHHGHGPGHVHHGLVHRVRLPDVGHGAADGDRMGQQLHHQRRVVELRLGDGLQLGAGDAAPSYLLDAVVPDAQPAEVGDVLAGAEVVHQPRVDGAGRVHVPGAHAVEARPPVLLVLDRHARVVRRARRRHDRRLDRRGGPARVQALDDGRDAAQVR

SEQ ID NO: 36667 - protein, 364 aa, Zea mays
  Clone ID: 700335261_FLI.pep
DAMEEARDHRLSSTAGRPFLSGFCAAALRRKPLGARASAAAAATGEGLVRQLGVLDLVLLGIGASIGAGIFVVTGTVARDAGPGVTISFVLAGAACVLNALCYAELASRLPAVVGGAYLYTYAAFNEITAFLVFTQLMVDYHIGAASIARSLASYFIEFLELIPLLKGQIPSWVGHGEEFFGGVVSINILAPVLLIILTAILCYGVKESSAVNTFMTTLKIIIVIVIVFAGVFEVDVSNWSPFMPNGFKSVVTGATVVFFAYVGFDAVANSAEEAKRPQRDLPIGILGSLIACVLLYVAVCLVITGMVPYTLLGEDAPLAEAFAAKGLKFITVLISIGAVAGLTTTLLVGLYVQVIPSNLAMYV

SEQ ID NO: 36668 - protein, 174 aa, Zea mays
  Clone ID: LIB3088-002-F12_FLI.pep
TLADGLHILSKEKTGVAVIDRKTSRLIGSLQCSDLYLFLDDSTLFSKRTTTTLEELISLNNKTDRKCSTAENSCAPGRNILALRSRQSGMVGLPATNLESDTLKQAMEKLTTLRSSCSFIVDEHGRVQGVVTTRDIISVFSPLCMDSRIDGATFFSAALEQAGCRVENGQMFQN

SEQ ID NO: 36669 - protein, 100 aa, Zea mays
  Clone ID: LIB3088-003-A9_FLI.pep
PANSWRGVPSISTLKRCNTSKEKKMIQTMRTQEFTLEQLKTRKAQLLLKFKTHDPFYSIRSSSSSGRGCAAAAASSASCCCCIAMSMVTSGGLRATASTK

SEQ ID NO: 36670 - protein, 98 aa, Zea mays
  Clone ID: LIB3088-004-F5_FLI.pep
DGKYIILRLDLLVPHVHKMHHRTIPAQMQGNSSTFAYACDCYKVSRASLFWCICILPGGMCIGIVLSSTSHIFCTYLAANFLQVLSCELHLQGVNVGI

SEQ ID NO: 36671 - protein, 195 aa, Zea mays
  Clone ID: LIB3088-007-B4_FLI.pep
ISPKTSPLEEGSPSERAAMADSSAPTRVMMAVNESSLKGYPHPSISCRTAFDWTLSKLVRSNPGGFHFLFVHVHVPDEDGFDDMDSIYASPEDFHQMKQRDKIRGLHLLEYFVNQCHQLGIKCEAWIRHGDPKEVICSEVKRVQPDLLVVGSRGLGPFQRVFVGTVSEFCVKHAECPVITIKRNATEAPQDPVDD

SEQ ID NO: 36672 - protein, 86 aa, Zea mays
  Clone ID: LIB3088-010-A4_FLI.pep
SEVEYMQRREMELQNDNLYLRSRVDENERAQQTANMMGAPSTSEYQQHGFTPYDPIRSFLQFNIVQQPQFYSQQEDRKDFNDQGGR

SEQ ID NO: 36673 - protein, 110 aa, Zea mays
  Clone ID: LIB3088-010-D8_FLI.pep
ISRCTTQVFPGGWTAVLVSLDNVGVWNLRAERLDDWYRGQEVYVKVADPLGYNITEMVVPDNALYCGLLKERQKPQVHESNSKSSAQGDAGWSNRLLATMILVVAAVIFS

SEQ ID NO: 36674 - protein, 66 aa, Zea mays
  Clone ID: LIB3088-026-G1_FLI.pep
EMQEPVSLTFALRYMNSFTKASSLSEQVTISLSSELPVVVEYKIAEMGYIRFYLAPKIEDDEEMKP

SEQ ID NO: 36675 - protein, 227 aa, Zea mays
  Clone ID: LIB3088-044-G8_FLI.pep
DPDASSRLNNPDSSKMDTNFLKEAYPLHTPNPSSVIETVYEPMALVTISPPFICSDGLSFAPEIRSKPGEMSDCEAEMVTCSNNFFGNAEQSAKLASSDDRPEAFTMTESTTNCGDEQLTDVKEPVASTAKEQLSKDIETMPDKKKGEGALFYEPPRFPGLDVPFISCDLVTSADLQEFSPLGIRQWMRSTMNVPTPLRLWGSPTHDESPDALKTAAESFPCTSSIM

SEQ ID NO: 36676 - protein, 91 aa, Zea mays
  Clone ID: LIB3088-045-B1_FLI.pep
GLQSRVATDLTCRPSLGTLGLKWFGGIEECLNPDRSKTPPIHLNPLQSVSFLEYPNQAVGGRVSQLMTRMEVRDHVEGHCFMEILTFFCKF

SEQ ID NO: 36677 - protein, 150 aa, Zea mays
  Clone ID: LIB3088-049-C2_FLI.pep
ESRRRSFYGSSSIFKNFPRGYITYVPQRAGEGRREGRITDGQTCSTILWRRTWLRSSTLMARTAPVRESRACLTLAKLPSPMVLPTSYGPTRVFLAAAALGSAILPSVGEEWRTRDEDRWVCVGFLGWFDETRQGEGGSGVRWISLRQEW

SEQ ID NO: 36678 - protein, 263 aa, Glycine max
  Clone ID: LIB3092-016-B12_FLI.pep
PTQPKTQAKFSLSQLQSLSLSLSLSLSTKKMALETLNSPTTTAPSFPFDDPTIPWAKRKRSKRCSRDHPSEEEYLALCLIMLARGGTTRRVSTPPPQPTPDPSTKLSYKCSVCNKSFPSYQALGGHKASHRKLAASGGEDQPTTTSSAASSANTASGGRTHECSICHKSFPTGQALGGHKRCHYEGNSNGNNNNSNSSVTAASEGVGSTHTVSHGHHRDFDLNIPAFPDFSTKVGEDEVESPHPVMKKPRPFVIPKIEIPQYQ

SEQ ID NO: 36679 - protein, 274 aa, Zea mays
  Clone ID: 700334635_FLI.pep
KDIIVANITLRNSPFWHLHPYDCTNVTVSNVTIMSPVSGAPNTDGIDPDSCQDVLIENCYISVGDDAIAIKSGWDQYGIAYGRPSSDILIRNVTARSLVSAGISIGSEMSGGVANVTVENVRIWESRRGVRIKTATGRGGYIRNISYRNITFDNVRAGIVIKVDYNEHADDGYDRTAFPDITSISFKGIHGQGVRVPVRAHGSDVIPIKDISFQDMSVGISYKKKHIFQCSYLEGRVIRPVFPKPCENLDVYDEQGQLVKRAVALNSTELDYDI

SEQ ID NO: 36680 - protein, 189 aa, Glycine max
  Clone ID: LIB3092-021-A11_FLI.pep
LNLSSCINDSASDSPSSMSTEKPKENKTTTAEPPPANDPAKPPAKAQVVGWPPVRSFRKNIVQRNSNEEEAEKSTKNAFVKVSMDGAPYLRKVDIKLYKSYQELSDALAKMFSSFTIEKCGSQGMKDFMNETNGSDYVPTYEDKDGDWMLVGDVPWEMFVESCKRLRIMKGSEAIGLAPRAVEKCKNRS

SEQ ID NO: 36681 - protein, 25 aa, Glycine max
  Clone ID: LIB3092-029-E5_FLI.pep
GNFSIGFFRYYYFPKESKLLVNNCY

SEQ ID NO: 36682 - protein, 290 aa, Glycine max
  Clone ID: LIB3092-033-F4_FLI.pep
QSTFQDEKQVEFDCCMKPEQTQACAMYKICSCKCCGEKADDTDCLVCDSCEEIYHVSCIEPAVKEIIPHKSWYCANCTANVIESLHENCVLCERLNDAKTLDDVIGDGSFPTIEETQNEFEENSNCTSDGIQVSIGEEKTPNCKICENEVDGGKIKICGHRFCSNKYYHVRCLTINQLKSYGHCWYCPSCLCRVCLTDQDDDRIVLCDGCDHAYHIYCMKPPRTSIPRGNWFCRKCDAGIQAIHQAKKAYEFNKPRRNGEDAAKPMPILKRNTTINVHGNWKVVEQWTCF

SEQ ID NO: 36683 - protein, 194 aa, Glycine max
  Clone ID: LIB3092-041-H8_FLI.pep
QRPPSVRRKWGKYVSEIRLPNSRQRIWLGSYDSAEKAARAFDAAMFCLRGSGAKFNFPSDPPNIAGGGNMTSSQIQIAAARFANSEPRNERSDQPVESLTSDEETASFPVISDTDTSSPPLSDVTFQNDAELVTGSFPDMFSDFGSGDFVPDFSDFPSFDDFSRDFFLHELPGFNFGEENLDGLIIQDSFLWNF

SEQ ID NO: 36684 - protein, 51 aa, Glycine max
  Clone ID: LIB3092-049-G3_FLI.pep
NKIKFSILLRSTFLQVFPDLEVGTLRSNLWINLNFVLCNIISHPIPNYNIV

SEQ ID NO: 36685 - protein, 342 aa, Glycine max
  Clone ID: LIB3092-062-C5_FLI.pep
KSSVEMAKKLPQEKRLCLLKCLEASLALCGICNDPPEDAVVSVCGHVFCNQCICEYLTGDDNQCPAPNCKTRLSTPSVFSKVTLNSSFSDQPCDNLPDYSGCEVEESEFCSQAQPYDSSKIKAALEVLQSLSKPQCFASQNNSVQSTSGESTDGLGSSSSADRMKSLNEIPESQNVLEERSSNNSVGVGEKAIVFSQWTRMLDILEACLKNSSIQYRRLDGTMSVTARDKAVKDFNTLPEVSVMIMSLKAASLGLNMVAACHVLMLDLWWNPTTEDQAIDRAHRIGQTRPVTVLRLTVRDTVEDRILALQVSVGCSFWWKQKKQGAENFVAWPLLTLDMKII

SEQ ID NO: 36686 - protein, 273 aa, Glycine max
  Clone ID: LIB3093-006-E10_FLI.pep
ASISQPKMQSSISQSEICITDYLLPQEVPSQFQFPDMSNNNIPMNHTNLQMPQITSFSKPPRSSSNLSNRKPSLRNITIPSITSGLTTTMSQTTTTTTIATTMYNNNQVTSSSDETNNIKENKHYRGVRRRPWGKYAAEIRDPNRKGSRVWLGTFDTAIEAAKAYDKAAFKMRGSKAILNFPLEIGESEESVSSCIKVGVKREREEESKSNNYEKSEFNNNNNSNKHVKKEECSPKAVCPLTPSCWKGFWDTDVMGTIFSVPPLSPLSPLMVV

SEQ ID NO: 36687 - protein, 286 aa, Glycine max
  Clone ID: LIB3093-010-H4_FLI.pep
ATPLHLAARQRRSECVHILLDSGALVCASTGGYGCPGSTPLHLAARGGSIDCIRELLAWGADRLQRDASGRIPYMVALKHKHGACASLLNPTSAEPLVWPSPLKFISELNPEAKALLEQALMDANREREKNILKGSSYSLPSPSHSDGVADNMSEVSESELCCICFEQVCTIEVQNCGHQMCAQCTLALCCHNKPNPATACLTPPVCPFCRSTITRLVVVKTECHDETDQDSADINCSKLSKSSRKLRHLNDSGSSSFKGLSSVSSFGKLGSRSSGRIAAEWLDKQ

SEQ ID NO: 36688 - protein, 133 aa, Glycine max
  Clone ID: LIB3093-015-A9_FLI.pep
ICIGLEEHSPRNSQHMYGREFQSMLDGLDEEGCVEEPGYQSEKKRRLSVDQVKALEKNFEVENKLEPERKVKLAQELGLQPRQVAVWFQNRRARWKTKQLERDYGVLKANYDALKLNFDTLDQDNEALRKQVE

SEQ ID NO: 36689 - protein, 203 aa, Glycine max
  Clone ID: LIB3093-015-B5_FLI.pep
KFLRMATAEEISTLKLLRQYLLGDISDPFLTNLIPVKLEDPSSGLDMGSNFSEQSSFCKFLECFDFEAEVVGLTSHHKVQSSIATSPPQNFNFPEEPMVSMKKEATCYATRHYRGVRRRPWGKFAAEIRDPKKKGSRVWLGTFDTEIDAAKAYDCAAFRMRGHKAVLNFPLEAGMSHPEPNSSGRKRRREYTTAATSSRHVMS

SEQ ID NO: 36690 - protein, 171 aa, Glycine max
  Clone ID: LIB3093-016-E5_FLI.pep
VVGRCNRCLPADMEEAGLGDCCSSNTTITRKSEKRKQQHQQQEKPYRGIRMRKWGKWVAEIREPNKRSRIWLGSYATPVAAARAYDTAVFHLRGPSARLNFPELLSQDDDVSTQQQGKMSADSIRKKATQVGARVDALQTALQQSSSTHSISSSHVSYEKPDLNEYPKPED

SEQ ID NO: 36691 - protein, 169 aa, Glycine max
  Clone ID: LIB3093-016-F6_FLI.pep
LVVIVVVPDMEEAGLGDCCSSNSTITRKSDKRKQQHQQQEKPYRGIRMRKWGKWVAEIREPNKRSRIWLGSYATPVAAARAYDTAVFHLRGPSARLNFPELLSQDDDVSTQQQGNMSADSIRKKATQVGARVDALQTALQQSSSSHSANSSHVSSSDKPDLNEYPKPED

SEQ ID NO: 36692 - protein, 195 aa, Glycine max
  Clone ID: 700744504_FLI.pep
LDYCHSQGIMHRDVKPHNVMIDHEQRKLRLIDWGLAEFYHPGKEYNVRVASRYFKGPELLVDLQDYDYSLDLWSLGCMFAGMIFRKEPFFYGHDNYDQLVKIAKVLGTDGLSAYLDKYRIELDPHLAALIGRHSRKPWAKFINVENHHMAVPEAVDFVDKLLRYDHQERPTAKEAMAHPYFNPVRNAESSRTRAH

SEQ ID NO: 36693 - protein, 617 aa, Glycine max
  Clone ID: LIB3093-019-C2_FLI.pep
GSNNSGDDERGRIEEGERSFGGNRWPRQETLALLRIRSDMDVAFRDASVKGPLWEEVSRKMAELGYHRSSKKCKEKFENVYKYHKRTKEGRSGKQDGKTYRFFDQLQALENHSPTPHSPNPSPKPPQSAPSRVVASSVSLPIATTTTVSLPIPTPTTVPMQPILSNNAILTSSVPNITVPSTTPLPITIPQPILTSPSINLTIPSYPPTNPTNFPPPPNPTLPSSFPTDTFSNSSSSSTSSEETLEGRRKRKRKWKDFFERLMKEVIEKQEELQKKFLEAIEKREDDRIAREEAWRVQEMKRINREREILAQERSIAAAKDAAVMSFLQKIAEQQNLGQVSTNINLVQQPQPQLQPQPPLQQQVTQPSIAAAQPSRTTATARGCYTARGAASGVTSDEYGDSESRYNSNNNNNGENFLAPSSSRWPKVEVQALIKLRTSMDEKYQENGPKGPLWEEISASMKKLGYNRNAKRCKEKWENINKYFKKVKESNKRRPEDSKTCPYFHQLDALYRQKHRGEESPAAVEAKPESAVAPLMVQPEQQWPPQQQQQDRDITMEDMENEDDEYEEEREGEEELEDDEDEEDEEGGGGGGNYEIVANKTSGGGGASAASVGASTE

SEQ ID NO: 36694 - protein, 119 aa, Glycine max
  Clone ID: LIB3093-035-G6_FLI.pep
LFHNSARALEEKRARLGLVECVNHELLQPYPVLHEKPGDYVAHIKFTVLLMPNGSDRVTSHSLQELQPTKTIDDPEIKAWLALGTKTKKKGGGKKKKGKKGAEAEPMDATNDATPQEQD

SEQ ID NO: 36695 - protein, 203 aa, Glycine max
  Clone ID: 700740866_FLI.pep
LILVCIYMVSREDVAEYCRKMRGVSLKLVEAISESLGLERDYINRVVGGKKGQEQQHLAMNYYPACPEPELTYGLPGHTDPTVITILLQDEVPGLQVLKDGKWVAVNPIPNTFVVNVGDQIQVISNDKYKSVLHRAVVNCNKDRISIPTFYFPSNDAIIGPAPQLIHHHHHPPQYNNFTYNEYYQNFWNRGLSKETCLDIFKA

SEQ ID NO: 36696 - protein, 161 aa, Glycine max
  Clone ID: LIB3093-050-G7_FLI.pep
KKESEKQKHQPQPPIIFIFPTTNSSTLTTNPSCQLNILGHNGYTLGVNGTQVSVLKEPNKVCLSSFLQCKHGVALETQISLEVLSNFTNQPLEGELPDQKLGTLLVFPNLTKSNGTRTITVGLLHTTSSWCRLTCSLGCKLLPRSLSSCGLTSGLLRTSHL

SEQ ID NO: 36697 - protein, 211 aa, Glycine max
  Clone ID: LIB3106-005-A2_FLI.pep
TMTFIREDDDDQVDDDDDHDHVDGGGSQNSASNITEIVTTPEGENLGEWLSLGLKGDINMPAEEQNSSSRPLHSNNNKVFSCNFCMRKFYSSQALGGHQNAHKREREAARSYHQSHHHRIGFSYTTSLATRSLGIKPHSLVHRPNRERSAMVARFSSSDAINVGVGSVASSWTPFMLEQAVDFYWPGSFRGDLLPKQESSDVKKIDLDLRL

SEQ ID NO: 36698 - protein, 193 aa, Glycine max
  Clone ID: LIB3106-006-D11_FLI.pep
MARIKEDPSLKHILEEIETGGPAAMMRYWNNEEVLQKLGQAMGLANSGDAGASAENSGADETEDLGNEDESIVHHTASVGDVEGLKNALASGADKDEEDSEGRTALHFACGYGEVKCAQVLLEAGAKVDALDKNKNTALHYAAGYGRKECVALLLENGAAVTLQNMDGKTPIDVAKLNNQNEVLKLLEKDAFL

SEQ ID NO: 36699 - protein, 181 aa, Glycine max
  Clone ID: LIB3106-038-C6_FLI.pep
MQLSVHSLIVILFLATAFLIIIFIIHLRYRLLRFFFIPTSRTFRLFLLIGSHVLLVLHFPFLRLCHIRCFFSIRHGLPFCSSSFAHSRHCFVFRMFFVEYLPELLHENEESTWRPLWLVRVFRCLPLAGGFPSLGGGSLLIHSKFGIGSLRFGLGLSSFHDGYERGTGSGVRVWVEREERK

SEQ ID NO: 36700 - protein, 117 aa, Glycine max
  Clone ID: LIB3106-046-F3_FLI.pep
QVHCMFFDKQEDFDDRDVRQMLSLVRREVLSGCVIIFSRIVHGAIPSLRKMAEQMGATCLTEIDPSVTHVVATDAGTEKCRWAVKEKKFVVHPLWIEAANYFWQKQPEENFILKKKQ

SEQ ID NO: 36701 - protein, 252 aa, Glycine max
  Clone ID: LIB3106-062-F7_FLI.pep
NGVVIIRWYSDSMKTPISGFYRNPVKFRMPTAENLVPIRLDIEIEGQRYKDAFTWNPSDPDSEVVVFAKRTVKDLKLPPAFVTQIAQSIQSQLSEFRSYEGQDMYAGEKIVPIKLDLRVNHTLVKDQFLWDLNNFESDPEEFARIFCKDTGIEDPEVGPAIAFAIREQLYEIAIQSVVSARESRMSKKGRRGAEYTPVSKGGAAAVDLVKLFGPKSSVVRKRKEWDVYEPIVDLLSNEEVDALEAKEERNFR

SEQ ID NO: 36702 - protein, 119 aa, Glycine max
  Clone ID: LIB3106-102-E11_FLI.pep
QRPVRIRIRRSEQRCRVVEREARVWVREEPRGTGRCSAITSRESQNPPFAVWLAEAASRESVASSMKKPAASLRSSSRTLFATLLPTPSMLGGRLLPLWMLFMLSRGRAGLSMVSVVKF

SEQ ID NO: 36703 - protein, 100 aa, Glycine max
  Clone ID: LIB3106-112-F10_FLI.pep
ASEKCQKEKRKTINGDDLLWAMATLGFEDYIEPLKVYLARYREAEGDTKGSARSGDGSATPDQVGLAGQNSQLVHQGSLNYIGLQVQPQHLVMPSMQSHE

SEQ ID NO: 36704 - protein, 257 aa, Glycine max
  Clone ID: LIB3107-036-B11_FLI.pep
MALEALNSPTAATTPFRGYQEEEEEVDLHLREPWAKRKRSKRPRFESEEEYLALCLIMLAQSGNNNNTQLPSSSQSHKEASPPLKLSHRCTVCNKAFPSYQALGGHKASHRKASSESNTTASAVAVSATANDSVSASTVGGGRMHECSICHKSFPTGQALGGHKRCHYDGGNNHSNSNANGNNSSGVTTSDGGAASSSSHAFRGFDLNLPAPLTEFWSPAGFDFGKKKVGVEQEVESPLPVTAKRPRLFSGEDNEEA

SEQ ID NO: 36705 - protein, 352 aa, Glycine max
  Clone ID: 700764593_FLI.pep
SAQFEVKQMIKKISRHASSSKVTNLNEVLISLISTIVCRIVLGRRYEEEGSEGSRFHKLFNECEAMLGNFFVSDYIPFMGWIDKLRGLDARLERNFKEMDKFYQEAIDEHMNSKKKTPEEEDLVDVLLQLKENNTFPIDLTNDNIKAVLLNLLVGATGTTEVTTIWAMTELIKNPSIMKKVQEEIRGLSGKKDFLDEDDIQKFSYLRAVIKETLRLHLPAPLLIPRETNKKCMLDGYEIPAKTLLYVNAWAIHRDPKAWKDPEEFIPERFLNCDIDLYGQDFEFIPFGAGRRLCPGMNMAFAALDLILANLLYSFDWELPQGMKKEDIDTEVLPGVTQHKKNPLCVVAKCYM

SEQ ID NO: 36706 - protein, 171 aa, Glycine max
  Clone ID: LIB3107-080-C1_FLI.pep
QHNATQRALSLFSLNTKTLSFFAVSPILAMPKAKSDAKAADSRLKRKGAGAGRKQSKKAAKDPNKPKRPPSAFFVFMSEFREQFKKEHPNNKSVAVVGKAGGDKWKSLSDAEKAPFVATAEKKKQEYEKTILAYNKKLEGKNSEEDESDKSKSEVNDDEEDEEEEDDDDDE

SEQ ID NO: 36707 - protein, 249 aa, Glycine max
  Clone ID: 700748571_FLI.pep
GYEVYILEATYKDPVGCAARNVHGFTQEDIEKMSKQWEEAPSLYLQLDVKSLFHGDDLKESRIQEVDMDMEDDLGDALLPVQGKEADKVVDPPFGEDASFLKAGKNWDAEEEHPTEVRELGKSKWSEDYGEDDIDQTEGMKGNINALSGLIHHYGKERKSVHWGDQGGKTGFSIGAAKKVNALSLVIGPGAGYNLKSNPLPEEDSPTRNSVDSKKHSIFQEQIRAERESFKAIFDRRRHRIGGLDVEED

SEQ ID NO: 36708 - protein, 366 aa, Glycine max
  Clone ID: LIB3109-011-F8_FLI.pep
KMKRMNESNNTDDGNNHNWLGFSLSPHMKMEVTSAATVSDNNVPTTFYMSPSHMSNSGMCYSVGENGNFHSPLTVMPLKSDGSLGILEALNRSQTQVMVPTSSPKLEDFLGGATMGTHEYGNHERGLSLDSIYYNSQNAEAQPNRNLLSHPFRQQGHVNVETHPYYSVFACRGLYQAPSEEEATKETHVSVMPQMTGGGLQNWVAPTREYSTHQQILEQQMNCGIWNERSGVSVGTVGCGELQSLSLSMSPGSQSSCVTAPSGTDSVAVDAKKRGHAKLGQKQPVHRKSIDTFGQRTSQYRGVTRHRWTGRYEAHLWDNSCKKEGQTRKGRQVYLGGYDMEEKAARAYDLAALKYWGPSTHINFSI

SEQ ID NO: 36709 - protein, 279 aa, Glycine max
  Clone ID: LIB3109-019-A10_FLI.pep
KRVLGKTPTVKRQSCGKYKGVRMRKWGKWAAEIRDPFKGARIWLGTFSTAEEASQAYNARRLEFEAMAKALSDEKSNNGSNSSSNNNVVASAETVAATENNSSNYCVSSAAGSVSDSKSASMDESESVLSLTSPSSVLELDTSAFNLIGSGKVSSNEVVETKGLEAEVAETKNLAAEFAELEMLEMPDLSMLNVPSPSAVAATAAAPSEFELDLLAFVDSEYGFHDEHDFDDDLAALEDFHICGFDDNEPSELPDYDFDDFGADEFAGWIEEPLNIPCV

SEQ ID NO: 36710 - protein, 293 aa, Glycine max
  Clone ID: LIB3109-031-C4_FLI.pep
VELYADYDPKMLLPFLRSSQHYTLEKAYEICIKRDLLREQVFILGRMGNSKQALAVIINKLGDIEEAVEFVTMQHDDELWEELIKQCLHKPEMVGILLEHTVGNLDPLYIVNKVPNGLEIPRLRDRLVKIITDYRTETSLRHGCNDIIKADCVNLLIKYYKEARHGISLGNEDEPRVKMSDTRASQVFDKSPSLRTVELKSKTRGGGRCCICFDPFSIQNVSVIVFFCCHGYHTTCLMDSSYTSSNQKEVQATSLEAETYDGYNGYEEDASEDDEEAKSGGPRMRCILCTTAG

SEQ ID NO: 36711 - protein, 484 aa, Glycine max
  Clone ID: LIB3109-031-H4_FLI.pep
KQNLKFGLGIGICCRVDLPGMEGASWNSSVCVAPFLSKTYDMVDDPSTDLVVSWGENNNSFVVWNVPQFATDILPNHFKHNNFSSFVRQLNAYGFRKVDPDRWEFANEGFLRGEKQLLKSISRRKSAHVNGSQQASQVHKSAAGACVEVGKFGLEEEVERLKRDKNVLMQELVRLRQKQQGTDNQLQNVGQRVQSMEQRQQQMMSFLAKAMQSPGFLAQFVQQQNESSKHIPGSNKKRRLQRQEEDSLATKDLHSSLDGHIVKYQSSINEAAKALFRQILQINNSTTQSSIKNPDVFLIDDIPSAIASDSSSSSTQVSNVMVPPISELTSMEVGSQFPLSCMPSNISEVQSSPAVLGFCRSQGMETESSLLNHELNVMGADTRNMGEIDMMSTVLDEADEADHFSPDTDGISKLPEISDEFWELFLRPSPLTEDTEETKCSSLGCGLTEDQGLPSEMGNKQENFDTIQHVDCLTQQMGLHALEY

SEQ ID NO: 36712 - protein, 122 aa, Glycine max
  Clone ID: LIB3109-035-E6_FLI.pep
EEEAEKSTKNAFVKVSMDGAPYLRKVDIKLYKSYQELSDALAKMFSSFTIEKCGSQGMKDFMNETNGSDYVPTYEDKDGDWMLVGDVPWEMFVESCKRLRIMKGSEAIGLAPRAVEKCKNRS

SEQ ID NO: 36713 - protein, 420 aa, Glycine max
  Clone ID: 700753182_FLI.pep
GLPMIPSYVENLPTGNEKGLFYALDLGGTNFRVLRVQLGGKDERVIATEFDQVSIPHQLMFATSQELFDFIASGLAKFASKEDGRFHISPGKKGEIGFTFSFPVKQASIDSGILIKWTKGFAVSGTAGRDVVACLNEAMERQGIDMRVSALVNDTVATLAGAEYWDNDVVVAVILGTGTNACYVEQISAIPKLQGHVSSSGKMIISTEWGAFSNGLPLTKIDREMDAASINPGEQIFEKTISGMYLGEIVRRVLLEMAEEGGLFGKSVPQKLSTPFILGTPDLCAMQQDSSGDLHAVGSLLYDKAGVESNLSERKTVLEVCETIVKRGGSLAGAGIVGILQKMEEDQRGLVFGNGKRSVVAIDGGLYENYPQYRAYLQDSVTELLGTEKSNNVVIEHTKDGSGIGAALLAASNSMYNQDL

SEQ ID NO: 36714 - protein, 477 aa, Glycine max
  Clone ID: LIB3109-041-F10_FLI.pep
LILIINHRSEMVSPSQVVKVKRNTLRPCMTCPLCHKFFKDATTISLCLHTFCRKCIYEKLSDEEMDCCPVCHIDLGCLPVEKLRPDHNLHDIRAKIFPFKRKKIKAQEVLSSISLPAKRKERSLSSLVVSAPKVSMQPGFTGKRTKNSTRKAAALRGCSFLLDESIKKEQTNGDDNMDSPMPEHSKKHKPHEDTENSVQHTEGKVDLWTPLNCLVEAANRTKSSRSNSQATPLAKLESPTTPHGGQDASETTTKTDLPASAQSELNIPKSKNKDTGLKPIFGDDKDANSLPLGPVKRRRLRPAGQKRVAASEMSASSPAPLDATGGKCNRKNSPIWFSLVASEDQKGDFPLPQISACYLRIKDGTVPVSFIQKYLMKKLNLASEAEVEIMCRGQPVLPSLQLHNLVDLWFPDSINLKKDTSISGVLSQRFCNGFIILSKGLASLTKFPILSIYHFPSATLHTYTINCFDSILTDITA

SEQ ID NO: 36715 - protein, 241 aa, Glycine max
  Clone ID: 700743077_FLI.pep
ETMANVSIPLPRNGFSKPNYSTKRPCFTPSASTLRISCSGVAEFDGSHQKKGGLFNFNGIKGVACGILAACAVTSAAFPVTAATQRLPPLSTEPNRCERAFVGNTIGQANGVYDKPLDLRQCDFTNEKTNLKGKSLSAALMSDAKFDGADMTEVVMSKAYAAGASFKGVDFSNAVLDRVNFEKADLEGAIFKNTVLSGSTFDDAKLDNAVFEDTIIGYIDLQKLCTNKTIGDEWRVELGCR

SEQ ID NO: 36716 - protein, 431 aa, Glycine max
  Clone ID: 700756578_FLI.pep
CVVLCCVTMAQLKASPVTAPSLHTTGVALRGKLSKVVLAYSGGLDTSVIVPWLRENYGCEVVCFTADVGQGIQELEGLEAKAKASGASQLVVKDLKEEFVSDYVFPCLRAGAVYERKYLLGTSMARPVIAKAMVDVAKEVGADAVSHGCTGKGNDQVRFELTFFALNPKLNVVAPWREWDITGREDAIEYAKKHNIPVPVTKTSIYSRDRNLWHLSHEGDILEDPANEPKKDMYIMSVDPEDAPDQPEYVEIGIESGLPVSVNGRRLSPASLLAELNEIGGKHGIGRVDMVENRLVGMKSRGVYETPGGTILFAAARELESLTLDRETIQVKDSLALKYAELVYAGRWFDPLRESMDAFMQKITETTTGSVTLKLYKGSVTATSRTSPFSLYRQDISSFESGQIYDQADAAGFIRLYGLPMRVRAMLEHGI

SEQ ID NO: 36717 - protein, 582 aa, Glycine max
  Clone ID: LIB3109-043-B4_FLI.pep
LSHFLCCFCYSEDAMEVFFSQCVPLYKHALDGNWQAAKHILDANPALKTAAIAPGWPTVLHVAAGTNHYHFVEELLNILDNDAIQLQDKKGNTAFCFVAAAGNWRIAELMQKRNILLPTVKGGDGMTPLHFAALQGRCPMACKLYPMTKEMFDDEDWELLFFTCIKTCNYHLALKMVRDRKELAFARDGNNGEEKKGGIALHLLAQNQKPLDSCCHCHQHQIPVKINPGMKQHVFLQLVNFLWNTLLENIDSKSKILDIISEPSHLLFDAAEVGNFGFLSELISAYPSLIWEVDSRNRSIIHTAVLNRHASIYNLIHEIGSIKDIIVTFAGEEDENTLLHLAAKLAPPSQLELVSGAAFQMSLEISWFEEVNKIMPPSFRWMKNSEGLTARELFTKEHADLRKNAESWMKRTAESCMLISTVIATGVFSAAISTPGGMNDESKEPNYLDKTSFLIFAVSDATSLISSATAILIFLSILISRYAEYDFHKSLPLKLIFGLISLFISITSMMVAFGCSFFITYYYGMKWVPSFISVLACLPILLFIGLQFSLWSVIIYSTYYCKALFKPGKKMLYVVERKGYNV

SEQ ID NO: 36718 - protein, 155 aa, Glycine max
  Clone ID: LIB3109-043-E12_FLI.pep
FPCLFEVRKRIVQQIKFSTFKKFHYNCFIFNRAIFLQAWNNWRGGTVSNIVDPTLKDYSWDEIRRCIHIGLLCVQEDIADRPTMNTVLLMLHSSSFPLAEPSEPAFLMRRKSSLPMIMLSGSEQYSEVTRSSDSGSQYAQGSSIVKTPTTEPYPR

SEQ ID NO: 36719 - protein, 379 aa, Glycine max
  Clone ID: LIB3109-053-B5_FLI.pep
EGVLVDIENMLARGRMDLPVSVCFAAARGDDLLLHQLLKRGMDPNESDNNRRTALHIAASQGKQNCVLLLLDYGADPNIRDLEGNVPLWEAIVGGHESMSKLLSENGANLQCGDVGQFACTAAEQNSLNLLKEIMRYGGDITLPNSSNTGTTALHVAVSEGNVETVKFLLDHGASIDMPDKHGWTPRDLADQQAHTEIKALFDSIGEPKVHSSVAIPVRNSKIKYLGRFTSEPTMTLPLDGSFHGTDGSWSQNQSQNQSRPRRRSNNYHNSLFGILSAAHNGEKYLLSAVDMNNNARNGMKSSSAVGPTRVIISCPEKGEVVGKLVLLPGSFQELVEIGAKKFGFYPNKVVCKDGGEIEDIEIIRDGDHLVFLGASGGC

SEQ ID NO: 36720 - protein, 308 aa, Glycine max
  Clone ID: LIB3109-056-E5_FLI.pep
KQQRDLVKLEIAMKKRSSSSSSSSVFEANGVEEPQQPSSCAAAALDELHKEKNENGEETLVPSNPYPNLDDGFYEIETIRRKRLRKGQLQYLIKWRGWPETANTWEPLENLQSVPDLVDAFEDSLKSGKHQKRKRKHVDVLQLTLLKKRSERSTTSYSLRHFPPLTPTNANDYDPKLSELKAPTHTGVQLDNLAIHFQQPIPSRGAKRRKSASSVKRFKRDTDAAALQPISAPINMPDANTACNIVKIIKPIGYSASLSDNMHDVLVTFMAMRSDGTEVMVDNRYLKAYNPLLLINFYEMHLRYTPTP

SEQ ID NO: 36721 - protein, 440 aa, Glycine max
  Clone ID: LIB3109-057-C3_FLI.pep
GEIGVLCYKPQLFTVRTKRLSQLLRLNRTTFLNIVQANVGDGTIIMNNLLQHLKEINDPIMEGVLVDIENMLARGRMDLPVSVCFAAARGDDLLLHQLLKRGMDPNESDNNRRTALHIAASQGKQNCVLLLLDYGADPNIRDLEGNVPLWEAIVGGHESMSKLLSENGANLQCGDVGQFACTAAEQNSLNLLKEIMRYGGDITLPNSSNTGTTALHVAVSEGNVETVKFLLDHGASIDMPDKHGWTPRDLADQQAHTEIKALFDSIGEPKVHSSVAIPVRNSKIKYLGRFTSEPTMTLPLDGSFHGTDGSWSQNQSQNQSRPRRRSNNYHNSLFGILSAAHNGEKYLLSAVDMNNNARNGMKSSSAVGPTRVIISCPEKGEVVGKLVLLPGSFQELVKIGAKKFGFYPNKVVCKDGGEIEDIEIIRDGDHLVFLGASGGC

SEQ ID NO: 36722 - protein, 182 aa, Zea mays
  Clone ID: LIB3115-001-D3_FLI.pep
NRPSAIGAALHREREGLLQWQRLAIGQALSILTMALAALVETRRLAIAEASGLRHREVPVPMSILWQGPVFFVHGAAEVFGAIGMTEFFYDQAPATMKSLCAAFGQLAVASGSYLNTVVLSVVALATTRGGATGWISDNLNEGHLDYFFWMMAALSLLNLALFVRYSMRHTDRQRKQDLGLS

SEQ ID NO: 36723 - protein, 136 aa, Zea mays
  Clone ID: LIB3115-002-A10_FLI.pep
LGAAAAAAMAASMISSSALAVAPQGLPPLGRRASSFAVVCSKKKIKTDKPYGIGGGLTVDVDANGRKGKGKGVYQFVDKYGANVDGYSPIYNEDDWSPTGDVYVGGTTGLLIWAVTLAGILGGGALLVYNTSALSG

SEQ ID NO: 36724 - protein, 93 aa, Zea mays
  Clone ID: LIB3115-004-D10_FLI.pep
SSFLTAVMKSSTIVALLLAVAILSSLSPCYEAGGCIGKPKKSPPPPRRPYFSSYSEDHQKDHQNCRLICSSKGFKDGGWCDESVEHKVCCCSH

SEQ ID NO: 36725 - protein, 322 aa, Zea mays
  Clone ID: LIB3115-005-C7_FLI.pep
RPPPPPPIGSNAHHRVVVRQHTERERERERERGMGDHEGHGVDFEKKADQKLSGWGLFGNKYEEAADLLDRAGSFFKLAKNWSRAAAVYKKIADCHLQGDNKHDAASAYVEAANCYKKFSLQDAAQALNSAVNLFQEISRLNMAARYSKDIGEIYLQEQDLENAAVYLNRAADLFDSEGQSSQANSMTQKIAEIYAQLEKYQKATELFEEIARKSINNNLLKYGVRGTLLNAGICQLCRGDVVAINNSLERYQDIDPTFSGTREYKLLADLAASTDEGDVGKFTDAVKEFDSMTRLDPWKTTLLLKAKNELKKKEEDEDDLT

SEQ ID NO: 36726 - protein, 172 aa, Zea mays
  Clone ID: LIB3115-009-A12_FLI.pep
TLLLATGIGHVYCLAVSCMDGLTVEQRLAFQEAFSLFDKNGDGCITMEELAAVTRSLGLDPSDQELNDMMSEVDTDGNGIIDFQEFLSLIARKMKDGDGDEELKEAFEVLDKDQNGFISPVELRTVMTSLGEKMTDEEVEQMIREADTDGDGQVNYDEFVLMMKNAERKISG

SEQ ID NO: 36727 - protein, 301 aa, Zea mays
  Clone ID: LIB3115-010-E1_FLI.pep
VEENRAMLTSRTVAYLNVDSAVAGHGFYASATPQLDELLKEASKQVRNPDNGTQSLYDLWMSSNSSPLIGRLGGGSSDYSAFVQHIGIPSVDMAIGSDYPVYHSLYDDFIWMEKFGDPLFQRHVAAASMWGLVALRLSDEEILPFNYSNYATELENGALGISERVQGMPVSLSPLHKSIKEFRKAVAKVDSELKALQTWKIWSPWRNNPLKVRDINDRLMMTERAFTDREGLSGRPWYKHLIYAPSLHNDYGAEVYPGIGDAIERVKKTNTSESLQSIQHEIYRVSRVINQAALVLSGGLT

SEQ ID NO: 36728 - protein, 192 aa, Zea mays
  Clone ID: LIB3115-015-F5_FLI.pep
NHSQPPPREQVAAKRSRPRARLDLPAKLELAVCRDFHGATPRRHPWSCDDDDDHHHHHHEQQRHRHQRRRGRPPAPGVGQEEALAAPALRGGEPRAVPAHALPRRPPPRPGAAAAGPVRGVQVLRLREVLRLLPGAGGPQDQPPGQAADPSCRSCPAPGTTGSGPLGGGPRTTTSHCHPAPAAASRGRRRRP

SEQ ID NO: 36729 - protein, 181 aa, Zea mays
  Clone ID: LIB3115-028-E3_FLI.pep
YQTNFILGYCSIYIFMQTFMIPGTIFMSLLAGALFGVIKGGILVVFTATAGGSSCYFVSKLIGRPLVSWLWPEKLRYFQSEIAKRKEKLLNYMLFLRITPTLPNTFINMASPIVDIPFHIFFAATLVGLIPASYITVKAGRALGDLKSVRELYDFKTLVVLFLIGSVVVVPTILKRKRTYE

SEQ ID NO: 36730 - protein, 227 aa, Glycine max
  Clone ID: 700750285_FLI.pep
KKSELSVLVDRATGGGSIKDGQVELMLHRRMLFDDGRGVDERLDELVCQNDRCQGLTVRGNYYVGIHKLGAGSHWRRTTGQEVYSPLLLAFAHEDLGNWKAFHVTRGTVIDPNYNLPPNVALITLEVLDNGMVLLRLAHLYEAGEDAQLSTLTKVELKKMFATKMIRGLIEVSLSANQEKEKMKKKTWNVAGDKGQGSKSVRGGPVSHINLVVELGPMEIRSFLLKF

SEQ ID NO: 36731 - protein, 265 aa, Zea mays
  Clone ID: LIB3115-029-F7_FLI.pep
YCTDYRASLSHVAKTNSLCSYLLYWTLPSLGTANATKASLSLSLSTLLDRFTPASRPALVSSRASAGGLLLRLGRRVRKPPARHGGRRSAAPSPGGVRAREEVDEPAPAASSAAARALVALAVAAVAGPPRDGGGALLPEHAAQHPALGRRPRHAVSVGVGVAAAARREPGARQPVLVHHPLRLASRRRLAAVEHQRALHAHQHGLALALALPLHAPDRHGHRLLLARRLPVPGPRGAVRAPALHVLGLLAREEVALLLAEPCQP

SEQ ID NO: 36732 - protein, 63 aa, Zea mays
  Clone ID: LIB3115-030-A4_FLI.pep
VDFIDQELSRFIAAGKLHCKIDKVAGVLETNRPDERNAFYQATIKQGDFLLNRIQKLSRVIDL

SEQ ID NO: 36733 - protein, 272 aa, Zea mays
  Clone ID: LIB3115-031-H5_FLI.pep
VIKSNRLLLIGRREEANDTTTTRSISLITKIIREEKDKLTSPTCCCRRMWALPDHEFRRALGPSLLQVRSARRRGSRSRRARHPPRRNCEHRSLRSTAGADLRPARGGHRDAERDATTARGPRRDPLPPGPPLQHRLRARRRPPPSASPWRRRRPRLHGVGRGQAGAAGRGRPGVGAPARQAAPHVPGRQEVGAVHLGVAARAEERRVRGAVHGRRAPAELAPRARCRGVTSGTHPACLPPLPSPRTPERSPPTSACGAGGAQRMRWRIRPP

SEQ ID NO: 36734 - protein, 197 aa, Zea mays
  Clone ID: LIB3115-032-C5_FLI.pep
APTNPTSLTHSDVVGTFGYLAPEYFMYGKVTDRVDVYALGVVLLELLSGRKSISSDGSSPKGQESLVMWATPVLSSGNICDLLDPRLDVKHDEVEVRRMASAASLCLRRSARLRPPISQILSILRGESAASIADQGATEPDCVDDEAYPAANVRSHLGLALLDVEDSESISSTEHSSGLSPLEEYLRERWSRSSSFD

SEQ ID NO: 36735 - protein, 139 aa, Zea mays
  Clone ID: LIB3115-032-F11_FLI.pep
GRRRRGSCGGGGGSPVPRRTDRSAGEVGAGGGPAERSGSGVVGVRGGLGAVVGAEPDRGLLGRVPDLGGVAPRRPPPHAAVPNLRRRRGLLRRRLRPAHRGRRGGGALGGERKRGGSRLGFGHKFIYFLLSSSGFSPIF

SEQ ID NO: 36736 - protein, 59 aa, Zea mays
  Clone ID: LIB3115-032-H7_FLI.pep
NSAKNYTSGCYIAVLIRSLRLALQQMKRTTVSHKALFVCVGLVGRNDSEPDCFSNLYKL

SEQ ID NO: 36737 - protein, 91 aa, Zea mays
  Clone ID: LIB3116-004-G11_FLI.pep
LALYMVSLLYSIVASLVVGRALVDGEDVEHEEDEVGECGDEGDDDGRHGALAEAAIDVADLRPADVRVAALAQDAELRGGSHGRVEQGQRQ

SEQ ID NO: 36738 - protein, 121 aa, Zea mays
  Clone ID: LIB3116-006-C9_FLI.pep
SPSSSLPGTAIYPQLEASKIYPSGTFRGVYRSRKAIGKNKTRSRSIQLASIFLLIPAIPAYLHYFVLLFMGQSQSVHLCEYLLSSLFCNQLTRIVYCIHCLDFSKTRSVMLNSMKLTTLEV

SEQ ID NO: 36739 - protein, 72 aa, Zea mays
  Clone ID: LIB3116-006-F5_FLI.pep
EIAAPRRCHYQVELHCRLVRQTSVNPKLADWAQFLSPKPLVNTLFMELVKARQMADSISHRRIFKADRTWIF

SEQ ID NO: 36740 - protein, 93 aa, Zea mays
  Clone ID: LIB3116-006-H7_FLI.pep
HRTGRMTDGKITRNEHPQHKERPWPNQHWLLSSGLSLLQMGEALVHVCLGMLGLGVLPALHFSRGTHECLHAHFALDAHGLLVGLELAPLGPL

SEQ ID NO: 36741 - protein, 281 aa, Zea mays
  Clone ID: LIB3116-010-G10_FLI.pep
AQHDHRHTHISIDRVTPAEHEHGAPIQSHVEASVFVVVPPPPAAVGDAARHRLPRRPGPGAGLLRGRGAGRPQQRVLLLQHLPGLPVQAGVDGGLGRLLLRGARGRREHGQPDGRGRDAGQRGGVPGAQHAGPVHQPRRPRPRRRQPAAHPPAVRRAGARGGRRDAGRLRQHGGQVLLQGGARRGELRHPARDGPLPVQRRQRRRARHDRLQQPAARRRARRADPVRGRPGDPRRRPGQELPGGHRHHQAPQVQVPERIARVADLLARFAVPYSFVSSVHN

SEQ ID NO: 36742 - protein, 173 aa, Zea mays
  Clone ID: LIB3116-012-C10_FLI.pep
PGTKPVETAELLQSQGDKLAEEGKYHEALAKWEAALILMPDNAILHEQKAQVLLEVGDAWRALTAATRATELDPFWPEAWVTLGRAQLNFGEPDSAILTFDKALAMKPDYTDAKADRETAARLVKKRGQLHTSGLSANKRRFTVGEYPKEGGAEGEEKGKETAEQLQKITQEN

SEQ ID NO: 36743 - protein, 109 aa, Zea mays
  Clone ID: LIB3116-012-F8_FLI.pep
PIKHKHQNIIRTIYEKKLCWFSSTNHCLQAHYYSCWLARTQWYVPSSFQYHNKIDASKGTATQGCLHRLSDATDSAENRYFTRESTESCAGSYGWSLDGISRIAGTGLL

SEQ ID NO: 36744 - protein, 199 aa, Zea mays
  Clone ID: LIB3116-013-E6_FLI.pep
PQPGQEKPPVPLLKDAFGAERRKAKMLNFSIAYGKTAHGLARDWKVSVKEAKDTLKLWYSDRKEVLAWQMKQKQLAHEKREVYTLLGRSRRFPNMAHATSGQRGHIERAAINAPVQGSAADVAMCAMLEIDRNTRLKELGWTLLLQVHDEVILEGPSESAELAKSIVVECMSKPFYGTNILKVDLAVDAKCAQNWYAAK

SEQ ID NO: 36745 - protein, 75 aa, Zea mays
  Clone ID: LIB3116-015-H1_FLI.pep
HGWGLFAARNIQEGQMVIEYRGEQVRRCVADLREAQYHREKKDCYLFKISEDVVIDATDKGNIARLINHSCMSNR

SEQ ID NO: 36746 - protein, 170 aa, Zea mays
  Clone ID: LIB3116-028-C8_FLI.pep
PQDFMFLSRCLRWRLGPLAADPPCQLNVLWHDGHTLSMDGAQVGVLKQANKVCLSSLLEGKHRMALETQISFEVLCNFPDEPLEGQLPDQQLSALLILADLTEGNSSRAVAVRLLHSTSGGGRLTGSLGGKLLPGSLPSRGLASSLLGTSHLSRFFGLSARFESGGRRAR

SEQ ID NO: 36747 - protein, 219 aa, Zea mays
  Clone ID: LIB3118-003-F3_FLI.pep
ESIEKWEKWKQNHCQPNFWKNVDPVGKCGPYHPINLASVEVEGSVKNEVVGSQGGLCQGYFESDNLLEPIKSNLKVVNRHNHDTISMAVIDKMGHIAVGTSTNGATFKIPGRVGDGPIPGSSSYGDDEVGACGATGDGDIMMRFLPCYQVVESMRQGMDPRDAATDAISRIARKYPDFIGAVFAVNKEGVHAGACHGWTFQYSVRNSSMQDVEVITVYP

SEQ ID NO: 36748 - protein, 358 aa, Zea mays
  Clone ID: LIB3118-003-F5_FLI.pep
STAYSLPPSSRLRLQVSRGPRFLPEQSRSALRHGDEVGMEYRDKLVLAPMVRVGTLPFRLLAAEYGADITYGEEIIDHKFLKCERVTNESLGTTDFVEKGTDSVVFRTCPQERGRVVFQMGTSNAVRALKAAQIVCRDVSAIDINMGCPKSFSLSGGMGAALLSKPELIHDILTTLRRNLDTTVTCKIRLLNTPKDTVELARRIEKTGVPALAVHGRKIKDRPRDLAKWDEIADVVSALSIPVIANGDVFEYEDFKRIKDATGAASVMVARGAMWNASIFCAKGKTPWEDVKREYVRKSILWDNDVKSTKHTLKEMIMHYSCLELPEGKGVIKCDTSEDLARLYGEEDYYNFVVANRK

SEQ ID NO: 36749 - protein, 217 aa, Zea mays
  Clone ID: LIB3118-011-B1_FLI.pep
TMTSAVARSAKRKRKNLYRGIRQRPWGKWAAEIRDPQKGVRVWLGTFNSPEEAARAYDAEARRIRGKKAKVNFPDAPAVGQKHRSGSASAKASKSSFGQKPIVKGSNSFGCSDLGWENDTKTPDITSIAPISTIAEGDESAFVDSNSNSSFVLPALENSAVDLTDGLTDLESYMRFLLDGGPSDSVDSLLNLDGSQDVGSDMDLWSFDDMPIVGDFF

SEQ ID NO: 36750 - protein, 225 aa, Gossypium hirsutum
  Clone ID: LIB3120-010-A8_FLI.pep
TPFQNTVKEKLILTKYYRKCPVLFSELFVRAIPCKMAFISTIKTSSPSSSSITAIATVSSISTTISTAATVSRTSTSTTLITIPGYMPRPPTIITSATTSATATATTITSSPVTTTSSTSAAKISSSSTAAGRTARSRHRSYINGLSSAIFTDINEELDGLVIGECTKALGKNRGLVDEKVVASVVGSYETKTFLGAEPFDCASGSLGAGRLSHCLREGSRKFLK

SEQ ID NO: 36751 - protein, 190 aa, Gossypium hirsutum
  Clone ID: LIB3135-055-C6_FLI.pep
SSFFNLFIFTTKVFFFFNFIWVLLLYIINKTPIMATSSGSSATQINSGSEEALMDERKRKRMISNRESARRSRMRKQKHLDDLMTQLTQLQKQNHEIITNINFTTQHLLNVESENSVLRAQLNELTHRLQSLNEIISFLNDDHGDDDDDDDKTSIDFTQPAVADTAFLNPFHLAFLNQPIMASADNTFQY

SEQ ID NO: 36752 - protein, 169 aa, Zea mays
  Clone ID: LIB3136-001-C11_FLI.pep
PNSNPTPPPSKNSSINQPSNKSRSRIPDPPRIRDRQGGNRDPSVRVDGVNGGADKLVGAVLGEGPRARSHRRRVGCGGGHFGGVQPEEGAAAGHGPAPHPRQDARAGAHARRPRRRRPLPLLRRRRAQEEGRRHRPRLLLAAAAGHRRRRQREPAVELVGGGAEEKEEL

SEQ ID NO: 36753 - protein, 147 aa, Zea mays
  Clone ID: LIB3136-001-D1_FLI.pep
QSTCHLPTAAFQTARRASRAAGTSSRNMARTQQLAVVATAVVALVLLAAATSEAAISCGQVASAIAPCISYARGQGSGPSAGCCSGVRSLNNAARTTADRRAACNCLKNAAAGVSGLNAGNAASIPSKCGVSIPYTISTSTDCSRVN

SEQ ID NO: 36754 - protein, 287 aa, Zea mays
  Clone ID: LIB3136-001-F5_FLI.pep
KNGAPVGAIPKEIKGPLYPTIAVHSQGEELTVNFGKEPFCFDIEGYILEEKMKQQSVSDKLNLETDISHWIVRSYLLHYGYQDTLNAFDMANATDPPTNRQNGHAEPPETYGLSHRKLLRQLIMSGDIDSTFKRLGEWYPQVIKDEKSVICLLLHSQRFIEYIRAEQLEDAVHYGRANLASFLTHEAFEWLLKDSVALLAYEKPAESCLGYLMGSPQREFVADAVNAAVLSTNPTMKDPESCLYSCLERLLRQLTVCSLERRAFNNDQGDAFLLHKEMQNYERSRRS

SEQ ID NO: 36755 - protein, 163 aa, Zea mays
  Clone ID: LIB3136-002-C7_FLI.pep
KPLIDRKARDQPVGVERIRILLRPPAAPGCCCCSSFSSYIGSDWDGGYRATVLLMMNMYPHAYMHVQRAMGYPPACRPAVWLWQHGRHERPASSLPIAAYADEMEKIRTHRYRHSSQAQATSKQQQQQQLSEIDLFLSHSVCMYVYMCAARWRQRCMYASQFK

SEQ ID NO: 36756 - protein, 116 aa, Zea mays
  Clone ID: LIB3136-002-G9_FLI.pep
FAKVRGWETENIEEIALKISQLPLASGKQKRIAVITQGADPVVVAEDGKVKTFPVILLPKEKLVDTNGAGDAFVGGFLSQLVLGKGIEDCVRAGCYAANVIIQRPGCTYPEKPDFN

SEQ ID NO: 36757 - protein, 263 aa, Zea mays
  Clone ID: LIB3136-003-B9_FLI.pep
PMMDILSGASLYGDDEPQMNEFEQMDHRARRQNRSAVGTPDYLAPEIILGTGHGCSADWWSVGVILFELIVGIPPFNAEHPQTIFDNILNYKIPWPHVPEEMSFDAQDLIDKLLTEDPHQRLGANGASEVKQHPFFKDISWDTLARQKAAFVPSSDNAFDTSYFTSRYSWNPSDGNIYEAYEFEDSSDNGSLSGSSSCLSNRQDDMTEDSDGLNEFESSANVNYSFSNFSFKRAAVGSPSKSSECLLARLHLRPACTIFVPYL

SEQ ID NO: 36758 - protein, 148 aa, Zea mays
  Clone ID: LIB3136-003-G2_FLI.pep
AGYTTCKFSCGQLLHTLSKTKTKTKKGGYSFYTFTSTYLASLSHLNSYFHCHYSVVVRGKKNHFSVNEWQNGAKCWCDVLHGRRGCFGHEHQPNPWNPADWYELDSFGSLRTASTPAAREKTEAKTNAGVFPPPYRASHGPAPSDTTI

SEQ ID NO: 36759 - protein, 128 aa, Zea mays
  Clone ID: LIB3136-005-A6_FLI.pep
IEVPPSPAKAHTEMSQLSSAGHMAATFLLILLASAAATVSADQQVSACQNDIDALWRSCKQFVQKEGPKMPPSEDCCKTIKALDAHASCICDYVGSPDARNKLDLDKVFFVTKQCGVTVPKGCGSKQD

SEQ ID NO: 36760 - protein, 181 aa, Zea mays
  Clone ID: LIB3136-007-D11_FLI.pep
TSIKPRRMAFLSTNALMSVPITAAAAPRHRRSLVVVRAAAVKSNEHLQEEQASVADGARGRRRAMVLLAATAAVTGSSVAICRSARAAGVTTLSGQYVKIENVKDPYVQGVGEWAVKEHNRQTGESLQFAEVVSGMEQVVAGTNYKLNLATKDPTSSYQAVVFDPLPNSSKNRQLMSFKSI

SEQ ID NO: 36761 - protein, 187 aa, Zea mays
  Clone ID: LIB3136-007-G8_FLI.pep
AVNSSRTGETGYIDSPTSLHMDSVEGQTTVRDSRSVQQADVTMATKEQTLPSTSGTTDSSSGSASSQPAFKGNPGRALKVSSSDALTVKATCNGDTVRFKFLPAMGWYHLLEEVAKRFKLATGAFQLKYKDDEDEWVILANDADLQECVDVLDSIGSRSVKLQVRDLPCLVSSSGSSSCCLQVEGSA

SEQ ID NO: 36762 - protein, 433 aa, Zea mays
  Clone ID: LIB3136-007-H10_FLI.pep
LALVSLVLLLMPRSPAGATAGARRSGPPGADKYAVIFDAGSSGSRVHVFRFDANLDLVHIGSEIELFVQIKPGLSHYANDPREAAESLVSLLDDAKRVVPAELRDQTPVRVGATAGLRNLGAQKSEAILQAVRDILREKSSFKNQPDWVTVLDGTQEGAYEWVTINYLLGNLGKTYADTVGVVDLGGGSVQMAYAIAEKDAEKAPKPSEGEDAYVKKLFLKGTTYYLYVHSYLHYGLLAARAEVLKAGNGNGYSNCMLEGFQGKYKYGDDSFEASGPPSGASYSKCKDDAVKALKVDEACTHMKCSFGGIWNGGGGAGQKNLFVASFFFDRAAEAGFVNANAPVAKVKPSDFRQAAERACSLSVKNAEATFPGVQKDSIPYICMDLVYQYTLLVEGFGVDPDHEMTLVKKVPYSDAYVEAAWPLGSAIEVASS

SEQ ID NO: 36763 - protein, 553 aa, Zea mays
  Clone ID: LIB3136-008-D7_FLI.pep
LLPLFSSRRRQISRGVAVSGHGGRRSEHRWGSVRRWAAMYKNQLQELAQRSCFNLPSYTCLREGPDHAPRFKAAVNFNGEQFESPGFFSTLRQAEHAAAEVALAALARRGPSYSLAARILDETGVYKNLLQEVAQRVGAPLPLYTTERSGVGHLPVFTCTVELAGITFTGDHAKNKKQAEKNAASAAWSALKQLVREEVNSSNETENSDEQEQIRIARALLNYRLKEKMAMANYPHVSPFPKKFPMQPERKPSFGQSSQSSYSKILPLFRPKSNSRSRPESPASTDGASQMPGRAMDIHTPSPRSRFPAAEAAPYVPVGHFRMPCHSMAPSVTIRTAVPVFSAPPLPPPSARPQQLPPLMSHPPPIRMASPVRMRPASPMFASSAPAQGPKLVRPVQLKDVQDQPRKETAPSVIPVQVKDVQYQSRKSSMSPVIPVLVKDAQRQPLPVQTKDVQTQTQAPKESLADPIPAIRPAVKIDLPAQGKKEASAGATSEAPSSATGNNGAMERGTSSDVLSARRSRAAADGDGDKVEAKHEAEAQAVAEAAIRQLEIN

SEQ ID NO: 36764 - protein, 314 aa, Zea mays
  Clone ID: LIB3136-008-F8_FLI.pep
TAVLTRVHSSRNENKSSEFKEINALVVDHRPVRAKVTKYHLQRLGVQTELTTDLDQYISKNNCGSQIAKLVLIDKETWLKESHSMPLLVTKLRNKDQPDSTKLFLLENPKSSVKSNSHIFREYNLNVIMKPLRASMLQVSLQRALGGIDKLHCRNGVVGNSTLGSLLHKKRIIVVDDNIVNLKVAAGALKKYGAEVTCADSGKEAITLLKPPHNFDACFMDIQMPEMDGFEATKRIRVMERDLNEQIECGEAPPECVGVRQWRTPILAMTADVIQATHEQCLKSEMDGYVSKPFEGEQLYREVARFFLNQDQVQ

SEQ ID NO: 36765 - protein, 224 aa, Zea mays
  Clone ID: LIB3136-011-A9_FLI.pep
GGDVDRGSWGGGTSVQLNRRSRVKSVGRGRTRYRGRMVLVLALGDLHIPHRVPDLPAKFKSMLVPGKIQHIICSGNLCIKEVHDYLKSLCPDLHITGGEYDEYARYPETKTLTIGQFKLGLCHGHQVVPWGDLDSLAMLQRQLDVDILVTGHSHQFKAYKHEGGVVINPGSATGAYSSITYDVNPSFVLMDIEGLRVVVYVYELIDGEVKVDKIDFKKAATMQA

SEQ ID NO: 36766 - protein, 321 aa, Zea mays
  Clone ID: LIB3136-011-B9_FLI.pep
FDLPLDLPPTHSYADANNSEQNTGDVFVHMSDLLTTIWPSPSQYLGPKCALWDCGRPAGGTEDSGDYCNPYHAGLALNDDGLLGIRPVMRPRGIDLKDGPLFAALIAKVQGKNVGIPVCGGAATSKSPWNAPELFDLSLLEGESLREWLFFDTPRRAFESGNRKQRSLPDYGGRGWHESRKLVMKDFAGLKRSYYMDPQPSSSHEWHLFEYEINASDALALYRLEYKSSDPKKGAAKSKLASPLNEIRQRMGRLTADSPVENKRTARSKPKANQNQKDTNANTRPHVNTPNQVNAPNAYQTTQQGYSAEGSSFFWNPSDGT

SEQ ID NO: 36767 - protein, 260 aa, Zea mays
  Clone ID: LIB3136-011-D6_FLI.pep
KVSRPLPWRPATNVFRVKEDVRPIFWANRPKSYLKRTLGWDQYPHGRWGDSRNPSYGALTDHQRFTNFCQGKLTSSPWSELDGLQPETKIIDDQLVNINQKGFLTINSQPAVNGEKSDSPTVGWGGPGGYVYQKAYLEFFCAKEKLDQLIEKIKAFPSLTYIAVNKDGETFSNISPNAVNAVTWGVFPGKEIIQPTVVDHASFMVWKDEAFEIWTRGWGCMFPEGDSSRELLEKVQKTYYLVSLVDNDYVQGDLFAAFKI

SEQ ID NO: 36768 - protein, 212 aa, Zea mays
  Clone ID: LIB3136-011-D9_FLI.pep
QVSPEFADANEEKLYDFLNIQLKSDMKRIQRRNVLSTMLSAWTILLLRPGQVSLAETTGGAFREYIDTFDGYTFLYPKNWIQVRGAGADIFFRDPMVLDENMSVEISSPSSSRLGVRRESNVLSASSKVADDGKLYYEVEVNIKSYASNNELAVMPQDRVQSLEWDRRYLSVLGVENKRLYELRLQTPEQVFMQEEEDLRRVMDSFRVIKAA

SEQ ID NO: 36769 - protein, 148 aa, Zea mays
  Clone ID: LIB3136-011-G7_FLI.pep
NGARHRSFVPIIPYTCFYKRHHRRFTHTWVANNATFTKLKQNYRQTPLLKQKQAVPFPPHPTPSIAMPSIVKTSTYHPPPMEQRRAAPIEVGRSGLSNSAAGALGRLHGEAVGVDAVVVDEVVGARPHELVALVHAQLRHLLLLPPVA

SEQ ID NO: 36770 - protein, 114 aa, Zea mays
  Clone ID: LIB3136-012-D11_FLI.pep
VKQQTLNCKAAVPHRTIYSSSSSLPSCSSSSTSDFDLLEPSASSPSRTSALAFLELVFSFLLALPSCFLLPPYFAFSSSDIERHFSPAALLTYKQSHRRAKAYTSHLSETQLHA

SEQ ID NO: 36771 - protein, 395 aa, Zea mays
  Clone ID: LIB3136-014-C8_FLI.pep
LFVHIVMELCAGGELFDRIVAKGHYSERAAAKLIKTIVGVVEGCHSLGVMHRDLKPENFLFASTAEEAPLKATDFGLSMFYKPGDKFSDVVGSPYYVAPEVLQKCYGPEADVWSAGVILYILLCGVPPFWAETEAGIFRQILRGKLDFESEPWPNISDSAKDLVCNMLTRDPKKRFSAHEVLCHAWIVDDAVAPDKPIDSAVLSRLKHFSAMNKLKKMALRVIAESLSEEEIGGLKELFKMIDTDSSGTITFDELKDGLKRVGSELTENEIQALMEAADIDNSGTIDYGEFIAATLHMNKLEREENLVSAFSFFDKDGSGFITIDELSQACREFGLDDLHLEDMIKDVDQNNDGQIDYSEFTAMMRKGNAGATGRRTMRNSLHLNLGELLNPSKT

SEQ ID NO: 36772 - protein, 600 aa, Zea mays
  Clone ID: LIB3136-014-G2_FLI.pep
RRQDEMVAAVASPSSAAPSAGRPHPTYKEMIMQALTELRDPSGSSRSAIATYIADHFSGLHSRHDALLSVHLRSLKSHGQLRLVSGNYFVSTAAQRQGRGSNIPPNPNPAPGQKRGRGRPRKYADSAPSASIPAFQDAKRGRGRPRKRKSAQDPVASSPSPSPLQGASVPPPPSGVKRGRGRPRKDALVPPPSSSSPLLGGIDPPPPSGIKTGRARPRKALVPVRSSFSELLGAVVLPPPSGVKRGRGRPRKSAYPAVAPLVGAEKGPAGGQPQRNTTPLSPTPATMSHSGKSETVRLPKVAVDISALRGSSMNISASSNSLVGAKRGRGRPPKVVVAGKEKMQPESVQSVDASLTKRGRGRPRKEKALESGRMKASQMTEGQREALTADQAGAVQNEVEDRDLQSLGTPLTEKRGRGRPRKRPLEIETAKAGAAKRGRPRKEKTSETGDLKVAQMTEGRHEALPAQAVDQTGPVQNEVEAMILQSLATTPLMEKRSRGRPRKRPLETETAETQVAASVEKRGRGRPRKKNPSAGWSAGTRDTALKGIKRGPGRPRKARPFETESVKTALEVSRDLTEDGPQKDGDLVSGKKADTHGVVW

SEQ ID NO: 36773 - protein, 298 aa, Zea mays
  Clone ID: LIB3136-017-A6_FLI.pep
EVASSQLISHYYHFKVEQEAGSSLCNFFGYNGTAGVWRTQAIVESGGWEDRTTAEDMDLALRAGLLGWEFVYVGSIKVKSELPSTLKAYRSQQHRWSCGPALLFKKMFWQILAAERVSVWKKWYMVYDFFIARRIVGTFYTFFFFSVLIPLNILLPEAQIPVWELIYIPIAITLLNSVGTPRSIHLVILWVLFENVMALHRFKAILIGFLEADRANEWIVTQKLGNLQKLKSIARLTGSYRFKDRFHFLEVFIGLFLLASACFDYLYRDDYVYLFVLPQSIMYFAIGFQFIGLNVSED

SEQ ID NO: 36774 - protein, 331 aa, Zea mays
  Clone ID: LIB3136-020-A7_FLI.pep
GSCVCLNKDTLSGHSEAAGCSFSASEGPLAVVSWLSAGCLAPFAGAAAPPSLAPSFPPPLALPSFVPSLAAGAGGGGCNICGGGACFSFTKIWRIRDRSVGLPGLGPWTTVMDGFLSLSFFPRFSMVAISCGMRSEIDFQYCLSAPAWNFSWLATKIFSLSLLFTMFDAQFCILFSKKAFLNSSASAIIWARSSLSFCSFFSSSIAFFLRHSRRRIPSSRPISVGGGRIGPSPPLGSSSGENGEGEYPPETWRIGTPSDSTVISSSTSSTPPSAKEAYPPYPSAAATSAAAAPKSSESKGWEVVRGRSSVPSSAKKEAMVGEGDAEIRGPA

SEQ ID NO: 36775 - protein, 579 aa, Zea mays
  Clone ID: LIB3136-020-B1_FLI.pep
PAPVPSLASPSRESFDSARLVSPARFDLAVRVIGTGARVRVPAIPIPMVQLPSSGKRHAEPAMAPARRAATVKLEVEELGADERCPLSKRAKAALPMPPTPPQPQQDMYHNVLDEPSPLGLRLKKSPSLLDLIQMRLSQASNAGESSMDNSGSEPSKKKDNKSGASAAGERLKASNFPASILKIGSWEYVSRYEGDLVAKCYFAKHKLVWEVLEGGLKSKIEIQWSDITALKATCPENGQGTLDVVLARPPLFFKETDPQPRKHTLWQATSDFTGGQASVHRRHFLQCPSTLLSKNFEKLIQCDQRLYQLSQQPEITLDSALFEPRSSIFEDPVESKCAGFTNSKDEHEALPGFSGPVSPCAGSSISAKNENNDSIGMTAEYLSQTVGTGVGAVGVQAVGRNVNGAAPEFSIPHWWSQLKVPGLRPSMSVDDFVNHLGNCISEQITSGNPALANNEVPTKETLEGIAQYLLGDTQGPPVSASDERSLMARVDSLCCLIQKDTVPVTKPKPEPNDSDSIGVEASDGSDEEFSSAPTGKPTDATNLPAMSRKDSFGELLTNLPRIASLPQFLFKIPEGTEN

SEQ ID NO: 36776 - protein, 422 aa, Zea mays
  Clone ID: LIB3136-020-E2_FLI.pep
LLSSDQKISKTTSRLPPVACLSSGSETMAVLQVAAAAPPPVSVIGFEGFEKRLEISFSEAPVLADPSGRGLRALSRAQIDSVLDLARCTIVSELSNEDFDSYVLSESSLFVYPYKIVIKTCGTTKLLLAIPRILELAEELLLPLAAVKYSRGTFIFPEAQPSPHKNFADEVAFLNRFFGGLKSGGNAYVIGDSAKPGQKWHVYYAAEHPEEPVVTLEMCMTGLDKKKASVFFKTTADGYSLCAKEMTKLSGISDIIPEMEICDFDFEPCGYSMNAVHGPALSTIHVTPEDGFSYASYEVMGFNPGSFSYGDLVKRVLRCFGPTEFSVAVTIFGDRDNAKTWGTKLDAEAYACSNMVEQVLPFGGLLIYQSFTVTAETTHGSPRSVLHDFAGDIVKNRSESDAPWEADAVDESEERDVKKMKC

SEQ ID NO: 36777 - protein, 269 aa, Zea mays
  Clone ID: LIB3136-020-G7_FLI.pep
IGSETAGSIAYPAARCGVTALRPTFGTVARTDVMSISESLDKLGPFCRSAVDCAVVLDTIRGTDAGDPSSREVALGDPFHVDITKLTVGYLDDAEMEVVDVLSSKGVKLVPFKLNYTVESVQSILNITMDTDMLAHFDNWQREGHDDDYEAQDQWPVELRRARLIPAVDYIQAQRARGKLIREIKDSFTVDAFVGNVTDWERVCLGNLVGMPVVVVPTGLKSIENPPKGGTKRRTTVTTGIYAPPDHDHIALALAMAYQSVTDHNKQRP

SEQ ID NO: 36778 - protein, 95 aa, Zea mays
  Clone ID: LIB3136-021-H3_FLI.pep
LRCKREEAKITAWENLQKAKAEAAIRKLEMKLEKKRSSSMDKILGKLRSAQKKAQDMRSVVSSSEGQCSVRATKKTSSSVKTGRPFSCCFTYRAC

SEQ ID NO: 36779 - protein, 265 aa, Zea mays
  Clone ID: LIB3136-022-H6_FLI.pep
NFFLNQQGVYTIVIGSHISAIYHYGFANLMMRRYVEATREFNKILLYILKYKQYHQNSPQYDQILKKNEQMYALLAICLSLCPQNKLIDENVSTQLKEKYNDKMTKMQRYDDEAYAAYDELFSYACPKFITPSPPILDQPLTNYNQDAYRLQLKLFLYEVKQQQLLSGIRSYLKLYSTITISKLAQYMEVDEATLRSILMTYKHKMHAVDSEGKIVSSADFDFYIVEDVIHVVESKPTKRHGDYFLRQILKFEEMIGELEKVQLD

SEQ ID NO: 36780 - protein, 241 aa, Zea mays
  Clone ID: LIB3136-024-G1_FLI.pep
RARRPPGTCTQAQLMACDVSDRAGRQPANGAQGAGGRDTETSSQDLVGVPDDGVVVEVGGGVEPEVEPHLPADDGAVAAAAHVHVGLQRVRLPRHRPQQLHVDLVVVPRVLLAVRQVEGGVDAGGVPRLHPDGRAEVAVPVRPRRLEPAARAAVHPERQGLAVRRQRLVLRAPQRAVGLGEAQRPEHAAGVVSRRRRLLLLLGSARPQLHREQSKRACQEKSRCLPHRRKVTRPCHPERTW

SEQ ID NO: 36781 - protein, 382 aa, Glycine max
  Clone ID: 700743189_FLI.pep
VSKHFNFRLHLKKMGGLASNLPLIVMVGLQIHYAALAIFTRAALLDGLSTTVFVVYRQGIATLALAPMFFSPKRRQSVKDSLGFRSFFLMFVTALVGVTANQNAYFKGLFYASSTAATAMSNLIPALTFVIAAIAGFEKVDISLRSTAKILGTVCCVAGALTMALVKGQKLLHTEFLPSIHLTGSEGDDWLLGCLLLLASSVFWSCWMILQVPIASCCPDHLSSTFWMCLFSTIQAALFALLSESDLQAWILQSPLQISCSLYAGIGIAVSFFIQSWCISERGPLYCAMFNPLATVITALISATFLQEEVYVGSLVGAVGVIAGLYIVLWGKAKEFAEIKPEAAPQSSNLQDDHDISSRIDLEQPLLSEKLSEHVTEADSKV

SEQ ID NO: 36782 - protein, 115 aa, Zea mays
  Clone ID: LIB3136-032-B9_FLI.pep
FNHIYVMVITRVFTGGAFGGNRGVRPVPPEKGVFPLDHLHECDLEKKDYLGCLKSTGFQSEKCRQFSKKYLECRMERNLMAKQDMSELGFRTVDEAGTSPDKNSKLESPPNQPKD

SEQ ID NO: 36783 - protein, 321 aa, Zea mays
  Clone ID: LIB3136-036-A4_FLI.pep
LVARVALQSEDVELVAVNDPFITTDYMTYMFKYDTVHGQWKHSDIALKDSKTLLFGEKPVTVFGIRNPEEIPWGEAGAEYVVESTGVFTDKDKAAAHLKGGAKKVVISAPSKDAPMFVVGVNEDKYTSDVNIVSNASCTTNCLAPLAKVIHDNFGIIEGLMTTVHAITATQKTVDGPSAKDWRGGRAASFNIIPSSTGAAKAVGKVLPELNGKLTGMSFRVPTVDVSVVDLTVRIEKGASYEEIKKAIKAASEGPLKGIMGYVEEDLVSTDFTGDSRSSIFDAKAGIALNDHFIKLVSWYDNEWGYSNRVVDLIRHMFKTQ

SEQ ID NO: 36784 - protein, 89 aa, Zea mays
  Clone ID: LIB3136-036-B1_FLI.pep
ALNDYKRLDYIQRHISTLKESIDLGANVHGYFAWSLLDNFEWYAGYTERYGIVYVDRKNNYTRYMKESAKWLKEFNTAKKPSKKIITPA

SEQ ID NO: 36785 - protein, 374 aa, Zea mays
  Clone ID: LIB3136-037-E4_FLI.pep
KKYPNGSRTNRATPNGYWKTSGKDRIIMLNSRTVGMKKTLIFHEGKAPKGDRTDWVMYEYRMEDEDLVSAGFSKDAYVLCKIFKKSGLGPRIGEQYGAPFNEDEWDNAEVETSLFPLFCSEVNPTEGQRAQPTVLAGALLEPEPPLHNSSSTCAGEEPSFGHATAEDLTFSYTVASSAIQDTPARMSGDGVVSVNNISNVANDMRSPCDCDEFLSELSRFMNDSPLRNTPLGECSGLPPMSEAEAHAFEVNSFGLYNELSELVELGGADNNLNTSNVETTDYLMLPPDRELSANDYMELNDLLAPDPSFPSEFSAQDNQYMQHPLAQYNGHYDLSGPSEPTMPSIFDVFPPNNGVLATDDPANYLDPAMQFPFS

SEQ ID NO: 36786 - protein, 433 aa, Glycine max
  Clone ID: 700756618_FLI.pep
KVGVQTSQMQMLPTNTHMFSWESFDEDISSLDDGSAITITTSGLLEQINVTRDTSDYLWYITSVDIGSSESFLRGGKLPTLIVQSTGHAVHVFINGQLSGSAYGTREDRRFRYTGTVNLRAGTNRIALLSVAVGLPNVGGHFETWNTGILGPVVLRGLNQGKLDLSWQKWTYQVGLKGEAMNLASPNGISSVEWMQSALVSEKNQPLTWHKTYFDAPDGDEPLALDMEGMGKGQIWINGLSIGRYWTAPAAGICNGCSYAGTFRPPKCQVGCGQPTQRWYHVPRSWLKPNHNLLVVFEELGGDPSKISLVKRSVSSICADVSEYHPNIRNWHIDSYGKSEEFHPPKVHLHCSPSQAISSIKFASFGTPLGTCGNYEKGVCHSPTSYATLEKKCIGKPRCTVTVSNSNFGQDPCPNVLKRLSVEAVCSPTNRRG

SEQ ID NO: 36787 - protein, 216 aa, Zea mays
  Clone ID: LIB3136-043-D10_FLI.pep
GSKTVIQIRSHAQKYFLKVQKNGTSEHVPPPRPKRKAAHPYPQKASKNEPNYGLKTDSSSIHRNSGMNVSVSSWPHRSIPQAVASSMVKDLGAGTPGPNNFCSSSTEGPPRTWQPGETNGPINQIPSLRLMPDFAGVYSFLGSVFDPSTSDHLQKLKEMNPIDVETALLLMRNLSINLTSPDFEDQRKLLSLYSASDGPELGSSRSSALATSAPFM

SEQ ID NO: 36788 - protein, 116 aa, Zea mays
  Clone ID: LIB3136-044-A4_FLI.pep
ASTIDHPSPHLQAPRNLPSFFSQSAAADSSAARESRARGAGPQNRGEAKDLTYVATLRSAAMGHEGSCRCELCGAPAAVHCAADEAFLCAACDAKVHGANFLASRHRRTRLRLAAA

SEQ ID NO: 36789 - protein, 237 aa, Glycine max
  Clone ID: 700761163_FLI.pep
KKVSLELGGNAPCIVFDDADLDVAVKGTLAAKFRNSGQTCVCANRIIVQEGIYEKFANALRDTVQNMKVGDGFSEGVAQGPLINEAAVKKVESLIHDATSKGAKVILGGKRHSLGFTFYEPTVISDVNSDMRISREEAFGPVAPLLRFKTEEDAIRIANDTNAGLGSYIFTNSIQRSWRVAEALEYGLVGVNEGVISTEVAPFGGFKQSGLGREGSKYGMDEYLEIKYVCLGNMHKA

SEQ ID NO: 36790 - protein, 139 aa, Zea mays
  Clone ID: LIB3136-044-H10_FLI.pep
SSSPLLRALSSRSASCDPPLQIDGIVAAEKATRSCVECRATTTPMWRSGPTGPRSLCNACGIRYRKKRRQELGLDRKLQQQQNNGEAKTEEAKDSSSNSSSGSSNLQVVQKRRLLMGVEEAALLLMTLSSSPTSTLLHG

SEQ ID NO: 36791 - protein, 294 aa, Zea mays
  Clone ID: LIB3136-052-C9_FLI.pep
LIFHMDGTCSNPEHLYSHHQYHLLHRNCRIRQCHNHHLGRHHRRCLHMHHLHRHPLHMHHHRMPHMHHMRLHTWIHHTHHQNQTQSQHCLHSHNLYHSHILLLRHHHIHNSLQQIDKHHQTHNHPHRCRCCHYQLHHHHGKYCGNLHPLGLISHYRCDQIHVSLVQPSLFQPSVRDGGSPPMKIFLVLGPSLVFISSLGTVILTSTVLPSITCSSSKTLSITDGSENVTNPNPRGILVCLSFIITESVIAPYFSKCLENDSSVVSQATPPTKIFLQKAKIIYLLLTYIINVQKS

SEQ ID NO: 36792 - protein, 240 aa, Zea mays
  Clone ID: LIB3136-056-F7_FLI.pep
SPAGTQRKKTRSCVFLPFQHRAQSASHPLFLSPAAAAAAARPLQYDVEQGEVKVRLACAMFKKFSSEDISGQNQVKASVQRKIRQSIADEYPSLEPLLDDLLPKKSPMIVVKCQNHLNLVVVNNVPLFFNIRDGPYMPTLRLLHQYPDIMKKFQVDRGAIKFVLSGANIMCPGLTSPGGALDDEVEEETPVAIMAEGKQHALAIGYTKMSAKDIRTINKGIGVDNMHYLNDGLWKMERLE

SEQ ID NO: 36793 - protein, 128 aa, Zea mays
  Clone ID: LIB3136-056-G1_FLI.pep
RSGPDQNGVTITERSNMGTTWVFSWPVADGPTPDANIVGQLQGTSVQVANTPVVVYHYSLGLVFEDKRFNGSTLQIQGTSQINGEWSIVGGTGQLTMAMGTVKRTEVVYKDNTRISELKIHAYFAPVN

SEQ ID NO: 36794 - protein, 236 aa, Glycine max
  Clone ID: 700746227_FLI.pep
HALKTTPYDERVENHENHALHATHQIAESWIHASRKVLERIADAVLSRTFEKAAEDCYAVERIWKLLAEVEDLHLMMDPDDFLRLKNQLSVKSSGGETASFCFRSKELVELTKMCRDLRHKVPEILEVEVDPKGGPRIQEAAMKLYVSKSAFEKVHLLQAMQAIEAAMKRFFYAYKQVLAVVMGSSEANGNRVGLSCDSADSLTQIFLEPTYFPSLDAAKTFLGYLWDNNDNNKWI

SEQ ID NO: 36795 - protein, 197 aa, Zea mays
  Clone ID: LIB3137-001-A5_FLI.pep
RRRGTRRLRGRRWGSPRAAASGASHARAWRAAAAQARARAEAPAPPLPRPPRRRSRRRRRRLRRRQPVTPAPAAPAAGAARTSPPRRRRAPLRRTCARGGRRRAPGARPAGRRGPAPRCGARWRPGWSRSHRRGGDRGDDHLGVGRGHEVGGARGRAVGTGSGSGHACAGAGRLGCWLSLPLPLGVSGCVGSGNWGR

SEQ ID NO: 36796 - protein, 235 aa, Zea mays
  Clone ID: LIB3137-001-B5_FLI.pep
QAQVPNQQTQTARRQPLSSLTPRRRPSSLTRPAPQHDTIAPWPSSRSRAPTARTTAESNPEIQRHRHDQACPGMGRRGEPYYVEAAPPVDVNKNTEWFMYPGVWTTYILLLFFAWLLVLSVSGCSPGAAWTVVNLAHFAITYHFFHWKKGTPFAADDQGIYSRLTWWEQIDNGQQLTRNRKFLTVVPVVLYLIASHLTDYKQPMFFLNTMAVFVLVVAKLPNMHKVRIFGINGDI

SEQ ID NO: 36797 - protein, 227 aa, Glycine max
  Clone ID: 700741750_FLI.pep
GYLTWEARIKILLGTAKALAYLHEAIEPKVVHRDVKSSNILIDDDFNAKVSDFGLAKLLGAGKSYVTTRVMGTFGYVAPEYANTGLLNEKSDVYSFGVLLLEGITGRDPVDYGRPANEVNLVDWLKMMVGNRRSEEVVDPNIEVKPSTRALKRALLTALRCVDPDSEKRPKMGQVVRMLESEEYPLPREDRRHRRRNREGSGEIESQKEYSDTDRSEIQDSREERRG

SEQ ID NO: 36798 - protein, 312 aa, Zea mays
  Clone ID: LIB3137-001-B9_FLI.pep
PSAPSRTRGRRRGGATRAGTTTRAPPARTSARAGAGAATPATSRTASSSAGSTRRATAPSPARTARPAAAASASSRTPRTSCGCSRPRRSSLAPAPGAPAPCPSPTTAPRCVARRSRATSPRASCPRRRPARSCRRPRRPRQSRRRCRRTVPPPPSAAGPGRAPGPPSTTSWPRSASSASARPARPRPAGGAATRRPRLPTGRPLRAGSTACPPPRGPRRQPSPPPPPPATCPTWSRLTSASAATRSPWRGWSPGVPSAPRCSSGSAGRALFPATQLPEPVAPTSGGSPTSSTEAAAAAGRCCHSSGEKRWW

SEQ ID NO: 36799 - protein, 670 aa, Zea mays
  Clone ID: LIB3137-002-E2_FLI.pep
DWTPNPTTAAGTGKRKNSLPFPSRLPPPPPRRRGRHRHQSSLPPPRSFARSLARRSTRGEAMKYVLVTGGVVSGLGKGVTASSIGVVLKACGLRVTSIKIDPYLNTDAGTMSPFEHGEVFVLDDGGEVDLDLGNYERFLDIKLTRDNNITTGKIYQSVIDKERRGDYLGKTVQVVPHITDEIQDWIQRVAMNPVDDTEEPADVCVIELGGTIGDIESMPFIEALGQFSYRVGPGNFCLVHVSLVPVLNVVGEQKTKPTQHSVRGLRGLGLMPDILACRSTQPLEEHVKVKLAQFCHVPIPNIINLHDVANIWHIPLLLRDQKAHEAILKVLDLQCVSKVAREPQLSEWTERVSRCDRLKSPVRIAMVGKYTGLSDSYLSVIKALLHASVALDRKLVVDWVPSCDLEDSTAKETPDAYEKAWESLKGADGVLVPGGFGDRGVQGKILAAKYARENNVPYLGICLGMQIAVIEFARSVMKLHGANSTEFDPTTKTPCVVFMPEGSKTHMGATMRLGSRRTFFQATNCKSAKLYGNACYVDERHRHRYEVNPDMVPEFEKAGLSFVGRDESGERMEIIELPTHRFFVGAQFHPEFKSRPGKPSPLFLGLVAASSGQLDHLLQRGLTSSVGRDICGKGGAQKPKACQNGHVMKPLNGLVHGHYSATRCNGVIPI

SEQ ID NO: 36800 - protein, 115 aa, Zea mays
  Clone ID: LIB3137-004-H8_FLI.pep
EAASLLWLWDRMVFFSFRVLVSFDLVLCSHSLLLQVLQQGSSRAPWASCISCCGTHLHSPGTHRSLCGTDNLYIKRGMNLRLLEMRTQALIFTVLATIHSSLWHRHLKPKARKTR

SEQ ID NO: 36801 - protein, 309 aa, Zea mays
  Clone ID: LIB3137-008-A2_FLI.pep
LERHRVHRDADGDLPAAVTAPLLAHPPSPAEPWPANFGSSEITDEEIDAASAACCRICLESESEPGDVLISPCMCKGTQQFVHRSCLDHWRSVKEGTAFSHCTTCKARFHLRVEFLEDDICRRMKFRMFVARDVIIIFLLIQATIAAIGGMAYFLDKDGNFRNKFSDDWERFLSKHPVPFYYCVGVVVFFVMVGFFGLILHLSSYNNNDPCLVGSRDCCFGCGLVDLPASMEACFAFAVIFVIMLAILGVAYGFLAATVAIQRIWQRHYHILTKKELTKEYVVEDLPGGYTPPKMDPEHEQRLKVLQLM

SEQ ID NO: 36802 - protein, 106 aa, Zea mays
  Clone ID: LIB3137-010-C9_FLI.pep
HTKQCRELDATIIPFLKVDLYYYAMIYSNHLLKKDCAKHFKGVKSHAYGEEIEKSFTKLLVEELKQREEEATQAQQEADVKLLEAKKLASQYQKEADKCSSSMDNL

SEQ ID NO: 36803 - protein, 476 aa, Zea mays
  Clone ID: LIB3137-010-H6_FLI.pep
RLVSSRAAAMAALGRGLPLLLLLLLLAVAGAANAAAAPGGMSIITYNEEHGARGLERTEPEVRAMYDLWLAEHGRAYNALGEGEGERDRRFLVFWDNLRFVDAHNERAGARGFRLGMNQFADLTNDEFRAAYLGARIPAARRGAAVGERYRHDGGAEELPESVDWREKGAVAPVKNQGQCGSCWAFSAVSSVESVNQIVTGEMVTLSEQELVECSTDGGNSGCNGGLMDAAFDFIIKNGGIDTEDDYPYRAVDGKCDMNRKNARVVSIDGFEDVPENDEKSLQKAVAHQPVSVAIEAGGREFQLYKSGVFSGSCTTNLDHGVVAVGYGAENGKDYWIVRNSWGPKWGEAGYIRMERNVNASTGKCGIAMMASYPTKKGANPPRPSPTPPAAPDNVCDENFSCSAGSTCCCAFGFRNVCLVWGCCPVEGATCCKDHASCCPPGYPVCNVRAGTCSVSKNSPLSVKALKRTLAKLSTA

SEQ ID NO: 36804 - protein, 269 aa, Zea mays
  Clone ID: LIB3137-011-C8_FLI.pep
KQYKAGLSVLEDDIFEVDQPKDLFLYCYYGGMIYIGLKKFPKALELLHNAVTAPMSTLNAIAVEAYKKYILVSLIVNGQVPSFPKYTSISAQRSMKNHAQIYFELSTSYSNGRYTDLETFVESNSAAFQSDNNLGLVKQVLSSMYKRNIQRLTQTYLTLSLEDIARSVQLETPEDAEMHVLRMIEDGEIHATINQKDGMVSFHEDPEQYKSVEMVEHIDSSIQRLTALSKKLASIDENMSCDPSYLLKTGRDRGRFDYDDFDSVPHKYF

SEQ ID NO: 36805 - protein, 517 aa, Zea mays
  Clone ID: LIB3137-013-D9_FLI.pep
EAEKLIGWKKLVQQALLLEAGDYHHLYLPHLQKKLRSLSALDARPGTLSKRTPDDLEEGEIAMSGDSHMDLQQSGSWNHERDDGEDEQVLQPKIKRKRSIRLRPKPNAEKQEDRSGEGAFPQRAARQQDAVHPIVKQKRNMSSRKVSPASRSGKLSHLSGSGEGSAELSKENWSSKAIDSTAPEFGGTKMSDSMQRKCKNVISKLWRRIDKEGHQMIPNISSWWRRNENSSFRGPAGSTLDLQKIEQRVDGLEYGAVTEFIADMQQMLKSVVQHFSYRHEVRIEAETLHNLFFNIMKIAFPDSDFMEAKNAMSFSNPGSGAAAAPSSSKHAAPSLKRSRASASASASEAEQQHGSGHSSRHNQPSEAVPPSRSHSSRSERDPRHGGSRDQHLQDGAAGLLHPSDMFIVKKKRQERARSGIGSPSSSGRGAGPLSPANPGRPGPAPSPRGARTPFQRDPPPHPSQQSMHSAGSGWGSGGAHSDHQAGASSSAPGIGDIQWAKPAKRLRTDRAGRGGRA

SEQ ID NO: 36806 - protein, 347 aa, Zea mays
  Clone ID: LIB3137-013-F4_FLI.pep
AGLNVPTNQNAARLAIWLSTSYVWGIMYENAAGDGRSSRGSVPFPRVRDVDLPVLVGVPELLGDVPVPCDLHLPPLGEAAGPAHVVPHLVVHLPPARVRLVAGVHPLVRHVPVAVVVPVARPWLHPQVVDGPDLGRVRPEQPLLERALPRGVGPEVLEVVDPARQAVPPHEHLVEEPLVAAVVRADGPAPPHERVERARRRFDHHHARVEERAVVAHRRQLREREQRVQVAQHQDVGVHEHHAVVVGQLPQPELAVVVLVVGAPRRARVADALDPPGRPPGRRQRAQRRPRHRVVVQEDQVAGRPRAPDALRQHDRAAQVRVRRVQNRRVRLAPGTTPARPRRRVQH

SEQ ID NO: 36807 - protein, 360 aa, Zea mays
  Clone ID: LIB3137-013-H10_FLI.pep
STGYRQAESKDVWWCDPRRAHPDHAGAPRRRGVARRQVQAAEGERLRGRVPGVRRGLRGGGGGRRGGGGEQARLRRPRLVRGDAAQGAPGAAEPAPGARPAVQGRPAPPVGQVGRRDPRPRQGRPRLARHLPFRRGRRARLRPRRAPHPRAQGQAQLPLLLLRLRCRGPRQPQARPHRRRRRRHRPRGTRAASGRGGPEARGRRVLRIRRAPGLLVARRVGGVRRGLRAAPGLRLRGAPGERRGRGVAPGLRLRVGRDVRLAPLRRPVRLLRRRRVRVAGQPVQRRRRAEQRRRRGGPGHAAVELRRRLPRRGQPLVLSFGDCCCVLSFVNYDLFFFFFEFLLMYICIDGELNEIILLRK

SEQ ID NO: 36808 - protein, 291 aa, Zea mays
  Clone ID: LIB3137-013-H4_FLI.pep
KTPREHPFPSMATTTSSSSLTTPLLRPNPNTNPAPRSLQLLRSRRCARAVTTAVAGGAVPYGANPRRGIWSIRDDLVVPRSPYFPVESAAGQERGPSPMVMERFQSVVSQLFQHRIIRCGGPVEDDMANIIVAQLLYLDAIDPNKDIIMYVNSPGGSVTAGMAIFDTMKHIRPDVSTVCIGLAASMGAFLLSAGTKGKRYSLPNSRIMIHQPLGGAQGQETDLEIQANEMLHHKANLNGYLAYHTGQPLDKINVDTDRDYFMSAKEAKEYGLIDGVIMNPLKALQPLPASS

SEQ ID NO: 36809 - protein, 187 aa, Zea mays
  Clone ID: LIB3137-014-A1_FLI.pep
LGVGHPPATTTRPLASPKLQLRASLFELASLQQERASEGNGHGGGCVLLPGASSPDVVQLRVRRRPPPLLLRGAGHVGVGAAPVSRAVAGADDGQRERRQGAVRAARGGGAQHHRPQALQPAQGEGNRAALAGHHRVLQDHRRRLQAAAGPHPPRQEERREARIPCLRRPCSTHIYKYIIYKYYIIK

SEQ ID NO: 36810 - protein, 465 aa, Zea mays
  Clone ID: LIB3137-014-E7_FLI.pep
PQSAAVDKATPVRPKSPAIDKATPIAPKSPPVDKASPALPKSLSGAKDALFPSRSLQIDKFTPAAPRLSQDDKAALPSSEQSHISPATSSEAQGATTRKVTTTTSLSEAAAAWRPSSAPVLPTPRSTGPAASHIQTSTLLSRSMSEAAGRRPVNDPSFSAPSYTPQTYRNAIIGKSGLSMTSASLAYQPSSLDQDTAPSRPLSAYASSTVMMPPAGRSDQSSARHGFKSGPGKLEAHDGWQQWKGDSNVDMHLWRDHAPYQQMTNSQAYEQSRRDDTYQQACSRGTEKFSRHAGLQARQQFQTETPASHVWHQPQGPVAEEFPHLDIINDLLEEDQINGSIPESFRQDYNVFGLPFSPRGNLSDMEMASVRSPARFNSPKYDGGLSGAYDMNAVNGLRERQFPSLDIYSNGLSDVSASKPWLNGSASPSVSLGVNTNGYHPQVGEYLGGGVNGVSLWRRHANGRW

SEQ ID NO: 36811 - protein, 342 aa, Zea mays
  Clone ID: LIB3137-017-C4_FLI.pep
AAGAVASVRSARVPLPDRQVPRPRPAIHPFPTAPPWLSSAPCISGSAPLLSRSLLFPSRPARPPRKPRRHGMGIVEEAHNLRVVGEGKRGVIVLAHGFGTDQSVWKHLVPHLVANYRVVLFDTMGAGPTNPDYFDFSRYATLEGYALDLLAILQELGVQSCIYVGHSVSAIIGALASISRPDLFTKLVLLSASPRYLNDVDYYGGFEQDELDELFEAMQSNYKAWCLGFAPLCVGGDMESVAVQEFSRTLFNIRPDIALNVAQTIFQSDVRSLLPHVSVPCHIVQSTKDLAVPVVVSEYLHRHLGGDSIVEVMPSEGHLPQLSSPDIVTPVLLRHIQHDIAV

SEQ ID NO: 36812 - protein, 249 aa, Zea mays
  Clone ID: LIB3137-023-A11_FLI.pep
NHLGLVAVVFFMILSQSSSLVLPPACVAGSVIVPRPVCCPLWHGLHPPLPLGSPLNNLTVDEEFSSVVLVFSINIRIREHKENTREPLELVRCLLIDLAPKPEVALARDVVDLLLRLLLASKDLGEGLDVAVNHLLLAGALPAGLVHHDEPMLVVAPGEQRRHLRGHGRAVPARARPRRDVAVPARPPRHPALEAEAGGRRDNSRAQHQRLLRDSAVTEERGEGGRGGAAGEEPPGGGGGHAGKTLAGR

SEQ ID NO: 36813 - protein, 330 aa, Zea mays
  Clone ID: LIB3137-023-A6_FLI.pep
LKWPKTFIVVSHAREFLNTVVTDILHLHGRKLHAYKGDYDTFERTREEHLKNQQKAFETNEKARQHMQTFIDKFRYNAKRASLVQSRIKALERMEHVDAVVSDPDYKFEFPTPDDRPGPPIISFSDASFGYPGGPTLFKNLNFGIDLDSRIAMVGPNGIGKSTILKLISGDLQPTSGTVFRSPKVRMAVFNQHHVDGLDLTVNPLLYMMKCYPGVPEQKLRAHLGSFGVSGSLALQSMYTLSGGQKSRVAFAKITFKKPHIILLDEPSNHLDLDAVEALIQGLLIFQGGVLMVSHDEHLITGSVDELWVVSEGRVTPFSGTFKDYKKMLK

SEQ ID NO: 36814 - protein, 384 aa, Zea mays
  Clone ID: LIB3137-023-G12_FLI.pep
YTYCIGIKTEFTMAHLISSAIAGAGNLVADGISGVTGVASQVVEGVEDTLGSIVEAIDQGVKDEDQLDLPKYVCFKGDNGLYLSARTVEGHPYLQFASEDIGDPSVRFITYNHKVNGKRVVRFKSNHLGKFWRRSPNWIWADTDDTSTNNSDTLFEVIKIDEDGVYALRNLGNNHFCHRLTYDGKESCLNATIPTIRKEAHIKIEEAVLSRKISNIEYHLKGAKIFDKKAKTLITREAVNGTSTDSKTTITLKYSVIKGKLWDSSKSMKLGVTTTIEAGVPVVLPATIEVQSEFNSTYSWGESIIEKEEYSNAYEVVVPAYSVVTVSVLATQGICQVPFSYTQEDVLTTGERKVFKFDDGIFRGVNSFGFKSEVTERKLSKDDD

SEQ ID NO: 36815 - protein, 129 aa, Zea mays
  Clone ID: LIB3137-024-C2_FLI.pep
EAVGYALTAPAGQMDLSLWERFYLQGIDSLMTLYELDYWPPQDKEVNQRSLTLPAVGLLQGCVGLRKLFVHGTTHEHFLTFFLKVPNLRDMQLREDYYPAPESDMMNTEMRAESWLRFEVQLNNRLIED

SEQ ID NO: 36816 - protein, 301 aa, Zea mays
  Clone ID: LIB3137-024-H1_FLI.pep
SSLTIRVPDKVQAFFSMAMQTEVGNGANTLFWKDRWLQGQRVADIAPRLLQVVPKRKINTRTVQEAITGRAWMSDIRGALSVGAIVDYLHLWNLLLTAELRPNVEDKHIFRMAANGKYSAKFAYEGLFISSIPFEPYERIWKTWAPPKCRFFMWLVAQKRCWTADRLAKRGLDHPDSCPLCEQESETIDHLLVSCVFSRECWFLLLRQFGLHNLSPQPENDSFLDWWRTISEMAAGQMKMRINSLVFLGAWILWKHRNQCVFEGGSPSVAAVLEQVGEERRLWEMAGAKGLIFLAANLPHG

SEQ ID NO: 36817 - protein, 313 aa, Zea mays
  Clone ID: LIB3137-027-A10_FLI.pep
PHRLHSTIPSFPYPLPLRLPSWLPFFAMATMSLRCLAMAMADTALPPAHKLLPTVSLPLLSSSTRAAPLLLFARRRLPLAPLVTSSDAVEAKSADEEEEKAGEPVEMEAGEFEEVLASGGEGEGQYAAVEPPEEAKVYVGNLPYDVDSEGLAQIFDQAGVVEVAEVIYNRETGQSRGFGFVTMSTVEEADKAIEMFSRYDISGRLLNVNRASSRGTRMERPQRQFAPAFRAYVGNLPWQVDDSRLVQLFSEHGEVVDAKVVYDRETGRSRGFGFVSMVSKEELNDAISALDGQELDGRPLRVNVAAERPQRGF

SEQ ID NO: 36818 - protein, 279 aa, Zea mays
  Clone ID: LIB3137-027-D2_FLI.pep
SPACPPRSSLSKPYASLTKLRGRMDGGAGFPGTPVPRSPEDVFRDYRARQAGLIRALTTDVEKFYVMCDPEKDNLCLYGLPNETWEVNLPAEEVPPELPEPALGINFARDGMNEKDWLSLVAVHSDSWLMSVAFYFGARFGFDKESRKRLFTMINNLPSIYEVVTGTAKKESKEKTPKSSNKTNKSGSKPSRQVEPNSRVPKMPPPKDEESEGEEGEPQEDHESALCGACGLGYDDFWICCDLCETWFHGKCVKITPNKAEHIKQYKCPSCTGSKRAKA

SEQ ID NO: 36819 - protein, 151 aa, Zea mays
  Clone ID: LIB3137-028-A4_FLI.pep
NKSILSDPSSDTNIQYNCMHQLLPSSKHGPSLLAGVGILASSARVISTHSPAFRAANRSYSAENTTSSACSTTAPMARSMSAALELSSATSSVRSAFRGATPAASRASHARLRNGTSYLSAATRSACSCRSWSWLASSPPPPPPPPGASRA

SEQ ID NO: 36820 - protein, 127 aa, Zea mays
  Clone ID: LIB3137-028-C10_FLI.pep
RNKYLELLLSVAEKYKKSPYSFVWTAAGKQANLENQVGVGGYGYPAMVALNVKKGAYAPLRSAFQRDEIIEFVKEAGRGGKGNLPLNDAPTVVTSEPWDGKDGEVIEEDEFSLDELMGDSSSVNDEL

SEQ ID NO: 36821 - protein, 392 aa, Zea mays
  Clone ID: LIB3137-028-E3_FLI.pep
PSRTLNASECVARGCALQCAMLSPTFRVREYEVQDAIPASIGFNTSDGPVSTLSSDALFRRGLHFPSVKIITLEKNDSFSFDAYYVDANELPPGTSTDIGSFQIGPFQAHTEASKVKVKIRLNLHGLVSVESAVLINDYQRNGSSTDHMEVDSSGDDMQGHKSRSERSIQRQELPITEYIYGAMSKHELLEAQEQEQQLAYQDKLVEWTKDRKNALESYVYDTRNKLSERYRSFATDSEREQISVNLQQTEDWLYEEGDDETEAVYSSKLEELKKLVDPIENRCKDDEVRAEAMRDLLKCIVDHRNAAKSLSTPERDAVDNECNKAEQWLREGSQLQESLPKNVDPVLWSCEIKRKEEELDTFCRNITRHKGSPARTDGSRGSDYMPTPDRD

SEQ ID NO: 36822 - protein, 242 aa, Zea mays
  Clone ID: LIB3137-029-B8_FLI.pep
RARPTVEVFRGVDAFLRLALPSALMMCLEWWSFELLTLMSGLLPNPELQTSVLSICLTSVTLLFTIPFGLGAAGSTRVANELGAGNPDGARSAVRVVLSMAGIDAVVVSGSLLAARRLVGIAYSSEEEVISAVAAMVPLVCITAITDCLQGILSGVARGCGWQHLGAYVNLGSFYLLGIPMAILLGFVLRMGSRGLWMGIVCGSLSQTTLMSAITFFTDWNKMAEKARERVFSDKQPQEPGP

SEQ ID NO: 36823 - protein, 264 aa, Zea mays
  Clone ID: LIB3137-030-F10_FLI.pep
RSRSRSRSRSPSHSRRHGRGIHAESNYWSKQKAPRVEYITEFGGSDDTSEPKVSGISPPSSPIRIDIPNRLSGGQILEALHSDPASSLSVEQERTAKLLKPSPSTSSALAKLSKVASGGTGKTPQTEKKETPQERLKRIMSKQLNKQIKKDTAAEIAKKREQERQRQEKLAEVGRYKRRSRSRSLSRSPPSTEGGDIAEAVVGAEAQEGTDPARSPVPGRPLALQGTEAGQDTENIQAATNKVPCHVVVNLFYRLFHSCSDVYS

SEQ ID NO: 36824 - protein, 378 aa, Zea mays
  Clone ID: LIB3137-030-H3_FLI.pep
LRMADEDIQPIVCDNGTGMVKAGFAGDDAPRAVFPSIVGRPRHTGVMVGMGQKDAYVGDEAQAKRGILTLKYPIEHGIVNNWDDMEKIWHHTFYNELRVSPEDHPVLLTEAPLNPKANREKMTQIMFETFECPAMYVAIQAVLSLYASGRTTGIVMDSGDGVSHTVPIYEGYTLPHAILRLDLAGRDLTDHLMKILTERGYSLTTSAEREIVRDIKEKLAYVALDYEQELETARSSSSVEKSYEMPDGQVITIGSERFRCPEVLFQPSLVGMESPGVHEATYNSIMKCDVDIRKDLYGNVVLSGGSTMFPGIADRMSKEITSLAPSSMKVKVIAPPERKYSVWIGGSILASLSTFQQMWISKGEYDETGPGIVHMKCF

SEQ ID NO: 36825 - protein, 444 aa, Zea mays
  Clone ID: LIB3137-040-F10_FLI.pep
ISDQILLLLLLPLPLSEDSAQQRGDPPRSGMERVFSMEEIPNPYWAPPHPQPAAGGAVAAPGGVGGAGDAAGAMNRCPSEWYFEKFLEEAVLDSPGPVAGVGRSSGQAGVEAAESKPLGAAAPASVSSSVVDPVEYNAMLKQKLEKDLAAIAMWRASGAAPPDLSATAASLPSVGVPHAAPLKPVGGTESLVQNMLAGAPVGGSGPHIVQIADIPVKQTTSSSSREQSDDDDMEGDAETNGNGNPVQQRQQRRKQSNRESARRSRSRKAAHLNELEAQVAQLRVENSSLLRRLADVNQKFNEAAVDNRVLKADVETLRAKVKMAEDSVKRVTGMNALYPAVSDMSSLSMPFNGSPSDSASDSTVPVQDDLNSYFANPSEIGGNNGYMPDIASSVQQDDNFCQRVSGCWQDGQNRLAAAGGKPGAPPEKNVRRPGFIRLDLLGFI

SEQ ID NO: 36826 - protein, 101 aa, Zea mays
  Clone ID: LIB3137-041-B5_FLI.pep
CLRDLTELSSSQNDNYVVCILSQNSSPNFSFMLPSSRTNFTKQKAKHNHILLYLTHLLWVLFATEFRPNPKPPMLPWRRHATSCFSSTPLPPSPSPSFSCR

SEQ ID NO: 36827 - protein, 847 aa, Zea mays
  Clone ID: LIB3137-041-C2_FLI.pep
SLLPSHPMARLTPTKSKSSRKPKPSSSSAMGAGAEPDAMSTRRPKRGKSVGGVSKKSKSGGFESMGLCEEVYRGVRHKGYRVPTPIQRKTMPLILAGVDVAAMARTGSGKTAAFLVPMLQRLRRRDPSAGVRALILSPTRDLAMQTLKFSNQLGKFTDLRTSIIVGGDSMESQFEDLSECPDIIIATPGRLMHHLNDVKDMTLRSVEYVVFDEADSLFSMGFAKHLHDILKKLNDTRQTLLFSATLPSALADFAKAGLRDPHIVRLDLDKKISPDLRMVFFTLRQEEKLAALLYLVRERISSEEQTIFFVSTKHHVEFLNVLFREEGLEPSLSYGAMDQEARMIHISKFRARKTMLLIVTDVAARGLDIPLLDNVVNWDFPAKPKLFVHRVGRVARQGRSGTAYTFVTSEDMPYLLDLHLFLSRPLRPAPTEEELLKDMDGITMKIDEAIANGESVYGRFPQTVLDLASDGLKEVITGCTELIALEKPCANAFRLYLKTRPMPSKESIKRVKDLPREGLNPIFRDVLRSDELSALAFSERLKSFRPKQTILEAEGEAAKARNSKGSNQWLDVMKKKREVHEGIINLVHQKSSEDPRPEVEEVVDISNWEKKEVCGKKRKLQSFRDEDYYISSVPQNHHLEAGLSVRDNEGFVENRLDAAVLDLVDDEASGMQAQKTRYHWMKNKFVKLNAGDRVTATGKIKTEGGAKIKASATGIYKRWQQKTHKSINIGGKSGNFADEGTSSSGGYQRGNKKHFTGHGRRSIPNANVPSEIRNHEQMQKGRQQKAMEITRLKNKSAKDGKFQNKFQKSRQQPDRHGKGRGSGKGTGKGFSKGAGGRGGKGKGKGGR

SEQ ID NO: 36828 - protein, 258 aa, Zea mays
  Clone ID: LIB3137-041-C9_FLI.pep
RQARQPWSMAGAEPPPDLIARAQITTCAARTGSDVTSTSSPSLFQTLQCVLDDWVLCRIYNKKGVIERYDTVDDDDGDGAVAEDVKPVPAPAASKNPRASARVGAAAAAPMKVELPEYGGGYYDYDDLETPSAGMLCFDRPSAPAPADRDSNNSVPWTTHHTHTDNSSSGSERVLSPSPDLPDRDHAESQPAAAAAAAGWWPVGGDWGSAAEDGFMVDVDVDDGSSLFGPLSPGLFARVDAAAFGFGDMLASYLHKPF

SEQ ID NO: 36829 - protein, 298 aa, Zea mays
  Clone ID: LIB3137-041-E11_FLI.pep
QSYFLPSPPLPRFHPVPLLSRSTRTIHLPAPDADGEPLLLLPPEEEGHQGQRVQEEEEQQQAAGRLGLCHMPLWGAAASAAPAAEGDAARAPSGSGGGVKVIRSLLPTRRRLRLDPPAKLYFPYEPGKQVRSAVRIKNISKSHVAFKFQTTAPKSCFMRPPGGVLAPGESIIATVFKFVEHPENNEKPMDKCKVKFKIVSLKVKGPVEYVPELFDEQKDQVAVEQILRVVFLDAERPSPQMDKLKRQLAEAEAALEARKKPPEDNGPRIVGEGLVIDEWKERRERYLARQQIEGVDSV

SEQ ID NO: 36830 - protein, 105 aa, Zea mays
  Clone ID: LIB3137-044-B7_FLI.pep
NKNLDGCVYDRCYYTVALAVNSIFICAGIGDVDTKETPLPMEDALNDYKRLDYIQRHIATLKESIEYESTLELISSIYFASVFYCSLFCCNHLYVAHAWFNQDNA

SEQ ID NO: 36831 - protein, 475 aa, Zea mays
  Clone ID: LIB3137-045-B6_FLI.pep
QTKQQGKTSSAAVAGRPSPTRLDRPFPPPLQEHDRWTDTMGRNSYELVLGRHDSRPTGSRHDAVQLQVLAERGLPHCPEDVGERHDPTQEPFLVDHPQPVHVPRCRRLDRLAEGALLGARHQRRLLLLALLFVSGGGSRGGVGVPGDRGASVRGVGAGDHKPGAGAVLSHLPLELHHADPQPSLQPRHRAVPQVRRRERLDRPLPAPGVHDGHGGQRRRPHRLDDVDHLGNARDGEHGVVHGAELAHGAQQHAPELRAVRPEEPHHVHLGEHPVPRRRLHQLQRHHVVRRALQGHQRAVHTLAERLHAVHHAGARVERPQSEALEGVSDDGGHRHGHPAVEVGRLVVVAGLGDVGKDVEHVHHADVVLADGAGGRVGLEDHGAAGADPVARWRSHGHGRDARCQERVGRVRQRRGVGNLHQPPLGPRQVHHLALAEQATEPRARLLVALVPVAGGDAVHRRLLLLVGGCSKLRHY

SEQ ID NO: 36832 - protein, 258 aa, Zea mays
  Clone ID: LIB3137-045-F10_FLI.pep
WTRALATVLFVVVAGAALLGVGGASAQQGVWSIITRPMFQSMLSHRGDSGCQGAFYTYDAFIEAASKFPGFGTTGDEQTRRRELAAFFGQTSHETTGGWATAPGGPFAWGYCRVKEQNPTDPPYYGRGPIQLTHEYNYRLAGQALNLNLVGNPDLVASDPVVAFKTAIWFWMTPQSPKPSCHAVMTGAWTPSATDRAAGRLPGYGLTSNIINGGLECGKGQSTDGAKDRVGYYKRYCDMLRVGYGDNVPCKDQKPYGG

SEQ ID NO: 36833 - protein, 323 aa, Zea mays
  Clone ID: LIB3137-058-E12_FLI.pep
LLKQRAATNARRLAKADSFFRLREGKKRKKWQGKRHDTPSAPSRSSIDQVCGRRRASLAGGLSLHGQRHGARHGAVLERVQHLQVPPGLAPLQVGHVLPEPVHAGEGHQPLRVELPGVLLLDTLEPALGDLAPVARVRLALVEEVHEQGRRLVALVRVDVVARHAVHDDLGRTAVGCGKRGQAAGHGLNHRQPESLVESRLHEGALGVADVAVQLAVADAVHLGGDPADVPVQVVLLDEVKHLLELGLLLLVLGRVAMVAADDHEVHQLLQPLVPAVQLHQPSQVLHTVETSHGEDDWLVPVVQNELVLRVLGLAVQELLNLR

SEQ ID NO: 36834 - protein, 161 aa, Zea mays
  Clone ID: LIB3137-058-H6_FLI.pep
ATALRVLRVEGEIVAEVKKQQGTMALSRSMRACLHSGRLALLAILVSGGIVLQILACALYNNWWPMLTVLMYLILPMPLIFFLGSDTSSMMSNGGDGWVNFTKFLTGASIVGSIAIPSILKHAGVIGWGALTMELSSFVVFGVAILWFLQMNGEDEYSGVF

SEQ ID NO: 36835 - protein, 388 aa, Glycine max
  Clone ID: 700752125_FLI.pep
NMLCVNTAFTSFLPRKSICFFSSKSTTPISCTLQGTVAEPKSTAAGEPLLLNAVRGIDVERPPVWLMRQAGRYMKSYQTICEKYPSFRERSENVDLVVEISLQPWHVFKPDGVILFSDILTPLSGMNIPFDIVKGKGPVIFDPIHTAAQVDQVREFIPEESVPYVGEALTILRKEVDNKAAVLGFVGAPFTLASYVVEGGSSKNFSKIKRLAFSESKILHSLLQKFTTSMARYIQYQADNGAQAVQIFDSWATELSPVDFEEFSLPYLKQIIDTVKKSHPNLPLILYASGSGGLLERLALTGVDVVSLDWTVDMADGRRRLGPNIAVQGNVDPGVLFGSKEFITDRINDTVRKAGRGKHILNLGHGIKVGTPEENVAHFFEVAKSIRY

SEQ ID NO: 36836 - protein, 226 aa, Glycine max
  Clone ID: 700786490_FLI.pep
PNLVTLIGYHACETEMFLIYNFLSGGNLEKFIQERSTRDVEWKILHKIALDIARALAYLHDTCVPRVLHRDVKPSNILLDDDFNAYLSDFGLARLLGTSETHATTGVAGTFGYVAPEYAMTCRVSDKADVYSYGVVLLELLSDKKALDPSFSSYRNGFNIVAWACMLLKQGRAKEFFTAGLWEAGPGDDLVEVLHLAVVCTVDILSTRPTMKQVVRRLKQLQPLTC

SEQ ID NO: 36837 - protein, 293 aa, Zea mays
  Clone ID: LIB3137-060-D9_FLI.pep
AAPASARPAPMAAAAVTLPSSGTPFAVATTASSSSARRCLLLPSAAPRRALRVVASAATEAPPKPTQPPTSPSGIVLVDPSEAQKVHRLKAVYDQKVVPLITEEFGYTNVHQVPKLEKIVVNCGLGAEAGNSKGLDAAMKDLAMITGQWPVKTKARKSVASFKIREGNTIGIAVTLRGRIMYNFLDRLINLGLPRTMDFLGVNPNSFDGHGNYSLGLRDQGVFPEIPYEVGGKKNGMDVSIVTSAKTDNEAFRLLVLLGMPFSENIKTDVVIRKKRLKRHHFLSKGKGKGGRR

SEQ ID NO: 36838 - protein, 422 aa, Zea mays
  Clone ID: LIB3137-061-C2_FLI.pep
DLRSSARLGSSSPFPAMERRQELCRNFQRGSCKYGSHCRFVHASSQQQQQQQQQQAKPNPFGFGLGSRQQQQQQSSFRAQFQQQQQQKPNPFGFGVQGGAAAQSRNAPGQAKPFQNKWVRDPSAPTKQQEAAQPPAAAHTSCTDPDSCRQQIAEDFKNETPLWKLTCYAHLRSGPCDITGDISFEELRANAYEQGRQGHPLQSIVEGEKKLKNAKLTDFNNFLNMPRLSVSQTPSFPTVASFPEVKNNSAFGVSQNNGPPVFSSFSQIGVTTNMGPGSRTTPGVPTNTLFGQSTQPSHPTFPAPTFGRSDMKFGVSGPFGSQISQQSSGSFQGSNMSSFGNFSKPHASYQQSPSSSSHHRDIDRQSQDLLSGIVVPTSATNEAPVEDNKNENQDDSIWLKEKWSIGEIPLGEPPQRHVSHVF

SEQ ID NO: 36839 - protein, 280 aa, Zea mays
  Clone ID: LIB3137-061-E7_FLI.pep
VGRLRLLVVGGGELLVGVGDEEQLVDDAGEAAADEGPDPVHPLVAPLPADEGGAEGHGGVHGRAVEGAAHQDVGPHDEADGNGGDGAQAALLRVHRRGVHRVHQPEGHHDLQHQRLPHRHARQPEGARGLPARREAEQEARHGGPQQLRHPVQEPPEQGDVAAHEGAEGHGRVHVPAGDVRAHRHRHEQRERVRHRRRDQARRGRRAAAGQLAEGHAGALAGEDEDEGGDELSERRLEGARVVHLLVAPQGDPIDRHFHGPLASSRALVTTAIGAGVELS

SEQ ID NO: 36840 - protein, 430 aa, Glycine max
  Clone ID: LIB3138-019-D4_FLI.pep
MKENGKKMIRQWVREEDLAKDLKLHTKQLRRTLRFFEEEKIITRDHRRETAKGAKIYGAAVAATADGQQTAKEGEEKVKLHTHSYCCLDYAQIYDVIRYRLHRMKHKLKDELENKNTLQEYICSNCGKRYNALDALRLVSFEDEDFHCESCNGRLEVESDKIAVQEGGDGDDNARRRRREKLKDMLQKMEVQLKPLMDQLSRVKDLPVPEFGSLQAWEARASAAVRAANGDINAGDSKISQLGYNGVPYSGDTKVVVDFNTEGKGEGVKSETDSTSLKVLPPWMITSGMNLTKEQRGEVKQETKMDETSTSTAVQYTDDKKLTIGHDNNQNIQDEYIKAYYAALLKQHELEEAAKKQLPNTLAADDPSSSTSNRQVGMKSKREEDDDCTEWEEAPIAGNGNGGYKVDLNVEAEEVAADDDDDDDVDWEEG

SEQ ID NO: 36841 - protein, 616 aa, Glycine max
  Clone ID: LIB3138-035-A7_FLI.pep
GYCILAGSPNLASNSTMAYAAPPLDPPGIGTNSPSSQKKRVAYFYDSDVGNYAYQSGHLMKPHRIRMAHSLVMNYGLYNKMEIYRAKPASKYEMTQFHTDEYVDFLQRVTPDNEHLLAKECAKHNVGEDCPPFDGVFEFCAISAGGSMEGAARLNRAKCDMAINWAGGLHHAKKNEASGFCYINDIVLAILELLRFHARVLYIDIDVHHGDGVEEAFYTTDRVMCVSLHKYGEFFPGTGDLRDIGIGQGKHYSVNVPLRDGIDDASYKDVFESVTTWAVEFFQPGAIVLQCGADSLSGDRLGAFNLSLAGHANCVNFVKKFNLPTLFLGGGGYTIRNVARAWAYETGQIVGVELSRSMPFTDYYEYYSPDFELDVKPSNMDNRNSAEYLAKIKSFVYTNLRQAQPVPSVQLQDVPRYPVGMSEHIDDMDDRLDDEDADEETSKDQRLTERVEDRMIEDDMDMSGLEDARGVDSGADADHGSPSIVGEGGSGCKVLSSDHDTDQITEPVPSIDPGNDPEPDRTTMMLQEAIRDESNEVSQPTNVEQTVVQRDAPAEHVEIIAQPSIVLESAPMQPEPPIVQCMNRVDSHTLGLSDAAEAVEAMENNHKGGNENIGLS

SEQ ID NO: 36842 - protein, 177 aa, Glycine max
  Clone ID: 700754143_FLI.pep
AKHTIIHRDVKTTNILLDDKWVAKVSDFGLSRIGPTGNAKAHVSTVVKGSIGYLDPEYYKRQRLTEKSDVYSFGVVLFELLCARPPLIRTAEKKQVSLADWARHCCQNGTIGQIVDPTLKGRMAPECLRKFCEVAVSCLLDDGTLRPSMNDVVWMLEFALQLQESAEQRENTNIVDN

SEQ ID NO: 36843 - protein, 362 aa, Glycine max
  Clone ID: LIB3138-042-C2_FLI.pep
LANLLIRHIMGSPESNLPPGFRFHPTDEELILHYLSKKVASIPLTVSIIAEVDIYKLDPWDLPAKATFGEKEWYFFSPRDRKYPNGARPNRAAASGYWKATGTDKTIVTSLQGGAQESAGVKKALVFYKGRPPKGVKTNWIMHEYRLVDNNKPIKLKDSSMRLDDWVLCRIYKKSKHALTSTEASIGVGEVDQAEEHLFQETLLPISKSPAPPPQNTLISQKSVSFSNLLDAMDYSILSSFLSENHTNHPPGVGSSAGFNTGNLDQQCSPINNNNPTNNYMFQKNPQLNPSVSNMENMMRPKRQVSNMDEETLYPSKKYLSSSCNFPTNISNQYENPQWNYLMKQSLMNQRLMLGPHLQFQG

SEQ ID NO: 36844 - protein, 434 aa, Glycine max
  Clone ID: LIB3138-060-C7_FLI.pep
RGGRRSAMSSGGGSSEAAAAAKEKEKEKARVSRTSLILWHAHQDDAAAVRKLLEEDPSLVKARDYDSRTPLHVASLHGWVEVANCLIEFGADVNAQDRWKNTPLADAEGAKRTAMIELLKSHGGLSYGQNGSHFEPSPVLPPLPNKCDWEVDPSELDFSNSVCIGKGSFGEILKAHWRGTPVAAKRILPSLSDDRLVIQDFRQEVNLLVKLRHPNVVQFLGAVTDRKPLMLITEYLRGGDLHKYLKDKGALSPSTAINFGLDIARGMAYLHNEPNVIIHRDLKPRNVLLVNSSADHLKVGDFGLSKLIKVQSAHDVYKMTGETGSYRYMAPEVLKHRRYDKKVDVFSFAMILYEMLEGEPPFSNYEPYDGAKYVAEGHRPSFRGKGYIPELRELTEQCWDADMKQRPSFIEIIKHLEKIKENLPSDHHWHLFTS

SEQ ID NO: 36845 - protein, 103 aa, Glycine max
  Clone ID: LIB3138-069-G10_FLI.pep
NRKPHRSGRRKKNKRRWDPNYPKPNRSGYNFFFAEKHYTLKTLYPNREREFTKMIGQSWNSLSPEERMVYQNIGLRDKERYKRELTEYKEKMKLRQTSEVGRP

SEQ ID NO: 36846 - protein, 228 aa, Glycine max
  Clone ID: LIB3138-129-C11_FLI.pep
HTPRVPATLLQPLARAHVQLSVQLGRWFLAMNKVAEAAADAAFATVQTTTGFAEIGHGREFAVDGTTSIPARVEGVAGFLRVFFVLESDVDIADEMVIVVVANNQLFSKSILAQLAPDVLVKCIKVHLHLLRVHLVLGVVRRVLVEVGQQDSLRVRRLDVFSGAAVAVTAGANLVVEGAIDLVLLGTEDGGEVVGHDCCCSRECWRCWRCRWKSASVVSRENGDGVVR

SEQ ID NO: 36847 - protein, 157 aa, Glycine max
  Clone ID: LIB3139-011-C4_FLI.pep
DTVPMTDYNVTFFSLMMFKLHYRSSHILMGCRLLTGAILAHELMHAWLRLNGYRNLNPEVEEGICQVLSYMWLESEVMPSFQNMPSTSTSAASSYSSSKKGAKSHVENKLGEFFKNQIANDSSPAYGGGFRAANEAVNRYGLRRTLDHIHWTGFFPV

SEQ ID NO: 36848 - protein, 354 aa, Glycine max
  Clone ID: LIB3139-020-D12_FLI.pep
SASIGKAQASEFGTHSIESSGNEFAAFSGGTTGTLSLAVALSSEKAVVAAESNSSKKIVDTFGQRTSIYRGVTRHRWTGRYEAHLWDNSCRREGQARKGRQVYLGGYDKEEKAARAYDLAALKYWGPTATTNFPVSNYSKEVEEMKHVTKQEFIASLRRKSSGFSRGASIYRGVTRHHQQGRWQARIGRVAGNKDLYLGTFATEEEAAEAYDIAAIKFRGANAVTNFEMNRYDVEAIMKSSLPVGGAAKRLRLSLESEQKAPPVNSSSQQQNPQCGNVSGSINFSAIHQPIASIPCGIPFDSTTAYYPHNLFQHFHPTNAGAAASAVTSANATALTALPASAATEFFIWPHQSY

SEQ ID NO: 36849 - protein, 116 aa, Glycine max
  Clone ID: LIB3139-021-F4_FLI.pep
ALPPNGKIAKDAKETVQECVSEFISFVTSEASDKCQREKRKTINGDDLLWAMTTLGFEEYIDPLKVYLAAYREIEGDSKGSAKGGDASAKRDVYQSPNGQVAHQGSFSQGVNYTNS

SEQ ID NO: 36850 - protein, 203 aa, Glycine max
  Clone ID: LIB3139-024-B9_FLI.pep
SLEIPRPTFPHITTNMRSSNGTSSSRASNGNTGRHPVYRGVRRRSSGKWVSEIREPKKPNRIWLGTFATPEMAAIAYDVAALALKGKDAELNFPNSASSLPIPASSAAHDIQMAAALAATAVGAANDALEGSQGGNVSVSLAEEFSGGNLNHFVDEDLIFDMPNILVNMAEGMLLSPPRFDNFAATDYEYMDEDPTLWGFPNY

SEQ ID NO: 36851 - protein, 210 aa, Glycine max
  Clone ID: LIB3139-034-E11_FLI.pep
KYLYVRIYIHTHRDMENNNHHAMAAGASSDSNTSDHTTPISSSCVNDNNNNKLYKGVRKRKWGKWVSEIRLPNSRERIWLGSYDSPEKAARAFDAALYCLRGRHAKFNFPNTPCNMDTATNAPPNQSLTPQEIQEVAAKFANQVSPLLQKPQEQPQPQRSSDGGGGGANSSSFGSKLLCKSDSIAESSTTSTTTNCTPTTTASSCSATMS

SEQ ID NO: 36852 - protein, 327 aa, Glycine max
  Clone ID: LIB3139-037-B3_FLI.pep
STSFPIIAIAIIGIMATAFLLVSYYIFVIKCCLNWHRIDVLRRFSPSRRREDPPPTYSPATDTRGLDEALIRLIPVTQYKAQQGDDRDFGERRFCECAVCLNEFQEDEKLRVIPNCSHVFHIDCIDVWLQSNANCPLCRTSISLTSRFHIDQLLTLRPSSSSYPHDQTPPRENLIGGDEDFVVIELGSDHDRSQNLQERGNALELPTCPISPSSPRKLLEHRNVQKKKAMKLQKVTSMGDECIDIRAKDDQFFSVQPIRRSFSMDSSGDRRFYLAVQEALRNQNWQVNEVNSIEGCSGIGSRAKRSFFSFGHGSRSRSSVQPVSLDP

SEQ ID NO: 36853 - protein, 258 aa, Glycine max
  Clone ID: 700749341_FLI.pep
VEAIPLDDATQPSCFFQLFGALKELKRPMWMLMLVTAVNWVGWFPYFLFDTDWMGREVYGGTAGEDAYAKGVRVGSLGLMVNAVVLGFMSLAVEPLGKMVGGVKRLWAIVNFILAIGFGMTVVITKVAEHQRRMNPAAVGHPSEGVVVGSMVFFGVLGVPLAITFSVPFALASIYCSASGAGQGLSLGVLNLAIVVPQMVVSALSGPWDSLFGGGNLPAFMVGAAAAALSAIMAIVLLPTPKPADEAKASSMMAGGFH

SEQ ID NO: 36854 - protein, 304 aa, Glycine max
  Clone ID: LIB3139-039-C10_FLI.pep
RDWNMENLGGSSRRKAIEELLRGRDSAQQLKSVINGTYDDGSATPFAQQLVKEVLMSFTNSLLFLHNNPTSESHHVFNVQVWDSPKSEDSQESNCKSSTIKEPRGCYKRRRTEQTWEKESEAPIDDGHHWRKYGQKEILNAKFPRNYYRCTHKFDQGCQATKQVQRVQEEPILFKTTYYGHHTCKNSANPDIILDPMSPSSSSKFLSFDNSFSTPSKQECPFLSSSNNFPSSSSVKRECKEEVPPSISSNDYLISSDLTFDSSPRHHVTLSSTLDSEYKSVDISDVLYDSAQLDFVFEPFLEIR

SEQ ID NO: 36855 - protein, 729 aa, Glycine max
  Clone ID: LIB3139-040-D1_FLI.pep
SREEEHESRSGSDNMDGGSGDDFDAADNPPRKKRYHRHTPQQIQELESLFKECPHPDEKQRLELSRRLNLETRQVKFWFQNRRTQMKTQLERHENSLLRQENDKLRAENMSMREAMRNPICSNCGGPAMIGEISLEEQHLRIENARLKDELDRVCALAGKFLGRPVSSLTSSIGPPMPNSSLELGVGSNGFGQGLSTVPSTMPDFGVGISSPLAMVSPSSTRPTTTALVTPSGFDNRSIERSIVLELALAAMDELVKMAQTGEPLWIRSLEGGREILNHEEYTRTITPCIGLRPNGFVTEASRQTGMVIINSLALVETLMDSNRWSEMFPCMIARTSTAEVISNGINGTRNGALQLMHAELQVLSPLVPVREVNFLRFCKQHAEGLWAVVDVSIDTIRETSGAPTFVNCRRLPSGCVVQDMPNGYSKVTWVEHAEYDESQIHQLFRPLLSSGMGFGAQRWVTTLQRQCECLAILMSSAAPSREHSAISSGGRRSMLKLAHRMTNNFCSGVCASTVHKWNKLNAGNVGEDVRVMTRKSVDDPGEPPGIVLSAATSVWLPVSSQRLFDFLRDERLRSEWDILSNGGPMQEMAHIAKGQDHANCVSLLRASAINANQSSMLILQETCTDASGSLVVYAPVDIPAMHVVMNGGDSAYVALLPSGFAIVPDGSGEEQGGASQQRAASGCLLTVAFQILVNSLPTAKLTVESVETVNNLISCTVQKIKSALHCES

SEQ ID NO: 36856 - protein, 335 aa, Glycine max
  Clone ID: LIB3139-048-A2_FLI.pep
EDFQSVLTTFTRYSRLRVIAELRHGDIFHSANIVSSIEFDCDDDLFATAGVSRRIKVFDFSAVVNEPTDAHCPVVEMSTRSKLSCLSWNKYAKNQIASSDYEGIVTVWDVTTRKSLMEYEEHEKRAWSVDFSRTDPSMLVSGSDDCKVKIWCTNQEASVLNIDMKANICCVKYNPGSGNYIAVGSADHHIHYYDLRNISRPVHVFSGHRKAVSYVKFLSNDELASASTDSTLRLWDVKENLPVRTFKGHANEKNFVGLTVSSEYIACGSETNEVFVYHKEISRPLTCHRFGSPDMDDAEDEAGSYFISAVCWKSDRPTILTANSQGTIKVLVLAA

SEQ ID NO: 36857 - protein, 320 aa, Glycine max
  Clone ID: LIB3139-055-E11_FLI.pep
LTTCSSSFRKTQVELISIMAALMDFYSSSPEFQLHSDPFRGELMEVLEPFMKSPSPNYFPSSPSLPNLYSNGLSSNTQSLIGFGQAQPTSLVGLNHLTPSQISQIQAQIQIQAQQHQNRSNTLSFLGPKPIPMKHAGMPPKPTKLYRGVRQRHWGKWVAEIRLPKNRTRLWLGTFDTAEEAALAYDKAAYKLRGDFARLNFPNLRHQGSSVGGDFGEYKPLHSAVDAKLQAICEGLAELQKQGKTEKPPRKSRSKLAEKVVSDKENNNSCKVEAASWSSEGSSPLSDLTFADVSEAQWEGDSDNYNLQKYPSYEIDWDSL

SEQ ID NO: 36858 - protein, 238 aa, Glycine max
  Clone ID: LIB3139-062-C12_FLI.pep
FMAFEEHYVSQELKTIPSSMTVTENLDGCFDCNICLDFAHEPVVTLCGHLYCWPCIYKWLHVQSASLAPDEHPQCPVCKDDICHTTMVPLYGRGQGIAHSDHDGKASSYRGSCIPPRPPALGAQSLIATSSQSVPYRNTYQNQHLYQEEDASSSQMLNPGATILAPGFPHLVFGMFGEMFYTRVFGNSENLYTHPNSYHLGESNNSPRLRRQEMQANKSLNRISIFLFCCFLLCLIVF

SEQ ID NO: 36859 - protein, 141 aa, Glycine max
  Clone ID: LIB3139-067-A6_FLI.pep
ICFPTSKNQMTLKGLVSLVINLIGLAEGTRNNDAPPLPCYMLSSHIQNNKQQSSESASASNFNEDSWCCVCLSRLKAKDEIRVLPCSHKFHKICVNKWLKGRHKTCPLCRFSMGAEEKSHRAEMFTEEMLIWFSSFHVAGM

SEQ ID NO: 36860 - protein, 298 aa, Glycine max
  Clone ID: LIB3139-072-D11_FLI.pep
TTMLNHGQGCWSDVARNAGLQRCGKSCRLRWINYLRPDLKRGAFSPQEEELIIHFHSLLGNRWSQIAARLPGRTDNEIKNFWNSTIKKRLKNMSSTTTTTSTSPNASETSISEPSNKDLNNMGGFISTLHNKHAGFVPMFGSSPSPSMMQTSTVFNNMIERFPMLEQGLINMPASGGYFEGTGSTPCFSQCEVHNNKGSCYLENEVFESVNIGVEGDMFVPPLENVTCKREETTNSSYFDDDINSILNNCNNIGIAENKAHHGVENLFQQELATATGEWDFEELMKDVSSFPFLDFSY

SEQ ID NO: 36861 - protein, 207 aa, Glycine max
  Clone ID: LIB3139-072-F12_FLI.pep
RSPIQNNHSLNIRSKMSAAEEAKVPAVEKPVEEVKAPKLAKEKKPKAPKEKKPKQAKTASHPPYLQMIKDALIALNEKGGSSPYAIAKYMEEKHKAVLPANFKKILGLQLKNQAARGKLVKIKASYKLAEAAKKVKESTAKATKESRPKRNKIATAVAPKKTEAVKKPAKKVGPKKTKKVSTPAKPKQPRSIRSPTKRARKAAVAAA

SEQ ID NO: 36862 - protein, 221 aa, Glycine max
  Clone ID: LIB3139-076-C2_FLI.pep
SLKSIQCLVNLELVVNLDLKAIAMSFIGTQQKCKACEKTVYPVDQLSADGTAYHKACFRCSHCKGTLKLSNYSSMEGVLYCKPHYEQLFKESGSFSKNFQSPAKLADKTTPELTRSPSKAASMFSGTQEKCATCGKTAYPLEKVTVEGQAYHKSCFKCSHGGCPITPSNYAALEGILYCKHHFSQLFKEKGSYNHLTKSASVKRAAAATAAATTAASVPES

SEQ ID NO: 36863 - protein, 121 aa, Glycine max
  Clone ID: LIB3139-088-F8_FLI.pep
ENDDVNRAVTQRLLQKLGCVVTPVASGFECLTVIGPAGCSIQVILLDLHMPDLDGFEVATRIRKFRSGNQPMIVALTASAEEDLWERCMQVGINGVIRKPVLLHGIASELRRILMQGNNVL

SEQ ID NO: 36864 - protein, 224 aa, Glycine max
  Clone ID: LIB3139-089-G3_FLI.pep
ALTRQITITMSSSSSSFFPAHITTDQEFSLIVAALTNVVSGSTSSSSVPEFRFPHSSPPLSSASLMPPPPPSIHTCRECNIAGCLGCNFFPEEQRKKYRGVRQRPSGKWAAEIRDRHRSARVWLGTFETAEDAARAYDKASFELRGPRAKLNFPLVDESLTLQPEMAATEEQINNEDNLNQGMGMDSHEFWDRINEADFHPFMMMMDFTGDSSDSAATGYTLSS

SEQ ID NO: 36865 - protein, 211 aa, Glycine max
  Clone ID: LIB3139-090-C11_FLI.pep
KIAQQLPGRTDNEIKNYWRTRIQKQAIYAKFEDHRRAGFVEFVKGLQMTRCLHKSQESSPSAMSTQDQAIPLPFDGVTVPHYSSFGIGTTPTIQITCHGDLNHLNQHEQNSDSEHHNSSCISSSESANIPNMSQPFGYTTSQFQALDNCDFGMCLYDGYSIDNNSYDRDALNLTTTMVAGNLELPVFDCQTLETNRLNKEFASSTWSMDEL

SEQ ID NO: 36866 - protein, 262 aa, Glycine max
  Clone ID: LIB3139-100-C9_FLI.pep
SDSSSLLHQHHHHQQQHQQHQQQLLQYWSDALNLSPRGMLTRLGPDGRPLFRLPTQPINTTKLYRGVRQRHWGKWVAEIRLPRNRTRLWLGTFDTAEDAAMAYDREAFKLRGENARLNFPELFLNKDKKEEQQQQEQEASSPVLSAIAKQHEPSSEHRDVPIEESNENDSGDATVSDDQVHATTESSEGVSQEMVWGEMSAWFNAIPAAWGPGSPMWDDLDATNNLLCQSHIPFSNPNQQELNDAERQEQNTGPGYLWKDQD

SEQ ID NO: 36867 - protein, 306 aa, Glycine max
  Clone ID: 700757563_FLI.pep
QSVSVCVFSLTNGSSCPLICNRGGLDKTTTIFRTLTRPHHTMSVIDILTRVDSICKKYDKYDVQSQRDSNLSSDDAFAKLYASVDADIEALLQKADTASKEKSKASTVAINAEIRRTKARLLEEVPKLQKLAMKKVKGLSSQEFAARNDLALALPDRIQAIPDGTPAASKQTGSWAASASRPGIKFDTDGKFDDEYFQQTEESSGFRKEYEMRKMKQDQGLDMIAEGLDTLKNMAHDMNEELDRQVPLMDEIDTKVDRASSDLKNTNVRLRDTVNQLRSSRNFCIDIVLLIIILGIAAYLYNVLKK

SEQ ID NO: 36868 - protein, 286 aa, Glycine max
  Clone ID: LIB3139-100-D12_FLI.pep
DMGLSSKQVSNRGLDWNQTLLQAQNLELPNPPPMRKQQQTQPSEPLKCPRCDSINTKFCYYNNYNKSQPRHYCRACKRHWTKGGTLRNVPVGGGRKNKRVKKSTTPAIATTSISTSTSNANMDGELNNPITIPSLAVDDHKTTPSSLYQYVCLPQQNLMSTKDSEEGKDFGIGNGIFLSSTVPFPQSQSLLFPFTTSNSFDPNLCAISSSFRSSSVYNYGEEFKIMEEPTLNSIMPNTSGSTNTQPWEIAATSSGMEMSNYWTWEDIDSFVSTDPNVPWDDSDIKP

SEQ ID NO: 36869 - protein, 135 aa, Glycine max
  Clone ID: LIB3139-100-H10_FLI.pep
KISSSLRKKWTRLPRLFVSVRDIKCANILVDVSGQVKLADFGLAKATKFNDVKSSKGSPYWMALEVFNLKNQGGYGLAVDIWSLGCTVLEMLTRQPPYSELEGVLPPIAQKHVIQLILSHERNFRADELMEFYKI

SEQ ID NO: 36870 - protein, 144 aa, Glycine max
  Clone ID: LIB3139-105-E2_FLI.pep
NQSSNSVFPGFYFEINDDEFHRGSSHREERWKRETEDFKVRFPFLQSWPSVSRRPCRSLPQGRSLRPARWLRFPCLSLRGSRIPRCRGSSFSSFNFRFVFFVYCDLNVFWGFRFWSLRGTLRGTTRRRGSFRGTFNWRLGTTRS

SEQ ID NO: 36871 - protein, 205 aa, Glycine max
  Clone ID: LIB3139-106-C7_FLI.pep
VSKDGQIRHFFHRPSKAYTTGTRKRRKVHTDKEGSETRWHKTGKTRPVFVGGAVKGFKKILVLYTNYGRQQKPEKTNWVMHQYHLGTSEEEKDGELVVSKIFYQTQPRQCGNNSIIKQDLYDEERLMSNQISVHNDDDNNIIPRSNNASALMDYYNPSFINYDQLGGRSNRESSAQLIPNLAMQGDSSSFIRLAMDATKAMLDRK

SEQ ID NO: 36872 - protein, 191 aa, Glycine max
  Clone ID: LIB3139-106-D11_FLI.pep
VKTQKKMQKRRAGRKKFHETRHPVYKGVRQRNGKWVSELRQPNNKNARVWLGTFAHPDMAAIAYDVAALAFKGDSASLNFPNAATSFPRLNSRTCSVRAIQFAATQAAEKHFSCVESQQLQREGSGSGSFSLDDDSSEFSSQGRFFWDEEEVFNMPELLNCMAEALIITPPALERGFNWVGGETTVDLTLW

SEQ ID NO: 36873 - protein, 249 aa, Glycine max
  Clone ID: 700675684_FLI.pep
GGGFFFESAFSKLFNDHFLKLVPQANIIVVSVEYRLAPEHPLPAAYDDCWDALKWVASHSTKDTTPNNTESWLTEHGDFNRVFIGGDSAGANIVHNILSFRVGPEPLPGDVQILGSILAHPYFYGSEPVGSEPVTGLEQNFFNLVWKLVYPSAPGGIDNPFINPLGAGAPSLAELACSRMLVCVAEKDGLRDRGVWYYEAVKKSGWKGEIQLFEEKDEDHVYHLLKPALNQDSHKADALIKLMASFLVN

SEQ ID NO: 36874 - protein, 289 aa, Glycine max
  Clone ID: LIB3139-119-A12_FLI.pep
EKISEVEMSQRSVPAPFLTKTYQLVEDQGTDQVISWGESGNTFVVWKHADFAKDLLPKYFKHNNFSSFVRQLNTYGFRKIVPDKWEFANEHFKRGQKELLSEIKRRKTVPQSSAHPPEAGKSGGDGNSPLNSGSDDAGSTSTSSSSSGSKNQGSVETNTTPSHQLSSENEKLKKDNETLSCELARARKQCDELVAFLRDRLMVGPDQIDRIMRQGSCGSENVVGEGGGGDCLKLFGVWLKGDTLTDKRNNHKRGREDQMGFGGPRLKESKPVVDFGAVNIMMKSNRVCN

SEQ ID NO: 36875 - protein, 189 aa, Glycine max
  Clone ID: LIB3139-119-H6_FLI.pep
LCSSFFVLISTPCPNLSAPSFSIFGFTKPLCLIKGSLIFPIFLVVKKLLAKRRPSFWCCRRKRRINMKIQCDVCERAPATVICCADEAALCAKCDVEVHAANKLASKHQRLLLQCLSSKLPTCDICQDKPAFIFCVEDRALFCQDCDEPIHSAGSLSANHQRFLATGIRVASSSNCTKDNEKSHSEPPN

SEQ ID NO: 36876 - protein, 162 aa, Gossypium hirsutum
  Clone ID: LIB3145-029-C10_FLI.pep
NKTPIMATSSGSSATQINSGSEEALMDERKRKRMISNRESARRSRMRKQKHLDDLMTQLTQLQKQNHEIITNINFTTQHLLNVESENSVLRAQLNELTHRLQSLNEIISFLNDDHGDDDDDDDKTSIDFTQPAVADTAFLNPFHLAFLNQPIMASADNTFQY

SEQ ID NO: 36877 - protein, 115 aa, Gossypium hirsutum
  Clone ID: LIB3146-010-H6_FLI.pep
LMAQVSQLQNENHQILTTVSITTQRYLNVEAENSVLRAQANELSHRLQSLNDIIDSLNGCNNNIGGADGGGDCGGFNVATIGFNEMVDHSFINPFNLAYLNQPIMASADNNMFQY

SEQ ID NO: 36878 - protein, 212 aa, Gossypium hirsutum
  Clone ID: LIB3149-029-F9_FLI.pep
SSFTQFDNTKAGSKAKNLEKVANETTQKTSRGREKEGKTQRTRKNIYRGIRQRPWGKWAAEIRDPHKGVRVWLGTYNTAEEAARAYDEAAKRIRGEKAKLNFPQTPHLTQPPAKKRCMMAPELTPPSSETKSPPTPQLFMGFGYENGVYRPSEAMESEMELKEQISSLESFLGLEPDETTTELSGSAEPDSVDLWMLDDLVTHHQQQPQLFY

SEQ ID NO: 36879 - protein, 476 aa, Zea mays
  Clone ID: LIB3150-007-B6_FLI.pep
AMHKANYASRICHSCNPNCEAKVTAVNGKYQIGVYTLRPIAEGEEITFDYNSVTESKEEHEASVCLCGSQVCRGSYLNFSGEGAFEKVLMEFHGVLDRHSLLLQACEIDSVSQQDLIDLGRAGLGTCLLAGLPGWLVAYTAHLVRFIYLERQKLPDEILRHNVDEKRQFLIEINMDSEKNDAEVQAEGVLNSRLQQIVHTLDKVRYVMRCIFGDPKNAPPPLVRLSGKSLVSAIWKGDSSIVAELIQSMEPHVEEEVLSDLKAKIRAHDPSESEDIEGGTRNSLLWLRDELRTLSCTYKCRHDAAADLIHLYAYTKCFFRVRDYKTVKSPPVHISPLDLGPKYADKLGPGFQEYCKTYPENYCLAQLIYWYSQNSEPESRLTRARKGCMSLPDVSSFYVKSAKPSQERAYGNRTVRFMLSRMEKQAQRPWPKDRIWVFKSDPRFFGSPMMDTVLNNSPLDKEMVHWLKTRPNVFLG

SEQ ID NO: 36880 - protein, 572 aa, Zea mays
  Clone ID: LIB3150-013-H1_FLI.pep
AEGQGSLGGCKLRIGDVQMRPRGTSLQQSSASALGDGDAALPKKKRNRPGNPKPDAEVIALSPRTLLATNRFVCEVCSKGFQRDQNLQLHLRGHNMPWKLKQKDPKDARRRVYLCPEPTCVHHSPSRALGDLTGIKKHYCRKHGEKKFRCDRCSKRYAVESDWKAHGKTCGAREYRCHCNALFSRKDNFITHRATCDAAVRGTAQKPPLVAGLYVGSGSDDRLGLSDAAAQMHGFADQGQSSSAAEASQFDHVMPSYSGSSMFRSQASDFSLSFFLGGGTPLIEQDLSDNGGDLSEGSQGPLLHGKAPLHGVMTHLPEQQYQPNSGNANVNLLDIGFFSGNSGGTSGSQGPLLHGKEPFHSHDLTQLPEQQHQPGSSNARVNLPNLGVFSGNSGGWPGSSHQDARLVIQDQLNGGSSSNTEHGNGMASIGSHFGGGFVPSLHNSSPSAGLSATALLMKAAQMGSTTSSTTHNPNGPSALLRAAGFAGTASVRETSSRAAEEEKSHEAYFHDLIMNSLPLTGGGTGGLSGLAGVDDGNVSTRDFLGVGRDDATAPQGLHGMGAPNPTQMKWYM

SEQ ID NO: 36881 - protein, 109 aa, Zea mays
  Clone ID: LIB3150-022-A9_FLI.pep
EFCPVCGILLQIDPGTGSHRLRLFCPVCPYVCPILNKIVKKARLVKKEVEPISSTADEMKSAPKTAVTCQRCNHGEAYFKQMQIRSADEPMTTIYRCCKEECQHEWRED

SEQ ID NO: 36882 - protein, 201 aa, Zea mays
  Clone ID: LIB3150-023-G6_FLI.pep
ARRASWRIVSSIEQKEESRKNEEHVNLIKEYRAKIEAELSNICDGILKLLDSHLVPSSTAAESKVFYLKMKGDYHRYLAEFKTGPERKESAESTMMAYKAAQDIALAELAPTHPIRLGLALNFSVFYYEILNSPDKACNLAKQAFDEAISQLDTLGEESYKDSTLIMQLLRDNLTLWTSDLTEDGADEGKEAPKGEAGDGQ

SEQ ID NO: 36883 - protein, 279 aa, Zea mays
  Clone ID: LIB3150-027-B3_FLI.pep
ATDRSSPLSTFQFHSASAAGRRLRNSDSPTTRRMSEEDKTAASAEQPKRAPKLNERILSSLSRRSVAAHPWHDLEIGPDAPAVFNVVSTSITLEPFDVLYVWCCGEWGLRLSGTIYGKVVEITKGSKVKYELDKKTGLIKVDRVLYSSVVYPHNYGFVPRTLCEDNDPLDVLVLMQEPVIPGSFLRARAIGLMPMIDQGEKDDKIIAVCADDPEYRHYNDISELSPHRLQEIKRFFEDYKKNENKEVAVDAFLPATTAREAIQYSMDLYAQYILQSLRQ

SEQ ID NO: 36884 - protein, 276 aa, Zea mays
  Clone ID: LIB3150-031-A7_FLI.pep
PSSHIGSMFFGCPKISSNEQTTLRNLARRQEFQNGHAKRSNSVLVVLDVEALGVGGSITLVGAEGSLRVGLAPGEEGSSSLLQVLHLASPGLEGARLEGTAEGERQGPRLLGAELVHGIEVAGGLLLALSTREEDNSRHSSRDGPLEGTDGVLSNHLRSHLLGVGAWSHHVGLQEGTLQEDMVLVERLVAGSKDGLSDVSAAINVMRAINKDLDIDAGKALANGASGLISSKDTLARGANVGSILDELILVLSAVGRHDRCSTRRRLRRSQARWCW

SEQ ID NO: 36885 - protein, 303 aa, Zea mays
  Clone ID: LIB3150-039-C5_FLI.pep
RIVTEDFLPLPSKGKSGKDGWYPPGHGDVFPSLNNSGKLDILLAQGKEYVFVANSDNLGAIVDIKILNHLINNQNEYCMEVTPKTLADVKGGTLISYEGRVQLLEIAQVPDEHVNEFKSIEKFKIFNTNNLWVNLKAVKRLVEAEALKMEIIPNPKEVDGVKVLQLETAAGAAIRFFDKAIGINVPRSRFLPVKATSDLLLVQSDLYTLVDGFVIRNPSRANPANPSIELGPEFKKVANFLARFKSIPSIVELDSLKVSGDVWFGSGITLKGKVTITAKSGVKLEVPDGAVFENKDVNGPEDL

SEQ ID NO: 36886 - protein, 335 aa, Zea mays
  Clone ID: LIB3150-041-E7_FLI.pep
LLLNFYWLLWQVYIIDYGLAKKYRDLQTHKHIPYRENKNLTGTARYASVNTHLGVEQSRRDDLESLGYVLMYFLRGSLPWQGLKAGTKKQKYDKISEKKMLTPVEVLCKSYPSEFISYFHYCRSLRFEDKPDYSYLKRLFRDLFIREGYQFDYVFDWTILKYPQIGSNPRTRAGERTSGAAGPSMDRIEKTPGEASGRRNPSGPVNQSDSYAQRPRETVSMSLKEIMHSTDRSGERTVERPRTSSRTGSASRRAVASSSRPATSSMEPSEQQYSRASRLFSSNSGSRPSSAQRVNPAPGESRATSLSRAAVARGSRDEPLHRSLELLSLGSGKRK

SEQ ID NO: 36887 - protein, 300 aa, Zea mays
  Clone ID: LIB3150-054-G6_FLI.pep
EQPPPGKKARGGGGGSDSGGGGSTSKSRAIGKMFFKTKLCCKFRAGTCPYVTNCNFAHGMEELRKPPPNWQEIVAAHEEATEQREEHQIPIMTSGSVVAGDGGGGSGGGSQGGRAFKGRHCKKFYTEEGCPYGDTCTFLHDEQSKARESVAISLSPTVGGGGYNAASANGVMVQKPSNWKTRICNKWEMTGYCPFGSKCHFAHGSTELHKYGGGLVDIDGRDILSTPDSKQAGGSAKAPLESAAASTALPPHADVYHLGIQSQRSAIASQRSGQLQRPIQKWKGPDKISRIYGDWIDENE

SEQ ID NO: 36888 - protein, 78 aa, Zea mays
  Clone ID: 700576063_FLI.pep
NLRVMRTSKKGQEKIEGSENRLGHPSRAPRPRELSEREEFTFRLVEGHTDGALLSYAVAASSFLPPFARASKIGKAFN

SEQ ID NO: 36889 - protein, 181 aa, Zea mays
  Clone ID: LIB3150-056-B6_FLI.pep
PLLTLAAAASPAPRAKMNVEKLKKMAGAVRTGGKGSMRRKKKAVHKTTTTDDKRLQSTLKRIGVNTIPGIEEVNIFKDDVVIQFVNPKVQASIGANTWVVSGTPQTKKLQDLLPSIINQLGPDNLDNLRRLAEQFQKQAPGASGAEAGASAGAAQDDDDDVPELVPGETFEEAAEEKKESS

SEQ ID NO: 36890 - protein, 116 aa, Zea mays
  Clone ID: LIB3150-058-B11_FLI.pep
NNGRSLHQAFRGPPPARLLHRDARRAGDYGVGEEVRVAELPLQGTLLEGRQLRKRLPDRRFHRRRVQGPTPPLLLHQGLLVLPRLVSCVCIYSRSGSVKHACMRYQIFGSTSKLMN

SEQ ID NO: 36891 - protein, 244 aa, Zea mays
  Clone ID: LIB3150-069-C11_FLI.pep
LYLLQSAEEPDRHHEGVARCPRSPGSRCERHLHAYKRRLRLPATAAGSSTAAGASATSGSPATSGASPTAGPPAAAGPPATAGPCAAAGSSAAATMPLPYSTAPASASSPATPMPVPTAASKPVPAAGNLRRWQHPDPGPVRRVPEASVQPDGDALLLASVPVVAAAVLPAAQAGGAAAPVPGDLRLGPPVHPAAAAAKRPGRGAVGGADSAATDGDVRPAAADSMPLRCCRRCPPLKKLCAVV

SEQ ID NO: 36892 - protein, 198 aa, Zea mays
  Clone ID: LIB3150-073-A7_FLI.pep
LRQEFHVAAQNCWVKKGGAFTGEVSAEMLVNLGVPWVILGHSERRALLGESNEFVGDKVAYALSQGLKVIACVGETLEQREAGSTMEVVAAQTKAIAEKIKDWSNVVVAYEPVWAIGTGKVATPAQAQEVHASLRDWLKTNVSPEVAESTRIIYGGSVTAANCKELAAQPDVDGFLVGGASLKPEFIDIINAATVKSA

SEQ ID NO: 36893 - protein, 341 aa, Zea mays
  Clone ID: LIB3150-076-H7_FLI.pep
GDITRANSRKKKKLLQINSGGYSVSEQDKIKFSMRIVHFLLPWLKQFHQEQMQEKSAEAATKGIDADKLEVPLTICGKKERIYCNNCRTSIVDFHRTCNKCNYDLCLQCCQELRRGLVSGNDGKVDGGGKQDFLSGVSHDKIISKGPSDGQNDMLIDSVVPGENNTSSLRQWSVNKDGTIPCPPNAFGGCGSSLLELKCLFKEKFIAELLEKANSALNNEMEVKIEGSKCPCFTESGDMDDGISRKSSCRENSCDNYIYCPTATDVQNGSLDHFQEHWLKGEPVIVRDTLALTSGLSWEPMVMWRALREKKEKVERLSVLALECLGWCEVCNILMTVNSSK

SEQ ID NO: 36894 - protein, 156 aa, Zea mays
  Clone ID: 700582861_FLI.pep
LHGTICSSQTQQAPIATWTRRIRHTLECLSPRVGGALKSHLDVATILSKYFAVEAAQFLRGVEDGYEALRSLPESTETELSILRRGVKLARQLEEMECDRCWKVLADFWSEMLLYIAPSENVKEHIEALANGGEFITHWWALLTHAGILDRNVHSA

SEQ ID NO: 36895 - protein, 422 aa, Zea mays
  Clone ID: LIB3150-077-H4_FLI.pep
PLTRRRRRRRHRRRPEAPSQRNRLPPRIEAMSSDDEVREEKELDLSSNDVVTKYKTAAEILNNALKLVVSECKPKAKIVDLCEKGDSFIREQTGNVYKNAKRKIERGIAFPTCVSVNNTVCHFSPLTTDDAVLEENDMVKIDMGCHIDGFIAVVAHTHVIANGPVTGRAADVLAAANTAAEVAMRLVRPGKKNKDVTEAIQKVAAVYDCKIVEGVLSHQLKQFVIDGNKVVLSVSNADTKVDDAEFEENEVYAIDIVTSTGEGKPKLLDEKQTTIYKRAVDKNYNLKMKASRFIFSEISQKFPIMPFTARALEEKRARLGLVECMNHELLQPYPVLHEKPGDLVAHIKFTVLLMPNGSDRITSYPLQELKPTKSIEDNAEIKAWLALGTKSKKKGGGKKKKGKKGDAAGDPMEATNDATSQE

SEQ ID NO: 36896 - protein, 135 aa, Zea mays
  Clone ID: 700623845_FLI.pep
EQQIKSVISSVPTKPQQPSFMSDLDVQLPSAFDPFAEANAEDSGAGPGTKDYVHVRIQQRNGRKSLTTVQGLKKEFSYNKILKDLKKEFCCNGTVVQDPELGQVIQLQGDQRKNVATFLVQAGIAKKENIKIHGF

SEQ ID NO: 36897 - protein, 143 aa, Zea mays
  Clone ID: LIB3150-079-E4_FLI.pep
ANGPTNLGSSLCPSLPTPAIKVHSFAGPNVALSTLRRHPRTPPRLRVASAAPPPGPPLPRRCVAPLRLRSGRLTGGCAAMGSGNRRRPQPPTWIVASAAKMQRQGARGNDVMNLPSQLSFALLSLLHYSRTCFCDFFLNTMHQ

SEQ ID NO: 36898 - protein, 54 aa, Zea mays
  Clone ID: LIB3150-084-E12_FLI.pep
KGLLQLLGQLITVHTSSTNGQGTACQTTHLAPERSTSCQAALTIPRLQEPTMVL

SEQ ID NO: 36899 - protein, 132 aa, Zea mays
  Clone ID: 700624077_FLI.pep
HTASYPHVHTTEPHLLHCLPLTYIVNTQRGIYIHVQRLHSGSCYDEPSPLRSSASCLLRSCRFSRSSSLHCSRHRGRWCQGRSSHRRTHCPDLWPPWWWWLSSSQDDATAAAAHRRVARRTTILALTIVSVT

SEQ ID NO: 36900 - protein, 244 aa, Zea mays
  Clone ID: LIB3151-004-F3_FLI.pep
LYLLQSAEEPDRHHEGVARCPRSPGSRCERHLHAYKRRLRLPATAAGSSTAAGASATSGSPATSGASPTAGPPAAAGPPATAGPCAAAGSSAAATMPLPYSTAPASASSPATPMPVPTAASKPVPAAGNLRRWQHPDPGPVRRVSEASVQPDGDALLLASVPVVAAAVLPAAQAGGAAAPVPGDLRLGPPVHPAAAAAKRPGRGAVGGADSAATDGDVRPAAADSMPLRCCRRCPPLKKLCAVV

SEQ ID NO: 36901 - protein, 129 aa, Zea mays
  Clone ID: LIB3151-014-E4_FLI.pep
PAAILQHIVSSVGDTAGSSVGAWSRLLQAAHRRQLLRYLRRQQPRDLAALRLLLQDGLEDQAEDRLVPVLRLHLPELLATLLPQRLALRRAVGRRRRAALMPQKLDALAQDRGAANAAGSLQLARAWMR

SEQ ID NO: 36902 - protein, 178 aa, Zea mays
  Clone ID: LIB3151-015-D4_FLI.pep
PAAILQHIVSSVGDTAGSSVGAWSRLLQAAHRRQLLRYLRRQQPRDLAALRLLLQDGLEDQAEDRLVPVLRLHLPELLATLLPQRLALRRAVGRRRRAALMPQELDALAQDRGAANAAGSLQLARAWMRLLARAWVWLGMRLRPGRLSRVVAWWRRQMNRRRHMDRRWQVDRRRQVDR

SEQ ID NO: 36903 - protein, 172 aa, Zea mays
  Clone ID: 700424383_FLI.pep
SAGVEMLVYQDLLSGDELLSDSFTYKELENGVLWEVEGKWVTQGPVDVDIGANPSAEGGEDESVDDTAVKVVDIVDTFRLQEQPPFDKKSFVSYIKKYIKNLTAVLEPEKADEFKKGVEGATKFLLSKLKDLQFFVGESMKDDASVVFAYYKDGATNPTFLYFSHGLKEIKC

SEQ ID NO: 36904 - protein, 340 aa, Zea mays
  Clone ID: LIB3151-016-D2_FLI.pep
KRDGSQSIFSSSPTTTKKNPVADAVCCLTSVSQGRSRRQAGSPTHIRNPILLRSRRPAMEGRRPGAPVAGLPIGFRFRPTDEELLLHYLRRKALACPLPAGVISDADLARLHPWDLLPAAAAAPGTVPLHHTPPRIAARVPYLTSTRDRIGSNPAGGSGADADGERFFFHRPATRCWRKGGGAARAAGTGVWRPSGKETLVLSPRCKRPVGTKRTLVFCPRRGRARTHWAMHEYRLLPAGLHPYGCAAGAGANAPPPTNVSSHGGDAAADWVVCRIFRRARPAHRARLGGGAREELEEEQAAEESPSSPSSCVTDASETLDQEEDDGDEGSSSSTVASSN

SEQ ID NO: 36905 - protein, 145 aa, Zea mays
  Clone ID: 700426618_FLI.pep
LLVWFLQGFSNPTPSMDALTLRCYRYSPSVAMVPMRKTSRTTMTRASISTDGCSSSEPKKKSHSVSFAGKANKVYEDKDMGILCYTDENGELVCEGLDEGPRLTWQDMEKKNENQERQRRQRTAPPTVGRIDWSSLHAAVSMGKN

SEQ ID NO: 36906 - protein, 361 aa, Zea mays
  Clone ID: LIB3151-018-G12_FLI.pep
GHGLRKKKRRRGAHTPRLQIAVLILAPCLVYPQKNDAIHGNAKNKHCLMKLFRTARGASGDGGVHVLALINFGRRHRAGAGMPRLHHQLRHPPQVRPVVLCDCRQNRRWRRLGLPEAELPHREHQLLHLGVGVAVLRRLVDPPAALHGGHRRRLPERRLQGGLGREGERERERRAPVLGLGLGGGGGAELGRGVREEADATAAGGARAAGAGAVAGRVEPQLEGAVRERAGGPARARGGGGGGARAAPEVRARLPRVGDAARVPAPRGLARVRVGARRPVVAPRARAPPHLELVHHELVVRLRLRLDVPAGRGAGEVLPERGEELRRDLHGGRVGPRHAQRRRVEHEVLVVVVVAVGVLPL

SEQ ID NO: 36907 - protein, 210 aa, Zea mays
  Clone ID: LIB3151-019-A11_FLI.pep
PISTAPRIRAGPCPPSAQPSLRLRPRPSPAAAAAVQAEHQPALTAAPKPPALPFRVGHGFDLHRLEPDLPLIIGGINIPHDRGCEAHSDGDVLLHCVVDAILGALGLPDIGQIFPDSDPRWKGADSSVFMREAVKLMHEAGYELGNLDATLILQKPKISPFKETIRSNLCDLLGADPSVVNLKAKTHEKVDSLGENRSIAAHTVVLLMRK

SEQ ID NO: 36908 - protein, 472 aa, Zea mays
  Clone ID: LIB3151-022-D3_FLI.pep
IDRHSQHHPPRRRDSRQEEGINSLPASEGGEVYCSVDQCAHRPAGLLISSTTSGLIGMAALATSQLVATPAGLGVPDASTFRRGAAQGLRGARASAAADTLSMRTSARAAPRHQQQARRGGRFPSLVVCASAGMNVVFVGAEMAPWSKTGGLGDVLGGLPPAMAANGHRVMVVSPRYDQYKDAWDTSVVSEIKMGDGYETVRFFHCYKRGVDRVFVDHPLFLERVWGKTEEKIYGPVAGTDYRDNQLRFSLLCQAALEAPRILSLNNNPYFSGPYGEDVVFVCNDWHTGPLSCYLKSNYQSHGIYRDAKTAFCIHNISYQGRFAFSDYPELNLPERFKSSFDFIDGYEKPVEGRKINWMKAGILEADRVLTVSPYYAEELISGIARGCELDNIMRLTGITGIVNGMDVSEWDPSRDKYIAVKYDVSTAVEAKALNKEALQAEVGLPVDRNIPLVAFIGRLEEQKGPDVMAAA

SEQ ID NO: 36909 - protein, 244 aa, Zea mays; identical to SEQ ID NO: 36891
  Clone ID: LIB3151-022-F10_FLI.pep

SEQ ID NO: 36910 - protein, 329 aa, Zea mays
  Clone ID: LIB3151-023-F1_FLI.pep
HARPGSCTRIPRGIPGRTASLRAPPTTKLSLSHARARARLRRFDSPVGVPWSRTLDLLLMGVPKQRWTPEEEAALKAGVAKHGPGKWRTILRDSDFSALLRLRSNVDLKDKWRNLSVTAGGYGSREKARMALKKGRRVVPKLTADPMDVDEKDMDNAHDTVIDVEPLAMAFEPLPLLESPDKSVARLDDLIVEAIRKLNEPSGSNKAVIAGYIEVNQKYRIAPSSSLGGISTKVSSSEGMNTENNNVKRLTKPQVVAELEKMKGMTREEAAAFAAKAVAEAEVAMAEAEEAARVAEAAENDAEAAKAFLDAVILSMRNRNAASMILRAC

SEQ ID NO: 36911 - protein, 140 aa, Zea mays
  Clone ID: LIB3151-026-A5_FLI.pep
IDSSEQHKRLVDHPLTAEPERHLSWLRCNLSLCQRPKITIPTSAAATTTDQIAFVSFAWLYKHVICFFNQHLHEAPVSQLLLSAGSEGWPDFSSKSSPDSTPSSRTTKPCASSSAWDEPYPGVSSFRFLMSYSSIIKFFV

SEQ ID NO: 36912 - protein, 138 aa, Zea mays
  Clone ID: LIB3151-034-E9_FLI.pep
AIPHSTTAAKPVPAVRILRRRQRRQPVPGPVRRVPEAPVQPGGDALRLATVPGAAAAVLPPDQAGGAAAPVPGDIRCGPAVLPAAAAAGRARGADGGPGSAAADGDVRPAAAAARSLPLQRSCRRCLLLRKLCTVVIM

SEQ ID NO: 36913 - protein, 106 aa, Zea mays
  Clone ID: 700428411_FLI.pep
ILARSNMYDADATDKCICHVSSGELSQKHCKSETNQLFMFRLQTSLFSRIHNFSEKDCQADKWDKPFENLVYNMLSASVCLRIVISLFQVVLFPCTFDSVLDLTAL

SEQ ID NO: 36914 - protein, 144 aa, Zea mays
  Clone ID: LIB3151-035-F3_FLI.pep
RRFPKYHESVVGRNGSGDATGVGAVAGQLVLVLVESTHGRHVLRHHHGHGVETLGCQQLLLLLHQSWLVQAAAGGSGTLKLHHHLQLLRDGLHVHHPHLLLAALLPERLVHGARLPTPGVVGRRRQRAALRLPQVLRVGVQPAG

SEQ ID NO: 36915 - protein, 244 aa, Zea mays; identical to SEQ ID NO: 36900
  Clone ID: LIB3151-039-D9_FLI.pep

SEQ ID NO: 36916 - protein, 242 aa, Zea mays
  Clone ID: LIB3151-041-D5_FLI.pep
LLQSAEEPDRHHEGVARCPRSPGSRCERHLHAYKRRLRLPATAAGSSTAAGASATSGSPATSGASPTAGPPAAAGPPATAGPCAAAGSSAAATMPLPYSTAPASASSPATPMPVPTAASKPVPAAGNLRRWQHPDPGPVRRVSEASVQPDGDALLLASVPVVAAAVLPAAQAGGAAAPVPGDLRLGPPVHPAAAAAKRPGRGAVGGADSAATDGDVRPAAADSMPLRCCRRCPPLKKLCAVV

SEQ ID NO: 36917 - protein, 236 aa, Zea mays
  Clone ID: LIB3151-041-F12_FLI.pep
LYLLQSAEEPDRHHEGVARCPRSPGSRCERHLHAYKRRLRLPATAAGSSTAAGASATSGSPATSGASPTAGPPAAAGPPATAGPCAAAGSSAAATMPLPYSTAPASASSPATPMPVPTAASKPVPAAGNCGVGSTPILGQCVEFLRHQCSPTATPYCSPQCQSLRQQCCQQLRQVEPQHRYQAIFGLVLQSILQQQPQSGQVAGLLAAQIAQQLTAMCGLQQPTPCPYAAAGGVPH

SEQ ID NO: 36918 - protein, 162 aa, Zea mays
  Clone ID: LIB3151-050-B5_FLI.pep
HFYGSSEFSFGIFCLPKSAIIPLHNHPGMTVFSKILFGSMHLKSYDWAKSLPAGSNDNALENSDGAGARLAKVNTDAVFDASSETVVLYPENGGNLHCFTALTPCAVLDVMGPPYNRAQGRDCAYYSESPYSCAGDAQYSWLKEVHSTFEMEGIKMEPNFIV

SEQ ID NO: 36919 - protein, 244 aa, Zea mays; identical to SEQ ID NO: 36900
  Clone ID: LIB3151-052-A5_FLI.pep

SEQ ID NO: 36920 - protein, 281 aa, Zea mays
  Clone ID: LIB3153-005-E8_FLI.pep
NLEAPLSLSLSLFAVRSSAPQSNRHLAEMGRKFFVGGNWKCNGTTDQVEKIVKTLNEGQVPPSDVVEVVVSPPYVFLPVVKSQLRQEFHVAAQNCWVKKGGAFTGEVSAEMLVNLGVPWVILGHSERRALLGESNEFVGDKVAYALSQGLKVIACVGETLEQREAGSTMEVVAAQTKAIAEKIKDWSNVVVAYEPVWAIGTGKVATPAQAQEVHASLRDWLKTNVSPEVAESTRIIYGGSVTAANCKELAAQPDVDGFLVGGASLKPEFIDIINAATVKSA

SEQ ID NO: 36921 - protein, 298 aa, Zea mays
  Clone ID: LIB3156-001-F6_FLI.pep
AALRGRLAVELGPDDVPPFVAAPEWYPAFTESALSQFDGLEHADDVLVNSFRDLEPMEADYLESTWRAKTVGPTLPSFYLDDGRLPCDKTYGVDLFSSTDSEAAPCMTWLDKQEPCSVVLASYGTVANLNKEQLDELGNGLCDSVKPFVWVLRSNEAEKLSRQLGGRCKERGLIVPFCPQLEVLAHKATGCFLTHCGWNSTIESIASGVPMVAMPQWADQPTTAKYVESAWGIGVRMRKGSLVRKEVERCIREVMGGERKHVYGRNAARWMHKAKEAMQEGGSSDKNIAEFAAKYLPK

SEQ ID NO: 36922 - protein, 140 aa, Zea mays
  Clone ID: LIB3156-001-G4_FLI.pep
GIPMNQVTPSQGSDEAKPLEATVVDAAPTTSEGTAAPAAAEGTAAPSSEEAKAAPGSEGGTSHPINEEATAVAVSDAPGSPDAAAAAALAPAADTSSSDAPAVTPSEVTVSPPSTDAPELTDKPSPTEASLPPPPSVSGV

SEQ ID NO: 36923 - protein, 74 aa, Zea mays
  Clone ID: LIB3156-002-A12_FLI.pep
PLSTERVVRVCIYRKATAKLYSCFSYIYISPHFFLPFSQSLECLVMPLLHPSSLIQKLQCLVDKASQLLQFKTS

SEQ ID NO: 36924 - protein, 298 aa, Zea mays
  Clone ID: LIB3156-002-B7_FLI.pep
LETVGSIKHRNLVSLQGYSLSPSGNLLFYDYMENGSLWDILHAASSKKKKLDWEARLKIALGAAQGLAYLHHECSPRIIHRDVKSKNILLDKDYEAHLADFGIAKSLCVSKTHTSTYVMGTIGYIDPEYARTSRINEKSDVYSYGIVLLELLTGKKPVDDECNLHHLILSKAAENTVMETVDQDITDTCKDLGEVKKVFQLALLCSKRQPSDRPTMHEVARVLDSLVCPAGPPPKQAQAQAQAQASEKPSTTAPSYVSEYVGLRGGGGGSALSCTNSSSASDAELFMKFGEVISRSTE

SEQ ID NO: 36925 - protein, 198 aa, Zea mays
  Clone ID: LIB3156-013-H7_FLI.pep
EVQAAGARVLGAARRLPRAPLQLRVPQGRQARAPQAAGEAGRDAARAAAGQVLRRQCGRRALGRRRRHEGGGGVHRRLRRGRALLVRVRWRWQVHRALLGGRRRGSSPLPAAVVSAADRWLTHVVGAAGAPAVPVPLRLLLAVVVGGADLQRLAMVGVGVPQRVTYDDHKRPGVTRFQAHVTGRANTSSFVAVSSLVS

SEQ ID NO: 36926 - protein, 163 aa, Zea mays
  Clone ID: LIB3156-014-D4_FLI.pep
QRGSINSTNSNSLRREVPSSAQASASTRTKTGLSPSLSRPFSSANSMTQAHSTTFAPTRSISLTAAQSVPPVAIRSSTTRARSLACTAPTCISILSVPYSREYSSEITSPGNFLGFLKGTNFALMARAIGGPKMNPLASTPATTVIPWSLYRSTKTSMVSRNA

SEQ ID NO: 36927 - protein, 61 aa, Zea mays
  Clone ID: LIB3157-006-F9_FLI.pep
PIQYHFNTKISKVNIFRHNAKSWQRPQKLRQCFTIVRGNNTSVLKHMSFNNLKHSRQINND

SEQ ID NO: 36928 - protein, 202 aa, Zea mays
  Clone ID: LIB3157-007-B8_FLI.pep
GAGFTPHVITVQAGEDVSSKIMSFSQHGPRAVCVLSANGAISNVTLRQTATSGGTVTYEGRFEILSLSGSFLLVEDGGQRSRTGGLSVSLAGPDGRVLGGGVAGLLVAASPVQIVLGSFNSGGKKEAKKHAPSAPTPAPLKVAPPTTTRMGPNSSSPPSRGGTLSESSGGAGSPPPPPLHQGMAASSSNDQPPFLSSIMPWK

SEQ ID NO: 36929 - protein, 90 aa, Zea mays
  Clone ID: LIB3158-010-G11_FLI.pep
ALRTHCLNDYEQKLQSANVPLILLFPSFDYGGECSRLLRGLKLWLAFNCLEFWRLLDCLASMSLLEEAPWHLRAISHLFVPFGRSIHWLI

SEQ ID NO: 36930 - protein, 172 aa, Zea mays
  Clone ID: LIB3159-004-D3_FLI.pep
AADPSPSLPSLAPTPTRRDGPEEGQGPAAVVEAGQVRWWQAKEEEVEQGKAKGEGKQRGAVRPGYLRQAALGGAQVQANHPFHPLRASEDQRLPCSEGHQGLDGAWPHSDGLGPLKPADLHQGNQYIRMGKRSKMHCLPSLQEELVFRTVAIFVKSCQCYVTGDEFQVTATF

SEQ ID NO: 36931 - protein, 189 aa, Zea mays
  Clone ID: LIB3159-012-F4_FLI.pep
ILQINLSDSRSSGEQKDIDSVMSTRLANENDSSRRLKSEFLIQFDGVSSNPDDLVIVIGATNKPQELDDAVLRRLVKRIYVPLPDPNVRRLLLKNQLKGQSFKLSNHDFERLAVETEGYSGSDLRALCEEAAMMPIRELGPQNILTIKANQLRPLRYEDFKNAMTVIRPSLQKSKWDELENWNEEFGSS

SEQ ID NO: 36932 - protein, 164 aa, Zea mays
  Clone ID: LIB3159-017-C4_FLI.pep
KYLMEADINANNLREFCLSLLDGTLPPYHKSEPLPQEKGLIEKVVGRTFDSSVLESHQNVFLEVHTPWCVDCEAISKNVEKLAKHFSGSDNLKFARIDASVNEHPKLKVNNYPTLFLYLAEDKNNPIKLSKKSSVKDMAKLIKEKLQIPDVETVAAPDNVKDEL

SEQ ID NO: 36933 - protein, 82 aa, Zea mays
  Clone ID: LIB3159-017-H1_FLI.pep
RPRRWLPSTGPPATLLRSSSVASEPKKPSKSDRAESEKRQPVIAWSSRSIKCVVCLRKFVKPTAAAVYTDIASKAGVWWCTC

SEQ ID NO: 36934 - protein, 410 aa, Zea mays
  Clone ID: LIB3159-018-F2_FLI.pep
MDAILLENRWKAAICGEYMRSRYKTCSHGVACNFIHCFRNPGGDYEWADWDNHPPRYWIRKMVALFGPSVDEMNEKASHTPDFRSSVGSDRKKLKISSNRYVSRGSRNEDVHTRHSPQDYSHSKQERSSHNMNYEYRRHKRDSSAADKHRRQDVGDTNDRQFSTMGNDSKSHRHKHEERHRSDHGNGEKEDDSKTRPRKHCSVRRGSLEVGYSDWSPDFTGTDNSKGPSGEKSTSRYDDAKGSRRGSSEYYNLERHHSTAQKQSRNEHSTTRRRRHDIEDYHDEKNDGRGESRKHNRHESNDRWVATNSDVDSDVDRYQSSSCKGTRLGRKDDDPGIEVRHQRSGRSTKDDKRRKHHSGNRWHSGTEEGTSDSSGGDLSSDSWSGRSRNSENFSAHRSKRKRSRSKESGY

SEQ ID NO: 36935 - protein, 120 aa, Zea mays
  Clone ID: LIB3159-019-C2_FLI.pep
ITQAFFPYLICHSSVLYNHTHAQTQTGTTHSGSSHMGEKWKTSRRRKKQNPGLRAICHALCTSPQHTQKRRAYCHSSMSHFGAAAAALLNERWQIHVRYVDVHYQLREVIHGERYAEVIV

SEQ ID NO: 36936 - protein, 318 aa, Zea mays
  Clone ID: LIB3159-021-E10_FLI.pep
PPAAAMLLHHRLLPRLLLVPSTHTSTLLCPSRLPRRLSLSPRFYALPHLAAPQTVDHSDDEGAPQGEGQIKLPLDHLFVPPGATMDAGDQEAVSARVLKGSNIVLGPYARGDAQVVNADFVKSSVRPDDCPRDGLPEFALVGRSNVGKSSLLNSLVRRKRLALTSKKPGKTQCINHFKVNDSWYLVDLPGYGYASAPQEARTNWDEFTRNYFLSRENLVSVFLLIDASIPAKKIDLDYASWLGQNKVPMTLVFTKCDKRKKKKNGGRKPEENVETFQGLIREYFEAAPPWIMTSSVTNQGRDEILLHMSQLRNYWLKH

SEQ ID NO: 36937 - protein, 84 aa, Gossypium hirsutum
  Clone ID: LIB3165-001-C10_FLI.pep
KNFVGLSVVDGFIACGSETNEVYAYYRSLPMPITSHKFGSIDPISGKDTDDDNGLFVSSVCWRGKSDMVVAANSSGCIKVLQMV

SEQ ID NO: 36938 - protein, 201 aa, Gossypium hirsutum
  Clone ID: LIB3165-041-B2_FLI.pep
RPEGLRCGEVGGSVAKVQPTKSRSSVCCVEFNPFGDALIAAGCADQKAYAYDVRKMVEPVHIFDGHTKTITYVRFLNAQTLVSAGTDGCLKLWNIVDSRLLRTYKGHVNSRSFVGLSVWRHGGLLGCGSENNQVFVYDTRWGEPIWVHGFEPMGRDSSDHHHAFVSSVCWRQVNEDQCTLVAGGSNGVLHVFVGKRKSDSE

SEQ ID NO: 36939 - protein, 154 aa, Gossypium hirsutum
  Clone ID: LIB3166-026-A9_FLI.pep
QMQALCSCEEAIDIGTMMENKRNPFSVDHTGFTSLASKRQKATKEKKDQVSERIAALQQLVSPYGKTDTASVLLEAMGYIRFLHEQVKVLSAPYLQTIPANSLQDDDQYSLRNRGLCLAPVSCTVGLARSNGADIWAPVKTTSPKFDEVISQFN

SEQ ID NO: 36940 - protein, 182 aa, Zea mays
  Clone ID: 700429017_FLI.pep
DRGLLVRGWAPQVTILSHPAVGGFLSHCGWNASLEAITHGVPVLTWPNFADQFCSERLLVDVLGVGVRSGVKLPPMSLPDEAEGVQVTSADVEKAVAELMGVGADGTARRARAKELAAKAKAAMEEGGSSYADLDDMLRHVAELNMKKSHEEGTGFSTLPELGTGSKNNDNIGAGAALSVQS

SEQ ID NO: 36941 - protein, 144 aa, Glycine max
  Clone ID: LIB3167-004-D1_FLI.pep
ALLKQRSLKPLSPHSLVCHFFFCSFPTKRSWTLLLCSAMAMAKVFCVLLLALLGISMITTQVMATDSAYHLDGRNYGPGSLKSSQCPSECTRRCSQTQYHKPCMVFCKQCCKRCLCVPPGYYGNKSVCPCYNNWKTKRGGPKCP

SEQ ID NO: 36942 - protein, 428 aa, Glycine max
  Clone ID: LIB3167-027-B5_FLI.pep
PPFFWYWLQMSSATKNAANAVGAKTARACDSCITKRARWYCAADDAFLCQACDSSVHSANPLARRHERVRLKTASYKSTDEQQQQQQQQPPTWHTKKPRTPRQWKHSRNNNPFHLVPEEGSEEANSHDENEEQLLYRVPIFDPFVAELCGTNSSPSPVTSTDQGVVAAAEVEYKGFQSNGFCSNSSEMENLHGMLPSDAELAEFAADVESLLGRGLENECVGMEELGLVDAKEEECSVGSGKVKMEDQEESPLVEMEMDMVVGRDDQSFELSFDYETCEEVKVCDLGLGNELGAKKENDDEVKKNKISLQLDYEAVIIAWASQKSPWTTADKPNLDPDECWKQCMGSCETAYHHPCGEMGGFGIHPVIIDGGREARVSRYREKRRTRLFSKKIRYEVRKLNAEKRPRMKGRFVKRASFAPPTFPLLNK

SEQ ID NO: 36943 - protein, 179 aa, Glycine max
  Clone ID: LIB3167-027-C1_FLI.pep
MQLSVHSLIVILFLATAFLIIIFIIHLRYRLLRFFFIPTSRTFRLFLVIGSHVLLVLHFPFLRLCHIRCFFSIRHGLPFCSSSFAHSRHCFVFRMFFVEYLPELLHENEESTWRPLWLVRVFRCLPLAGGFPSLGGGSLLIHSKFGIGSLRFGLGLSSFHDGYERGTGSGVRVWVEREE

SEQ ID NO: 36944 - protein, 486 aa, Arabidopsis thaliana
  Clone ID: LIB3168-010-G9_FLI.pep
NYFFFMDLCSFSKNRPAEKMSSSYNTIALSSTPTFLLSSAAAGPGPNNFNRQEAAMTMVQQQPTSSVAPPPKKRRNQPGNPNPDAEVIALSPKTIMATNRFLCEVCNKGFQREQNLQLHRRGHNLPWKLKQKSNKEVRRKVYLCPEPSCVHHDPARALGDLTGIKKHYYRKHGEKKWKCDKCSKRYAVQSDWKAHSKTCGTKEYRCDCGTIFSRRDSYITHRAFCDALIQESARNPTVSFTAMAAGGGGGARHGFYGGASSALSHNHFGNNPNSGFTPLAAAGYNLNRSSSDKFEDFVPQATNPNPGPTNFLMQCSPNQGLLAQNNQSLMNHHGLISLGDNNNNNHNFFNLAYFQDTKNSDQTGVPSLFTNGADNNGPSALLRGLTSSSSSSVVVNDFGDCDHGNLQGLMNSLAATTDQQGRSPSLFDLHFANNLSMGGSDRLTLDFLGVNGGIVSTVNGRGGRSGGPPLDAEMKFSHPNHPYGKA

SEQ ID NO: 36945 - protein, 98 aa, Arabidopsis thaliana
  Clone ID: LIB3168-026-H8_FLI.pep
INGFDLPTRSSSLSLRQTLFSGFFGEVIYHQKKDFKSLNPFFFLSFNMPLPWKKSKSSRISRFVSDFQQSPKHGGSLVVETGFPTSLIDLFVKNRDRL

SEQ ID NO: 36946 - protein, 123 aa, Arabidopsis thaliana
  Clone ID: LIB3168-033-C1_FLI.pep
LSSPLIEKPLTKFSGLIVSSFWKQKPSDGQEHLVDDVGAGFIPGHGSQQPSSSEHNVDRTIDSPGQEETGMTGVSKVIRADQKRFFFDLGNNNRGHFLRISEVILEEQSFAGLSLESLYLPWF

SEQ ID NO: 36947 - protein, 278 aa, Arabidopsis thaliana
  Clone ID: LIB3168-047-F3_FLI.pep
TLRERFKVIIFVDPSIAMWNLASKSIREGFISKGEEAATKPRRATLDRSGDGRKTTKEEKLECPICWESFNVVENVPYVLWCGHTICKYCLLGLQRAIVIKSSALPFQLPFFVACPWCNILSLRLVCNGTIRFPSKNFYLLWMVESMNGSRSEAPSDNKRVASGQRDLRNRCDGVSNTALGDEGLLDNRSWWNGVTRGFFRTGRLHDSVRKSMALVAHLLAKFPLVVIFLLMALYAIPVSAAVLGVYFFVTFALAVPSFLVLYFAFPSLNWLIREIAT

SEQ ID NO: 36948 - protein, 77 aa, Zea mays
  Clone ID: 700429041_FLI.pep
TAGIFSYDMVSDFTTETQQVEHAYVRRVDLYVACIIYLHKVSLYVCARSLFSIGWLHRSIHHIFVLDMKNKIYMLAV

SEQ ID NO: 36949 - protein, 185 aa, Zea mays
  Clone ID: 700429335_FLI.pep
RAREPSDTWSVACRDHPLRPGRSDSSSPRRTRTAAVPRQGAGSSRMPEHSENAAADLMGNIMETIAENLPRQKSVRFDDGDGSSISEQAKKLFGGGESRKKSVHHVLGGGKSADVLLWRNKKISSSVLGVATLVWVFFEWLDYHFLTILCFMLALGMAVQFAWSIFSSSVPRVQLPEELFASAGA

SEQ ID NO: 36950 - protein, 130 aa, Zea mays
  Clone ID: 700431476_FLI.pep
VTMPEPLGRKSFPTTLSNTDDLPELCPPTTAIAGSESQSVGRALSSPWSPRAVQALCSLLTRVIKLSMAAAQGGRDLAGSRDAAGESRSRRGAGRREAGERGEADRPAASRRRSLVSSCGLDGEVVQASE

SEQ ID NO: 36951 - protein, 279 aa, Arabidopsis thaliana
  Clone ID: LIB3168-051-B10_FLI.pep
RNLLSEILTKEMMEWDNQLQPNNHHSSNLQGIDVNGGSGAGGGMYVKVMTDEQYETLRKQIAIYGTICERLVEMHKTLTAQQDLAGGRMGGLYADPMMSSLGHKMTARQRWTPTPVQLQILERIFDQGTGTPSKQKIKDITEELSQHGQIAEQNVYNWFQNRRARSKRKQHGGGSSGNNNGESEVETEVEALNEKRVVRPESLLGLPDGNSNNNGLGTTTATTTAPRPEDLCFQSPEISSDLHLLDVLSNPRDEHLVGKMGLAESYNLYDHVEDYGMSG

SEQ ID NO: 36952 - protein, 158 aa, Glycine max
  Clone ID: LIB3170-002-G8_FLI.pep
TTQLLTISLYSIHSLHFFKLNFLRMAKAAEKKPAAEKAPAEKKPKAEKKVPKEGSGGEKKKKRSKKSVETYKIYIFKVLKQVHPDIGISSKAMGIMNSFINDIFEKLAQEAARLARYNKKPTITSREIQTAVRLVLPGELAKHAVSEGTKAVTKFTSS

SEQ ID NO: 36953 - protein, 118 aa, Glycine max
  Clone ID: LIB3170-011-G12_FLI.pep
ELVTGSAKQSKDQPAAHNNGSKCKSSGKSHQSESQAKGMKMSAPPKEEDESGEEEEEDDEQGATCGACGDNYGTDEFWICCDMCERWFHGKCVKITPAKAEHIKQYKCPSCSNKRVRV

SEQ ID NO: 36954 - protein, 125 aa, Glycine max
  Clone ID: LIB3170-011-H7_FLI.pep
SNPMSQVGIADTIYPQRPGQIECDFYMKTGECKFGERCKYHHPIDRSAPSLSKQATVKLTPAGLPRREGAVICPYYLKTGTCKFGATCKFDHPPPGEVMEMAKSQGTSANGGEAEGDEIETSAQL

SEQ ID NO: 36955 - protein, 113 aa, Glycine max
  Clone ID: LIB3170-013-E11_FLI.pep
KNLAPKSVEGPSLSLESINHVHCRNGLSPSMLSVGNGVTNHVLQKDLEHATCLFVDETTDTLHATPTSQTPNRGLGDSLNVIAQHLTVSFRSSLSQTLASLSTPRHSCSEKFS

SEQ ID NO: 36956 - protein, 72 aa, Glycine max
  Clone ID: LIB3170-016-C5_FLI.pep
GNQLHTKTRALNLKLLTSRSNLGLPLASDLLGQQILVNVRQNTTVGNGHRSHQLAQLLVVPNRQLNVPRNDP

SEQ ID NO: 36957 - protein, 112 aa, Zea mays
  Clone ID: 700431674_FLI.pep
LLLKMITEILHINSWNASASNFADFLAPPMTMYHFQHVVSQAISSKLILGISFLMLPFFRHCSLSLASSVLCMLVSIASPFLLHGADPCLLLTVEVSPPLVPAPQMLLLEIA

SEQ ID NO: 36958 - protein, 128 aa, Zea mays
  Clone ID: 700433155_FLI.pep
APKHFTCFYRGLHANISHCICIRLPPLLTTVERNAMNAACTYVQTQASPGPPTAHPQQQELTAERVVNLERLDDVGDGAGGGGDGDDQARDAERLEADPLGAAAGHAALLDVHLDGEVDGEGPEGDGA

SEQ ID NO: 36959 - protein, 240 aa, Glycine max
  Clone ID: LIB3170-019-F4_FLI.pep
GFISGSECALHSYQLSNSFGDHRNYLYICLFIISLLVSMSNTSNNVAGVDNTFRRKFDREEYLERARERERQEEEGRAKPKAKGPPVQRKPLKHRDYEVDLESRLGKTQVVTPVAPLSQQAGYYCSVCECVVKDSANYLDHINGKKHQRALGMSMRVERASLQQVQERFEVLKKRKDVGSFTEQDLDERILKQQQEEEERKRLRREKKKEKKEKAVEEPEIDPDVAAMMGFGGFRSSNKK

SEQ ID NO: 36960 - protein, 268 aa, Glycine max
  Clone ID: LIB3170-019-G2_FLI.pep
GSSVLLRPPKNFLAQRNSTVLAIAEAPTPRISNSSPKTLFVGTEFQRETLHNMAKTRPGRKDLDSYTIRGTDKIVRAGDCVLMRPSDTSKPPYVARVEKIEQDSRNNVKVRVRWYYRPEESIGGRRQFHGAKELFLSDHYDVQSAHTIEGKCIVHSFKNYTKLENVGAEDYYCRFEYKAATGAFTPDRVAVYCKCEMPYNPDDLMVQCEGCKDWYHPACVGMTIEEAKKLEHFVCSECSSDDDMKKPHATFSVSPGSDVKVEPKRRKR

SEQ ID NO: 36961 - protein, 150 aa, Glycine max
  Clone ID: LIB3170-020-C12_FLI.pep
HPNLSTLFLSPLASDPACKLDILGHNGNPLSMNRAEVSVLEQPNEVSLSSLLKRGNSAALETQIGLEILRDFSHEPLKWKLPDEKLGALLVLSDFPQRHGSRPEAVGLLHSSGRRSGLPSGLGGELLTWRLATGGLASGLLRTSHIEVRT

SEQ ID NO: 36962 - protein, 163 aa, Glycine max
  Clone ID: LIB3170-022-B9_FLI.pep
DITLFVSLFVIETFSPPSYILNSAMASHDKAQGSSTTKKGISRSNKAGLQFPVGRVARYLKTGKYAERISSAAPVYLASVLEYLAAEVLELAGNAVMDNKKTRIMPRHIQLAVRNDEELNKLLGDVTIANGGVMPNIHSMLLPKKVGTSTSTFMGASVNDNDA

SEQ ID NO: 36963 - protein, 388 aa, Glycine max
  Clone ID: LIB3170-025-C9_FLI.pep
EVARRCRMADAGAEGASSSTVGQIDVFWHEGMLKHDTGNGVFDTGMDPGFLEVLEKHPENSDRVKNLVSILKRGPISPYISWHLGTPAKIPELFSFHTPEYINELVEVDKEGGKQLCGGTFLNPGSWDAALLAAGTTLSAMKHLLNGDGKVSYALVRPPGHHAQPSQADGYCFLNNAGLAVQLALDSGCKKVAVIDIDVHYGNGTAEGFYRSNKVLTISLHMNHGSWGPSHPQSGSVDELGEGEGYGFNLNIPLPNGTGDKGYVHAFNELVVPSIQKFGPDMIVLVLGQDSNAFDPNGRQCLTMEGYREIGRIVHLLAKRHSAGRLLIVQEGGYHVTYSAYCLHATLEGVLNLPMPLLADPIAFYLDDETFSVQVIEAIKNYQKDKVR

SEQ ID NO: 36964 - protein, 328 aa, Glycine max
  Clone ID: LIB3170-025-D12_FLI.pep
GMGDRVETLARLAQWKIDNFGLCSYKKSDPFKVGIWNWYFSIVRNRYLYIHLFPEPSQVLKDNPPFARFILRVSNAGSSRSFHISPVQEKLLRTHDDFVWPVDTTFVGRFIIDVEFLDLKICPPNGGETSPVWPSDGNSQSIAFQSSILRCLSRMLDEAIHADLTIMTADGSTLRAHKAVLSASSPVFQSMFHHNLKEKESSTIHIEDMPLESCTALLSYLYGAIKQEDFWKHRLALLGAANKYDIGSLKDICEESLLEDLSAGNVLEMLNEAWLYQLHKLKKGCLVFLFQFGKIHDIKDEINNFFQHADRELMLEMFQEVLSISNPI

SEQ ID NO: 36965 - protein, 228 aa, Glycine max
  Clone ID: LIB3170-031-E3_FLI.pep
GPWRMLQVNWDEPEVLQNAKRVSPWQVELVSLPFALHTVYSPNKRLRSDQGSGLLSNREGDPFFPMTGFPNSTMEHMTGFPNSTVGHMDKSLLSYDTFPAGMQGARHDLFSPSSFSNFLNDKSYLYMGSGSFGNNPVQSLGTVTTELNMSSSQSDDLSPHSQSSFHSFAREFAGTRNCDTKVASGSILLFGKIIQPAESDLHDGDCMERDGSRGSNKLKTVEACYFSK

SEQ ID NO: 36966 - protein, 224 aa, Glycine max
  Clone ID: LIB3170-032-G11_FLI.pep
RRMGRGKIEIKRIENTTNRQVTFCKRRNGLLKKAYELSVLCDAEVALIVFSSRGRLYEYSNNNIRSTIERYKKACSDHSSASTTTEINAQYYQQESAKLRQQIQMLQNSNRHLMGDALSTLTVKELKQLENRLERGITRIRSKKHEMLLAEIEYFQKREIELENENLCLRTKITDVERIQQVNMVSGPELNAIQALASRSFFNPNMLEGGTVYPHSDKKILHLG

SEQ ID NO: 36967 - protein, 195 aa, Glycine max
  Clone ID: LIB3170-035-E3_FLI.pep
NNQTQTIPHTLPSSFSLSFFTIILQYVATHHSLSSPTFFNSHLELYHLTSDVLKIFIICSLSTLKLDMLDSVLLALFLPCLGMSAVFIVYMCLLWYATNHHSDPALPAKPVSDTGISPSQLDKLPRITGKDLLMGNECAVCLDEIGTEQPVRVVPGCNHAFHLECADTWLSKHPLCPLCRAKLDPSLFSSSQNPC

SEQ ID NO: 36968 - protein, 237 aa, Glycine max
  Clone ID: LIB3170-035-E9_FLI.pep
EAQEGSSQKKMGRGKIEIKRIENTIFMQVTFCKRRNGLLKKAYELSVLCDAEVALVVFSTRGRLYEYANNSVRATIERYKKANAAASNAESVSEANTQFYQQESSKLRRQIRDIQNLNRHILGEALGSLSLKELKNLEGRLEKGLSRVRSRKHETLFADVEFMQKREIELQNHNNYLRAKIAEHERAQQQQSNMMSGTLCESLPSQSYDRNFFPVNLIASDDQQQYSSQDHTALQLV

SEQ ID NO: 36969 - protein, 271 aa, Glycine max
  Clone ID: LIB3170-040-G1_FLI.pep
ERVECDSAQEYAVQSDWKAHSKTCGTREYRCDCGTLFSRRDSFITHRAFCDALAEESARAIANPLLPPQQQQSSSSHMSTLQTQFNPQNLHAFPLKKEMPPWLGPPATVVVDHHLSSSSSIMFSPPHQENPNPSLGPTLAAYQTVPNPHMSATALLQKAAQMGATMSRSGSTPAMTGPHHHAHVSHFGLNLSSREDTTTTTSLKQLLMLTLLKCSAMAYYHHHHWGIKLLLLLLCLLPHHPFFTMLSTLSLLLLPLKEPLLRMHSFRAQRN

SEQ ID NO: 36970 - protein, 394 aa, Glycine max
  Clone ID: LIB3170-041-F10_FLI.pep
LPLSLCLSVSSMAISFSPKHPPYDEMIYTAIGALKERDGSSKRAIGKYIEQVYKDLPPTHPALLTHHLNRLKSSALLVLVKKSYKLPGSHHLPALQPQKTRGRPPKPKPHPVWPAAALTDSPALLSAKRGPGRPKKIGVSPPGPRGRPPGTGRSKLPKRPGRPPKPKSVSAISSGLKRRPGRPPKAQSNVNVIPFAAPVAPGLPTVQPILPTASVPNGSPRPRGRPKKSFTAAGAPALSAVAGAARGRGRGRPRGVFPVVRPGRPQKLAVGRSKNPVRRPVGRPKGSTAAAITAHKAANEDLRKKLEHFQSKVKESLGTLKPYFNHESPVTAIAAIQELEVLSTLDLKAPLRDETQQQPPPLPQTQTQVYEQQYPQPQSQQLPQFFQPHTSAPS

SEQ ID NO: 36971 - protein, 144 aa, Zea mays
  Clone ID: 701163768_FLI.pep
PLQLLSRILFHLLQPSLDVVPRHVSKHLPDLEAHDIFVRQDEFVPSIVKVLVRFLREFDLVLELVEAVVEATEAVDVLLVLPRHLRLRAVALLHLRLSVSRADRRSESRVSSSTDPASGSGIATAARFGRSSSTRTGEKEGEGL

SEQ ID NO: 36972 - protein, 276 aa, Glycine max
  Clone ID: LIB3170-041-G10_FLI.pep
PHFLGLFCSLFLVWELGLVWFFLVVKGNKERTKMGRGRVQLKRIENKINRQVTFSKRRGGLLKKAHEISVLCDAEVALIIFSHKGKLFEYATDSCMEKILERHERYAYAERQLVANDSETQENWTIEYTRLKAKIDLLQRNHRHYMGEDLASMSLKELQSLEQQLVTGIKNIRTRRNDLMSESISELQKKEKRIQEENNTLAKKIKEKEQAVAQQAAQWEQPNYRVDTSFMPQQQPLPTSLNICGNNYCQEAAPELGRNGLDLTLEPLYSCNLGCF

SEQ ID NO: 36973 - protein, 228 aa, Glycine max
  Clone ID: LIB3170-043-C11_FLI.pep
EEMGGVAWTEEEDHLLKKCIQQYGEGKWHRVPLLAGLNRCRKSCRLRWLNYLRPNIKRGNFAEEEVEMIIKLHKLLGNRWSLIAGRLPGRTANDVKNYWNCHLSKKLNVIEAEDRPITRDVQVIRPQPRNIVGSSSVKRRGQNESPTDKGVQQESSMSSLTFDTADGQNHMLDSQQDNNIYACLDQQGIVSELSMDFQFEGFGAMMNGEGSSSQWDWGDLLLDMDLYK

SEQ ID NO: 36974 - protein, 222 aa, Glycine max
  Clone ID: LIB3170-045-C12_FLI.pep
VADELVAEFADPINGVSTPDQQQYDEKNIRRRVYDALNVLMAMDIISKDKKEIQWKGLPRTSLSDIEELKSERLGLRNRIEKKAAYLQELEEQYIGLQKLIQRNEQLYSSGNAPNGGVSLPFILVQTRPHATVEVEISEDMQLVHFDFNSTPFELHDDNYVLKAMKFCERSQNDNTTDNSTDGGEGSSIYAQVPTSVSNPPNRPPSSPPLPGILKARVKNEH

SEQ ID NO: 36975 - protein, 311 aa, Glycine max
  Clone ID: LIB3170-045-G3_FLI.pep
DNVSDFIRVGGIQRLQDGEFIVQATKDCVAKTLKRLEEKIHGRVLNHLLYLMRVSEKAFQRRVALTLAHLCSADDQRKIFIDYNGLELLMGLLGSYNPKQQLDGAVALCKLANKAMTLSPVDAAPPSPTPQVYLGEQYVNNVTLSDVTFLVEGKRFYAHRICLLASSDAFRAMFDGGYREKEARDIEIPNIRWEVFEPMMRFIYTGSVDITLDIAQDLLRAADQYLLEGLKRLCEYTIAQDISLENVSSMYELSEAFNAISLRHTCILFILEHYDKLSGKPGHSHLIQRIIPEIQNYFVKALTKANSNILP

SEQ ID NO: 36976 - protein, 299 aa, Glycine max
  Clone ID: LIB3170-048-D4_FLI.pep
IELKLKLLSWLLLLQLQGMPLILAKSDSIQIREVWNDNLEEEFALIREIVDNYPYIAMDTEFPGIVLRPVGNFKNSYDYHYQTLKDNVDMLKLIQLGLTFSDEHGNLPMCGGDDEESDTCCCIWQFNFREFNVNEDVFANDSIELLRQSGIDFKRNNENGIDAHRFGELLMSSGIVLNDNIHWVTFHSGYDFGYLLKLLTCQDLPDTQVGFFNLINMYFPTVYDIKHLMKFCNSLHGGLNKLAELLEVERVGISHQAGSDSLLTSCTFRKLKDNFFSGSLEKYAGVLYGLGVENGQGSH

SEQ ID NO: 36977 - protein, 347 aa, Glycine max
  Clone ID: LIB3170-050-G9_FLI.pep
KQKIMFKLQVDESIYLNISKSNKKMIPLRVFSAHSAAAFAVRNPFFNSANLFMQAALDLPGTAAATFSHLMETSLGNAFKAFSNAISSAELQPLSTTFSPSSAFSSTTLLSNAFLFFKNNAYDSESSTLFSPNSFAFFITLSTPCLPPNAAAIASHLPGFPTGFFTICFFSTSTSSSLHPFSSSTTVARFSIPEDSFLFSAALTETTGPTAAEASSALRCLDRRCEDFLLASSSGSGSGSGKLTTSPRPTRTSPPVMEGGAKGPTRRESASQKRSDLKGSASRKKRERVRKSEERETVAKRNGLVGLWIGCGGSLLLAAAPDWNTNLGLASSSRNSILSQTLETETP

SEQ ID NO: 36978 - protein, 153 aa, Zea mays
  Clone ID: 701164106_FLI.pep
HCSGRVQGEGGRGHGGLLLAHRSRGHRAGHRHRFRLQQARRHRPGRGGRLQRGRRRDPGVHVPGRSPRRGLQQPEAADERQAPAGGVRRPVPRRGAHVVARQMGVEQNRFATRQFFFSAESPSARISVRRGSEERRPGCDVCKSTPNSAPWFP

SEQ ID NO: 36979 - protein, 375 aa, Glycine max
  Clone ID: LIB3170-051-C4_FLI.pep
NSICSLDRVRRRRIGMTRRCSHCTNNGHNSRTCPSRGGGGVKLFGVRLTDGSIIKKSASMGNLNLSSSSSSAAAAHLQFRSSPSSSNLPAASSPNPSSPCSDPPQGYLSDDPAHVSTFANRRGDRKKGVPWTEEEHRLFLIGLQKLGKGDWRGIARNFVVSRTPTQVASHAQKYFIRQSHATRRKRRSSLFDMVPDMSSDQPSVPEEQVLLPPPENSQPCNGKSQPSLNLSLKSEFEPMETTSQENVQQTNEPMMGSNRLTPMAPHGCFPAYLPVPFPVWPSTWVHPFEEVKGGETCHHQIHKPIPVIPKEPVNVDELVGMSHLSIGEAQVRDREPSPLSIKLLGEPSRQSAFHANVPVGSSDLNNGKDNAIQAV

SEQ ID NO: 36980 - protein, 409 aa, Glycine max
  Clone ID: LIB3170-051-F9_FLI.pep
NKLTVTDSETTKPTTAMTEEDRSAQETVHNGVASTELGGEEMDIAEVTAAGRVKGPWSPEEDALLSRLVAQFGARNWSMIARGVPGRSGKSCRLRWCNQLDPCVKRKPFTEEEDSIIVSAHAIHGNKWAAIARLLPGRTDNAIKNHWNSTLKRRCMEMGRYVPAHADVMEDGTGSFDKTKASSEETMSIGDINSKNPAEVRNVMMDNENKPPTKDDAKVEEHPTLHRPVARVSAFSVYNTPGRSTMGSCSKMFPRQSPLIQSPKPDVGSCKLFDDIDCEPMVPSQCGHGCCTGDSRESHSHGSLLGPEFVDYLESPSSSHAFISIATDLNNIAWIKSGLENCSTGVTENTANLTASRGVASALQTNFLGQDLKNGYGQFEEGHGMFLGAMQEVLSTKMARQHYAMPAEV

SEQ ID NO: 36981 - protein, 257 aa, Glycine max
  Clone ID: LIB3170-051-G3_FLI.pep
IIHLQDLLGNRWAAIASYLPQRTDNDIKNYWNTHLRKKLKKMQVGCEGGSFGEGFSASRQIPRGQWERRLQTDIQMAKRALSEALSPEKPSCNLSASNSNPSDSSSSFSSTKPTTTQTVCYASSADNIARMLKGWMKNPPKSSRTNSSSVTQNSFNNFAAAGADTASSIGAKGPPSSAELSENNFESLFDFDQSLESSNSDEFSRSLSPEATVLQDESKPDVIGAEIMPFSLLEKWLLDEAGCQEKLVGCGDDAKFF

SEQ ID NO: 36982 - protein, 245 aa, Glycine max
  Clone ID: LIB3170-053-F12_FLI.pep
LFETTKEVNKRMSNSRNTHWCYSCRRPVWLGRRDAVCPSCNEGFVHELNDMVHVNPFDLFEMDNNEERDQRLGLMETFSAFMRHQMADRGRSHDIRAQTDSNPEHSAGFAPLLIFGGQIPFRLSGHGGFEALFNGAPGIGLTRGNTGDYFIGPGLEDCLNSFQLITGKVPRQHQDHQSMQCLPLRSRRGIFDQIHIVQCAKINLKWGLKQDKCHATIYITRIVLFHGWSSITPAPFVVRNCCHKD

SEQ ID NO: 36983 - protein, 109 aa, Glycine max
  Clone ID: LIB3170-055-F10_FLI.pep
FYKGREKRGPFSCIVQVSESAKKWEGLLVVPKWGCTKVHGLLKKMHCLPSISKLMEKANGNHYPKKQVIKVLDAQLSQFISQFDVSCSGFDHKLLCVTFIIIILILIYD

SEQ ID NO: 36984 - protein, 175 aa, Zea mays
  Clone ID: 701165114_FLI.pep
LGLSGPHRSVPPVPVVVAVAAAAVCTTVSPTAAVASTTTAVASTATAVAASITAPATVSATAASTAAAGLGLVNGDVAAVELLAVHALDGAAHRVLRGEGDEAEAAGPLRLPIQDDLRLEDLAVGAEGVVEGVVVGGPGEAANEATVLNVRRRHLFPLAHEPEPEHEPVGEEKPT

SEQ ID NO: 36985 - protein, 106 aa, Glycine max
  Clone ID: LIB3170-057-E2_FLI.pep
LYANEPANAENPVSMPVGTAEPERTRDAGSGGNTNHARPASNIVNIVKPVGYSASVASGMQDVLVTFVASKSDGTEVMVDNKYLKAFNPLLLINFYEQHLRYSPTL

SEQ ID NO: 36986 - protein, 253 aa, Glycine max
  Clone ID: LIB3170-059-C12_FLI.pep
GSMAVPGRRNGINDDEEELDDNALFEEQGVVEDDTDTPPHLRDLSAAAQIGDAHALRLALDNLTGSIDEPVEDGDTALHLTCLYGHLACVQLLIERGANIEAKDEEGAIPLHDACAGGFTEIVQLLLNRANDAEHIKRMLESVDSEGDTPLHHAARGEHIDVIRLLLSNGASPTKANLYGKALRICLNRKMLGGCLKLQLLPWHASSISVEIFSSILTEMLHFLDHKICISYTTLFSKFKNQNDLLEEHHRKF

SEQ ID NO: 36987 - protein, 57 aa, Zea mays
  Clone ID: 701165560_FLI.pep
KHYLETINYICITSCTVTTQIGQPWPIPKNELPGSPYDVSNELNKELKFVPDKDRSC

SEQ ID NO: 36988 - protein, 197 aa, Glycine max
  Clone ID: LIB3170-062-D8_FLI.pep
AIASRNWETIQIEDLKIERNELLAVNCLVRFKNLLDESIEVNSPRNAVLNLIRKMKPDIFVHSVVNGSYNAPFFLTRFREALFHYSSIYDMFDTLISRENEWRLMLEREFLGREIMNVVACEALERVERPETYKQWQARNTRAGFKQLPLDKEIMTKFRGKLREWYHRDFVFDEDGNWMLQGWKGRILYASTCWVPA

SEQ ID NO: 36989 - protein, 197 aa, Glycine max
  Clone ID: LIB3170-067-B1_FLI.pep
LCADKYVKLIERCHMMIDGLTQCLYVAVVSSCEKKKKKSVSAEKKSGGRARKNVYRGIRQRPWGKWAAEIRDPHKGVRVWLGTFPTAEEAARAYDDAAKRIRGDKAKLNFPATAPPPSKKQRCLSPDTTTEQSSSSQSTTGSTGSPPSAAFHGGGDELDLKQLERFLGLDNMGAEWDNMDDLWMLDDVVVPNRHLIY

SEQ ID NO: 36990 - protein, 77 aa, Glycine max
  Clone ID: LIB3170-067-C6_FLI.pep
QLHRRIVQNANVNYTKLNGNLSLYVKKQIIKHIHPPIKIISNCPRNKLYILSADRTRIILDKPFVHTYQVKCMVTAR

SEQ ID NO: 36991 - protein, 207 aa, Glycine max; identical to SEQ ID NO: 36861
  Clone ID: LIB3170-067-E8_FLI.pep

SEQ ID NO: 36992 - protein, 66 aa, Zea mays
  Clone ID: 701168856_FLI.pep
PFLFFALGCARAGSPAAPHGIPGEPTETPHLKNVVLTTWHVPRRKERGLPDTTQVKGRTRLQARLA

SEQ ID NO: 36993 - protein, 109 aa, Glycine max
  Clone ID: LIB3170-074-E8_FLI.pep
VGVCNKTFARVFQGESLRRMHCNSLLISQDWASDPNFMWLHVFNLSCVLFMIHSRFAIPSHGVFKRDCIIGLIWNERKKNAGEISKNESIDFIGNLYSFRWIWHPGRTT

SEQ ID NO: 36994 - protein, 378 aa, Glycine max
  Clone ID: LIB3170-074-F12_FLI.pep
QRERWTDEEHKKFLEALKLYGRAWRRIEEHVGTKTAVQIRSHAQKFFSKILRESSGNSTTLEESIEIPPPRPKRKPIHPYPRKLVEFPKTGISNSEHPLRSNSLKSSDFGQENNSPKSVLSTVVSETVGSSDSDTSSRCLSPASSISGVPTNRFPLAEPKTSFKEEGSAPSSAHDEQPPVKLEFFHKESVSTRDDATEESSGRTLKLFGTTLLVTDTCKPSSPTTEPCKPTPAAAMYLMQLQNVCSDVTEGHASIVPWWTLPHNTPFMPLHKEPKGKHLYSNLGEFEHKEVQKEGSWTGSNTSSIDDGDNTEKSDDQAKSHVHGFSKSETLTISELRVRPKTCGKGFVPYKRCMAERENQCSSVYYEEREEQRIKLSL

SEQ ID NO: 36995 - protein, 410 aa, Glycine max
  Clone ID: LIB3170-081-C11_FLI.pep
PIIFVSLSILPNGASIGNPNFHLRPSMELRSRRRLSNPSVSGKEQPPGDDAVGEDETTTGKGSNNKDKGVAVISSNSDIVSGPDSDSDYEDEEFGVGSLPDLNQDPSSISFSSGEDYASDSSDGGKSLYKRGKALLSRGKRKSFNTEYGEPSDVVRVAEYKDDDAQFAIFQELSVPSVSKGTKRRKYSRKGRKGDSKSVLLWNAWEEEQEKWIDRHMLEDVDLDNHSEVMNETADIPSDLTMPLLRYQKEWLAWALKQESSASKGGILADEMGMGKTVQAIALVLAKREFELGCEPDQSIPCSSSLKPAIKGTLVICPVVAVTQWVSEVDRFTLKGSTKVLIYHGANRGRSGNRFADYDFVITTYSVVESEYRKHMLPPKERCPYCGKLFLPNKLMYHQIYFCGPDAVRT

SEQ ID NO: 36996 - protein, 361 aa, Glycine max
  Clone ID: LIB3170-086-G7_FLI.pep
KRTSAVNKRALREDGGGGGGGGAMRYRGVRRRPWGRYAAEIRDPQSKERRWLGTFDTAEEAACAYDCAARAMRGLKARTNFVYPTSPQPSSATTEHLFPNFNNNNNFHKHSLFNHHRNRHITGSNTCFDHPHSVDFSAPRNPSSLNMLLFRDLIHSNPSLLSSSSTQNFHDQFYNKSTSTFSSLPVSPSLAPPSYSMNNSCGGSLSVKMNTFPTCGTNFAEKGDDGDGFFSRESSDSGLLEEIVNKFLPRTKPSKCETTFANPQEESLLLPPLVSESTLVSTGQQYYDDDMKKGFPKNEGLGVFYSDQGFPMQQFDTSNGFNSMAMENDQNIINNAENCVVEDVFQYQELLNAFAIRMQNA

SEQ ID NO: 36997 - protein, 244 aa, Glycine max
  Clone ID: LIB3170-087-A3_FLI.pep
TRKMDQRKLRDSSNSKPASDAAPQHVTLTSNRFRNSQAAVREREKEKGEGENEDPSAARKVLKADREKLRRDRLNEHFQELGNALDPDRPKNDKATILTETVQMLKDLTAEVNRLKTEHKTLSEESRELMQEKNELREEKTSLKSDIENLNVQYQQRVRIMFPWSAIDPSAVISQPYSYPVPIHIPSAPISIHPSLQPFPFFGNQNPGHIPNPCSMYVPYTTPTSHPPVEPPSMMYASTSHASN

SEQ ID NO: 36998 - protein, 288 aa, Arabidopsis thaliana columbia
  Clone ID: LIB3175-004-E9_FLI.pep
FSCCSLGSQREEGRGSLIPLRFLQLGFSQLESKMVTDKSKKAKTEEENVEQIDAELVLSIEKLQEIQDDLEKINEKASDEVLEVEQKYNVIRKPVYDKRNEIIKTIPDFWLTAFLSHPALGELLTEEDQKIFKYLSSLDVEDAKDVKSGYSITFSFNPNPFFEDGKLTKTFTFLEEGTTKITATPIKWKEGKGLANGVNHEKNGNKRALPEESFFTWFSDAQHKEDVEDEMQDEVADIIKEDLWPNPLTYFNNDADEEDFDGDDDGDEEEKEGDSDEDDDEEDEVGEE

SEQ ID NO: 36999 - protein, 517 aa, Arabidopsis thaliana columbia
  Clone ID: LIB3175-020-B8_FLI.pep
IEREMGNSFGCSASGERLVSAARDGDFVEAKMLLDCNPCLAKYSTFGGLNSPLHFAAAKGHNEIVGLLLENGADVNSRNYCGQTALMQACRYGHWEVVQTLLLFRCNVTRADYLAGRTALHFAAVNGHARCIRLVLADFLPSDKLNSLPETGVVTAKNKSEQSALSKFVNKAADGGITALHMAALNGLFDCVQLLLDLEANVSAVTFHYGTSMDMIGAGSTPLHYAACGGNLKCCQILLARGARKMTLNCNGWLPIDIARMWSRHWLEPLLSPNSDVVIPAFPHSNYLSLPLLSILNIAREFGLQSATIGDEVDICAVCLERTCTVAAEGCEHQLCVRCALYLCSSSNVPSVTVGPPGSIPCPLCRHGITAFKRLPSSLTREMKLPMSLGFCAPCMLHTGDTTDQSSPTCPPTEQRSSKTRAASVSSDIFCPVTCSPFPSVNIPMCTCNEGTCPNFETHGTERHSEEHVESSPSRTTTEQEKIEEGQRLGKTTTCSSMFWGRRSCSRENQCNSEINA

SEQ ID NO: 37000 - protein, 265 aa, Arabidopsis thaliana columbia
  Clone ID: LIB3175-020-G2_FLI.pep
QTLRQTEPPKIHGGLHVSVIPPADDVKTDISQSSRITGDNTHKDYNSPTAKRRKKGGNIELSPVERSTNDSRIVVHTQTLFDIVNDGYRWRKYGQKSVKGSPYPRSYYRCSSPGCPVKKHVERSSHDTKLLITTYEGKHDHDMPPGRVVTHNNMLDSEVDDKEGDANKTPQSSTLQSITKDQHVEDHLRKKTKTNGFEKSLDQGPVLDEKLKEEIKERSDANKDHAANHAKPEAKSDDKTTVCQEKAVGTLESEEQKPKTEPAQS

SEQ ID NO: 37001 - protein, 68 aa, Zea mays
  Clone ID: 701174361_FLI.pep
LSSQWYIHDDTYKLRHLYLLQGTTTAETVHNNGRKEMTTHATHSAKGNNFTTWLECLIVLLTTDTNFS

SEQ ID NO: 37002 - protein, 80 aa, Arabidopsis thaliana columbia
  Clone ID: LIB3175-027-F7_FLI.pep
TKSTNYKMRNKQLGNSNNSHHSKLFGDLKDLNANEPLVRNSPKFEIDRRDEDTRVDICCSPKPGLLLSTVNTLGDSRLGD

SEQ ID NO: 37003 - protein, 145 aa, Arabidopsis thaliana columbia
  Clone ID: LIB3175-033-E1_FLI.pep
KSKMATKSTGGTEKTKSIEVKKKLINVLIVDDDPLNRRLHEMIIKTIGGISQTAKNGEEAVILHRDGEASFDLILMDKEMPERDGVSTTKKLREMKVTSMIVGVTSVADQEEERKAFMEAGLNHCLEKPLTKAKIFPLISHLFDA

SEQ ID NO: 37004 - protein, 297 aa, Arabidopsis thaliana columbia
  Clone ID: LIB3175-033-G6_FLI.pep
EAGAPQDQEAFIKEVEAFNKENFLEFKAPKFYGQPLNCLKLWRAVIKLGGYDVVTTSKLWRQVGESFHPPKTCTTVSWTFRIFYEKALLEYEKHLRQNGELNLPGSASLPSSGIEKEASSHQASGSGRTRRDAAARAMQGWHSQRLLGSGEVTEPIVKEKGLNSTPKQKNLKNIGVQKQKTTTGMDLVFSHESEKQSTAEVIDVGPPADWVKINVRETKDCFEIFALVPGLLREEVRVQSDPAGRLVIAGQPEQLDNPWGITPFKKVVNFPARIDPLHTSAVVSLHGRLFVRVPFEQ

SEQ ID NO: 37005 - protein, 279 aa, Zea mays
  Clone ID: 701182780_FLI.pep
IGRDGSKLFHTGIALEKSAGLVFNSFLLTRIRYMTLYISYDDGLPCWVRKKRMRRKSTGPDSIAETIKWWKEQNQKLQDESGSRKAPAKGSKKGCMMGKGGPENVNCVYRGVRQRTWGKWVAEIREPNRGRRLWLGSFPTAVEAAHAYDEAAKAMYGPKARVNFSESSADANSGCTSALSLLASSVPAAALQRSDEKVETEVESVETEEVVHEVKTEAKNGDLGSVKVTCVIQSAEETVLHKEGDVSYDYFNVEDVVEMIIVELNADKKFEAHEEYLDG

SEQ ID NO: 37006 - protein, 131 aa, Zea mays
  Clone ID: 701185551_FLI.pep
AHVLHHLLTFVCIRSSWYVSHYPVEVLPHGRVAGARRIWVRHDQRVEVVAAAGDADERRRGGGGRLEEAAVADVFGAIGDGHGDGGHEQVHHLADHPPHHQRVHEPRHDRSINATLGRAQVASSLCTYMCM

SEQ ID NO: 37007 - protein, 287 aa, Arabidopsis thaliana columbia
  Clone ID: LIB3175-035-E9_FLI.pep
LIKPHTFLVSLFLHRTLFFFFFFLSVFSLSLFGTTMDNVKLVKNGVLRLPPGFRFHPTDEELVVQYLKRKVCSSPLPASIIPEFDVCRADPWDLPGNLEKERYFFSTREAKYPNGNRSNRATGSGYWKATGIDKRVVTSRGNQIVGLKKTLVFYKGKPPHGSRTDWIMHEYRLSSSPPSSMGPTQNWVLCRIFLKKRAGNKNDDDDGDSRNLRHNNNNNSSDQIEIITTDQTDDKTKPIFFDFMRKERTTDLNLLPSSPSSDHASSGVTTEIFSSSDEETSSCNSFR

SEQ ID NO: 37008 - protein, 107 aa, Zea mays
  Clone ID: LIB143-002-F10_FLI.pep
GTINSNTKEGDNEKGGTEEDDEPVVVVAKMWENSKFADYDSSKEKDNDGDSQVDLESNKGDAGLDSNGLHSTKENSGRASPTKQHQQYKKKPLLKRFGGLLKKKSEN

SEQ ID NO: 37009 - protein, 168 aa, Zea mays
  Clone ID: LIB143-012-H4_FLI.pep
GVGERQRLAARADAAADGEQRRGPGRRRRAVVGVGVVDDPALREAEPRLAAHGEERLPAGVHEHDAGAAPAPGGAGVAVDAEGQVAAGVVDSEAVAVEEQRLAPHRQHSGRLSISLRRGPAYCCCCGNDGPRGVGVDLGHYSSFLFPALLDPLLRPSLLWRLAAEVPR

SEQ ID NO: 37010 - protein, 225 aa, Arabidopsis thaliana columbia
  Clone ID: LIB3175-040-D5_FLI.pep
KSKRTPNFFLPSSFSPPIIITMSSHTNLPSPKPVPKPDHRISGTSQTKKPPSSSVAQDQQNLKCPRCNSPNTKFCYYNNYSLSQPRHFCKSCRRYWTRGGALRNVPIGGGCRKTKKSIKPNSSMNTLPSSSSSQRFFSSIMEDSSKFFPPPTTMDFQLAGLSLNKMNDLQLLNNQEVLDLRPMMSSGRENTPVDVGSGLSLMGFGDLTTTIHRRGSQPPEQATET

SEQ ID NO: 37011 - protein, 148 aa, Zea mays
  Clone ID: LIB143-013-D6_FLI.pep
AAAVEAAAAAGTVVAVEAAATAVAGAVMAAAATAVAAATVVAAAATVVVAAATAATAATATPTGTGGTERWGPRGQVILFATVLFTLVQSVYLRSSRVCCCPSVFLIEGRSVSVVSAVFILGSSRPMHQPAWTADRWVLLPPSGFILS

SEQ ID NO: 37012 - protein, 329 aa, Arabidopsis thaliana columbia
  Clone ID: LIB3175-057-E3_FLI.pep
YTKINHSLCLTRRSFGHCAISGVEFVVLHRTMNSHDIDDQLEADVYSNLPSRNDSSTGRRNRNSCRSKHSETEQRRRSKINERFQSLMDIIPQNQNDQKRDKASFLLEVIEYIHFLQEKVHMYEDSHQMWYQSPTKLIPWRNSHGSVAEENDHPQIVKSFSSNDKVAASSGFLLDTYNSVNPDIDSAVSTKIPEHSPVSAVSSYLRTEPSLQFVQHDFWQPKTSCGTINCFTNELLTSDEKTSASLSTVCSQRVLNTLTEALKSSGVNMSETMISVQLSLRKREDREYSVAAFASEDNGNSIADEEGDSPTETRSFCNDIDHSQKRIRR

SEQ ID NO: 37013 - protein, 203 aa, Zea mays
  Clone ID: LIB143-013-E1_FLI.pep
LCPLFSISTWSLSRMAAAASASTPQGVAERRGIPAAAFVEDVEAYLRQAGLDVNSALAFLQERLQQYKIVEMKLLAQQRDLQAKIPDIEKCLDIVSTLQAKKDLGEALIADFELSEGIYSCAKIEDTDSVCLWLGANVMLEYSCDEANALLKKNLENAKASLEVLVADLQFLRDQQTITQVTIARVFNWDVHHRRSKQAVKEP

SEQ ID NO: 37014 - protein, 144 aa, Arabidopsis thaliana columbia
  Clone ID: LIB3175-061-D9_FLI.pep
FTGPTGGESRLVYAEVPQEIHDQLVNSSLGKQGSKGQLALPQERSSVRGFRTGSLGTEKNYFYFERFDQDGRLDRRPFSITPPYHTRSIQSPDEIINASGNYQDRAGAPKGLLLAIRSPFDRLFTGKKNAGERSYLQSGDASPV

SEQ ID NO: 37015 - protein, 162 aa, Arabidopsis thaliana columbia
  Clone ID: LIB3175-078-C11_FLI.pep
DSSAMSSEEAKVVVPRNFRLLEELERGEKGIGDGTVSYGMDDADDIYMQSWTGTILGPPNTAYEGKIFQLKLFCGKEYPESPPTVRFQTRINMACVNPETGVVEPSLFPMLTNWRREYTMEDILVKLKKEMMTSHNRKLAQPPEGNEEARADPKGPAKCCVM

SEQ ID NO: 37016 - protein, 154 aa, Arabidopsis thaliana columbia
  Clone ID: LIB3175-082-B12_FLI.pep
FSPNQIQKSKFTILRTPKMARTKQTARKSTGGKAPRKQLATKAARKSAPATGGVKKPHRFRPGTVALREIRKYQKSTELLIRKLPFQRLVREIAQDFKTDLRFQSSAVAALQEAAEAYLVGLFEDTNLCAIHAKRVTIMPKDIQLARRIRGERA

SEQ ID NO: 37017 - protein, 188 aa, Arabidopsis thaliana columbia
  Clone ID: LIB3176-007-D7_FLI.pep
QNSLSLSLSVSCLIIYLSNGEAMGFPVGYSELLLPKIFFYLLSFLGLIRKLISTMFKIIGLPDFLEPEPVSTSWPDPPPTLTKPDSAAILAGEMLPVVRFSDINRPESECCAVCLYDFENDDEIRRLTNCRHIFHRGCLDRWMMGYNQMTCPLCRTQFIPDHLQLEFNQRLWSQSSAVSSQLLDESSS

SEQ ID NO: 37018 - protein, 39 aa, Zea mays
  Clone ID: LIB143-013-F4_FLI.pep
LLSLTIGRVYRYGEDAIEANRKRSSSTNIIPISINCCLA

SEQ ID NO: 37019 - protein, 269 aa, Arabidopsis thaliana columbia
  Clone ID: LIB3176-008-F5_FLI.pep
MELWTEARALKASLRGESTISLKHHQVIVSEDLSRTSSLPEDFSVECFLDFSEGQKEEEEEVVSVSSSQEQEEQEHDCVFSSQPCIFDQLPSLPDEDVEELEWVSRVVDDCSSPEVSLLLTQTHKTKPSFSRIPVKPRTKRSRNSLTGSRVWPLVSTNHQHAATEQLRKKKQETVLVFQRRCSHCGTNNTPQWRTGPVGPKTLCNACGVRFKSGRLCPEYRPADSPTFSNEIHSNLHRKVLELRKSKELGEETGEASTKSDPVKFGSKW

SEQ ID NO: 37020 - protein, 92 aa, Arabidopsis thaliana columbia
  Clone ID: LIB3176-019-H12_FLI.pep
TDLRDLLPNSTVVEAGSSDSCDSSAVLNDETSSDNGRLTPPVTVTGGSFLQFVKTEQTEDHEDFLSGEEACGFFSDEQPPSLHWYSASDHWT

SEQ ID NO: 37021 - protein, 238 aa, Arabidopsis thaliana columbia
  Clone ID: LIB3176-021-F5_FLI.pep
KFRRFLRCLRILEKEGNNNNQKKTKKKKDKTKKMSFTGTLDKCNVCDKTVYVVDMLSIEGMPYHKSCFRCTHCKGTLQMSNYSSMDGVLYCKTHFEQLFKESGNFSKNFQPGKTEKPELTRTPSKISSIFCGTQDKCAACEKTVYPLEKIQMEGECFHKTCFRCAHGGCTLTHSSYASLDSVLYCRHHFNQLFMEKGNYAHVLQAANHRRTASGNTLPPEPTEDVAVEAKEENGVSES

SEQ ID NO: 37022 - protein, 136 aa, Zea mays
  Clone ID: LIB143-016-D7_FLI.pep
TTATSSSGRSPSSDRLTPYDGGYFNAIMTFPQNYPNSPPSVRFTSEMWHPNVYPDGRVCISILHPPGEDPNGYELASERWTPVHTVESIVLSIISMLSSPNDESPANIEAAKDWREKRDEFKKKVRQCVRKSQEML

SEQ ID NO: 37023 - protein, 387 aa, Arabidopsis thaliana columbia
  Clone ID: LIB3176-027-C11_FLI.pep
LMDSRDIPPSHNQLQPPPGMLMSHYRNPNAAASPLMVPTSTSQPIQHPRLPFGNQQQSQTFHQQQQQQMDQKTLESLGFGDGSPSSQPMRFGIDDQNQQLQVKKKRGRPRKYTPDGSIALGLAPTSPLLSAASNSYGEGGVGDSGGNGNSVDPPVKRNRGRPPGSSKKQLDALGGTSGVGFTPHVIEVNTGEDIASKVMAFSDQGSRTICILSASGAVSRVMLRQASHSSGIVTYEGRFEIITLSGSVLNYEVNGSTNRSGNLSVALAGPDGGIVGGSVVGNLVAATQVQVIVGSFVAEAKKPKQSSVNIARGQNPEPASAPANMLNFGSVSQGPSSESSEENESGSPAMHRDNNNGIYGAQQQQQQQPLHPHQMQMYQHLWSNHGQ

SEQ ID NO: 37024 - protein, 140 aa, Arabidopsis thaliana columbia
  Clone ID: LIB3176-027-F11_FLI.pep
RTPKMARTKQTARKSTGGKAPRKQLATKAARKSAPATGGVKKPHRFRPGTVALREIRKYQKSTELLIRKLPFQRLVREIAQDFKTDLRFQSSAVAALQEAAEAYLVGLFEDTNLCAIHAKRVTIMPKDIQLARRIRGERA

SEQ ID NO: 37025 - protein, 311 aa, Arabidopsis thaliana columbia
  Clone ID: LIB3176-030-B12_FLI.pep
NDLQRRVLLARQTQVEGLHHKQHEDVPQAGSSQALENRRPKDMNHETPATTLKRRSPDDVDGRDMHRGSPKTPRIDQNKSTNHEEQQNPHDQLPYRKARVSVRARSDATTVNDGCQWRKYGQKMAKGNPCPRAYYRCTMAVGCPVRKQVQRCAEDTTILTTTYEGNHNHPLPPSATAMAATTSAAAAMLLSGSSSSNLHQTLSSPSATSSSSFYHNFPYTSTIATLSASAPFPTITLDLTNPPRPLQPPPQFLSQYGPAAFLPNANQIRSMNNNNQQLLIPNLFGPQAPPREMVDSVRAAIAMDPNFTAAL

SEQ ID NO: 37026 - protein, 274 aa, Zea mays
  Clone ID: LIB143-016-H4_FLI.pep
DKEGIPPDQQRLIFAGKQLEDGRTLADYNIQKESTLHLVLRLRGGMQIFVKTLTGKTITLEVESSDTIDNVKAKIQDKEGIPPDQQRLIFAGKQLEDGRTLADYNIQKESTLHLVLRLRGGMQIFVKTLTGKTITLEVESSDTIDNVKAKIQDKEGIPPDQQRLIFAGKQLEDGRTLADYNIQKESTLHLVLRLRGGMQIFVKTLTGKTITLEVESSDTIDNVKAKIQDKEGIPPDQQRLIFAGKQLEDGRTLADYNIQKESTLHLVLRLRGGQ

SEQ ID NO: 37027 - protein, 225 aa, Arabidopsis thaliana columbia
  Clone ID: LIB3176-036-E4_FLI.pep
KEGNNNNQKKTKKKKDKTKKMSFTGTLDKCNVCDKTVYVVDMLSIEGMPYHKSCFRCTHCKGTLQMSNYSSMDGVLYCKTHFEQLFKESGNFSKNFQPGKTEKPELTRTPSKISSIFCGTQDKCAACEKTVYPLEKIQMEGECFHKTCFRCAHGGCTLTHSSYASLDSVLYCRHHFNQLFMEKGNYAHVLQAANHRRTASGNTLPPEPTEDVAVEAKEENGVSES

SEQ ID NO: 37028 - protein, 290 aa, Arabidopsis thaliana columbia
  Clone ID: LIB3176-036-H7_FLI.pep
YIFFRSIQRDQFLREKKMSIEEENVPTTVDSGAADTTVKSPEKKPAAKGGKSKKTTTAKATKKPVKAAAPTKKKTTSSHPTYEEMIKDAIVTLKERTGSSQYAIQKFIEEKHKSLPPTFRKLLLVNLKRLVASEKLVKVKASFKIPSARSAATPKPAAPVKKKATVVAKPKGKVAAAVAPAKAKAAAKGTKKPAAKVVAKAKVTAKPKAKVTAAKPKSKSVAAVSKTKAVAAKPKAKERPAKASRTSTRTSPGKKVAAPAKKVAVTKKAPAKSVKVKSPAKRASTRKAKK

SEQ ID NO: 37029 - protein, 137 aa, Zea mays
  Clone ID: LIB143-031-B4_FLI.pep
RRPRERRRLPTASGASAFVVLSAGNEYRRARMATFELYRRSTIGMCLTETLDEMVSNGTLSPELAIQVLVQFDKSMTDALENQVKSKVTVKGHLHTYRFCDNVWTFILTDASFKNEEATEQVGKVKIVACDSKLLGQ

SEQ ID NO: 37030 - protein, 304 aa, Arabidopsis thaliana columbia
  Clone ID: LIB3176-037-A1_FLI.pep
NKIKKKSREMVRTPCCKEEGIKKGAWTPEEDQKLIAYLHLHGEGGWRTLPEKAGLKRCGKSCRLRWANYLRPDIKRGEFSPEEDDTIIKLHALKGNKWAAIATSLAGRTDNEIKNYWNTNLKKRLKQKGIDAITHKPINSTGQTGFEPKVNKPVYSSGSARLLNRVASKYAVELNRDLLTGIISGNSTVAEDSQNSGDVDSPTSTLLNKMAATSVLINTTTTYSGFSDNCSFTDEFNEFFNNEEISDIYTTVDNFGFMEELKSILSYGDASAGVIENSPEVNVADAMEFIDSWNEDDNMVGVFV

SEQ ID NO: 37031 - protein, 115 aa, Arabidopsis thaliana columbia
  Clone ID: LIB3176-067-A10_FLI.pep
DLTPKSALDASLSPVPYMFGRVRKTGAVLEKVIERRQKRMIKNRESAARSRARKQAYTMELEAEIAQLKELNEELQKKQVEIMEKQKNQLLEPLRQPWGMGCKRQCLRRTLTGPW

SEQ ID NO: 37032 - protein, 308 aa, Zea mays
  Clone ID: LIB143-031-D12_FLI.pep
IMAEHLASIFGTEKDRVNCPFYFKIGACRHGDRCSRLHNRPTISPTLVLANMYQRPDMITPGVDAQGQPIDPEKMQEHFEDFYEDIYEELGKFGEIENLNVCDNLADHMIGNVYVQFREEEQAAAAYNALQGRFYSGRPIIVEYSPVTDFREATCRQFEENSCNRGGYCNFMHVKQIGRDLRRKLYGRSASRRYHGRSRSRSPPPQRRGHRDRDDYHHRDRDDYRGGGGGGRGRGSRYDRYDDGAGRGGRHARYDDGAGRGGRHDRYDDGGRRRHGSPSRRARSPVRESSEERRAKIEQWNREREGKQ

SEQ ID NO: 37033 - protein, 121 aa, Arabidopsis thaliana columbia
  Clone ID: LIB3176-071-F4_FLI.pep
PCKHKFHVRCIVPWLELHSSCPVCRFELPSSADDDDETKTDSERVLRTRNVRETSNGNVVENVGNADRGREDEVRSGNGRRFSFPWPFSGLFSSSSSSSSSTSGSQSGENNFFSRSSGSSR

SEQ ID NO: 37034 - protein, 275 aa, Arabidopsis thaliana columbia
  Clone ID: LIB3176-073-A8_FLI.pep
ISTEMQSKPGRENEEEVNNHHAVQQPMMYAEPWWKNNSFGVVPQARPSGIPSNSSSLDCPNGSESNDVHSASEDGALNGENDGTWKDSQAATSSRSDNHGMEGNDPALSIRNMHDQPLVQPPELVGHYIACVPNPYQDPYYGGLMGAYGHQQLGFRPYLGMPRERTALPLDMAQEPVYVNAKQYEGILRRRKARAKAELERKVIRDRKPYLHESRHKHAMRRARASGGRFAKKSEVEAGEDAGGRDRERGSATNSSGSEQVETDSNETLNSSGAP

SEQ ID NO: 37035 - protein, 181 aa, Arabidopsis thaliana columbia
  Clone ID: LIB3176-073-H2_FLI.pep
RLCFRIRESLSSSQFRSSDLTINRLELKSHFINQIMTLGSGSSVVVPRNFRLLEELERGEKGIGDGTVSYGMDDGDDIYMRSWTGTIIGPHNVTVHEGRIYQLKLFCDKDYPEKPPTVRFHSRINMTCVNHDTGVVDSKKFGVLANWQRQYTMEDILTQLKKEMAASHNRKLVQPPEGTFF

SEQ ID NO: 37036 - protein, 338 aa, Arabidopsis thaliana columbia
  Clone ID: LIB3176-085-E10_FLI.pep
MVEEGGVVVNQGGDQEVVDLPPGFRFHPTDEEIITHYLKEKVFNIRFTAAAIGQADLNKNEPWDLPKIAKMGEKEFYFFCQRDRKYPTGMRTNRATVSGYWKATGKDKEIFRGKGCLVGMKKTLVFYTGRAPKGEKTNWVMHEYRLDGKYSYHNLPKTARDEWVVCRVFHKNAPSTTITTTKQLSRIDSLDNIDHLLDFSSLPPLIDPGFLGQPGPSFSGARQQHDLKPVLHHPTTAPVDNTYLPTQALNFPYHSVHNSGSDFGYGAGSGNNNKGMIKLEHSLVSVSQETGLSSDVNTTATPEISSYPMMMNPAMMDGSKSACDGLDDLIFWEDLYTS

SEQ ID NO: 37037 - protein, 331 aa, Arabidopsis thaliana columbia
  Clone ID: LIB3176-087-A11_FLI.pep
LSCQKRKRVLVMDDSSFMDLMIDTDEYLIDDWESDFPICGETNTNPGSESGSGTGFELLAERPTKQMKTNNNMNSTSSSPSSSSSSGSRTSQVISFGSPDTKTNPVETSLNFSNQVSMDQKVGSKRKDCVNNGGRREPHLLKEHVLAERKRRQKLNERLIALSALLPGLKKTDKATVLEDAIKHLKQLQERVKKLEEERVVTKKMDQSIILVKRSQVYLDDDSSSYSSTCSAASPLSSSSDEVSIFKQTMPMIEARVSDRDLLIRVHCEKNKGCMIKILSSLEKFRLEVVNSFTLPFGNSTLVITILTKMDNKFSRPVEEVVKNIRVALAE

SEQ ID NO: 37038 - protein, 145 aa, Zea mays
  Clone ID: LIB143-038-E10_FLI.pep
RTTINQQALGPKETERRKAGAASNHGRSSERPPPPVYKFPSFSSSIYRGHQIQEEGRAPRTFGARSGSTSSRASSWLTSSSSDHLQGSWCSLPLSPIKFSCLISTFRSQLPSIPSLRPMLGTLVRQQGQRTTYTCASSSVMVARA

SEQ ID NO: 37039 - protein, 104 aa, Arabidopsis thaliana columbia
  Clone ID: LIB3176-094-G3_FLI.pep
DKVYGRSGDPNADALQFSGSMAPEKFKPPTVCCIGRFFCKGFYDGSCLCSEATRVQHVKDFKDSCCCRRRFCGDRVIFSFRFMESLKALQERTLLELQEQSNVL

SEQ ID NO: 37040 - protein, 145 aa, Zea mays
  Clone ID: LIB143-041-H6_FLI.pep
RTSSPEMANARSGVAVNDECMLKFGELQSKRLHRFITFKMDDKFKEIVVDQVGDRATSYDDFTNSLPENDCRYAIYDFDFVTAEDVQKSRIFYILWSPSSAKVKSKMLYASSNQKFKSGLNGIQVELQATDASEISLDEIKDRAR

SEQ ID NO: 37041 - protein, 226 aa, Arabidopsis thaliana columbia
  Clone ID: LIB3176-112-G6_FLI.pep
VETSLNFSNQVSMDQKVGSKRKDCVNNGGRREPHLLKEHVLAERKRRQKLNERLIALSALLPGLKKTDKATVLEDAIKHLKQLQERVKKLEEERVVTKKMDQSIILVKRSQVYLDDDSSSYSSTCSAASPLSSSSDEVSIFKQTMPMIEARVSDRDLLIRVHCEKNKGCMIKILSSLEKFRLEVVNSFTLPFGNSTLVITILTKMDNKFSRPVEEVVKNIRVALAE

SEQ ID NO: 37042 - protein, 277 aa, Arabidopsis thaliana columbia
  Clone ID: LIB3177-062-C5_FLI.pep
SLNLCFKFNPSLFPPFPHNQNLNSQLLVLSKMEGGSASGSASALSNDENLVVSCEDSSSPIGNELELGLTLSLGRKGYRDCRVYADDSSSSSSSSSLSRASVIAGIKRTADSMAATSGQVVGWPPIRTYRMNSMVNQAKASATEDPNLEISQAVNKNRSDSTKMRNSMFVKVTMDGIPIGRKIDLNAHKCYESLSNTLEEMFLKPKLGSRTLETDGHMETPVKILPDGSSGLVLTYEDKEGDWMLVGDVPWGMFIGSVRRLRIMKTSEATGKAQMIL

SEQ ID NO: 37043 - protein, 97 aa, Arabidopsis thaliana columbia
  Clone ID: LIB3177-067-F10_FLI.pep
CQVKWSGGRSLTAQFVCRTSKQGKSHEAYRNVIIRFIWYVLINGSSDTGHAPFADRQLKIKTRLLPSCVHSKNTLSLYVVVTCKSKTPFFCIFPHFI

SEQ ID NO: 37044 - protein, 652 aa, Arabidopsis thaliana columbia
  Clone ID: LIB3177-078-F4_FLI.pep
GMSPVAKVSEFHREGNDWFCKTGLSSDITVVVDDVKFHLHKFPLVSKCGKLARMYEDSKSTDKQSLWTTVLEEFPGGADNFLIVARFCYGARVDITSKNLVSIHCAAEYLEMTNEYGEDNLISQVETFLHKHVLRNWKDCILALQSSSPVLKSAEKLQMIPKLMNAVSTMVCTDPSLFGWPMMMYGTLQSPGGSILWNGINTGARMRSSGSDWWYEDISYLSVDLFKRLIKTMETKGIRAESLAGAMMYYARKYLPGLGRWQSGTSDSSKSRRRVVSFNLAKASSPSSMPPLDQIALLETILSLLPEKRGRSFCKFLLGLLRVAFILGVDGNCVKKLEKRIGMQLELATLDNLLILNYSDSETLYNVDCVERIVRHFVSSLSSSSSQLPEFSPPSLDPVTSPSPAPLKKVAKLVDSYMAEVASDVNLKPDKMRSLAAALPESSRPLYDGLYRAFDIYFKEHPWLSDRDKEQLCNIMDYQRLSIDACAHASHNDRLPLRVVLQVLFFEQMHLRTALAGGLNVANTETAHAVTIPGGRTGQEIVQRDGWVTVVRQNQVLKVDMQKMRSRVGELEEEFQSIKQEMKKRVSKSSSSMSSPRLVKLGCKFLLPRASDAKNDTVQNSVSSTPRSATADHTLPRSSRHSKHRKSFSFFG

SEQ ID NO: 37045 - protein, 251 aa, Arabidopsis thaliana columbia
  Clone ID: LIB3177-079-A9_FLI.pep
LKWGYGYFDHDQTDNYLQIVPEIHKEVENAKEDLLVVVPDEHSETDDHHHIKDFSERSDHRFYLRNKHENPKKRRIQVLSSDDESEEFTREVPSVTRKGSKRRRRDEKMSNKMRKLQQLVPNCHKTDKVSVLDKTIEYMKNLQLQLQMMSTVGVNPYFLPATLGFGMHNHMLTAMASAHGLNPANHMMPSPLIPALNWPLPPFTNISFPHSSSQSLFLTTSSPASSPQSLHGLVPYFPSFLDFSSHAMRRL

SEQ ID NO: 37046 - protein, 93 aa, Zea mays
  Clone ID: LIB148-001-F1_FLI.pep
HCLVQMQRRRKVLHLPAKKPSPRHTLAQLSAIMHAPTNRSLYFSHSLACAISVDTMSRRSRMTAGWNLRDDSITFILAGIYICTLQGFTNYLF

SEQ ID NO: 37047 - protein, 133 aa, Arabidopsis thaliana columbia
  Clone ID: LIB3177-086-C5_FLI.pep
SSAAFSCFSSSPVVLFPLASSMLYCCIVTAYSVFLLCDFATKGALSSSVMVFHFFPAALPTLPTDLLSGLARLNSFRKSSRKTKKGLGGFLGLFGSFVFFPTLFPLTFNLSSVLLDSTSVWLSFISRSLCEHV

SEQ ID NO: 37048 - protein, 71 aa, Zea mays
  Clone ID: LIB148-003-B8_FLI.pep
PNKPVVGQGCNTYLSGVPGTDRFLFVRGDVTVSLVTPKQSASCACCCSGRAEREIKCKLHFLAQIHDKLVV

SEQ ID NO: 37049 - protein, 244 aa, Arabidopsis thaliana columbia
  Clone ID: LIB3177-087-E9_FLI.pep
SESTMDVYGMSSPDLLRIDDLLDFSNDEIFSSSSTVTSSAASSAASSENPFSFPSSTYTSPTLLTDFTHDLCVPSDDAAHLEWLSRFVDDSFSDFPANPLTMTVRPEISFTGKPRSRRSRAPAPSVAGTWAPMSESELCHSVAKPKPKKVYNAESVTADGARRCTHCASEKTPQWRTGPLGPKTLCNACGVRYKSGRLVPEYRPASSPTFVLTQHSNSHRKVMELRRQKEQQESCVRIPPFQPQ

SEQ ID NO: 37050 - protein, 207 aa, Zea mays
  Clone ID: LIB148-017-C6_FLI.pep
AYLRIQDTAAAAAAAVCSEAPAQVLGRSIRYACILPFHHPIVATYIVKESLSPPCSSISTYSQPSARISLPPPRAPCAARPACKQPPSWQWHQLLDAVPFYHPIYHTIYQQLPLRMLLHRLQHDVAPLLGVRLGGPFPHHRHELAVVDPPVVVGVDLRDDVLDVPAVQEPLLLERLLQLLLGDAPAAVLVEVLERGVEVFFPVHPVH

SEQ ID NO: 37051 - protein, 195 aa, Arabidopsis thaliana columbia
  Clone ID: LIB3177-091-E5_FLI.pep
NRFDRDSTPVPDFSNREASERVNDRANSILNRLMTSRGVRSEQNQASAAAAAIVAASEDIDLNPNIAPDLEGESNTRFHPLLIRRQLQSHRVARISTFTSALSSAERLVDAYFRTHPLGRNHQEQNHHAPVVVDDRDSFSSIAAVINSESQVDTAVEIDSMALSTSSSRRRNENGSRVSDVDSADSRPPRRRRFT

SEQ ID NO: 37052 - protein, 123 aa, Zea mays
  Clone ID: LIB148-024-C12_FLI.pep
YSGRESAGCGRRLGSPPPHVHLGESACGDQVSARDVCGGNRASIPYRRLGVEGGVAWAILRRRSRFVVKPLTSAVGVRCCLNFGQEQVPQDEAHGGCCDVFVRDLGRRLPVNCGLLDRCLLIM

SEQ ID NO: 37053 - protein, 550 aa, Zea mays
  Clone ID: LIB3060-003-B11_FLI.pep
AMAAYYHGGAGTDIQASTDGLQTLYLMNPSYAGGYADDGGASTPGAANMMLLNSAVTTMTPASFAHHHQQQSPPAAQQHFVGIPLQVQAPPPSGYNLWTPAMAGGAADMSPQAQAQTPGAAGAAGVSAVLSLSSREAPPVTVAAVAACTDEGKYLGVSATPQGQMVMSSKYLKAAQELLDEVVSVSKGVEDAKTAAAAATKSLAAVKKKEDSEGASGGGTDDGAGAKSGGGAAPEMSTAERQEMQMKKSKLLNMLDEVEQRYRQYHGQMQAVSSSFEAAAGAGSARTYTALALRTISRQFRCLRDAIASQVRAASRALGEDADAAVAGGRTVGSRLRYIDHQLRQQRALQQLGMMQGGAWRPQRGLPERSVSILRAWLFEHFLHPYPKDSDKIMLAKQTGLTRSQVSNWFINARVRLWKPMVEEMYLEETKDQDAGGGGNDEGKSGGGGSKSSDTVDGVMPRADVMSKSAVRVGGGGAGAESASTNKGIHGSSLLELGGGDHQQSHAGFYDDDEDDGDDVMGRRLKKARGNEPAPAFHHVHDIATLHAQA

SEQ ID NO: 37054 - protein, 168 aa, Arabidopsis thaliana columbia
  Clone ID: LIB3177-096-A8_FLI.pep
PTQSQISLNLETSRKTVSMAPKAEKKPAEKKPASEKPVEEKSKAEKAPAEKKPKAGKKLPKEAGAGGDKKKKMKKKSVETYKIYIFKVLKQVHPDIGISSKAMGIMNSFINDIFEKLAQEASKLARYNKKPTITSREIQTAVRLVLPGELAKHAVSEGTKAVTKFTSS

SEQ ID NO: 37055 - protein, 181 aa, Arabidopsis thaliana columbia
  Clone ID: LIB3177-096-H2_FLI.pep
EYPLSIVLVGVGDGPWDTMRQFDDNIPARAFDNFQFVNFTDIMSKNIDPARKEAEFALSALMEIPSQYKATLELGLLGQRTGHCPDRIALPPPTYATQSMRNSPRTSRSTSFQNKPYDNGVSSTPPSTTHNESQQQFCPVCLVSAKNMAFNCGHQTCAGCGEDLHVCPICRSSISVRIKLY

SEQ ID NO: 37056 - protein, 156 aa, Zea mays
  Clone ID: LIB3180-001-D8_FLI.pep
GSTATNQKPKKPSSVALSFSKVSKYWYMIVTASNIPVPEPIAPMKSARTVNAPMHTPPNAAAVGMYRLSSFCKFDSRWPGITICCSLSCLATSFADEPETSIHVFAKHVFKELPQQPHFLPLQKYPPTLREGIALGMMLSSMLASIVNFTNSENDT

SEQ ID NO: 37057 - protein, 223 aa, Zea mays
  Clone ID: LIB3180-003-D12_FLI.pep
LVFLIVIYFQGFRVVLPVRSKNARGQQGSYPIKLFYTSNMPIILHSALITNLYFISQLLYRKYSGNFLVNLLGKWKESEYSGHSIPVGGLAYYVTAPSSLADVLANPFHALFYVVFMLSACALFSKTWIEVSGSSAKDVAKQLKEQQMVMPGHRESNLQKELNRYIPTAAAFGGVCIGALTVLADFMGAIGSGTGILLAVTIIYQYFETFEKERATELGFFGF

SEQ ID NO: 37058 - protein, 277 aa, Zea mays
  Clone ID: LIB3180-011-D7_FLI.pep
RAHLSVAERLLKEFGCSICRAVIKEPLTTPCAHNFCKTCLLGAYDSQSSMRERSRGGRTLRAQKIVKTCPSCPTDICDFLENPQINREMMELIESLQRKAVEEGKMAAGDAEESGDGDSEENGGALVKGEDDSNLNEEGQDGVDADGSVKIVVEMEGAKDDKKSKMGAAEVVDVLVEDAAAKQPKKRTADEDAAAKQTKHKADAETGGKRVKSSAAVEEVDVCVTPMKRTRKSGDMHDDGNGSPAVSSGRRVTRSSVNATGADDSPARRTRSRGRAC

SEQ ID NO: 37059 - protein, 909 aa, Zea mays
  Clone ID: LIB3060-054-H10_FLI.pep
GPFASAPPSQVPFASAQPSQSPFTSPPQSQGPFAAGPPPTGPFAATPAPFRSPLSSLAQPQSPTQGALPPPPTYARPLSQPLQAQGYYPGAPPSNPQFPMSRPAFQQPVQNMPPPPIGSAATFGNQAAYQSGGPPVGGTLQSLVEDFQSLSLSSVPGSLDPGVDVKGLPRPLDGDEEPVKLIESYPFNCHPRYFRLTTHAIPASQSLVSRWHLPLGAVVHPLAESPDGEEVPVINFGSAGVIRCRRCRTYINPYATFADAGRKWRCNLCTLLNDVPGEYFCALDASGRRYDTDQRPELSKGTVEFVAPTEYMVRPPMPPSYFFLIDVSVSAVRSGLLEIVAKTIKSCLDELPGFPRTQIGFLTFDSTLHFHNFKSSLSQPQMMVVADLDDVFLPLPDDLLVNLVDSRHVVESFLDSLSNMFHDNVNVESALGPALKAAFMVMSQIGGKLLVFQSTLPSLGIGRLRLRGDDVRAYGTDKEHTLRVPEDPFYKQMAAEFTKNQIAVDIFSFSEKYSDIASLGSLAKYTGGQVYHYPSFQAPTHGDKLKLELSRDLTRETAWESVMRIRCGKGVRFTTYHGHFMLRSTDLLALPAVDSDKAFAMQLSLEETLMTTQTVYFQVALLYTSSSGERRIRVHTAAAPVVTDLSEMYRQADTGAIVSLLGRIAVENSLSDKLDSVRQQLQLKLVRSLKEYRNLYVVQHRIGGRLIFPESLKFLPLYILAICKTLALRGGYADVSLDERCAAGFSMMILPVKRLLNFIYPSLYRVDEVLTMEPNKIDGWLKRLPLTFQCLDTGGLYLLDDGFTFLVWLGRMLPPELVNNILGVSLANFPDLSKILLRECDNELSRNFMKILRYLREKDPSYHQLSLVVRQGEQPREGYLLLSNLVEDQMAGTSSYVDWIQQIHRQTQS

SEQ ID NO: 37060 - protein, 281 aa, Zea mays
  Clone ID: LIB3180-014-E11_FLI.pep
RTQRKNKHKHARSDLGRPSSHPSMATRVWLTALLLGFLVAASPFTGRVARAESEEDAAAAEVVEGADLGIVGDDTQVSSDGPLSPAPGVETVVVFPKNAGKIVLAGEETELLVGLQNDGESILNVVAVHSTLHLPFDHNMYGQNLTVQNFFNSSVPVSVQATFPYKFVVSKFLQPGAYDLVGYIVYEIDQHPYQNVFYNGTIEVVEAGGLLSVESVFLITLGFALLGLFGLWAYGQVQQLSKKTKKAPKVELGTGTTDANIDEWLEGTSFVQRSKSKKKQT

SEQ ID NO: 37061 - protein, 476 aa, Zea mays
  Clone ID: LIB3180-017-D8_FLI.pep
SSPSSPPPLQGFAPPNSRNPTHPMRDRSVEREFPSRERGDRPPPGVLGPPRRGPAYKTKLCALWQRGGCSRDTCSFAHGHAELRRFPGSRTSFPPRAGRRDYRAGDFRDRFDRRRSPHRRHSPDGDSRGHRSLRDRRPNSQERESSYSRSPSRKSEMRHEKKPDDGETNSSRSLSVSDNNDDRKKETLLSGDDKEDHEIQLKQIRQDMELLRDDKSLLEIILDEKNAEVRKISSRLNDLDLQLRKEKEECHRMTSKIKKFLKAHARFLKAQEELKRSQARFERLGDLLASDILKRGANEEVSSINVDEDPNVPYERSPNAAIAKKRSIPYSTSEEAKAVKKRRERDSDTTRPDKYRFEGTIAGFEKLSKGTEPTKSLYLKKKLWEDEKDKIGNFVSSANTDKVKESPVKHVLPSTGMAAHALDDLFEAVELEDRRDTSIENDADDETRSPVMPPQPPPVVNTYEQYEADDEEVDVE

SEQ ID NO: 37062 - protein, 127 aa, Zea mays
  Clone ID: LIB3180-018-H8_FLI.pep
KKRCFRLYGKEGYPLVDIMIRESEPSPKAGERILCRHPFIESKRAYVVPQHVEELLQCYWPGTSDKPRAELPSLEKIRSRCMQQLEMLRPDHIRRLNPTPYKVSVSTKLYDFIHRLWLNEAPVGELQ

SEQ ID NO: 37063 - protein, 340 aa, Zea mays
  Clone ID: LIB3180-023-A12_FLI.pep
LKVLANADTPDDALTARNNGAQGIGLCRTEHMFFASDERIKAVRQMIMAPTLELRQQALDRLLPYQRSDFEGIFRAMDGLPVTIRLLDPPLHEFLPEGNIEDIVSELCAETGANQEDALARIEKLSEVNPMLGFRGCRLGISYPELTEMQARAIFEAAIAMTNQGVQVFPEIMVPLVGTPQELGHQVTLIRQVAEKVFANVGKTIGYKVGTMIEIPRAALVADEIAEQAEFFSFGTNDLTQMTFGYSRDDVGKFIPVYLAQGILQHDPFEVLDQRGVGELVKLATERGRKARPNLKVGICGEHGGEPSSVAFFAKAGLDYVSCSPFRVPIARLAAAQVLV

SEQ ID NO: 37064 - protein, 374 aa, Zea mays
  Clone ID: LIB3180-023-D6_FLI.pep
QFNELQEYYLQRRRTGAQARRQEERDIVAMNREGYHAGLQDFQSVLTTFTRYSRLRVIAELRHGDLFHSANIVSSIEFDRDDELFATAGVSKRIKVFEFSTVVNEPSDVHCPVVEMATRSKLSCLSWNKYSKNIIASSDYEGIVTVWDVQTRQSVMEYEEHEKRAWSVDFSRTDSSMLVSGSDDCKVKVWCTNQEASVINIDMKANICSVKYNPGSSFYVAVGSADHHIHYFDLRNPSSPVHIFGGHKKAVSYVKFLSNNELASASTDSTLRLWDVKDNCPVRTFRGHKNEKNFVGLSVNNEYIACGSETNEVFVYHKAISKPAASHRFVSSDPDDADDDPGSYFISAVCWKSDSPTMLTANSQGTIKVLVLAP

SEQ ID NO: 37065 - protein, 76 aa, Zea mays
  Clone ID: LIB3180-028-C1_FLI.pep
VISDTSLAARDNQLRHSLPYVQCTFISRASICRFWCPLCTCARLTMGCELPWLSPVHFPFFPHSIICNVLLCLVRY

SEQ ID NO: 37066 - protein, 358 aa, Zea mays
  Clone ID: 700051232_FLI.pep
PVPIGSNHQAELPECRPFGGRTEEDESVKWIRNSVVPMPGTDASSLVLEPVHCKAGCDCLDEGSINCVKKHVMEARENLKDSVGADAFRELGFYDMGEEVASRWSEEEERLFQQVVSSNRASLRRNFWDELPLAFPSKSSKELVSYYFNVFMLRKRAEQNRFDPANIDSDDDEWQAGGDFEFPITGRTDEYMPIESLTDQDDVACNPFPLEGDLYGDSDDEDELDNSSGGDRHNGVQRAGMLSEGHPEMSFIDHDQQTLKLDADAQDDSCTSFEAHQVGCDGGAHTDIGNHYRSDDGLCGGAEHGFFGDHCDTKEWGFGFSTGWERHDFLSTNNVIEEVFGKGSSEDGSDTGTGQDLI

SEQ ID NO: 37067 - protein, 512 aa, Zea mays
  Clone ID: LIB3180-035-F2_FLI.pep
KTGRHARLIVLLPVRFVFVIYLCLALSTLLLQATNPILQVGNKDAHTTAPRAGGVVCTGRAGGAGAGEDGGWTTLAEVLGVEDGRVGEGPVEPAPGDVAVGGLREVDAVPTPVVGGVRARVRPRLAALGRQVEVVLAHARRAAARPRRLLQHPVFLGVEDELDGRRVVVGVHDAHAGVPGAELLDLAAQRGVVHPRQRVQLLDAAAAGAVAAGRLPAEDGEVDGEAADGEHPGHHQLRGALRDQPLHAPPDGLHHVRHHVVRLRQRPEREQRRVVVVPAELTHDEQRPPEQVPALLLLPAQLGLHVLEPLDLRVQGPRVPDRLPQPALHEEGRVQRRGARDGEVGAAVERRVLRLGRRQQRHAQLLRDEVNDEAAVGAAAGGVAEVGHAVGQARRGQVVRDAVHHQVAGVHQGVPEVEDGRVLPRHGRPHEEDEDGGPRHRQPDTHDMTTTDRGDAAESATRHHQAPAPRVVVGARSRSLLAAAACCVPSRFARLNPRAERSWSSPGPGCLN

SEQ ID NO: 37068 - protein, 518 aa, Zea mays
  Clone ID: LIB3180-036-C7_FLI.pep
GFGWVWWKMIKQILGRLPRKPGKAGDSREAAAAGNGTEPSNSYSVARSMDPGNKRAGNGDYPVPSGVIPNPVMNGAVVYHSNEPLPAFKDVPMSEKQNLFVKKVSLCCAVYDFVDPTKNLKEKEVKRQTLMELVDYVTSANGKFSEVVMLEITKMVSINLFRSSSPTPRENKAIEGVDLEEDEPLMDPAWSHLQIVYEVFLRFVASQETDAKLAKRYIDHSFILRLLDLFDSEDPRERDYLKTILHRIYGKFMVHRPFIRKAINNIFYRFIFETEKHNGVAELLEILGSIINGFALPLKEEHKLFLVRALIPLHKPKCVSMYHQQLSYCITQFVEKDCKLADTVIRGLLKYWPVTNSSKEVMFLGELEEVLEATQLAEFQRCMVPLFRQISRSMNSFHFQVAERALFLWNNDHIETLIKQNYKVLLPIIYPALERNSRDHWNQAVRSLTLNVRKIFSDHDSTFFGECVQRFSDEELKQAESDSKRDAMWKRLEEMGASKPGGNHPLGAPNGKPSHAAG

SEQ ID NO: 37069 - protein, 248 aa, Zea mays
  Clone ID: 700073101_FLI.pep
FFGMDAKRFLHLVEEKKRRILEKKEAPLKWEQKLETAAKAKVDAEAKVKKLNSRKHRRRGDLSSDSDSDYGSDVDRKHLKRKNRRRNKKHEHSDSDDARRCNRRSRRSTDSSDDSDSEYETRSEEERPRKKRSHRRRHHRHSSRSDSENYSSDEEERRSAKDHTQSRRRHHRSSDDDSGKDKVKSRHGKGLRSRDEDARADFNSHKRLRSQSLEESSDDRDADESEKMRNGKRSHKNGGHRHHRHHHE

SEQ ID NO: 37070 - protein, 143 aa, Zea mays
  Clone ID: LIB3180-037-E3_FLI.pep
SEEFQEGNSRTGNQHQQLHPQTKVRVHSDATISVFTSQQVFSPRIHSPSSDYSIQSVRVMHTPSEEQESFHFFLYPHIHSAAAYFPGAAAAACTLGPLASRTRLTLCRIDFSYLCIPFADLHALHGVQNHLPLGTELRGGSMQ

SEQ ID NO: 37071 - protein, 232 aa, Zea mays
  Clone ID: LIB3180-055-A2_FLI.pep
EIDQSVDASSMAISASMENAAGAVAGASGAGGGSGRGKKKGMPAKNLMAERRRRKKLNDRLYMLRSVVPKISKMDRASILGDAIEYLKELLQRISDLHNELESAPSSSLVGPTSASFNPSTPTLQTFPGQVKEELCPGSFPSPTGQQATVEVRMREGHAVNIHMFCARRPGILLSTMTALDSLGLDIEQAVISCFNGFAMDVFRAECADGPGMVPEEIKAVLMHTAGLHNAM

SEQ ID NO: 37072 - protein, 420 aa, Zea mays
  Clone ID: LIB3180-059-C7_FLI.pep
ASARAYKSLPSAHSPPPLRSSTRPMAAAASSALHAVGAVASAKPRSVVPAVATRRSVRVAPAAKRGPGSGGGRLVARSAVAAKADEAAAAAGSKSGGHELLMFEALREALIEEMNLDPTVCVMGEDVGHYGGSYKVTKGLAEMFGDLRVLDTPIAENSFTGMGVGAAMKGLRPVVEGMNMGFLLLAYNQISNNCGMLHYTSGGQFKIPVVIRGPGGVGRQLGAEHSQRLESYFQSIPGLQMVACSTPYNAKGLMKAAIRSENPVVLFEHVLLYNLKEKIPDEEYICCLEEAEMVRPGEHVTILTYSRMRYHVMQAAKTLVNKGYDPEVIDIRSLKPFDLHTIGNSIKKTHRVLIVEECMRTGGIGASLRSAIIDNFWDYLDAPIMCLSSQDVPTPYAATLEDATVVQPAQIVAAVEQICQ

SEQ ID NO: 37073 - protein, 337 aa, Zea mays
  Clone ID: LIB3180-062-H5_FLI.pep
QYLKMNNHISILVILIVDVSVVLLLNSHVGLCSCYNRIFSFGDDTMDTGNFIHLIGKAPSKYKEAPYGKTFFRHATGRISDGRVLIDFYAEALKLPMIPPILPEKNSGCFPHGANFAVFGATARGKVFFSGSPWCIGTQMYWFDQLVDRIAPGDGKPPKDGNIISDVIADISHFIEELIVVNGAKAFVVANNFPVGCLASYLSRFHSDDHEDYDEHGCLKSFNEFSQKHNEQLYSAIGQIRYSYPNVKVIYADYYNATMEFIKKPSRFGIGDPLVACCGGNGPYHTSMECNGTAKLWGDPHHFANWDGMHMTEKAYNIIMEGVLNGPFADPPFPLSC

SEQ ID NO: 37074 - protein, 618 aa, Gossypium hirsutum
  Clone ID: LIB3197-059-F3_FLI.pep
FGSSHSSNSAQHQSVSVNEQLEEKWYASPEDINEGVCTILSNIYSLGVLLFELLCQFESERGHAAAMLDLRHRIFPPTFLSENLKEAGFCLRLLHPEPSLRPTTRDILQSEVLNGFQEVFAEELSSSINQDDTESELLLHFLGLSKEQKQKHASKLMEDIACLEADIKEVEKRRHFSRKPLTYSSINARECRHHSKEPPISEMHSSLYPFSSDNEMRLMRNINQLESAYFSMRSRVPFHETDSMRRPDKDLLKNRDNGHLTQNNEEIPNPPDCLGAFFDGLCKYARYSKFEVRGIMRSGEFNNSANVICSLSFDRDEDYFAAAGVSKKIKIFEFNALFNDSVDVHYPVIEMLNKSKLSCVCWNNYIKNYLASTDYDGLVKLWDASTGQAISHYIEHEKRAWSVDFSQVYPTKLASGSDDCSVKLWSINEMNCLGTIRNIANVCCVQFSAHSPHLLAFGSADYKTYCYDLRNARAPWCVLDGHDKAVSYVKFLDSETVVTASTDNTLKLWDLNKTSSGGLSSNACSLTFSGHTNEKNFVGLSVVDGFIACGSETNEVYAYYRSLPMPITSHKFGSIDPISGKDTDDDNGLFVSSVCWRGKSDMVVAANSSGCIKVLQMV

SEQ ID NO: 37075 - protein, 100 aa, Arabidopsis thaliana nossen
  Clone ID: LIB3234-004-E1_FLI.pep
DLSSLQKNLRLVSLPAFSDFRILAMSSDGSAGKAVVEAKGLNPGLIVLLVIGGLLVTFLIANYVMYMYAQKNLPPRKKKPLSKKKLKREKLKQGVPVPGE

SEQ ID NO: 37076 - protein, 636 aa, Zea mays
  Clone ID: 700073158_FLI.pep
PVEDLDKPASFDGKAANSTADDDSLFEQSSAFDQAPKSDPLFTSEFNGHAKDTKPPSAVRDSSPLHHSMDRNSARQSSMEDFDNVMPKSQSARYSDVRGNDTEDQSPRSTESEDDIWLTVSEIPLFTAPTIAPPPSRSPPLLKRKPLRANAKENGHARQSTPNQNHYTDLPKQPEVSSIDDLEGFSMGKPQMPAYGNTVFDEDYERSSSDTEEKDRQERLEKEREMKLREEMEREQRRLEKERELEQQRERERERQAVERATKEARERASAEARAKAEREARQRSQRAAVQRAQQEARERAAVEAKERAARVAAEARERAAAEAKERAAAEAKEKAAAEAKERERAAARERAAAERAAAERAQQEARKRAERAAVERAATEARERQAAAAAAAATAAAAAASREKQSTPDDLESFFGVGSRANSAPKQRAPTPTVDSMFGFGAQGRGTTNGSQRAASTSAPVRKVASATSFGDDLSDLFGAPASSDVFQEVEGESEERRRARLERHQRTRERAAKALAEKNERDMQVQREQAERDRIGDTLDFEIKRWSAGKEGNLRALLSTLQYILWPECGWQAVSLTDLITGAAVKKQYRKATLCIHPDKVQQKGATLQQKYIAEKVFDILKEAWNKFNSEELF

SEQ ID NO: 37077 - protein, 222 aa, Arabidopsis thaliana nossen
  Clone ID: LIB3234-087-G12_FLI.pep
RFQYSGEVCPEFRRGGDCSRGDDCEFAHGVFECWLHPIRYRTEACKDGKHCKRKVCFFAHSPRQLRVLPPENVSGVSASPSPAAKNPCCLFCSSSPTSTLLGNLSHLSRSPSLSPPMSPANKAAAFSRLRNRAASAVSAAAAAGSVNYKDVLSELVNSLDSMSLAEALQASSSSPVTTPVSAAAAAFASSCGLSNQRLHLQQQQPSSPLQFCSFAFHSKLPN

SEQ ID NO: 37078 - protein, 79 aa, Arabidopsis thaliana nossen
  Clone ID: LIB3234-090-D9_FLI.pep
QNVNFFLILFFGGFIYKRFQILIPMELRTSVSVLIMKLLSDLSSTKYTSFFVRKLESILNISNIYINKKEIERFNKLVD

SEQ ID NO: 37079 - protein, 170 aa, Zea mays
  Clone ID: 700088181_FLI.pep
GIAIHLAEEKHKDPSMQIKGTECINTTTSIEEHLHKELPDPVDLKSMEMTVPDQHDPSFNEPEHVLKDDEKSEGHFSEEKVDAGANEIHNGGQDDNGGVKTIYECGIVEKKADRSVDKTVPKTEVAQVWRKDDPKGNDVIEETKSKLLLERKSRVKALVGAFETVLSFKE

SEQ ID NO: 37080 - protein, 368 aa, Glycine max
  Clone ID: LIB3242-006-H7_FLI.pep
TTTLVIITMESTEDSSTSSQQQPNLPPGFRFHPTDEELVVHYLKKKVDSVPLPVSIIADVDLYKFDPWELPAKASFGAEEWYFFSPRERKYPNGARPNRAATSGYWKATGTDKPICSGTQKVGVKKSLVFYGGKPPKGVKTDWIMHEYRVTENKPNNRPPGCDLGHKKNSLRLDDWVLCRIYKKGNTQRSHERDDSIDDMIGEVPPSINVGHMSARFHLSRMSTSYSGALLENDRNTLEGVVIGNGSVNGISNTNNITSVISSSHQFGTSNSKAELLPFVPSNNTSNSASKRTLSSLYWNVDDHKHFNLDSNGNVSVLRTDQENNNNNNGTSGSFATLLNQLPQTPSLPQIDGLLRTPYQIQGTNWYG

SEQ ID NO: 37081 - protein, 235 aa, Glycine max
  Clone ID: LIB3242-009-C8_FLI.pep
FSLCSLFLSSKQEMDSNSVVSWPRMPENINGFGLKQNQSEEVHVLAVDDSTVDRKVIEHLLKVLACKVTAVDSGLRALQLLGLLDEQKIPSETNGFVGLKVDLIITDYCMPGMTGYELLKRIKESSTFKETPVVIMSSENVLPRIDRCLEEGAEDFIVKPVKLSDVKRLKDYMTTKEVRGELSQEEREGINKRKLLDTSDVSPSSPPSISSSPLPSSLSSVIDSPIRRLKMTNTD

SEQ ID NO: 37082 - protein, 72 aa, Glycine max
  Clone ID: LIB3242-043-D5_FLI.pep
LKGQSSDVDNDADYWLLSDADVSITDMWRTDSTVDWNGIDMLHPDFGIISRPQSPSSGLAEVPSTGANSIQK

SEQ ID NO: 37083 - protein, 193 aa, Glycine max
  Clone ID: LIB3242-046-E1_FLI.pep
EISQLSTPFGTSAQRVAAYFSEAISARLVSSCLGIYATLPHTHQSHKVASAFQVFNGISPFVKFSHFTANQAIQEAFEREERVHIIDLDIMQGLQWPGLFHILASRPGGAPYVRLTGLGTSMEALEATGKRLSDFANKLGLPFEFFPVAEKVGNLDPERLNVCKTEAVAVHWLQHSLYDVTGSDTNTLWLLQR

SEQ ID NO: 37084 - protein, 399 aa, Glycine max
  Clone ID: LIB3242-059-D4_FLI.pep
QNHKPTLVTMEEDSGIRLVHTLMTCADSVQRGDLAFAGSLIENMQGLLAHVNTNIGIGKVAGYFIDALRRRILGQGVFQTLSSSSYPYEDNVLYHHYYEACPYLKFAHFTANQAILEAFNGHDCVHVIDFNLMQGLQWPALIQALALRPGGPPLLRLTGIGPPSSDNRDTLREIGLRLAELARSVNVRFAFRGVAAWRLEDVKPWMLQVNPNEAVAVNSIMQLHRLLASDSDPIGSGIETVLGWIRSLNPKIISVVEQEANHNQDRFLERFTEALHYYSTVFDSLEACPVEPDKALAEMYLQREICNVVSSEGPARVERHEPLAKWRERLEKAGFKPLHLGSNAYKQASMLLTLFSAEGYSVEENQGCLTLGWHSRPLIAASAWQAAPMQDRETLRFEQ

SEQ ID NO: 37085 - protein, 226 aa, Zea mays
  Clone ID: 700193656_FLI.pep
HMPISSKENGLYCDVCMRTETLLNRIFVCSRCKAAVHIDCYRNLENSIGPWNCELCEDEDISSEATSTTVSDKSHCNGKLPFAQCGMCHGTSGAFRKTVDGKWVHAFCAEWLLDTKYVRGQDSPVEGMENLVEGKDTCCLCLCNVGMCLRCSSGDCNITFHPTCARSSGLYMNTKGFGTTSQHKAYCDKHSVEQKEADAQQYGPEELRSMKRMRYQMQELITHCHL

SEQ ID NO: 37086 - protein, 364 aa, Glycine max
  Clone ID: LIB3242-059-E12_FLI.pep
PREDTFNDTKAYSSTGLRQCAMCEKEVYGEQSICCGRCRAVVYCSSICQKQHWNDTHKSMCGLYKAMMEREEELAIMIFMFPCSADQPCKWLESLGIHQKGMWRRKCSCYSHCSFGLLPVKGGLQELWGGIDEFEYPHDSPFNNHFISSPFLLSGWPEYYNLRSLPLSSPVADILSHPLTVYHILTTLNISSKNLILKGKEVIVHYLGPEGELDWMPAFAEVGHLLNGLGNVQIVMVGPEVPTNLSGTTSGIGSRVRVNLVRGVYQVEASYLPSPHVVIALNSRLESYSSWGGALDLIKSIGVPAFFTDQSEVSCVNAKQVLRNAGLHITHPVTPNPFRSPVKNLTASSNLPSYSNGFVFGVNT

SEQ ID NO: 37087 - protein, 169 aa, Glycine max
  Clone ID: LIB3242-062-G8_FLI.pep
VVLVKRRAISFYLPLLHPVEKNQSRIHRKNSMASQPLKNDTDAEAKSGCLYVKVSMEGAPYLRKVDLNSFTTYKDLSLALEKMFSCFTLSQCGSYGVSSRENLSESRLMDLLHGSEYVLTYEDKDGDWMLVGDVPWEMFTESCKRLRIMKSFEAIGLAPRAMEKCKSRN

SEQ ID NO: 37088 - protein, 266 aa, Zea mays
  Clone ID: 700208909_FLI.pep
GEREGRMSRRSVNPSRRVADGGLPSFGGPFHPKSRSPPVLTIALVVLGVIFLIAYFNSSPGVTVTSKETVTRSEGSCTSEVMRALPYLKKAYGNAMQKVLHVGPDSCTVVSNLLKEGKVEAWGVEPYDLEDTDSTCKRLVRKGFVRMSDIKFPLPYRPDSFNLVIVSDALDYLTPRYLNKTLPGLARVSTDGLVIFAGNPGQQKAKVSELPKFGRPAKLRSSSWWTRYFVQTGLTENEGPLKKFEEATSQNKYQPDCQIFHLSSPR

SEQ ID NO: 37089 - protein, 285 aa, Glycine max
  Clone ID: LIB3242-064-F6_FLI.pep
PNPLLQLMGVFSEDPNPNPNPIVIREVWASNLESEFELIRELIDRYPFISMDTEFPGVIFRPHVDPTKPFNHRNRPSDHYRLLKSNVDALNLIQVGLTLTDAAGNLPDLAGNRSIWEFNFRDFDVARDAYAPDSIDLLRRQGIDFARNTADGVDSTCFAELMMSSGLVCNDAVSWVTFHSAYDFGYLVKILTRRNLPTRLEEFLKTVKVFFGDNVYDVKHMMRFCDTLYGGLDRVARTLNVDRAVGKCHQAGSDSLLTWHAFQKIVDIYFVKEEHRKHAGVLFGL

SEQ ID NO: 37090 - protein, 827 aa, Zea mays
  Clone ID: 700264904_FLI.pep
ACCVTDDGLPCLCLPIQQSPAYFLRHTYTGHTQDYHLPLLTLLEGYMPFADQCRGTHQLGWELRLRGGLRRRYHDRAADNVIPRHPLQVALDAADGRRPAPPHRHGEAALLVHPVEPQRRGPHHHGHGPAGHVHHGPVHGAGLPDIGHGAADGDRAGQQLHHQRRVVELRLGDGLHPLAAAGDAAPRYLLHAAVPDAQAAEVGDVVAGAEVVHQPRVHGAGRVHVPGAHAVEARPPVLLVLDGHARVVRRVRRRHDRRLHRRGGPARVQALDDGRDPAQVRRRHGRPGLHEEGQAHVVRELRVHLAGRPRRQDVHAGPRDVRLQDARARPVGPARREEGHGRRRGRPHHRAPERDGRRGPGRRPGVRRDPRPRGVAHVRRGQHVRVGEGGVPLRRLVHQDHAGAAVRGHRLPLLDVLADGAALAQHHLAPHLGLHQRAAVAGLREDERQRAPRGVVPGLEQRLAVELLPVAEPHGCAYRAVRGARRDREHPRRAVGDGPRGGAVVAGRGADEDAALHGLERGDGDEVVVELRAVGGADGEGEHVHAVPDGGVQAGDDVQDGAPAPRAHLVDGQVRVRRHPGRPAVRVAPHAGVVHEVARRGAGRVRAVARVVDGRRRVVDGRAPERARADDLVAAPAAGDGPELAGALPLLGRRWHPRVAEGRVGGQDAGVEEPNHDAAAEPGPAPEAVLAHVEAEEARRVGGSQRQELLRVQPQAPLLAPQRLRLRVGEAGGEPRQHVAVRVDDPGPVIRRRVQRGLRQERPVPLLHRPAAAVVVPRLEMNHVVLALLRVGDGEQRGGQQQEEGKEVSLGPHEAMQCRTGPGEGDS

SEQ ID NO: 37091 - protein, 99 aa, Glycine max
  Clone ID: LIB3242-075-B11_FLI.pep
VVELVVVFAMIFCIIIIFYFSSSFRGNSRRHVAQHQGILIGGGCCISSLELLFATMASDLEHGGVDLLHCMFFQGVGFVEFRLCLLSYPLGVCELFNFS

SEQ ID NO: 37092 - protein, 574 aa, Zea mays
  Clone ID: 700241304_FLI.pep
GGIGREENSKSHLEKKLYFHLLLSATLLLPVPEELHGLAEHGLEPLEVEPDVLLAEVVLGHLPPPTPVDGLRVLDGRVVAPQRVHQGGLLDAGGVGDVLEPHVHGGDAEVHLPDVLHLAVRVDLDEDGARGEEQRVGEPGAVHAHQHVHGVHLLGELPDVDVEGRVPDDDLEPDAPRQSHHGVQVHQLPRVAARDDHHAGPRPLVLLAVGARQPRRRGPRERVGLAEERGELRHGVAQRLPRRVDAELLVHADAHHRAREAAHAVVPVHVHDVVPRQPPQDGPVLAHVPRLDVLHHQLHLALEPRRLEVERDHDVAEVVPVVASQSAHGQHHRRHGGPHVARRRVGAGRQLAHRHLLDPALVLPGVGADAPLLRVRVAAALDGRRDQHGARRPVDPHVAVDVAHVGRPRALDVARRLLGRSTLRGDAIAAADTTAPTIIVRDRLLLVLICFSMGPFNINAWRLLFLRRLLLRCNLWLGWLLLYGRRLLPLLFDGRGDRRPRGVRVARRCPPNSVGRRDRELLGDGEVGEEHEEEAEQEANAEVLLRGALHVPDDLPRVAAHLPSSSSSSSPASA

SEQ ID NO: 37093 - protein, 332 aa, Glycine max
  Clone ID: LIB3242-098-F10_FLI.pep
TLNFFFLYYHLSFFLHLLYFTFITFIEGKMSNISMVEAKLPPGFRFHPRDEELVCDYLMKKVAHNDSLLMINVDLNKCEPWDIPETACVGGKEWYFYTQRDRKYATGLRTNRATASGYWKATGKDRSILRKGTLVGMRKTLVFYQGRAPKGNKTEWVMHEFRIEGPHGPPKISSSKEDWVLCRVFYKNREVSAKPRMGSCYEDTGSSSLPALMDSYISFDQTQTHADEFEQVPCFSIFSQNQTSPIFNHMATMEPKLPANHATNAYGGAPNLGYCLDPLSCDRKMLKAVLNQITKMERNPLNQSLKGSPSLGEGSSESYLSEVGMPHMWNNY

SEQ ID NO: 37094 - protein, 56 aa, Glycine max
  Clone ID: LIB3242-107-C6_FLI.pep
SMAGFAPCPLSSLVTDAVRNMLNEFNENYRLGYRDGALYLGWKNRAMCTSSAWRCY

SEQ ID NO: 37095 - protein, 81 aa, Glycine max
  Clone ID: LIB3242-113-C8_FLI.pep
KLQPSDTINQEISLYNEKIPFLSIKIGGTSKFFIFTFQNITQNSESNKSLPPKKSPIPYEELRSHAEQMNYLTYLMAYERV

SEQ ID NO: 37096 - protein, 265 aa, Glycine max
  Clone ID: LIB3242-115-A3_FLI.pep
LTENGKLCVLDFDIGDGNQYVSLLHELSARRKGAPSAVKIVAVAENGADERLNSVGLLLGRHAEKLGIGFEFKVLIRRIAELTRESLDCDADEALAVNFAYKLYRMPDESVSTENPRDELLRRVKALAPRVVTLVEQEANANTAPFVARVSELCAYYGALFDSLESTMARENSARVRIEEGLSRKVGNSVACEGRNRVERCEVFGKWRARMSMAGFRLKPLSQRVAESIKARLGGAGNRVAVKVENGGICFGWMGRTLTVASAWC

SEQ ID NO: 37097 - protein, 366 aa, Glycine max
  Clone ID: 700746662_FLI.pep
RKKGLCLILEMSLLSDLINLNLSDTTEKVIAEYIWIGGSGMDLRSKARTLPGPVSDPSELPKWNYDGSSTGQAPGEDSEVILYPQAIFRDPFRRGNNILVICDAYTPAGEPIPTNKRHAAAKVFSHPDVVAEVPWYGIEQEYTLLQKDIQWPLGWPVGGFPGPQGPYYCGVGADKAFGRDIVDAHYKACIYAGINISGINGEVMPGQWEFQVGPSVGISAGDEIWAARYILERITEIAGVVVSFDPKPIKGDWNGAGAHTNYSTKSMREDGGYEVIKAAIDKLGKKHKEHIAAYGEGNERRLTGRHETADINTFLWGVANRGASVRVGRDTEKAGKGYFEDRRPASNMDPYVVTSMIADTTILWKP

SEQ ID NO: 37098 - protein, 113 aa, Glycine max
  Clone ID: LIB3242-129-H11_FLI.pep
ESIVHHLTKAVHRREVSHLLAVIGWPPGKMGLTTVVVLERKVGALQGTVMRAAMIALKLMGIAVALGMMTRAPLMKMMTTTVAHCHLEKHFLIKWGQDVTQFVSALYIKCTPA

SEQ ID NO: 37099 - protein, 262 aa, Glycine max
  Clone ID: LIB3242-142-B10_FLI.pep
YSLSYCFETHRKRERERMGRGRVELKRIENKINRQVTFSKRRNGLLKKAYELSVLCDAEVALIIFSSRGKLYEFGSVGTTNTIERYQRSSFTPQDEHVECETQSWYQEVSKLKAKYESLQRTQRHLLGEDLGPLNIKELQNIEKQLEGALAQARQRKTQIMIEQMEELRRRERHLGDMNKQLRLKLEAEGFNLKATESLLSFTSAAGNSGFHFQQPPQTNPIDYQQPEPFLQIGYHQYVQSEASNVPKSMACETNFMQGWIL

SEQ ID NO: 37100 - protein, 259 aa, Glycine max
  Clone ID: LIB3242-146-C11_FLI.pep
FICGKRYKASIKHMGRGKVELKRIENKINRQVTFAKRRNGLLKKAYELSVLCDAEVALIIFSNRGKLYEFCSGHSTAKTLERYHRCSYGALEVQHQPEIETQRRYQEYLKLKSRVEALQQTQRNLLGEELEHLDVNDLEQLERQLDSSLKQIRSNKTQQMLDQLSDLHRKEEMLLETNNILRNKLEEINVALQPTWEAREQNAPYNCHPPQTEGYYETATAHCSSTLRIGYDSSGLNEAGGAAGASAQNASEFMHGWMN

SEQ ID NO: 37101 - protein, 228 aa, Glycine max
  Clone ID: LIB3242-173-C10_FLI.pep
ASETTPSQKKARGRPPGSGRKQQLAALGEWMNSSAGLAFSPHVITIGVGEDIVAKLLSLSQQRPRALCIMSGTGTVSSVTLRQPASTNASVTFEGRFQILCLSGSYLVAEDGGPLNRTGGISVSLSSPDGHVIGGGVAVLIAGSPVQVMLCSFVYGGSKTMSKQATTLKDESSEPPPQHNDKLASPASAPAPPGQNFLPLSAANLWPGSRPAELKSAHMHTGIDLTHG

SEQ ID NO: 37102 - protein, 94 aa, Zea mays
  Clone ID: 701160317_FLI.pep
EHATKRSFCLIHLSSFCLFKARQLRKATISGMQGFAIAPNFFGFMYKAPAFRPILLLHLRLHLEEETATGRLPARRRGAGTGEAAFLRSYEQFL

SEQ ID NO: 37103 - protein, 516 aa, Glycine max
  Clone ID: LIB3242-192-A8_FLI.pep
SAITKGWATVLHIAVGANHESFVEELLKLMSREDLELQDIKGNTAFCFAAAVGNVHIAERMRRKNASLPMIRGGEGVTPLHLAVLQGRSEMAWYLFDKTRETLYDDDWFQVFLICVNSRLYELALEMLNQKESLAFARGDNDETALHVLARKPLDCGCRSPLRYPKHVLHLCKNMKDPPVLKLTRRVWDIFLTLDDSKMMTAIREPFQVTFIAAEVGNFEFLSVIMSTYPDLIWELNTMGQSIIHVAALHRHASIFNLIHEIGPSKDLLLTFWDDEGSTLLHSVAEIAPTDRLNVVSGAALQMMLELTWFEEVKKNMQPSYIERPNHEGIVPRELFTEKHKELLKKGESWMKRTASSCMVVSTLIATGVFSAAFSVPGGTKDDSGSPNYLKKHLFTVFAISDALALTLSTASTLIFLSILISRYAEEDFLRSLPFKLIFGLVSLFLSIVSMMGAFSSAFFITYYHAKTWVVPITIAVFVLFPILLFIYLQFRLWHDIVYSHYMCGSLFRPKKRMIH

SEQ ID NO: 37104 - protein, 266 aa, Glycine max
  Clone ID: LIB3242-198-H4_FLI.pep
CEILELDPSAASQHSKSSSKQGSRCVKPPIIYGDVSRPKPMTVFWSSLAQSFTKRPMKGMLTGPVTILNWSFVRNDQPRSETTYQIALSIKDEVEDLEKAGITVIQIDEAALREGLPLRKSEQAHYLDWAVHAFRITNVGVQDTTQIHTHMCYSNFNDIIHSIIDMDADVITIENSRSDEKLLSVFREGVKYGAGIGPGVYDIHSPRIPPTEEIADRINKMLAVLEKNILWVNPDCGLKTRKYTEVKPALTNMVAAAKLIRNELAK

SEQ ID NO: 37105 - protein, 923 aa, Glycine max
  Clone ID: 700987649_FLI.pep
CTLQSAKMPLRLEIKRKLAQRSERVKCVDLHPTEPWILASLYSGTVCIWNYQSQTMAKSFEVTELPVRSAKFIARKQWVVAGADDMFIRVYNYNTMDKVKVFEAHTDYIRCVAVHPTLPYVLSSSDDMLIKLWDWEKGWICTQIFEGHSHYVMQVTFNPKDTNTFASASLDRTIKIWNLGSPDPNFTLDAHQKGVNCVDYFTGGDKPYLITGSDDHTAKVWDYQTKSCVQTLEGHTHNVSAVCFHPELPIIITGSEDGTVRIWHSTTYRLENTLNYGLERVWAIGYLKSSRRVVIGYDEGTIMVKLGREVPVASMDNSGKIIWSKHNEIQTVNIKSVGADVEVADGERLPLAVKELGTCDLYPQNLKHNPNGRFVVVCGDGEYIIYTALAWRNRSFGSALEFVWSSEGEYAVRESTSKIKIFSKNFQEKRSVRPTFSAERIFGGTLLAMCSNDFICFYDWAECRLIYRIDVNVKNLYWADSGDLVTIASDTSFYILKYNRDVVVSHLDSGRPVDDEGVEDAFELLHEMNERVRTGIWVGDCFIYNNSSWRLNYCVGGEVTTMFHLDRPMYLLGYLANQSRVYLIDKEFNVMGYTLLLSLIEYKTLVMRGDLERANEILPSIPKEHHNSVAHFLESRGMIEDALEVATDPDYRFDLAIQLGKLDVAKSIAIELQSEPKWKQLGELAMSTGKLEMAEECLKYAMDLSGLLLLYSSLGDAEGISKLAILAKEQGKNNVAFLCLFMLGKLEDCLQLLVESNRIPEAALMARSYLPSKVSEIVAIWRKDLNKVNPKAAESLANPEEYPNLFEDWQVALAVESKAVETRNVYPPAEQYVNHADKSHITLVEAFRSMQIEEGEEHLENGDSTHELTERNGEEHYTEEQEEQNGEEGSQEEAVVVDADSTDGAVLVNGNEADEEWVLAPHH

SEQ ID NO: 37106 - protein, 98 aa, Glycine max
  Clone ID: LIB3242-270-H9_FLI.pep
EQMLVEANRSLTVKLEEINSRNHYRQSWEAGDQSMPYGGGGPENSHSHSHSQGFFQPLECNPTLHIGPDYRYNAVASDQITATTQPQQVSGFIPGWML

SEQ ID NO: 37107 - protein, 462 aa, Zea mays
  Clone ID: 700042758_FLI.pep
NPSAARAEPEPEVERSHAPSAACSFLALATRHHHTHPNLARASSRVWRRRRRRRHASGSPFPLASTMALRLNDVALCLSPPLAARRRRSRSRSSGRFVAVASMTSAVSTKVENKKPFAPPREVHVQVTHSMPPHKIEIFKSLDDWARDNILTHLKPVEKCWQPQDFLPDPASEGFHDEVKELRERAKEIPDDYFVCLVGDMITEEALPTYQTMLNTLDGVRDETGASPTAWAVWTRAWTAEENRHGDLLNKYMYLTGRVDMRQIEKTIQYLIGSGMDPRTENNPYLGFIYTSFQERATFISHGNTARHAKDFGDLKLAQICGIIASDEKRHETAYTKIVEKLFEIDPDGTVVALADMMRKKISMPAHLMFDGQDDKLFEHFSMVAQRLGVYTARDYADILEFLVDRWKVVNLTGLSGEGNKAQDYLCTLASRIRRLEERAQSRAKKAGTLPFSWVYGRDVQL

SEQ ID NO: 37108 - protein, 352 aa, Glycine max
  Clone ID: LIB3242-297-B4_FLI.pep
VWSVMSPPTLVTEEEGRSTVASDSSQSLDCFSQNGAGLKERNYLGLSDCSSVDSCASTVPSLCDEKKENMNLKATELRLGLPGFQSPEREPDLFSLSSPKLDEKPLFPLLPTKDGICSSGQKAVVSGNKRGFADTMDGFSQGKFAGNTGMNAVLSPRPSGAQPSAMKETPSKLSERPCSTNNGTGHNHTGASISGSAPASKAQVVGWPPIRSFRKNSMATTTNKNNDEVDGKPGVGALFVKVSMDGAPYLRKVDLRSYTTYQELSSALEKMFLSCFTLGQCGSHGAPGREMLSESKLRDLLHGSEYVLTYEDKDGDWMLVGDVPWEMFIETCKRLKIMKGSDAIGLGMHSQH

SEQ ID NO: 37109 - protein, 147 aa, Glycine max
  Clone ID: LIB3242-301-G2_FLI.pep
RIIGGLTSRKKMKTPSDAAEKARIHSSRRQHFQQQQQQLKQQQQQFQFNLDMKGIINLLEENDHRVPSISQEAQEMASMYPNTSEHQGYFYSIFNVNDNDNNVSAPESSNEEILWDGLWNLDDVLCNFNAASATSKASLHNLVSPFC

SEQ ID NO: 37110 - protein, 341 aa, Zea mays
  Clone ID: LIB3245-134-E2_FLI.pep
FHFTSGPKIYGLTWALQYINLFMINTGFIILAGQALKATYGLFSDDGVLKLPYCIAISGFVCALFAIGIPYLSALRIWLGFSTLFSLMYIVIAVVLSSRDGITAPARDYSIPKSSQSTRVFTTIGSIADLVFAYNTGMLPEIQATIRPPVVKNMEKALWFQFTIGSLPLYAVVFVGYWAYGSSTSGYLLNSVTGPVWVKAVANLSAFFQTVIALHIFASPMYEFLDTKYGSGRGGPFEIHNVAFRVAVRGGYLTVNTLVAAVLPFLGDFMSLTGALSTFPLTFVLANHMYLMVKGPKLGAIQKSWHWLNVLGFTALAVAAAVSAIRLIMRDSSTYHFFADL

SEQ ID NO: 37111 - protein, 197 aa, Glycine max
  Clone ID: LIB3242-312-F1_FLI.pep
STSKMYPTVDEHDEVYAAHHRHPGYVLPVVVPPNYGPPQIPSYAPPYISNSVSVRGPVIRTQRWSTGLCRCTDDPGNCLVTCFCPCVTFGLIAEIVDKGNTTCTCAGAIYGTLLALSGLACLYSCYYRSKLRVQYDLPEAPCMDCLVHFCCETCALCQEYRELKNRGFDLSIGWEANMERQRQGAIVSPVMSQSMTR

SEQ ID NO: 37112 - protein, 82 aa, Glycine max
  Clone ID: LIB3242-315-H7_FLI.pep
FIHESVRLMHEAGYEIGNLDATLILQRPKLSPHKDAIKANLSALLGVDSSVVNIKAKTHEKVDSLGENRSIAAHTVVLLMKK

SEQ ID NO: 37113 - protein, 59 aa, Glycine max
  Clone ID: LIB3242-349-C8_FLI.pep
IHIPYNCTFSTILKYDTSHSCIMQHCYNFRPFFFPFSFTGYVSISSCTLEIHYDDLLTS

SEQ ID NO: 37114 - protein, 160 aa, Glycine max
  Clone ID: LIB3242-355-C5_FLI.pep
RTVLQTEGSFPALVNRLLVIKSESLEFSPVENAIGMIETRTAALRNELEEPRSSEGDQLPRLQSLQRILQGSVAVQVNSGVLSVCTAFLSGEPATRLRSQELQQLIAALLEFMAVCKRAIRVHFRLIGEEDQDFHTQLVNGFQSLTAELSHYIPAILSEL

SEQ ID NO: 37115 - protein, 103 aa, Glycine max
  Clone ID: LIB3242-356-D11_FLI.pep
SHQEPAAVSAPPKHQESFHHERCPDLNLELTISPPHHPQPDHPHLKTLVTNSNLCFPCSLGLHNSKDCSCALHTSTANATATGYDFLALKTTVVLDYRTLHMK

SEQ ID NO: 37116 - protein, 163 aa, Glycine max
  Clone ID: LIB3242-382-C7_FLI.pep
TFFNKNNNILSLFLSLKLMAEAQSGQASEGIKLFGTTITLHGRERKEDRNDSEDGTEEIKRPDKIIPCPRCKSMETKFCYFNNYNVNQPRHFCKGCQRYWTAGGALRNVPVGAGRRKVKPQFGQEERLALDEWHVAAVAHGDFRQLFPSKRRRMSSGGQRQPC

SEQ ID NO: 37117 - protein, 195 aa, Glycine max
  Clone ID: LIB3242-387-A2_FLI.pep
NDESNPSIPSVCPNNHQPQEVEVNLVITDYCMPGMTGYDLLKKIKESSSLRNIPVVIMSSENVPSRINRCLEEGAEEFFLKPVRLSDLNKLKPHMKKTKFKDQKQETVERFEDSEVQQQQSQQQIIIQNEHHQAPKLQVLQPESESESHPQPTIEQQQQILQQANNNNKRKTMEQGLSPETDRTRPRYSGIATVV

SEQ ID NO: 37118 - protein, 341 aa, Glycine max
  Clone ID: LIB3242-387-D3_FLI.pep
NQKEKMGRQPCCDKVGLKKGPWTAEEDKKLINFILTNGQCCWRAVPKLAGLLRCGKSCRLRWTNYLRPDLKRGLLSEYEEKMVIDLHAQLGNRWSKIASHLPGRTDNEIKNHWNTHIKKKLKKMGIDPVTHKPLSNKTEQTQAQPDEQQTHQPLQEQQEEPIPVEKDTKFEPEKEQNKEPEKPESSIESLTITEEAKEEDQIMTPLFDSWELMNEFCTDEVPIIESNEILVPSAPSSTSPTTTTTTSSSTSTSASSNSNSSNFLEDLLLPDFEWSDDYNDTNFDNNNNSSMALWDDDFIRSWNLLINDDDGDGDRKQVFEAPINQYPRVIMDSDSWAYGLF

SEQ ID NO: 37119 - protein, 176 aa, Glycine max
  Clone ID: LIB3242-389-C8_FLI.pep
RRNTQEWEEVSKTPKVDGHQWRKYGQKEILKAKYSRNYYRCTHKYDQNCQATKQVQRIQEDPPLYKTTYLSHHTCNDLLNYEIIPDSNNNSPSDTSILLSFNNTFPTPTKQECPFLSSFPSPTSVKKLEEVIPASSSRHNNNVTLPLPDPWDVMSNSAMCDSVGLDDVNLFLDFDD

SEQ ID NO: 37120 - protein, 32 aa, Glycine max
  Clone ID: LIB3242-389-D6_FLI.pep
FRDDITSKGKLLQKIMSCVLLPFKLETQNIQS

SEQ ID NO: 37121 - protein, 227 aa, Glycine max
  Clone ID: LIB3242-431-H1_FLI.pep
MLSHRAEPSPVEDLAIALKTIIDVEREKIKNIKSSAKSQLSLSIFRNYSFLSLSPATACEIKLILRWFPIMQLDDWVLCRIYNKKGTIEKFQPSSDVVVSRKMESSEIEDRKPEILKSGGGCLLPPVPPPQAKAAVKTDYMYFDPSDSIPKLHTDSSCSEHVVSPEFASEVQSEPKWKEWEKSLEFPFNYVDATLNNSNSFTTQFQGNNQMMSPLQDMFMYWPNKPF

SEQ ID NO: 37122 - protein, 314 aa, Glycine max
  Clone ID: LIB3242-438-G6_FLI.pep
GTMRNVPVGAGRRKNKNSTSHYRHITISEALQAARIDAQNGTHLPTLKGNGRVLSFGLDAHAPICDSMASLMNLGEKKALNGTRNGFHHGFEDQRLPVPCKSGENGDDSSTTSSITISSPKGENNKSTFQQQPLPQNHGFLPQVPCIPGVPWPYTWNSPVPPPALCPSGFPLPFYPATFWNCGMPGNWNVPWFSSSSPASNLKSPSSSPNSPTLGKHSRDSDMIKQDSLHKEEASTPRNGSVLVPKTLRIDDPSEAAKSSIWATLGIKNESVSGGAMFKAFQSKKGEKNHVEASPMLMANPAALSRSLNFHENS

SEQ ID NO: 37123 - protein, 212 aa, Glycine max
  Clone ID: LIB3242-441-D11_FLI.pep
PVNTIQGSIAMGLSILRSTSISTPISSSKSKPIFSTLVRSSFASISPTKCVTPTTLFVSATPFFTASPKRGFRGGIVAMAAAGSLRKSEEEWRAVLSPEQFRILRQKGTEFPGTGEYDEFFDEGVYNCAGCGTPLYRSLTKFNSGCGWPAFYEGIPGAINRNPDPDGMRTEITCAACGGHLGHVFKGEGFPTPTNERHRVNSISLKFAPANS

SEQ ID NO: 37124 - protein, 214 aa, Glycine max
  Clone ID: LIB3242-441-E4_FLI.pep
HISIMYTSFKPNSHNHKHQKDHNVTTTTTTNTKYSEISHFSHKQHKLAFDYSESPFKCDGCKELGIGSRYKCSICDFDLHTHCSIPSPSLFHPFYPKCSFHFLSQPPGDTSRYCNACEKPVKGFLYHCFSCGFDLHPCCAKLPTVLGSDEHGVRLFLYRKVSSACHRCGRKGSGWSYRSSCKRYNLHVACVREMVVESWHEGGGLMNVVESGLS

SEQ ID NO: 37125 - protein, 265 aa, Glycine max
  Clone ID: LIB3242-444-D2_FLI.pep
MGRLPSFPIKGEAVTNLDFIRKRKISGDFNMIMDQKIYTCEQPQCPYSEIHHGFADRNSRDNHRLSCPYRGSASTDYGGSNFHVNEAKPVIFPQQSFVQPKPTTTPSVVNLVPSVIDLTGLGVPEDGKKMITDLMSIYDTNVQSNKNLSSSNHVSAENPNLPQPGIQQQHDNFFRSQGISMEGNFFEEANMSNNNHHMFAREEGQFDRFKALNAPPFETNHNNNFHLMFGSPCDLASFDFKEDMQGGVVGMDALQKQPDISIWYQ

SEQ ID NO: 37126 - protein, 248 aa, Glycine max
  Clone ID: LIB3242-448-A11_FLI.pep
RQKGNWMSSAQLWSTQKTKSRNEEDDRSVPANPINGNSCVLEKEGSQVPRFGLMARASELSHSNSKSVGGDISSGSSLLRVEVQSQPQPPQHMQQNPRKQRRCWSPELHRRFVDALQQLGGAQVATPKQIREPMQVEGLTNDEVKSHLQKYRLHVRRFPVSSTGQADNGSWMSQDESGDKSKGNNMSQSGSPQGPLTPLILGGGGGGSAKGLSSPGQNSVDGEDEQSDCRNWKGGLHHHQLEADNQCL

SEQ ID NO: 37127 - protein, 67 aa, Glycine max
  Clone ID: LIB3242-453-H1_FLI.pep
IPITRWNGSNLIRLQADPAAFAQARLLEQNDQQTQLADLTLDLNSVHQQMQQGQNLSTSLLSRTEIP

SEQ ID NO: 37128 - protein, 346 aa, Glycine max
  Clone ID: LIB3242-465-C3_FLI.pep
RIRMMAATMEQQQQRPQQQDEAEEIQHGPLPVEQLQASGIAATDVKKLKDAGICTVESVAYTPRKDLLQIKGISEAKVDKIIEAASKLVPMGFTSASELHAQRDAIIQITTGSTELDKILEGGVETGSITELYGEFRSGKTQLCHTLCVTCQLPLDQGGGEGKAMYIDAEGTFRPQRLLQIADRFGLNGADVLENVAYARAYNTDHQSRLLLEAASMMVETRFAVMIVDSATALYRTDFSGRGELSARQMHLAKFLRSLQKLADEFGVAIVITNQVVSQVDGSAVFAGPQIKPIGGNIMAHATTTRLALRKGRGEERICKVISSPCLAEAEARFQICAEGVSDVKD

SEQ ID NO: 37129 - protein, 317 aa, Glycine max
  Clone ID: LIB3242-470-B8_FLI.pep
PTLKLETFTKQRSMVSKNPNPSEAFYLDPSGMSLPGILPFAAAATATADSFEDPAKKTRKPYTITKSRESWTEPEHDKFLEALQLFDRDWKKIEAFVGSKTVIQIRSHAQKYFLKVQKSGTNEHLPPPRPKRKAAHPYPQKASKTAPVLSQVSGSFQSSSALLEPGYILKHDSSAMPKTPIINTAVSSWSNNSLQKTTSVLHGQKQKVNNCCSSSRSPRAQLVGESNGQRNNSHPLRVLPDFAEVYSFIGSVFDPNVTGHVQKLKRMDPIDVETVLLLMRNLSINLASPDFEDHRRLLASYEVEPEVDKYKCRLNHA

SEQ ID NO: 37130 - protein, 175 aa, Glycine max
  Clone ID: LIB3242-479-E7_FLI.pep
FKIMVIYGPSLSVYCGSWVRDGESNWQDRCSPQKLSGSGRRSITCKFESVRLSRACSVALTTLLTTAAVIASVAAADEPETLSNIPQTLSGECTLPKDCKKARIQKPKSRKAESCTIKCVTTCIRGGDGSPGEGPFNVIRPLVVFKQGFRTRQYCLVECSDICNLISDAVVTKTR

SEQ ID NO: 37131 - protein, 232 aa, Glycine max
  Clone ID: LIB3242-490-B6_FLI.pep
GDTSQKQSSISDYDWNADEELLLLEGIETYGFGNWNEVAEYVGTKTKSQCIDHYNAVYMNSPCFPLPDLSHVMGKNKVELCAMAKGHEAKKEFSLTAELTLKEEALFTDRINYEESKNAEINNQTMSRLTSACGKAYPSTIKKASNVIQNNGGVKVEESRADWSIGEKKPKLSGEDRPSMTDLSGYSFKREEFDVEYDNDAEQVLADMEFKDTDTKAEYAMKLHVLHIYSKR

SEQ ID NO: 37132 - protein, 477 aa, Zea mays
  Clone ID: LIB3061-031-A3_FLI.pep
AGAAGMATALARRGAAALARWRGMCSSSASAPRRAAALSSEELMRMEQDCSAHNYHPIPMVFSKGEGSHIVDPEGNKYIDFLSAYSAVNQGHCHPKVLRALIEQAERLTLSSRAFYNDKFPIFAEYLTSMFGYDMMLPMNTGAEGVETAIKLARKWGYEKKHIPKNEALLVSCCGCFHGRTLGVISMSCDNDATRGFGPLVPGHLKVDFGDIDGLKKIFEELGDRICGFLFEPIQGEAGVVIPPDGYLKGVRDLCSKHNVLMIADEIQTGIARTGKMLACDWENIRPDMVILGKALGAGVVPVSAVLADRDVMLCIRPGEHGSTFGGNPLASAVAVASLKVVRDEGLVERAAKLGQEFRDQLQKVQQKFPQILREVRGRGLLNAVDLNNDALSPASAYDICIKLKERGILAKPTHDTIIRLAPPLTISPEELAEASKALSDVLEHDLPQLQLQKQIKKPESEAEKPVCDRCGRDLYG

SEQ ID NO: 37133 - protein, 537 aa, Glycine max
  Clone ID: LIB3242-516-A9_FLI.pep
PIQFPIFESTLSLSTMEPSSISPPPAPPATAVPFPAEPNDHLPPPIPEPPSNHPPYAEMIYTAIEALKEKDGSSKRAIAKYIEQVYTQLPPNHSDLLTQHLNHLKSRGLLQMVKKSYALPRSVPVSVPGPAPTQGTSAVPAAVVAITTTPRPRGRPRKAQNPVQNSPLPQDTVNVQVQQNAEPVWAALGLADEPVQAEGSGKKRGRPKKSGILGAGLTKRGRPPGSGKKPGRPPKATTTDVSASAGPKRRPGRPPKNQSQPTLIPFAPAVSAASVDTEHVAASAETAPVDADAALGPRARGRPKKYADEMIAAGRGRGRGRGRGGGGRGRGRGRGELPAQPRKPGARPVGRPKKGSTSASTSQNAANEDLRRKLEHFQSKVKESLAVLKPHFNHESPVTAIAAIQELEVLGTMDLNVPLRDETLPHQVELPPPQPPVQQQQQPPQQQLSSHHSSHHKQHLAPQQLPPQPPIFQQTYPSISSAAVPPSPAFAAVPATAAAAATATATAIPAPGTASFPPTVSSLGIRPRLGRITWSSI

SEQ ID NO: 37134 - protein, 197 aa, Glycine max
  Clone ID: LIB3242-542-B11_FLI.pep
RHFFHRPSKAYTTGTRKRRKVHTDDEGIETRWHKTGKTRAVFASGGAVKGFKKILVLYTNYGRQKKPEKTYWVMHQYHLGNTEEEKDGELVVSKVFYQTQPRQCVNPIIIKDPYEKMLNGGSVQDSTNTSITKTTATLLDCYNAPYIDYDHAHASHNRESSSQLIIPSSVVQVDGSYIRSTMDAKKARFESNTGKSF

SEQ ID NO: 37135 - protein, 210 aa, Glycine max
  Clone ID: LIB3242-550-A8_FLI.pep
TEQHIVELITITTKLTSEEKETETRRVIDRSVRRRRRRRWSSRWSPNHIRGQVTAVHGHSTRLRLSMPAVSAAGDWRRMSISGGGALFLRRKPVVCRVVERGSDHKNSPGSHQPAGNKSSDDLPLRSGERDGESVGNRRRSAGLLRKEGGGNRKDVETAVKSNGGAGRGGRLTERDVSDGSRTREDADSHVLAVTELRDGLDDVVSARHF

SEQ ID NO: 37136 - protein, 135 aa, Glycine max
  Clone ID: 700831056_FLI.pep
GDAVKYVKQLQERVQTLEEQAAKRTLGSGVLVKRSIIFADDETSDSHCEHSLPEVEVRVSGKDVLIRTQCDKHSGHAAMILSELEKLYFIVQSSSFLPFGNSKTDVTIIAQMNKENCMTAKDLLGRLRQALVGHN

SEQ ID NO: 37137 - protein, 260 aa, Glycine max
  Clone ID: LIB3242-677-A1_FLI.pep
SSNLESEFDLIRSVIDSFPLISMDTEFPGVVVRPDAGDPSFRHRQPVAHYAVLKANVDRLHLIQIGLTLSDNAGNLPTLGTSNAFIWEFNFKDFDVARDAHAHDSVELLRRQGIDFEKNRDFGIDSFRFAELMMSSGLVCDDAVSWVTFHSAYDFGYLVKLMTHRTLPEELREFLRLVRVFFGDRVFDVKHLMRFCSNLHGGLDRVCQSLKVERVIGKSHQAGSDSLLTLHAFQNIRENYFDKADGLVQYAGVLYGLEVF

SEQ ID NO: 37138 - protein, 143 aa, Glycine max
  Clone ID: LIB3242-679-C12_FLI.pep
VLPLQMQGVEEFPPSNFSGYTSGNVSQWPIEEFLGLNELSQYYNYMDGSSKADSGKLGDSDSSVLRSGEEDMDDDGFLGRVPDSSWTVPQIPSPPTASGLYWPKVPQYTSDSAMSVPDICFSHVRQPHHAQHNSNVSKRRRQL

SEQ ID NO: 37139 - protein, 188 aa, Glycine max
  Clone ID: LIB3242-679-C9_FLI.pep
GENRRGRFLKVSEASVSRNRSTIIVPAGSSRDEGWAAFRNVLAEINEASRLFILPNQQNSESSERLVGLSDDVGAGFISGHSTQPATSSELNVDRSVDLPPQDEIGNLGVSKVIRADQKRFFFDLGSNNRGHFLRISEVAGSDRSSIILPLSGLKQFHEIVGHFVEITKDRIEGMTVANVRTVDPPQR

SEQ ID NO: 37140 - protein, 179 aa, Glycine max
  Clone ID: LIB3242-683-F2_FLI.pep
IPVSTGLYMNPPTPGSPSGSDVSESSVLVASSSHVFRPVPRTGAVLPPVETTTTLSSNDPPTSLSLSLPGVDSSEVSNRTTEPIHAAPPPPPQPQPQPQPLNTIPLLPMMTVPSVSPTGMAPFNFSAEFLAVMQEMIRKEVRSYMELHNQKNGMCFQAAVNDGFRNASVKRIGISRVDS

SEQ ID NO: 37141 - protein, 327 aa, Glycine max
  Clone ID: LIB3242-684-D12_FLI.pep
QKATYFAEALARRIYRVFPQQHSLSDSLQIHFYETCPYLKFAHFTANQAILEAFQGKNRVHVIDFGINQGMQWPALMQALALRNDGPPVFRLTGIGPPAADNSDHLQEVGWKLAQLAERIHVQFEYRGFVANSLADLDASMLDLREDESVAVNSVFEFHKLLARPGAVEKVLSVVRQIRPEILTVVEQEANHNGLSFVDRFTESLHYYSTLFDSLEGSPVNPNDKAMSEVYLGKQICNVVACEGMDRVERHETLNQWRNRFGSTGFSPVHLGSNAYKQASMLLSLFGGGDGYRVEENNGCLMLGWHTRPLIATSVWQLATKSVVAAH

SEQ ID NO: 37142 - protein, 141 aa, Glycine max
  Clone ID: LIB3242-689-D6_FLI.pep
LMNEIQILIVAITIHKRLDFGMERVLSVDEISEQYWVAASSSSSSSSSSFKSKMNRSESEWAFQQFLQQEAASSSSNSDHDDDHHHAKLKKESNTNIPVTLHVDSQDYHAILKTKLNLACAAVAMTRVCSFFGTTPCFFFF

SEQ ID NO: 37143 - protein, 100 aa, Glycine max
  Clone ID: LIB3242-694-A3_FLI.pep
RAGGHSGNARRDERRRLCLRGASSVGVRHRARRVRRGERWRVAAEGGEWRVPPDGGVSDSGEQPPHGEAHGGVGGDGEQPHLLHRAEDQISASLRKLKVT

SEQ ID NO: 37144 - protein, 238 aa, Glycine max
  Clone ID: LIB3242-698-A1_FLI.pep
IFISSTGDQAQSMSGNGAMAFDVEYARWLEEHNRQTNELRAAINSHAGDIELRTIVDNFMTQFDDILRLKGIAAKADVFHILSGMWKTPAERCFMWIGGFRSSELLKLLESQLEPLTEQQLMGIYNLQQSSQQAEDALSQGMDALQQSLSETLANGSPSTSGSSGNVASYMGQMAMAMGKLGTLDGFLRQADNLRQQTLQQMLRILTTRQSARALLAISDYFSRLRALSSLWLARPRE

SEQ ID NO: 37145 - protein, 582 aa, Glycine max
  Clone ID: LIB3242-698-A2_FLI.pep
NYIWAKGALFMGGVEDEEPSMKRMKLSSKGLVGLSNGSSKEPVGGLSSDLMARPLPSKGDEHVGSKGVIKKEEFVRIIAKALYSLGYGKSGAHLEEESGIPLHSPGVNLFMQQILDGNWDDSVATLYKIGLADESMVRSASFLILEQKFFELLNGEKVMEALKTLRTEIAPLCINSSRIRELSSCLVSASSRLDILRVRSRSKLLEELQKLLPPTVMIPEKRLEHLVEQALILQREACPFHNSLDKEMSLYSDHHCGKDQIPSSTLQILEAHDDEVWFVQFSHNGKYLASASKDQTAIIWEVGINGRLSVKHRLSGHQKPVSSVSWSPNDQELLTCGVEEAIRRWDVSTGKCLQIYEKAGAGLVSCSWFPCGKYILCGLSDKSICMWELDGKEVESWKGQKTLKISDLEITDDGEEILSICKANVVLLFNRETKDERFIEEYETITSFSLSNDNKFLLVNLLNQEIHLWNIEGDPKLVGKYKGHKRARFIIRSCFGGLKQAFIASGSEDSQVYIWHRSSGELIEALAGHSGSVNCVSWNPANPHMLASASDDRTIRVWGLNCLHNKYQNVHSNGIHYCNGGT

SEQ ID NO: 37146 - protein, 309 aa, Glycine max
  Clone ID: LIB3242-705-G10_FLI.pep
DLTMYIALCSIEFDCDDDLFATAGVSRRIKVFDFSAVVNEPTDAHCPVVEMSTRSKLNCLSWNKYAKNQIASSDYEGIVTVWDVTTRKSLMEYEEHEKRAWSVDFSRTDPSMLVSGSDDCKVKIWCTNQEASVLNIDMKANICCVKYNPGSGNYIAVGSADHHIHYYDLRNISRPVHVFSGHRKAVSYVKFLSNDELASASTDSTLRLWDVKENLPVRTFKGHANEKNFVGLTVSSEYIACGSETNEVFVYHKEISRPLTCHRFGSPDMDDAEDEAGSYFISAVCWKSDRPTILTANSQGTIKVLVLAA

SEQ ID NO: 37147 - protein, 586 aa, Glycine max
  Clone ID: 700906354_FLI.pep
LMVAIMQQQQQHQQQQQNPSALVPPQLKNPQSSTTTTTAATTPLRSPSAQSPLSVVQPIRQPPPPSHPVVPVTTVEPGLTAVPTCPLVRVRLSDIAPYDGAPGGPYLRAMEALCGSLLRHNAALIELGNEDTALMRCGLEGARLFFRSRAHLGSGKGSRGVYMYRAGRALEDWDSSPPCMADIFRCMGKASRSALCAIARHLRLRSDVFNHLLDDAPLPANEVSSSVLVVTYSHASLQNGRGAIGGSKPTMNGEVEKGLLTLISSDTPGLQVCDPSGRWYLADSGFGPGDLLLITGKALSHATAGLCPAASYRASPDYFLSPNGGGRSSLAYRLMPQGNAILDCSPIAAAGHVIPQSYVRISVSQFMDDLAAEELIGSRCDNADAAAQHNVNKEPSLRSVLSDPLSGTFLEDAMLVSCGHSFGGLMLRRVIETSKCTLCNVEIETGSLIPNHALRAAAAAVKHEDDRRLFRNAALRKRRKEMGDQMDSMRRVNGENGDFTAADGLQRGVQYPFLVNEKVVIKGNRRTPEKFVGKEAVITSQCLNGWYLLKIIETGENVRLQYRSLRKLLNSPADQCPSQPIQNSSS

SEQ ID NO: 37148 - protein, 337 aa, Glycine max
  Clone ID: LIB3242-709-A2_FLI.pep
RSNLVGVNMAASGSSFSNITSFLRNQQPSSQPLDSSLFLSAPSIFVSGSRSMVSFEAEGGKGCNGSFFRAFDMDDNGDECMDEYFHKPEKKRRLSMNQVQFLEKSFEEENKLEPERKTKLAKDLGLRPRQVAIWFQNRRARWKTKTLEKDYEALHASFENLKSNYDSLLKEKDNLKAEVASLNEKVLARGKQEGHMKQQAESEEETKRLLHLQEQEPPQRLLLESVSEGEGSKVSSVVGGCKQEDISSARSDILDSDSPHYTDGVNSALLEHGDSSYVFEHDQSDMSQDEEDNLSKSLYPSYLFPKLEEDVDYSDPPESSCNFGFSEEDHALWTWAY

SEQ ID NO: 37149 - protein, 326 aa, Zea mays
  Clone ID: LIB3245-072-F6_FLI.pep
PGAENSVRRRRMAMVAAAEGSGRRDAEAELNLPPGFRFHPTDEELVVYYLCRKVARQQVPVPIIAEVDLYKFDPWDLPEKALFGRKEWYFFTPRDRKYPNGSRPNRTAGKGYWKATGADKSIVPMGSTRAAGIKKALVFYSGKAPRGVKTDWIMHEYRVAQADHTLGKKGSQKLDEWVLCRLYNKRNNWDKVKVEEQELEAAPRRQHHLQSAEDSMSNSFQTHDSDIDNVFELQNCYGNNMVQGQAMTPRNDIGVVTVKEDNDWFTDMNLDDLQASYNMAHTVNPNPAQTANLVAGQGHGYLQGYGYLQYMNSPSMKMWQTILPPF

SEQ ID NO: 37150 - protein, 52 aa, Zea mays
  Clone ID: LIB3245-075-G8_FLI.pep
KELASYLQANGRQHRSSFPNPPVYNNNPRNTSFRGMMDNDQIVITHPTNFFF

SEQ ID NO: 37151 - protein, 347 aa, Zea mays
  Clone ID: LIB3245-080-B2_FLI.pep
SERHLCDRVFDGLAPFGDLAFIAAVRTQALQLISFGDAISSSSRSPERLFRVVDMYEAVRDILPDLDPVFSDPYSAALHAEVSAMCNTLGSSIKGIFMELENLIRRDPARVAAQGGAIHPITRYVMNYLRAACGSRQTLEEVMEGDFGVNRGAPVAVDPDRPTSSLAVHIAWIMDVLQKNLDTKSRIYRDPSLASIFLMNNGKYIIQKVNDSELGVFLGNEWIKQMTTKVRRWSMDYQRTTWGKVTTVLQTGSPGIGGLPAKAMLQKMRMFNTYFEEIYAAQSEWVIADDQLRVDIRAAVEETVMPVYASLIAKLKSSPETGRDLYIKYTPEDVVAHIQHLFEGAAK

SEQ ID NO: 37152 - protein, 142 aa, Zea mays
  Clone ID: LIB3245-391-C11_FLI.pep
AEPAEHAGGHGVLVRQLPGDGVRRALPGPRLGHLLPRRLRLHPHGRHHRPQRVVQLGRPQPRADGVLRAVQVHGPGRDLCRPGGVVARAHRRRGQALHLAQLHRWHRVGQAVAVNLAAAHATTPHTVKKQSKTVYTDFILSV

SEQ ID NO: 37153 - protein, 160 aa, Zea mays
  Clone ID: LIB3245-421-H1_FLI.pep
ASSSRSFLSSLSMEGSLASLDGSRASRPFQLVSGSQTSSTPELGLVQRRRCAGKEDGSGQCATGSRCHCSKKRKLRIRRSIKVPAVSNKVADIPADEFSWRKYGQKPIKGSPHPRGYYKCSSVRGCPARKHVERCVDDPSMLIVTYEGDHNHSRVLAQPA

SEQ ID NO: 37154 - protein, 485 aa, Glycine max
  Clone ID: 700908603_FLI.pep
AISLLHNPLVIYGSGSGSILTLYLPGMEGSPVFSEHACLIGVLIRPFRQKAYGAEIQLVIPWDAIVTASSGLLHKRPQNTQKGLCNQEGNLYAAGSVPFSDTDKLDVCSRNKHEHLYFGSSSPLPIEKAMTSVCLVTIGDGVWASGVLLNSQGLILTNAHLLEPWRFGKEHVNGGGYGTNSEKISSMLEGTAYVVNRVESNQVSQTSPLKMPILYPFAANEQGGYKSSPTYDNHRNIRVRLDHIKSWVWCDAKVVYVCKGPWDVALLQLESVPDDLLPITMNFSRPSTGSQAFVIGHGLFGPKHGFFPSVCSGVVAKVVEAKTPQSYLSVQPEHLHNHEHFPAMLETTAAIHPGASGGAIINSDGHMIGLVTSNARHSGGAIIPQLNFSIPSAALAPIVNFSKAMEDLSLLRILDEPNEYLSSVWALMRPSYPNPHPMHDPPQSVTDNKSKEKGSRFAKFIAERKDIFNAGKSGVISKEVIASKL

SEQ ID NO: 37155 - protein, 406 aa, Zea mays
  Clone ID: LIB3245-425-H10_FLI.pep
VRMPTVTCNACNAGFDDEEQQRLHYRSEWHRYNLKRKVAGVPGVTEALFLARQAALAEGSKPASTPMLYSCALCGKEYRSSKAHEQHLNSRSHLLKASQEPNASIAGITIVKPLPERVSRRAPSAVEEDQDDDEEEEWVEVDPSEMELADESTSNMQEDEHSSKSDDDMDDLEELDISSCFMCDLKHDTIEDCMVHMHKKHGFFIPDSEYLKDPSGLLTYVGLKVKRDFICLYCNDRCQSFFSLEAVRKHMDAKGHCKLRYGDGGDDEDADLEEFYDYSSSYVDSEGKQLIAVDDLNNNIELGIGGSELVITNKSEKGTRVRTLGSREFMRYYRQKPRPSVAPDRALALSLASSYKSMGLVTVQSKEQMVRLKVLRAMNRTGVETMRNKIGMKSNVIRNLPKNCPH

SEQ ID NO: 37156 - protein, 131 aa, Zea mays
  Clone ID: LIB3245-437-E1_FLI.pep
TITRIPVTITNDYLSVSSLSCLRLTGRSLPRRSLPPGLADAFPYHTIPRTARAIPTTTWRLRPSLPKKRKPRERTSTVFMWPRTWKDTAEKRPMQMNWLRLTPIAMKHDSARNNRARDEKLKWSTLCPVSR

SEQ ID NO: 37157 - protein, 240 aa, Zea mays
  Clone ID: LIB3245-443-G4_FLI.pep
RNKILQRQDAPAAIMQANKLNDPEAVTKRSKLMLPPPQISDHELEEIAKMGSAGDPALADELGEGSTATRTLLASYSQTPRLGMTPLRTPQRTPAGKGDAIMMEAENLARLRESQTPLLGGDNPELHPSDFSGVTPRKKEIQTPNPMATPLASPGPGITPRISMTPSREGHSFGLTPKATPLRDELNINEVEMQDNTKLELRRQAELRKSLRSGFASIPQPKNEYQIVMPPITEDEKEEA

SEQ ID NO: 37158 - protein, 205 aa, Glycine max
  Clone ID: 701118081_FLI.pep
TVQEQSSVEKQNQHESEKKEENVSMLPNRGKDEKLTDSYKGRKKYKDVADAAQAAFESAEYAAAAARAALELSRSESHDPDDHYSPRLQPRKVEDGHDDVRPQLEEKEILSETQREDELEKSEDIISCNSTDEALKGATALVDGEIEADPLEEEVVFDNSDDETDNKQNRNQSPKWTSSGYGAGIVVNTTPQLDLQKRPISVRTR

SEQ ID NO: 37159 - protein, 247 aa, Zea mays
  Clone ID: LIB3245-453-G11_FLI.pep
EDQVQKASHTFSTLISLCSQELQRLGAIEEHSELGQGFHVAEKDMGIRGFGSLFGEQQSGDVANVGIDLFFDMLFDSLSKVDQFCLVPVPYKDVQLDINISPRLSSEYISYLENPVELLNEAAKAAEKDLWTLIQFTEDLRRRYGKEPRDMELLLKKLYVRRMAADLGISRIYPSGKMIFMKTNMNKKVFRLMTEAMTSETHRNSLSFAEKEIKAELLVNLPDTLLLNWLFHCLSDCYTVIPALVKY

SEQ ID NO: 37160 - protein, 122 aa, Zea mays
  Clone ID: LIB3245-457-H7_FLI.pep
RIISIWLTHTAEGDSSHARPRPRLISITFRRMGRAGTCPAPGPTESSGGRAHGHAMTKDAAAPSELPLPGTAVRSLHLTPTTRRPCSCRRHPPSSNSSGPRPRPPSRSLPRRRHGVPRPADR

SEQ ID NO: 37161 - protein, 374 aa, Zea mays
  Clone ID: LIB3245-459-A6_FLI.pep
EPPCFRSFEFPFVSCELVNSSDLPEYSPLGIRELMRTSLNFPTPVRLWGSPTRDGSPDAVLKNAAKRFMCTPSIMKKRHRDLLSPVPDIRTDKKPNTERDFMSSGISSTRVGKSCMDSVDDSADLVSPKESAFQKKLKLCHENKENLNEIADQGENEANAKHSSGILTPSSVDNHNTHKNGPNFRIPELNTTVQALSNSKDIIFSRSKPSEHVEKSAACIDADYEYLNILADTPGIKRGLESPSAWKSPVFTPFQDAYFMSPASRAFDALGLVKQINEQSASAVEEAHEVLANGSPWKQHNKENSDKENIENTALKHEHVTSKPPSILMVEARVLDFNECSTPVRKKDDKKVEMVLGGPATSPVTSSHLWINMR

SEQ ID NO: 37162 - protein, 432 aa, Glycine max
  Clone ID: LIB3055-013-G12_FLI.pep
HGFLSVIFSLLSRFVPTAPSSSLQLRKAPIPILILTLADIKATLASLSSIDFNFYGNRKSKKKKARLCFGFRRVKMLWLMRFSGFFSAAMLVILLSPSLQSFHPAEAIRSSHHLDGLLRLPPPRLSFRPAAPFRNAADGKCASSVPTSVCDPSLVHVAITLDVEYLRGSIAAVHSILQHSQCPENIFFHFLVSETNLESLVKSTFPQLNFKVYYFDPEIVRNLISTSVRQALEQPLNYARNYLADLLEPCVERVIYLDSDLVLVDDIAKLWSTSLGSRTIGAPEYCHANFTKYFTAGFWSDMRFASAFAGRRPCYFNTGVMVIDLVRWRKIGYSKRIERWMEIQKNDRIYELGSLPPFLLVFAGRVAPIEHRWNQHGLGGDNVKGSCRDLHAGPVSLLHWSGSGKPWTRLDSKHPCPLDALWAPYDLYGHAH

SEQ ID NO: 37163 - protein, 209 aa, Zea mays
  Clone ID: LIB3245-459-E10_FLI.pep
CFQHPHHLTVCSQHPDLCPVRLCNGRCSRRSSICGAVLCAQGRRRQQEDGGVRGRIGAGEARASGGRQLCGPRRDRQDPPWLQVQGDRRGVGDARAGAARARSAPRRQHDHHRLLDARDDWVRAAQTRQGVGGAQGHPRRHHVVGERAHPHHSLPGGGRRGLPPQARPPRRRLPPVQPDPVTACGAMLGARILNNNKKNPLLSFSLAWT

SEQ ID NO: 37164 - protein, 214 aa, Zea mays
  Clone ID: LIB3245-460-A3_FLI.pep
PWAVRMEYEIYKAANSIHGYCKVGELKPEKSIPDSILRQAKGLAIITEVKVGVMLTYKIGTGLVVARRGDGSWSPPSAISTCGLGYGVQAGGELADYIIVLRNKDAIKTFSGNAHMSIGAGVSASAGHFGRVAEADFRAGDGGYAACYTYSCSKGAFVGCALNGSVVSTRDSVNARFYGGPIKASEILLGSLPKPPAAATLYKALSVLFDKIEK

SEQ ID NO: 37165 - protein, 247 aa, Glycine max
  Clone ID: 700866569_FLI.pep
SYTLFFFFFFSLLACNMDMNSSGGACGWLYDYGFDIPVAGSDFMASDSGGFSWGPQSYNFKGPSNMSLEMEYSLDSTVMENGPSKRLRTESCASGSKACREKLRRDKLNERFLELSSILEPGRQPKTDKVALLSDAARVVIQLRNEAERLKEMNDELQAKVKELKGEKNELRDEKNRLKEEKEKLEKQVKLTNIQPSFLPQAPDAKGQVGSHKLIPFIGYPGIAMWQFMSPAAVDTSKDHLLRPPVA

SEQ ID NO: 37166 - protein, 211 aa, Zea mays
  Clone ID: LIB3245-469-C2_FLI.pep
RELDRHGRRTDYASIAKHLESANTMFSFIWWIIGFYWISAGGEEVIRDAPQLYWLCIVFLAFDVFFVVFCVALACIIGIAVCCCLPCIIAILYAVSDQEGASEDDIRQIPRYKFRRTDEPEKQDVDPMGPFGGIMTECGTNQPIEKVLAAEDAECCICLSAYDDGAELRELPCGHHFHCTCIDKWLHINATCPLCKYNIRKSNSSSGSEEV

SEQ ID NO: 37167 - protein, 408 aa, Zea mays
  Clone ID: LIB3245-471-D12_FLI.pep
QPVNSDNHAKYEDGDESESVEARNTRHHQQYESLNKKSSLKRRKDNNRSNSFHELHKDNVDIDCRFDTDGTENTSIGDWDNSPPQGGDVKAVKSGARLLGTKRFSKEKGSNGLSNVNKKLVKMGKKISTKKQKNDKTNRQFQENHKKADIVDLLHEDDGDEGTYIDCNEIRKQKTDDVRVKSRGKMQSGKKKVSRCQASDGSHNGGKEMKLSSDIEVCNRRGDGTTAANFEEIPKEKADAVKVKPKMQGDKKKTSKHQAGDGDKGAKFSCDIEGCDMSFSTQHDLSLHKRDICPVKGCKKKFFCHKYLLQHRKVHLDERPLMCSFPGCAKTFKWPWARTEHMRVHTGVRPYACTEPGCTQTFRFVSDFSRHKRKTGTRVTRKRNAAFDCSCTSTGFFSDGERSEGDGC

SEQ ID NO: 37168 - protein, 123 aa, Zea mays
  Clone ID: LIB3245-475-E2_FLI.pep
LTTSNQLALSKSNKPRLQPTTKGEERTCGLRFVHFISRPLKSSTLVLSPRKWWPLLQLHPAAPFCPPRPQPRQRPWPWPWPACSASRLTTAGLMRSSSSSSSSPSSSCWHGGLMQRSRLRSGH

SEQ ID NO: 37169 - protein, 294 aa, Zea mays
  Clone ID: LIB3245-476-H11_FLI.pep
QNEWYFFSHKDKKYPTGTRTNRATTAGFWKATGRDKPIYTKSCLVGMRKTLVFYRGRAPNGHKSDWIMHEYRLETTENVTAAPEEGWVVCRVFIKKRVEAVRRMADGAPPWFDGHVPGGFMAPAGLGSPRQLMHHHPNPAAAAPLLYSGQQLYHCKPELEYHHLLQPSQEALLQQLPQLVESPKPPPPAFIDQGSCSLQSPDEASGYNTTPQQPPPMTTEAAYMDDDSVTDWRVLDKFVASQLFSHGDGMAKEDGYPNPGQALFQAENKQPEEALDYASTSASGGGGGEANMWK

SEQ ID NO: 37170 - protein, 121 aa, Zea mays
  Clone ID: LIB3245-481-H7_FLI.pep
YTRSADTVRCSCCNTVNLVRPVNNIAHVNCGQCRTTLMYPYGAPSVKCAVCNYVTATGVNTVAPTPSARPTSDGSSYSGSSTSAPKSQSQNVTVVVENPMTVDDKGKLVSSVVVGVTAGKE

SEQ ID NO: 37171 - protein, 101 aa, Zea mays
  Clone ID: LIB3245-482-E1_FLI.pep
GINDQYNCIVSFVQTHMESELKQPQHASSSFCAANRSKKGPLVVLLQNQSRTHPLHALRCASQAHPSAWGSLRSTAAPTRTAKIIKQKEEKKRKKQLIRPP

SEQ ID NO: 37172 - protein, 128 aa, Zea mays
  Clone ID: LIB3245-491-G2_FLI.pep
CKLTEHDPGARSSCRRRRGVIQSSSSCRRSVIQSGCRCSGNSSSLTLTTCIRTRVGVSWIRSGSRRRRCPTPIRPCLQLLLDHAGNGGDPSTDLPPHLRAKIRHGAALREPPLLPPARALRYGVLVPA

SEQ ID NO: 37173 - protein, 91 aa, Zea mays
  Clone ID: LIB3245-492-C8_FLI.pep
SAALRAPERWAATSCSTRARRRAASAWSPSEEPGTRCPATSQGERSCLSRVSLQAKRFLTAKRASQLSGWQHYSNMYLRERGRESERESSY

SEQ ID NO: 37174 - protein, 397 aa, Glycine max
  Clone ID: 700866653_FLI.pep
LHCSKISNKGASVLNTFPKLTYLNLAWTSVTKLPKLSFLEYLNMSNCTIDSILEDDKAPLAKLILSGAMFMNEAEALLYANTNFLSFLDVANSSFHRFFFLSKMKVIEHLNLSSCMMGDDSVEMVACAGGNLKSLNLSGTRVSSAGLGILAGHVPHLEILSLSQTPVDDTAISFISMMPSLKDVDLSNTNIKGFLHQGRTDVNSLLSLMALQNLKLERLNLEHTQVRDEALYPLSSFQELRYLSLKSASLADISLYYLSSIPKLTNLSICDAVLTNYGLDMFKAPETLKLLDLKGCWLLTEDTILSFCRNHPQVEVRHELGTLFPVNQNGLNHSSPSRSTSKTMQMTKKKDQIPLSPYFVDQRLKYSRDELLALQFTSLPLASSSESGNSIFEKQLG

SEQ ID NO: 37175 - protein, 325 aa, Zea mays
  Clone ID: LIB3245-496-F10_FLI.pep
TSLDDYLPMRSTEVKNRTLTGDITSLRLITAVKTPYLPDGRFDLEAYDSLINMQIEGGSEGVIVGGTTGEGHLMSWDEHIMLIGHTVNCFGTRIKVIGNTGSNSTREAVHATEQGFAVGMHAALHINPYYGKVSTEGLISHFEAVLPMGPTIIYNVPSRSGQDIPPQVIETLSGYPNMAGVKECVGHERVKCYTDKGITVWSGNDDECHDSRWKYGATGVISVASNLVPGLMRSLMYEGENALLNEKLLPLTKWLFCLPNPIALNTALAQLGVARPVFRLPYVPLPLEKRIEFVRIVEAIGRGNFVGQQEARVLDDDDFVLISRY

SEQ ID NO: 37176 - protein, 113 aa, Zea mays
  Clone ID: LIB3245-498-F9_FLI.pep
GSDVSRSSATGAVDLESVAVHEIGHLLGLGHSSVPDAIMYPTIRTGTRKVELEADDVQGIQSLYGSNPNFKGATPTSPATSSREMDSSAGAGCRPDRVFVGVVAAVGLLLLVL

SEQ ID NO: 37177 - protein, 442 aa, Zea mays
  Clone ID: LIB3245-505-H11_FLI.pep
KYLKAAQELLDEIVSVWKSVKQKTDKGPSEAGKSDGKETDGGTKSEGVSFDPQESGANTAAELSTAEKQELQNKMAKLMTMLDEVDRKYKHYYHRMQLVMSSFDMVAGSGAAKPYTAVALQTISRHFRCLKDAINDQISVIRKKLGEDDDASGKEGKLIRLRYIDQQIRQQRAFQQYGMLQQNAWRPQRGLPENSVSILRAWLFEHFLHPYPKDSEKLMLSRQTGLTRSQISNWFINARVRLWKPMIEDMYKEEIGEAELDSNSSSDNVQRNKDKPPSSEEKEDHKTSTSQVCQTRQLGESKANIGGLMSFSGAPACGFHNDVNPDDSFMSLMLKAQRPGETDGSGLLHDAVAHHSDESARFMAYHLTEFGRYGNNVSLTLGLQHAENTQPGFPGVRDQDIYNSTAPLNVTSTSSEYDSASQIDQQQRQRFEVSPLMHDFVA

SEQ ID NO: 37178 - protein, 850 aa, Zea mays
  Clone ID: LIB3245-506-A7_FLI.pep
AGAGAMENGDVNEDERNGKKIRVQGGGSSGPACQVEGCGADLTAAKDYHRRHKVCEMHAKATTAVVGNTVQRFCQQCSRFHLLQEFDEGKRSCRRRLAGHNKRRRKTRPDTASCGTASIEDKISNYLLLSLIGICANLNSDNVQHSNGQELLSTLLKNLGSVAKSLEPKELCKLLEAYQSLQNGSNAGTSGTANATEEAAGPSNSKLPFVNGSHCGHASSSVVPVQSKATIVVTPEPASCKLKDFDLNDTCNDMEGFEDRQEGSPTPAFKTADSPNCASWMQQDSTQSPPQTSGNSDSTSTQSLSSSNGDAQCRTDKIVFKLFDKVPSDLPPVLRSQILGWLSSSPTDIESHIRPGCIILTIYLRLVESAWQELSENMSLHLDKLLSSSTDNFWASGLVFVMVRRRLAFMLNGQIMLDRPLAPSSHHYCKILCVKPVAAPYSATINFRVKGSNLLSTSSRLICSFEGRCIFQEDTDSVAENDEYEDRAIECLSFCCSVPGPRGRGFIEVEDSGFSNGFFPFIIAEKDICFEVSELESIFESSSIEHADANDNAREQALEFLNELGWLLHRANRMSKENVTDTSVATFSMWRFRNLGVFAMEREWCAVIKMLLDFLFIGLVDVGSRSPEEVVLSENLLHAAVRRKSVNMVRFLLRYRPNKNSKGTAQTYLFRPDALGPSMITPLHIAAATSDAEDVLDVLTDDPGLIGISAWSNARDGTGFTPEDYARQRGNDAYLNLVQKKIDKHLGKGRVVLGVPSSICSVITDGVKPGDVSLEICMPMSASVPGCLLCSRKARVYPNSTSRTFLYRPAMLTVMGVAVVCVCVGILLHTFPRVYAAPTFRWELLERGPM

SEQ ID NO: 37179 - protein, 271 aa, Glycine max
  Clone ID: 701145422_FLI.pep
TTLMDIDEWEFPSDDGYLDFNEEGGKQKQKQNSFGKLDSEGIFDMDYFCSSPPPPRVRTQLVPLPIQLEPKIGKAPEDILVKDIIKSSPMEVAIATPSENTKEFETVEADRVKVFFKIKEKSEFVDMKRGILAPMDAAGSLKFEDKGEAMEIITSPRRRVIEKDVCDKEEESTWEEDNNSGFNLWKWSLTGVGAICSFGVAAATICVLFFGSQQRNKLKQDQKIRFQIYTDDKRIKQVVQHATKLNDAISAARGVPMSRAHISVGGYYDGL

SEQ ID NO: 37180 - protein, 446 aa, Zea mays
  Clone ID: LIB3245-513-H1_FLI.pep
RGFNDAVSGFPDDGWSCLLNTDGAEDITVTINSSPNKLVGSHVSASPLFSAMGGGIMCAKASMLLQNVPPALLVRFLREHRSEWADPGIDAYSVASLRANPYTVPGLRAGGFMGNQVILPLARTLEHEESLEVIRLEGHGFSHEEVLMSRDMFLLQLCSGVDEDAPGACAQLVFAPIDESFADDAPLLPSGFRVIPLDAKTDVPTATTRTLDLASALEVGSGGSGMRASCDGSGTCATRSVLTIAFQFSFENHLRESVAAMAKQYVRGVMASVQRVAMAIAPSRLGSRIELKHPPGSPEALALATWIGRSYRAHTGTEIRWSDTEGADSPLMLFWKHSDAILCCSLKPPAFTLKFANSAGFDILETTMVNIQDLPLEAVLDEEGQKALSAQLPAIMQQGLAYLPGGVCRSSMGRQASYEQAVAWKVVGDDGAPQCLALMLANWTFI

SEQ ID NO: 37181 - protein, 606 aa, Glycine max
  Clone ID: 701157842_FLI.pep
LTMASSTSHPSFWSLLNLSASIPISSSVCMFPPSKKPSKATKRRHAWEVACNGNPRNRRDILIGLGGLYGATTSLTSNNTGSAFGASLSPPDPTNCVQPDPEKDPFCPPPPFKDYELPPHDDKTLPLRIRPAAHLVTDDYIAKYEEAVRCMQDLPPDDPRSFMQQANVHRAYCDGRGYNQKGFADYKLDVHGSWIFFPWHRWYLYFYEKILGKMIDDPTFALPFWNWDNPAGMRIPPIFTDKSSPLYDEHRNSDHVNAFIDLDYKKDHSPVKPPQTIIWPPVVKKNNSIVDNLIVNNLIKVYTAVASKTNSSPDSFLGPAFEVGSDPKKHFGSLESLHNTVHSWTGELEKPNHDMGLLATAARDPIFFAHHSNVDRMWNIWKTELLDGRRFDHKSDEWLESSFFFYDENSNYVRVKVKDCLDSKKMGYDYQRVDLPWLLAGELIKPKKEIIPLRSKPEASTFKTLQLPLLLESIERTNVKRPKPRSRNENEEEEGVEEVLVIDVEYDSTDGVRFDVFINDQGDNEIGPQDSEFAGSFVTLPHSPHVNHNNITRASFKLPLTYQLKDLGVTKDDDSISVTLAPIYGDKPVTIKDVRIKRVYPEVDDE

SEQ ID NO: 37182 - protein, 235 aa, Zea mays
  Clone ID: LIB3245-514-C3_FLI.pep
SRAVPFLLSSASPVPSTSASHRRRPHAELGIFLRLRAPFSTNCHGRFQHASFSSPVSRDCRGRRSKLEEADGFAMGSEGSSGPVVVPRNFRLLEELERGEKGIGDGTVSYGMDDADDIYMRSWTGTIIGPPNTVHEGRIYQLKLFCDTDYPDKPPTVRFQTRINMTCVNQETGLVEPSLFPMLGKWEREHTMEDILASLKREMSTPQNRRLYQPHEGNEDQRVEQKGLSLRCVVM

SEQ ID NO: 37183 - protein, 123 aa, Zea mays
  Clone ID: LIB3245-520-G8_FLI.pep
ASAAALISPAAVVRSWLLLAWVSTVAGNLSLLGSAANLIVCEQARRAQRNAYDLTFWNHIVFGVPSTLIVTAIGIPLIGRSTSDRSSYILHYMHNCMPRSYMHVLLSLICYIIAPAPDRSDTY

SEQ ID NO: 37184 - protein, 185 aa, Zea mays
  Clone ID: LIB3245-549-F2_FLI.pep
LFLCAAAAAAFRSSSSYARAKPTNPLPPVLRPTHPGAMTLGSSGAGSSVVVPRNFRLLEELERGEKGIGDGTVSYGMDDADDIYMRSWTGTIIGPHNTVHEGRIYQLKLFCDKDYPEKPPSVRFHSRINMTCVNHETGMVDPRKFGLLANWQRDYTMENILTQLKKEMAASQNRKLVQPPEGTFF

SEQ ID NO: 37185 - protein, 179 aa, Zea mays
  Clone ID: LIB3245-572-B10_FLI.pep
DMQSQIVCHGCRTLLFYPRGAPSVCCAVCHVVTNVPPPAMEMARLICGGCQTLLMYARSATTVRCSCCDTVNLVRPVSSIAHVNCGQCQTVLMYPYGAPSVKCAVCNFITNVGGVTPMIPLPPPALPASSGTSYIIPSISVPTNQPRNVTVVVENPMTVDDKGKLVSNVVVGVTSGGKK

SEQ ID NO: 37186 - protein, 196 aa, Zea mays
  Clone ID: LIB3245-572-C10_FLI.pep
RSVHRQRYRMGVGYKVAPDGTTTEKYWEPVEEDGEQQAGRAGRTRKPYRVELVGIICDAYLAVVRGIRRAIISGRAVRVNSQLKSHKRFAGAFRKYCDLVDNARLYSTNTIAGAKLIGWKDKDSRLLVDVDEIGLLDRVSRINDDANCVHELYPDGHPTGGAGSVWDELMASPVRASIQRELKEAILDSEACFPSP

SEQ ID NO: 37187 - protein, 373 aa, Zea mays
  Clone ID: LIB3245-584-F6_FLI.pep
HHHLLRSPTPVAPQPPAMACLTDLVNLNLSDNTEKIIAEYIWIGGSGMDLRSKARTLSGPVTDPSKLPKWNYDGSSTGQAPGEDSEVILYPQAIFKDPFRRGNNILVMCDCYTPAGEPIPTNKRYNAAKIFSSPEVAAEEPWYGIEQEYTLLQKDTNWPLGWPIGGFPGPQGPYYCGIGAEKSFGRDIVDAHYKACLYAGINISGINGEVMPGQWEFQVGPSVGISSGDQVWVARYILERITEIAGVVVTFDPKPIPGDWNGAGAHTNYSTESMRKEGGYEVIKAAIEKLKLRHREHIAAYGEGNERRLTGRHETADINTFSWGVANRGASVRVGRETEQNGKGYFEDRRPASNMDPYVVTSMIAETTIIWKP

SEQ ID NO: 37188 - protein, 108 aa, Zea mays
  Clone ID: LIB3245-584-H9_FLI.pep
RAALLRPRSTSFSDRFHMERAASSCASLLAQRRCYSVAAVVVKGCGRKAVEKVAKRIMGKEVNTAAASGEKTPWVPDPVTGYYRPAGGAKEVDAAELRARLLTKRIAN

SEQ ID NO: 37189 - protein, 96 aa, Zea mays
  Clone ID: LIB3245-588-G12_FLI.pep
IVQVAWILSIVIMGINIYFFCNSFISWLVHSELPRIVNVIISTLVFPFMAAYIAALIYLAFRKVNAAGIFPSVSASTGTEVEAWRQDGNIDDIGVH

SEQ ID NO: 37190 - protein, 128 aa, Zea mays
  Clone ID: LIB3245-591-H10_FLI.pep
PLQNSIKQLESAATKIYKEKKLLQAENWSLKTSKYTLKVREINDRLMMAERAFTNREGLVGRPWYKHMIYASSDQDDWGTKAFPGIVSAMDKAKKSNTTETWRLLQHEIYRVARAVSKASAVLDGKLT

SEQ ID NO: 37191 - protein, 170 aa, Zea mays
  Clone ID: LIB3245-595-C9_FLI.pep
KGMSGQVTPMLTEMWVQEGTWQLNPSLTIISSVIELQIRHYIIALSSLLMVVALVEVMQDVERGRRQEDADRVAEEVQPRGDCHHLAPLEHLHQQDHHDDVPHYCLQLVEGGDLHPLGAFLQSEHPEQQRSAQCTVGFRTNTHGSVADEETVETHPKYQHDRSSKIHIDG

SEQ ID NO: 37192 - protein, 154 aa, Zea mays
  Clone ID: LIB3245-596-C2_FLI.pep
SVLAMDLGAPARRRLPIRLLLVSLAVLMVLTARSSAEVITLTEETFSDKIKEKDTVWFVQFCVPWCKHCKNLGTLWEDLGKVMEGADEIEIGQVDCGVSKPVCSKVDIHSYPTFKVFYEGEEVVKYKGPRNVESLKNFVLNEAEKAGEAKLQAD

SEQ ID NO: 37193 - protein, 169 aa, Zea mays
  Clone ID: LIB3279-005-E7_FLI.pep
GRGGLPLLGGGELEGSLDLDEAALGGEAAQLHCQHLAVIGREHVPVLLPHVLGDRVRARPDLPAVLRQDRLLDHLEVGRVVRPGGLGLPAPRLPRLLLLLGGGGGLLPLATLLVGLLPLLRLLRHLLRRLRRRLLGDGDDRSNFLSYGCHDQKSVITLRQCACDASGCS

SEQ ID NO: 37194 - protein, 150 aa, Zea mays
  Clone ID: LIB3279-011-C10_FLI.pep
TKECFEVPPKATRVVSERMAFPLSLMHSHDYVSKRLALVGDAAHTVHPLAGQGVNLGFGDAAALAKVIAEGVSVGSDVGDLTLLQRYEKERKAANVAMAAVLDGFQKMYSVDLGPLNVVRAAAFHGAQYISPLKKNIISYATGDTKWSLF

SEQ ID NO: 37195 - protein, 127 aa, Zea mays
  Clone ID: LIB3279-018-F2_FLI.pep
RASLAASASELLEDIVNEGVHDRHGLGGDANVRVHLLQHLEDVDLVGLHALLALLLAPLALAALLGSGLASGDPLLRLRLLPGGRLLGRGLLLRRLLRRGLLLGLGRHRCGASWGLGCEGGWEEMRG

SEQ ID NO: 37196 - protein, 379 aa, Zea mays
  Clone ID: LIB3279-044-F5_FLI.pep
DAWVPHHHHLLRSPTPVAPQPPAMACLTDLVNLNLSDNTEKIIAEYIWIGGSGMDLRSKARTLSGPVTDPSKLPKWNYDGSSTGQAPGEDSEVILYPQAIFKDPFRRGNNILVMCDCYTPAGEPIPTNKRYNAAKIFSSPEVAAEEPWYGIEQEYTLLQKDTNWPLGWPIGGFPGPQGPYYCGIGAEKSFGRDIVDAHYKACLYAGINISGINGEVMPGQWEFQVGPSVGISSGDQVWVARYILERITEIAGVVVTFDPKPIPGDWNGAGAHTNYSTESMRKEGGYEVIKAAIEKLKLRHREHIAAYGEGNERRLTGRHETADINTFSWGVANRGASVRVGRETEQNGKGYFEDRRPASNMDPYVVTSMIAETTIIWKP

SEQ ID NO: 37197 - protein, 144 aa, Zea mays
  Clone ID: LIB3279-057-D4_FLI.pep
DIEQVKADAEGLAKKLEALEAYKRKLLGERLEECSFEELHSLEVKLEKSLHCIRGRKTQLLEEQLHKLKEKEMNLRKSNEDLREKCKKQPPPPPPMLMAPPPPPAPAAIDHTGPKDVGMDVETELYIGLPGRDYRSNNKDMTAQ

SEQ ID NO: 37198 - protein, 356 aa, Zea mays
  Clone ID: LIB3279-057-D9_FLI.pep
SPLPIFSPGSRLGRTRTRWPPSSVLHRRRLSLRSATRRRRSSIRTPPRRCTTWTMSTRAAVTAVATAAPARGSCAPGATGAPPRTPSSRSSSRSSGPRTGTSSPRGWTADQGRAAACGGSTSWTRGSTGAPSRRRRRSGSWRRTARTATSGLSSRASSRAAPTTPSRTTGTSSWRAGSGSTRARSAAASPPRPRPRRRRRRRRTWRPSSSSTTTTTTPAAPLPCRRCTPPTPTRSTRQRRRQRTPARTAAASPTRPPPRAPPTSPSLPPPPASTRVATTWPRAPRRSHRARAPPSPRRRRRRAPTTRSRCPSSTSSASARRDGGAGPGRPGGGVQEGGGGQRTRAPAAVNPCPRVV

SEQ ID NO: 37199 - protein, 418 aa, Glycine max
  Clone ID: LIB3039-011-B5_FLI.pep
MDQSFLVMVSNLLQLHNSLDPTSSLLSNADGASSLLHSSSVAPLLFFTIASVLSFVASTRPSPSSDYSVSAFRTLSTEHIWSLEAPLRDAHWRSLYGLSYPVFTTVVDKLKPHIALSNLSLPSDYAVAMVLSRLAHGLSAKTLASRYSLDPYLVSKITNMVTRLLATKLYPEFIKIPVGRRRLLETTQAFEELTSLPNMCGAIDTTPVHLRINPNPNIYRCRYGFPSLLLQVVSDHKKIFWDVCVKAPGGTDDATHFRDSLLYHRLTSGDVVWDKVISVRGHHVRPYVVGDWCFPLLPFLLTPFSPSGMGTPAQNLFDGMLMKGRSVVVEAIALLKGRWKILQDLNTGVHHAPQTIVACCVLHNLCQIAREPEPELWKEPDESGPPPRVMDSEKSFYYFGENLRQALADDLHQKLSSR

SEQ ID NO: 37200 - protein, 433 aa, Triticum aestivum
  Clone ID: LIB3350-046-F10_FLI.pep
PNSRAPPSTSSPGGLNNRRFDLRAPASHQGHQRRDALASSDPPNPPLQSGNVIARKRRVQAQFNELQEYYLQRRRTGAQSHRQEDAVTMNREGYHEGLEDFQSVLTTFTRYSRLRVIAELRHGDLFHSANIVSSIEFDRDDELFATAGVSKRIKVFEFSTVVNEPSDVHCPVVEMATRSKLSCLSWNKYSKNVIASSDYEGIVTVWDVQTRQSVMEYEEHEKRAWSVDFSRTEPKMLVSGSDDCKVKVWCTNQEASAINIDMKANICSVKYNPGSSYYVAVGSADHHIHYFDLRNPSAPLHVFGGHKKAVSYVKFLSNNELASASTDSTLRLWDVKDNCPLRTFRGHKNEKNFVGLSVNNEYIACGSETNEVFVYHKAISKPASSHRFLSTDLDDAEDDPGSYFISAVCWKSDSPTMLTANSQGTIKVLVLAP

SEQ ID NO: 37201 - protein, 563 aa, Zea mays
  Clone ID: LIB3353-008-E6_FLI.pep
HRPTATATANHGLLSVPAAVPPALPARGGDGGLAVLPAAPHRARPRGRLRASAGGGGGAGPDGAAGAEGRGAGGRVLGPQGEVPGGAEPAGEGEAGEGAHGAVHGGRHPGPGQGPHGADRRRQAHQGRRRRPPQVARPLPPPQAPVRAVHDAAEAAQRRDDERADAVPGERHRGVRRRRVRGRDHPAELADPRGDAPGRPGHPGRPPRRRPHQPAERHGQRAQPRRQPARRRRPPRDRRHAPLHQPSLLLRHQQLPGEPHNHQPAEEMERLRHRLARPVRAPAHQRPRVHAGRQGRRVRLQPSGGRVHQPQEVGRGVAARRLGRRGRRRPRLQGHPRGVPGPRLQGQPAEDAHDVAHRRARDGGVPVGGGEEDAERGAGARRAGGSRRQALGAAGLPRRAPAEAGRPVVRGPPRARGPAAGRGHVRAGAPRRRVRHRRAPAHGGAEHRAPQRQQREARRAAGGAAAAGAAALAAAVHAAQGPGGVHGQPVLRAGHHRDQGAGAAGGAGGGEARGRAAAGPHALDRMPQQLRPGAGGGHRLHGLPYQGQRRQDRRGRGHLRGRP

SEQ ID NO: 37202 - protein, 561 aa, Zea mays
  Clone ID: LIB3354-017-C10_FLI.pep
PLPPLPLTMASSASLQRFLLPSSHAAATAASPSSRLRRTGRARAAVSVPPPAAAGEQVPTERLEPRVEERAGGYWVLKEKYRAGLNPQEKVKLEKEPMALFMEGGIQDLARVPMEQIDAAKLTKDDVDVRLKWLGLFHRRKHQYGRFMMRLKLPNGVTTSEQTRYLASVIEAYGADGCADVTTRQNWQIRGVTLPDVPAILDGLRAVGLTSLQSGMDNVRNPVGNPLAGVDPHEIVDTRPYTNLLSSYVTNNSQGNPTITNLPRKWNVCVIGSHDLYEHPHINDLAYMPAVKDGEFGFNLLVGGFISPKRWAEALPLDAWVAGDDVVPVCKAILEAYRDLGSRGNRQKTRMMWLIDELGMEVFRSEVEKRMPNGVLERAAPEDLVDKRWERRDYLGVHPQKQEGLSYVGLHVPVGRLQAADMFELARLADEYGTGELRLTVEQNIVLPNVSNERLDALLAEPLLQEQRLSPRPSMLLRGLVACTGNQFCGQAIIETKARALQVAREVEKRVAVPRPVRMHWTGCPNSCGQVQVADIGFMGCLTKDSDGKIVEAADIFVGGR

SEQ ID NO: 37203 - protein, 354 aa, Zea mays
  Clone ID: LIB3354-033-F8_FLI.pep
DAKGEKTDRLGCFFDGLCKYARHNRFEVRGILKNADVLSSPNVICSLSFDRDEEYFAAAGVSKKIKIFEFDALLNDRVDIHYPLVEMPSKSKLSCVCWNSYIKNYLASTDYDGTVQLWDAGSGQGFTQFTEHRKRAWSVSFSQVDPTKLASGSDDCCVKVWSINQKNSIDTIRNVANVCCVQFSPYSSRMLAFGSADYKIYCYDLRNTRIPWCTISGHGKAVSYVRFLDPETLISASTDNTLKIWDLNQTNCSGLSADSCSLTLNGHSNEKNFVGLSVHDGYITCGSETNEVFSYYKDFPMPITSHRFGSIDPITGQVTNEDNQQFVSSVCWRGKSNMVVAANSSGSIKVLELV

SEQ ID NO: 37204 - protein, 425 aa, Zea mays
  Clone ID: LIB3354-060-C7_FLI.pep
SSSTSKQNGEGKIVAQPLGPAMQRPAPYAEQTDTTRPRDASGLPDDGGLGDHGGDHVGIHVGRRPAVLEVALAVLLRLATHAHRRATVGDSPAEGVDVGGLVPAGEPALVALAVGRDVLLVPQLQLLDGRLDHLVPALLPHGLGAVVGVGARAVPVARDRLRVERHHHAGDLGDPLKNVASNPHLIARRDADGRSDLELPLPRHDLPVDATDVDACVQACLVVGVDYVTPERFLRADSTVVRTLRAREAANRPPEGPVGVLLKEGVLLLDTIPGLLGSDLRAAEDLGGAVPLVGGNWLASWGVAIAHDKDVVAPPEWVLEDGLRVQDDLAVLAGGLAGAGAVVVPLGQLAGIGYRAREGPGFAPEIHARSTDPYVLGDDLLCGVREVEVDEVGEAGHGRRLRRDCDCDRRGARAGNPRRKEGRMW

SEQ ID NO: 37205 - protein, 248 aa, Zea mays
  Clone ID: LIB3355-019-C11_FLI.pep
KSKQLFFSWFFMAVNLGVFISGTVLVWIQQNVAWSLGFGISSICLVIAAVAFLVGTPLYRVQLPTGSPLKSIVMVFVASYKKRGVAVPADSTLLFEGNESSSIVPNKIEHTDEFRCLDKAAVVVEDQEMKDSHRPWLLCTVTQVEEVKILIRMLPIWFTCVFYSAAMSQTATTFVQQGNAMNTKIGSFSVPAASMNSAEVIFMLVWVVFQDSVVIPIARRYTGNPMGLTLLQRMGVGRLLAIPSLAAA

SEQ ID NO: 37206 - protein, 425 aa, Zea mays; identical to SEQ ID NO: 37204
  Clone ID: LIB3356-043-E6_FLI.pep

SEQ ID NO: 37207 - protein, 421 aa, Zea mays
  Clone ID: LIB3357-030-H7_FLI.pep
SSSTSKQNGEGKIVAQPLGPAMQRPAPYAEQTDTTRPRGASGLPDDGGLGDHGGDHVGVHVGRRPAVLEVALAVLLRLAAHAHRRATVGDSPAEGVDVGGLVPAGEPALVALAVGRDVLLVPQLQLLDGRLDHLVPALLPHGLGAVVGVGARAVPVARDRLRVERHHHAGDLGDPLKNVASNPHLIARRDADGRSDLELPLPRHDLPVDATDVDACVQAGLVVGVDYVTPERFLRADSTVVRTLRAREAANRPPEGPVGVLLKEGVLLLDTIPGLLGSDLKAAEDLGGAVPLVGGNWLASWGVAIAHDKDVVAPPEWVLEDGLRVQDDLAVLAGGLAGAGAVVVPLGQLAGIGHRAREGPGFAPEIHARSTDPYVLGDDLLCGVREVEVDEVGEAGHGRRLRCDCDRRAHGLGTQGGRRGG

SEQ ID NO: 37208 - protein, 637 aa, Glycine max
  Clone ID: LIB3051-110-D8_FLI.pep
SSSSSMAVPPSVAAAPASLYVGDLHPNVSDNHLVDAFSDFESLASVRVCKDSSTGKSLCYGYVNFVSPQDAIRAIELKNNSTLNGKAMRVMWSRRDPDARKNAIGNLFVKNLPESIDNTGLQDMFKKYGNILSSKVVMSEDGKSKGYGFVQFESEESSNVAIEKLNGSTVGDKQLYVGKFVKKSDRILPGPDARYTNLYMKNLDLDVSEATLQEKFSSFGKIVSLVIAKDNIGMSKGFGFVNYDNPDDAKKAMEAMNGSKLGSKILYVARAQKKAEREQILHHQFEEKRKEQILKYKGSNIYVKNIDDHVSDEELRDHFSACGIITSAKIMRDDKGISKGFGFVCFSTPEEANKAVNTFHGFMFHGKPLYVALAQRKEDRKAQLQLQYAQQVAGLSGPSTAIIPGGYPPYYYAATGVISHVPPRAGLMYQHLPMRPGWGANGFALPARSFQQSPVPAVSNNTRQHRQNRGRLNGNPIAQGNTHSVTYLPQAQQISQPVISSSTQQRTGQAKYLPSGRQRDMEKGSGSSSSGSNSGRGSQGSEMLHSMLAGAAPEQQKEILGEHLYMLVHKLKPTLAAKITGMLLEMDNGELLLLLESPESLSAKVEEAVQVLKNSKTKVSGQDVLHSNFLSAEVAVN

SEQ ID NO: 37209 - protein, 172 aa, Arabidopsis thaliana
  Clone ID: LIB35-014-B1_FLI.pep
RLANRNNSRIRGSGRDGLSSVTAAEMSQTETSNNLNSPVSLELFSGFPEFGLSGSLLSHDSFRSYNLDGISEILPELDRIEQDIELNYEDLLIMETGLLLGGLSFHDQHRDMRLDIDNMSYEELLALEERIGTVSTALTEEAISKCLKTSIYQMKPLSYGSITISFVYIPIH

SEQ ID NO: 37210 - protein, 561 aa, Glycine max
  Clone ID: 700844626_FLI.pep
RKQISHSIELKTNETSSMASLLRCNGVFLSPLPPQPRRDPILPKFFLPQSPNPKPSRLLTVRAEVKETSSAAATTTTTTSSDDKIREILRNRDYDKKFGFSVDIESLTIPKGLSKETIRLISSLKEEPQWMLEFRLKAFEKFLSMKEPTWSDNTYPPIDFQNICYYSAPKNKPSLQSLDDADPELLRYFDKLGVPLNEQKRLANVAVDAVLDSVSIATTHRKTLEKAGVIFCSISEAIKEYPDLVRKHLGRVVPSDDNYYAALNAAVFSDGSFCYIPKDTKCPMQISTYFRINALETGQFERTLIVADDRSSVEYLEGCTAPSYDRNQLHAAVVELYCGEGAEIKYSTVQNWYAGDEEGKGGVYNFVTKRGLCAGAGSKISWTQVETGSAITWKYPSVVLEGDGSVGEFYSVALTNNYQQADTGTKMIHKGKNTRSRIISKGISVGHSRNCYRGLVQVLSKAENARNSSQCDSMLIGDNAAANTYPYIQVKNPTARIEHEASTSKIGEDQLFYFQQRGIDYEKAMAAMISGFCRDVFNELPDEFGSEVNQLMSLKLEGSVG

SEQ ID NO: 37211 - protein, 257 aa, Arabidopsis thaliana
  Clone ID: LIB35-015-H12_FLI.pep
AAIKQFLHCNSHATFKLKLERQEILRIFNLMALEALTSPRLASPIPPLFEDSSVFHGVERWTKGKRSKRSRSDFHHQNLTEEEYLALCLMLLARDNRQPPPPPAVEKLSYKCSVCDKTFSSYQALGGHKASHRKNLSQTLSGGGDDHSTSSATTTSAVTTGSGKSHVCTICNKSFPSGQALGGHKRCHYEGNNNINTSSVSNSEGAGSTSHVSSSHRGFDLNIPPIPEFSMVNGDDEVMSPMPAKKPRFDFPVKLQL

SEQ ID NO: 37212 - protein, 542 aa, Glycine max
  Clone ID: 701148522_FLI.pep
NMGDSTCLMQQPFCYASGISNEASEAHLEKNCETCAFQNNPIHALEQSISFGRFMSESLAWEKWSSFSHNRYVEEAERYSRPGSVAQKKAFFEAHYKKLAAQKAAALLEQANNEAQNNSTGQEDEGVIDNDNDTHNLQISPNSEMVVKEEQDAKVLSVTSDEHDVLVRLTASEHDSNSSVEASVTPESNKVEGAEAVMEEVAVVGSSMKVELQSHLEDVGAQKEESEKLSAIVTPPILTPIVKVSKSDQEVLASVGKKKPPVSSFKLSKANGTSYLTSTPVKSTAAISFKRDNIATPMSNKPANETSKFTTTPVKSTAAISFKRDNIVTPMSNTPANGTSVFTTTPVKSTAAITFKRDNIVTPMSNKPANGTSKFTTTPVKSTAAISFKRDNIVTPMSNKPANGTSKFTTTPVKSTAAISFKRDNIVTPMSNKPANGTSKFTTTPVKSTAAISFKRNNIVTPMSNKPATLSTADKKRSTPRSVDFTPIRELNRLTASVMRKFESTRAGAGSSKASKDNSTTLRTPTMASKEMQNQSSLTPLT

SEQ ID NO: 37213 - protein, 147 aa, Arabidopsis thaliana
  Clone ID: LIB35-017-E4_FLI.pep
ESIMKGAKSKTETRSSKLSVTKKPAKGAGRGKAAAKDPNKPKRPASAFFVFMEDFRETFKKENPKNKSVATVGKAAGDKWKSLSDSEKAPYVAKAEKRKVEYEKNIKAYNKKLEEGPKEDEESDKSVSEVNDEDDAEDGSEEEEDDD

SEQ ID NO: 37214 - protein, 406 aa, Glycine max
  Clone ID: LIB3138-032-A11_FLI.pep
TMGDFTVALNPPKTFRADILLSTTNNRTSPAARGFQTVLAFKPPRAFRGIRASVMPREGQQASLGDALVNTPRRSDFVEAIRRTAALSSCLSETSLHATVPGLESKTRGKVRDIYDAGDYLVLVTTDRQSAFDRILASIPFKGQVLNQTSLWWFERTKHIVSNAVVLAPDNNVTIARKCSVFPVEFVARGFVTGSTDTSLWTVYNKGVRNYCGNVIPDGMVKNQKLPKNILTPTTKAADHDVPITPDEIIDRGLMTRADYVEVSEKALSLFEYGQQVALEHGLILVDTKYEFGKANDGSIMLIDEVHTPDSSRYWIANSYLERFQNGLEPENIDKEFLRLWFISHCNPYEDEVLPDAPEDLVCELAWRYIFLYETITKSKFEVPSTEEPIHDRITRNVASALSSLK

SEQ ID NO: 37215 - protein, 276 aa, Arabidopsis thaliana
  Clone ID: LIB35-042-B7_FLI.pep
ELKLLRHLRHENVVALKDVMMANHKRSFKDVYLVYELMDTDLHQIIKSSQVLAIDDFDENELQEADKMIKEEGKFLCVSMGHENKTLDDFVEAHNTCVNDLMYFPTRSAYELSSVAGNADKVAAFQEEMENVRKKMEEDEKKAEHMKAKYKTYTKGHERRAETVWTQIEATLKQAEIGGTEVECFKALKRQEEMAASFRKKNLQEEVIKQKETESKLQTRYGNMLAMVEKAEEIMVGFRAQALKKQEDVEDSHKLKEAKLATGEEEDIAIAMEASA

SEQ ID NO: 37216 - protein, 772 aa, Glycine max
  Clone ID: LIB4198-002-E7_FLI.pep
QCGEKRSDLKMDMDVEEASAPKERKPVLVILVGAPGSGKSTFCEEVMGSSTRPWVRVCQDTIGNGKAGNKAQCLSSATRALKDGKSVFIDRCNLDREQRSEFIKLGDGPQIDVHAVVLDLPAKLCISRSVKRTGHEGNLQGGKAAAVVNRMLQHKELPKLSEGFSRITFCQNESDVKNALNTYSTLGPLDSLQYGCFGQKNPDSKIQVGIMKFLKRAEVPVAAASRESGIEDPTSQTPGKNNSCCKDKQTFSSIPDNDNSETKEVENQAVGSVGSHANQVSLDDIPTLAFPSISTSDFQFNHEKAADIIVEKVAEFSNKFRNARLVLVDLSHKSKILSLVKAKIAGKNIDAQKFFTHVGDITHLYSRGGLRCNVIANAANWRLNPGGGGVNAAIFNAAGPELESATKEKVQSLSPGNAAVVPLPSSSPLFTREGVTHVIHVVGPNMNPQRPNCLNNDYNKGCKILQDAYTSLFEGFASIVRNQTWHPVGKSENLERKSLELQVQSDCSRNYFTKTDQKSKRDVDHGLGKSKKYKGTRDDSGLTFTDSRNENVDSEHRTERSMTKTWGSWAQALHQIAMHPEKLKDDLLEISDDVVVLNDMYPKARKHVLVLARTGGLDCLADVQKEHLQLLNKMHDVGLKWAEKFLNENASLVFRLGYHSAPSMRQLHLHVISQDFESIHLKNKKHWNSFNTAFFRDSVDVIDEISSDGKAKLKDDDKLLSMELRCHRCRSAHPNIPRLKSHISNCQSPFPAHLLQHGRLVRAPGEPHSNVQ

SEQ ID NO: 37217 - protein, 217 aa, Arabidopsis thaliana
  Clone ID: LIB35-042-E7_FLI.pep
NTTPNNNNQSFMNQHGLIQFDPIDNINLKSSGTNNSFFNLGFFQENTKNSETSLPSLYSTDVLVHHREENLNAGSNVSATALLQKATQMGSVTSNDPSALFRGLASSSNSSSVIANHFGGGRIMENDNNGNLQGLMNSLAAVNGGGGSGGSIFDVQFGDNGNMSGSDKLTLDFLGVGGMVRNVNRGGGGGGRGSARGGVSLDGEAKFPEQNYPFGRG

SEQ ID NO: 37218 - protein, 379 aa, Arabidopsis thaliana
  Clone ID: LIB35-044-F1_FLI.pep
DTEKKNPSGYRKFPDFTLWAVADFLRALFVATVVYARAFMDTKAVGVSKDTAASMEASTVFPGFKFSPTDVELISYYLKRKMDGLERSVEVIPDLEIYNFEPWDLPDKSIVKSDSEWFFFCARGKKYPHGSQNRRATKMGYWKATGKERDVKSGSEVIGTKRTLVFHIGRAPKGERTDWIMHEYCVKGVSLDDAMVVCRVRRNKEYNSGTSQKAPKPNSSAEKRAKVQNGATSSGSPSDWDNLVDFYLAGESGEKLLAEMAESSENLQVDNDEDFFADILRDEIINLDEAVMTGNTPNEVPTLESASMEIRVLPLPNMIDKQMSSLLEERPSQKKKGKDATESLSSCFVGLYSIKSVNKARWDVIIGVVALIAMLFYLE

SEQ ID NO: 37219 - protein, 989 aa, Zea mays
  Clone ID: 700223564_FLI.pep
GLPNAAAAMDDSLYDEFGNYIGPELADSDADDDSDAAGASPSSTASRSPSPAARSPSGSPSRPAALMDVDEDEGDPSQQAVVLAEDKKYYPTAEEVYGPGVEALVMDEDEQPLEMPIIAPPRVVKFEVGTRAAATSTYASTDFLLGLAGNPALVRNVTLVGHLQHGKTVFMDMLVEQTHEVDTFDSEGERHVRFTDTRVDEQERQVSIKAVPMSLVLEGGNGKSYLCNIMDTPGHVNFSDEMTAALRLADGAVLIVDAAEGVMVNTERAIRHAIQERLPIVVVINKVDRLITELKLPPNDAYFKLRHTLEAINDLISSCSTTVGGTQLVDPIAGNVCFASGAAGWSFTLQSFAHLYLKIHGVQFDHEKFASRLWGDLYFHPDSRTFKKKPPKEGANRSFVEFILEPLYKIYSLVVGEQKGNVESKLAELGVTLSNAAYKLNVRPLLRLACRSIFGTGTGFTDMLVKHIPSVKDAAARKIDHIYTGPQDSSIVDAMKKCDPNGPLMVNVTKLYPKSDCSVFDVFGRVYSGTIQTGQTVRVLGEGYSPDDEEDMTVKEVTKLWVYQARYRVAISKAPAGSWVLIEGVDASIMKTATICPMNIDEDVYIFRPLRFNTLSVVKIAAEPLNPSELPKMVEGLRKISKSYPLAITKVEESGEHTILGTGELYLDSIMKDLRELYSEVEVKVADPVVTFCETVVDTSSMKCFAETPNKRNKITMLAEPLEKGLAEDIENGLVSLDSRQKEITDFFRQRYQWDVLAARSIWAFGPDKQGPNILLDDTLSIEVDKNLLNAVKDSIVQGFQWGAREGPLCDEPIRNVKFKILNANIAPEPLHRGGGQIIPTARRVVYSAFLMATPRLMEPVYYVEIQTPIDCVSAIYTVLSRRRGHVTADVPKPGTPIYIVKAFLPVIESFGFETDLRYHTQGQAFCLSVFDHWAIVPGDPLDKSIVLRPLEPAPMQHLAREFMVKTRRRKVRDIVDLWQPYIRNFYRS

SEQ ID NO: 37220 - protein, 224 aa, Arabidopsis thaliana
  Clone ID: LIB35-055-H12_FLI.pep
GGWSINAFCELVAQSQRERWSFDNEHLGSGRRRLSGCSSSRFSCSPSVDQQTCGRCSKLLTERSPVARFDLPIPAVLACGHVYHAACLETMTNETEKYDPTCPICTETQVTKLSRKALKAEAELKATSYKRCKNRVVDSYVRSECEDLMFQNLGKREGKGLKMDPSSNTKGSTSKSFMKWHFGSVSTKWSKARDSTSKKSFWSRHSNKRLSHPFSSVEGLNQAT

SEQ ID NO: 37221 - protein, 55 aa, Homo sapiens
  Clone ID: LIB3547-136-B1_FLI.pep
GRGPGRRRGGRGRAALRAWAEGSRGALGLRRASRYRCRGPKKADAAARVREAGGG

SEQ ID NO: 37222 - protein, 320 aa, Zea mays
  Clone ID: 700213134_FLI.pep
RAYTMHSLRCALRYPIPSTAASLSTSGLRRLSSHHLTPPPLRSATTGEDEWNDAWETAWLPGDSPASSPAPAAPWESPASASESAIPVISAEVDPDTKAFVADMDERWAERRIASRRGQQQRASRAAEGGEGGVVARKKAQADDYRTRKQRVHAALWVKEIEKMEEARLGGGGGGADDIDRLLDSCSDIFDSGNTDFGDSKIPNTTEIKTKPDGWETTSRGQDGNIWDISQREDDILIQEFERRIAFSKQQIASFIKTHIFSRRRPIDGWKYMIEEIGPNARKGKGSVQRLPSVSDPATQPYREETPAIASSSSFRGNRP

SEQ ID NO: 37223 - protein, 204 aa, Zea mays
  Clone ID: LIB3587-224-H2_FLI.pep
PVLGRKMFSGTQQKCKVCTKTVYPMDQLSTDGVVFHRSCFKCQHCKSTLSLSNYSSFEGVPYCKTHFEQLFKETGSYNKSFQSQSPAKITPEKLAPELTRSPSKAARMFSGTQDKCATCGKTAYPLEKVTVEEKSYHKSCFKCSHGGCAITPSNYAALEGILYCKHHFSQLFKEKGSYNHLIKCASVKRAAEAQPEQPASDSSS

SEQ ID NO: 37224 - protein, 375 aa, Zea mays
  Clone ID: LIB3592-074-H6_FLI.pep
PLPPSTAVTARFLAAPAIRVISPSRPALPLLSSASAGGFPHASRAPCSAAREHRRGTVRECSRADAAGAAPLSKTLLDLKDSCWRFLRPHTIRGTALGSIALVARALIENSHLINWWLIFKAFYGLGALIFGNGYIVGINQIYDVAIDKVNKPYLPIAAGDLSIQSAWLLVILFAAAGFSIVISNFGPFITSLYCLGLFLGTIYSVPPFRLKRYPVAAFLIIATVRGFLLNFGVYYATRAALGLTFQWSSPVAFITCFVTLFALVIAITKDLPDVEGDRKYQISTLATKLGVRNIAFLGSGLLLANYIAAIAVAFTMPQAFRCTVMVPVHAVLAGGLIFQTWVLEQAKYRKDAISQYYRFIWNLFYAEYIFFPLI

SEQ ID NO: 37225 - protein, 204 aa, Zea mays; identical to SEQ ID NO: 37223
  Clone ID: LIB3597-012-A4_FLI.pep

SEQ ID NO: 37226 - protein, 590 aa, Zea mays
  Clone ID: 700356023_FLI.pep
VRRTHKMRVLVEKLLVSVFLAAFYSGCMVVSLEYDHTASIECLGDPMKPLYKGGIVQNSEFNSGLMGWSTHRNVKAGVSRSPSGNKFAVVHGAGSYVSSSGKLLPSHSVYQRIQMQSDRHYSLSAWLQVSNGTSAHVRAVIKSPNGERVIAGAIVAQSGCWSMLKGGMTAYSSGPAEIYFESHAPVDIWVDSVSLQPFTFDEWDGHTRRSADKVRRRTVKVVAMGANDKPMAHANVSIELLRLGFPFGNAVTKEILGLPAYEKWFTSRFSVATFENEMKWYSTEWTQNHEDYRVPDAMMNLMRKYKIKVRGHNVFWDDQNSQMQWVKPLNLAQLKAAMQKRLKSVVSRYAGKVIHWDVVNENLHFNFFETKLGPMASAQIYQQVGQLDRNAILFMNEFNTLEQPGDPNPVPAKYVAKMNQIRGYAGNGGLKLGVGLESHFSTPNIPYMRSSLDTLAKLKLPMWLTEVDVVKSPNQVKYLEQVLREGFAHPNVDGIVMWAAWHARGCYVMCLTDNSFKNLPVGDLVDKLIAEWKTHRASATTDHNGAVELHLPLGDFKFTVSHPSLKAAAVQTMTVDNSASASQHTINVKS

SEQ ID NO: 37227 - protein, 262 aa, Zea mays
  Clone ID: LIB36-001-A2_FLI.pep
AHQSRRESPRTRGGISHSLGPPPPPLCSSSFPRSSSTRSAPIPPASADPDPAPAPMATRRRMFLKVIILGDSGVGKTSLMNQYVNNRFSNQYKATIGADFLTKEVQIDDRLFTLQIWDTAGQERFQSLGVAFYRGADCCVLVYDVNVSKSFEKLNNWREEFLIQASPSDPENFPFVVLGNKIDVDGGNSRTVSEKKAKAWCASKGNIPYFETSAKEGFNVEAAFECIARNAVKNEPEEDMYLPDTIDVGGAGRQQRSSGCEC

SEQ ID NO: 37228 - protein, 98 aa, Zea mays
  Clone ID: LIB36-001-G6_FLI.pep
TRNTQCLHARANYQAFAMGGEATNAGGGGIRARMEHYLYSGEKKHVVAGIAIFAAVFGVPWYFMTRGAKHQSHQDYMEKANKARSERLSSGQSSALKE

SEQ ID NO: 37229 - protein, 156 aa, Zea mays
  Clone ID: LIB36-003-B5_FLI.pep
SDGQTERLNQCLETFLRCFVHTCPSKWSQWISVAEYWYNTSFHSALGRSPFEVLYGYKPKHFGLSAASVTSVPELNEWMQEREVMNKVIQLHLQRACDRMKRQADKKRTERVFAVGDFVYLKLQPYVQSSVAARSNNKLAFRFFGPYKILDKVGSV

SEQ ID NO: 37230 - protein, 216 aa, Zea mays
  Clone ID: LIB36-003-D9_FLI.pep
QDSVHRKKKEHREWSSGQTMELCVSTPPSSVRATAAPISFAPPRRGASASTAVPPHRRIPTRVWRCASAAVPGPVPSEEPASASYAVVVTDKPDTPADDKAEEVSAAPSGSAEAPMAELVPSEASSSPDDGGLDEILSKLNIEVTPTLILTGFGAFIALWILSSVVAAVDSVPLLPKLLELIGTAYTIWFIARYLLFKESRDELFAKFEDLKQRII

SEQ ID NO: 37231 - protein, 130 aa, Zea mays
  Clone ID: LIB36-003-E10_FLI.pep
QNILQTFNHSVIDRLIDPSKACREKLSPEPILILDRCLRLLTSRGSSSGGGGSDMVVVIDDLPGHERRYGLLARRFELPQPGFSDDHPLVPLHPPRLRHEVVVSEERGRLVHQSHAAVHLQLELAVLPVP

SEQ ID NO: 37232 - protein, 145 aa, Zea mays
  Clone ID: LIB36-003-H11_FLI.pep
LAAMASLAAVSVKPVAIKGLAGSSISGRKLAVARPSARSIRRPRAAAVVAKYGDKSVYFDLDDIGNTTGQWDLYGSDAPSPYNPLQSKFFETFAAPFTKRGLLLKFLLLGGGSLLAYVSASASPDLLPIKKGPQEPPQPGPRGKI

SEQ ID NO: 37233 - protein, 558 aa, Zea mays
  Clone ID: 700382291_FLI.pep
CPALPFPPHALARSLVLVVLPSPVPLECAVCVSSGDDWATAAAALRKVPSSPFSVPSPDTSTRQDNMLSTHEANADQFDLLSYGNLRGLEASRSSEESNFGNDLKDGSSVSSENFGSSCLPGESYQSATVDHEKRPLSDVKTCQIACKRPKQTDHCTWLYSFEEHPLTSEVGISSPALYDGLVEIKQPNDIPAINGATTCSGSSVIPCRNHDQSILVENLDIPDWATSFPGYFEDCGPVVTYSHVDDIGSPRKGVPIGPEHQADIPEWRPLNSMIVPGASEFCANLDCSSASTSESVPRGDDYVSDKWIRYCVVPVTCCSSPVDWAGDSKIDCNCSDEGSMRCSRQHIIEARDNLKMILGQDRFRELGLCEMGEDVALRWTDEEEKLFQRVVFLNPVSLGKNFWDHLPDAFPNKTSQELVSYYFNVFMLRKRAQQNRSDVLAVDSDDDELHGEPLAERVEGDPAVESSTHEHSVSNSLPMDDDHKEFEGAQFDGSLCEKSVYNAVECRHLPNQMPADSNTVNTALDVCDQDNGAQCSEFHMSLPSDTSNSLGDQSASV

SEQ ID NO: 37234 - protein, 90 aa, Zea mays
  Clone ID: LIB36-009-F3_FLI.pep
QTVPDCHNLYKNSFTYHSLQRDRPLDFDEANQYLEKCERDKSRVLVHCMTGKNRSAAIVAAFLMKSRGWRLAQSFQWVKDRRPQVQLTDG

SEQ ID NO: 37235 - protein, 157 aa, Zea mays
  Clone ID: LIB36-015-B5_FLI.pep
GVELAGSSVQLPLVWNIQVSTWLRYYVYERLIQKGKKPGFLQLLGTQTVSAIWHGLYPGYIIFFVQSALMINGSRVIYRWQQAASSSFLSGILAFLNFAYTLLVLNYSCIGFQVLSFKETLASYRSVYYVGTIVPIVCLLLGNVIKPARKAKARKTE

SEQ ID NO: 37236 - protein, 191 aa, Zea mays
  Clone ID: LIB36-015-E11_FLI.pep
STSPDPSSYMNSGKRRRKKKKKKHLNDHLVALIISYQSSSSSSSAGEEEAGRLVDGVVEPPPGLVHELGAEAHHEDAELRLAERAVAVEVALGEHPAEVGVRHAAQAQQRRVAPEAVEGDEPARRVHQQPEPARQLPHQPVLAQPLRHHRQVVLEAHGGGRRRRSRLLLPLLRRHVCVCVRVWKVDRVCCC

SEQ ID NO: 37237 - protein, 261 aa, Zea mays
  Clone ID: LIB36-015-H10_FLI.pep
CSYCCSRSHGEPDHAVHHINTTGFLAMNSIRSRVGGVGIAATEAARGRLPLGVFQHSSHLKAHHMLLHPIEEIPADGAAGGDFLVVPDEVDLGPQVAVEAVDVLAAEIDGAGGEPVRRQDPHGETHGAAGPGVEEVGGAVGPLDVVERVAGELVPDEVEVAAPGPVVVQVDQLQPAAALGEIGEDHRVELLRPRRRHWGRGAGTGRISRSVGYSGEEEGEEEREHHEGRRRRRHQRLLRLNRPYRFACAYLPVATASQSKL

SEQ ID NO: 37238 - protein, 141 aa, Zea mays
  Clone ID: LIB36-016-A5_FLI.pep
DNRAQAALARLEALESDNGGVEVVDLNDDEYGSTDEEDPVLMQKKQSKIMKRKTRQGKALEKRAARSLMDVLQEANLESVPPHVPTYSRAAVGPPSTSSRRHYCSVCGSSATYTCVRCGTRFCSCRCQVIHNDTRCLKFVA

SEQ ID NO: 37239 - protein, 131 aa, Zea mays
  Clone ID: LIB36-016-E2_FLI.pep
LLATKFCRLHRRRSQRHRRDLPSPLLHAMNTDITASTKPEYPVVDRNPAFTKVVGNFSALDYMRLSTISAVSVTVGYLSGIKPGIRGPSMVTGGLIGVMGGFMYAYQNSAGRLMGFFPNDAEVARYKHKLH

SEQ ID NO: 37240 - protein, 146 aa, Zea mays
  Clone ID: LIB36-017-H11_FLI.pep
NEKLVIRCLQGMASDEKRNLYFVSTNATSTFRSIVSSYPGRLTLVTIQCPNPDFNKEQNRWRMVRRMLIEAIVDLLHTNGQVYLQSDVESVLLVMKEQFLSYSKGQLVTDGDGGNCIDNPFGVVSDWERHVLARGAPMYRAMLKKM

SEQ ID NO: 37241 - protein, 465 aa, Zea mays
  Clone ID: LIB3061-063-D12_FLI.pep
LAMARVAAMVVVMVLLQQLASSYSYTVAAHADAAGVLGRKAGVVVDETPVEKSPAGPGRYAVIFDAGSTGSRVYIFRFGRQMDLLRIGDEIEFFAKLKPGLSSYAGRPQEAAKSILPLLEKAKSIVPSWLMKRTPVKLGATAGLRLIGNQQADEILDAVRDLVHKKSKFQYKPNWINVLEGSQEASYLWVALNYLLDKLGGEYSQTVGVIDLGGGSVQMAYAVSANAAARAPAVPDGEDPYITKEYFKGKQYNVYVHSYLRYGSFASRAEILKSKNGPFSSCMLRGFSGKYTYNGQQFDATARPEGALYDKCRGEIAKAMNLKAPCKAKNCTFGGVWNGGGGAGQNDIYVASGFYYLASHVGFIDSKAPSAKAAPAAFRVAAKKACKFDVNRAKVAYPDVSDSDVPYLCMDLTYTYTLLVDGFGLQPMKKITFVSKVKHGEYYIEATWPLGTAIEAVSPTKQIGN

SEQ ID NO: 37242 - protein, 307 aa, Zea mays
  Clone ID: LIB36-020-B8_FLI.pep
NQEQRDMAPHQQQRALLLFPLVFLLLLLAPPLAGAWGKEGHIMVCKIAEKYLSEKAAAAVQALLPESAGGELSTVCPWADQVRWHYHWASPLHYANTPQVCNFKYSRDCHNSRGQQGMCVVGAINNYTDQLYSYGQKTSYNLTESLMFLAHFVGDVHQPLHVGFEDDEGGNTITVHWYRRKANLHYVWDVSIIDTAIKDFYNKSMDTMVEALKMNLTDGWSDDIVHWENCKNKHATCANDYAIESIHYSCNYAYKDVEQDITLGDDYFFSRYPIVEKRLAQAGIRLALVLNRIFGGGEADDIPLQVQ

SEQ ID NO: 37243 - protein, 231 aa, Zea mays
  Clone ID: LIB36-020-D4_FLI.pep
IHTPQAAMAPPITSLSSLMASSPIPTPPPPLPKTSGRALSVAPCGSASSSSPSTSSTPHPVAASAGRRGLLALGAGFLASAALLSPAGDAGATRIEYYATVGDKMCDLSLVKSGLAYCDVEVGTGVQPPRGELINVHYTARFPDGTLFDSSYKRGRPLTMRIGAGKILRGLEQGISGGGGVPPMLVGGKRKLMIPASLAYGPEPAGCFSGDCNIPGNSTLLYDLFLVGIYK

SEQ ID NO: 37244 - protein, 108 aa, Zea mays
  Clone ID: LIB36-021-E6_FLI.pep
TLRPLLYHRTKTLECTSLLKTQAAKLYLIKSITHYLLHSRGTHVLGLLSDLTTVSCQPADPGSVQRREGRRVYDPPVLEFLAASFFFISSNLSIATCSSSVPPTALMV

SEQ ID NO: 37245 - protein, 360 aa, Zea mays
  Clone ID: LIB36-021-F8_FLI.pep
RCCLLSSPKAESDSQRQQNPSPRPLPTGDSAPMAALLRTAAALVPPPSSPLSAREPRGRCLRLACSRRAPVRQLRAWPLPTPHVFGRSGGRFRRLSVTEAEEAAQTATQEDPETKVTGESAADDSAGSTDETPSIIVTTLQSYREALVNDDEAKAAEIESFLLSIEDEKNSLLSKITSLDVELATQRERILRISADFDNFRKRTENEKLNMMENVQGELIESFLPVLDNFERAKMQIKVETEGEEKINNSYQSINKQFIEILNSLSVEDVETVGKPFDPMLHEAIMREESSEYEEGIILQEFRKGFKLGERLLRPAMVKVSAGPGPENSGDDDPTVVEDSVAPQKVEDVEEDGFDDGDAE

SEQ ID NO: 37246 - protein, 216 aa, Zea mays
  Clone ID: LIB36-021-G2_FLI.pep
LLAFVHPTRTSTISQHIHRRGGVEDTTKNPCKKGRPNKSVDAAGCSIAGELGDGLGSLGDGMFGELSWEDEAHGGLDLAGGDGGLLVVPRELGGLAGELLEYVVDEGVHDGHGLGGDADVGVHLLQDLEDVDFVGLHALLGLLLPLLLAALLAGGLRGRQALLGLGLLTCGRLLRLLLGRRLLLRWLLLGLGRHRVGFVGVEGDGGGLDAVGWRLG

SEQ ID NO: 37247 - protein, 107 aa, Zea mays
  Clone ID: LIB36-022-C5_FLI.pep
WQSPALSHRTPSLRLLCMCLRRKRVAGTHLSFPGYRPQFYMRTTDVTGNVTVIMNDKDEEAKMCMPGDRIKMVVQLIQPVACEQGMRFAIREGGKTVGAGVINKIIE

SEQ ID NO: 37248 - protein, 97 aa, Zea mays
  Clone ID: LIB36-022-G6_FLI.pep
RWRRRRRACWRCGCSSHRACPTWAQRARPWAASRSGSSTTSRSPSSGPAPSAPPPATAAPPTAAAARSLSRRSRSVSARPFDFCSYVPSGEYGIGFV

SEQ ID NO: 37249 - protein, 539 aa, Zea mays
  Clone ID: LIB3689-211-E11_FLI.pep
PQAPARQADMGNRASRHHRQAAEQQPATPTLPKPQPQIQPPPPPPPTQTQQYQQAPPQSQQKPKPAADVGAVGRVLGRPMEDVRATYTFGRELGRGQFGVTYLVTHSETGQRFACKSIATRKLVHRDDIEDVRREVQIMHHLTGHRNIVELRGAYEDRHSVNLVMELCEGGELFDRIIAKGHYTERAAASLCREIVAVVHSCHSMGVFHRDLKPENFLFLNNKEDSPLKATDFGLSVFFKHGETFKDLVGSAYYVAPEVLKRKYGAEADIWSAGVILYILLSGVPPFWAENEDGIFDAVLRGHIDFSSDPWPSISNGAKDLVKKMLRQDPKERLTAAEILNHPWIREDGEAPDKPLDITVIGRMKQFRAMNKLKKVALKVVAENLSDEEIMGLKEMFRSLDTDNSGTITLEELRSGLPKLGTKISESEIKQLMEAADVDGNGTIDYAEFISATMHLNRLEKEDHILKAFEYFDKDHSGYITVDELEEALKKYDMGDDKTIKEIIAEVDTDHDGRINYQEFVAMMRNNSPEIVPNRRRMF

SEQ ID NO: 37250 - protein, 555 aa, Zea mays
  Clone ID: LIB3245-233-F1_FLI.pep
FVSSTHQLGCRLRAGRNNLTREMGQCCSRAPAPDSGRGGTNGYGYSNQAKPAQTPSSYNPPQQPAEVRYTPPATNPPVVPPVPVPVPPKPTADTILGKQYEDVRSVYSLGKELGRGQFGVTYLCTEVASGKQYACKSISKRKLTSKADREDIRREIQIMQHLSGQPNIVEFRGAYEDKSNVHVVMELCAGGELFDRIIAKGHYTERAAATICRAVVNVVNICHFMGVMHRDLKPENFLLASKEENAMLKATDFGLSVFIEEGKMYRDIVGSAYYVAPEVLKRSYGKEIDVWSAGVILYILLSGVPPFWAETEKGIFDAILHEEIDFESQPWPSISESAKDLVRKMLTRDPKKRLTSAQVLQHSWLREGGGASDKPIDSAVLSRMKQFRAMNKLKKMALKVIASNLNEEEIKGLKQMFMNMDTDNSGTITYEELKAGLAKLGSKLSEAEVKQLMEAADVDGNGSIDYVEFITATMHRHKLERDEYLFKAFQYFDKDNSGFITRDELESALIEHEMGDTSTIKEIISEVDTDNDGRINYEEFCAMMRGGMQQPMRLK

SEQ ID NO: 37251 - protein, 553 aa, Zea mays
  Clone ID: LIB3245-459-C1_FLI.pep
FVSSTHQSGCRLRAGRNNLTREMGQCCSRATAPDSGRGGANGYGYSNQAKPAQAPPSYNPPQQAAEVRYTPSATNSSAVPPVAVPPKPTADTILGKQYEDVRSVYSLGKELGRGQFGVTYLCTEIASGRQYACKSISKRKLVSKADREDIRREIQIMQHLSGQPNIVEFRGAYEDKSNVHVVMELCAGGELFDRIIAKGHYTERAAATICRAVVNVVNICHFMGVMHRDLKPENFLLATKEENAMLKATDFGLSVFIEEGKMYRDIVGSAYYVAPEVLRRSYGKEIDVWSAGVILYILLSGVPPFWAETEKGIFDAILHEEIDFESQPWPSISESAKDLVRKMLTRDPKKRLTSAQVLQHQWLREGGEASDKPIDSAVLSRMKQFRAMNKLKKMALKVIASNLNEEEIKGLKQMFMNMDTDNSGTITYEELKAGLAKLGSKLSEAEVKQLMEAADVDGNGSIDYVEFITATMHRHKLERDEHLFKAFQYFDKDNSGFITRDELESALIEHEMGDTSTIKEIISEVDTDNDGRINYEEFCAMMRGGMQQPMRLK

SEQ ID NO: 37252 - protein, 146 aa, Zea mays
  Clone ID: LIB189-025-B10_FLI.pep
EQLLFMATLVAKKLLKMKKVKPYIPDFKLAFEHFCIHAGGRAVLDELESNLALTDWHMEPSRMTLHRFGNTSSSSLWYELAYSEAKGRIRRRHRVWQIAFGSGFKCNSAVWRALRSVNPAEETNPWMDEIDRFPVDVPKVSKVSSD

SEQ ID NO: 37253 - protein, 124 aa, Glycine max
  Clone ID: LIB4-01-H1_FLI.pep
INSPTKHYTNHTELQEKDKRRWRLLIPTCLWFPPASPRAAPVLLPRSPSASRSRSGTPSLSGLGTSLSITVLSAGTTSWISASSAKPTRLAPLARNALWLGEFVTMLFTSIASVDGSRLVKFVL

SEQ ID NO: 37254 - protein, 177 aa, Zea mays
  Clone ID: LIB4073-019-D8_FLI.pep
NKFSSSGAPPTAPPPAAYQQQQHGANMNPSRPGGGLRKWSTGLFHCMDDPGNCLITCLCPCITFGQIADIVDKGTCPCLASGFIYGLICASTGMGCLYSCLYRSKLRAEYDVDEGECPDFLVHCCCEHLALCQEYRELKNRGFDLGIGWEANMDRQRRGVTGGTVMGAPAIPLGMIR

SEQ ID NO: 37255 - protein, 223 aa, Zea mays
  Clone ID: 700264467_FLI.pep
EGDFHAALNFAAVMEAPVIFFCRNNGWAISTPTTEQFRSDGVVIRGQAYGIRGIRVDGNDALAVYSAIHAAREMAVTEGRPILVEALTYRVGHHSTSDDSTKYRPVDEIEHWRTARDPISRYRKWVQGNDWWSDAEESELRSRVRKELLQAIQVAERMPKPPVTELFTDVYDKIPSNLHEQEQLLRDTIMRHPADYPTDVPVGVVLRYAEGLTRRSSFGQSRF

SEQ ID NO: 37256 - protein, 380 aa, Homo sapiens
  Clone ID: LIB43-130-E7_FLI.pep
QVEAVHGGPGVRATLPPAGGAGSPQVPGRSRAEDAQGLCDCLGQAVPWTAASQEAVGDAAEWLASLPLDRIPYNAVLDLVNNKMRISGIFLTNHIKWVGCQGSRSELRGYPCSLWKLFHTLTVEASTHPDALVGTGFEDDPQAVLQTMRRYVHTFFGCKECGEHFEEMAKESMDSVKTPDQAILWLWKKHNMVNGRLAGHLSEDPRFPKLQWPTPDLCPACHEEIKGLASWDEGHVLTFLKQHYGRDNLLDTYSADQGDSSEGGTLARGEEEEKRLTPPEVSHGDRDTQSVRPPGALGPRPALPESLHHSLDGKLQSLDGPGAHKEVGGAAPFLGVDFSSLDMSLCVVLYVASSLFLMVMYFFFRVRSRRWKVKHHHPAV

SEQ ID NO: 37257 - protein, 114 aa, Homo sapiens
  Clone ID: LIB43-139-C3_FLI.pep
ESSQASYLWLQRSKGGQMLNTPTQMGKVNPSGLRSLARTTWKPQILLMINYNSQNSWGRQKEKWVLSIIKDLWKGAPPLQAVPLSLNLAAGIIGVAGDRSSEGGRPPVLPPPRI

SEQ ID NO: 37258 - protein, 80 aa, Homo sapiens
  Clone ID: LIB43-145-H6_FLI.pep
GSFLKLYSYRRYSSFIVSNLGNKPCCFLEISVKDKFSLLTYEDFRVYLHMFDFKSVYNLDGKKCEIGIRDQPKYFINAFN

SEQ ID NO: 37259 - protein, 84 aa, Homo sapiens
  Clone ID: LIB43-151-G11_FLI.pep
PCCPPRRGRPGSHVDGEGGEPPMWPSTIPSHREKPSLGFSQVDWSWHPQASLLVALHPRADHGARLPQPSLPTCTVREYKTQEP

SEQ ID NO: 37260 - protein, 204 aa, Homo sapiens
  Clone ID: LIB43-152-A11_FLI.pep
LFQASNLSYKTAFVLLLCSTERPRKAGRVPDQGRRPPQKPRPTSAQAHVRAQNKASTKRVDGLQSRNCGSCQQSSLLLQQAPCKGRLKDLQCINIHLAERKGALKQLCLPGARGSLADSNATIKDTEMGEVGEPYFYNKVKQICAFIPPDTQVEKNQCCGFCQDGIFLLLVPHMAFAMLDSIALGCCLCVLAPVAWAPYTLLSS

SEQ ID NO: 37261 - protein, 71 aa, Homo sapiens
  Clone ID: LIB43-19-A1_FLI.pep
SFHLPTPSGTCLWPRQLQCITTPFGNTFTEVLRTLCGIYDQSVLILQTSIISIMALGSGVRAKHCTGKEKK

SEQ ID NO: 37262 - protein, 51 aa, Homo sapiens
  Clone ID: LIB43-47-B7_FLI.pep
TQITNDNVLHEAPLLLWYKVCFTLGWPLSQLLSPLLVLSLLSPQEIQAENK

SEQ ID NO: 37263 - protein, 74 aa, Homo sapiens
  Clone ID: LIB43-49-A12_FLI.pep
KAPLSDKIDGEHALSQDIYYYPKKCFSKCGPWYWSMNWLLPVNEEINYLHQSVNQYIALAINKILLKNQILSLT

SEQ ID NO: 37264 - protein, 88 aa, Homo sapiens
  Clone ID: LIB43-66-A8_FLI.pep
ERKFLWPRKSSLLLLHLIRHILRVGQGSFLVLRLAFTLNVNWLLSSVVKARILLGVGAGVECGRNSVAPHFSSKVLQRCPGVGSVWPG

SEQ ID NO: 37265 - protein, 285 aa, Homo sapiens
  Clone ID: LIB43-95-B8_FLI.pep
QRRRPPRLEAQAMRGSQEVLLMWLLVLAVGGTEHAYRPGRRVCAVRAHGDPVSESFVQRVYQPFLTTCDGHRACSTYRTIYRTAYRRSPGLAPARPRYACCPGWKRTSGLPGACGAAICQPPCRNGGSCVQPGRCRCPAGWRGDTCQSDVDECSARRGGCPQRCVNTAGSYWCQCWEGHSLSADGTLCVPKGGPPRVAPNPTGVDSAMKEEVQRLQSRVDLLEEKLQLVLAPLHSLASQALEHGLPDPGSLLVHSFQQLGRIDSLSEQISFLEEQLGSCSCKKDS

SEQ ID NO: 37266 - protein, 153 aa, Glycine max
  Clone ID: LIB5-01-A6_FLI.pep
GSQHVAETTRKCGNGEGSTSPCKRTHEDHQARKLSPLESRAMAWDEAERAKYMARFKREEVKIQAWENHQIRKAEMEMKKMEVKAERMKALAQERFTNKLASTKRIAEEKRANAQVKLNDKALRATERVEYIRRTGHVPSSFSLSFKLPSICW

SEQ ID NO: 37267 - protein, 168 aa, Glycine max
  Clone ID: LIB5-01-F10_FLI.pep
CIVRCYLRFRSDTKSQTQVYKQTKPKTHLRVLAIGLGLGLDFQAVELELDFQVVGLGLGCQVLVSGKIDRCGEYHGEEDPIWADRQAEWAYRAWWAEMAAEARRGENPGLAGASSRPLLYVPDSRSSVSFQSQPAPIFQPGIGGIIPWSATPETTLLSSPSSRLCPAP

SEQ ID NO: 37268 - protein, 679 aa, Glycine max
  Clone ID: LIB5-01-G6_FLI.pep
ISMKNKNSRANRKARSVKPPDSCLSSSNSNKKWMVPYKFYDVKGPNSESNPNVDSSSWVLCTEVQLETILLKNIEIIYNDTVPKLVALGYSEEIAVKAILYNGHCYGANDLATNVLHNSLACLTTGTLDLSESSPAFPDMKKLQEYSLMNLVSLLKEVRPDLSRGDAMWCLLMSNFHVLKAGAIPVPVGNTCPPPPPPLPELENTGWRFAKEGGLGFPLNGLFSDTDMTIRLQRDIEFPKRFDLTPAMKSLLKRNVAMFADGFRANSKQVQPQASEFPRTGSVSKLGSSSASGTAAVLGEQPGDSHNQNDQEDLNSVMSKFLDLNIDDNVEFVPEDDKEEVIVTLVNQIKDLEKQVKERKDWAHEKAIQAAKKLSSDLIELKKFKMEREENKKLPKETGAAEELDNPTMMRLSEMENALRKTSGQMDQATAAVRKLEAEKAEIKAELEASKLSASESVTSCLQVAKREKKCLKKLLTWEKQKVKIHQDISDEKQKILEIQEELAQIKQCAKETEVTRKEELKAKEEALALIEEERRSKEAAEANHKRNLKALRLKIEIDFQRRKDDLPKAEAEIHALKAHARSTTLPTSESEDAEPQRETLAKLLLELDNVKDFSGKEINGDRECIICGKDEVSVIFLPCAHQVMCARCGKEYGKKGKAVCPCCRVPIEERIPIFGACS

SEQ ID NO: 37269 - protein, 208 aa, Glycine max
  Clone ID: LIB5-02-C9_FLI.pep
CANMSSRAGKGPAVRSYRRRKTALDLDLNRVPAGENREQEGPSTQSVPREVQVEQQQQATQPPMIDVEAIDDDVVECTPRAFAEAKNNSRRVRRRTIVDVDLEDQTRRNKRRRELPNLIINCDKYINLEGGSSSMEQSFKKPPEPPKELVFNCPICMGPMVHEMSTRCGHIFCKDCIKAAISAQGKCPTCRKKVVAKDLIRVYLPSTS

SEQ ID NO: 37270 - protein, 318 aa, Glycine max
  Clone ID: LIB6-01-B11_FLI.pep
EFMMGYRNDTFAEDNAVREAASGLESVEKLIKLLSHTQQQYQTTSKSSMENIDTDYTAVADVAVSKFKKVISLLGRTRTGHARFRRAPVPVPVPVASPPPSEPRVYRATPLQQIPPPTLHTHSVTDHSLIPKIERKDSSKTINFSYSNSFVSSLTAGDTDTKQPCSSSPSPATAFQITNLSQVSSAGKPPLSSSSLKRKCSSENLGSAKCGSSSSRCHCSKKSRKMRQKRVVRVPAISLKMADIPPDDYSWRKYGQKPIKGSPHPRGYYKCSSVRGCPARKHVERALDDPSMLVVTYEGEHNHTLSAAEATNLILESS

SEQ ID NO: 37271 - protein, 200 aa, Glycine max
  Clone ID: LIB7-01-G1_FLI.pep
ILRTTSISTPISSSKSKPIFSTLLRSSPSTIFPPKSVTPTTLFVSATPFFTLHPKLGFRGGIVAMAAPGSLRKSEEEWRAILSPEQFRILRQKGTEFPGTGEYDKFYEEGVYNCAGCGTPLYRSITKFNSGCGWPAFYEGIPGAINRNPDPDGMRTEITCAACGGHLGHVFKGEGFPTPTNERHCVNSISLKFAPANSYS

SEQ ID NO: 37272 - protein, 303 aa, Glycine max
  Clone ID: LIB7-01-G3_FLI.pep
RTVGFYNNFNGLSDESLDDVMDMELLDLPLDFEDVETDAVEEQDWDAQLKLLEDPPPPLGVFPLQQSSAFCGQTRNENAKLGSKSFSASLAKTVRPAYGKTIPVQKVSLKGKDLLQFQTNSPVSVFESSSSSPSVENSNFELPVIPTKRPRTKRRRLSNISLLYSIPFILTSPAFQKFQRMDFSKSDIQTQPSGELLCKFKKKQRKKDIPLPTNKIEMKRSSSQESVAPRKCLHCEVTKTPQWREGPMGPKTLCNACGVRYRSGRLFAEYRPASSPTFVASLHSNSHKKVLEIRNRATQVTVR

SEQ ID NO: 37273 - protein, 236 aa, Brassica napus
  Clone ID: LIB80-006-F5_FLI.pep
FDFIMSKKMTGWMYFMSKTLAEKAAWDYAKEKGIDFISIIPTLVIGPFITTSMPPSLITALSPITRNEAHYSIIRQGQYVHLDDLCNAHIFLYEQAAAKGRYVCSSHDATILTISEFLRQKYPEYNVPSTFEGVDENLKSIMFSSKKLIDMGFNFKYSLEDMLVESIETCRQKGFLPVTLPEHLKSEDKVPGSDDNKEIKNGSAGLTDGMVACKKTEPGMAGEKADSHMSAQQICA

SEQ ID NO: 37274 - protein, 227 aa, Brassica napus
  Clone ID: LIB80-018-E12_FLI.pep
QDGCISCRKRYAEKAAWDYAKEKGIDFISIIPTLVIGPFITTSMPPSLITALSPITRNEAHYSIIRQGQYVHLDDLCNAHIFLYEQAAAKGRYVCSSHDATILTISEFLRQKYPEYNVPSTFEGVDENLKSIMFSSKKLIDMGFNFKYSLEDMLVESIETCRQKGFLPVTLPEHLKSEDKVPGSDDNKEIKNGSAGLTDGMVACKKTEPGMAGEKADSHMSAQQICA

SEQ ID NO: 37275 - protein, 690 aa, Schizochytrium aggregatum
  Clone ID: LIB81-015-D5_FLI.pep
QRVGEKYYVIRSFSPPPPAIRCRVRTRFTFLERVGGLVDKGSILGLEVNARVVAQGVETAQVAGTTEDLQVDLDDTGVLVGDSGVEVGALDEVVEGANGRATPDLVVHDAVRGAHVGPAAGKTKVPAEAERHLELGVVLGALDLLRVLETVNVKVLGLLPDLLECALEDTLLDALELGRRHGVEGVVLAKELVELVGARGEHGSLLEDLELDALLEHVGGRGHADIRVGGLRELLAHVVAGAGLLGDLVDSAGDDEGGAHGERGGGGLRAADATAGANADAEVRGVAALAVQAVAEVDDEREDDVDGAVVGVAARVSLDSDIVGDGNAARELGLLLGDLARGDELLEEVLRGRADEHLGELGARDLADDAVADVDRTVGVAREAGGAVAHDLRGEGHECRGLHHSDALLEEEIDVALLEVAVKRRVDEVDGVGALRQGGLDLLEGGAHVVHGEAAGAKGAEDLALAGGDDEVRRGNALGHGARVQRGDDAVGLHEGAVTEVAERAGLHDGGLAGGHVGVLLELAAGRVLREVERGIELEELGLELLEVDGLGRAGGDSGARARALDGRSRGAHRGGGGGGGRGLTGGDAHANVAHRVDAEAVGPEEAVGDEVDNAVVGVHGHDVDLRVHLLALGRELAAVLPADLARGVHKGGVGNAVLASEILVGGDGLDELEHGLDTETSGHDRVKPK

SEQ ID NO: 37276 - protein, 362 aa, Schizochytrium aggregatum
  Clone ID: LIB81-021-A4_FLI.pep
QKDNLSRFTSLDLEGKAVRGDDRSLDINEEIALLVVELKGVLVLGVTARLVGAEGNVEGLVLRDRAVLDDALDRVGERSLAERAAHPDEHGLKGQVVHEGVMGVSVRGKLAASGVGAGDSAALGHKLALGAREHVIDAAEGRAVEEGLAVVDGALERRIGIERGRLHGGVGRGRALVGEHDDGAVGRDQLAAGKGLERGLDVDAARGRRRRGEGHLAVDVAVDSDTLEELGVVNGPERVAGEEAEAGLRERANGQRHGQHAAALDDVVLEEGVGLGGNLAVQGDGVRADLLGRGAPVADKDLSRRGAEHDARHGISAALAGDDLHAHLLELLLELRRHHATVPGTEADRLDRDVLGELEAHL

SEQ ID NO: 37277 - protein, 1027 aa, Schizochytrium aggregatum
  Clone ID: LIB81-021-C5_FLI.pep
PEPLASDRVAFMYGEGRSPYYGITQDIHRIWPELHEVINEKTNRLWAEGDRWVMPRASFKSELESQQQEFDRNMIEMFRLGILTSIAFTNLARDVLNITPKAAFGLSLGEISMIFAFSKKNGLISDQLTKDLRESDVWNKALAVEFNALREAWGIPQSVPKDEFWQGYIVRGTKQDIEAAIAPDSKYVRLTIINDANTALISGKPDACKAAIARLGGNIPALPVTQGMCGHCPEVGPYTKDIAKIHANLEFPVVDGLDLWTTINQKRLVPRATGAKDEWAPSSFGEYAGQLYEKQANFPQIVETIYKQNYDVFVEVGPNNHRSTAVRTTLGPQRNHLAGAIDKQNEDAWTTIVKLVASLKAHLVPGVTISPLYHSKLVAEAEACYAALCKGEKPKKNKFVRKIQLNGRFNSKADPISSADLASFPPADPAIEAAISSRIMKPVAPKFYARLNIDEQDETRDPILNKDNAPSSSSSSSSSSSSSSSSPSPAPSAPVQKKAAPAAETKAVASADALRSALLDLDSMLALSSASASGNLVETAPSDASVIVPPCNIADLGSRAFMKTYGVSAPLYTGAMAKGIASADLVIAAGRQGILASFGAGGLPMQVVRESIEKIQAALPNGPYAVNLIHSPFDSNLEKGNVDLFLEKGVTFVEASAFMTLTPQVVRYRAAGLTRNADGSVNIRNRIIGKVSRTELAEMFMRPAPEHLLQKLIASGEINQEQAELARRVPVADDIAVEADSGGHTDNRPIHVILPLIINLRDRLHRECGYPANLRVRVGAGGGIGCPQAALATFNMGASFIVTGTVNQVAKQSGTCDNVRKQLAKATYSDVCMAPAADMFEEGVKLQVLKKGTMFPSRANKLYELFCKYDSFESMPPAELARVEKRIFSRALEEVWDETKNFYINRLHNPEKIQRAERDPKLKMSLCFRWYLSLASRWANTGASDRVMDYQVWCGPAIGSFNDFIKGTYLDPAVANEYPCVVQINKQILRGACFLRRLEILRNARLSDGAAALVASIDDTYVPAEKL

SEQ ID NO: 37278 - protein, 835 aa, Schizochytrium aggregatum
  Clone ID: LIB81-042-B9_FLI.pep
RAEAGREPEPAPQITSTAAESQQQQQQQQQQQQQQQPREGDKEKAAETMALRVKTNKKPCWEMTKEELTSGKTEVFNYEELLEFAEGDIAKVFGPEFAVIDKYPRRVRLPAREYLLVTRVTLMDAEVNNYRVGARMVTEYDLPVNGELSEGGDCPWAVLVESGQCDLMLISYMGIDFQNQGDRVYRLLNTTLTFYGVAHEGETLEYDIRVTGFAKRLDGGISMFFFEYDCYVNGRLLIEMRDGCAGFFTNEELDAGKGVVFTRGDLAARAKIPKQDVSPYAVAPCLHKTKLNEKEMQTLVDKDWASVFGSKNGMPEINYKLCARKMLMIDRVTSIDHKGGVYGLGQLVGEKILERDHWYFPCHFVKDQVMAGSLVSDGCSQMLKMYMIWLGLHLTTGPFDFRPVNGHPNKVRCRGQISPHKGKLVYVMEIKEMGFDEDNDPYAIADVNIIDVDFEKGQDFSLDRISDYGKGDLNKKIVVDFKGIALKMQKRSTNKNPSKVQPVFANGAATVGPEASKASSGASASASAAPAKPAFSADVLAPKPVALPEHILKGDALAPKEMSWHPMARIPGNPTPSFAPSAYKPRNIAFTPFPGNPNDNDHTPGKMPLTWFNMAEFMAGKVSMCLGPEFAKFDDSNTSRSPAWDLALVTRAVSVSDLKHVNYRNIDLDPSKGTMVGEFDCPADAWFYKGACNDAHMPYSILMEIALQTSGVLTSVLKAPLTMEKDDILFRNLDANAEFVRADLDYRGKTIRNVTKCTGYSMLGEMGVHRFTFELYVDDVLFYKGSTSFGWFVPEVFAAQAGLDNGRKSEPWFIENKVPASQVSSFDVRPNGSGR

SEQ ID NO: 37279 - protein, 1045 aa, Schizochytrium aggregatum
  Clone ID: LIB81-045-C6_FLI.pep
PRCLKMRRDWSSPAGSRYAPEPLASDRVAFMYGEGRSPYYGITQDIHRIWPELHEVINEKTNRLWAEGDRWVMPRASFKSELESQQQEFDRNMIEMFRLGILTSIAFTNLARDVLNITPKAAFGLSLGEISMIFAFSKKNGLISDQLTKDLRESDVWNKALAVEFNALREAWGIPQSVPKDEFWQGYIVRGTKQDIEAAIAPDSKYVRLTIINDANTALISGKPDACKAAIARLGGNIPALPVTQGMCGHCPEVGPYTKDIAKIHANLEFPVVDGLDLWTTINQKRLVPRATGAKDEWAPSSFGEYAGQLYEKQANFPQIVETIYKQNYDVFVEVGPNNHRSTAVRTTLGPQRNHLAGAIDKQNEDAWTTIVKLVASLKAHLVPGVTISPLYHSKLVAEAEACYAALCKGEKPKKNKFVRKIQLNGRFNSKADPISSADLASFPPADPAIEAAISSRIMKPVAPKFYARLNIDEQDETRDPILNKDNAPSSSSSSSSSSSSSSSPSPAPSAPVQKKAAPAAETKAVASADALRSALLDLDSMLALSSASASGNLVETAPSDASVIVPPCNIADLGSRAFMKTYGVSAPLYTGAMAKGIASADLVIAAGRQGILASFGAGGLPMQVVRESIEKIQAALPNGPYAVNLIHSPFDSNLEKGNVDLFLEKGVTFVEASAFMTLTPQVVRYRAAGLTRNADGSVNIRNRIIGKVSRTELAEMFMRPAPEHLLQKLIASGEINQEQAELARRVPVADDIAVEADSGGHTDNRPIHVILPLIINLRDRLHRECGYPANLRVRVGAGGGIGCPQAALATFNMGASFIVTGTVNQVAKQSGTCDNVRKQLAKATYSDVCMAPAADMFEEGVKLQVLKKGTMFPSRANKLYELFCKYDSFESMPPAELARVEKRIFSRALEEVWDETKNFYINRLHNPEKIQRAERDPKLKMSLCFRWYLSLASRWANTGASDRVMDYQVWCGPAIGSFNDFIKGTYLDPAVANEYPCVVQINKQILRGACFLRRLEILRNARLSDGAAALVASIDDTYVPAEKL

SEQ ID NO: 37280 - protein, 401 aa, Brassica napus
  Clone ID: LIB82-006-G2_FLI.pep
LKPSWFNMVMGPSSLDEIRKAQRADGPAGILAIGTANPANHVLQAEYPDYYFRITNSEHMTDLKEKFKRMCDKSTIRKRHMHLTEEFLKENPNMCAYMAPSLDARQDLVVVEVPKLGKDAAVKAIKEWGQPKSKITHVVFCTTSGVDMPGADYQLTKLLGLRPSVKRLMMYQQGCFAGGTVLRLAKDLAENNRGARVLVVCSEITAVTFRGPSDTHLDSLVGQALFSDGAAALIVGSDPDVSAGEKPIFEMVSAAQTILPDSDGAIDGHLREVGLTFHLLKDVPGLISKNIEKSLDEAFKPLGISDWNSLFWIAHPGGPAILDDVEKKLGLKAEKMRATRHVLSEYGNMSSACVLFILDEMRRKSKEDGVATTGEGLEWGVLFGFGPGLTVETVVLHSVPV

SEQ ID NO: 37281 - protein, 205 aa, Zea mays
  Clone ID: LIB83-002-B10_FLI.pep
VLKFGIFSLLPCRLQDVAGYGVALAVKDIYADAFGERNLDSDLVDLMVKDGRQGKVNGKGYYIYEKGGKPKPDPSVKHVIEEYRKHANTMPGGKPVTLTDQDILEMIFFPVVNEACRVMDENVVIRASDLDIASVLGMGFPKYRGGLVFWADTVGAPYIHSKLSKWAEIYGPFFKPSSYLEQRAKSGVPLSAPGASQQGSARSRM

SEQ ID NO: 37282 - protein, 181 aa, Zea mays
  Clone ID: LIB83-004-F4_FLI.pep
DSIISGLNNLSSNVSEVLKLDAGMKELASSLIDSESLLVFGRGYNYATALEGALKVKEVALMHSEGMLAGEMKHGPLALVDENLPIIVIATRDACFSKQQSVIQQLLSRRGRLIVMCSRGDAAAVCPSGGSCRVIEVPQVADCLQPVINIIPLQLLAYHLTVLRGFDVDQPRNLAKSVTTQ

SEQ ID NO: 37283 - protein, 661 aa, Zea mays
  Clone ID: LIB83-005-C10_FLI.pep
LVMLWAPSVYILLLARLIDGFGIGLAVTLVPLYISETAPTDIRGLLNTLPQFSGSGGMFLSYCMVFGMSLMPKPDWRLMLGVLSIPSLIYFGLTVFYLPESPRWLVSKGRMAEAKRVLQRLRGREDVSGEMALLVEGLGVGKDTRIEEYIIGPDDELADEGLAPDPEKIKLYGPEEGLSWVARPVRGQSALGSALGLISRHGSMAASQGKPLVDPMVTLFGSVHEKMPEIMGSMRSTLFPNFGSMFSVADQQQVKADWDAESQREGEDYASDHGGDDIEDNLQSPLISRQATSVEGKEIAAPHGSILGAVGRSSSLQGGEAVSSMGIGGGWQLAWKWTEREGEDGQKEGGFQRIYLHEEGVQGNRGSILSLPGGDVPPGGEFIQAAALVSQPALYSKELLEQRAAGPAMMHPSEAVTKGPRWADLFEPGVKHALFVGIGIQILQQFAGINGVLYYTPQILEQAGVGVLLSNLGLNASSASILISALTTLLMLPSIGIAMRLMDMSGRRFLLLATIPVLIVALLVLVVSNIVDVGDVAHAALSTASVIVYFCFFVMGFGPVPNILCAEIFPTTVRGVCIAICALAFWVGDIIVTYTLPVMLNVVGLAGVFGVYAVVCVLALAFVFIKVPETKGMPLEVITEFFSVGAKQAKEEEEEEEAREG

SEQ ID NO: 37284 - protein, 265 aa, Zea mays
  Clone ID: LIB83-005-C1_FLI.pep
PNGARPRRRAYLPLSLPTEREMSGGVRRVLEAWRLGVVKYGEALQLQERLVADRKAGRVGDLVLSLQHPPTYTLGKRREKAERNLLAPEADLRALGAEIHRTERGGDVTFHGPRQAVLYPLLSLRTLGLGARRYVEGLESAMIQVAALHGVSARPGDPGETGVWVGDRKIGAIGVRISSGFTWHGLAFNIDPDLEYFEHIMPCGIAGKGVTSLRREVGDGAELPADGVIHDQLVGCLATTLGFTDVEFKDDSERGDLIGVTASQY

SEQ ID NO: 37285 - protein, 248 aa, Zea mays
  Clone ID: LIB83-005-D1_FLI.pep
ARKSRDFPSQSLARAGMATLARWHLQPPTARPLARRRIPRRAATVVSPRAFSRADFDGFVRRAWQGANAGAERFAFEARQAAQRLDSRFSISRRLADASRAARARAVEIDAEFGIGRRWRSFSVDFSRNWPRYRRDINDFMGTPIGRALATIFFLWLALSGWLFRIFIFGTFVLPFAAPLLLGTFANRVAIEGTCPACKRRFVGYRNQVIRCMSCQNIVWQPNNSPSGGARSSRSSEPDVIDVEYEER

SEQ ID NO: 37286 - protein, 678 aa, Zea mays
  Clone ID: LIB83-005-F5_FLI.pep
FYSPSSSIDIGHGVVAMKGTQQTLKYTQQGLNLCVDYSVMPFYKAGPVMDLVHKIVGYLDYRTTLNKRQMENLVDELKGRRVTVIHRRTNQKYTVQGLTPLPASQMTFVDAESGQTKCLVEYYAQKHGIVIEYQMLPCLDLSKSKDKPNHVPIELCTLLEGQRFPKANLDKNSGRILKGKALIPASNRRKEILDLVNASDGPCRGEIAQRFGISLDLRMTEVTGRILPPPNLKLGASNGQTSKFSIDQNCQWNLVKKRLVEGRDLQCWGIVDFSAEPSDPQQEPLNGRMFIEKIVRKCCELGIRMNSNPCFVHKSKMAVLSDPHRLQEELNKAKQAAVSKKQRLQLLFCPMSEQHPGYKTLKLICDTQLGIMTQCFLGDRANKPNGQDQYMTNLALKINGKLGGSNVQLFDSLPRVGGAPFMFIGADVNHPSPGNVESPSIAAVVASINSGVSKYVTRIRAQPHRCEVIQQLGEICLELIGVFEKRNRVKPQKIIYFRDGVSDGQFDMVLNEELADLEKAIKVGGYAPTVTVIVAKKRHHTRLFPKDPSQPQTKNGNVPPGTVVDTGVVDPSAYDFYLCSHAGILGTSRPTHYYSLVDEHGFRSDDLQKLVYNLCFVFARCTKPVSLATPVYYADLAAYRGRLYYEAAMMPSHSSAGTFGVTNFPRLHKDVENNMFFI

SEQ ID NO: 37287 - protein, 206 aa, Zea mays
  Clone ID: LIB83-006-C9_FLI.pep
RAHASRDEGHVVPRGCRRPRRPFLRRRRSRKASASWRSEWRQHGQARRACRDRAGRGAAAGAGARVRRGACGGRGIRERDEGGDREGAVDDQPGQVGPERGGRGGGAPGAVQLVGGQVPAGEVAAGAAVVPGDVLGAQRRVGPLHQLRPHGAHPGQAPRAHPRGDGHRREGAPPRQVGQIPAKPGHGDRRRRGGRNAALSDNATIL

SEQ ID NO: 37288 - protein, 277 aa, Zea mays
  Clone ID: LIB83-006-G4_FLI.pep
LRCASSTFLFSTCTNPLRSCSPLVRRQHPRAAMTTDSSAASFQKIQIQREDTTFDAYVVGKENAPGIVVLQEWWGVDYEIKNHAIHISQLGGGYKALIPDLYRGKVALDVAEAQHLMEGLDWQGAVKDIQASVKWLKSNGSPKVGVTGYCMGGALSIASGVLVPEVDAVVAFYGTPSSELADPSKAKAPIQAHFGEHDNFVGFSDVTAAKSLEEKLKSSGISYEVHIYPGCSHAFMNTSPEALKRKKGMGLTDENQEAVDLAWSRFSSWMGRFLGSA

SEQ ID NO: 37289 - protein, 362 aa, Zea mays
  Clone ID: LIB83-006-H1_FLI.pep
WLVPSDFPLNDDEFGQSSAESYGNMLQNKAFGGGTDRSLVGNRLPPYVYLHLDGNYGFHDKLFFCEDDQQFLRGVPWLVMRTDMYFVPSLFLVPAFQDELGRLFPEKDTVFHHLARYLFHPTNGVWYSVTRCFRSYLAKAEKRVGIQIRIYETKGILQRNGPFPHILNQILSCAQNEKLLPEISMAEGAADGTRNNRTAAGSGTRNNRTIAVLTTSLSAWYSEQIQEKYDEQSAVDGVSVRVFQPSHEEYQRSRNKGHNMKALAEIYLLSMTDVLITSGFSTFGYAAQGLAGLKPWIMLKSENHVTPDPPCVRAMSIEPCFHQAPFYDCKARKDTDLGKVVPYVRHCEDVSWGLKIVDQTHL

SEQ ID NO: 37290 - protein, 209 aa, Zea mays
  Clone ID: LIB83-007-A4_FLI.pep
RATSHHRTMSAAARVLPKAVTFVTGNAKKLEEVRAILGSSVPFQSLKLDLPELQGEPEYISKEKARIAASQVNGPVLVEDTCLCFNALKGLPGPYIKWFLEKIGHEGLNNLLKAYEDKSAFAMCIFSLALGPGEEPITFVGKTAGKIVPARGPNYFGWDPVFQPDGFEQTYAEMPKSVKNNISHRGKALALVKEHFASASYTVQSNDST

SEQ ID NO: 37291 - protein, 76 aa, Zea mays
  Clone ID: LIB83-007-F11_FLI.pep
EAGTAPCKSNFRPTSNVASHCGHWKSYRGNSCCRCEDSPRQDTEVLHATHIKTVLRARLVSLVSVWFQGLKVLRTH

SEQ ID NO: 37292 - protein, 250 aa, Zea mays
  Clone ID: LIB83-007-F7_FLI.pep
PGEAAGVLQDCERLKELVLSHDAIFLLTDTRESRWLPTLLCTNENKIAITAALGYDSYLVMRHGAGPGISCEASSVVTAIDKMSTEDALGRQRLGCYFCNDVIAPVDSVSNRTLDQQCTVTRPGLASIASGRAADLFRRMLHHPDGIHAPGEIAGTGSGHEHGLLPHQMRGSLSQYNILTLLGYSSSNCTACSHAVLYQYRRRGMDFVMQVINEPTYLEDLTGLTELMKSASCSQVEWVDEIDEDDFVEV

SEQ ID NO: 37293 - protein, 74 aa, Zea mays
  Clone ID: LIB83-008-C6_FLI.pep
LSSLAGRKLLGGNCECRETSLDFYHHRAHHTQISLYGSRSYSAKSNNKSYAEKLTVALHHKHQLELRETNHKQK

SEQ ID NO: 37294 - protein, 334 aa, Zea mays
  Clone ID: LIB83-009-E1_FLI.pep
YDILVLGFVVLLCGLLGIPPSNGVLPQSPMHTKSLAVLKRQLLSKKMVDTAKESIGGSATSLEIYGKMEEVFIKMDSEQNTDSVDRELKNFKDAVLQEGDEEGRLAREFDPRKHIEAHLPVRVNEQRLSNLLQSILVGGCVGAMPVIRMIPTSVLWGYFAYMAIDSLPGNQFWERIQLLFITESRRYKVLEGPHASFVESVVPKTVTIFTIFQLVYLLICFGITWIPIAGILFPVPFFLMIVIRQYLLPKFFDPVVLRELDAAEYEELDGVPLEHKLEDEASEVGSCPSRPDAEILDELTTNRGELKHRSSSLREERPIQVTVSTHMVLQQDMI

SEQ ID NO: 37295 - protein, 489 aa, Zea mays
  Clone ID: LIB83-012-E3_FLI.pep
IAAAAAELFDEMPPWPPCLQPTLTTARRATVFSRTKCLSSTPASPTYEQGQHEEEPSLVVVGGGAAGVYASIRAKTLAPHLNVAVVEKGRFLSKVKISGGGRCNVTNGHHLEPMGLARNYPRGNKELRGSFFTAHGPQDTIRWFTDHGVKLKTEDDGRVFPVTDNSASVVDCLLNEARRLGVSLQAGKTVSSASVAQDGKFVLKVEKRTADLVDYINANYILVATGSSQHAYSIAAQLGHSIIAPVPSLFTFKIADKRLADLAGVTFPIVKAKLKLDGVQKSVPELTQTGPMLVTHWGLSGPVVLRLSAWGARELHQCNYQGNLMVDFVPDIHIEDVKRVLFHYKDQHAKHKVSNTFPTEFGLVKRFWRFLLEQESLNGDTHWASMPNNHLNAVAFRLKQWTFEVVGKGQFKDEFVTAGGVPITEISLGTMESKKQPNLFFAGEVLNVDGVTGGFNFQNAWTGGYIAGTSIGTLASTSNLPEQQSCFQL

SEQ ID NO: 37296 - protein, 520 aa, Zea mays
  Clone ID: LIB83-013-B7_FLI.pep
GVKPVQSPGPFLAGMEPRYQSVSREDILGEPLTKEEVSELVKGSLKSKRQLNMGRDGLTHNMLENIHSHWKRKRVCKIKCKGVCTIDMDNICHQLEEKVGGKVIHRQGGVIFLFRGRNYNYRTRPCFPLMLWKPVAPVYPRLVTKVPGGLTPDEATKMRTRGHQLPPICKLGKNGVYANLVKQVREAFEACDLVRVDCSGLNKSDCRKIGAKLKDLVPCILLSFEFEHILMWRGSDWKSSLPPLENSYEVTKVQESFSGKESNEKVTHSGNVLTQIELVSVATSHKNWNLDEGQEKFKDSIDSDMVLSSAKDVPALFHSTGISRTEPSADIPLEYSPLNPVCDIMDPSLNCRSIPTNNCENRTLVEKSEHCPDDYNLEMKRKRNDGTKGTVVLNSGSKVEGLLCLLEQAIHSGRALVLSEDELADSDLVYEKSVAFTKSIPRRLVFENTRRKSSARRNVPDNHARTKTHLVENKMLSSSVENKFIVNGGSAMQTDHGQEFLSDVVHQGTLRVDELAKLLA

SEQ ID NO: 37297 - protein, 274 aa, Zea mays
  Clone ID: LIB83-013-H1_FLI.pep
LHSVVSPLPTSCAGDRLYSSVAPERHVAGAVVVVAVHDAMPSAGAGAALPAVAAPAHHPVVVAIRVVELHAAAVHRRRGGGGGGDVVRLRGRDHVSGNGGSLILLRGGVGELDGGAADVVGGGERGGVDLEQARRVGEVEARGAAPQGQRGHVVRARGGLGGGEGAEPDARLLVGLADLAHPAPRGPAPPHAAVHGVPRLPELGPPRRPLGWRRQHRRVLVVAAAAAVRGLRRLLALVVPVPVAVADGGVLHVMAVVAAAACLAMCWFDAERDG

SEQ ID NO: 37298 - protein, 108 aa, Zea mays
  Clone ID: LIB83-014-B7_FLI.pep
LVGFVRMILHSGKYESGDRLCPEHEKAILERLLPYHPQYNEKIGCGIDYITVGLHPEFENSRCLFIVRKDGEQIDFSFWKCVKGLIRQKYPMYADSFILRHFRRRQDY

SEQ ID NO: 37299 - protein, 125 aa, Zea mays
  Clone ID: LIB83-014-C2_FLI.pep
ELNDKKRLATSGANFARAYTVEFGSCQFPYNFTGCQDLAKQKKVPFISDDLEIECEGKEKFNVRLQRFLEVVKQLAAASDGNGGDHHLSCLTLDMSKPAWEIKSSCVIVLILFQSSQHPIMNLLH

SEQ ID NO: 37300 - protein, 163 aa, Zea mays
  Clone ID: LIB83-014-E11_FLI.pep
RPSILRSSSADKQQREKASKAEAVVLLVGPSMAPKRPVSAAAAAEQPRLRGVRKRPWGRYAAEIRDPVRKARVWLGTFDTPEQAARAYDAAARKLRGPGAATNYPAPEPTAEALAEAPAASGSGSAVVYESSSASASASSCSLPLAAPSLDLSLALPAAAAAA

SEQ ID NO: 37301 - protein, 517 aa, Zea mays
  Clone ID: LIB83-014-G8_FLI.pep
NFSVVDGPASSAAGNPDEIAKLFPNLFGQPSASLVPSAEPAATRPLKVGVVLSGGQAPGGHNVICGIFDYLQERAKGSTLLGFKGGPAGIMKCKYVELTSDFVYPYRNQGGFDMICSGRDKIETPEQFKQAEDTANKLDLDGLVVIGGDDSNTNACLLGEYFRSRNLKTRVIGCPKTIDGDLKCKEVPTSFGFDTACKIYSEMIGNVMTDARSTGKYYHFVRLMGRAASHITLECALQTHPNAALIGEEVAAKKETLKNVTNYITDIICKRADLGYNYGVILIPEGLIDFIPEVQKLIAELNEILAHDVVDEAGAWKSKLQAESRELFEFLPKTIQEQLMLERDPHGNVQVAKIETEKMLISMVETELEKRKAEGRYSAHFRGQAHFFGYEGRCGLPTNFDSNYCYALGYGAGALLQSGKTGLISSVGNLAAPVEEWTVGGTALTSLMDVERRHGKFKPVIKKAMVELDAAPFKKYASLRDEWAIKNRYISPGPIQFSGPGSDDSNHTLMLELGAEL

SEQ ID NO: 37302 - protein, 372 aa, Zea mays
  Clone ID: LIB83-016-E12_FLI.pep
DLKPGQLTDLKSLAVNNNSFAYVAVKKSIHRYLIKDSNYLTTAVNKFANYVNLSSSEKDLLEEPTCPKVLGDIVESCVGAVLLDSGFNLNHVWKLMLMLLKPILSFCGMHIDPMRELRETCQYNGFDLGLPEPTKYNGEFHVKVEVNINGKMISCTAANRNSKDARKVAAQETLSKLKNYGYKHKRKSLEEILRSTTKKESELIGYDEEPINVEDDIDMQMNNLLINGERTSIQSTAGDNKVDKNDANSGRNNKSNVVMQNGCLPRGATDKINQKEYHGDMVRKTARSFLYELCAANYWKPPEFELCNDEGPSHLRKFTCKVLIEITGTSVSLLECYSDPKLQKRAAQEHAAEGALWYLKHLGYLPRDENRF

SEQ ID NO: 37303 - protein, 445 aa, Zea mays
  Clone ID: LIB83-016-E5_FLI.pep
DMVTCENVMAACGHGGLHGDAREVLEYMTREGMVPTADAYTGLVEALGHAAMYEEAYVAFNMMTEIGSLPTLETYNALAFAYARGGLFQEAEAIFSRMSNNAGIQKSKDSFDALIEAYCQGSRLDDAVKAYMEMRKSRFNPDERSLEGVLNAYCIAGVIDESKEQFEELQSSVTMPSVIAYCMMLSLYARNDRWSDAYDLLEEMKTNRASSTHQVIASLIKGEYDDSSNWQMVEYVLENSTMEGCDYSFRFFNALLGVLWWFGQKGRAARVLDQAVKFGLFPELYRDTKLVWSLDVHRMSMGGALVAVSVWLNKLYDRLVEDEDLPQLASVVVLRGEMEKSTVTRGLPIAKVVYSFLNDTLSASFHFPKWNKGRIICLKSQLKRLQSAVDSSNGSLAAGFVDMTNSRLPAPGSKIYTSEDQLDNGSRHLPDEPLAEEKESELLAL

SEQ ID NO: 37304 - protein, 328 aa, Zea mays
  Clone ID: LIB84-003-A8_FLI.pep
PRATTASHDLLSFATTATRRRLLLSTATTTIAAAMAASSSCKVIDSHLHVWATPQQAKEEYPYFPGQEPTLRGDADFLLECMSEAGVDGAVIVQPINHMFDHSLVTSVLKKYPSKFVGCCLANPADDGTGIKQLEHLIVQEKYRAVRFNPNLWPSGQKMTNEVGRSLFSKAGELGVPLGIMTMKGVGPYIQEIEELCRDYPATTVILDHMAFCKPPTNDEEEKAFSSFLSLSRFPQVYVKYSALFRITREAYPYEDTAQLLSSVISHYGASRVMWGSDFPYVVPECGYKGGREAISHVASKIPVSQSDLEWILGKTVSQLFQGAWVTP

SEQ ID NO: 37305 - protein, 221 aa, Zea mays
  Clone ID: LIB84-004-H3_FLI.pep
SVLGGSANLMLSITLRIVSGAAEVVNFLSQLMVFLWVLYYLITVEGGGATEQIIDLLPVSKQVKDRCVEVMDHAISSVLLATAKIAIFQGGLTWLLFKFFKVHFVYTSTVLGFISALVPILPFWLSSIFATGQLLMEGRYVLALVVTVIHLMLMDYGTTTILEDIPGYNGYLTGLSIIGGMTLFPNALEGAILGPLIMTVVIALKNLYTEFVLADGEETSS

SEQ ID NO: 37306 - protein, 180 aa, Zea mays
  Clone ID: LIB84-005-D11_FLI.pep
EALHYTTPHPPDDDHTRRRSSSFDRDRDAGSYKLAKTGIIMAASTVASLSVPVTTTTFAAAGGGDVLIVVPRRAGAKRVVWFPAAARRGGGRLVAVRSSGPATPPEISDKVSESIKQAEETCADDQKGDAECAAAWDEVEELSATASHARDSLKETNANDPLEKYCKDNPDSEECRIYDN

SEQ ID NO: 37307 - protein, 244 aa, Zea mays
  Clone ID: LIB84-006-D9_FLI.pep
VARKEDKLKIKDEYNNYRDRTAYKFLLFPSILLLLRWWIWDGCLPALAVQIYQAWLLYLYTSFALRENVLIANGSDIRPWWIYHHYLAMLMALISLTWEIKGQPDCSSKQRGVQLFLRWAIMQGIAMHLQNRYQRQRLRTRIALGKAKRMDVVAGETAGVEGQLLLLYPVLFILQGFEAYVGVLLLQTALHGLASEWQVLVCGILLVVMAVGNFVHTMETLVLKLRFKAKMKKAKSRQDRPHQN

SEQ ID NO: 37308 - protein, 146 aa, Zea mays
  Clone ID: LIB84-006-F11_FLI.pep
IGVNTAIYSPSGASSGVGFSIPVDTVGGIVDQLIRFGKVTRPILGVKFAPDQSVEQLGLSGVLVLDAPPNGPAGKAGLQPTKRDPYGRLILGDIITSVNGTKVTNGSDLYRILDQCKVGETVTVEVLRGDHKEKIPVVLEPKADES

SEQ ID NO: 37309 - protein, 266 aa, Zea mays
  Clone ID: LIB84-007-D12_FLI.pep
PRHYQSHGGFYREIYAVDGITGIKFPDHYPVSRLLGCVEVVGCLRSEELVCWEHVPESVRLEGLTDFCWLCENPQKLVVPFEMRGYQGVYNLERRIYDGAVRGLLPVQGPLPVKFPLPDPRDPFSLKPGSLTFAASKPTLQKSESVAAAIAGARAAATQFSKKDRKAAASSEIGTEEQSWGSHGGSSSVDCNGLSIVHGSYAHLQNQNRPSIFPSTQANSQNPNSEPRRSPRLEFGASNRLVAVALSELKQLSLSKKGTGQAVPRS

SEQ ID NO: 37310 - protein, 193 aa, Zea mays
  Clone ID: LIB84-008-B1_FLI.pep
DTPQKQVRFLTLSGDKKLLTPQPRLRTGFFSVMDSQMIPVGCIPEACTSVGAAKYGRPIGLDESLKVDLIVIGSVAVDPSSGARLGKGEGFAELEYGMLRYMGAIDDSTMIVTTGCHGLSQPTGDDSSNGGFCCHACLVPCGHARRHRRAVGTGQPTHGAPTGSPAHMAHPHTHPGRRVATYVPEHTTTGFSA

SEQ ID NO: 37311 - protein, 330 aa, Zea mays
  Clone ID: LIB84-008-B8_FLI.pep
AGGPTLALNECQILVQQKPQGDSRLLASNLCRKKRPRRSRDGPTSVAAVIQRWAERNKHLEYEESEEAKRPRKAPAKGSKKGCMKGKGGPDNTQCGYRGVRQRTWGKWVAEIREPNRVDRLWLGTFPTAEDAARAYDEAARAMYGDLARTNFPGQDATTSAQAALSSTSAQAAPTAVEALQTGTSCESTTTSNHSDIASTSHKLEADISSYLKEKCPAGSCGIQDGTPIVADKEVFGPLEPITNLPDGGDGFDIGEMLRMMESDPHNAGGADAGMGQPWYLDELDSSVLESMLQPEPEPEPEPFLMSEEPDMFLAGFESAGFVEGLERLN

SEQ ID NO: 37312 - protein, 273 aa, Zea mays
  Clone ID: LIB84-008-C5_FLI.pep
GLPAAAAAAGAAPANPNPPVVAGRRRRREGAAAAAGGGAARGEEAAGARAQAELQQGPTHQGRRQGPADPDARALRRADLPAHAGTRPQVRRRDRPVAAAAGRAGHRRRHRHGHHTGVRARLRRALAPVAHLRARQAAPPHVGAVRRLLLALLPELCRRGHGRCRRYHAADGDPRGLRAAGSLRRRSHPRRRRPHRLCAHVRWTRRRHAGARARAIAGRPHRRARRAVDQPVLPPGGCCRRRRRPDASRARAPSSPSPAAGGRGGRPRGRRVR

SEQ ID NO: 37313 - protein, 185 aa, Zea mays
  Clone ID: LIB84-008-D7_FLI.pep
ESVKFMAREILILRRLDHPNIIKLEGLVTSRMSCSLYLVFEYMEHDLAGLAASCDVKFTLPQIKCYIQQLLSGLEHCHDNNVLHRDIKGSNLLLDNNGILKIADFGLATFFDPRHKRPMTSRVVTLWYRPPELLLGATEYSVGVDLWSAGCILAELLYGKPIMPGRTEVSLEHGVALYSTILFFQ

SEQ ID NO: 37314 - protein, 233 aa, Zea mays
  Clone ID: LIB84-008-G2_FLI.pep
SFFSVHFYEFQQIEELQPGRLKKKKTLFGITLLIYCTQHAIFMVRSLLGHVGVVLRHGHDDERELPALLLRLLLGLEVGLPLVLLERRATSVRQPVDRRRQPLRRAQDRLVVLLVGREDWEVLRHGGVENLVADGLDEGGPPGDGALLLACDEHHDALVVALLNRGVPLLQDLVRVLERVSLARELADGDEVEADVLAGLEVAGKPLDVGLGDAAQHAGVVHHVGVHGGPVVQ

SEQ ID NO: 37315 - protein, 243 aa, Zea mays
  Clone ID: LIB84-008-H4_FLI.pep
PCTGTYPPLEPEVQVDLALFSLERSFVLRVLRSQPEAPRPRRRTGRLLAGGDRRPPGGSGGGGAAALEEPCRRSGRARRLVDRRRGRADPERVHERGVRVQRQAHDHAVRVVGALGGAALPLVRVLVPAQRLRAEELAQAEVAGEHLVRGGGRIGGGLGPGPGPGPGPGLGGAARSRVRRGRLARAKREVQPRHAGVVLLLPVPGKLLLRALLGHRRRLVSLLHSPRSIPLGLCMQRLKLALA

SEQ ID NO: 37316 - protein, 387 aa, Zea mays
  Clone ID: LIB84-008-H6_FLI.pep
HILKRILPAGVEVPSSFETIGHVAHLNISDDLLAYKDVIAKVIYDKNYPRIQTVVNKVGTITNEFRVPKFEILAGKNDMVTEIKQYGATFRLDYGLVYWNSRLEHEHIRLVSLFKKGDVICDMFAGIGPFSIPSAQKGCVVYANDLNPDSVHYLRTNAKINKVEDYIFAYNMDARVFMQKLMTVPGLETRSDSQVATDESYSKEGVPPNEISSSNGNHNDVREDIKNGANESSAASTTTKKRQQTSEEGDEPDCQDADANKTKRQNKKRVRGLGPLPSKPWEHFDHVLMNLPASALQFLDCFDGLIQKKYWTGSLPWIHCYCFIRSCESEESILSEAQNKLSATIAEPIFHRVRDVAPNKAMFCLSFKLPMECLKGDSENHIESVAK

SEQ ID NO: 37317 - protein, 156 aa, Zea mays
  Clone ID: LIB84-012-E5_FLI.pep
AVAKILRAVALQEKPGLVILGKQAIDDDCNQTGQMLAGLLKWPQGTFASKVTLDTEKQKATVEREVDGGIETICLDLPAVITTDLRLNQPRYATLPNIMKAKSKVIKKVAAEDLGVDIRSDMEVIEVNEPPKRKAGVILSCVDELLDKLKNEARVL

SEQ ID NO: 37318 - protein, 254 aa, Zea mays
  Clone ID: LIB84-013-A11_FLI.pep
KSHRTYGLRRIGLAAAQRRRRDDGGCGMTVFHFLNCAFLTFGPHVVYYSATPLSEYDTIGTSIKAAAVYLGTALVKLVCLATLLKVPENDSFDPYQELMKVFIGFIDVAGLYFALTQLTHRNISQNHKFQAVGLGWAFADSVLHRLAPLWIGARGLEFTWEYIFQGLEANANLVMTLSLAALGSLMWLRKNKPRTLVPIIYACALLLATMPSITSYLRRSLEWQTPKVVGFELFSSLVMAFISWQLFSACQRPM

SEQ ID NO: 37319 - protein, 419 aa, Zea mays
  Clone ID: LIB84-013-F8_FLI.pep
SKRTTPRIATAAAAAMACSAHLVSQSLYSSHRASPGGPRNLRSQGRPPARASPSARPGSRVSGCRGVSLRVAASFEQGRRQVEVSYDPQARFNQIADQIDKDAGMTRLNLFSPCKINVFLRITGKRPDGFHDLASLFHVISLGDTIKFSLSPSKSRDRLSTNVPGVPVDESNLIIKALNLYRQKTGTNNFFWIHLDKKVPTGAGLGGGSSNAATALWAANQFAGCIASEKDLQEWSGEIGSDIPFFFSRGAAYCTGRGEIVQDIPNPLPENLPMVLIKPPEACSTAEVYKRFRLEQTSQADPMTLLEEITQNGISQDVCVNDLEPPAFEVLPSLKRLKKRIIAAGRDDYSAVFMSGSGSTIVGIGSPDPPAFVYDDEDYKDVFVSEACLLTRDENEWYREPISANATSGKEGLQASVAD

SEQ ID NO: 37320 - protein, 190 aa, Zea mays
  Clone ID: LIB84-013-H1_FLI.pep
EELRLRLRLRERENMVGKKRGVISPLDHLAGLLEVRVVRGVDLAIRDLRSSDPYVVLRIGKAQKVKTRVVKKSINPEWNEKLTLSIEDPAVPIRLEVFDKDTFVDDAMGNAELDIRPLVEIVKMKLQGVADKTVVKKLVPNRQNCLAEESSIYISEGKVKQDLVVRLRNVECGEIELQLQWVHLPGSKGV

SEQ ID NO: 37321 - protein, 214 aa, Zea mays
  Clone ID: LIB84-014-E12_FLI.pep
KPSELTEEQRQLLSSNVLCQDQLKKILHDTDLESIEQCYMEMNTVEFNLEQALNTVLMQGIPLGKEKRISIERNWPVEVSCMYLYGDNLRLQQVLADYLACALQFTQTAEGPIVLQVMSKKENIGSGMQIAHLEFRIVHPAPGVPEALIQEMFQHNPGVSREGLGLYISQKLVKTMSGTVQYLREANTSSFIILMEFPVAQLSSKRSKPSTSKF

SEQ ID NO: 37322 - protein, 183 aa, Zea mays
  Clone ID: LIB84-017-B9_FLI.pep
KHLDHVNMLGLSKTTLRLRYLINWLVTSLLQLRLPDSGDGEGVPLVYIYGPKIKYDRGAAVAFNIKDCNTGTSLINPETVQKLAEKEGLSLGVGFLSHIRLIDNQKHGAVDVGLSSSLPAANGRREKKNSKNAIIGTEVVTASLGFLTNFEDVYRLWAFAAKFLDSSFLEQERLSSIPEDTER

SEQ ID NO: 37323 - protein, 132 aa, Zea mays
  Clone ID: LIB84-023-A11_FLI.pep
LGRGTGDNNFGLPSGTYVRSNSTGTIGEPFSASANPYESNNLGAYGSSSIYGDSTWRFNSSEVDIPPFGHDLGNVDPDIKSEISANYMGNYTVNNNQTSISYILFLEDTSKFIESATTSMHITYVVNSISLC

SEQ ID NO: 37324 - protein, 350 aa, Zea mays
  Clone ID: LIB84-023-B7_FLI.pep
MDANQLTTAKTSRHNYIYAEAEYTWNGRAKLVQFVPSGRAQEYLHSFMVQITTETSSVQHNVLARRGPVASLRPWCELGGVDPGVVGDGVVEVVEQVLEGPLAGDDGLDEEAEHGEHGEAAVLDLLDLELGEGDGVVGEAQRVEVLAAGVEVVALADAVEAVDAEALDEAHEDDLEAEHGQDALRVHQVGVAQVVQPALREDLRAGLEPHGLLEVHAHPLLQHLRGDAAQRTQHRPPPVDHLQRPVPRERLRVRGQPGGVPAVVAGELAGQVRGRLGGEGAQVLDAVRAVPQVVAHGDPAASSGGGDVAEGAGIGGGGGGATLAKKRRLGRDDAGGGGHDRRRHLLRFVW

SEQ ID NO: 37325 - protein, 254 aa, Zea mays
  Clone ID: LIB84-024-B12_FLI.pep
EGNDNHFATPLGGSSLLLELGHVSGEHRNNISGWRLQRGDEGRSGSLQRAEQRGVHLCAAGHSLERLEVAGPVKLALKDGADEVVGLLDTLLLLEGAVGLERGGYLLSVDEEPGIHTLHARLERLPRGTLDGFPHQRVLRHQQPAGVGERVADSLQLLHRQALVLDTRQEVAPLQLLPDGGHRLLLPAPGDGCAYGGATRALLGTDRGGWGVGSERGERPCVGECGGQERGLHFAGQEGALEEERRVGLGASPL

SEQ ID NO: 37326 - protein, 183 aa, Zea mays
  Clone ID: LIB84-024-E8_FLI.pep
RHIITDDQLFRPVLDPQGWDHDIGFDAINFEASQELKKNVSAAITGQMRKDKEDMYIHSECSVSYNAQRGCSLMGGMDMQTASKDLVCTVHGDAKFHNLPWNSIGGGISVTKFGNKYFAGAKLEDSVTIGRRVKLVANAGRMSGCGQVAHGGGVEITARGKDYPVREGVSLPRSLLCHLKRKP

SEQ ID NO: 37327 - protein, 112 aa, Zea mays
  Clone ID: LIB84-025-G12_FLI.pep
ETSERRVPEERNIKLLIAQMHVVMGQLDVASEKLQSLINEDPRDFRSHLCQGIVYALLDRKEDADMQFDVYRSLVPDEFPDKSFISDVILAARTESHDRLQKEFDSEFQAKK

SEQ ID NO: 37328 - protein, 202 aa, Zea mays
  Clone ID: LIB84-026-F9_FLI.pep
AAMAAWLAAGGLTILQTDKKRVGLLAVPLYSLLPALVRLPCAASGPAVDGAAPGAPRHRRRGRGAAAVVARAAVRVGERGVGVVQAGELGGGPGRGRHVRVPLPRQAPVRGLDLPARRAGAQAQDLVQRGGGAADPAGLGLGIGIGLDGGRAEQERPPGGSLRRRQPHPQRRRDHETEAQGRGIGGSEDEGKGQEGSGERSH

SEQ ID NO: 37329 - protein, 215 aa, Zea mays
  Clone ID: LIB84-026-G10_FLI.pep
LNMLGLAKRIGARFLLTSTSEVYGDPLEHPQKESYWGHVNPIGVRSCYDEGKRTAETLTMDYHRGGGVEVRIARIFNTYGPRMCLDDGRVVSNFVAQALRRQPMTVYGDGKQTRSFQYVADLVAGLMALMESDHIGPFNLGNPGEFTMLELAQVVKETIDPMATIEFKPNTADDPHMRKPDITKAKQLLHWEPKVSLKEGLPLMVQDFRQRISDE

SEQ ID NO: 37330 - protein, 284 aa, Zea mays
  Clone ID: LIB84-027-D2_FLI.pep
ASGRLLEYEVGGPRVCVQTAYGVEVEVENNPYDPSLMVFMDYRDCFKEEFSHIEQENPTFLYAMPMSSTRVFFEETCLASKDAMSFDLLKKRLMYRLNAMGIRILKVYEEEWSYIPVGGSLPNTDQKNLAFGAAASMVHPATGYSVVRSLSEAPRYASVISDILGNRVPAEYMLGNSQNYSPSMLAWRTLWPQERKRQRSFFLFGLALIIQLNNEGIQTFFEAFFRVPRWMWRGFLGSTLSSVDLILFSFYMFAIAPNQLRMNLVRHLLSDPTGSSMIKTYLTL

SEQ ID NO: 37331 - protein, 190 aa, Zea mays
  Clone ID: LIB84-027-G4_FLI.pep
EGPQFDQAFPETGVSSSPPARETSEIEEVGDWDNELYERVQSHLGASTSSALFWNTPGKDYGTEENTNSNWWAHAPAYPSGPQGSFIEPPDFGNRYMTNPHSSNHSGGTSEGSTSDLEQSNSRSRSSWRSPQALSKTRYMDDSDIEEGLSLHFADVHQKDEDDRHPVRDHQDPAPSGLPVRIIPRSSDPV

SEQ ID NO: 37332 - protein, 193 aa, Zea mays
  Clone ID: LIB84-028-F5_FLI.pep
NRGKAIIQCKSYIHQSVSTLVEHLAENRERKRHGAPAPAVRQVHGFSPDPPPLGRLRLRPLVDQGQLLLLGEHGAQHEARVVGELGEERHHLGRPALGGAQAAVHGPQLVLHPALLLPQALHGPDGPAHLLPGLAQLPAAGAGAGARLLPLAHDQRQQARLAPQERLVRELPPVRVHLPEPVGVELPDEAGEV

SEQ ID NO: 37333 - protein, 197 aa, Zea mays
  Clone ID: LIB84-028-G10_FLI.pep
PSRTGSLFLLSAEEEPWPDTMLPMAVHPTTTPALSPRARVSPHRPPISSLADPSSSPCHRIVSFKSRRLPLRSLHIAAAAAAGAEEEEAQLGGSVNAVDEEEAENKVVVPERQDPMLVLKFIWMEKNIGIALDQLVPGYGSIPLSPYYFWPRKDAWEELRAKLEEKEWISQKQMIILLNQATDIINLWQQGGGNLST

SEQ ID NO: 37334 - protein, 279 aa, Zea mays
  Clone ID: LIB84-028-G12_FLI.pep
GFGASVAHWRRNIGVLSESYTVYAIDLLGFGASDKPPGFSYTMETWAELILDFLEEVVRRPTVLVGNSVGSLACVIAASESSREAVRGLVLLNCAGGMNNKAIVDDWRIKLLLPLLWLIDFLLKQRPIASALFNRVKNRDNLKDILLSVYGNKDAVDDELVEIIRGPADTEGALDAFVSTVTGPPGPSPIALMPRLADLPVLVLWGDRDPFTPIDGPVGKFFSKLPSELPNVTLYMLEGVGHCPHDDRPDLVHDRLLPWLEALLPPAAGAVTTTTTTVV

SEQ ID NO: 37335 - protein, 277 aa, Zea mays
  Clone ID: LIB84-028-G3_FLI.pep
VNTASYPQFQPQLLSSRHRPRAQCHLQFPVAAMASVQLSGPRVVAAAKPAALGGLLLTPSLAVPKGRRARGLVVRAATVVSPKYTSIKPLGDRVLVKIKTSEAKSDGGILLPVSVQTRPQGGEIVAVGEGRSFGSNRIEISVPVGAQVVYSKYAGTELKFNDADHLILKEDDIIGILDSDDVKDMKPLNDRILIKVAEAEERTAGGLLLTQATKEKPSVGSVVAVGPGPLGEDGSRNPLSITPGSNVMYSKYAGSEFKGEDGEYIVLRASDVMAVLS

SEQ ID NO: 37336 - protein, 143 aa, Zea mays
  Clone ID: LIB84-029-E10_FLI.pep
GEHMSFCSCNLRTSESSNKSHGVLPPAAPPYHLFQFQPVIFRPYASTYVYMVHGRIAACRCLYVRRMVAVLYSEKGTLMGAHALRVSLEQGFDLPPVLVCHFVPSYFHGGCHQTIVNRERFVDNQNWPDTEGAVRGPGSQFII

SEQ ID NO: 37337 - protein, 252 aa, Zea mays
  Clone ID: LIB84-030-D11_FLI.pep
HGTYESSHPGPAIPFTHHEYLGDKTHRMDGLGTFQASEPLSESEYNSYGLFLFVFASSGGRSSSSSSESGSSSTWAACASAPASEASFGVGAELKMAGQLPDFCRARTCSWKRTRETTHAILLPDSSAWSLPLASTTTKLPFLIQKLFWNLAGNKARDLTPTPSITSMTLEPRSVRTCMMLSPSASVTAAPSSHARRRFFLPAFICSSPFFGGGYTGGGALLRGYRSAATTGGRRRRRRRRGSRIVKDQVRL

SEQ ID NO: 37338 - protein, 99 aa, Zea mays
  Clone ID: LIB84-030-D3_FLI.pep
LLHHFQKTLEPHLRYSSKIVALADPVVAVTAKTAARPSRAARRPSGAASCTRFAGDEAAAACGTAAAGLSPTTLEFTPAIIGALSSSSTWCRVVRAWLG

SEQ ID NO: 37339 - protein, 290 aa, Arabidopsis thaliana
  Clone ID: LIB9-036-B12_FLI.pep
GFSGCSLGSQREEGRGSLIPLRFLQLGFSQLESKMVTDKSKKAKTEEENVEQIDAELVLSIEKLQEIQDDLEKINEKASDEVLEVEQKYNVIRKPVYDKRNEIIKTIPDFWLTAFLSHPALGELLTEEDQKIFKYLSSLDVEDAKDVKSGYSITFSFNPNPFFEDGKLTKTFTFLEEGTTKITATPIKWKEGKGLANGVNHEKNGNKRALPEESFFTWFSDAQHKEDVEDEMQDEQVADIIKEDLWPNPLTYFNNDADEEDFDGDDDGDEEEKEGDSDEDDDEEDEVGEE

SEQ ID NO: 37340 - protein, 131 aa, Arabidopsis thaliana
  Clone ID: LIB9-04-E10_FLI.pep
QCLAYPPPSKLWSSPAILAFERILQREWRKRIFAILLSQVLSHNCHLLYDPFHWCVARVVCVFKNCAVQIISNLLAVFRAQKMEHWGFLRVFISEQCHYVFKLFYIFFDLPKRSQSCLTKFESFGAVPSTD

SEQ ID NO: 37341 - protein, 375 aa, Arabidopsis thaliana
  Clone ID: LIB9-044-D5_FLI.pep
FRFLSLHLAIEEVMYQSSSSTSSSSQRSSLPGGGGLIRYGSAPGSFLNSVVDEVIGGGSSNARDFTGYQPSSDNFIGNFFTGAADSSSLRSDSTTCGVNNSSDGQKQLGNNNNNNSNKDIFLDRSYGGFNEISQQHKSNDIGGGNSSGSYSLARQRSSPADFFTYLASDKNNFSLNQPTSDYSPQGGSNGGRGHSRLKSQLSFTNHDSLARINEVNETPVHDGSGHSFSAASFGAATTDSWDDGSGSIGFTVTRPSKRSKDMDSGLFSQYSLPSDTSMNYMDNFMQLPEDSVPCKIRAKRGCATHPRSIAERERRTRISGKLKKLQDLVPNMDKQTSYSDMLDLAVQHIKGLQHQLQNLKKDQENCTCGCSEKPS

SEQ ID NO: 37342 - protein, 272 aa, Zea mays subsp. mexicana
  Clone ID: UC-ZMROTEOSINTE063G08_FLI.pep
MTSASELFTARRAARGARISDLDLDPHADALRDQHGLGARHRRRGCRPRRQLDAAGDVRQHLHTGAPPPRRRGSYTDQILSYIDNNNLGVGDSAARRNRLDRLMFRTNERLPGAVLQAQARVLERLRGISLGSSASRPSISLDEFSASDVFRIIDFRNREARHEANRHHSSWFHPSSESDEERPTVSSTHSNRSTGLTKAAFLRLQVEIFEASKDDSREASPECSICLDGFYDGDELIRLRCGHRFHSTCLEPWARKCADCPYCRTNIRSRS

SEQ ID NO: 37343 - protein, 210 aa, Glycine max
  Clone ID: jC-gmfl02220053d12_FLI.pep
GRFVERDVDEKVMDTDDYATGLYAGDDADGEKLARKVGPEIMNQLTEGFEEMTSRVLPSPLEDEFLDALDINYAIEFEPEYLVEFDNPDIDEKEPISLRDALEKAKPFLMSYEGIQSQEEWEEIMEETMARVPLLKKIIDHYSGPDRVTAKKQQEELERVAKTLPGSVPSSVKQFTNRAVISLQSNPGWGFDKKCHFMDKLVWEVSQHYK

SEQ ID NO: 37344 - protein, 263 aa, Glycine max
  Clone ID: jC-gmfl02220054d06_FLI.pep
SGTLQRRLCKIKREMALDQYFDEAVPQLDSLEDKSSLETWKCGSDDIADSDRNASGGFDCNICLECVQDPVVTLCGHLYCWPCIYKWLNLQTASSENEEEKQQCPVCKSEISQSSLVPLYGRGQTVLPSKGKGHQVGVVIPRRPLGPTLDSATVSPPISHVYHRHYPNHPQQFNSIPGSYTSMFNTGGSLANAFDTTYGVFGEMIYARVFGNQMTNTYTYPNSYDLSRNSNPRIRRHLMQVDRSLNRITFFLLCCIVLCLLLF

SEQ ID NO: 37345 - protein, 203 aa, Glycine max
  Clone ID: jC-gmfl02220056h06_FLI.pep
KHLNASPFTSPLNSNYTGEENSNSNSPPRPGIGVLRERHDLLQRRGQRRRHGGVPANGAGPVKLEPWVETTEMKVVSTLWHHPQHLRILVLAQTDRACAVVITFLNEWKLGVGVYDGLVEAGGDVVLAGVVVVVILVLGYEDHAREHDAIGGVAAVVVVVAAAEGAAAKVGGEDEGGEEEENAEGDGDGVAEAEVGEVRGGGG

SEQ ID NO: 37346 - protein, 89 aa, Glycine max
  Clone ID: jC-gmfl02220072c03_FLI.pep
INFPLSTYEKELEEMKHMTRQEFVANLRRKSSGFSRGASVYRGVTRHHQHGRWQARIGRVAGNKTHPLGETHNISIPHDYMTMIHLQRG

SEQ ID NO: 37347 - protein, 421 aa, Glycine max
  Clone ID: jC-gmfl02220073g06_FLI.pep
SHRAIEQLPGSNTFEVAGGSSNNFGRSSSFMNDARGPHKRKIPKGIRGNSQDFNASSSSSSTAPPNARHANDVAIMDNTQFHIRSLVEVGPHGSEWSRPNESIMVHDHNHLIHGNYLGQHFPPIAPPWLFQQLNSNNNDGHATPWNQSLPMPCVQAPAINGSSLESVSMGLQRYHDPVGNRNGLRFPYHVPVNQQHHSYHHSTLPMQGVRDHSLNFFPTVTTNSFRVPTNPLRNVAIPTQASFEMGPRHVGPAPSSSLRIYRPHRGVVPETTLRHRSLPPMGFLRVNDVALIDEVGNLVDNHRDMRLDIEDMSYEDLIALGERIGNVNTGLSEETITTQLKTKTYLTGATSINMEEEVCDDQGTFSCIICQDEFKNQEKIGVLQCEHEYHADCLRTWLVVKNVCPICKSEALKSTSVSPPT

SEQ ID NO: 37348 - protein, 184 aa, Glycine max
  Clone ID: jC-gmfl02220096f06_FLI.pep
TVFKRLGFPPIELDNPHVPLPRRHVDRRPPLGVHRIHFQLLAVVAVALQLKLHRVDSVHCRGLVKNRFVDFAAGGFQKLHRLEAPNPNCERHEGFRRRAANPRRRRRCRIPWRRGGRRGRRGGRVWRIVGGGVRRWPFGWGAWWLGRLWRREGRREGVDQRAERVVVCKKQKRVGELWRRVCGG

SEQ ID NO: 37349 - protein, 283 aa, Glycine max
  Clone ID: jC-gmfl02220097e06_FLI.pep
TMDCSAARKTQKADREKLRRDRLNEQFVELGNILDPDRPKNDKATIIGDTIQLLKDLTSQVSKLKDEYATLNEESRELTQEKNDLREEKASLKSDIGNLNNQYQQQLRTMFPWTAMDHSVMMAPPSYPYPVPMAVPPGPIPMQPYPFFANQHPAVISNPCSTYVPYLAPNTIVEQQSTQYVSPPLHPCGRSNVSGKQESKSKSSRESKAEKNEDSNDVTTDLELKTPGSSADQDLSSRQRKSSKLSRRESSCTEGSSLGRCSSSRSVQDSSSSSVAASRKDNE

SEQ ID NO: 37350 - protein, 305 aa, Glycine max
  Clone ID: jC-gmfl02220101f11_FLI.pep
SFNKRSLHAIGSTPNPYEKAISIIGKTLAPFDDDNLIPCFGFGDATTHDQEVFSFHSDHSPCHGFEEVLACYQKIVPNLKLSGPTSYAPVIEAAIDIVEKNRGQFHVLVIVADGQVTRSVDTSDGELSPQEEKTIKAVVDASAYPLAIVLVGVGDGPWEDMRKFDDKIPARDYDNFQFVNFTEIMSKNISPSEKEAAFALAALMEIPFQYKATMEFGILGRVTGRAKRIVPKPPPVPYSRPAPSINTAASSGDDQNQTACPVCLTNARDLAFGCGHMTCRECGHKLTNCPMCRERITSRLRVYSG

SEQ ID NO: 37351 - protein, 247 aa, Glycine max
  Clone ID: jC-gmfl02220102b01_FLI.pep
FLDEEEHGPVVDHPIWYIRTTGLQQAVITAITVCNYKKDEGLIEGTECSVCLSEFQEDESLRLLPKCNHAFHLPCIDTWLRSHTNCPMCRAPIVTDPTRVPSSMDPTAFETSSFVEEIFENSAENTQNSSDDLLRGEEEERVQEDEACEENLASELVVTVQQPRRSVSLDSSSAAKISLALATVVSGESHGDHSKRVGGNGNLATKGGSSSCSSTSSVKRSLSFNAKHLLSWYSRSQRKPNAPLRSF

SEQ ID NO: 37352 - protein, 997 aa, Glycine max
  Clone ID: jC-gmfl02220103b07_FLI.pep
NADSPKAPGCQDLGNMGNTNSSGQKPALHGDISESKKLTSDLRAPSASAVGVAHSNEKLRTVSYSTKNQNGFTLPRILDESSGREGNNCDNNKVKRASKGVKSISVEVSGKGNDFIKEDEPISLLPQKRINEASFTKLKSRKKTCVPSANGKSQGLKVTSQVDEPPEVDDYFSIGKDGINNSNTCLVLKPSGSTSNSLAFDELFSRNANPESVQCDNVCQNSPKTAVQSLSESKINGKPDITDSGMQQVDGDEAEQHNVTRNLDCSSLGNKKSCNVESAGCTKLDLITEESNKLVRNSPRKKSVAKRSLGSKPKLGATAKQKKSLSLTKTSLQGEGVTCSSGSKEIATCDAKMHQGCPKIFDVNKTTEQEIVGKNAEDAGDRTEFLDDETEAPDDKCEYELGMALDEDLVHLSKKPYTAKEEKSEAICPATKCEEAMPPKKGTNKTEKQKTSSLPVKHQARKGSAGKVKATVSKYAEDDGDRTELVNDEIEAPDDKCEYELRMALNEESHLSKKSDTATEEKSEVICPATKCEETMPPKKGTKKTEKQKPSSLVVKNQARKCPAGNAKATVAKELSKSNMAVSGEKIPNETGHEPEIETMEEMSLPDDKSDESAVQRNKSENFSEEKENKPIDGEQGRSNGNPTIKSSVRPAKIKSKKSGLNPSITESNTRVKTEAACFILSGHRLQRKEFQQVIKRLKGRVCRDSHQWSYQATHFIAPDPIRRTEKFFAAAASGRWILKTDFLTASSQAGKLLAEEPYEWHQNGLSEDGTINMEAPRKWRLLKERTGHGAFYGMRIVVYGDCIAPPLDTLKRVIKAGDGTILATSPPYTRFLGTGIDYAVVSPGMPRVDTWVQEFLKHEIPCVVADYLVEYVCKPGFSLERHVLYGSHAWAEKSFDKLKSKAEEIVEELVAPEDSRDDDIICKVCGSRDRGDVMLICGDESGSVGCGIGTHIDCCDPPLTAVPEEDWFCPKCSSTRNCSNKPSKRKKTVLSSSKCT

SEQ ID NO: 37353 - protein, 91 aa, Glycine max
  Clone ID: jC-gmle01810006h04_FLI.pep
PLVEAVQYTHNSYHIAREIQQEVHSQDELIQHDGHLFRRFGSTLPSDPGDTGNVAWGFFMSSSDEHSEQTKWSNFFASSIVMPTQAGWYQS

SEQ ID NO: 37354 - protein, 445 aa, Glycine max
  Clone ID: jC-gmle01810009c08_FLI.pep
LVSLSSMAEPHSTAAILPPSTARLEETPSGSSQTPLRSGRGGWSIVDGSFAIVRDNTCSCFVVVFSLWFFVSMTMILGVYGSMTIVLGPKSSIVFQPSPVFVQSVKVENLKANPGPGPILYGTYRYPPLDVVTTWGESINVSLPSGSYKEWKYYLNCGSSINISYHVSSKSSSVFLIIAEGDVSLTRWLEDPTEPNTTLSWNVIHGTGMITQDIFWSSSYYVALGNLDEDVEVALNLSIRASLHNTTNAFYKCDLANGPCSLNLLFSDGSAAVLVTPGPQQNASNEWYVKLSYGPRWVTYIFGIGGLTLLVFGAFNFLNKLQCAHEDRAGVRSEGTERQRAPLLPHKDDDLSSWGSSYESLPQDEKDLGFLPGGPIDGKTLVDGETSNNTRHLCAICFDAPRDCFFLPCGHCVACFACGTRIAEAAGTCPVCRRNMKKVRKIFTV

SEQ ID NO: 37355 - protein, 249 aa, Glycine max
  Clone ID: jC-gmle01810010c06_FLI.pep
ILMEIWQLVRLILILKPNVVFVMLEQMSIFYYFVIYVILLRTHTVLAWAILFLMVIGFVTIVLFPGRPISMKNQTNKNFAPTAEPSVTINIFDIVRETGSRVVNRPRASPLQQNLSSPVIPLPDRLSYLSRLKGKGPVTGVCNMQRNVKVFRENWNALRSGSFQFRCNSFQPGSTVSQKQDSSSLSHHKLDGLHSMASTSLQQSTVQGGPSNKMLNERVFKDADKAWKMMDRAKRIQRLIIEQAAFYRE

SEQ ID NO: 37356 - protein, 261 aa, Glycine max
  Clone ID: jC-gmle01810014g06_FLI.pep
SRKMAMIPYHLCRLPYQDSLKALEADIQHANALAAAIPRAKGETLLQMKLVYNHLAPLFLLFLQWMDCSCAGFLHRYLDLFHILIYKVHNDGRSIMPTHGRKATIGDFYAVILPSLQRLHGSLEKLEVVKEEGQSSIEGPSYGKKVIEEGVKLTANVDLQREDECGICLEPCTKMVLPGCCHAMCIKCYRKWNRKSESCPFCRGSLRRVNSEDLWVLTCNDDVVDAETVSKEDLLRFYLYVSKLPKDHPDALFLMYYEYLI

SEQ ID NO: 37357 - protein, 234 aa, Glycine max
  Clone ID: LIB3106-107-E10_FLI.pep
LLPSSELRVAERAMSQESFIYSFVARGTMVLAEYTEFTGNFPAIAAQCLQKLPSSNNKFTYNCDHHTFNFLVEDGYAYCVVAKESVSKQISIAFLERVKADFKKRYGGGKADTAVAKSLNKEFGPVMKEHMKYIIDHAEEIEKLIKVKAQVSEVKSIMLENIDKAIDRGENLTILADKTETLHSQAQEFKKQGTHVRRKMWYQNMKIKLVVLGILLLLVLVIWLSVCHGFNCAN

SEQ ID NO: 37358 - protein, 228 aa, Glycine max
  Clone ID: jC-gmle01810016h12_FLI.pep
RIDVDFPSPDAASQVGLLHKEIVGKAMIYKLSEAVEEGDGANFVKVLKQQCEENKLRLSDVFDKVTLAGHSLLHVAADMGQKSIVQVLCDLFPLLLIRRNVRGDTPLHVAARSKKYETVKLILSQYATKKSTYDEMKDKKIARETNECGNTPLHEAVYSGDVDVVKEIFDQDKAVAYCLNKSKRSPLCLAVVNGNEQILELLLQIPLPADQPLSQCRRSSPLHTAVQH

SEQ ID NO: 37359 - protein, 274 aa, Glycine max
  Clone ID: jC-gmle01810019e09_FLI.pep
GRAYSHFAPMEMQDQIESTRSTIFGSASNIHSNAEKQAENVAPKVRKPYTITKQREKWTEEEHQKFLEALKLYGRGWRQIEEHIGTKTAVQIRSHAQKFFSKVVRESEVSDEGSIQPINIPPPRPKRKPLHPYPRKSVNSFRGPTIPNETEISPSTNLLVAEKDTPSPTSVLSTVGSEAFGSQFSEQTNRCLSPNSCTTDIHSVSLSPVEKENDCMTSKESEEEEKASPASRPLSTVSNPKMCMKPEFSSKEIEDATDMPQTTSIKLLEEQSLW

SEQ ID NO: 37360 - protein, 225 aa, Glycine max
  Clone ID: jC-gmle01810026a02_FLI.pep
LVFEMKNCELCKLPARTFCESDQASLCWDCDAKVHGANFLVERHTRTLLCHACQSPTPWKASGAALGNTVSLCERCAGGTTEQGQESQGGNDDDIDTDIDTDDEDDYDESEDEVAADEEDGDNQVVPWSSEPPPPAPSSSSSEESVSRCNNVDEVSTTLKRRRQEDNDFQGWNSNNWGCERSEVERGGWLVRLRRRTADDVAVEQRSARAASPDGCCGDRASEDV

SEQ ID NO: 37361 - protein, 266 aa, Glycine max
  Clone ID: jC-gmle01810028f10_FLI.pep
AEECCVVHSRKKKEQMGNPRKPSTADELHTAARSGDLIAVNSILASNPLAVNSRDKHSRTPLHLAAFSGQAEVVTYLCKQKADVGASAMDDMAAIHFASQKGHLEVVRALLSAGASLKATTRKGMTSLHYAVQGSHMELVKYLAKKGANLGAKTKAGKTPLDLATNEEIRSFLEDYEKSAKNGELGKKDKDKAEESDPKTSTLGSEGDLSSEPAAAAIDEEDNVGEKRKKGNEDGTREEESSQPKKARVNLSHLQSSDDTQEEENL

SEQ ID NO: 37362 - protein, 331 aa, Glycine max
  Clone ID: jC-gmle01810036d01_FLI.pep
ISMASFPSNSALEHSMASAQQNSNPHASSPSFMTRVAMRISRSRWFTFLRRVFHYQNGPRSNLGSNPFNSSTWMMLELIALLVQIASTTFTLAISKSEKPIWPMRVWIAGYDIGCVLNLLLLCGRYHQLHVTQGNNALSLSELEQQRNNEESSVYRTSHLIDKCRSSLELFFAIWFVMGNVWAFDSRFGSFPQAPKLQVLCIILLSWNAICYSFPFLLFLLLCCCVPLMSTLLGYNMSMGSSARGASDDQISQLPSWRYKGLHSNLDIANDSQSSERLINQDPECCICLAKYKDKEEVRQLPCSHLFHLKCVDQWLRIISCCPLCKQGLQR

SEQ ID NO: 37363 - protein, 158 aa, Glycine max
  Clone ID: jC-gmle01810042e11_FLI.pep
HYLISFYSFLHSTITMVKEKKNVVVKNKKPNNNADELHFRGVRKRPWGRYAAEIRDPGKKTRVWLGTFDTAEDAARAYDAAARNFRGPKAKTNFPVPPDDNNNNNVNVNKNKSVNVKSTVPARAAPWSPPPRSVKPRAAPPPPQSTVSRSYPSSSKSS

SEQ ID NO: 37364 - protein, 362 aa, Glycine max
  Clone ID: jC-gmle01810043d11_FLI.pep
LLIMEAIFVTKPASHSLLLTKLSPNPKHLFPPHQQSFHNIRHKPTRFRPVIAVFQNQHQQDAAAASNHTEDESYGEVKGIIGSRALEAATGMEYLIEWNDGHAPSWVPADFIAKDVVAEYETPWWTAAKKADESALKNLIESDDGRDVDAVDADGRTALLFVAGLGSESCVKLLAEAGANLDHRDRSGGLAALHMAAGYVRPGVAKVLLDLGADPEVADDRGRTALDLAREILKVTPKGNPMQFGRRIGLEGVIRVLEGAVFEYAEVQEILERRGKGENLEYLVRWKDGGANEWVKAKFVAEDLVKDYEAGLEYAVAEAVLAKRVADEGTPEFLVKWADLEEPTWAARGECGPRACQSFRGK

SEQ ID NO: 37365 - protein, 360 aa, Glycine max
  Clone ID: jC-gmle01810046f05_FLI.pep
SSSYTGKVYTYDGLYKVVNYWAGKGISGFTVYKFRLRRLEGQPTLTTNQVYFTYGRVPQSLTEIQGLVCEDITGGQEDMPIPATNLVDDPPVPPTDFTYCKSLKVAKNVKLPMNATGCKCEGICNDPTSCACALRNGSDFPYVSRDGGRLIEAKDVVFECGPKCGCGPGCVNRTSQRGLRYRLEVFRTAKKGWAVRSWDFIPSGAPVCEYTGILARAEDMDSVLENNYIFEIDCLQTIKGLGGRERRSQDGEIPANLLDKYHDQCSESVPEFCIDAGSTGNIARFINHCCEPNLFVQCVLSTHDDLRLARIMLFAADNIPPLQELTYDYGYVLDSVLDSDGKIKQMPCYCGASVCRKRLF

SEQ ID NO: 37366 - protein, 293 aa, Glycine max
  Clone ID: jC-gmle01810051e03_FLI.pep
TKSHCYKHFTLNISKKQRFLLSTMRDMKDAGALGGKTARACDSCVSRRARWFCAADDAFLCHGCDTLVHSANQLASRHERVRLQTASSKVTTTHAWHSGFTRKARTPRHNSKHFALQQRLKDEVLFNNTSVLPLVPELGGEEQEPVVVDNDETEEQMLCRVPVFDPFDVRTDDLDSFSDMDFAEFAADVESLLDKEDDEISACVGGGEGEGEGVQGAMVKVKDEEEIDGDVACYLESVFDDAFHWNNIESVLSDAREEKEGVVACDVGVGDEEGGTKRDIFLRLNYDEVITAV

SEQ ID NO: 37367 - protein, 150 aa, Glycine max
  Clone ID: jC-gmle01810051e08_FLI.pep
HLFKKLPSSKLDYYYYYYHYPIELLKMCKGAEGEKQHGFCSSYLHKECATRSATCCELCGLQASLYCQADDAYLCRKCDKRVHEANFLALRHIRCFLCNTCQNLTRRYLIGASIEVVLPANINWTIGNLPSNRGIHRKCSRMHNNLSLLL

SEQ ID NO: 37368 - protein, 525 aa, Glycine max
  Clone ID: jC-gmle01810054b09_FLI.pep
CSHVFHFPCLAGHVKKHRMVTCPVCNANWKQLQQNADENKGNAELKTTRSFKLHNYDDDEPLMSPTSVSRFNPIPESSENEEEEDEEQNDEETNFNVSSMIRTKNIDAFFSPEAAVVASNRSSETYVAVLNVKSQPRNAAANRPPADLVAVIDVGGSVSGEEYRMLKRSMQVVISSLGSADRLSVVAFSGGSKRLFPLRRMTGRGQMAARRVVDALSTVELRRDGTAARNNALKKAARVLEDRRQKNTVAKIILLTNSHEDQRLSSTRFDIHSLRYSYDGACNHAQHDHELAKRVGNLLSVAAQDFKLELKLTSRSAPAEISAVYSLAKGCTDALSPESVALGDLYAAEGREILVELKVPAGTASRGSHQRVISVRCSHRDPFTRELVISKDRELNVPRPRTVRSCDPRIERLRRCQVSARAVAESRRLMARNDVSGALELLSSARASVSREQGDECLRWLESEQAELRSQKLRSSCNNNCFDEKGEPLTPMSAWRVAERLAKVAIMRKSMNRVSDLHGFEDARF

SEQ ID NO: 37369 - protein, 245 aa, Glycine max
  Clone ID: jC-gmle01810059c05_FLI.pep
IPGKTVVDVIRQYKELEVDVSNIEAGLIPVPGYSSTAISPFTLDWVNTPGYDGFKGCGKRPSSVRPIEHERKKGVPWTEEEHKLFLLGLKKYGKGDWRNISRNFVITRTPTQVASHAQKYFIRQLSGGKDKRRASIHDITTVNLTETITTSCSEDTNRSTSPHVLSQPQQQNSTPTTPRTHFQWTNQSNTGVAMTLNPAHERVFMSPYGANSFGVKIEGQNLHESSYLGPQTQNMVFQMQQSSQH

SEQ ID NO: 37370 - protein, 728 aa, Glycine max
  Clone ID: jC-gmle01810059f08_FLI.pep
AYILLVVCAFTFCFYDGSDRHLFTAVLQLELNKVVVSVLCCKRVISKSTTTTMPPSQFPLRWESTGDRWWYASPIDYAAANGLYDLVTELLHLDTNLLIKLTSLRRIRRLEAVWDNESKFEDVARCRSKVARNLMIECETGRGHKHNSLILAGYGGWLLYTAASAGDVDFVLELLGRDPLLVFGEGEYGVTDMFYAAARGKNCEVFKLLLRSALSRKECLGGSEAELEEKLDEGSKVFKRDVMNRAIHAAARGGNWEILKQILASVSVSQVLSYRDSQGCTVLHAAAARGQVEVVRNLIESYDIINSANAQGNTALHVASYRGYLPVVEILIGASHSLATLTNHYGDTFLHMAVVGFRSPGFCRLDKHTELMKQLTSEKIVKMKDIINVRNNDGRTALHVAVVHNIQFDVVELLMSVPSIDLNICDADGMTPLDHLRQKSRSVSSEILIKQLISAGGISNYQDYVTRNALVKHLRTHGIGGSPGTSFRIPDSEILLYTGIENSCDDNYDQASVESNSWSSEINNYDSANSPCNSKSSSVNYGARHLKFLLQSSRRRDTKEAASDLEDDVSVNSFSSRNNLEDFPIPLRQRYSKMCSLPNNKRTLSIRTYLPSPTAKKYFHAGLTQGVIKVKPQVPLPVHSTSNLFQKLSISSNSTNNKQKRVDIMGPSCSNRPMDGGGTLQLNFKQGTFNRRLMNRYFSFGAHGQALEDANSCTMSNCSSKHFSSLVA

SEQ ID NO: 37371 - protein, 335 aa, Glycine max
  Clone ID: jC-gmle01810062f11_FLI.pep
QIQSKNLHYLNFQICVICKQIHGSCTQCCKCSTYFHAMCASRAGYRMELHCLEKNGKQTTKMVSYCAYHRAPNPDTVLIMQTPLGVISTKSLLQTKKKTGSRLISSSRKKQDDSPVDNTEHEPFSAARCRIFQRTNHTKKRAADEAVSHRVRGPYHHPLDAIESLNTHRVVHEPQAFSSFRERLYHLQRTENERVCFGRSGIHEWGLFARRNIQEGDMVLEYRGEQVRRSIADLREARYRLEGKDCYLFKISEEVVVDATDKGNIARLINHSCMPNCYARIMSVGDEESRIVLIAKTNVAAGDELTYDYLFDPDEPEENKVPCLCKAPNCRKFMN

SEQ ID NO: 37372 - protein, 416 aa, Glycine max
  Clone ID: jC-gmle01810063f07_FLI.pep
CSDPKGERNGVGKEDEQEVRKKVLQKLDACFGGSLLKDANHVRLDRVSELLMFYLSSMCYIFGFDSLCGPGSSFKSGKFIWASDAAGCLNQLESRSFLGKLAGLHTVVFVPLKSGVVELGSFEMVPEEQGVVEMVRTAFGESSPGQAKVFPKIFGHELSLGDTKSQSITISFSPKVEDDPGFTSDSYEVQALGVNHAYGNSSNGTLGDGNEGTLFPQLNQMMAGNFNAQARVPCLDLGNEDSSSIHADERKPKKRGRKPANGREEPLNHVEAERQRREKLNQRFYALRAVVPNISKMDKASLLGDAITFITDLQMKIKVLEAEKNMGNNKDQKLSLPDMDFQEREDDTVVTVRCPLDIHPVSNVVKTFREHQIVAQDSNVSTADDKIIHTFSIRTEGGEAAAIQLKEKLEASLSKS

SEQ ID NO: 37373 - protein, 309 aa, Glycine max
  Clone ID: jC-gmle01810064h08_FLI.pep
IAYLSPLIGILPQGQMDMHPLVTTLLYLLTSQMHQALLMIILCIRLVLDHSLQCRKIIYTNLLPPIMTDKHFMLMLVLLILQWEVDKGITSVRALEFLQSTREAVLVDTLMLGVQLIFLYLQNCGRRSQILILNICPGYHFTMTPTFRGTGLSIKGEGSLRNVRSRSTLDLDSNLSRTHLSSNHSHNSYPTVPPVDHSSMADLSGQTSGTLTRDWSQMNMSPANGRVLLSDTSSFGLETSHFLVGSGATASNASVDVGGFHHEFGASRNPTAPQSFHNTHTQTARGIRSNYSQRSTPTFRASQACAWDM

SEQ ID NO: 37374 - protein, 268 aa, Glycine max
  Clone ID: jC-gmle01810064h11_FLI.pep
CTSRTCAICLEDYCVGEKLRILPCCHKFHAACVDSWLTSWRTFCPVCKRDARTGLTDPPPSESTPLLSSTPASMASSVLSSARSSLASSSAIQIARTASMASSALPSARSSLASSSAIQIARTASMASSALHSARSSLASSSAIQISRAASQTPSVSRNHSIASTPYVQPSLRSSYHQSPSLSISRSSVDLRNASQRSLASHLNSPCSMGYPSLSSLNSRYMSPHIPSPSNASVSYMGSSSHQQHPLRYSESAASFSPFASTHSLPEC

SEQ ID NO: 37375 - protein, 181 aa, Glycine max
  Clone ID: jC-gmle01810085a01_FLI.pep
GVRKRPWGRFAAEIRDPLKKARVWLGTFDTAEEAARAYDTAARTLRGPKAKTNFPLSPPFYHPDPFSDHRHFANTGEDFHDHRRPTSSGMSSTVESFSGPRAAVPATAPVATGRRYPRTPPVIPEDCRSDCDSSSSVVDDGEGDNVASSFPREPLPFDLNALPLDDADVATDDLFCTVLCL

SEQ ID NO: 37376 - protein, 331 aa, Glycine max
  Clone ID: jC-gmle01810085e03_FLI.pep
RNMKKPGMLFFQAFKLILLGSNSLRASLQNLESVSSSSRGMSTHGHPERNDDFDCTLCLKLLYEPVTTPCGHSFCCSCLFQSMDRGNKCPLCRTVLFISPRTCSISVTLKNIIQKNFPEEYAERKQEHDSLIKAGVDLLPLFVMDVVIPCQRFPLNIFEPRYRLMVRRIMEGNHRMGMAILDSTGSLAEFACEVEITECEPLPDGRFYIEIESRRRFRIIHSWDQDGYRVAEVEWIQDIMPPEGTSERDTLQQQTYNAVEDARSWIARAKEAARHDQRKLERLASVEVMMPSPKDPERFSFWALIAAGYSFQSEACGKIGSPTHKRHCRED

SEQ ID NO: 37377 - protein, 322 aa, Glycine max
  Clone ID: jC-gmle01810085f01_FLI.pep
LESWVPMPVDLDNASTASGEAASVSSSGHQTKPAVPKKKRNLPGMPDPEAEVIALSPTALLATNRFVCEICNKGFQRDQNLQLHRRGHNLPWKLRQRSSKEVRKRVYVCPEPTCVHHDPARALGDLTGIKKHFCRKHGEKKWKCDKCSKKYAVQSDWKAHSKVCGTREYKCDCGTVFSRRDSFITHRAFCDVLAEENVRSHAVVKDNSENDSKVLTLTGDSPPLQPVSATVATTTTQTNSAMSCGLQTQNLELPETNPPQVIEEEPQGATAVSGSCGSNSTCSTSNGGATSNSNSSSSVFAGLFASSTASGSLHLKHQHSVT

SEQ ID NO: 37378 - protein, 195 aa, Glycine max
  Clone ID: jC-gmst02400001g05_FLI.pep
GCRRRLAPVRGSDQERKKGVPWTEEEHRRFLMGLLKYGKGDWRNISRNFVVTKTPTQVASHAQKYYIRQKVSGGKDKRRPSIHDITTVNLTETSASDKNKPPVIAPQQKLNSMSKVQLDWTSSHYNDGSLMVFNPNSDDLFVSSSSDVTSMALKMQGQDLYECALREAYAKVKVPGFSMAPRDFNNEAVFGIHAL

SEQ ID NO: 37379 - protein, 209 aa, Glycine max
  Clone ID: jC-gmst02400026h10_FLI.pep
LLCCESCDFDLLKFKGQSFGASAPANGGGSGQPKQRVRARRGQATDPHSIAERLRRERIAERMKALQELVPNANKTDKASMLDEIIDYVKFLQLQVKVLSMSRLGGAAAVAPLVAEGGGDCIQAKRSNSNDSLAMTEQQVAKLMEEDMGSAMQYLQGKGLCLMPISLASAISKATCHPFINGDGPSSPRMSALTLANAVVKDAASVSKS

SEQ ID NO: 37380 - protein, 347 aa, Glycine max
  Clone ID: jC-gmst02400029f07_FLI.pep
TNQPSMADVTTYLRHHRDPDPDPDDDDQTLIPFPYWDLDFDFDPEFPTNTFSFTDRENQINFVMDLFHQRVEQSQLTDPLSNDAVFGVIDGIDLGFPAADDFFIGRRFSVGSDESDGGHSHSHAGIDDGVLGFCAHSDEDYNENDDVASIPLCWDALQLEDNNNNYDDFEWEEVIDERDVLSMLDDTVSVNLGIEAEAAAAAAEEEEAESEASILEWQVLLNSNNLEGPNSEPYFGDNEDFVYTADYEMMLGQFNDDAFNGKPPASASVVRNLPSVVVTEADVVCAVCKDEFGVGEGVKVLPCSHRYHEDCIVPWLGIRNTCPVCRYEFPTDDADYERRKAQRSVVM

SEQ ID NO: 37381 - protein, 433 aa, Glycine max
  Clone ID: jC-gmst02400030c02_FLI.pep
SNKKKKKKSLLLSFQRYQMPENRQVLRNADSGDNIEEAIRHLKINDNWDRDAAAQSTQYPDRPGEPECLYYLRTGMCGYGTNCRYHHPAHISIGTHYGEELPQRAGQPDCEYFLKTGTCKYGSTCKYHHPKDRRGAAPVSFNTLGLPMRQEEKSCPYYMRTGSCKFGVACKFHHPQHASLGAYPLAGSPTPTSTIIPTSGLPYAGGFPAWSAVPRMSYLSGQGLQSYVPPFLSSSQGVIPVQSWNNYMGNMNPAMPNGFLGSNLVYDYMNLGESLFGGQAINSALPNRPDQPECRYFMSTGTCKYGSDCKFHHPKERMSQSLINPLGLPVRPGQAVCSYYRIYGMCKFGPTCKFDHPVLTIPQNYGLTSPAMNVLDTPLTRGLSNVQPPETSPSKLSDKKLQHSDAKAATEDSSKQDDTTLNSFPASAEPLHN

SEQ ID NO: 37382 - protein, 280 aa, Glycine max
  Clone ID: jC-gmst02400031c09_FLI.pep
EMRCNACWREVEGRAISTTCGHLLCTDDANKILSNDGACPICDQVLSKSLMKPVDVNPNDEWVNMAMAGVSPQILMKSAYRSVMFYLGQKELEMQFKMNKIVAQCRQKCEMMQEKFTEKIEQVHTAYQKMAKKCQMMQQEIESLTKDNQELQEKFAEKSRQKRKLDEMYDQLRNEYDSVKRSAIQPADNFYSRNEHDLFSNPPNIMDGREMGRKVGWYSLLPLQDQERMSGQQGRIATTLVTLICPSAHQRNKQSLQGMLETEGLVLILFLDLVLLITHP

SEQ ID NO: 37383 - protein, 477 aa, Glycine max
  Clone ID: jC-gmst02400039a12_FLI.pep
VVVVVVVVAAAAAMKGGGGKRKASTSEAPNDVVVVVAAASAPSDDADLGVGDVGGVKVQNFEGNEGTQLRNTEEQEEEPHHVEGDEGGEDEEDYAEGEEEYEEENGGAVAGGQQGFPALGENFFEVEAIRRKRLRKGEVQYLIKWNGWPETANTWEPLENLESVPDVVEAFEESLKSGKHRKRKRKHVVHHTQPKKRLERSTTPYSLRRFSTSTAENHTQSAPPLNDPSLPDIPAFPHTVLFSDDVGNGAEGSSLRKATPSNANRSANGSEQNIKRNEENDYDPVLSELKAMTSNGNDADRLAIRIPEAKGSGPSGSNGQMDAKSKGACMETSESDRCRGSKRRKCGSVKRFKKELYANEPANAENPVSMPVGTAEPERTRDAGSGGNTNHARPASNIVNIVKPVGYSASVASGMQDVLVTFVASKSDGTEVMVDNKYLKAFNPLLVVPYTFTLLHLIIGCIIFLVPHLLRISVFSP

SEQ ID NO: 37384 - protein, 232 aa, Glycine max
  Clone ID: jC-gmst02400050e06_FLI.pep
IEGKRLPEGGGEDAVLVVDDGGRRVAIAVAVVVVVVERDDRVNNHKGLARGGGGGGNPRPAEGLHGAAHAAGGGPVHLGGLELGGKPVGLVERRNLLRGVVVRRAGEGGEIGLGLGPAEGSGSLVVSPRGILGGIERPQPHALLLPRISNLRRESPPRPLPDAAEPRLLRLLRRRIHDGGGGSPSAHLDHDIKKLLYFTITRSIENKQGDTTGFFKPQFLILFLFHIFFFLV

SEQ ID NO: 37385 - protein, 500 aa, Glycine max
  Clone ID: jC-gmst02400051b01_FLI.pep
AKRRWCLSGTPIQNAIDDLYSYFRFLRYDPYSDHASFCTRIKNPISRNPANGYRKLQAVLKTIMLRRTKGTLLDGEPIISLPPKYIELKKVDFSMEERDFYSKLEADSRAQFQEYADAGTVKQNYVNILLMLLRLRQACDHPLLVKRYNSNSLWRSSVEMAKKLPQEKQISLLKCLEVSLALCSICNDPPEDAVVSVCGHVFCNQCICEHLSGDDNQCPAANCKSQLSTSMVFSKATLNSCLSDQGCDNSPSCSGPEAEEAEPWSESKPYDSSKIKAALEVLKSLCKPQCYTSKSTSEHSTFREDKNCLGNPSIAKNGKSLKDSPESQNLSDENRSSNASVTVVGEKAIVFSQWTRMLDLLEACLKNSSINYRRLDGTMSVVARDKAVKDFNNCPEVTVIIMSLKAASLGLNLVVACHVLMLDLWWNPTTEDQAIDRAHRIGQTRPVTVLRLTVRDTVEDRILALQQKKRMMVASAFGEDGTGDRQTRLTVDDLKYLFMM

SEQ ID NO: 37386 - protein, 620 aa, Glycine max
  Clone ID: jC-gmst02400051g07_FLI.pep
IDADMNNRGKGRLKYLLQQTELFAHFAKGDQSSSQKKSRGRGRHASNFTEEEEDEEYLKGEEDGLANTRLVTQPSCIQGKMRDYQLAGLNWLIRLYENGINGILADEMGLGKTLQTISLLGYLHEFRGIKGPHMVVAPKSTLGNWMNEIRRFCPVLRAIKFLGNPDERRHIRDELLVAGKFDVCVTSFEMAIKEKSALRRFSWRYIIIDEAHRIKNENSLLSKTMRLYSTNYRLLITGTPLQNNLHELWSLLNFLLPEIFSSAETFDEWFQISGENDQQEVVQQLHKVLRPFLLRRLKSDVEKGLPPKKETILKVGMSQMQKQYYRALLQKDLEVVNAGGERKRLLNIAMQLRKCCNHPYLFQGAEPGPPFTTGDHLIENAGKMVLLDKLLPKLKERDSRVLIFSQMTRLLDILEDYLMFRGYQYCRIDGNTGGDDRDASIDAFNKPGSEKFVFLLSTRAGGLGINLATADVVILYDSDWNPQVDLQAQDRAHRIGQKKEVQVFRFCTEYTIEEKVIERAYKKLALDALVIQQGRLAEQKTVNKDELLQMVRFGAEMVFSSKDSTITDEDIDRIIAKGEEATAELDAKMKKFTEDAIKFKMDDTAELYDFDDEKDESRFD

SEQ ID NO: 37387 - protein, 298 aa, Glycine max
  Clone ID: jC-gmst02400052h08_FLI.pep
IKVKCYATWCGWRFSGSVPSSDTTTEEFLNENQVDHPVWLIATVGLQESIINSITVCKYKKNEGLVEGTECSVCLNEFQEEETLRLLPKCNHAFHVPCIDTWLRSHTNCPLCRAGIVSNSVNSEAPAPVSNSEQENANLGRNQDTLLDNSRINEGGLSSNMVAGESSEAIDESNSKDRVNDETQNNGVLMNIEIQTEMGSVSTTECESHRVVDDHKHDDDTMLHTDNLGKQDQDGDYYYSKTCKTVRRSSIEECLHLSPVSMKRSFSSCNGRTLTSRGYMSLNSKLNSSLLEFSFYER

SEQ ID NO: 37388 - protein, 150 aa, Glycine max
  Clone ID: jC-gmst02400060f04_FLI.pep
INLVPCSVYRSSHLIDKCRSSLELFFAIWFVMGNVWAFDSRFGSFPQAPKLQVLCIILLSWNAICYSFPFLLFLLLCCCVPLMSTLLGYNMSMGSSARGASEDQISQLPSWRYKGVHTNLDLGNDSQSSERLINEDPVSEITIIHKISNI

SEQ ID NO: 37389 - protein, 177 aa, Glycine max
  Clone ID: jC-gmst02400060g12_FLI.pep
RELGLQPRQVAIWFQNKRARWKSKQLERDYGILQSNYNSLASRFEALKKENQTLLIQLQKLNHLMQKPMEPGQRCTQVEAANSMDSESENGGTMKCEAEGKPSPSMEISEHLLGVLSDDDTSIKVEDFGLEDEHGLLNFAKHVDGSLTSPEDWNAFESNDLLGQSTTDDYQWWDFWS

SEQ ID NO: 37390 - protein, 132 aa, Glycine max
  Clone ID: uC-gmflminsoy008g11_FLI.pep
VCDLQVVVDERKKKRKQSNRESARRSRMRKRKHLDELTKQVSQLAKGNGEILGTIDITTQHYLNVEAENSILRAQMEELSQRLQSLNDIVDGIINLTNATTAYERDCYLTSAQNITTKNNTLCLNQQAVFQW

SEQ ID NO: 37391 - protein, 348 aa, Glycine max
  Clone ID: uC-gmflminsoy011b03_FLI.pep
EAPEELSFGGSKDHTNIAKGKRTKRVRPQSPIPFSITANSSTGGEKEEDCYNVDDDNIIKNEDINNNNINNINSTPTTSAELQDITDEEEDMANCLILLAQGQSRESPKHAEEDAGMSYAKHNSRKFLEAATLGSSRAGYYVYECKTCNRTFPSFQALGGHRASHKKPKALMAIGQKKKQQHLLSSDEEEFQLKTNKSPFSIQLNTNGNLYSSSSNNNNKSKVHECSICGAEFTSGQALGGHMRRHRAPVGTTPTATILSFTPLALEPEEDHPRKKRNVLNLDLDLNLPAPEDDHRESKFAFASKQQQQQHGQKQPQQHHHPEQKQQQPQQQQTSLVFPVPALVDCHY

SEQ ID NO: 37392 - protein, 285 aa, Glycine max
  Clone ID: uC-gmflminsoy018f08_FLI.pep
RSKINERFQVLRDLIPQNDQKRDKASFLLEVIEYIQFLQEKLQIYEQTYEGWNQEPTKLTPWRNNHGPAENTTDPSQATQNGSVDEKNNNVSPLLPKNVQNPIESDFSMTTIQKGNIPGSTTEAVPLPMQMRLDMFDPVVSSSMATQHLLEPVSNVNMLSHTQPQLWLDKRNKGNYILPHNDTMKEQEELVNESGSDSISSAYSQGILDSLTQALHSSGVDMSQTNVSVQIDVGRQENAGLIPSASTSKGHENQSVSNPAIARSGVDYCNIDSEQSSKRLRQEAS

SEQ ID NO: 37393 - protein, 214 aa, Glycine max
  Clone ID: uC-gmflminsoy020d04_FLI.pep
KAFILFSSGTGTNSALFNLKPNNLSFRMLSNRESARRSRRRKQAHLTELETQVSQLRSENSSLLKRFTDVSQKYNNAAVDNRVLKADVETLRTKVKMAEETVKRITGLNPMLHAITEMSSMAMPSFDESPSETSADAAIPVQEDPNHHRCQPTSNNGLGGISSIETVQQNVSAVVGGNKTGRTTSLHRVASLEHLQKRIRGGADSRGPPSNGEQ

SEQ ID NO: 37394 - protein, 558 aa, Glycine max
  Clone ID: uC-gmflminsoy022a10_FLI.pep
EDSGFKPLLKPYQLVGVNFLLLLYRKGIGGAILADEMGLGKTVQAITYLTLLKHLHNDSGPHLIVCPASVLENWERELKRWCPSFSVLQYHGAGRAAYCKELNSLSKAGLPPPFNVLLVCYSLFERHSAQQKDDRKILKRWRWSCVLMDEAHALKDKNSFRWKNLMSVARNANQRLMLTGTPLQNDLHELWSLLEFMLPDIFATEDVDLKKLLNAEDGDLIGRMKSILGPFILRRLKSDVMQQLVPKIQQVEYVIMEKQQETAYKEAIEEYRAVSQARMEKCSNLNSKSVLEVLPRRQINNYFVQFRKIANHPLLIRRIYNDEDVIRFARKLHPIGAFGFECTLDRVIEELKNYNDFCIHRLLLHYGVNDRKGILPDKHVMLSAKCRALAELLPSLKEGGHRALIFSQWTSMLDILEWTLDVIGLTYKRLDGSTQVAERQTIVDTFNNDTSIFACLLSTRAGGQGLNLTGADTVVIHDMDFNPQIDRQAEDRCHRIGQTKPVTIYRLVTKGTVDENVYEIAKRKLVLDAAVLESMEEINEGDMPEKTMGEILSAILLS

SEQ ID NO: 37395 - protein, 349 aa, Glycine max
  Clone ID: uC-gmflminsoy046e06_FLI.pep
IKDFRTKEGVMNVTNKPNPYGSTNGFQSLLQQNGWEQGSSRLRPTKLYPAPTARYQDIVRDANLFWGTLQAFHKTLGTKYKISTVGGTPLDLHRLFVEVTSRGGIEKVIVDRKWKEVILTFNFKDTITNASFMVRKSYLSMLYHFEQVYYFGRQGIPPTTPDLMIRGQSCQPYSSTTIPEVAAVNDSPVQSTPVQAHDDMVSGTIDAKFDVGYVVTVTLGSEQLQGVLFHVPDNVSQSSHAEGTSSSQNLGDDTSNLQSRKRAKYAPRDPFRPKSNRSGYNFFFAENYARLKPSYHGQERAISKRIGFLWNNLSEAERQVYQEKGIRDKERYRTELMEYKSNNSTPNAQ

SEQ ID NO: 37396 - protein, 577 aa, Glycine max
  Clone ID: uC-gmflminsoy049c02_FLI.pep
RVPLHSLFYFITMIATETIVPSTKLKIKFSTKRMEVESGPKYEFGQKVSHTDENRSFNLNGKSSALNSNKRGPPTSIEGQKEKRQRIDRKGSMQCATILKSLMSHTYSWVFSKPVDPIALSIPDYFTIISHPMDLGTIKSKLEKNIYSGTEEFAADVRLTFSNAMKYNPPSNDVHLMAKELSKIFDRKWKDLGRKWKCEDEHDKSESETIKETGRKSLDMLSRHRDSLPKKTQVSEHKGMPKIRSLATKDARVEPSKLSQIPCKLIEKDMHKGNKGNHDVEQPAGSLKACSSVCFVTSKCRICGDTTCHCVIPSNSIQVSSDISSEGSEGGDVITRGADSLRQNCPTKCTSPIEKKSDPDSDGAVSSLDSEHVCPSSQHVTPTTDASSGEVWSTPVLPVQLSPKKALRAAMLKSRFADTILKAQQKTLLDHGDKGNPQKMQQEKERLERIQREERARIEAQIKIAEAAARMRAEEESRQRREKEREAARAAIEKMKRTVDIEHNVEIIKELESLSGCTLSYKAVGCRNGYKVALETLDKPQFENPLERLGLFIKEDFTADEDEEVLNGGFEEGEIFN

SEQ ID NO: 37397 - protein, 459 aa, Zea mays
  Clone ID: 700093022_FLI.pep
PLSLASSISPPTMGKEKSHINIVVIGHVDSGKSTTTGHLIYKLGGIDKRVIERFEKEAAEMNKRSFKYAWVLDKLKAERERGITIDIALWKFETTKYYCTVIDAPGHRDFIKNMITGTSQADCAVLIIDSTTGGFEAGISKDGQTREHALLAFTLGVKQMICCCNKMDATTPKYSKARYDEIVKEVSSYLKKVGYNPDKIAFVPISGFEGDNMIERSTNLDWYKGPTLLEALDQITEPKRPSDKPLRLPLQDVYKIGGIGTVPVGRVETGVIKPGMVVTFGPTGLTTEVKSVEMHHEALQEALPGDNVGFNVKNVAVKDLKRGFVASNSKDDPAKEAASFTSQVIIMNHPGQIGNGYAPVLDCHTSHIAVKFAELITKIDRRSGKELEKEPKFLKNGDAGMVKMIPTKPMVVETFSAYPPLGRFAVRDMRQTVAVGVIKSVEKKDPTGAKVTKAAAKKK

SEQ ID NO: 37398 - protein, 408 aa, Glycine max
  Clone ID: uC-gmflminsoy057g07_FLI.pep
GFTLWEESSGKRGKTGKENNAGEKPSLGESAAKLGQWTTTERTSQSFSNNRHGSFSSRSSSQTTGLKNQSFIEMMKSARDSAQNEVLESEETFFLKKEPSSNTQRAELLVKVDGKSTDQKSNTPRSKHSATEQRRRSKINDRFQMLRELIPHSDQKRDKASFLLEVIEYIHFLQEKVHKYEGSFQGWSNEPERLMPWRNNDKPAESFQPRGTDNGSSPSPTIPGSTQNVESGLSTATTSKTMDHQAGKMNKAFPIPIPSQLNFFTPTQIGGPGGVVSQLTHRSASDAENTKYQPSVECQTMTATNEKLKEKELTIEGGAISISSVYSKGLLHTLTHALQSSGVDLSQASISVQIELGKQANIRSNVPVSVCGAKDGAVPSNNQKMMRSRVASSGKSDQAVKKLKTCRS

SEQ ID NO: 37399 - protein, 271 aa, Glycine max
  Clone ID: uC-gmflminsoy057h02_FLI.pep
RMEINRPFPASPADIRRFHSDDYVDFLSSVSPETLADSAFSRHLKRFNVGEDCPVFDGLFPFCQASAGGSLGAAVKLNRADADIAINWAGGLHHAKKSEASGFCYVNDIVLGILELLKAHRRVLYVDIDVHHGDGVEEAFYTTDRVMTVSFHKFGDFFPGTGHVKDIGVGSGKNYAVNVPLNDGMDDESFRSLFRSIIQKVMEVYQPEAVVLQCGADSLSGDRLGCFNLSVRGHADCLRFLRSFNVPLMVLGGGGYTIRNVARCWCYEQWQ

SEQ ID NO: 37400 - protein, 328 aa, Glycine max
  Clone ID: uC-gmflminsoy063h08_FLI.pep
ICVGGFDTAHAAARAYDRAAIKFRGVEADINFNIEDYEEDLKQMTNLTKEEFVHVLRRQSTGFPRGSSKYRGVTLHKCGRWEARMGQFLGKKYVYLGLFDTEIEAARAYDKAAIKCNGKEAVTNFDPSIYDSELNSESSGGVAADHNLDLSLGNSSSKHNNSQTSGNHFANSATDQHMPPESNWRNGGSKPKVHLVNILPKPCGRSNIEAYGHGESETLRLLSQTHLQSPTNKEMHRYGPYRSPAEPQKPHNFAHHLHQPSFHVPSSSSNGGRIGSDLSLSMSDQQQWQAGPPHLLATAAASSGFPQQIRPSQGWLQKNGFHSLMRPS

SEQ ID NO: 37401 - protein, 337 aa, Glycine max
  Clone ID: uC-gmflminsoy064a03_FLI.pep
RLTSSSSSSSSSSNNNKIPSFPLMKRLNSSDSSTALMTIFPSSSTEEHSPRNSHHMYGREFRSMLDGLDEEGCVEEPGHQSEKKRRLSVEQVKALEKNFEVENKLEPERKVKLAQELGLQPRQVAVWFQNRRARWKTKQLERDYGVLKANYDALKLNFGTLNQDNEALRKQIKELKSRLLQEENTAGSGVSVKEEEITTMPADSEEKTMEQSKSDPPSETSNINPSSESSEEDHLNYECFNNNSDDCVVGGSAAASLLQVDFMKDGSSDSDGSSAILNEDTMYLPSSMNCFQFQKPYHHAQYVKTEEHNFLSADEACNFFSDEQAPTLQWYCPEQWS

SEQ ID NO: 37402 - protein, 236 aa, Glycine max
  Clone ID: uC-gmflminsoy064a05_FLI.pep
HFLHPYPKDSEKIMLARQTGLTRNQVANWFINARVRLWKPMVEEMYKEEFGDSEMSSNLLSSENTLKAPRDDVQASDNKREESQDNLINVDDSVQHHGLKLDHASELDRGIQSSDHGENAMDPRIGKLQGDQRFNMNNSNNNSPYYGDGCVMASTPATYDLPELGNIAVDGHVSLALELRNCESQGFGVSNDDMHKRHKKTLASSPETDLLDYHFTDPGKQQNKFGNPHLLHEFVV

SEQ ID NO: 37403 - protein, 311 aa, Glycine max
  Clone ID: uC-gmflminsoy064a08_FLI.pep
RFTEIQNQHLWFVVIVASSGYIASVTISVMKNITSFNWMGNLQYKCPTCRGECYQVKNPEDAAREIWRRRNIAERDLIASLRAAAGLPTQEEIFSISPFSDDEDSGPLKLKSESARSFKFSLKNLANDSPKKKSSSKKTAKKKDSQLFMTSKIDTHNSCEGHSDIKSLHSLDDDKNDDIQSQRNEGPDVYSSPAAGSLSQTEASFPIDQPGILKQKFVDEVMVSDEERKPRVVRIKSNKALIPDSEEESGKHSLKTQNVKGKKLVINLGARKINVASSPRSDTSSCQKDQDPVTVNGIHLSFCFSCHYIFA

SEQ ID NO: 37404 - protein, 172 aa, Glycine max
  Clone ID: uC-gmflminsoy065b12_FLI.pep
LLSSKGGKIIYRMKVRNKSGDSGGHGSEAKGPMGPVFSTFVYEEEYGSDSQMEAIHGFAREGDMANLLKCIENGVSMNLKDSEGRTPLHWAVDRGHLNVTELLVGKNADVNAKDNDGQTPLHYAVTCEREAIAEYLLKHNADIYSKDNDGSSPRDICESNWPCMQHVGGEVN

SEQ ID NO: 37405 - protein, 336 aa, Glycine max
  Clone ID: uC-gmflminsoy075h09_FLI.pep
GFRTDKKGQTALHMAVKGQNEEILLELVKPDPAVLSLEDNKGNTALHIATKKGRTQNVRCLLSMECININATNKAGETPLDVAEKFGSPELVSILRDAGAANSTDQRKPPNPSKQLKQTVSDIKHDVQSQLQQTRQTGMRVQKIAKKLKKLHISGLNNAINSATVVAVLIATVAFAAIFTVPGQYVEDKTHGFSLGQANIANNAAFLIFFVFDSLALFISLAVVVVQTSVVVIEQKAKKQLVFVINKLMWMACLFISIAFISLTYVVVGSHSRWLAIYATVIGSLIMLSTIGSMCYCVILHRMEETKLRAESRSFSMSHASDQEILNSEYKRMYAL

SEQ ID NO: 37406 - protein, 479 aa, Glycine max
  Clone ID: uC-gmflminsoy076c09_FLI.pep
KLAKERRMGMEEESSIIEGGASLPSSGSDAKKRRVTYFYEPTIGDYYYGQGHPMKPHRIRMAHNLIVHYSLHRRMEINRPFPASPADIRRFHSDDYVDFLSSVSPETLADSAFSRHLKRFNVGEDCPVFDGLFPFCQASAGGSLGAAVKLNRADADIAINWAGGLHHAKKSEASGFCYVNDIVLGILELLKAHRRVLYVDIDVHHGDGVEEAFYTTDRVMTVSFHKFGDFFPGTGHVKDIGVGSGKNYAVNVPLNDGMDDESFRSLFRSIIQKVMEVYQPEAVVLQCGADSLSGDRLGCFNLSVRGHADCLRFLRSFNVPLMVLGGGGYTIRNVARCWCYETAVAVGVEPDNKLPYNEYYEYFGPDYTLYVDPSNMENLNTSKDLEKLRNTLLEQISRLPHAPSVPFQTTPPTLQLPEEAEENMDRRPKLRKWDGEDYDSDPEEGGKDNSKFSNITAHMRDIADEMEEEKPEEHPSSCS

SEQ ID NO: 37407 - protein, 303 aa, Glycine max
  Clone ID: uC-gmflminsoy082e03_FLI.pep
TTHLAHFFFFLLLPLSQFLFFNDTILLLLLMVSSSGKSREMDRVKGPWSPEEDEALRALVQAHGPRNWSVISKSIPGRSGKSCRLRWCNQLSPQVAHRPFSQEEDEAIIMAHAKFGNKWATIARLLNGRTDNAVKNHWNSTLKRKSSAVSDDDVVTHRQPLKRSNSVGPAHLNPASPSVSDLSDPGLPALSNPSPSAHYMPNLMETASSAPDPATSLSLSLPGFTVPQPVSPPPPPLPLPAETVEERGKQMFNAEFLRVMQEMIKKEVRSYMSGMEEQKNGFRMQTEAIGNAVVKRMGISNIE

SEQ ID NO: 37408 - protein, 157 aa, Glycine max
  Clone ID: uC-gmflminsoy091e02_FLI.pep
MGATEANTTLQARPETTSENIEALLDAARYDDMDDVKSLEASGVPLDSKDEQGRTALHMAAANGHIDIVEYLISRGVDLNSPNEEKNTPLHWACLNGHVEAVKKLIMAGANVSVLNSHERTPMDEAVSGGKPEVMDAINEAVALVELRGAMVFAQET

SEQ ID NO: 37409 - protein, 106 aa, Glycine max
  Clone ID: uC-gmrominsoy027a11_FLI.pep
LVGTKNFLASFSATDHWLVENLEVQYFSISSAVLPGILPAIKDHLSPTRLYTMAIRISSASENSTSETWLDFSVETAETLLSKERSMSAIAITSSQKSFESFSVVY

SEQ ID NO: 37410 - protein, 463 aa, Glycine max
  Clone ID: uC-gmrominsoy033a05_FLI.pep
ENGHLDILKELIRYHDIGLASFKARNGFDAFHIAAKNGHLEILKVLMEAFPEISMTVDLSNTTVLHTAAAQGHIEVVNFLLEKGNSLVTIAKSNGKTVLHSSARNGYLEVVKALVSKEPEIAMRIDKKGQTALHMAVKGQNLELVDELVKLNPSLANMVDAKGNTALHIATRKGRLQVVQKLLDCREINTDVINKSGETALDTAEKNGRLEIANFLQHHGAQSAKSIKSPTTNTALELKQTVSDIKSEVHNQLEHTIKTQRRMQGIAKRINKMHTEGLNNAINSNIVVAVLIATVAFAAIFNVPGQYPEKPSELSPGMSPGEAYIAPDIGFMIFIIFDSTALFISLAVVIVQTSVVVIERKAKRQMMAVINKLMWVACVLISVAFIAMSYIIVGDHKELAIAATALGTVIMAATLGTLCYWVIAHRLEASRLRSLRTTMSSRQSMSMSMMSGSENEYKTVYAI

SEQ ID NO: 37411 - protein, 617 aa, Glycine max
  Clone ID: uC-gmrominsoy047b05_FLI.pep
PLAKYVKAVYHTRVSVGMRFRMLFETEESSVRRYMGTITGISDLDPVRWQNSHWRSVKVGWDESTAGDRQPRVSLWEIEPLTTFPMYPSPFPLRLKRPWPPGLPSFHGMKDDDFGPNSPLLWLRDPDRGLPSLNFQGIGINPWMQPRFDPTMLNMQTDMYQAAAVQDMRSLDPSKQHSASLLPFQQPQNFPNRTAALMQAQMLQQSQPQQIFGNTQENQHSPQSQAHLQQHLQHQHSFNSQHHHHHQQQQQRQQHQVVDNQQISSAVSTMSQFVSAPQPQSPPMQVISSMCQQQNFSDSNGNTVTTIVSPLHSILGSFPQDETSHLLNLPRTSSWIPVQNSSGWPSKRVAVDPLLSSGASQCVLPQVEQLGQPQSTMSQNAISLPPFPGRECSIDQEGSNDPQNHLLFGVNIEPSSLLMPNGMSSLKGVCGNNGSSTLPYQSSNYLNTTTRTDSSLNHGMTPNIGDSGFLQCLEEAGQGNPLNKTFVKVYKSGSFGRSLDITKFSSYHELRGELARMFGLEGELEDPVRSGWQLVFVDRENDVLLLGDGPWPEFVNSVWCIKILSPQEVQQMGNNGLELLNSFPIQRLSNGICDDYVSRQDPRNLGTGITTVGSLDY

SEQ ID NO: 37412 - protein, 276 aa, Glycine max
  Clone ID: uC-gmrominsoy063e09_FLI.pep
VMANAAEVSALNRIKLHLLGELSPLATPLNYFDESNPSPSESSNSQSSSVSLNHYFTDLFEFDSKPQIIDLQTPKTLTSAQKKPQLNRKPSLLIAVPKKTEWIQFGSPDPNPVMAAPENLPQKNHYRGVRQRPWGKFAAEIRDPNKRGSRVWLGTFDTAVEAAKAYDRAAFRLRGSKAILNFPLEVSAVAETVSVAAAEGNVERKRRREEEEVVVEEVKPVVKKEKITEQDVSCFREMPLTPSMWTGFWDSDVKDIFNVPPLSPLSPFGFSPLVAV

SEQ ID NO: 37413 - protein, 218 aa, Glycine max
  Clone ID: uC-gmrominsoy099b07_FLI.pep
KYYIYIYIYIFSSSPSKKKTMAKPSSEKPEEHSDSKYYKGVRKRKWGKWVSEIRLPNSRQRIWLGSYDTPEKAARAFDAAMFCLRGRNAKFNFPDNPPDIAGGTSMTPSQIQIAAAQFANAGPHEGHSGRPEHPPMESPSPSVSEGTIQTDSDVPTLNGSVTDLFTPVGSSGYASDYGIFPGFDDFSGDFYVPEMPNVNYGEENGEGFIVDESFLWNF

SEQ ID NO: 37414 - protein, 223 aa, Glycine max
  Clone ID: uC-gmrominsoy104e07_FLI.pep
SAITMAPRDKTSAVKPSGNAGVKDLHFRGVRKRPWGRFAAEIRDPAKKTRVWLGTFDTAEEAARAYDAAAREFRGPKAKTNFPLPSENFKNASPSQSSTVESSSRDRDVAADSSPLDLNLAPVAVSSARFPFRNQFPVFPGAVPAANQVMYFDAVLRAGMAGPRGFAFGYNPHPVAASEYHATTSDSDSSSVIDLNHNEGVVKGNGSRMFDLDLNHPPPHEIA

SEQ ID NO: 37415 - protein, 100 aa, Glycine max
  Clone ID: uC-gmrominsoy109d01_FLI.pep
NTVTNQRNPVLAKERNSTFNPLLHAGLRKSDPLPVIALSFQLSNLILKFFQLSSLSLTRLSCCKSVTSTLHGDDVARVIDNDRGQGLVTLAGIHTGHRRV

SEQ ID NO: 37416 - protein, 316 aa, Glycine max
  Clone ID: uC-gmrominsoy111a03_FLI.pep
STELPTCPVCLERLDQDTGGILTTICNHSFHCSCISKWADSSCPVCRYCQQQAEKSICFVCQTTENLWICVICGYVGCGRYKGGHAIIHWKETQHCYSLEVETKRVWDYVGDNYVHRLIQSKTDGKLIELNTQCAHADNGCGSCSCEDNAMNEAILNSKVEAIVNEYNELLATQLENQKLYFESLLQEVKEESERKISKAVQKAISLKQQKIQSKIDRCKKEKKFLDDLNENLVKNEDIWKTKILAIEEREKKTTRLMGDRVADLEMQLGDLMVCLEGGRTVEQLAASDEIKEGIILDKSIESSTTSGSDLVGRDA

SEQ ID NO: 37417 - protein, 378 aa, Glycine max
  Clone ID: uC-gmrominsoy111a12_FLI.pep
ISLWFGGIVVFTMKTVLFLLLVSALIPIAVAQPNDFSDANLNEFNSSIAIIIIILVIAFFLMAFFSIYVRHCADSPSNTVRPLTTARSRRAARGLDPALIQTFPILEYSVVKIHKIGKEALECAVCLCEFEDTETLRLLPKCDHVFHPECIDEWLSSHTTCPVCRANLLPTESEDAIANANANGVVPVPETLTRDIESQNDAVQAAPEQQNAEADPVLPEPEVVSLDKTLNRNRTRGSRSNRPRRFPRSHSTGHSLVQPGENTDRFTLKLPLEVRKQLINRQLQRASSLIVLPREGSSRQGYRTGGEGSSRAKISRRLDRSLKSDRWIFSMAAPFFARALSIRSPRVRNNDVEGAASSSSPTAPIMPPTAVDSARPPV

SEQ ID NO: 37418 - protein, 242 aa, Glycine max
  Clone ID: uC-gmrominsoy125a08_FLI.pep
FFFSFSIFMEGHHLHHRQQQLQQHHHPHHNITTSNVDATDRFPQWSIQETKEFLVIRAELDQTFMETKRNKQLWEVISNRMKEKGFHRSAEQCKCKWKNLVTRYKGCETMEPEAMRQQFPFYNELQAIFAARMQRMLWAEAEGGSNNKKKGMHLSSDDEEEGNEEMMSEGDHKGNIIISKKNKKKGKMVIGVGGSGNNNNNSSSSSNNLEREEQRRIREEVRADKRDALITALLNKLRREEM

SEQ ID NO: 37419 - protein, 376 aa, Glycine max
  Clone ID: uC-gmrominsoy139h02_FLI.pep
PNQTKPKPLSALTSHKPKLINYQHKMDGGCVTDETTTSSDSLSVPPPSRVGSVASAVVDPDGCCVSGEAESRKLPSSKYKGVVPQPNGRWGAQIYEKHQRVWLGTFNEEDEAARAYDIAALRFRGPDAVTNFKPPAASDDAESEFLNSHSKFEIVDMLRKHTYDDELQQSTRGGRRRLDADTASSGVFDAKAREQLFEKTVTPSDVGKLNRLVIPKQHAEKHFPLSGSGDESSPCVAGASAAKGMLLNFEDVGGKVWRFRYSYWNSSQSYVLTKGWSRFVKEKNLRAGDAVQFFKSTGPDRQLYIDCKARSGEVNNNAGGLFVPIGPVVEPVQMVRLFGVNLLKLPVPGSDGVGKRKEMELFAFECCKKLKVIGAL

SEQ ID NO: 37420 - protein, 137 aa, Glycine max
  Clone ID: uC-gmrominsoy145h06_FLI.pep
DLLKRKKSSDTVNVVKVAHSQPSRPQLRHISDTSVVDIGPPADWVKINVQKTKDCFEVYALVPGLLREEVRVQSDPAGRLVISGEPEHSDNPWGVTPFKKVVSLPSRIDTQQTSAVVTLHGQLFVRVPFESNQNREG

SEQ ID NO: 37421 - protein, 444 aa, Glycine max
  Clone ID: uC-gmrominsoy195d07_FLI.pep
ENQDEEPDAMVEEPHSGDEATNSNDSDWSMDCSAGAVVRVKTLHISSPILAAKSPFFYKLFSNGMKESDQRHVTLRINASEEVALMELLNFMYSNTLTTTTAPALLDVLMAADKFEVASCMRYCSRLLRNMPMTPDSALLYLELPSSVLMADAVQPLTDAAKQYLAGRYKDITKFQEEVMALPLAGVEAILSSDDLQVASEDAVYDFVLKWSRQQYPKLEDRREVLGARLARLIRFPYMTCRKLKKVLTCSDFDHDIASKLVLEGLFFKAEAPHRQRSLAAEDSASSNRRFVERAYKYRPVKVVEFELPRQQCVVYLDLKREECNNLFPSGRVYSQAFHLGGQGFFLSAHCNMDQQSSFHCFGLFLGMQEKGSVSFAVDYEFAARSRPTEEFVSKYKGNYVFTGGKAVGYRNLFAIPWTSFMAEDSLYFINGVLHLRAELTIKH

SEQ ID NO: 37422 - protein, 88 aa, Glycine max
  Clone ID: uC-gmrominsoy216b02_FLI.pep
MQKYIDIVTEIYPTWLDGSSLRNKSGDSGGHGSEAKGPMGPVFSTFVYEEEYGSDSQMEAIHGFAREGDMANLLKCIENGVSMNLKGQ

SEQ ID NO: 37423 - protein, 262 aa, Glycine max
  Clone ID: uC-gmrominsoy223a06_FLI.pep
KIERKRNTKTLAHHILYSLTWIVNSANELLPFKLTMENIGEEYGYWPENDMLFQNEDLGSWAIMDEAALSGSGYYDSSSPDGTGASSSVASKNIVSERNRRKKLNDRLFALRAVVPNITKMDKASIIKDAIEYIQHLHDQEKRIQAEILDLESGNKLKNPTYEFDQDLPILLRSKKKRTEQLFDSVSSRNSPIEIIDLRVTYMGEKTFVVSLTCSKRTDTMVKLCAVFESLKLKVITANITSFSGTLLKTVFIQVSLPFCPS

SEQ ID NO: 37424 - protein, 182 aa, Glycine max
  Clone ID: uC-gmrominsoy223h06_FLI.pep
YIPMSRSSAMHGITSTNNKLKGVRRRKWGKWVSEIRVPGTQERLWLGTYATPEAAAVAHDVAVYCLSRPSSLDKLNFPETLSSYSVQLRDMSPRSVQKVASDVGMDVDARNIVAGKTSTVGAETNCESDERTSTASVCNVVGEGGADHSDVFWWDDDGGSWHGSGGDSTERDALSISIEDYL

SEQ ID NO: 37425 - protein, 335 aa, Glycine max
  Clone ID: uC-gmrominsoy224c01_FLI.pep
IAPISPTKPSLLSRRFKLLCGFPFLFFFTEMEVAVAKALKPSLRREFIVQQMLCEDIFSLNANTVAAGEDFSVDDLFDFSNGSLHNEQQQEYDEGKQSLSASEDRGEDDCNSNSTGVSYDSLFSTELAVPAGDLEDLEWVSHFVDDSLPELSLLYPVRSEEANRFVEPEPSAKKTPCFPWEMKITTKARTVRNRKPSNSRMWSLGSPLLSLPSSPSSPSSCSSSVREPPAKKQKKQAQAQPVGAQIQRRCSHCHVQKTPQWRTGPLGAKTLCNACGVRYKSGRLFSEYRPACSPTFCSDIHSNSHRKVLEIRKRKEVAQPDTGLAQAQTQMVPTC

SEQ ID NO: 37426 - protein, 229 aa, Glycine max
  Clone ID: uC-gmrominsoy243f12_FLI.pep
FHALRFLHDTLGLLHGLYGCLLLSWLSSDLLGRDLSGLRLGLGSRGRSFGLGLGNSLFLRSSSFGLGSGLSGSFGWLFGSSGLNRSRLSRCELKGVFHLNKLASSNRFLEMNEDKLLVGCRQLLVLPFDVFGYRVLARTGSLFQTRNRLCYHLQNNQIKYNWKRNKLRELILKESILGKYHGEGRVGEGLLGRRRFLGLGLRCGRHDDGLIETQNEKGVTVVEIETRDR

SEQ ID NO: 37427 - protein, 247 aa, Glycine max
  Clone ID: uC-gmrominsoy258c06_FLI.pep
EKKSMEMEVDIEKKQQDVVKEKDLFKAAEEGEASTFEALSSEILSKALSLRNEDARSLLHVAASSGHSQVVKIVLSCDASAGVVNCADEEGWAPLHSAASIGSVEIVETLLSKGADVNLKNNGGRAALHYAASKGWVKIAEMLISHDAKINIKDKVGCTPLHRAASTGKSELCELLIEEGAEVDAVDRAGQTPLMNAVICYNKEVALLLIRHGADVDVEDKEGYTVLGRATHEFRPILIDAAKAMLE

SEQ ID NO: 37428 - protein, 669 aa, Glycine max
  Clone ID: uC-gmrominsoy308c01_FLI.pep
SHEMNHLSLDTEDSLASLLLELAANNDVSGFKRLIECEPSSIDEVGLWYGRHKESKKMVNEQRTPLMVAATYGSIDVMTLILSLSEADVNRSSGLDKSTALHCAASGGSENAVDAVKLLLEAGADRNSVDANGRRPGDVIVSPPKLDYVKKSLEELLGSDDWSLLRVMRSTCNGCSAEDLKMKTNEVSEKKEYPVDLSLPDIKNSIYSSDEFRMYSFKVRPCSRAYSHDWTECPFVHPGENARRRDPRKFHYSCVPCPEFRKGACRRGDMCEYAHGVFECWLHPAQYRTRLCKDGTNCARRVCFFAHTNEELRPLYVSTGSAVPSPRSSASSAMDFVAAISPSSMSVMSPSPFTPPMSPSSASIAWPQPNIPALHLPGSNFHSSRLRSSLNARDFSVDDFDLLLPDYDHHHHQQQQQQFLNELSCLSPHAMNCNTMNRSGRMKPLTPSNLDDLFSAESSSPRYADPALASAVFSPTHKSAVFNQFQHQQSMLAPLNTNFASKNFEHPLLQASLGMSPRNVEPISPMGSRISMLAQREKQQFRSLSFRELGSNSAAASADSWSKWGSPNVKLDWPVGAGEVGKLRRSSSFELGNNGEEPDLSWVQSLVKESPAEVKDKLATTVSYVAAAAAGSSSEGSNISTQMESVVDHAVLGAWLEQMQLDHLVAQQN

SEQ ID NO: 37429 - protein, 409 aa, Glycine max
  Clone ID: uC-gmrominsoy308h08_FLI.pep
LDPEAEVVALSPKTLLATNRFICEICNKGFQRDQNLQLHRRGHNLPWKLKQRSSKDIIRKKVYVCPEPSCVHHEPSRALGDLTGIKKHFCRKHGEKKWKCDKCSKKYAVQSDWKAHSKTCGTREYRCDCGTLFSRRDSFITHRAFCDALAEESARSVTGIVANSTTQPTEAAGVVISSSSLHQDMIHASNNNFPLKKEQQGCIPHWLGQPSPSSASSSFLFSHQDHHLHENPNPRGGPTLLPPPYHQTAPHMSATALLQKAAQMGATMSKTGSMIRTHQQQAHVSANAALNLSSRDHQMNPTPHDLLPFGNNKAVDNGVGVSPSLLHHVINSFSSSPFEGTFEDTFGGGDAMTADEGGGGGAGGNNNEGLTRDFLGLRHLSHTDILNIAGVGNCMNSSQHNQTRNPWQG

SEQ ID NO: 37430 - protein, 279 aa, Glycine max
  Clone ID: uC-gmrominsoy309h05_FLI.pep
FGVGEMFMPFDWGYKRFFKRTALETSDYLKDDCLSVNCSVGVVRSRTEGPKIYTIAIPPSSIGQKFGHLLESGKGSDVNFEVNDDIFAAHKLVLAARSPVFRAQLFGPMKDQNTQCIKVEDMEAPVFKALLHFIYWDSLPDMQELTGLDSKWASTLMAQHLLAAADRHGLERLRLMCEASLCEDVAINTVATTLALAEQHHCFQLKAVCLKFIATSQNLRAVMQTDGFEYLKESCPSVLTELLEYVARFTEHSDIMCNHRNDALLDGSDINGRRVKQRL

SEQ ID NO: 37431 - protein, 190 aa, Glycine max
  Clone ID: uC-gmrominsoy310d10_FLI.pep
CYPCDPPRLSLHCPLPRPRRKGAPSSCWTLLLLPPTTFSAFSPRKSLEARCKTGIAASSLLAPSFHIPLNLIAGNEVFPLALALFCTFMETLFLHPGGDDFPKLFVPLCIHESLIQLGTDHEELFCLLDAPLGEPIRGIHVTSCDVVMRVVMMLLLLMLLLMMMLLLLLLPVMVMEMMTLHGKLKKEKSE

SEQ ID NO: 37432 - protein, 601 aa, Glycine max
  Clone ID: uC-gmrominsoy313f09_FLI.pep
RLVPLTRNEGDFEDDAVGGINGSENKDKSPSFAKTLTQSDANNGGGFSVPRYCAETIFPRLDYSADPPVQNILAKDVHGETWKFRHIYRGTPRRHLLTTGWSSFVNHKKLVAGDSIVFLRAEKDDLRVGIRRAKRGIGIGGGPEAPAGWNSGGGIRPMPYGGFSAFLREEDSQLLRNGLSPNAKGKVRPEAVIEAATLAANMQPFEVVYYPRASAPEFCVKANLVRAALQVRWCPGMRFKMPFETEDSSRISWFMGTISSVNFADPRWPNSPWRLLQVTWDEPELLQNVKRVSPWLVEIVSNMPTIHLSHYSTQQKKPRFPQHPDFSFDGQISLPAFPSNFLGPSNPFGCLAESTPAGIQGARHANYGISLSNLHFNKLQSGLFQAGFPPLDHTASPVLRVSSNNAATMQKVGTGDNVSCLLSMSTATQPSKKVDDVKAPQLVLFGQTILTEQQISLNTSAKTDPTRNNSFDGNADKMCKFSDGFGYALHPQGSSLERLQWYKDQQKETMASLETGHCKVFMESEDIGRTMDLTMLGSYDELYRKLADMFGIEKSVVLSHMLYRDTTGAVKHIGDEAFSEFTKTARRLTILMDSNSDGRGI

SEQ ID NO: 37433 - protein, 626 aa, Glycine max
  Clone ID: uC-gmrominsoy315f07_FLI.pep
FLTLIELEASMNQGLEQQMPSFNLPSKILCKVVNVHLRAEPETDEVYAQITLLPEADQSEVTSPDDPLPESPRCTVHSFCKTLTASDTSTHGGFSVLRRHADDCLPPLDMTQQPPWQELVATDLHGNEWHFRHIFRGQPRRHLLTTGWSVFVSSKKLVAGDAFIFLRGENGELRVGVRRLMRQQSNMPSSVISSHSMHLGVLATASHAIATGTLFSVFYKPRTSRSEFIVSVNKYLEARSHKLSVGMRFKMRFEGDEVPERRFSGTIVGVGDNKSSVWADSEWRSLKVQWDEPSSILRPDRVSPWELEPLVSTPPTNPQPSQRNKRSRPPILPSTMPDSSLQGVWKSPVESAPFSYCDHQHGRDVYPSTNFNSTATGFLGFGGNCYASNKSIYWSSRMENSTESFSPVALKEFGEKRQGTANGCRLFRIQLHDNSNSNEESLPMVTLSGRMGDDGPLPSLDAESDQHSEPSNVNRSDIPSVSCDAEKSCLRSPQESQSRQIRSCTKVHMQGMAVGRAVDLTRFDGYEDLLRKLEEMFDITGELCGSTKKWQVVYTDNEDDMMMVGDDPWLEFCSIVRKIFIYTAEEVRKLSPKIGLPISEEVKPSKMDSEAVANPEDQSSIVGPGC

SEQ ID NO: 37434 - protein, 252 aa, Glycine max
  Clone ID: uC-gmrominsoy316d05_FLI.pep
PVYINTLPLLQIKTLIMDVKKGGSVVQAQVKLQKHNEKEMGMRKGPWAVEEDTILVNYIATHGEGHWNSVARCAGLRRSGKSCRLRWLNYLRPDVRRGNITLQEQILILDLHSRWGNRWSKIAQQLPGRTDNEIKNYWRTRVIKQAKQLKCDVNSKQFRDTLRYVWMPRLLERLQPTSQALEPNQSGLVLHASSSLLPSNSDHSIERGSDLWPGFNNQMLLEQGSGGDLLESLWDDDNMCFLQQLSYDLQMK

SEQ ID NO: 37435 - protein, 120 aa, Glycine max
  Clone ID: uC-gmronoir007f09_FLI.pep
LDHQSFLSGIADVRDRHRDMRLDVDNMSYEELLALEERIGNVSTGLSEETVLKHLKQRKHSAEKGPQIDAEPCCVCQEDYGDEDDIGTLDCGHDFHSSCIKQWLMHKNLCPICKTTGLAT

SEQ ID NO: 37436 - protein, 262 aa, Glycine max
  Clone ID: uC-gmronoir037a08_FLI.pep
GRMDHQGHSQNPSMGVVGSGAQLAYGSNPYQPGQITGPPGSVVTSVGTIQSTGQPAGAQLGQHQLAYQHIHQQQQHQLQQQLQQFWSSQYQEIEKVTDFKNHSLPLARIKKIMKADEDVRMISAEAPVIFARACEMFILELTLRSWNHTEENKRRTLQKNDIAAAITRTDIFDFLVDIVPREDLKDEVLASIPRGTMPVAGPADALPYCYMPPQHPSQVGAAGVIMGKPVMDPNMYAQQSHPYMAPQMWPQPPDQRQSSPEH

SEQ ID NO: 37437 - protein, 62 aa, Glycine max
  Clone ID: uC-gmronoir056c06_FLI.pep
SEQDVWSAVQERALVQALKAFPKETSQRWERVATAVPGKTVNQCKKKFALMKESFRNKKTAV

SEQ ID NO: 37438 - protein, 335 aa, Zea mays
  Clone ID: uC-zmrob73080h09_FLI.pep
YRRTGRWESHIWDCGKQVYLGGFDTAHAAARAYDRAAIKFRGVDADINFNLSDYDDDMKQMKSLSKEEFVHALRRQSTGFSRGSSKYRGVTLHKCGRWEARMGQFLGKKYIYLGLFDSEVEAARAYDKAAIKCNGREAVTNFEPSTYDGELLLTAEASAEVADDVDLNLSISQPASSQSPKRDKNCLGPQLHHHHGRPFDGSAVLKKTKIDAPSELSSAGRPHRSFLPHLVAAEHLPPRSHPFFITHHESDASRRDPSWAAAAAWKVTAAAPPPPTTTLLPLPLPSTSSAAASSGFSNTATTAAAAPSAASSRRFDPPPPSSSSSSSHHHHHHRR

SEQ ID NO: 37439 - protein, 189 aa, Zea mays subsp. mexicana
  Clone ID: uC-zmroteosinte008b05_FLI.pep
EKRTHKTSAEFFLPSTDLRPLATDPSCQLNVLGHDGHALGMDRAQIGIFEETNQVGLCCLLQSKHGMALEAQIRLEILSNLPHKPLERQLPNQQLSALLVLADLTKSNSPWAVTVRLLHSSSCGCRLPGCLCSELLPRSLSSCGLASGLLGTRHLANDVLFDSNLGAGFPSPKSGTTQRRPTARTQEDS

SEQ ID NO: 37440 - protein, 278 aa, Zea mays subsp. mexicana
  Clone ID: uC-zmroteosinte008f10_FLI.pep
VRVDIGCTNCRADSTCKEDCECRGLSMSCSKNCRCSDLCTNRPFRKDKKIKIVKTKRCGWGAVALEPLERGDFVIEYVGEVIDDATCEQRLWDIRRRGDKNFYMCEISKDFTIDATFKGNVSRFLNHSCEPNCKLEKWQVDGETRVGVFASRSIEVGEPLTYDYRFVHFGEKVKCHCEAVNCQGYLGSQIKNPIQSILATVAPQVQLREYSPMHHEAPRLKPINHLLPWTNCIEVSFNLRSKRKIDRLCWARKKKRTSLVPSSTSMPASASEVPAADF

SEQ ID NO: 37441 - protein, 340 aa, Zea mays subsp. mexicana
  Clone ID: uC-zmroteosinte011c06_FLI.pep
FRLTNFSVLSLNRVGASEFIVPYCKFLKSLNYPFSVGTRFKVGCENEDANERSFGLIIGISEVDPIHWPGSKWKSLLIKWDGATKYSHQNRVSPWDIEGVGSSVLVTHRLSSSVSKRTKLCFPPSDLDTPILDGNGRPDSVETERFHRVLQGQELVHPSIHGAACSHSSDSPRCQGSYGRRFSADVWNCKMNDVMSGPRHLNATGFAYQPLGFSESVKFSEVLQGQEISQAVPSFMRSAFNAGTQNGRVRPFDYVQRSDATQGYALQQFNLPATEVHSPSSVLMFNQTMAPHAELDGATNREEVHGSRYLSSNAIGREAEPWPSMQQQRASVNGSEPLDN

SEQ ID NO: 37442 - protein, 863 aa, Zea mays subsp. mexicana
  Clone ID: uC-zmroteosinte018g09_FLI.pep
LLIGRGTNASKARNQKRSLDDAVLGITHIIVDEIHERDRFSDFMLTILRDLLPLYPHLRMVLMSATIDAERFSQYFNGCSVIQVPGFTYPVKSFYLEDVLSILQSAEQNTEVYNYQHSETGITPLMVFAMKGQLGDVCMLLSFGVDCSAQDHDGKSALDWAQQENQQEVCEVIKKHMECSSEKSTEDNELLNKYLASINPEHIDTLLIERLLRKICVDSNEGAILVFLPGWEDISQTRERLFASPFFQDSSRFLVLSLHSMIPSSEQKKVFKRPPVGVRKIILSTNIAETAVTIDDVVFVIDSGRMKEKSYDPYNNVSTLHASWVSKASARQREGRAGRCQPGTCYHLYSRFRASSLPDYQIPEIKRMPIEELCLQVKLLDSNCRIADFLKKTLDPPIPETVRNAIAVLQDLGALTQDEQLTELGEKLGSLPVHPSTTKMLLFAILMNCLDPALTLACAADYRDPFVLPVAPDERKRAAAAKVELASLYGGFSDQLAVVAAFDCWRHAKDRGQDSQFCAKYFVSSNIMNMLSSMRKQLQNELSQRGFVPADASACSLNSKDPGIMRAVLMAGAYPMVGKMLPPRKNARKSVLETASGAKVRLHPHSCNFNLSFSKSSGNPLLIYDEITRGDGGMYIKNSSVVGSYPLLLIAAEMVVAPPDDDSDEDEEDSSEDEAEESTLVQHKEEIMSSPDSIVSVVVDRWLRFDATALDVAQIYCLRERLASAILFKVKHPQDVLPPALGASMYAITCILSFDGLPSMVPPNDLSANRGSGQDLAEASKFSQGRRAGYIPPSGFLMSLLADRTHNAPSFQNSSNHPGGGSAHTRPSRAPVGRFDRSRRPFRNSGPGSSAPRSFKRQRDAPR

SEQ ID NO: 37443 - protein, 303 aa, Zea mays subsp. mexicana
  Clone ID: uC-zmroteosinte020g09_FLI.pep
DDSGTEEEQAAFMKELERFHREKMLEFKPPKFYGEGLNCLKLWRQVTGLGGYDQVTSCKLWRQVGESFKPPKTCTTVSWTFRNFYEKALLEYEKHKIETGEFQVASSALPDRVGSESQVGGSHVSGSGRARRESATRAMQGWHSHRLLGNGEIADPIIKDKGPIVLKKDKTPKSSGSAKRKRTPSLEDDMAIPYKSDKLQNDSMVIDMGPPADWVKINVRKTKDCYEVYALVPGLLREEVHVQSDPAGRLIVTGEPEQLDNPWGVTPFKKVIRLPSRIDPHQTSAVVTLHGQLFVRAPFEQSK

SEQ ID NO: 37444 - protein, 312 aa, Zea mays subsp. mexicana
  Clone ID: uC-zmroteosinte021e06_FLI.pep
QPMIPPYGAPPYVMYPPGVYAHPSMASGAHPFTPYAITSPNGNADATGTTAVACDTDGKPSEGKDKSPTKRPKGTLGSLNMLTGKNPSEHGKTSGASANGATSQSGESGSDSSSEGSEGNSHNDSYKHSGQEQDGDVRSSQNGASRSPSEGKFNQAMAIMPMPSSGPVTGPTTNLNIGMDYWANTASSAPVIHGKVTPTTVPGAVVPAEQWIQDERELKRQKRKQSNRESARRSRLRKQAECEELAQRADVLKQENASLRDEVNRIRKEYEELLSKNNSLKEKLEGKQHKTDEAGLNNKLQHSGNDIQKKGN

SEQ ID NO: 37445 - protein, 290 aa, Zea mays subsp. mexicana
  Clone ID: uC-zmroteosinte026h02_FLI.pep
QTLPASSSIKGDVLQYIQEKVSPCILDCIFQHIPVKAAAPSGKKKDTELAPEAEAAAKASKNAIATCSLLPYLESLWPIGTLQMASLAGSLYGMMIRLLPSFVRTWFTTLRDRSLSYSIESFTKQWCSPPLLLDEFSQVKESVYGDENFSVSVNRSAFEIVATYKKEETGIDLVIRLPSCYPLRHVDVECTRSLGISEVKCRKWLLSLTSFVRSQNGAIAEAIRTWKSNFDKEFEGVEECPICYSILHTSNHNLPRLACKTCKHKFHGACLYKWFSTSNKSTCPLCQTPF

SEQ ID NO: 37446 - protein, 322 aa, Zea mays subsp. mexicana
  Clone ID: uC-zmroteosinte031d02_FLI.pep
RMKGEYPERVGQPECQYYLKTGTCKFGPTCKFHHPREKAGIAGRVQLNTLGYPLRPNEKECAYYLKTGQCKYANTCKFHHPELFNAVPSSRGSPIYTSVHSSASAGPQSYTGTMSSWTFPRASFIPSPRWQSPSNYAPMIVPHGLVQVPSWNSYPGQLQSPGAQQTYGSSQQGEASAGNQGMLSPYRSSSFPVPQYALQRDNVFPERPDEPECQYYMKTGDCKFGAVCKFHHPRVRSQPPPDCVLSPMGLPIRPGEELCKFYSRYGICKFGANCKFDHPTMAAPMGVYAYGFSGSASVAPASTNAPMTRRLLGSPSGSGYMS

SEQ ID NO: 37447 - protein, 930 aa, Zea mays
  Clone ID: 700085405_FLI.pep
SSPSLVVVCLGRPATWLASSPAARAMANPTATKHAFKRILTSLLKPGGGEYGKFFSLPALNDPRIDKLPYSIRVLLESAIRHCDNFQVTESDVEKIIDWENTSPKLAEIPFKPARCILMDNTGVPAVVDLAAMRDMMPKLGCDPYKINPLIPVDAVIDHAVRVDVAGTYDALDRNEELEFQRNKERFAFLKWASNAFHNMQVFPPGSGTVHQVNLEYLARVVFNEDGILYFDSVVGTDSHTTMINSLGVAGWGVGGIEAVVAMLGQPMGMVLPGVVGFKLSGKLRDGVTTTDIVLTMTQMLRKHGAIGKFVEFYGVGVGELSLPARATIANMSPEYGATMGFFPVDQVALDYLKLTGRSDETVSMIEAYLRANKMFVDKHEPETERVFSSYLELDLSEVEPCVSGPKRPHDRVPLKEMKSDWHACLDNEVGFKGYAVPKEQQGKVVKFDFHGRPAEIKHGSVVLAAICSSTNTSNPSVMIGAGLVAKKACELGLEVKPWVKTSLTPGSVVATEYLKHSGLQDYLNQQGFHVAAHGCATCVGNSGDLDGSVSAAITENDMVAAAVLSANRNFEGRVNPLTRANYLASPPLVVAYALAGTVDIDFEKEPIGVGKGGNEVFLRDIWPSNQEIDEVVESSVQTHLFKKVYDSIMERNPRWNQLPVPKEALYPWEDRSTYIRKPTYLEGMSMTPPAAPPTVTEAYCLLNLGDSITTDHISYSGKIPEGTPAAKYLLEYGVEPKNFSSYGGRRGNNEVVMRGAFANMRIVNKLLDGKAGPWTIHVPSGEKLYVYDAAMKYKSEGHDMVIIAGSEYGSGSSRDSAAKGPMLLGVKSVIAKSFERIHRSNLVGMGIIPLCFKAGEDADSLGLTGRERYTIHLPTSTAELSPGQDVTVTTHDGRSFTCTLRLDTQLEVTYFNHGGILPYMVRNLAAQMK

SEQ ID NO: 37448 - protein, 149 aa, Zea mays subsp. mexicana
  Clone ID: uC-zmroteosinte037h08_FLI.pep
EASAGNQGMLSPYRSSSFPVPQYALQRDNVFPERPDEPECQYYMKTGDCKFGAVCKFHHPRVRSQPPPDCVLSPMGLPIRPGEELCKFYSRYGICKFGANCKFDHPTMAAPMGVYAYGFSGSASVAPASTNAPMTRRLLGSPSGSGYMS

SEQ ID NO: 37449 - protein, 157 aa, Zea mays subsp. mexicana
  Clone ID: uC-zmroteosinte058g09_FLI.pep
RTSRQVRFSKRRSGLFKKAHELSVLCDAEVAMVVFSPAGRLYHYASLGTSIEKTFCRYWDLANTDIDLNIEARDSRDNYNTQFPENGQPAEGSLSDLLIMMDQWSMEENLNGLSMAGIAGLEEALTVALAVIRNKLAMKVTGCGGPKPEAHTLFQRR

SEQ ID NO: 37450 - protein, 550 aa, Zea mays
  Clone ID: 700219076_FLI.pep
ERRGLLLPSTPLKKRIEASEGAPPRLEGGEGTPRTMTAMEAAVDAMLAAASRAFTSTFAIAIQIQGCMICLVLALGWAAASIVRKGVIKNMRRNIVDGNSFAFLCDNIDELEHSVQENLPRVSVVMPLKGFGEHNLQNWRTQITSLYGGPLEFLFIVESKDDPAYHAVSRLITEYKDNLEAKVVVAGLSTTCSQKIHNQLIGVEKMHKDTKYVLFLDDDVRLHPGTIGALTKEMEKNPEIFIQTGYPLDLPSGSLGSYCIYEYHMPCSMGFATGGKTFFLWGGCMMADDFRQDRYGIVSGLRDGGYSDDMTLAAIAGQHKRLIFSPPVAVFPHPLASDLSFSRYWNYLRKQTFVLESYVSNVNWMMNRALFTSHCYLSWGFVWPYIMALVHVLAALRAPYSKVVKEASDSSWGLFLVGLLFTCTLIELVSMWNLTKVEIQLCNMLSPEGPKVSLDSYNWGLVFIAVLVDNFLYPVSAIRSHFSQSINWSGIRYYLRDGKISKIERENSSKYTDLGGKHLYGKRTYPPNKSLLGYLSRTLVQWHQPKKYDV

SEQ ID NO: 37451 - protein, 524 aa, Zea mays subsp. mexicana
  Clone ID: uC-zmroteosinte066a02_FLI.pep
GTEWRFRHIYRGQPRRHLLTTGWSAFVNKKKLVSGDAVLFLRGDNGELRLGVRRAAQLKNGSAFPALYNQCSNLGSLPNVAHAVATKSVFHIYYNPRLSQSEFIIPFSKFIKSFSQPFSAGSRFKVRYESDDASERRCTGIIAGIGDADPMWRGSKWKCLMVRWDDDVDFRQPNRISPWEIELTSSVSGSHMSAPNAKRLKPCLPHVNPDYLVPNGSGRPDFAESAQFHKVLQGQELLGYRTHDNAAVATSQPCEATNMQYIDERSCSNDASNIIPGVPRIGVRTPLGSPRFSYRCSGFGESPRFQKVLQGQEVFHPYRGTLVDASLSNSGFHQQDGSHVPTQASKWHAQLHGCAFRGPQAPAVPSQSSSPPSVLMFQRGDPKMSPFEFGHFHVNKKEDRRAMFVHAGGIGGTEQTTMLQAHHVSGGTQNRDVTVEKSHPAVAAASDNREVSKNSCKIFGISLTEKVPAMKEKGCGDINTNYPSPFLSLKQQVPKSLGNSCATVHEQRPVVGRVIDVSTVDMMI

SEQ ID NO: 37452 - protein, 206 aa, Zea mays subsp. mexicana
  Clone ID: uC-zmroteosinte068F11_FLI.pep
RVWSVDFSIVDPTKLVSGSDDGSVKLWDMKQAGSIGTIKTRENVCSVQFQPDTARSIAIGSADHKIYCYDLRHIRAPYCTLVGHTKTVSYVKYLDASTIVSASTDNSLKLWDLSMSPGRIIDSPVQTFKGHTNTKAALEEILYQFEEKLQAEREEAARKQEELQAQVQAQQAALEENQSLLRQAKHNYLARTYLWLELCQNYVQSV

SEQ ID NO: 37453 - protein, 167 aa, Zea mays subsp. mexicana
  Clone ID: uC-zmroteosinte083d03_FLI.pep
QMFRFQVRLYCPDCDELLDTRGRNFLHTAIEHKKWKVVWRFSGTADLGRMANVMDSEGNTPLHLAIKNADQMIVSLLMATNSVLPNIVNNQGLTALDLAVLATDKGISYTMNPQVIILRCLAWTGAVLSPRRLDHFIDDFGIGKTSGNELKKFTNIAQKKHGIVFIF

SEQ ID NO: 37454 - protein, 235 aa, Gossypium hirsutum
  Clone ID: uc-gsflnu33B137e01_FLI.pep
VKFMETVVSSVVAPDELTVEERNLLSVAYKNVIGARRASWRIVSSIEQKEEGRGNADHVSIIREYRAKIEAELSEICAGILKLLEEKLVPAAGNGDSKVFYLKMKGDYHRYLAEFKTGDDRKAAAENTLSAYKSAQDIAVSELAPTHPIRLGLALNFSVFYYEILNSPDRACSLAKQAFDEAISELDTLGEDSYKDSTLIMQLLRDNLTLWTSDMQEDGTEEIKEASKPEDEKQQ

SEQ ID NO: 37455 - protein, 159 aa, Gossypium hirsutum
  Clone ID: uc-gsronu33B046C09_FLI.pep
GNSNSSSSSQLQNSGSEEDLHQQNMMDQRKRKRKESNRESARRSRMRKQQHLDELVAQVAQLSKENNQILNSINFTTHHYLNIQAENSVLRAQMMELSQRLDYLNQILSYLNTMSASELVYETDQCFETSTCDHGFTKPFHLPYLNQPIMASPDMFQYY

SEQ ID NO: 37456 - protein, 140 aa, Zea mays
  Clone ID: 700156628_FLI.pep
FLEMIKEEFNRRYSGGEAGTATANSLTRDFGPRLRDQMQYCTDHPEEVSKLSRVKAQVDQVKSIMMENIDKAFDRGQQIDGLVTRTEQLHDEAVDFRRQGVQLRRRMWYQNMKVKLIVLGVVVALILIIVLSICHGGCSK

SEQ ID NO: 37457 - protein, 512 aa, Zea mays
  Clone ID: 700220375_FLI.pep
LGRFDVLLVPPDLADMWKQFIGKLSWKSMKSSSGSGGSPPAPLSSPRDNGASPRENGATGKPNVSPRSPAAGAGAGAEVRSREDAFVQKVNICCAVYDFSDRGKDSPEKERKRQMLMSLVDCIGAAEEPLTETMIAACVRMFAANLFRVFPPKVRSGTSASETEEDEPFFDPSWYHLQVVYEFLLRFVTSPLVDAKVARKYVDSPFVSKLLDLFDSDDPRERDCLKTILHRIYGKFMGNRPFIRKAVSNIFYRFVFETDHHNGIAELLEVFGSVISGFAKPLKEEHKLFLWKALIPLHKPKSMGVYLPQLTYCITQFIDKEPKLAGTVIRGLLKYWPVTNSQKEMMFLGELEEVLELTDMAEFQKCMVPLFRKIASCLNSSHFQVAERALFLWNNEHLFDMISQNRQVILPIIYPALERNTRWHWNQSVLNVTMNVRKMFRDMDERLLQACHDNFQEEEEKRAVTEERRRLMWEQLERSAARGYHQPPAIAADASSFPAPSSSARLVSLTVT

SEQ ID NO: 37458 - protein, 226 aa, Zea mays
  Clone ID: 700240404_FLI.pep
CILKILKSSSSRCPICRRTLSKEDLFLAPEVKHPDEDGSGNLESDRPLSSKVQALLKLLTASQNEDPSSKSVVFSQFRKMLILLEAPLRRAGFKTLRLDGSMSAKKRLQVIQEFSHGGSDSPTVLLASLKAAGAGVNLTAASTVYLFDPWWNPGVEEQAMDRVHRIGQKKEVKVIRLIVKGSIEERILALQERKKRLISGAFGKKGGKNEKEMRVEELRMMLGLGK

SEQ ID NO: 37459 - protein, 492 aa, Zea mays
  Clone ID: 700267466_FLI.pep
VELAVTAMEELVRMAQLDEPLWNAPAGGHDGSAETLNEEEYARMFVPAGGLGLKKQYGFKSEASRDSSVVIMTHASLVEILMDVNQYATVFSSIVSRAATLEVLSTGVAGNYNGALQVMSVEFQVPSPLVPTRDSYFVRYCKQNADGTWAVVDVSLDTSSVLKCRRRPSGCLIQEMPNGYSKVTWVEHVEVDDRSVNGIYKLLVDSGLAFGARRWVGTLDRQCERLASVMASNIPTSDIGVITSTEGRKSMLKLAERMVTSFCGGVTASAAHQWTTLSGSGADDVRVMTRKSVDDPGRPPGIVLNAATSFWLPITPKRVFDFLRDESSRSEWDILSNGGVVQEMAHIANGRDHGNCVSLLRVNQSTNSTQSNMLILQESCTDASGSYVIYAPVDVVAMNVVLNGGDPDYVALLPSGFAILPDGPSGSSNMQGGGGGGVGSGGSLLTVAFQILVDSVPTAKLSLGSVATVNSLIARTVERIKAAVSGESVTQQ

SEQ ID NO: 37460 - protein, 466 aa, Zea mays
  Clone ID: 700282259_FLI.pep
MQRSQVHGPPPKSANLHFLSSLSPPPPRRPASRATTGASPPRMEYERIHEPLPRRQSGGFSPAKLRAMLRGLEKHQRNSGEDTSPEANDSGELDDRRSLECSTSTEMSSNSGHRSRNRAPDDDSFDSESSSSGPPTVKRSAAVAALLPPFSRPTPSKWDDAEKWISSPTSNRTGRAGPTAGTMPKKSALAFPEHGARQPAVAKVVTDVPTIAGPLVKNSDGLAHPDLLKPAHDASIVDGPAPAVRSVSMRDMGTEMTPIASQEPSRTATPMIASSPTSSRTPTPQRTTEFSVSNIDSNKMAMSEEEVHISTRQEIMDLGERLGKTTIAAWASKEEKAAARSTDTAADNAVDVNRENRAADWQEAEKAKYLARFHREEAKIQAWENLQKAKIEAEMKRIEAKIERKRAREQDRLASKLAAVSHRAEAKREAAEARRDQEAARTEEQAAQIRETGHTPSSFSCWCWCL

SEQ ID NO: 37461 - protein, 115 aa, Zea mays
  Clone ID: 700343159_FLI.pep
KQMDPEIVRIMKAIESMLDVMEVRTTCIRHLAIENLNENRSGLSDADKITKPDFSVLCMILVPYIIRSLEKRPFTVSHCWEVLKNEAKWLHLEQGSQNIDVLVNKGVGFSPRCRI

SEQ ID NO: 37462 - protein, 349 aa, Zea mays
  Clone ID: 700551738_FLI.pep
GDGHLLMLKLKEWPRPSVLEAFLLCQRPEFIVNFPLVDFIHPRWGLLNLAAKLPPDALQPELGMKLLIAHGSHRELGKGDSMTNLMINMSDVVHMLMHATEVHYQCPKRVRVQSDVSEMIANGTSVHVNAHTPVQNLNLDIEEQSHKHSKSHIEEPNTNNSEGSLAGAVWDVFRRQDLPKLNEYLAAHREECAARCQAVSSVKYPIYDQTVYLNDYHKKMLKDQYGIEPFTFHQHIGEAVFIPAGCPFQLKNLQSTVQLALNFLSPESLPESVRLSQEIRCLPNGHLAKLKMLEVKKISLYAASSAVREIQRITLDPKFNLDPSFEDQNLTRAVSENLARVNKRKVSCS

SEQ ID NO: 37463 - protein, 329 aa, Zea mays
  Clone ID: 700574820_FLI.pep
YVPSPAMTWCNSFNDVRAVENNLATAAAVAAAAAKKQQQQQASSHVNLIRTCPSCGHRAQYEQVQAAATIQDLPGLPAGVKFDPTDQELLEHLEGKARPDARKLHHPLIDEFIPTIEGENGICYTHPERLPGVGKDGLIRHFFHRPSKAYTTGTRKRRKVHTDEQGGETRWHKTGKTRPVFTGGKLKGYKKILVLYTNYGKQRKPEKTNWVMHQYHLGSDEEEKDGELVVSKVFYQTQPRQCGSGSATAKDAIPLAANAATDHHHHHHHDGGNGGGNNMLKEAGIVDFYSPAALISYNQAASNSRVAASAHLVPNFEVHTTSGAAGFGP

SEQ ID NO: 37464 - protein, 267 aa, Zea mays
  Clone ID: 700576436_FLI.pep
EVELDDVWFAYPSRPSHMILKGITLKLAPGSKVALVGPSGGGKTTIANLIERFYDPLKGRILLNGVPLAEISHQYLHSKVSIVSQEPTLFNCTIEENIAYGLEGTTNFADVESAAEMANAHNFICGFPDQYKTVVGERGIRLSGGQKQRIAIARALLMNPRVLLLDEATSALDAESEYLVQDAMDSLMKGRTVLVIAHRLSTVKSADTVAVISDGLIVESGTHDELLDRDGIYTALVKRQLQGPKFEATSSISEASEIEAEPSSNGQ

SEQ ID NO: 37465 - protein, 87 aa, Zea mays
  Clone ID: 700469967_FLI.pep
IVLNVPDDSSCAAVPVKEKRQSVCPLRRGRSTNRDILLYRKMQCKSCGVLLIVGDVVVYGSISIFCIHEMHTQVVGNVGMDRESLRC

SEQ ID NO: 37466 - protein, 483 aa, Zea mays
  Clone ID: 700574807_FLI.pep
CASSSPFPLRVQPGATHSAADPRRRSDPAMASTAARRLRELQAQTGNKTCVDCAQRNPQWASVSYGVFMCLECSGKHRGLGVHISFVRSVTMDSWTEAQLRKMEAGGNDRLNAFLTARGVPKETPHVAKYNSNAAAAYRDRIAALAEGKPWTDPPVVKETPGSGAPAPARKPPVHTSAASGGGGWDDWDDDFRPDMRRNQSVGSFAAAGAQSGRQPPRSKSTQDMYTRQQLEASAANKEDFFARRMAENESKPDGIPPSQGGKYVGFGSSPPPSANRNGGAAQGDVMQVVSQGFGRLSLVAASAAQSAASAVQVGTKEIQSKMRDGGYDQKVNETVSVVANKTAEIGSRTWGIMRGVMALASQKVEEYAKEGGVGGWGEDWQHSEQKSEPYQRFEHETNGNSWNSSQNSSSKNNSSSWDDWDDPGKKDEPAKPHQSSDSWAGWDDGKDDGFDSPSYNNHSTSNKGSNQNGTSGGTFWTEGGFR

SEQ ID NO: 37467 - protein, 438 aa, Zea mays
  Clone ID: LIB143-062-E4_FLI.pep
FSSRAQTLNLNLSPAAAATTSTATPPPPSRSPLPAPSTSSRIEAMSSDDEVREEKELDLSSNDVVTKYKAAAEILNNALKIVVSQCKPKVKIVDLCEKGDSFIREQTGNVYKNAKRKIERGIAFPTCVSVNDTVCHFSPLATDDAVLEENDMVKIDMGCHIDGFIAVVAHTHVITNGPVTGRAGDVLAAANTAAEVAMRLVRPGKKNKDVTEAIQKVAAAYDCKIVEGVLSHQLKQFVIDGNKVVLSVSNADTKVDDAEFEENEVYAIDIVTSTGEGKPKLLDEKQTTIYKRAVDKNYHLKMKASRFIFSEISQKFPIMPFTARALEEKRARLGLVECMNHELLQPYPVLHEKPGDLVAHIKFTVLLMPNGSDKITSHPLQELKPTKSIEDNAEIKAWLALGTKSKKKGGGKKKKGKKGDAAEADPMEEATNGATSQE

SEQ ID NO: 37468 - protein, 401 aa, Arabidopsis thaliana
  Clone ID: LIB22-010-D8_FLI.pep
NREAQVLTSTIKSSNHLQPSMVVMSRVSFYSSFLLLLLEVVVASSEFDDEGRTSFSPTTAIIMIVLVSVFFALGCISVYMRRCLQHALGMDSGGGPGNWLNVRQTTEPGLDASVIETFPTFPYSTVKTLRIGKEALECPVCLNEFEDDETLRLIPQCCHVFHPGCIDAWLRSQTTCPLCRANLVPVPGESVSSEIPGLARETGQNSLRTPIDDNRKRVLTSPDERLIDSVAWTGNQSMPRKSMSTGWKLAELYSPASSPGQPEENLDRYTLRLPQEIHDQLVNSSLGKQGSKGQLALPQERSSVRGFRTGSLGTEKNYFYFERFDQDGRLDRRPFSITPPYHTRSIQSPDEIINASGNYQDRAGAPKGLLLAIRSPFDRLFTGKKNAGERSYLQSGDASPV

SEQ ID NO: 37469 - protein, 352 aa, Zea mays
  Clone ID: LIB3066-004-A3_FLI.pep
CITIAGGGPTTMGSRDYYEILNVDRSATDDDLRRAYRRLAMRWHPDKNPAGKAEAETRFKEITEAYNVLSDADKRAVYDQYGEEGLRGDVPQPGGGGGTDDIFAEFFGSTPFTYCSTASSGRQPPPPPKWDSGFGRAFRRAQGGGGGAASSRMAPPPPPVESRLACTLEELCMGGTKKMRISRNLVDASGKTKTESEILWIEVKPGWKKGTKITFAGKGNQQWNQLPADLVFVVDEKPHPVYRRDGNDLLAEVRVTLAQALGGTVVVLTALDGRELAVDVGGGGEDEDDEDDAPVVCPGYELVLPGEGMPIAREPGRRGNLRIRFDVAFPERLTRRQRAEIKRALEDSTGVC

SEQ ID NO: 37470 - protein, 513 aa, Arabidopsis thaliana
  Clone ID: LIB22-074-F3_FLI.pep
ITLSPLLADLLLRFFPTNDISEMAASYEEERDIQKNYWIEHSADLTVEAMMLDSRASDLDKEERPEVLSLLPPYEGKSVLELGAGIGRFTGELAQKAGELIALDFIDNVIKKNESINGHYKNVKFMCADVTSPDLKITDGSLDLIFSNWLLMYLSDKEVELLAERMVGWIKVGGYIFFRESCFHQSGDSKRKSNPTHYREPRFYSKVFQECQTRDAAGNSFELSMIGCKCIGAYVKNKKNQNQICWIWQKVSSENDRGFQRFLDNVQYKSSGILRYERVFGQGFVSTGGLETTKEFVEKMNLKPGQKVLDVGCGIGGGDFYMAEKFDVHVVGIDLSVNMISFALERAIGLSCSVEFEVADCTTKHYPDNSFDVIYSRDTILHIQDKPALFRTFFKWLKPGGKVLISDYCRSPKTPSAEFSEYIKQRGYDLHDVQAYGQMLKDAGFTDVIAEDRTDQFMQVLKRELDRVEKEKEKFISDFSKEDYDDIVGGWKSKLERCASDEQKWGLFIANKN

SEQ ID NO: 37471 - protein, 376 aa, Zea mays
  Clone ID: LIB3279-019-B1_FLI.pep
SPLPTRYSGSFRGLIKSMLRKSPEHRPSAAELLKHVHLQPYVLQVQLKSSPSRNMSPIYQALTDKVKKMTFPSDITDSARRVARRNSLGNERTVTFCKPSPEQNSISSTRSIKEYTTTQSVKELSVGSSQIDDEVTSKAIRTKTTGILRTPKSTPAKTLTTRNRLELDPPKTSYSRTDHSELTSRTPLNKSAVTARRASLPLPTYRAPNGRAASVLNQLDSPDVSVNAPRIDRIAEFPLASSEDPLAPMNKNLSSAPGHDVSCSTPPFINRSITKDKYTVQVLHRGDGDNASDSSGRNATAASSGGSNDSRQQRFDTSSYQQRAEALEGLLEFSAQLLQQERYEELGILLKPFGPEKASPRETAIWLTKSFKETAS

SEQ ID NO: 37472 - protein, 454 aa, Homo sapiens
  Clone ID: LIB3063-092-E4_FLI.pep
HRGEARVTLLPCKSQVSGNLRSWLLCGRVTVERPGYHKLMDFDKKGGKGETEEGRRMSKAGGGRSSHGIRSSGTSSGVLMVGPNFRVGKKIGCGNFGELRLGKNLYTNEYVAIKLEPIKSRAPQLHLEYRFYKQLSATEGVPQVYYFGPCGKYNAMVLELLGPSLEDLFDLCDRTFTLKTVLMIAIQLITRMEYVHTKSLIYRDVKPENFLVGRPGTKRQHAIHIIDFGLAKEYIDPETKKHIPYREHKSLTGTARYMSINTHLGKEQSRRDDLEALGHMFMYFLRGSLPWQGLKADTLKERYQKIGDTKRATPIEVLCENFPEEMATYLRYVRRLDFFEKPDYDYLRKLFTDLFDRSGFVFDYEYDWAGKPLPTPIGTVHTDLPSQPQLRDKTQPHSKNQALNSTNGELNADDPTAGHSNAPITAPAEVEVADETKCCCFFKRRKRKSLQRHK

SEQ ID NO: 37473 - protein, 330 aa, Zea mays
  Clone ID: LIB3279-031-F5_FLI.pep
SHGFPPLVLRHINQADSALSTSSNEHFITVMSQIRQNSPLLAFHNSSCNSMRMHPSKRPIPAQKKNSKFTAPSPQTYRHGYPERLPGEPAVHPRAERAASGAHVPSPFGAVPRLLVEPQQRLLGLVGVHHNVAAVPTRRQRHGPVVVALVRHLLALLLAPVEPAAGLGGVRGGRRRHGEHGAVPAVARADGDHGVVEVLVRLLRQRLRRRRRRGAWARSGLLDPGCAARDRREHHAALPSGAAEGKEARGVRDGVVVVGCRAERMGGEAGMEKKRHGARCCCCRGVAVLRHCSARAGWRYLISQVAPCGAASAVGLQRRTHRGRPLDQNE

SEQ ID NO: 37474 - protein, 276 aa, Zea mays
  Clone ID: LIB3067-054-E3_FLI.pep
LARSSSNLASGMASKQIGVLTCFIAITALAFRPCASAVPMDGGWSNGGATWYGPAKGAGSDGGACGYQGAVDQPPFSSMITAGSQSIFQDGKGCGTCYQVKCTGHASCSGSPVTVVITDLCPGAACQVEPVHFDLSGTAFGAMAKPGQADQLRNAGRLQVQYIRVACNWNGLDIAFRVDAGSNANYLAMAIEYESGDGDLRAVELKQSGAAAWAPMQRSWGAVWQYKSGSTNLQAPLSVRLTSGSGRVLVASNVIPAGWQPGRTYRSVVNFGGNHA

SEQ ID NO: 37475 - protein, 529 aa, Zea mays
  Clone ID: LIB3357-006-G9_FLI.pep
GREPDQAGAREDVRRRAPQRDRLVRRGRERQRARGRQASAGRPERALRHRGPHLRHRPELGADAGGVHRGVRPPVAPRARAPRRVPARRGRHRAAEDVHEGLLGGPGGRARQGDADRGRGRGQPAHRGRVQRGAQDHGAVRGQPARPAPALLLEGADRRQRLRRGAVPAVRVLRAGAVVRGVAGEARRVRLLAHHPRVHGADGVRERRRRDADAGAGLHQGRARDAVGVRDDRPQDGGGARRRGRGAGAGAAEGRGGAEARGLLVPVAAGHPGVPRPEPPCARREDAGAGGAERVRQELGAGSGAAVLRAHVRARAPGRQGRAQVQPAGAAARGGCGTAGAVPVRGEHPREHRVRARGRDGGGGGGGGGAGERAPVHRGAAGGVPDAGGRARGAAVGGAAAADRDRARAGEAGGHRAAGRGDQRAGRRVGAVRAGGAGARGVRAHHHRGGAPAGHGARRAHHRGHRRRQGGGAGVALAPAQAPSRRVLRADAAAAAADGRGGRARAVDLVQRGRVGRNGWMDGFGSSRD

SEQ ID NO: 37476 - protein, 455 aa, Zea mays
  Clone ID: LIB3067-054-F10_FLI.pep
PLAIPAPAARTRGMDASHPEGEATAGWLTVEEWSGSSASALSRTAVLTASASSLTAHRFGSRWERIGSRMLGAFVPEGFPGSVTPDYVPFQMWDTLQGLSTYIRAMLSTQALLGAIGVGEQSATVIGATFQWFLRDLTGMLGGILFTFYQGSNLDSNAKMWRLVADFMNDLGMLMDLLSPLFPSSLIVIMCLGSLSRSFTGVASGATRAALTQHFALANNAADISAKEGSQETLATMLGMGLGMLLAQITRGHALSVWASFLSLTMFHMYANYKAVQSLSLTTLNYERASILLQYFKECGEVLVPRKVSQQEHILPSWSNWRKLNRIKLPHERVHLGAKASMLTHSDMLVIAKTRYHYENANYFLLDKQGIVYVFIHKEATPADVLRSFVHGLVLASSTQNSKPQHLEARRWMDEMYTSFISKLQTEGYSTERLLSHSILWRAHWLHGQLDEKLK

SEQ ID NO: 37477 - protein, 456 aa, Zea mays
  Clone ID: LIB3594-027-G11_FLI.pep
PSAMSTSPAASSSAPTAFAASAVTMAAEAADGPVLSVVSKRLRALRKKYNRITQMEESLAAGKSLNREQEEVLRSKPVVAALIDELERLRPPLASALAEELSSRSAPAPAPAPAATASSSDPDSSVQDLLALVYFGSLFDVKQQSDFVSLVYTRELERSSCLTYDYVGDDPEDSLVETDLNAVSALATLAASRPPAAAGVSHRDALQACAHHARLWLNRADEPIHPDSTITYAGVRAKLDRIMASGYYTAQLEMRTPMDLAAAVANFGAGGVQVQESMVVSPQALEAVEGSQDVEEHKDEKEDSQATEIYSDHQAPVVDAEHVDDEGLVNPAHEVPSAEAEQETFDDYVDDQEQKDQQFTQRRSYQNQRSGGGRGGGRRGYPNGRGVRGYQNGRGGGGYQNGRGGGGGYYESGYYQPRNYNNRGRGGRNSYYNNHGGGAQAGGHGHPGRVELGANA

SEQ ID NO: 37478 - protein, 761 aa, Zea mays
  Clone ID: LIB3594-029-C12_FLI.pep
IPTAPAPPLVPTASAMAVRATVSRFPATPEALESCAVQWGVAVTPFAAADEHGQPPTTGAGGDRVPRCEHCWAYLSSHCDLERWGWTCALCGTLNGFDDEAERRFQRPDVCPELKSSFVDLEILVDEAEGGGDGVQALPVYVAAVDLACSEEFLELVKSALLAALEALVPGSLFGLMTFSHKIGLYDVQGPIPLVKNVFIPPDLEEDGLPVALEDAMPLLCFLAPVDTCKDQIAAVLETLRPTSSWERGVASGQEEDTVLLGRRGFGTAMSALIEYLSSEYGSTFALARVFAFLSGAPDYGAGVLDTRRYGEQYASKGVDADLALLPEQIPFYRDLAAVAVQSGVCIDIFAVTDEYTDLASLKFLSIESGGSLFLYASTDDSTVPQDIYRLLSRPYAFGCVLRLRTSSDFEPGNSYGHFFPDPQYENVQHIICCDSFATYAYDFEFAHNDGFSRHTDPAVVQIAFQYSVIEPVKETSGNGSQPSASYKFCLKRRLRIRTLQYRPTNNISEIYDSVDPEVVLHILVHKVILESLDKGVREGRHQVHAWLSLLAARYNQALSSDVRPLSSIDIDFSQCPQLQTIPQLVFALLRSPLLRLHEEGVHPDYRIYLQCLFSALEPSSVAKAIYPVLISYSSPDKQAFPRHTLSHAALIMSESPIFLLDTFTNLIVYYSSTADPSVPFPPPHDCLLRKTINGLKQDRCITPKLTFIHGGKDDSTLFESYLIEEQDVDGSGLTTGSGFVAFRESVRNVAGEIIQEEIGS

SEQ ID NO: 37479 - protein, 189 aa, Zea mays
  Clone ID: LIB3068-059-G6_FLI.pep
IWNNQTTLYYFMERSSIYKHFSSCLLVPVACIKIVSVHFFFLHREMDFSVRFANLFSCNVSCFFLARYNERVVWTDKQLNLKLLRKGVLTRIYTPMTIVQSLRESGVFTSAIAAGQPAVNAKLSPKETNAQSQNVTASGNMTRVVRSTDSKASGRKILQAVDLAFSDTNVTAVPPLSPPSLDEHRHHSE

SEQ ID NO: 37480 - protein, 442 aa, Zea mays
  Clone ID: LIB3069-005-C12_FLI.pep
FFLAFAGARLGARRGCCAQPEVIGATRAHCLLCCTAGVSGENAEIMEITLLHDESDAGSTSLLPPLLSYGPRSMVPIQVPSSSDLESILSPDPVCSDLQLKEINYNAAAMDESTELLHLILGGNDEGYNTTTELQVWDVLDFYVSENFSALQFDSLMGFTNEVSTSYNDCMNLVDMVEWPVARLSLDDTPKLSNSDDAVLADNVTTDPDETSLYLRTKPTDSETESSSDAGDVETEYLDQKLLSRCLPDLMDVDSPNHLLKTPVRTKHVTLVLDLDETLVHSTLDQCDSADFTLEVFFNMKNHTVYVKKRPYLKVFLEKVAQMFELVIFTASQRIYAEQLIDKLDPDGKYISRRIYRESCIFSDGCYTKDLTILGIDLAKVAIVDNTPQVFQLQVDNGIPIKSWFDDPADQELIELLPFLESLVDSDDVRPIISKAFHDKPE

SEQ ID NO: 37481 - protein, 460 aa, Zea mays
  Clone ID: LIB3591-113-G12_FLI.pep
RHGRKHKLDDEPADDTAADAAEDSGNPKKKGANTKKQQPVAKYGAEAKSKAVRERETGAEVVRGDFDRPSKFLVVCLNAIRDAVAPEEGGGSIHGAGDWGVELWRCCSAQAPSDVLDASGACATVAQTAWLVSTACDIVARKERHGMVVSCPFLLYLVSSQDKAAQVRSICKPLKPLGIHSVSLHPGASIEHQISGLKTCEPEFLIATPERLLELVSLKAIDISGVSMLVIDGLKCFVDHNVSDKIFSIRDAISNNLQITIFTDPSDKNIATMAKNLLRGRITKLSINDSVSSRSAFIAQHVHFCPSEELKTTKVKEILEQILQDHPKKTSKVLLVAASDKKARLMSLSLKLENCTVIDDSCGNSFTICSSVGLMNVIVKDRENMSVTDVEAFETVLVVDLPPSVDEYIEILTGAALHVIGGEVHSIFCNTDASVAKPLAQLLADCGQVVPEFLKSLKSS

SEQ ID NO: 37482 - protein, 619 aa, Zea mays
  Clone ID: LIB3069-017-G9_FLI.pep
EFALREVGTGRHLTVEELARSPIVQELMRRQAFSTPNSNCTSNSQSGTSTPIERSSSGSSNGVGRAKRRSSWLRSIRCVAGSFASHSRDRRSSDEKDASPEKGGHHSSSTTDDSQDSVPRHGPARVKVRQYGKSYKELSGLFMTQEIQAHSGSIWSIKFSPDGRYLATAGEDCVIHVWEVLEFERARKENEVCNPLVAMVCNESSETTVGSAAPSESHWEKKLRSKVLHGGGSVSSDRLMVPEYVFALSEKPVITFAGHSEDVLDLSWSKSQYLLSSSMDKTVRLWHMSSTYCLKTFSHTDYVTCIQFNPVDDRYFISGSLDEKVRIWSIPKREIVDWVDLHEMVTAACYTPDGKGALVGSHKGSCHLYDTSDDMLCYKTQIDLQNKRRKSSQKKITGFQFVPGDSSMVIITSADSRIRVLDGFELAHRFKGFRNTSSQISACLAGNGRYIISASEDSHVYIWRNNDGPKPSRKKGIVSVTDSHEYFHCQSVTVAVTWPFASTAMTCLMNPGKQEELERGSEPQDLQTKLAKAQEMPDVEYRSTNITSNNSNHNNGDRTSPTWPEKLNTPPNQSLRATTCHANEGDQALNRSAWGLVIVTAGRGGQIRTFQNFGFPVRV

SEQ ID NO: 37483 - protein, 381 aa, Zea mays
  Clone ID: LIB3060-059-F5_FLI.pep
HRCVFASITVKAPVREVWNVLTAYENLPEFVPNLAISRIVLRDNNKVRIMQEGCKGLLYMVLHARVVMDLREKHEQEISFEQVEGDFYTFKGKWRLEQLGDQHTLLKYMVETKMHRDTFLSESILEEVIYEDLPSNLCAIRDYIEKAGAKSSNSTGHSNVPTDPDPDVDHDESRQSEQTCVSCSSSTMKQRPKVPGLQKDIEVLKSELDNFIAEYGQYGFMPKRKHLRSHGRVDIEKAITRMGGFRKIASIMNLSLSYKNRKPRGYWDNLENLQEEISRFQKIWGLDPSYMPSRKSFERAGRYDIARALEKWGGVQEVSRLLSLELRYPRRQADPDDERQSESPSGMMKKHGVKPDEGNVSPNAQKWLLKLKDLDVNWVEY

SEQ ID NO: 37484 - protein, 477 aa, Zea mays
  Clone ID: LIB3075-003-G10_FLI.pep
CDHHSSVDVVVGGHPVPVSEPDAVGDDLGAVLVAVPGVVCVCPVPDLQGGVAEAGLPEGRVARLRLREVVRDALDVAAIAYRDVDGRVPCPDGRAPGVDDIVGDVGHAVAALVRVDVAGDDEVGLGGDDPALELHPHRLALHVVVAVAAVPGRVHEHDQPRRGGAVHARQLGPQPLPLGRVLAVGGVGGEHDDVRGGDPHRVPERRRVAVREGLERHVLAQLRGQVQLVVARRPHPRLVRRAALHEARPRVPPGVVVQRVVVGVGEVADVQHGVAAVRLVVRQRRVGVKRLAQVANEAELEGHVRARHGWRGEAEAPHRVAEPHGVVVLGAMLEVCEGAVVDEAGGVVEVVVARVGALRPELHLLRVRRRLAVHDGAAAQLIGRHPRHDHRRALLVTQRDVHLLRGIVPRRDAEDVGVQWHLHRRLQLPPVLARHAGVGDDDEEHSGEEHHLQEVQAAASPQHVAHRFPSPASSPST

SEQ ID NO: 37485 - protein, 262 aa, Zea mays
  Clone ID: LIB3068-043-D11_FLI.pep
APHNQCRLSPARAPAPPRPMADTANPPTKPTKASAPFVVIDAASANKARDGGADAPTPSAGHGRRWLRRACCGVAIAGALAAAAVLSLSLTVLRVRDPTLSMESVAVRRFSVRLDAASPARPLRINVTLSGAIVARNPNYESMRFGASATEIFVDGAADPGPVGVGRAPPGEVPARGASRVAADVDVLVDRVAPAVVAQVLFGGGEVRLATRTAVDGRLSLLGGLYGRRTVRVAMRCRVALRVSAAAVAVAGNPACVADLGR

SEQ ID NO: 37486 - protein, 225 aa, Zea mays
  Clone ID: LIB3075-032-C4_FLI.pep
RPTAIAPSNLEEMYASDMAMSPRFSNDQVHSVYSPAHKSALLNKFHHQQKGLLSPVNTNRIYSPRGLDPSVLHSPFGGMCPRSPRTMEPASPLTVCVGATATQRDMLDQFSSLNKHQVPSAGSPRNLNVSWGNIGTPKSKVDWGVDNDELVRLRHPVQPGNTEEEPDVSWVQSLVNHAELSGKRGEMAGMASRPTNRPELSSQDDSLDESVIASWLEQQMHLEPK

SEQ ID NO: 37487 - protein, 622 aa, Zea mays
  Clone ID: LIB3593-007-E1_FLI.pep
LATMATNPGLFTEWPWKKLGNFKYLLLAPWVAHGGYLAATKGWRAADLGYVAILPSLLLRALHNQAWITASRLQSARGRRQVVDRGIEFEQVDRERNWDDQILLSGILLYLGSTYLPGGQHLPLWRADGAALIALLHAGPVELVYYWLHRALHHHFLYSRYHSHHHASIVTEPITSVIHPFAELVAYELLFSIPLIVCTLNGTASIIAFEIYVIYIDFMNNMGHCNFELVPNWLFKWFPPLKYLMYTPSFHSLHHTQFRTNYSLFMPFYDYIYNTMDKSSDTLYEKSLKGKEETADVVHLTHLTSLHSIYHMRPGFAEYASRPYTAKWYVRMMWPMSWLSMVLTWSYGSSFTVERNVMKKLKMQSWVIPRYSFHYGLSWEKEAINSLVEKAICEADKKGAKVVTLGLLNQAHNLNRNGELYLQKCPKLGVRLVDGTSLAAAVVVNSVPQGTDQVVLAGNISKVARAVAAALCRKNIKVVMTNKQDYHFLKPNMAEDAAENLLFSKTTTAKVWLIGDGLDASEQFKAQKGTQFIPYSQFPPRMARKDTCTYSTTPAMVVPKTLQNVHSCENWLPRRVMSAWRIAGMVHALEGWNEHECGDIVLDMEKMWSGALLHGFRPVAQV

SEQ ID NO: 37488 - protein, 336 aa, Zea mays
  Clone ID: LIB3078-032-F3_FLI.pep
SGSLKGFPSDCKAASKLNLVCRKNLVIDKSIHTAYVRAIRSAQHFIYIENQYFLGSSYAWPSYVNSGADNLVPIELALKIASKIKAGERFAVYVVIPMWPEGVPTAASVQEILFFQAQTMEMMYKIIADELKATDNKDMHPEDYLNFFCLGNREEPPSNGSPESEKSTDKSAAALASKYRRFMIYVHAKGMIVDDEYVILGSANINQRSLAGSRDTEIAMGAYQPHYAWSTKNGHPHGQVYGYRTSLWAEHLGTVDDRFKDPSSLECVRFVNQIAVENWQRFTAEEMSTLQGHLLKYPVKVEADGKISPLSDQECFPDVGGKILGAPTSLPDSLTM

SEQ ID NO: 37489 - protein, 351 aa, Zea mays
  Clone ID: LIB3332-019-D12_FLI.pep
NLRRERPRESAMVLLLLGCSPASSRPDCSPASRRRCSTAGQKMVRCSLNEETQLNKHGLVSKQLISCLAASLVFVSPPSQAIPAETFARPGLCQIATVAAIDSASVPLKFDNPSDDVSTGMMMRGMTAKNFDPVRYSGRWFEVASLKRGFAGQGQEDCHCTQGVYSFDEKARSIQVDTFCVHGGPDGYITGIRGRVQCLSEEDIASAETDLERQEMVRGKCFLRFPTLPFIPKEPYDVLATDYDNYAIVSGAKDTSFIQIYSRTPNPGPEFIDKYKSYVANFGYDPSKIKDTPQDCEYMSSDQIALMMSMPGMNEALTNQFPDLKLKAPVALNPFTSVFDTLKKLLELYFK

SEQ ID NO: 37490 - protein, 155 aa, Zea mays
  Clone ID: LIB3078-051-G4_FLI.pep
ARCGRTYRGRGRRTTARVAGTFGITLSSTDRSPTPCFRLYGRAGGSIVLQSSFCGHPCSNILMLRVANDCIITNHNNLCDHLGIFIHAQAWPIVYLPKLIFALPYLRQLIPSFNPSLVCMIRTISGSFDLFFLAFAFFGSSGAFVGSSPSMINAP

SEQ ID NO: 37491 - protein, 398 aa, Homo sapiens
  Clone ID: LIB3101-194-B6_FLI.pep
GWSWAGIPSSAAAQRAGPPAGALEALSPGGARAHAERRGEMRATPLAAPAGSLSRKKRLELDDNLDTERPVQKRARSGPQPRLPPCLLPLSPPTAPDRATAVATASRLGPYVLLEPEEGGRAYRALHCPTGTEYTCKVYPVQEALAVLEPYARLPPHKHVARPTEVLAGTQLLYAFFTRTHGDMHSLVRSRHRIPEPEAAVLFRQMATALAHCHQHGLVLRDLKLCRFVFADRERKKLVLENLEDSCVLTGPDDSLWDKHACPAYVGPEILSSRASYSGKAADVWSLGVALFTMLAGHYPFQDSEPVLLFGKIRRGAYALPAGLSAPARCLVRCLLRREPAERLTATGILLHPWLRQDPMPLAPTRSHLWEAAQVVPDGLGLDEAREEEGDREVVLYG

SEQ ID NO: 37492 - protein, 354 aa, Zea mays
  Clone ID: LIB3117-008-D8_FLI.pep
GNRTGRAAAGGRRTSATRTATTYLRQPTMRRRAKTRNPLKTTTTPATQQRRTNQRGIRKQASRTNGKDQCLPSFTYTSSPCSTEWIRTDARRTAIGLDLDLESLEWCLENNLSKIGADGYSRMLLFHGNVLQPMESRLVKQKFTNLVHGLDLNSNNGTGSNSCKQMGLADSKCLANLTMSEADFPARDIICAFNYSCCCLHSRKDLVLYFRHVCSVLSERGGIFVMDVYGGISSERKLRLQRKFPSFTYFWEQDEFDIISRQTRISLHFQGGKKQMLRYAFTYHWRLWSIPEIKDCLEEAGFKWVHVWMREMPNTQSGGNAKEYNANRDVKYEESQHFNQGDAWNAYVVGVANV

SEQ ID NO: 37493 - protein, 179 aa, Zea mays
  Clone ID: LIB3136-020-B5_FLI.pep
PSMENASTIYTCTILDAQRTPKKSCGPVKSRADDQLAGVLWTCHGQLSSTVMDPARPMLRVAPELLSRFQVNHDDGDVVLGTLLQRDPHEIIRCGLGSGVGGGSITLVAQRPRCASGTVVLVPHLDLPARSSARLFVRHHIPQPIACEDETVVIFRPGNHRDLWFWNHERLQIPVPNRS

SEQ ID NO: 37494 - protein, 207 aa, Zea mays
  Clone ID: LIB3151-038-C9_FLI.pep
PAAILQHIVSSVGDTAGSSVGAWSRLLQAAHRRQLLRYLRRQQPRDLAALRLLLQDGLEDQAEDRLVPVLRLHLPELLATLLPQRLALRRAVGRRRRAALMPQKLDALAQDRGAANAAGSLQLARAWMRLLARAWVWLGMRLRPGRLSRVVAWWRRQMNRRRSSPPAAAAAGPPPWLSLSLSCPRPPNAQNSLLELQDQVVRSLVLQ

SEQ ID NO: 37495 - protein, 99 aa, Zea mays
  Clone ID: LIB3156-021-F6_FLI.pep
PIGQKCTNLLIIPSECSARSACRPSSAPPPRPSAKNMRRRGIPRTTSTSASPTSRTSKQQKHMLCSAKRQVLHIYIYAVCQLMGSRLLLMRLLRSCCPV

SEQ ID NO: 37496 - protein, 640 aa, Zea mays
  Clone ID: LIB3180-001-C9_FLI.pep
RTLQFVSPALSLKSTRPPPPRRFASFPPPQERSEATLRRLRFSPHHPKLSPTTASPPAPPSAVMYRAAASLASKARQAGNSLAARQVGSRLAWSRNYAAKDIKFGVEARALMLRGVEELADAVKVTMGPKGRNVVIEQSFGAPKVTKDGVTVAKSIEFKDRVKNVGASLVKQVANATNDTAGDGTTCATVLTKAIFTEGCKSVAAGMNAMDLRRGISMAVDAVVTNLKGMARMISTSEEIAQVGTISANGEREIGELIAKAMEKVGKEGVITIADGNTLYNELEVVEGMKLDRGYISPYFITNSKTQKCELEDPLILIHDKKVTNMHAVVKVLEMALKKQKPLLIVAEDVESEALGTLIINKLRAGIKVCAVKAPGFGENRKANLQDLAILTGGEVITEELGMNLENFEPHMLGTCKKVTVSKDDTVILDGAGDKKSIEERAEQIRSAIENSTSDYDKEKLQERLAKLSGGVAVLKIGGASEAEVGEKKDRVTDALNATKAAVEEGIVPGGGVALLYASKELDKLQTANFDQKIGVQIIQNALKTPVHTIASNAGVEGAVVVGKLLEQENTDLGYDAAKGEYVDMVKTGIIDPLKVIRTALVDAASVSSLMTTTESIIVEIPKEEAPAPAMGGGMGGMDY

SEQ ID NO: 37497 - protein, 244 aa, Zea mays; identical to SEQ ID NO: 36900
  Clone ID: LIB3180-010-D4_FLI.pep

SEQ ID NO: 37498 - protein, 244 aa, Zea mays; identical to SEQ ID NO: 36891
  Clone ID: LIB3180-041-C11_FLI.pep

SEQ ID NO: 37499 - protein, 471 aa, Glycine max
  Clone ID: LIB3242-355-A3_FLI.pep
DNEDPSTQKKPRVVWSVELHRKFVSAVNLLGIDKAVPKKILDLMNDEKLTRENVASHLQKYRLYLKRISCGANRQANMVAALGTADSSYLRMGSLSGVGHLQTLTGPQQFHNNAFRPFPPGGMIGRLNTSVGLNNHGLSSSEALQLSHAQNLNNSINDPLKFQSSIACGNQNAIQGMPMSIGLDQLQHNKGVSVSVGPIQNMSPLIDARPTFAVSNRLSDQIPKVTMGCSPSPVLDVSNNALVLKADSENTQGRGVYENLTSVASQHSQFSLPLLGHGRCSDIWSSPMRSSGTNSYPPSETLQGGNLSGASSITSLSNQSHDSQTDMHSQGLIFTNNSGQISNNVPFLGWDDHNHDSSYHSNVIGNSIDSLIDPEGHTSINSTYNRNLDFNFCDPLQMKHDGIMGLSDENSLKQQHRYIMNQQKSQNSRAPNNIGSLEDFVSSMMKQKQDKVKFLDGSYLCNNNYPDGTSM

SEQ ID NO: 37500 - protein, 618 aa, Glycine max
  Clone ID: LIB3242-387-G8_FLI.pep
LPAGTPQWDFFGLFHPIDHQFSFQDGKGMHQDIGNADDIQRLREEEGIPELEDDEEKASSHGREHSRDSEDEFDEEPAAETLVQRFENLNRSNSHVQANFEPATTKPLRGHSASEVELVNGEKGNSAYLSPLKTAPMPALPPPETNKPMEKESRNENKVTPKNFFSSVRDIELLFIKASESGQEVPKMLEANKVHFRPIFQGKENGSLVSSFLKVCFSCGEDPSQVPEEPAQNSVKYLTWHRTVSSRSSSSRNPLGANSIDNAEDHANNLFDNSCMISGSHASTLDRLYAWERKLYDEVKASEIVRKEYDMKCKFLRQLESKGEKTSTVDKTRAKVKDLHSRIIVSIHRINSISKRVAELRDKELQPQLEELIEGLNRMWEVMHECHKLQFQIMSAAYNNSHARITMHSELRRQITSYLENELQFLSSSFTKWIGAQKFYLEAINGWLLKCVRHEEKSSKRKRRSQFDLSYYDPPIYVTCAVWLDKLSALPVKDVADSIKSLATDTAQFLPHQDKNQGKGAHPHMSTWKADIGGESADGLLRDDISEDWVAGLDQFRRSLIRFLSQLNNLSGCSVKMYTELRQAIREVKNYQRLNSQSQNGHLNSQSQDGHPNSESQS

SEQ ID NO: 37501 - protein, 160 aa, Glycine max
  Clone ID: LIB3242-392-A1_FLI.pep
KERSMIKIESCAKGDLNIVSSLEDTSTNNNMSKCRALVAVPAINMEALAVVPFWRKSGNPDFAQRRIRRPFSVLEVEALVQAVEKLGTGRWRDVKQRAFDHAKHRTYVDLKDKWKTLVHTARISPQQRRGEPVPQELLDRVLAAHAYWSQHQCKHQLKPL

SEQ ID NO: 37502 - protein, 548 aa, Glycine max
  Clone ID: LIB3242-396-D4_FLI.pep
MQTSKKHPTSAGIHLYLQPAQDIDPYTHYQILQSNSCHDNSSSQGTTISFETSKEQYFTLESSPAINDLIGCDSPSYASVSSNRSPFSPQASHSDQHQSSDNTYGSPTSAHSRYDDDGYELKNKLRELEISLLGPDSDIVDSWHCSYKGGRHRASSPTAKHNWDQIVEMIPKLDLKEVLIRCAQAVADDDIETAVGFMNNVLAKMVSVGGDPIQRLGAYMLEGLRARLESSGSIIYKALKCEQPTSNDLMTYMHILYQICPYWKFAYTSANAVIGEAMLNESRIHIIDFQVAQGTQWLLLIQALASRPGGAPFIRVTGVDDSQSFHARGGGLHIVGKRLSDYAKSCGVPFEFHSAAMCGSELELENLVIQPGEALVVNFPFVLHHMPDESVSTENHRDRLLRLVKSLSPKVVTLVEQESNTNTSPFFQRFVETLSYYTAMFESIDVALPRDDKQRINAEQHCVARDIVNMVACEGDERLERHELLGKWRSRFSMAGFAPCPLSSSVTAAVRNMLNEFNENYRLQHRDGALYLGWKSRAMCTSSAWRCY

SEQ ID NO: 37503 - protein, 314 aa, Glycine max
  Clone ID: LIB3242-432-H12_FLI.pep
RGRDIGGSVYSFIKMASELQLPPGFRFHPTDQELVLHYLCRKCASQPIAVPIIAEIDLYKYDPWDLPGLASYGEKEWYFFSPRDRKYPNGSRPNRAAGTGYWKATGADKPIGHPKPVGIKKALVFYAGKAPKGDKSNWIMHEYRLADVDRSVRKKNSLRLDDWVLCRIYNKKGTIEKFQPSSDVVVSRKMESSEIEDRKPEILKSGGGCLLPPVPPPQAKAAVKTDYMYFDPSDSIPKLHTDSSCSEHVVSPEFASEVQSEPKWKEWEKSLEFPFNYVDATLNNSNSFTTQFQGNNQMMSPLQDMFMYWPNKPF

SEQ ID NO: 37504 - protein, 355 aa, Glycine max
  Clone ID: LIB3242-512-E11_FLI.pep
LSLLHPSIFSFSSSHGVIAPTMAVDLMTTGCSRNDNINSFTTKAEENAVQEAASGLESIEKLIRLLSQTQTQTRHQINNNSSNEIAIAMDCKVVADVAVSKFKKVISLLGRTRTGHARFRRAPLPNQNQHTQPPSEPPVFHATPLHQIPPPSLHQIPKTERNLNDSSSSKTIHFSYPSAATSFISSLTGDGAADNKQPSSSPPAAAATTTPFQITSLSHVSSAGKPPLSTSSFKRKCSSENLGSGKCGSSSSRCHCSKKSRKMRLKRVVRVPAISLKMADIPPDDYSWRKYGQKPIKGSPHPRGYYKCSSVRGCPARKHVERALDDPAMLVVTYEGEHNHTLSAADATNLILESS

SEQ ID NO: 37505 - protein, 350 aa, Zea mays
  Clone ID: LIB3245-129-E9_FLI.pep
HRTGHTEPSHPTHHRRPAASRGSELFKDTERSRTEDWQAQPKPPLLVLGFIASNPDHIMGLPVTRRRERDAEAELDLPPGFRFHPTDDELVEHYLCRKAAGQRLPVPIIAEVDLYRFDPWDLPERALFGAREWYFFTPRDRKYPNGSRPNRAAGDGYWKATGADKPVAPRGARTLGIKKALVFYAGKAPRGVKTDWIMHEYRLADAGRRAKKGSLRLDDWVLCRLYNKKNEWEKMRLGKEGAAKEEAMDMSTSHSWGETRTPESEIVDNDPPFPDPPAPAMMVPKKERVDAGGSARSSDLFVDLSYDDIQGMYSGLDMLPPPGEDFYSSLFASPRVRGNQPTGAAGLGPF

SEQ ID NO: 37506 - protein, 484 aa, Zea mays
  Clone ID: LIB3245-467-G6_FLI.pep
RQRGKMARRRPMDYEELNEKVKKAQYAVRGELYLRASELQKEGKKIIFTNVGNPHALGQKPLTFPRQVVALCQAPFLLDDPNVGLMFPPDAIVRAKRYLAMAPGGLGAYSDARGIPGIRKEVADFIHKRDGYPSDPELIYLTDGASKGVMQMLNAIIRNERDGILVPVPQYPLYSAIISLFGGSLVPYYLEEEANWNLDFANIRQAVAEARSKGITVRATVIINPGNPTGQCLSEANIRELVRYCYHENLVLLADEVYQQNVYQDERPFISARKVMFDMGPPISREVQLVSFHTVSKGYWGECGQRGGYFEMTNLPPKTVDEIYKVASIVLSPNVPGQIFMGVMVNPPKPGDISYPKFTAESKSILESLRRRARMMTDGFNSCRNVVCNFTEGAMYSFPQIQLPARAIEAAKRAGKAADVFYCLKLLEATGISTVPGSGFGQKEGVFHLRTTILPAEEDFPTIMSSFKKFNDSFMEQYEGYSRM

SEQ ID NO: 37507 - protein, 371 aa, Zea mays
  Clone ID: LIB3245-467-G9_FLI.pep
ARNRPRGFTSSFHFNYGPTAVRVNPVARRLRSLAWLLQFLGEVHVVDEDQFPAIRVQDGCDLGVDPWQGPRLPHHLASGQLRRLRGPVDIVGANGDLGICIPLGILGDTIVVGQLQHRVLVFRAETHHCHCVLVLRAISLPEQFHAAGLFIEAYGTVKVADAEHHLAQGFRSSRPLDDLKLVAVGVLHEGDDGLAALHRTGFPDDLSSLCSYELYRLGHVLDCDAEMAEPFAYVIFVNPVIVSELDDEMRFLGPVPEERVAVLLLWNVPLPEQLHPQALGVELDRLVEVADPVDDVEEAAVVFLRPRDGLVGQGPGLCHGAGLAPGQPQRPRSSHLLRLQRRTCGSGGEEQRPPGDGRGRAGDGPAAGGHR

SEQ ID NO: 37508 - protein, 111 aa, Zea mays
  Clone ID: LIB3245-471-G1_FLI.pep
LARRHGHLARGHGLLAVGRVDVALKIGVARVRAQARLLLLEPTAARRAGRPPDDDGAGARRQLRGVARRRRVGAPRRGGAQQQQDHRPGGERRQQHLRRLRHWLLLARCCL

SEQ ID NO: 37509 - protein, 214 aa, Zea mays
  Clone ID: LIB3245-475-C3_FLI.pep
ARHKEELQEAAEHRDLLEKDLEREKAARAEIEKTSSREAPKAPLPDQTRNAPLRKLSSSGSINSLEESHFLQASLDLSDNASLERRMSSESNMSYYLKTMTPSAFESALRQKDGELASYMSRLASLESIRNSLAEELVKLTEQCEKLRTEATAVPGLRAELEALKQRHFQALELMGERDEELEELRNDIVDLKEMYREQVDLLVSQLQSLGARV

SEQ ID NO: 37510 - protein, 262 aa, Zea mays
  Clone ID: LIB3245-495-A6_FLI.pep
RVIMFSVYAFASLYKSKDTEFVQGHRMLKEKSASAMSMLTAVDEAGLILSGSSLCRRCWSATGYMSPSSRPGDAGALCGSSDLPLYLWSKCTGELPRLGDVARLARRGVGARQHVEEACRLPLPHLILGRLAPLHDRLGRLLLEDGLLHVRPHLRDERVEREGDVAAEELESQAHRNFHDAQAQPLVVAFLQVWGEQCPNEMRHLEGVLEEREVDEEEDPARAVKPEEPVTWLHHRRPLDDRRLVLYLLGHLHDDNLQLGPN

SEQ ID NO: 37511 - protein, 174 aa, Zea mays
  Clone ID: LIB3245-498-A8_FLI.pep
VTMTVLLAKAAAMALAQHPVVNASCRDGKSFTYNSNINIAVAVAIDGGLITPVLQDADKLDIYLLSQNWKDLVKKARAKQLQPNEYSSGTFTLSNLGMFGVDRFDAILPPGQGAIMAVGASKPTVVADKDGFFSVKSKMLVNVTADHRIVYGADLAAFLQTFAKVIEDPESLTL

SEQ ID NO: 37512 - protein, 255 aa, Zea mays
  Clone ID: LIB3245-499-E2_FLI.pep
LAEVAVLEEEVVRLEEQVVNFRQGLYREAVITTSMAAKSAYFPDGYRSTPARHKPSAKPQSSELSTSTRQGSDQDAADWPPSLRRSTNAMRTPRRPGLSLSQGDCPGKENQSFGSGTNSCREFGLAPLSNVPGCRVQVGAETRAGFQTTSAVEDHKAVEGSNGTGQGKASTAANEVSEELLACLLGIFSQKSASSGQDEEQLSPPSVSGSCGSSSADPYGVPEFGWRDIGRYKQFQSVDTNISAGDDSALDQRLK

SEQ ID NO: 37513 - protein, 343 aa, Zea mays
  Clone ID: LIB3245-517-E11_FLI.pep
VKAHTVRLHCIALPKTDQSTNQPQPRMLRHPHLPSGHDGRCRLERLAPVHEDVLQQRVAAGVADDGVEHGARGVHGVGGEGPLPLADLGLALHLPVARQLLRGQHLLRAAGVVRVQPRHRVRRPVVVRRQLRERRGQPARRRHERLLLRRGAHRRRGEHRLVVAAGRRRRRLLQPAALLVVDAAQDPVIQPEAVLLARRAVDVGEAVLVHDPVGLLALGRLAGVEDERLLDGQRLGRAHGLVSAGGLPVPSPGGAVGPGPVRVLAVPRGEEVPLLLAVQRHPWELPWVELVEVDLGDDGDGDGQAGAAAAEVVHHQLLVRRVEPEPRWQLQIRTGAAHRVPPC

SEQ ID NO: 37514 - protein, 318 aa, Zea mays
  Clone ID: LIB3245-520-F12_FLI.pep
HGHRAARAAATAPALPGGGAGPDGVHLGRAVQAHPGGGVQAQGVEAARARRPGRPQPGGQGRVPVAQVRAEGYQGQPLPAGLLPLLLRPGLPSQEEGAAQRRRPHHPGRHVRGRPQPRPAPATGAGAARRLQPWRQQEAAVAAEAGRRRSGAAPPPAGPAAPAAAGGWRGEMRAARGRGGVGAHPAEPRGADGHDADAGPQLQGGVRHRAVRPALRDVADQGLTERIGWIGRLASQEILDQIVFERTPQWSTAQRWLGCQSETAVTEQDTRGLHSAVVQEEEQTQGEDGARPDMAWNRDRRHRRRGCGRRRDMRNTTC

SEQ ID NO: 37515 - protein, 168 aa, Zea mays
  Clone ID: LIB3245-537-A11_FLI.pep
LFQQSPALSLVQSLVQTIRAQQLQQLVLPVINQVALANLSPYSQQQQFLPFNQLSTLNRAAYLQQQLLPFSQLATAYSQQQQLLPFNQLAALNPAAYLQQQILLPFSQLAAASRASFLTQQQLLPFYQQFAANPATLLQLQQLLPFVQLALTNPAASYQQHIIGGALF

SEQ ID NO: 37516 - protein, 185 aa, Zea mays
  Clone ID: LIB3279-005-B8_FLI.pep
GRATFPSFAEAARRKPQTQPHLFSRPLPPPRSVGRSAMTPGSSAAGSGVVVPRNFRLLEELERGEKGIGDGTVSYGMDDADDIYMRSWTGTIIGPHNTVHEGRIYQLKLFCDKDYPEKPPSVRFHSRINLTCVNHETGVVDPKKFSVLGNWQRDYSMEYILTHLKKEMTSPQNRKLVQPPEGTFF

SEQ ID NO: 37517 - protein, 128 aa, Zea mays
  Clone ID: LIB3357-049-E8_FLI.pep
ICFFLFKIQSASRGKLEFVCSYLAELSLLDYDCISYLPSVVAAACLFVARFIIHPKTRPWNLSLEQSTGYRVFDLQKSIYVIHELQLTIRCPNQVAIREKYKDPKFGCVSTMVSPREIPTSFLEGCHK

SEQ ID NO: 37518 - protein, 653 aa, Homo sapiens
  Clone ID: LIB3547-006-G1_FLI.pep
TSSLLFGAMLKFQEAAKCVSGSTAISTYPKTLIARRYVLQQKLGSGSFGTVYLVSDKKAKRGEELKVLKEISVGELNPNETVQANLEAQLLSKLDHPAIVKFHASFVEQDNFCIITEYCEGRDLDDKIQEYKQAGKIFPENQIIEWFIQLLLGVDYMHERRILHRDLKSKNVFLKNNLLKIGDFGVSRLLMGSCDLATTLTGTPHYMSPEALKHQGYDTKSDIWSLACILYEMCCMNHAFAGSNFLSIVLKIVEGDTPSLPERYPKELNAIMESMLNKNPSLRPSAIEILKIPYLDEQLQNLMCRYSEMTLEDKNLDCQKEAAHIINAMQKRIHLQTLRALSEVQKMTPRERMRLRKLQAADEKARKLKKIVEEKYEENSKRMQELRSRNFQQLSVDVLHEKTHLKGMEEKEEQPEGRLSCSPQDEDEERWQGREEESDEPTLENLPESQPIPSMDLHELESIVEDATSDLGYHEIPEDPLVAEEYYADAFDSYCEESDEEEEEIALERPEKEIRNEGSQPAYRTNQQDSDIEALARCLENVLGCTSLDTKTITTMAEDMSPGPPIFNSVMARTKMKRMRESAMQKLGTEVFEEVYNYLKRARHQNASEAEIRECLEKVVPQASDCFEVDQLLYFEEQLLITMGKEPTLQNHL

SEQ ID NO: 37519 - protein, 552 aa, Zea mays
  Clone ID: LIB3357-018-F2_FLI.pep
GHRLDSGWGARDHRRRRPPLAPPTTPRREQAAMGEDLVTTLSMENGGGGGGGHHGPCTLLSMDPSGHLSAPDDRAVGVMVQTLIGGGVGAGARAHAVSPSGAPPPDINQPWQTDLCDMLDVGLGPQVYSAEAVLSCAPKAGSRKAAKRGDSIWGAWFFFTFYFKPLLSDKCKDKVVRDNSGGVSGFDKSDLRLDMFLVQHDMENMYMWVFKERPENALGKMQLRSYMNGHSRPGEPQFPFSVDRGFVRSHRMQRKHYRGLSNPQCIHGIEVVRSPNLVGLTEADLRRWADLTGRELNFIIPQEASDFGTWRTIPNSELELEKPHPVMKSNGTQNPKKTGLNLSSPSNHSGEDGMDLSPVSSKRRKELSPQAMDEEVFFPLNSCPQKTQQDVEMHSPTQPAAWLHEFTGVMRNACGPVTAAKSIYEDDQGYLIMVSLPFVDQQRVKVSWRNTLTHGIVKIVCVSTARMQHIRRHGRMFALADPSPEHCPPGDFIREIPLATRIPEDAKLEACFDEAASVLEIMVPKRGNEPEEHEVRVSLRPPHYGANDLLLT

SEQ ID NO: 37520 - protein, 182 aa, Zea mays
  Clone ID: LIB3593-002-F8_FLI.pep
FPHQFISSVIGSPWVILNRQFIEYCILAWENLPRILLMYFNNVIQPQEGYFQTVICNSLDFRNFTVNNDLRFMVQDDSAQKKSLFTSREHYGHMVDSGAPFARPFQENDPLLDQIDGNILKRWSHGPVPGAWCTGRKRWFSDPCSQWGDVNVLRPGPQAVMLHQYVNRTLEEAKSSSNSCRR

SEQ ID NO: 37521 - protein, 369 aa, Homo sapiens
  Clone ID: LIB3547-022-F6_FLI.pep
GSFKFVLSWELALFGWSRALRRRMALDVKSRAKRYEKLDFLGEGQFATVYKARDKNTNQIVAIKKIKLGHRSEAKDGINRTALREIKLLQELSHPNIIGLLDAFGHKSNISLVFDFMETDLEVIIKDNSLVLTPSHIKAYMLMTLQGLEYLHQHWILHRDLKPNNLLLDENGVLKLADFGLAKSFGSPNRAYTHQVVTRWYRAPELLFGARMYGVGVDMWAVGCILAELLLRVPFLPGDSDLDQLTRIFETLGTPTEEQWPDMCSLPDYVTFKSFPGIPLHHIFSAAGDDLLDLIQGLFLFNPCARITATQALKMKYFSNRPGPTPGCQLPRPNCPVETLKEQSNPALAIKRKRTEALEQGGLPKKLIF

SEQ ID NO: 37522 - protein, 361 aa, Homo sapiens
  Clone ID: LIB4014-016-G2_FLI.pep
PPQPREATQLPGGPGTSCLPSTQSGADLPWSFSGATSKVRALVRLACRMAGQPGHMPHGGSSNNLCHTLGPVHPPDPQRHPNTLSFRCSLADFQIEKKIGRGQFSEVYKATCLLDRKTVALKKVQIFEMMDAKARQDCVKEIGLLKQLNHPNIIKYLDSFIEDNELNIVLELADAGDLSQMIKYFKKQKRLIPERTVWKYFVQLCSAVEHMHSRRVMHRDIKPANVFITATGVVKLGDLGLGRFFSSETTAAHSLVGTPYYMSPERIHENGYNFKSDIWSLGCLLYEMAALQSPFYGDKMNLFSLCQKIEQCDYPPLPGEHYSEKLRELVSMCICPDPHQRPDIGYVHQVAKQMHIWMSST

SEQ ID NO: 37523 - protein, 131 aa, Homo sapiens
  Clone ID: LIB4014-055-D3_FLI.pep
GHSHCVAEASRSPGGGAEMPLHQLGDKPLTFPSPNSAMENGLDHTPPSRRASPGTPLSPGSLRSAAHSPLDTSKQPLCQLWAEKHGARGTHEVRYVSAGQSVACGWWAFAPPCLQVLNTPKGILFFLCAAA

SEQ ID NO: 37524 - protein, 103 aa, Homo sapiens
  Clone ID: LIB4118-021-A9_FLI.pep
QLALCCWKSCRHSMPACESSWVRAESYKAIGAELPKTMGTHLLHQCDVAVRPGVKGDHFGALKFDCLTELQTCMGPITPLFWPISLSEWLYLPNTCTSIVSRK

SEQ ID NO: 37525 - protein, 629 aa, Homo sapiens
  Clone ID: LIB4119-067-D3_FLI.pep
PRLNSGRSGAVRRLCSDRGLQRSFGSMSAAVTAGKLARAPADPGKAGVPGVAAPGAPAAAPPAKEIPEVLVDPRSRRRYVRGRFLGKGGFAKCFEISDADTKEVFAGKIVPKSLLLKPHQREKMSMEISIHRSLAHQHVVGFHGFFEDNDFVFVVLELCRRRSLLELHKRRKALTEPEARYYLRQIVLGCQYLHRNRVIHRDLKLGNLFLNEDLEVKIGDFGLATKVEYDGERKKTLCGTPNYIAPEVLSKKGHSFEVDVWSIGCIMYTLLVGKPPFETSCLKETYLRIKKNEYSIPKHINPVAASLIQKMLQTDPTARPTINELLNDEFFTSGYIPARLPITCLTIPPRFSIAPSSLDPSNRKPLTVLNKGLENPLPERPREKEEPVVRETGEVVDCHLSDMLQQLHSVNASKPSERGLVRQEEAEDPACIPIFWVSKWVDYSDKYGLGYQLCDNSVGVLFNDSTRLILYNDGDSLQYIERDGTESYLTVSSHPNSLMKKITLLKYFRNYMSEHLLKAGANITPREGDELARLPYLRTWFRTRSAIILHLSNGSVQINFFQDHTKLILCPLMAAVTYIDEKRDFRTYRLSLLEEYGCCKELASRLRYARTMVDKLLSSRSASNRLKAS

SEQ ID NO: 37526 - protein, 379 aa, Homo sapiens
  Clone ID: LIB4119-086-E11_FLI.pep
RAASEALGIPGTMDDAAVLKRRGYLLGINLGEGSYAKVKSAYSERLKFNVAIKIIDRKKAPADFLEKFLPREIEILAMLNHCSIIKTYEIFETSHGKVYIVMELAVQGDLLELIKTRGALHEDEARKKFHQLSLAIKYCHDLDVVHRDLKCDNLLLDKDFNIKLSDFSFSKRCLRDDSGRMALSKTFCGSPAYAAPEVLQGIPYQPKVYDIWSLGVILYIMVCGSMPYDDSNIKKMLRIQKEHRVNFPRSKHLTGECKDLIYHMLQPDVNRRLHIDEILSHCWMQPKARGSPSVAINKEGESSRGTEPLWTPEPGSDKKSATKLEPEGEAQPQAQPETKPEGTAMQMSRQSEILGFPSKPSTMETEEGPPQQPPETRAQ

SEQ ID NO: 37527 - protein, 577 aa, Homo sapiens
  Clone ID: LIB4119-094-D5_FLI.pep
NFASTIHQKMKWKEKLGDGVYDTFMMIDETKCPPCSNVLCNPSEPPPPRRLNMTTEQFTGDHTQHFLDGGEMKVEQLFQEFGNRKSNTIQSDGISDSEKCSPTVSQGKSSDCLNTVKSNSSSKAPKVVPLTPEQALKQYKHHLTAYEKLEIINYPEIYFVGPNAKKRHGVIGGPNNGGYDDADGAYIHVPRDHLAYRYEVLKIIGKGSFGQVARVYDHKLRQYVALKMVRNEKRFHRQAAEEIRILEHLKKQDKTGSMNVIHMLESFTFRNHVCMAFELLSIDLYELIKKNKFQGFSVQLVRKFAQSILQSLDALHKNKIIHCDLKPENILLKHHGRSSTKVIDFGSSCFEYQKLYTYIQSRFYRAPEIILGSRYSTPIDIWSFGCILAELLTGQPLFPGEDEGDQLACMMELLGMPPPKLLEQSKRAKYFINSKGIPRYCSVTTQADGRVVLVGGRSRRGKKRGPPGSKDWGTALKGCDDYLFIEFLKRCLHWDPSARLTPAQALRHPWISKSVPRPLTTIDKVSGKRVVNPASAFQGLGSKLPPVVGIANKLKANLMSETNGSIPLCSVLPKLIS

SEQ ID NO: 37528 - protein, 928 aa, Homo sapiens
  Clone ID: LIB4119-112-B4_FLI.pep
IDKKAMYKAGMVQRVQNEVKIHCQLKHPSILELYNYFEDSNYVYLVLEMCHNGEMNRYLKNRVKPFSENEARHFMHQIITGMLYLHSHGILHRDLTLSNLLLTRNMNIKIADFGLATQLKMPHEKHYTLCGTPNYISPEIATRSAHGLESDVWSLGCMFYTLLIGRPPFDTDTVKNTLNKVVLADYEMPSFLSIEAKDLIHQLLRRNPADRLSLSSVLDHPFMSRNSSTKSKDLGTVEDSIDSGHATISTAITASSSTSISGSLFDKRRLLIGQPLPNKMTVFPKNKSSTDFSSSGDGNSFYTQWGNQETSNSGRGRVIQDAEERPHSRYLRRAYSSDRSGTSNSQSQAKTYTMERCHSAEMLSVSKRSGGGENEERYSPTDNNANIFNFFKEKTSSSSGSFERPDNNQALSNHLCPGKTPFPFADPTPQTETVQQWFGNLQINAHLRKTTEYDSISPNRDFQGHPDLQKDTSKNAWTDTKVKKNSDASDNAHSVKQQNTMKYMTALHSKPEIIQQECVFGSDPLSEQSKTRGMEPPWGYQNRTLRSITSPLVAHRLKPIRQKTKKAVVSILDSEEVCVELVKEYASQEYVKEVLQISSDGNTITIYYPNGGRGFPLADRPPSPTDNISRYSFDNLPEKYWRKYQYASRFVQLVRSKSPKITYFTRYAKCILMENSPGADFEVWFYDGVKIHKTEDFIQVIEKTGKSYTLKSESEVNSLKEEIKMYMDHANEGHRICLALESIISEEERKTRSAPFFPIIIGRKPGSTSSPKALSPPPSVDSNYPTRERASFNRMVMHSAASPTQAPILNPSMVTNEGLGLTTTASGTDISSNSLKDCLPKSAQLLKSVFVKNVGWATQLTSGAVWVQFNDGSQLVVQAGVSSISYTSPNGQTTRYGENEKLPDYIKQKLQCLSSILLMFSNPTPNFH

SEQ ID NO: 37529 - protein, 804 aa, Homo sapiens
  Clone ID: LIB4119-126-D10_FLI.pep
SWRVPAMAASLPGPGSRLFRTYGAADGRRQRRPGREAAQWFPPQDRRRFFNSSGSSDASIGDPSQSDDPDDPDDPDFPGSPVRRRRRCPGGRVPKDRPSLTVTPKRWKLRARPSLTVTPRRLGLRARPPQKCSTPCGPLRLPPFPSRDSGRLSPDLSVCGQPRDGDELGISASLFSSLASPCPGSPTPRDSVISIGTSACLVAASAVPSDLHLPEVSLDRASLPCSQEEATGGAKDTRMVHQTRASLRSVLFGLMNSGTPEDSEFRADGKNMRESCCKRKLVVGNGPEGPGLSSTGKRRATGQDSCQERGLQEAVRREHQEASVPKGRIVPRGTDRLERTRSSRKSKHQEATETSLLHSHRFKKGQKLGKDSFPTQDLTPLQNACFWTKTRASFSFHKKKIVTDVSEVCSIYTTATSLSGSLLSECSNRPVMNRTSGAPSSWHSSSMYLLSPLNTLSISNKKASDAEKVYGECSQKGPVPFSHCLPTEKLQRCEKIGEGVFGEVFQTIADHTPVAIKIIAIEGPDLVNGSHQKTFEEILPEIIISKELSLLSGEVCNRTEGFIGLNSVHCVQGSYPPLLLKAWDHYNSTKGSANDRPDFFKDDQLFIVLEFEFGGIDLEQMRTKLSSLATAKSILHQLTASLAVAEASLRFEHRDLHWGNVLLKKTSLKKLHYTLNGKSSTIPSCGLQVSIIDYTLSRLERDGIVVFCDVSMDEDLFTGDGDYQFDIYRLMKKENNNRWGEYHPYSNVLWLHYLTDKMLKQMTFKTKCNTPAMKQIKRKIQEFHRTMLNFSSATDLLCQHSLFK

SEQ ID NO: 37530 - protein, 390 aa, Homo sapiens
  Clone ID: LIB4119-136-D3_FLI.pep
PVESYGPVTYIVQCSLEGGSWTTLASDIFDCCYLTSKLSRGGTYTFRTACVSKAGMGPYSSPSEQVLLGGPSHLASEEESQGRSAQPLPSTKTFAFQTQIQRGRFSVVRQCWEKASGRALAAKIIPYHPKDKTAVLREYEALKGLRHPHLAQLHAAYLSPRHLVLILELCSGPELLPCLAERASYSESEVKDYLWQMLSATQYLHNQHILHLDLRSENMIITEYNLLKVVDLGNAQSLSQEKVLPSDKFKDYLETMAPELLEGQGAVPQTDIWAIGVTAFIMLSAEYPVSSEGARDLQRGLRKGLVRLSRCYAGLSGGAVAFLRSTLCAQPWGRPCASSCLQCPWLTEEGPACSRPAPVTFPTARLRVFVRNREKRRALLYKRHNLAQVR

SEQ ID NO: 37531 - protein, 488 aa, Homo sapiens
  Clone ID: LIB4119-205-A2_FLI.pep
KCFLNRSPKNLPHLIYRKVYCAAPLPSLSCSCSGHIKRAGSSFAFCYHWKLPDASQEANAIMVPVQPAEPPEVLKSEPYGEKADVWAVGCILYQMATLSPPFYSTNMLSLATKIVEAVYEPVPEGIYSEKVTDTISRCLTPDAEARPDIVEVSSMISDVMMKYLDNLSTSQLSLEKKLERERRRTQRYFMEANRNTVTCHHELAVLSHETFEKASLSSSSSGAASLKSELSESADLPPEGFQASYGKDEDRACDEILSDDNFNLENAEKDTYSEVDDELDISDNSSSSSSSPLKESTFNILKRSFSASGGERQSQTRDFTGGTGSRPRPASAGIAVSQRKVRQISDPIQQILIQLHKIIYITQLPPALHHNLKRRVIERFKKSLFSQQSNPCNLKSEIKKLSQGSPEPIEPNFFTADYHLLHRSSGGNSLSPNDPTGLPTSIELEEGITYEQMQTVIEEVLEESGYYNFTSNRYHSYPWGTKNHPTKR

SEQ ID NO: 37532 - protein, 289 aa, Zea mays
  Clone ID: LIB84-006-D4_FLI.pep
YIHTGTSGPTILTSVNFVQASAGYHGPVRVRRRQSFFAFGPCWLLIRSRTSSFCFFSISTCFFCNSSFWSLSFATSASSSIMYACFLARDLAADSLFLIMRRCLLSTTFSTVGPFRILSAVSNGYGTGDSDDRSPASTFPNPLNTTGVVGAATVTPPPRPCPTTPATIPFPSCRVCGATAFPWEKSPCACGCSRRVWCPPMSSRTTPARTRNSSRVMDPSVCCACACAGSGAGAGAGSGSGAGAGAGAATCCASSPLVRLTISRQTSSTVFWLSVRGSVKEPWRWMGAP

SEQ ID NO: 37533 - protein, 389 aa, Glycine max
  Clone ID: 701042232_FLI.pep
RYQSSIHQQPLSLPSLQQNQFSGDISGQVPAASPATRHGNSMNAESPPGLLMSVSCLSDYDLLCGEDSSGILSGESPECSFSDIDSSPPPPSPTTEDCYSIASFIEHERNFVPGFEYLSRFQSRSLDANAREESVGWILKVHAYYGFQPLTAYLAVNYMDRFLDSRRLPETNGWPLQLVSVACLSLAAKMEEPLVPSLLDLQIEGAKYIFEPRTIRRMELLVLGVLDWRLRSVTPLCFLAFFACKVDSTGTFIRFLISRATEIIVSNIQEASFLAYWPSCIAAAAILTAANEIPNWSVVKPENAESWCEGLRKEKVIGCYQLMQELVINNNQRKLPTKVLPQLRVTTRTRMRSSTVSSFSSSSSTSFSLSCKRRKLNNRLWVDDKGNSE

SEQ ID NO: 37534 - protein, 243 aa, Zea mays
  Clone ID: LIB3245-492-A11_FLI.pep
ISVWMMNVESDPLDSHTISKSELQLILAGRAGSKVQGSNKFPSLRELFSRTEFLAVTLANVVNNWGYFVLLSWMPVYFKTVYNVNLKQAAWFSAIPWAVMAMSGYVAGASADFLIKSGFPIGLVRKIMQSIGFMGPCVALLCLRFAQTPSVAAVLMTIALSLSSFSQAGYFCNIQDIAPKYAGSLHGMTNGIGTVAAIVSTIGTGYFVQWLGSFQAFLTLTAALYFSATVFYNVYATGDLIFD

SEQ ID NO: 37535 - protein, 112 aa, Zea mays
  Clone ID: LIB36-001-H9_FLI.pep
HHKFTATIHQKQDVKLPLATHASKHSAHLLRSHLFHQRLQTAHATNLFKHLRRKDLAHVLNIHVAGQCTHLPFLWDLETLHLAPDFSKPLILFQHVDDIPDRTTRPPRNPND

SEQ ID NO: 37536 - protein, 404 aa, Zea mays
  Clone ID: LIB3354-069-E8_FLI.pep
KRVNRWPCKAAVPRAQCLRFLFHLEFGVFSRPCPPPAPPPPPPRRNLAMARPPSAALKPPYPAFQSHPSDLELVNFYLRPWVETGVKTGAFIHDADVYAADPNYLTRQFAPAVAQDGERAWYFYTPLRHKSVHGTRKTRTVATGGGCWHNEAKARPVYMVSNGMHQIAHRQSFSFVEKDGGVRVRTGWLMMELRLVEDGAAGQKPEEDGALGSRVLCKVYRSPRNPEPSGIEAATAPGQKAEADDDESCDDESSDATLDDDDSSNASLAAASGPKRESDEVESSDATVAAPSRHSAPNDEISGGSAVAPGRKEKTEIGEVSTETSAAVRKRRKADGSSSPSTPVSTTDMHCPQCGTHLMLTLNMAESKSEAGLAKDESATAAPDQGGTGESSQKNVRVRFHQFL

SEQ ID NO: 37537 - protein, 173 aa, Arabidopsis thaliana
  Clone ID: LIB22-027-G7_FLI.pep
SRNYISLILILFYYTLLITFDNSYPIRFFVVIFYLQKQKQVLARQLNLRPRQVEVWFQNRRARTKLKQTEVDCEFLKKCCETLADENIRLQKEIQELKTLKLTQPFYMHMPASTLTKCPSCERIGGGGGGNGGGGGGSGATAVIVDGSTAKGAFSISSKPHFFNPFTNPSAAC

SEQ ID NO: 37538 - protein, 239 aa, Zea mays
  Clone ID: LIB3354-076-A9_FLI.pep
QILCAIVCTTELYFDRGNFYDFTSIVRELDVPGEIYERKTYPFEFSTVEMPYESYNGTNVRLRYILKVTIGRNYVGSIVESRDFCVRNYSLVPTINNSIKMEVGIEDCLHIEFEYSKSKYHLKDVIIGKIYFLLVRIKIKNMELEIRRRESTGSGPNTYVETETLAKFELMDGAPVRGESIPVRLFLTPYELTPTHRNINNKFSVKYYLNLVIVDEEDRRYFKQHEITMYRLLETPQSS

SEQ ID NO: 37539 - protein, 266 aa, Arabidopsis thaliana
  Clone ID: LIB22-055-F2_FLI.pep
GGEIDLDREFESILRRRRRSSGNILQLLQGIRAGIASEYESSDNNWDNSRERDRVIMINPYNQSLVVPSDQNQNHPSLTSLGDYFIGPGLDLLLQHLAENDPNRQGTPPARKEAVEALPTVKIMEPLQCSVCLDDFEKGTEAKEMPCKHKFHVRCIVPWLELHSSCPVCRFELPSSADDDDETKTDSERVLRTRNVRETSNGNVVENVGNADRGREDEVRSGNGRRFSFPWPFSGLFSSSSSSSSSTSGSQSGENNFFSRSSGSSR

SEQ ID NO: 37540 - protein, 548 aa, Zea mays
  Clone ID: LIB3060-074-F12_FLI.pep
SVWPPQSTPSPPVAMASDNRASLLPFAAAVLVVLLAGGAAADDASSDDDAGTSRTPGCSNKFQLVKVKNWVNGTEGTTFVGLSAKFGAPLPRDIHEAKKSFAVLSNPIDCCSNLTSKLTSSVAIATRGECAFTEKANIAQASGSTGLLVINDNEELYKMVCGENDTSINVTIPVVMIPQSAGKKLKNFLHHGASVEVQLYSPNRPTVDLSACFLWIMAVGTIVCASLWTEFVTCEQVDERYNQLTRKDGPDTGTNYREDKEVFEISAKGAFIFIIVASVFLLLLFYFMSSWFVWVLIVLFCIGGIEGMHACLVTLLARIFKDCGQKTVQLPVLGEVLILSVGIVPFCAVFAILWAVYRHASFAWIGQDVLGICLMITVLQMARLPNIKVASALLSAAFVYDIFWVFISPLIFHESVMIAVARGDNTGESIPMLLRIPRFFDPWGGYDMIGFGDIIFPGLLVGFSYRFDRANRKGVLSGYFLWLIVGYAVGLFITYLALFLMDGHGQPALLYLVPCTLGVIVILGWLRGELYELWNFGKSPAENFVNEP

SEQ ID NO: 37541 - protein, 526 aa, Arabidopsis thaliana
  Clone ID: LIB22-063-C6_FLI.pep
GKSSESVTRKKLKTDDVVGMNVSQKTTLIVCPPSVISAWITQLEEHTVPGILKVYMYHGGERTDDVNELMKYDIVLTTYGTLAVEESWEDSPVKKMEWLRIILDEAHTIKNANAQQSRVVCKLKASRRWAVTGTPIQNGSFDLYSLMAFLRFEPFSIKSYWQSLIQRPLGQGNKKGLSRLQVLMATISLRRTKEKSLIGLPPKTVETCYVELSPEERQLYDHMEGEAKGVVQNLINNGSLMRNYSTVLSIILRLRQLCDDMSLCPPELRSFTTSTSVEDVTDKPELLQKLVAALQDGEDFDCPICISPPTNIIITRCAHIFCRACILQTLQRSKPLCPLCLGSLTQSDLYNAPPPPPDSSNTDGEDAKSSTKSSKVSALLSLLMASRQENPNTKSVVFSQFRKMLLLLETPLKAAGFTILRLDGAMTVKKRTQVIGEFGNPELTGPVVLLASLKASGTGINLTAASRVYLFDPWWNPAVEEQAMDRIHRIGQKQEVKMIRMIARNSIEERVLELQQKKKNLANEAF

SEQ ID NO: 37542 - protein, 199 aa, Zea mays
  Clone ID: LIB3060-052-F2_FLI.pep
LRVRGAPPPGQGEWAHHRAWRYGQGKTLTHNRVAFRSRMGYRLRRIVDTFKDLMEEMKTFEFNKLEPKATAASLELREMDFLIDDHEDIVARSRHDERNKMVNILVNANGRVVGGDLMVVPIVGMGGLGKTTLAQLIHNDPQVKEYFHLRKWVCVSDDFSVLNLANKICNASERDLEEAVKKLQEHLNGKRYWLELISY

SEQ ID NO: 37543 - protein, 278 aa, Arabidopsis thaliana
  Clone ID: LIB23-008-B10_FLI.pep
VQKTMSEVEIENAATIEGNTAADAPVTDAAVEKKPAAKGRKTKNVKEVKEKKTVAAAPKKRTVSSHPTYEEMIKDAIVTLKERTGSSQYAIQKFIEEKRKELPPTFRKLLLLNLKRLVASGKLVKVKASFKLPSASAKASSPKAAAEKSAPAKKKPATVAVTKAKRKVAAASKAKKTIAVKPKTAAAKKVTAKAKAKPVPRATAAATKRKAVDAKPKAKARPAKAAKTAKVTSPAKKAVAATKKVATVATKKKTPVKKVVKPKTVKSPAKRASSRVKK

SEQ ID NO: 37544 - protein, 550 aa, Zea mays
  Clone ID: LIB3354-111-F5_FLI.pep
GWTCLYGAYAHASGCGRRALFLTHRPRAMAAAAGKARAMSLAAAVRVVAATARPASSAAAAAGVGAMALIVQGEDTAFGSLEWWAYAGISFFLVLFAGIMSGLTLGLMSLGLVELEILQRSGTDAEKAQAAAILPVVQKQHQLLVTLLLCNAAAMEALPIFLDRMFHPVVAVVLSVTFVLAFGEVIPQAICTRYGLAVGANFVWLVRILMVICYPISYPIGKVLDCALGHNESALFRRAQLKALVSIHGKEAGKGGELTHDETTIISGALDLTEKTAAEAMTPIESTFSLDVDSKLDWEAIGKILARGHSRVPVYSRNPKNIIGLLLVKSLLTVRAETETPVSAVSIRRIPRVPSDMPLYDILNEFQKGSSHMAAVVKAKPKTEPPPDRTEPNREAVGPAQLTVTLLSNAEESADNVVVDIERPHNRQINGIPASNAVPRSSEDIEDGEVVGIITLEDVFEELLQEEIVDETDEYVDVHKRIRVAAAAAASSVARAPSVRRLTGQKAANLQGAQNRQGQQPPGILKKPTEGDSNSSKQVNLVEPLLEKRR

SEQ ID NO: 37545 - protein, 563 aa, Arabidopsis thaliana
  Clone ID: LIB24-048-G10_FLI.pep
TAYRCAVVLRDLIMPYLLRRMKADVNAHLTKKTEHVLFCSLTVEQRSTYRAFLASSEVEQIFDGNRNSLYGIDVMRKICNHPDLLEREHSHQNPDYGNPERSGKMKVVAEVLKVWKQQGHRVLLFSQTQQMLDILESFLVANEYSYRRMDGLTPVKQRMALIDEFNNSEDMFVFVLTTKVGGLGTNLTGANRVIIFDPDWNPSNDMQARERAWRIGQKKDVTVYRLITRGTIEEKVYHRQIYKHFLTNKILKNPQQRRFFKARDMKDLFILKDDGDSNASTETSNIFSQLAEEINIVGVQSDKKPESDTQLALHKTAEGSSEQTDVEMTDKTGEAMDEETNILKSLFDAHGIHSAVNHDAIMNANDEEEKMRLEHQASQVAQRAAEALRQSRMLRSRESISVPTWTGRSGCAGAPSSVRRRFGSTVNSRLTQTGDKPSAIKNGISAGLSSGKAPSSAELLNRIRGSREQAIGVGLEQPQSSFPSSSGSSSRVGSLQPEVLIRKICSFVQQKGGSADTTSIVNHFRDIVSFNDKQLFKNLLKEIATLEKDQNRSFWVLKSEYKD

SEQ ID NO: 37546 - protein, 672 aa, Zea mays
  Clone ID: LIB3591-110-H7_FLI.pep
TSLAEVTIASIVRPCGFCLAGTVMDPEKQNEMSLIDKRELVYEVARWPQGAMEILRCWTRRELLELICVELGKERKYTNVPKAKMIAYLLKLVSRNSGKNGQLKNDNPNVMLLGQDNKDEIQMKESDEQSRPLKTANSDSSISREACAGSSVVCSNVACQATPNAGDKYCKRCSCCICNKYDDNKDPSLWLVCSSDNPYSGCSCGVSCHLNCALKNKRAGIVKNGCNKLDCSFYCVSCGKINWLMRCLQKQLAIAREARRVDVLCERLSLSHKIIQGSERYKEIASIISSAVKTLEIEVGSALDQVSVITGRGIVNRLTCGAEVQKLCSSTLEIVDSKVDNILEFESNNSPKLLGPQPQILFHEITPFSVVIVLNYQHDIGKEQIDGSKIWHRSARVCNYSSEPTCHILRPNTRSLVSGLSPSTEYFFKVLPFSSTHGFTEWETKCSTRSLDHGSSQCSTQNSESMCLKDDSMQHHKKDLNVQNHQRTIQYDSPKGSTNSSENNLSCDRYSKRAKVARLDGASDNDESQLPPTSEVLPFASSNSSPSEAPSKPDLLIGTPDSASKNYVEQQYEYCVRVVRWLEHEGHMDNDFRVKFLTWFSLKATTQDRRIVGAFVDVLIGDPASLVGQLVDAFKDAICIKEKPSQAQQKDACCKVASELCRDRHWALEINF

SEQ ID NO: 37547 - protein, 252 aa, Arabidopsis thaliana
  Clone ID: LIB24-063-F10_FLI.pep
GKMGRGRVELKRIENKINRQVTFAKRRNGLLKKAYELSVLCDAEVSLIVFSNRGKLYEFCSTSNMLKTLERYQKCSYGSIEVNNKPAKELENSYREYLKLKGRYENLQRQQRNLLGEDLGPLNSKELEQLERQLDGSLKQVRCIKTQYMLDQLSDLQGKEHILLDANRALSMKLEDMIGVRHHHIGGGWEGGDQQNIAYGHPQAHSQGLYQSLECDPTLQIGYSHPVCSEQMAVTVQGQSQQGNGYIPGWML

SEQ ID NO: 37548 - protein, 400 aa, Zea mays
  Clone ID: LIB3606-018-B12_FLI.pep
ISTVLMTVGIAVISWLALPAKFTIFNFGTQKDVSNWGLFFCVAIGLWAGLIIGFVTEYYTSNAYSPVQDVADSCRTGAATNVIFGLALGYKSVIIPIFAIAVSIYVSFSIAAMYGIAVAALGMLSTIATGLAIDAYGPISDNAGGIAEMAGMSHRIRERTDALDAAGNTTAAIGKGFAIGSAALVSLALFGAFVSRAGVKVVDVLSPKVFIGLIVGAMLPYWFSAMTMKSVGSAALKMVEEVRRQFNTIPGLMEGTAKPDYATCVKISTDASIKEMIPPGALVMLTPLIVGTLFGVETLSGVLAGALVSGVQIAISASNTGGAWDNAKKYIEAGASEHARTLGPKGSDCHKAAVIGDTIGDPLKDTSGPSLNILIKLMAVESLVFAPFFATHGGLLFKYL

SEQ ID NO: 37549 - protein, 217 aa, Arabidopsis thaliana
  Clone ID: LIB24-095-D7_FLI.pep
RGSRFFLIFITPHIFLSSNSHKERKVSKAQKAMTRPSRLLETAAPPPQPSEEMIAAESDMVVILSALLCALICVAGLAAVVRCAWLRRFTAGGDSPSPNKGLKKKALQSLPRSTFTAAESTSGAAAEEGDSTECAICLTDFADGEEIRVLPLCGHSFHVECIDKWLVSRSSCPSCRRILTPVRCDRCGHASTAEMKDQAHRHQHHQHSSTTIPTFLP

SEQ ID NO: 37550 - protein, 388 aa, Zea mays
  Clone ID: LIB3689-230-C12_FLI.pep
NMKLKKFLHIIENSPVYPVIYDSNRTVLSLPPIINGAHSAITLATRNVFIECTATDLTKANIVLNTMVTMFSEYCETKFEVEPVEVIHHDGRKTVYPDLSCYKMDVLLSDILGPIGISQDEKQVVCLLNKMQLQAESHSLKGEARISVSVPPTRSDILHARDLSEDVAIAYGFNNVPKSKPKCMTIGGRQPLNRFSDKIRAEVARAGYMEVLTFILSSHEENFDMLNRTDDKSKAVIIANPRTSEFEVVRTSLMSCLLKTLKHNIDHPRPIKIFEVGDVVMLDSSRDVGASNNRRLAALYCNRVSGFEEIMGLVDSIVKVVRAPHVNFGENYYVPTDEPEFFPKRQCKIVTSDGKQVGYLGIVHAEVLRKFGIPDPCTFVEMDLEALL

SEQ ID NO: 37551 - protein, 257 aa, Arabidopsis thaliana
  Clone ID: LIB25-001-G12_FLI.pep
LILLSQLGLIEMEGGASNEVAESSKKIGRGKIEIKRIENTTNRQVTFCKRRNGLLKKAYELSVLCDAEVALVIFSTRGRLYEYANNSVRGTIERYKKACSDAVNPPTITEANTQYYQQEASKLRRQIRDIQNLNRHILGESLGSLNFKELKNLESRLEKGISRVRSKKHEMLVAEIEYMQKREIELQNDNMYLRSKITERTGLQQQESSVIHQGTVYESGVTSSHQSGQYNRNYIAVNLLEPNQNSSNQDQPPLQLV

SEQ ID NO: 37552 - protein, 294 aa, Arabidopsis thaliana
  Clone ID: LIB3168-029-D4_FLI.pep
DLNHKKESKHKSMGRSPCCEKAHTNKGAWTKEEDERLIAYIKAHGEGCWRSLPKAAGLLRCGKSCRLRWINYLRPDLKRGNFTEEEDELIIKLHSLLGNKWSLIAGRLPGRTDNEIKNYWNTHIRRKLINRGIDPTSHRPIQESSASQDSKPTQLEPVTSNTINISFTSAPKVETFHESISFPGKSEKISMLTFKEEKDECPVQEKFPDLNLELRISLPDDVDRLQGHGKSTTPRCFKCSLGMINGMECRCGRMRCDVVGGSSKGSDMSNGFDFLGLAKKETTSLLGFRSLEMK

SEQ ID NO: 37553 - protein, 247 aa, Arabidopsis thaliana
  Clone ID: LIB35-022-G2_FLI.pep
SKSRNLQDLVETMEEGDFFNCCFSEISSGMTMNKKKMKKSNNQKRFSEEQIKSLELIFESETRLEPRKNVQVARELGLQPRQVAIWFQNKRARWKTKQLEKEYNTLRANYNNLASQFEIMKKEKQSLVSELQRLNEEMQRPKEEKHHECCGDQGLALSSSTESHNGKSEPEGRLDQGSVLCNDGDYNNNIKTEYFGFEEETDHELMNIVEKADGSCLTSSENWGGFNSDSLLDQSSSNYPNWWEFWS

SEQ ID NO: 37554 - protein, 80 aa, Arabidopsis thaliana
  Clone ID: LIB3168-030-D11_FLI.pep
RSQKTQFVLLNLEQNENKLITKKCLCHRHVATLKQSPLIIFCYTGSIESILWKNYYTIWFTNTLIPIKEAMVSGTEHTEE

SEQ ID NO: 37555 - protein, 416 aa, Arabidopsis thaliana
  Clone ID: LIB3168-030-D12_FLI.pep
KRERAMNSIFSIDDFSDPFWETPPIPLNPDSSKPVTADEVSQSQPEWTFEMFLEEISSSAVSSEPLGNNNNAIVGVSSAQSLPSVSGQNDFEDDSRFRDRDLGNLDCAAPMTTKTVIVDSDDYRRVLKNKLETECATVVSLRVGSVKPEDSTSSPETQLQPVQSSPLTQGELGVTSSLPAEVKKTGVSMKQVTSGSSREYSDDEDLDEENETTGSLKPEDVKKSRRMLSNRESARRSRRRKQEQTSDLETQVNDLKGEHSSLLKQLSNMNHKYDEAAVGNRILKADIETLRAKVKMAEETVKRVTGMNPMLLGRSSGHNNNNRMPITGNNRMDSSSIIPAYQPHSNLNHMSNQNIGIPTILPPRLGNNFAAPPSQTSSPLQRIRNGQNHHVTPSANPYGWNTEPQNDSAWPKKCVD

SEQ ID NO: 37556 - protein, 566 aa, Arabidopsis thaliana
  Clone ID: LIB3168-035-H3_FLI.pep
SIDMGITKTSPNTTILLKTFHNNSMSQDYHHHHHHNQHQGGIFNFSNGFDRSDSPNLTTQQKQEHQRVEMDEESSVAGGRIPVYESAGMLSEMFNFPGSSGGGRDLDLGQSFRSNRQLLEEQHQNIPAMNATDSATATAAAMQLFLMNPPPPQQPPSPSSTTSPRSHHNSSTLHMLLPSPSTNTTHHQNYTNHMSMHQLPHQHHQQISTWQSSPDHHHHHHNSQTEIGTVHVENSGGHGGQGLSLSLSSSLEAAAKAEEYRNIYYGANSSNASPHHQYNQFKTLLANSSQHHHQVLNQFRSSPAASSSSMAAVNILRNSRYTTAAQELLEEFCSVGRGFLKKNKLGNSSNPNTCGGDGGGSSPSSAGANKEHPPLSASDRIEHQRRKVKLLTMLEEVDRRYNHYCEQMQMVVNSFDIVMGHGAALPYTALAQKAMSRHFRCLKDAVAAQLKQSCELLGDKDAAGISSSGLTKGETPRLRLLEQSLRQQRAFHQMGMMEQEAWRPQRGLPERSVNILRAWLFEHFLHPYPSDADKHLLARQTGLSRNQRNTMCFAFHSPLAFLGIRL

SEQ ID NO: 37557 - protein, 642 aa, Arabidopsis thaliana columbia
  Clone ID: LIB3175-019-D10_FLI.pep
RLQMARKMSLEAFVSTMAPLIDMEKEAEISMSLTSGASRNIETAQKKGTTILNLKCVDVQTGLMGKSLIEFQSNKGDVLPAHKFGNHDVVVLKLNKSDLGSSPLAQGVVYRLKDSSITVVFDEVPEEGLNTSLRLEKLANEVTYRRMKDTLIQLSKGVLRGPASDLVPVLFGERQPSVSKKDVKSFTPFNKNLDQSQKDAITKALSSKDVFLLHGPPGTGKTTTVVEIVLQEVKRGSKILACAASNIAVDNIVERLVPHKVKLVRVGHPARLLPQVLDSALDAQVLKGDNSGLANDIRKEMKALNGKLLKAKDKNTRRLIQKELRTLGKEERKRQQLAVSDVIKNADVILTTLTGALTRKLDNRTFDLVIIDEGAQALEVACWIALLKGSRCILAGDHLQLPPTIQSAEAERKGLGRTLFERLADLYGDEIKSMLTVQYRMHELIMNWSSKELYDNKITAHSSVASHMLFDLENVTKSSSTEATLLLVDTAGCDMEEKKDEEESTYNEGEAEVAMAHAKRLMESGVQPSDIGIITPYAAQVMLLRILRGKEEKLKDMEISTVDGFQGREKEAIIISMVRSNSKKEVGFLKDQRRMNVAVTRSRRQCCIVCDTETVSSDAFLKRMIEYFEEHGEYLSASEYTN

SEQ ID NO: 37558 - protein, 349 aa, Arabidopsis thaliana columbia
  Clone ID: LIB3176-009-E12_FLI.pep
LLFCLFLFGALAPIVNVNYGGISGAFYGNYRSNYITDQIYSQHRDRVLDTSRSGAGTGVSNSNGMHRGRDSDRGARKNISATESSVTPGNGSEPLVASLFVPRNDKLVKIDGNLIINSILASEKAVASRKASESKERKADLMISKDYTPALPLPDVGRTEELAKHLYRSKAEKQKALSSGSADTLKDQVKTKAANGEMQQWFREGVAGPMFSSGMCTEVFQFDVSSTSGAIIPAATNVSAEHGKNTTDTHKQQNRRILRGLPIPLPGSDFNLTKEHQRNSSSKEIKPASSMVVSVLVDPREGGDGDIDGMIGGPKSLSRVFVVVLLDSAKYVTYSCVLPRSGAPHLVTT

SEQ ID NO: 37559 - protein, 293 aa, Arabidopsis thaliana
  Clone ID: LIB23-065-D10_FLI.pep
MESNHEGNAIQVIDQVTTMTHLSDPNPKTKPGMMLMKQEDGYLQPVKTKPAPKRPTSKDRHTKVEGRGRRIRMPAGCAARVFQLTRELGHKSDGETIRWLLERAEPAIIEATGTGTVPAIAVSVNGTLKIPTSSPVLNDGGRDGDGDLIKKRRKRNCTSDFVDVNDSCHSSVTSGLAPITASNYGVNILNVNTQGFVPFWPMGMGTAFVTGGPDQMGQMWAIPTVATAPFLNVGARPVSSYVSNASDAEAEMETSGGGTTQPLRDFSLEIYDKRELQFLGGSGNSSPSSCHET

SEQ ID NO: 37560 - protein, 128 aa, Zea mays
  Clone ID: LIB3607-011-A11_FLI.pep
AKLVAGTTNIKAAPAATPPAIAPVVEELLPGDCIGVVGLYGGGGEKGGALGQGFVVPGPHKLGLFTKLISHGAFTHRYTIDYDLFLAEKTEDAALKHHKRTEDMAYHLSNVCTLLMILLLLLRVPHPN

SEQ ID NO: 37561 - protein, 137 aa, Zea mays
  Clone ID: LIB3606-035-B12_FLI.pep
LLLDLINVPEWNSLSLRSRERCQGCISWCRRRRRPCAPGRWHGQQRRRALLQHHPPRDDDDDGSGGVRRRERQGRVRAEAAARRRAPRLHLHAAQGQAVTVSDEDGAAAAAAESEEREIDHLIPQTKHLINSYQGRW

SEQ ID NO: 37562 - protein, 455 aa, Arabidopsis thaliana
  Clone ID: LIB146-009-A1_FLI.pep
TRVLGLGCFVFIEEEVEGVYTRIMGTHINFNNLGGGGHPGGEGSSNQMKPTGSVMPLARQSSVYSLTFDELQNTLGGPGKDFGSMNMDELLKSIWTAEEAQAMAMTSAPAATAVAQPGAGIPPPGGNLQRQGSLTLPRTISQKTVEEVWKCLITKDGNMGGSSGGGGESNVPPGRQQTLGEMTLEEFLFRAGVVREDNCVQQMGQVNGNNNNGFYGNSTAAGGLGFGFGQPNQNSISFNGTNDSMILNQPPGLGLKMGGTMQQQQQQQQLLQQQQQQMQQLNQPHPQQRLPQTIFPKQANVAFSAPVNITNKGFAGAANNSINNNNGLASYGGTGVTVAATSPGTSSAENNSLSPVPYVLNRGRRSNTGLEKVIERRQRRMIKNRESAARSRARKQAYTLELEAEIEKLKKTNQELQKKQAEMVEMQKNEQLKETSKRPWGSKRQCLRRTLTGPW

SEQ ID NO: 37563 - protein, 215 aa, Sorghum bicolor
  Clone ID: LIB3478-015-D8_FLI.pep
GIGGSSRYLAKKYGAQCKGITLSPVQAERGNALATAQGLSDQVTLQVADALEQPFPDGQFDLVWSMESGEHMPDKRKFVSELARVAAPGGTIIIVTWCHRNLEPSETSLKPDELSLLKRICDAYYLPDWCSPSDYVNIAKSLSLEDIKAADWSENVAPFWPAVIKSALTWKGLTSLLTSGWKTIRGAMVMPLMIQGYKKGLIKFTIITCRKPGAA

SEQ ID NO: 37564 - protein, 390 aa, Zea mays
  Clone ID: LIB3245-084-E10_FLI.pep
PNKSHRSRFLACSSARLGFDLQPSRERGCRRGAVVMATEEWELREEDAYAYEFEFDLENPFTSPADEPIASLLDAEGHHAPSISAAASATRRAAAAFISKVRFGGELAVHPRVAYLALNYVDRFLSKRQLACEQQPWAPRLLAISCLSLAAKMQRVATFSTADIQRDEDFMFDAVTIRRMERVVLGALEWRARSVTPLAFLGFFLSACYPPPQHPPQVAAVKARAVDLLLHAQPEVKMAEFSPSVVAAAALLSAAGEVAAANLHAFQASLAACPFVNSEKLRECGEVLAAAGGVGRGRAAPSADTPVRCSVTSAAPAPPRRPTGLTAATRRNAAWAHHRNGGRRQAESSGYCRSWIEESEILLQPCSFFSKLFLPFFFSQFFPSTLMLSR

SEQ ID NO: 37565 - protein, 99 aa, Zea mays
  Clone ID: LIB3066-002-C2_FLI.pep
YGKRLQNGTAAKTEQRAGASLLLLSKLARRAQPRHRALADDTGSVLPGAQGTWEQLLELVEECAPLFRAHVRQLHETGAGREQLVGAPAPGLMLAGFAG

SEQ ID NO: 37566 - protein, 507 aa, Zea mays
  Clone ID: LIB3606-037-C11_FLI.pep
IYRYRHTQQVQDQAKATSRPCSLGLHSSSSLGSPPHLATMFHHQQELLQAEAAAADRESSMSNLTSSTFGGPNAAPAAAAAAPPAPAASGNNKRKRSLPGNPDPEAEVVALSPATLMATNRFVCEICGKGFQRDQNLQLHRRGHNLPWKLKQRGTGKEAQRRKVYVCPEASCVHHDPARALGDLTGIKKHFFRKHGEKKWKCDKCSKKYAVHSDWKAHSKICGTREYKCDCGTIFSRRDSFITHRAFCDALTEESAKAIGLNAMAAVPAQHHHHPMLFSPPPTHVMQQDVALLQEHHHQEVMQQEHCNYAMKTEMPPWPGMTYDHPLLQPLCNAAAPQSSATSTPPPPTTMQLPAAYAHLSATALLQKAAQMGATVAGAGYTQMAGAATSATFGLGLPDLQNTQQQQHQDGEIMAGLARTASHGRGGEEGGGGGGDGMTRDFLGLRAFSHRDILGLAGLDSSCMGAIISASASMNCYDEPQQRAQAQAEQQQQSSNEQWHSMGSHQS

SEQ ID NO: 37567 - protein, 179 aa, Zea mays
  Clone ID: LIB3059-059-B9_FLI.pep
QMHGGSTKKSAPDLSPTKQKKQQAVQERKRKQQSKRGKKVAGESLEIPQTNFESENQPHNDDVNIEKQTITSSTLSPNGAKGQKGAQRRNQTKKRNQRKILGDADLACQPGVRKSSRTRSRPLEYWLGERLLYGPIHDNLHGAIGIKAYSPGQDGKRSLKVKSFVPEQYSDLVAKSARY

SEQ ID NO: 37568 - protein, 647 aa, Zea mays
  Clone ID: LIB3606-040-G10_FLI.pep
VETMYRVCVGGGKIERKEDDPRLWRRWDSDERYIFSMNAAHSIRNTSSISYVSRDGADSVPAPLRLYETARVTEETFVVDRKFNVSWRFGVDPGFEYLVRLHFCELEYGSAEQRRFKIYINGKTAAENYDVVAKAGGKNKAFHEDFLDDDDAAPASETDTLWVQLGSESSATSSAASDALLNGMEIFKVSRNGNLGHPTVRIGGVSGGLEDDRRKRSPRWVLVGAAAGVVIFVSVAAAVYLCFYLHRKKNTNTSAANKKTKTKTKDDNLPATTTAPGLRAAGTFGSCRMGRRFSIAEIKAATMDFDESLVIGVGGFGKVYRGETDTGTPVAVKRGHAESQQGAKEFETEIEMLSRLRHRHLVSLIGYCDEQDEMILVYEHMANGTLRSHLYGSESESDHLPALTWRQRLEICIGAARGLHYLHTGLDRGGVIHRDVKTTNILLDGSLVAKVADFGISKHGPPLDRTHVSTAVKGSFGYLDPEYFMRQQLTQSSDVYSFGVVLLEVLCARPVINPALPRDQVNLPEWALERKRRGLLETVVDRRLDGGYYLESVRQLAEVAEKCVADEGRDRPSIGQVLWHLETALQLHQAHLQSSSASAAAGDLEPSDGASASNSIRRAEEAAETAGVTYGDGHGDGEAVELRVEVL

SEQ ID NO: 37569 - protein, 124 aa, Zea mays
  Clone ID: LIB3606-043-H3_FLI.pep
RRCITTSLAHPVPPGNEAPSRIQHDELVGKDVILYAIIGPEQPVAKGTIVSTNPNTLLGGVPLGKEYCEVIVNTVLKRDAILPCPYGYVETMADAHQMSVAWLYKRMKISKASGSPQGIGGGWH

SEQ ID NO: 37570 - protein, 219 aa, Zea mays
  Clone ID: LIB3059-059-H3_FLI.pep
MILQNSEAMVSIDMPAGPSEVLVIADKYANPVHVAADLLSQAEHGPDSQVVLVVAGDGVDLGAIEAEVSKQCNALPRGEFASKALSHSFTVFAKDMVEAISFSNLYAPEHLIINVKDAEQWEEFIENAGSVFLGQWTPESVGDYASGTNHVLPTYGYARMYSGVSLNSFLKYITVQSLTEEGLRKLGPYVAKMAEVEGLEAHKRAVTLRLQEVEANVTV

SEQ ID NO: 37571 - protein, 442 aa, Zea mays
  Clone ID: LIB3608-033-B9_FLI.pep
VPEWILDKSNGDVAADSYHMYPEDVRLLKEIGMDAYRFSISWSRILPNGTLEGGINPDGIKYYKNLINLLLENGIEPFVTIFHWDTPQALMDKYGGFLDKSIVKDYTDFAKVCFDNFGDKVKNWFTFNEPETFCTFSHGTGQCAPGRCSPGIITPTGSTSCANPIGNSLTEPYIVGHNLLRAHAEAVDLYNKYYKGENGRIGIVFDVMGRVPFEKTAFIDQQAEERSWDINLGWFLEPVVRGDYPFSMRSLVRDRLPFFTDEEREKLVGSYDMLGLNYYTSRFSKHIDITQHNTLRLNTDDAYASQETKGPDGEPIGPPMGNWIYLYPQGLKDLLKIMKEKYGNPPMYITENGMAEVDLGNNLNDQKRIDYLQSHLAALQESVQSGANVKGYFLWSLLDNFEWFCGYTQPYGIVYVDRNDGCKRYMKQSAKWYKRFIAANDK

SEQ ID NO: 37572 - protein, 413 aa, Zea mays
  Clone ID: LIB3060-020-H12_FLI.pep
AAHPGTVVMARVDCASKVNVDLCNKFSVDHYPYLVWGPPTKFNLVQWKPKQENSELELIDDGRTADRLLKWINKKMGSSFNLDDKKYENESMHPKNTSDPEQIVRAIYDVEEATSHALQIILEHKMIKPDTRDSLISFLQILVAHHPSKRCRRGSAELLIDFDDHWHTNLSLSLEDSTTLLKGAGEKVCGNGVPRGYWIFCRGSKKETRGFSCGLWVLLHSLTVRIGDGESQTTFTSICDFIHNFFICEECRTHFYEMCSSVSVPFKSARDLALWLWTAHNKVNERLMKEEKELDNADPSFPKIIWPPKQLCPLCYRSSSRTADGAMQVEWNEDEVFNFLVNYYGKMLVSSYRETSMQSFQVGSISDDSSASSAATVPIGAALGIALASCTFGALACFWRTQQKNRKQRKNWN

SEQ ID NO: 37573 - protein, 394 aa, Zea mays
  Clone ID: LIB3608-034-F8_FLI.pep
FDTTRCLVMDSTRSNQVAGRCSSTIASRAATVPPSLTMPRGELADAIVGGGGGGGADGDPRAALLRLSALGDRMAAVRGRISASISGEARPLSYADIQSVSSEISAAVQLVVLNAAELLASSVPFPAPPPPPPSAAPAPVREIPVVAASAQEQPLEAAKDDGGYEVVELDAAELLAEHVHFCEICGKGFRRDANLRMHMRAHGDRFKTLDALSRPGHGQPKPPVGSNVRFSCPFAGCNRNRTHRRFRPLKSAVCARNHFRRSHCPKLYACERCGGKKRFAVLADLRSHLRHCGEEAQWRCSCGTTFSRKDKLFGHLALFEGHTPAVNKPNKDVVTGPTESTIDAMEEGGFEEGIPDREEDEEGGYDPEFFKEWMDELRGGAGGSNWPGPAADGH

SEQ ID NO: 37574 - protein, 236 aa, Zea mays
  Clone ID: LIB3060-053-C8_FLI.pep
HLFKNSSGSKVLSWSQRFGIAVGVARGLSYLHEKCRECIIHCDIKPENILLDEEMGAKVADFGMAKLVGHDFSRVLTTMRGTMGYLAPEWLAGAPVTAKADVYSFGLLLFELISGRRNNGSSEAGSNSAVYFPVHAAVRLHAGDVAGLLDDKIAGDANAKELERVCMVACWCIQDEEGDRPTMGLVVQQLEGVADVGLPPIPSRLHMLAMMNKCAVGGEAEVEPCSNSGSKIDTEV

SEQ ID NO: 37575 - protein, 489 aa, Zea mays
  Clone ID: LIB3594-050-B12_FLI.pep
PARPARALRSVNYIYLSPAAPRRRTEAGRKALTSPGARSRQQERMAADAAAAATLRTALSQATGQEQRASLLCTPKHRVAASRRSLRFTTRASSNAGASVSIPKQWYNLIADLPVKPPPPLHPQTHQPLNPSDLSPLFPDELIRQEVTDERFVDIPEEVIDVYKLWRPTPLIRARRLEKLLGTPAKIYYKYEGTSPAGSHKPNTAVPQAWYNAAAGVKNVVTETGAGQWGSALSFASSLFGLNCEVWQVRASFDQKPYRRLMMETWGAKVHPSPSTATEAGKRILEADPSSPGSLGIAISEAVEVAATSADTKYCLGSVLNHVLLHQTVIGEECLEQLAALGETPDVVIGCTGGGSNFGGLAFPFLREKLRGRMSPAFRAVEPAACPTLTKGVYAYDFGDTAGLTPLMKMHTLGHGFVPDPIHAGGLRYHGMAPLISHVYELGFMDAVAIQQTECFQCILLYLLQWQRDLSTRKWMKEEQHRNANVLFC

SEQ ID NO: 37576 - protein, 269 aa, Zea mays
  Clone ID: LIB3060-054-C3_FLI.pep
KEGHIMVCKIAEKYLSEKAAAAVQALLPESAGGELSTVCPWADQVRWHYHWASPLHYANTPQVCNFKYSRDCHNSRGQQGMCVVGAINNYTDQLYSYGQKTSYNLTESLMFLAHFVGDVHQPLHVGFEDDEGGNTITVHWYRRKANLHHVWDVSIIDTAIKDFYNKSMDTMVEALKMNLTDGWSDDIVHWENCKNKHATCANDYAIESIHYSCNYAYKDVEQDITLGDDYFFSRYPIVEKRLAQAGIRLALVLNRIFGGGEADDIPLQV

SEQ ID NO: 37577 - protein, 444 aa, Zea mays
  Clone ID: LIB3689-209-F6_FLI.pep
PHIVSSMSQYGKLHGHEGCVNTVSFNPAGDLLVSGSDDTNIILWDWLSKTKKLVYPSGHQDNVFHARVMPFTDDSTIVTVAADGQVRVGRLKEGGEVTTKLVGEHDSRVHKMAIEPGNPYIFYSCGEDGLVQHFDLRSDSATKLFTCCSFLNDRRRVKLNSIVIDPQNPYYFSIGGSDEYARLYDMRKFQLDGSRNTNQPVDTFCPKHLIKGASARVHITSIAYSYAREILVSYNDELIYLFQHNIGLGPNPVSAEPEFFNMLDQPQAYRGHRNFRTVKGVSFFGQHDEYVVSGSDCGNVFIWRKKGGELIRMMNGDKSVVNCIEPHPHFPFMATSGIDNTVKLWTPAAKKLIMPLPKNAKQIIAANELERTVHISQATATLSSDVMMHVLRLLRRRDSEMNIENEPASADLASDDDEAFYFGFEDDAERNERENSDPRECNMT

SEQ ID NO: 37578 - protein, 190 aa, Zea mays
  Clone ID: LIB3061-030-E8_FLI.pep
TINFDNIYLLELLIFSNQLQTQKFQSVHATRCYIHTDFLETVLRTINSNVVRTCIMHAIKKNTHQSSFFKRTNRRRNLASETGNKHGGEPDNKVVGECLCFTAGVLCRHRLLVPIGHINSAQRTGSLAGREPPVDAVPVEHMATRQSAGSLAEPNLGQADAALVRWAAAVLAGLCCLRSCLDAHDLGNVG

SEQ ID NO: 37579 - protein, 810 aa, Zea mays
  Clone ID: LIB3689-210-B11_FLI.pep
PALNPSVPMASSSSPPPPKLPIPGRRNILITSALPYVNNVPHLGNIIGCVLSADVFARYCRLRGYNAIYICGTDEYGTATETKAMEEKCTPKEICDKYHAIHNEVYKWFNIKFDKFGRTSSPEQTEVCHAIFHKLMENNWLTENTMQQLYCDTCQKFLADRLVEGTCPNKVCNASARGDQCETCSTLLNPTELIDPKCKVCKNTPRIRDTDHLFLELPLLRDKLVNYINETSVTGLWSQNAIQATNAWLKEGLKPRCITRDLKWGVPVPHEKYKDKVFYVWFDAPIGYVSITASYTPEWEKWWKNPDNVELFQFMGKDNVPFHTIMFPSTLLGTGEKWTMMKTISVTEYLNYEAGKFSKSKGIGVFGNDAKDTNIPPEVWRYYLLMNRPEASDTLFTWADLQAKLNSELLNNLGNFINRVLSFVAKPAGAGYGSVVPDAPNAGAHTLTKTLAEKTSKWVEQYLDAMEKVKLKQGLKSAMGISSDGNAYLQESQFWKLYKEDPAACAIVMKTSVGLVYLLACLLEPFMPSFSDEVLRQLNLSPEENLSLSEEKGEIAKAKTPWNFVPAGHRIGKPAPLFKELKDEDVALHREKYAGSQAERSSKAAADAEANKVANQLKGTKLSDGGTKKEPKKQSGGSKSKTAEADITVAKLDIRVGLIRKAEKHPDADSLYVEEIDVGEDAPRTVVSGLVKFIPLEEMQSRKVCVLCNLKPVAMRGIKSHAMVLAASNEDHTKVELVEPPESAAVGERVTFAGYAGEPEASLSGKSKTWEKLAAELHSNGELVACYRDVPFTTSAGVCRVKTIANGEIR

SEQ ID NO: 37580 - protein, 225 aa, Zea mays
  Clone ID: LIB3061-031-G10_FLI.pep
SHAEGGGVRSLAMARWRPAALLVVALTAVLSAARRADALSVTVTDTECIHEFVPYEGDTVSGNFVVVDHDIFWSSDHPGIDLTVTSPGGNTVHTLKGKSGDKFEFKAPKGGMYKFCFHNPYGAPETVSFYIHVGHIPNEHNLAKDEHLDPINVKIAELKEVLESVTAEQKYLKAREARHRHTNESTRKRVMFYTMAEYIAFVAASTLQVLYIRRMFSKNVGYNRV

SEQ ID NO: 37581 - protein, 518 aa, Zea mays
  Clone ID: LIB3960-013-E3_FLI.pep
KSTCLRGIATVAQSTFAKSLVRFLNPSKVGMASASMLARSLLRTPDPTQTSHPNRRSAAVVSFPRRHRRLSVRASVSTASPSPPPQPAAAAAGVPKHCFRRGADGYLYCEGVRVEDAMTAAERSPFYLYSKPQILRNLAAYRDALQGLRSIIGYAVKANNNLPVLRVLRELGCGAVLVSGNELRLALQAGFDPARCIFNGNGKTLEDLKLAAESGVFVNVDSEFDLENIVRAARATGKKVPVLLRINPDVDPQVHPYVATGNKTSKFGIRNEKLQWFLDSIKSYPNEIKLVGVHCHLGSTITKVDIFRDAAVLMVNYVDEIRAQGFKLEYLNIGGGLGIDYHHTNAVLPTPMDLINTVRELVLSQDLTLIIEPGRSLIANTCCFVNRVTGVKSNGTKNFIVVDGSMAELIRPSLYGAYQHIELVSPPTPGAEVATFDIVGPVCESADFLGKDRELPTPDEGAGLVVHDAGAYCMSMASTYNLKLRPPEYWVEADGSIVKIRHGEKLDDYMKFFDGLPA

SEQ ID NO: 37582 - protein, 200 aa, Zea mays
  Clone ID: LIB3061-032-F11_FLI.pep
QQPIAQLQQQSLPHLTIQAITTQQQQQFLPALSHLAMVNPAAYLQEQLLASNPLALANVVANQQQQQLQQFLPTLSQLAMVNPAAYVQQQQLLSSSPLAVGNAPTYLQQQLLQQIVPALTQLAVANPVAYLQQLLPFNQLTLSNSAAYLQQRQQLLNPLVVANPLVAAFLQQQQLLPYNQFSLMNPVLSRQQPIVGGAIF

SEQ ID NO: 37583 - protein, 448 aa, Zea mays
  Clone ID: LIB3960-022-A8_FLI.pep
SLSWFYKRPAAKRLMMGAKKKIPFVIMTSDDTNALTIKLLESNSYFGMEPSQVKLLKQEKVACLADNDARLALDPSDKYKIQTKPHGHGDVHSLLYSSGLLEQWKSEGRKWVLFFQDTNGLLFNAIPSALGVSATKGYNVNSLAVPRKAKEAIGGITKLTHVDGRTMVINVEYNQLDPLLRATGYPDGDTNSETGYSPYPGNINQLILELGPYIEELKKTHGAISEFVNPKYTDSTKTSFKSSTRLECMMQDYPKTLPPSTKVGFTVMDTWLAYAPVKNNPEDAAKVPKGNPYHSATSGEMAIYRANSLILRKAGAQIADPVVDTFNGQEVEVWPRVTWSPRWGLTFQSVKEKVHGSCSVSQRSALVIDGRSVFLDGLSLDGTLIVNAVDGAEVKVTGHVENKGWTIRHVDYKDTSEKEEVRIRGFKFNKSEQLEVNYTEPGKHSLSA

SEQ ID NO: 37584 - protein, 209 aa, Zea mays
  Clone ID: LIB3061-035-E2_FLI.pep
KDNLQTMTPLEWWRSYGGRAIELQRFARRLVSLCASSSGCERNWSTFEFIHTKKRNRLLHKRLNSIVFISYNRKMKARFQKLRQKKGKNFDPLVHEDFNWDNEWADSLHVVPEGGRGCECDLTWDLVDNAIGASQALRGRNLPRRAHNVYSRRNSVAAQNMSEAEEEDEDEDVPHDDAEITDCEDESNGGNDGEEGEAPNIPGEFDDDF

SEQ ID NO: 37585 - protein, 112 aa, Zea mays
  Clone ID: LIB3637-199-D7_FLI.pep
EKTRNSMQKAPSSTSMTSKLPLCFSQFLITPTRPVFLPPVTMTTLLTSNLKKYMITRIGYHGDSTSGSHGMPVCNDLIVCSGNSYAGTQNSFKRPPLHIPVIAQNWWLLDLP

SEQ ID NO: 37586 - protein, 240 aa, Zea mays
  Clone ID: LIB3061-057-A1_FLI.pep
ESSVYDERQPKRRKRNIMNSEQIDELEKALVDEPEMHRNPVLLQGWSEKLSLQGPEITSSQLKNWLNNRKAKLARIAKERGTFEGDNADKPSTPHPGESSESAGEDNYIPPARVMTAPSKGRLVSPDGNEKTSQAELSPNTMLIRPFTRSFSLEPGRLVSLVDSDGKEVGRGKIFQAPGKSPAPVESRICTVDVTELRTEKWRELPHPSEASGRTFQEAEARNGGIMRVSWDSGRLLPVV

SEQ ID NO: 37587 - protein, 39 aa, Zea mays
  Clone ID: LIB3062-003-B7_FLI.pep
TVIQINISSSYSSLAKKCQTSEKQYIYLSNEISSTKRIS

SEQ ID NO: 37588 - protein, 339 aa, Zea mays
  Clone ID: LIB4073-013-B2_FLI.pep
VWLMAAKEKWLAGDVPAARAILQEAYAAIPNSEEIWLAAFKLEFENNEPERARMLLAKARERGGTERVWMKSAIVERELGNVGEERRLLEEGLKLFPSFFKLWLMLGQMEDRLGNGAKAKEVFENGLKHCPSCIPLWLSLAGLEEKVSGLSKSRAVLTMARKKNPATPELWLAAIRAESRNGNKKEADALLAKALQECPTSGILWAEAIEMAPRPQRKGKSTDAIKRSDHDPHVIATVAKLFWLDRKVDKARSWLNRAVTLAPDIGDFWALYYKFELQHGTVDTQKDVLKRCVAAEPKHGEKWQEVSKAVENSHLPVEALLKKAVVGLHVEENLNPAGA

SEQ ID NO: 37589 - protein, 457 aa, Zea mays
  Clone ID: LIB3632-002-A6_FLI.pep
KNHPSPYRCYSCTRALPPGAAAYDPDMNRAHSSSSKLINEKLVEHRISTAKHCPHCGEKIDSKPDWVGLPAGVKFDPTDQELIEHLEAKVKDEGSRSHPLIDEFIPTIDGEDGICYTHPEKLPGVTRDGLSKHFFHRPSKAYTTGTRKRRKIQTECDVHKGETRWHKTGKTRPVMVNGRQKGCKKILVLYTNFGKHRKPEKTNWVMHQYHLGDLEEEKEGELVVCKIFYQTQPRQCSWSSDRGAAATALAATAAAAAAQEQHRRDSGSGSCSSRDHEVSATSFPAGYTVTTAVEMQQHMKQPADHFSFAPFRKTFDQEVGIGGDQVPSNQLGRSEPHHAGLGQQPHGPVLATKTAVPATAFLISRPSNPVSTIVPPAMQHASVVLDHDQFHVPAILLHHHDKFQPQQKLDRRSAGLEELIMGCTSSTSTKGDASIAHPQETEWPYTYWPPDNQDHHG

SEQ ID NO: 37590 - protein, 262 aa, Zea mays
  Clone ID: LIB3062-016-D9_FLI.pep
GCDGSVLLDAVPGVANSTEKLAPANNNSARGFPVVDKVKAALEDACPGVVSCADILALAAEISVELSGGPKWAVLLGRLDSKKADFKSAENLPSPFDNLTVLEQKFAAVGLHTVDLVALSGAHTFGRVQCQFVTGRLYNFSGTNRPDPTLNSGYRAFLAQRCPQNGSPSALNDLDPTTPNLFDNHYYTNLEVNRGFLGSDQELKSAPQAQGVTAPVVDQFATSQAAFFSSFAQSMINMGNIQPLTDPAKGEVRCDCRVANDD

SEQ ID NO: 37591 - protein, 182 aa, Zea mays
  Clone ID: 700258532_FLI.pep
TLDYCVLSRPAGSRVIGPSGSVDVLDATQLRRRPRPRHVDGDHAVLVRELGLVAVHLAEPGRRRRVRHQLPCALHEHLCRDAASIFLGLERLHGAGGVEHVGESDGRELDGPLVRDDAHGGDDEELVGEGLQREVDALVGAQQLQRPGLDRVHGELGDALDADAWSRFAALPFDVGRRGARG

SEQ ID NO: 37592 - protein, 103 aa, Zea mays
  Clone ID: LIB3062-027-F12_FLI.pep
SRELLVAVASGWDKHVVIIDKIIPQAWKDEPVARILELCILHIAMAEMASKGTPHKVVINEAVDLAKRFCDGGAPRVINGCLRTFVKDHVDVAGTSQEAKSKS

SEQ ID NO: 37593 - protein, 143 aa, Zea mays
  Clone ID: 700259393_FLI.pep
TQHAAKLNKRHNEHTYIADWQVVLCTSGGDVAIGHLYEATCLFVRSRGQLCSAAHSATPAEHTGTCMVAFLQFLGQPVWRLVTAFFLPLWLVTTSASTFFLLPPPFFFLLPLSFFLLASPCTLLLLFLSPPLLLLLLPGPLFF

SEQ ID NO: 37594 - protein, 173 aa, Zea mays
  Clone ID: LIB3062-029-A6_FLI.pep
TKEQLGYTVDSSPRMTYRMLAYCFRVMSSKYSPIYLQSRIDNFIDGLSALLDELSEETFEHHRSGLIADKLEKEPSLSYQTSDYWSQIADKRYMFDMSKLEAEELKTVQKADVIAWYNTYIRSSSPKRRRLAIHVYGCNSDIAEAAKLQEQSWTIIDDVESLKASSQFYSSLC

SEQ ID NO: 37595 - protein, 242 aa, Zea mays
  Clone ID: LIB3062-032-E9_FLI.pep
PFKPPSFMLLTPSGRFEIQKKICLSISNYHPEHWQPSWSVRTALVALIAFMPTNPGGALGSLDYKKEDRRALGIKSREAPPKFGSPERQKLIDEIHEQMLSKAPPVPQTLPNVPNEESNELPASDPSGEHADKVDEGDNTSGSVSDSSSGLPVPESESGVTENTGETSAVEVANHHVPEASHRENIPRVSSSHQNPAVAIQKPKHDRLLTLAAFGLTLAIMALVIKKFLKINGLGGFIEGKF

SEQ ID NO: 37596 - protein, 89 aa, Zea mays
  Clone ID: 700239751_FLI.pep
RRGRNKMSSKKATNRGLVLVLLLVVLPALSVATHAGERELPDEKDHKGHSTVASGKGGTASGDMVKTNDYGRYDPTPAFSKPRSKLIPN

SEQ ID NO: 37597 - protein, 180 aa, Zea mays
  Clone ID: LIB3062-047-A2_FLI.pep
DANAAPDSDNLRIRRYIAKYTINPAIVNGFSDFVGSVEVGKLADLVLWKPSFFGAKPELVVKGGAIAWANMGDPNASIPTPEPVVMRPMFGAFGKAGSSNSIAFVSKAAKEAGVATEYRLEKRVEAVGRVRGLTKLDMKLNDALPKIEVDPETYTVTADGEVLTCQPAPTLPLSRNYFLF

SEQ ID NO: 37598 - protein, 218 aa, Zea mays
  Clone ID: 700161731_FLI.pep
QRRVNGGSSQASAAQLTIAACARRQSDPESPAMPISQSIRSVPSVLGRRHLEEPAGQRGDERRLEAGVPRQRHGHLLREVPPDELRRRRGHGRLAFHRANRLLLLVLLDLLVVERRRSGGDRPRRRRRLLAGARAGAVVRRLRLWRGLAVVMVALVRGDQDGGVVGAALHLLLDWAGRGEGAAEVGPRAGVVLGDLLPVLAPLVPVLDHQAEVGRVGV

SEQ ID NO: 37599 - protein, 74 aa, Zea mays
  Clone ID: 700337421_FLI.pep
KKYRMQKNAGHSWCIRFLKLLPQIQGNLFVVKMSTNGSSPCNHLYLSYYLCLPCNFYGNVWLLCLKLFAYFFFL

SEQ ID NO: 37600 - protein, 95 aa, Zea mays
  Clone ID: 700337606_FLI.pep
FVKEAIYQLRPKRKRKTTDHDRVLSHDDRRTSDTRVSFTRRDRHRDSASRQTNANENIAVTSLQASVFLKLQSALSNSHAIKPCTRREVSAASPR

SEQ ID NO: 37601 - protein, 367 aa, Zea mays
  Clone ID: 700350763_FLI.pep
GGYGYNQGRYGNYQENGGMLSHSSTVEKLYAWEKKLFLEVKSYEGYKQEHDKKVSLLRKQEVKGVDYLKMEKNKMEIESLESKMLVANQSIETTTSEIIRLRESELFPQLLELIAGLMSMWRGMYECHQVQTHIVQQLEYLNNARNTNPTSNVHRQAALQLEIEVDRWYSAFCSLVKSQRDYVYSLTGWLRLSLFCHHDPLTKAQNSDIYGLCEEWQLAIDRIPDKVASEGIKTLLTVIHAVVIQQAEEHKQKKRAESAFKEFEKKAEELRALESKYVGAEGYREMSRKSSVADKRAKVEALRSRADEEKIKYEKSIGVTRAMTLNNLQTGFPNVFQAMTGFASVCMEAFESVYNFKRSSDPKRLLT

SEQ ID NO: 37602 - protein, 431 aa, Zea mays
  Clone ID: 700611403_FLI.pep
CPSAPSESEKNVRSKCLNGITSAKVAEQIMDNALRITDASSRRPTNLGKDLAMTEPAADRKCQSLVMENNAVKEKNPGEKSKSAVIGHADSYPSQFLETNLGKQQYRNGYKNQEFREKDIFNHSNSSAFSRYGNRRIESSGEIQFLPSRCIVGQEQHVHGKDPVFQPNGVLLPPNDHNTGESTRQARITLDSSMEGADIICSSSAREDAGASSSSHRKDSMSHPSYGFVPVPIPVGAMMPYHCGAILQPVYYPQGPLMHCNSSAINKATIHQTSGQSNYREDCGSGRPSQVDEHKQSEEKHQLHHSRQIHRESGQPVDMVRAHMDHANQSASCSRDICKGSGCTGSGEADTNANTTVALESGNESGIQNSDRSHREAALMKFRMKRKDRCFDKKVRYHSRKKLAEQRPRVKGQFVSQKLKAAMATEAETDS

SEQ ID NO: 37603 - protein, 129 aa, Zea mays
  Clone ID: 700445879_FLI.pep
ALKLSFGGSNQFIYVQTWFFIVVVTICCLVQLNYLNKALDSFNTAVVSPVYYVMFTILTIVANMIMYKDWASQTATQIATQLCGFVTIVAGTFLLHKTRDMGNPPPPPPDQMCLQEAGECAPRSMTSSS

SEQ ID NO: 37604 - protein, 385 aa, Zea mays
  Clone ID: 700446664_FLI.pep
LIHRSPSPIAMPAASWSAPTTSFAPAPAPPWGPWRTKAAPLPIRTLPRRVLLNAVGESAMVAAGDTLLGLYEKERLGLLQYADDESKEERYWETLDADLRYWTRSLRPVQWYPGHIAKTEKELKEQLRLMDVVIEIRDARIPLSTSHPKMDSWLGNRKRIIVLNRKDMISTEDMNAWATYFGNQGIKVVFSNGQLGMGTMKLGRMAKSVASVANTKRKEKGLLPRPVRAGIVGYPNVGKSSLINRLLKRRMCPAAPRPGVTRELKWVRFGTDLELLDSPGILPMRISDQTSAIKLAICDDIGERSYDFADVAAILVQMLIRHPAVGSEAFRRRYKIDVDSECGKTFVTKLSVHLFNGDTSQAAFRILSDYRKGKFGWVALERPPT

SEQ ID NO: 37605 - protein, 77 aa, Zea mays
  Clone ID: 700456303_FLI.pep
LAHCFQRHPTYTVFLLVQPPENWNGGVGFVSKEMIQSHCPAPAEDIQILRCGPPPMNKAMAAHLDELNYTKEMQFQF

SEQ ID NO: 37606 - protein, 247 aa, Zea mays
  Clone ID: 700548596_FLI.pep
ELSSDSSQHVRSALASVIMGMAPVLGKDATLEQLLPIFLSLLKDEFPDVRLNIISKLDQVNQVIGIDLLSQSLLPAIVELSEDRHWRVRLAIIEYIPLLASQLGVGFFDDKLGALCMQWLEDKVFSIRDAGANNLKRLTEEFGPEWAMQHIIPQVLEKINNPHYLYRMTTLQAISLLAPVMGPDITCQQLLPVVIASSKDRVPNMKFNVAKVLQSLVPILDQSVSCSHQLCCCDPIFINIWLFACPN

SEQ ID NO: 37607 - protein, 224 aa, Zea mays
  Clone ID: 700581504_FLI.pep
CVAVMHELRLIHTDLKPENILLVSPEYIKVPDYKVSSQSPKEGSYYKQLPKSSAIKVIDFGSTTYDQHDQSYVVSTRHYRAPEVILGHGWSYPCDIWSVGCILVELCTGEALFQTHENLEHLAMMERVLGPLPYHMLKRADRHSDKYIRKGRLNWPEGCTSRESMKAVMKLSRLQNLVMQNVDQAAGDFIGLLQGLLKYDPASRLTAREALRHPFFTEGFGRRR

SEQ ID NO: 37608 - protein, 122 aa, Zea mays
  Clone ID: 700582606_FLI.pep
NDSMIAPAYQHVATTMRDRRSVPRDSKMMPRTTNAGGHQLVHVQGHSSYPRRQNGEACPGEPGRARLEAEFCRDLGARVRSDGGSEEDDPECLPDCLTVLNTCVCMHVSAIVFTEKSETGQP

SEQ ID NO: 37609 - protein, 40 aa, Zea mays
  Clone ID: 700613088_FLI.pep
QHDEKLTSKHINFCLKRGCRPYRTLLATHQHIIGNPSAYM

SEQ ID NO: 37610 - protein, 265 aa, Zea mays
  Clone ID: 700615917_FLI.pep
LLVMGPSGSGKTSLLRALAGLWTSGTGEIIYHVRGSTQLQKPNPSSDKPSSMNLKGEEESLQSSKQRRDNGIFFVPQRPYMVLGTLRQQLLYPTWTEEVQHSPDNDDKNSDPLPFLSEVSTSDLVGAKSEVPSTAELIEVLEDVKLGYILPRFNGLDSTHDWASVLSLGEQQRLAFARLLLATPTLVLLDESTSALDEANEAHLYSQIEAAGITYVSIGHRKTLHKFHNKALYISMSDSTDTNPRNWELKPADKLPAEEPSQFPS

SEQ ID NO: 37611 - protein, 325 aa, Zea mays
  Clone ID: 700616895_FLI.pep
LDEEMSADPSVFLMGEEVGEYQGAYKISKGLLDKYGPDRVLDTPITEAGFTGIGVGAAYHGLRPIVEFMTFNFSMQAIDHIINSAAKSNYMSAGQISVPIVFRGPNGAAAGVGAQHSQCYAAWYAHVPGLKVLAPYSAEDARGLLKAAIRDPDPVVFLENELLYGESFPVSAEVLDSSFCLPIGKAKIERQGKDVTITAFSKMVGYALQAADILAKEGISAEVINLRSIRPLDRATINASVRKTNRLVTVEEGFPQHGIGAEICMSVVEDSFEYLDAPVERIAGADVPMPYAANLERMAVPQVDDIVRAAKRACYRAAVPMAATA

SEQ ID NO: 37612 - protein, 223 aa, Zea mays
  Clone ID: 700617436_FLI.pep
ADDIFLTDGATSAINLMMQILIRSHEDGILSPLPEYPLYSASIILHGGTMVPYNLTEDNGWGLEIFEVKRCLEEARSAGLTVRAMVVINPGNPTGQVLSVTNQEEIVEFCRKEGLVILADEVYQENIYAENKKFHSFKKVARSLAYDENDLTLVSLHSVSMSYGESGRRGGYMEVSGVAANVKDQIYKVASLTLCPNIAGQILVSLAMDPPKNFPCDLYAARR

SEQ ID NO: 37613 - protein, 275 aa, Zea mays
  Clone ID: 700623983_FLI.pep
PATLPPVAAGLWRLCDRISSPLRLPRPTHLMFLSRIVLRDLDSIDSPASMASSKKVVTRDEWELKLRDVKIRKEDMNRLVMNFLVTEGFVDAADKFRIESGTQPEIDLATITDRMEVKRAVQSGNVQEAIEKINDLNPTILDTNPQLYFHLQQQKLIELIRVGKINEALEFAQEELAPRGEENQTFLEEIEKTVALLVFEDVKNCPYGELLDVSQRLKTASEVNAAILTSQSHEKDPKLPSLLKMLKWTQNQLDEKAAYPRINDFTTAALEDPSI

SEQ ID NO: 37614 - protein, 48 aa, Zea mays
  Clone ID: 701161651_FLI.pep
WRKRCQASGVLYDKMVPQKLKGKFYRMTIRSAMLYGAECWLTKDIIFS

SEQ ID NO: 37615 - protein, 420 aa, Zea mays
  Clone ID: 701164538_FLI.pep
SVVPAVDSPPTSVAVDCSSVTPHSLLRFLAARFLLPDPPLASRFMAMWRAAARQLVDRALGSRAAHTSTGSKKIVGVFYKAGEYADKNPNFVGCVEGALGIRGWLESQGHQYIVTDDKEGPNCELEKHIEDMHVLITTPFHPAYVTAERIKKAKNLELLLTAGIGSDHIDLPAAAAAGLTVAEVTGSNTVSVAEDELLRILILLRNFLPGYQQVVQGEWNVAGIAHRAYDLEGKTVGTVGAGRIGRLLLQRLKPFNCNLLYHDRLQIDPELEKEIGAKFEEDLDAMLPKCDVIVINTPLTEKTRGMFNKERIAKMKKGVIVVNNARGAIMDAQAVADACSSGHIAGYGGDVWFPQPAPKDHPWRYMPNHAMTPHISGTTIDAQLRYADGVRDMLNRYFKGEDFPVQNYIVKEGQLASQYQ

SEQ ID NO: 37616 - protein, 105 aa, Zea mays
  Clone ID: 701164553_FLI.pep
LFNGSQPTAAFFIAHNNFFHRPNRPIDLFVTSRSCMAGPGRFMTARFLRQRSSAAIVFFKKNVLPRPLPVSHHVCCDFYPADVVYYNILQYFVSIYYSCSSSNSS

SEQ ID NO: 37617 - protein, 189 aa, Zea mays
  Clone ID: 700240012_FLI.pep
QSKTSLTNSHQSRPSERSLLEGQTTRTSRSVAAADNGFGRTISWKSLDMAIRHMDIRQNLGGIRGASLFPHSIRSTTTKSRPARASDPGHCISNGDRCFTDNGSSNGHFSGDSNGTLSHNGGSSIGSPDSGKKEVLSELDIYANSRYDAMLLKEDSKNMSWLHSVDDKSDQSPVFDHRFEPLPEPFGPL

SEQ ID NO: 37618 - protein, 447 aa, Zea mays
  Clone ID: LIB143-030-G7_FLI.pep
IGLTWLDHGMAMAASCFSGEIANNATADVTVDEYHRYKEDVNIMKNMGFDAYRFSISWSRIFPNGTGEVNWKGVAYYNRLINYMVKKGITPYANLYHYDLPEALEVRYGGLLSREVVRSFADYADFCFGAFGDRVKNWLTFNEPRVVAALGYDDGRFAPGRCTGCEAGGDSGTEPYVVAHHLILSHAAAVQRYRRRHQPTQRGRVGILLDFVWYEPLTADSAADRAAAQRSRDFHVGWFLHPIVYGEYPKSVRRSVKGRLPKFTAEEAGLVRGSIDYVGVNQYTAYYVRDRRPNATAAPPSYSSDWHAEFVYERDGVPIGPRANSDWLYIVPWGLYKAVTYVKEKYGNPTMLLSENGMDDPGNVTVGQGVRDAARVAYYRSYVAELKAAIDGGANCVGYFAWSLLDNFEWKLGYTSRFGLVYVDFRTLRRYPKSSAYWFRDVIAGTN

SEQ ID NO: 37619 - protein, 55 aa, Zea mays
  Clone ID: 700223165_FLI.pep
RFRTSANKSRQMIQKSRIIKQIWFNYKGRPESLVVAHVTHLCQPKQCEHYITYYM

SEQ ID NO: 37620 - protein, 279 aa, Zea mays
  Clone ID: LIB143-059-F4_FLI.pep
VGRLRLLVVGGGELLVGVGDEEQLVDDAGEAAADEGPDPVHPLVAPLPADEGGAEGHGGVHGRAVEGAAHQDVGPHDEADGNGGDGAQAALLRVHRRGVHRVHQPEGHHDLQHQRLPHRHARQPEGARGLPARREAEQEARHGGPQQLRHPVQEPPEQGDVAAHEGAEGHGRVHVPAGDVRAHRHRHEQRERVRHRRRDQARRGRRAAAGQLAEGHAGALAGEDEDEGGDELSERRLEGARVVHLLVAPQGDPIDRHFHGPLASSRALVTTVIGAGVEL

SEQ ID NO: 37621 - protein, 96 aa, Zea mays
  Clone ID: 700265286_FLI.pep
HECTTRRLRSSNEHVLGKNCHRLPAPATVGIRSSRQADELLADLPELLGLVGVAGLLRELVLEGRRVLVPAPVHAGLGQAGVAHDLRQPLPGLLLG

SEQ ID NO: 37622 - protein, 101 aa, Zea mays
  Clone ID: LIB143-059-G1_FLI.pep
KQVVITLAFSSGLFGTAYKLFMAKLNAFLQLILVALSPTIPFVLKSRWVKPTYFDCVLLHLCSFSTKRFLYTSEERPLCKQDCDASELSDHLNPNPSVGHI

SEQ ID NO: 37623 - protein, 76 aa, Zea mays
  Clone ID: 700265413_FLI.pep
ASTTGSNKSHIYSYLFPAIGIVSSVLISWRIKQYSSALAVPEELQSSPTNGDHNGDAKLASAPSKNTGSGKTRKRR

SEQ ID NO: 37624 - protein, 111 aa, Zea mays
  Clone ID: LIB143-064-D4_FLI.pep
TPQVQIIYCRHQKPHLCHRKDYGTMFKIPVTSTRYSIDALKLPTITPWHAWYDDDGEVGGWTQGYRGLNFVTVRGAGHEVPLHRPKQALTLIKSFLTGSPMPVQSSTHSNM

SEQ ID NO: 37625 - protein, 503 aa, Zea mays
  Clone ID: LIB148-019-F8_FLI.pep
PGKPMPKTIKLTNPVGFRCPAPNHKDSVMYVCCVKDRKFKAKKANSTRYQTRRKADLTFAYDVLQANTNNYQVQVTIDNWSPISRLDNWNLTWEWKRGEFIYSMKGAYTLLKEGPACIYSPAAGYYKDMDFTPVYNCEKRPVIVDLPPEREKDDAVGNLPFCCKNGTLLPPTMDPSKSRAMFQMQVYKLPPDLNRTALYPPQNWKISGKLNPQYACGPPVRVSPQEFPDPTGLMSTTPAVASWQVACNITRPKKRASKCCVSFSAYYNDSVVPCNTCACGCGDDTATCDPDKRAMLLPPEALLVPFDNRSAKARAWAKIKHWRVPNPMPCSDNCGVSINWHVINNYKSGWSARMTIFNWQDYTFKDWFAAVTMGSHFSGYENVYSFNGTRMGAPFNNTIFMQGVPGLAYLEPITDAKTTSEPRLPGKQQSVISFTRKDAPNVNIPRGEGFPKRIYFDGEECALPDRIPKVSSARRRAGTASLGQIAMAAALVMIVALVDSLCL

SEQ ID NO: 37626 - protein, 232 aa, Zea mays
  Clone ID: 700235149_FLI.pep
RAASCLLITVLLSASTCRKQGMWNSRSHFAGGQDNDGNDDQPYGYGYGGGQQYEATGGKKRASSRLKKSSGSKKDDEYTKYAGNSNEADDNRRNRPNDDNNYNGGGGNHYSGAGAAIGAPYYGAAGAGGYGSSSPYYGNAAVHGTGGDGGGGYAPYNNAPAAFWAPQDGTRSPMFISTREVHVYGAPGGYDNYDGSNNDDRQRRRGGGGFFGPAFHAVGRFFDRKFGFSDRD

SEQ ID NO: 37627 - protein, 277 aa, Zea mays
  Clone ID: LIB189-002-D5_FLI.pep
LAAQGAFRGFLDTRTPLYAVGAGNLLNALLDVVLIFPLGLGVSGAALATVTSEYLTAIILLWKLNDEVDLLSWNIIEDGVIRYLKSGGLLIGRTIAVFLTLTLATSLAAREGPVPMAGYEICLQVWLTISLLNDALALAGQALLASEYAKGNYKQARTVLYRVLQVGGVTGFVLAASLFVGFGSLSLLFTDDPAVLDVARSGVWFVTISQPVNAIAFVADGLYYGVSDFAYAAYSTFFAGAVSSIFLLLAAPNYGLGGIWAGLTLFMSLRAVAGFWR

SEQ ID NO: 37628 - protein, 244 aa, Zea mays
  Clone ID: 700236916_FLI.pep
GKRGKSGLVALNLDFSFLEMNPFTMVNGEPYPLDMRGELDDTAAFKNFKKWGGIEFPLPFGRVLSPTESFIHELDEKTSASLKFTVLNPKGRIWTMVAGGGASVIYADTVGDLGYASELGNYAEYSGAPNEEEVLNYSRVVLDCATADPDGRKRALLIGGGIANFTDVATTFNGIIRALREKESKLKASRMHIYVRRGGPNYQSGLAKMRKLGAELGVPIEVYGPEATMTGICKQAIECIMAAA

SEQ ID NO: 37629 - protein, 186 aa, Zea mays
  Clone ID: LIB189-009-D12_FLI.pep
RLTYQTFPTPMDSQVFSKIKPGPNQTEHLRLLQLGPGPNDSNRIPWLKGTKLPLDADRQTSSAPGESACKCNHTNYSAGAVSALVSVTLPESVDSDLPLPSDLPSLTVSFASNPAVEPPSSPSLPSFFVSDSAISSTNSLNFLQFSTEPNLMANISSLSSPSAKSAACQTHDLSLPACSCIFVVEA

SEQ ID NO: 37630 - protein, 308 aa, Zea mays
  Clone ID: 700238884_FLI.pep
VLPPRKQIVKSMLRKNPEHRPTAGELLRHPHLQPYLSESSNCSPIYLPVKPTKGNLVDKQSKKPSSGRKRAVKANGSNGTLETAAEHAVEARDSSTNFSDVSTIGTQEALILQMPVDPDAGSKEEQNVDVVPFQHAAENLMATTDRQVDATIRLKAIRTSNAKEAAPVTVADQKFNEAPIPNEELTIGVVQEQRKDVKPRSYQAGKPEMCDTTVTEESSPISTLKLAHTESAPAEWDHLNIVQQRADALESLLELCAKLLEQERLDELAGVLRPFGEGAVSSRETAIWLTKSLMTPPPKFGESPTKLL

SEQ ID NO: 37631 - protein, 357 aa, Zea mays
  Clone ID: LIB189-018-H7_FLI.pep
RMFSYEELKLATSNYSPDMLIGKGGTSQVFKAQLDGGTFAAIKILKPSVDAIHEFVTEVETVTSLQHENIVALRGFSFENYNLVLAYDYMPRGSLDKALHGKNDGTEFLVWERRIKIAIDIARALEFLHLGGVTQSVIHGDVKSSNILLSEDFGARLCDFGLAKRVSASTPHLTCTDITGTFGYMAPEYFSHGEVNEKIDVYAFGVVLLEIVSGRRPITPGSAKGQESLVGWAKPLLSSGGIKHLVDPFLGNDYDCDEMERMTLAASLCTRTSWHSRPEMSLVLKLLQGDDETMGWARSASFDGSDEEAIAAGPDLNMQSHLSLALLGVDADDTLSRCSSTERTSADGYWSRSSSFD

SEQ ID NO: 37632 - protein, 229 aa, Zea mays
  Clone ID: 700239267_FLI.pep
HVYSYNDDAYSYVGMCVYTVRYPASRRRRAEGVREKDSWVEDWRVGVGPVEPSLGDVAVGGLGEVGAVPAPVVGGVLARVRPRLAALGRQVEVVLPHSRRPAAGPRRLPQHAVLLSVEDEPDGGRVVVGVDDAHVGVPGAELLHLALQRRVVHPRQRVELPVAPAAGPVRRGRLADEGGQEHGEAAGGEQPRHHQVRGPLRDQLLHAPRDDVHHMRHQRVHLLQRPERA

SEQ ID NO: 37633 - protein, 390 aa, Zea mays
  Clone ID: LIB3060-002-F8_FLI.pep
GIMFLAGSVINAGAVNVAMLIVGRILLGFGVGFTAQAAPLYLAEISPTRWRGGFTTAYHFFLVAGTLAANVANYVTNRIPDWGWRVSLGLAAVPSAVIVMGALLVSDTPSSLVLRGEPYAARASLQRVRGAGADVEAELKDIICAVEAARRDEEEGAFRRLRAEGYRHYLVMMVAIPAFFDLTGMVVISVFSPVLFRTVGFDSQRAIFGAVIISLVSLCGVALSTLAVDRCGRRFLFLAGGTAMLLFQVAVSWVLADHLGKHQAVTMPKNYAMGVVVLVCLYTFSFSMSWGPLKWVVPSEIYPVEIRSAGQAITLSVALTLSFTQTQVFISMLCAMKYAIFLFYSGWVLAMTLFVAAFLPETKGVPLETMRSVWARHWFWRKFVVLDAAR

SEQ ID NO: 37634 - protein, 184 aa, Zea mays
  Clone ID: LIB3060-051-C3_FLI.pep
HALTVLPPPPMALPPGAGAVAPATPFAANPCRLRRASGPPAAALRLGPLFWPWEKVKIGPLSVSPMGFGTWAWGNQLLWGYQESMDNELQDCFNLALRNGINLFDTADSYGTGRLNGQSERLLGKFILEFEGRIKSPDDVVIATKFAAYPWRLTSGQFVSACKYSPDLFVSCLLWKDYNLIGSG

SEQ ID NO: 37635 - protein, 162 aa, Zea mays
  Clone ID: 700239287_FLI.pep
KDLMLSKLQILIGTADRAALEEELEEAAASIDQLETELERHLQEKLEAEIQCLLMLKARQNWQVRAVDQVALEEHRALSAGDKTRMLLKLRETESKIVMLKEQVDKLEVREKELNRTTEVLKMQSRTFRASLFGLVQLVMLCLSLKVFFARVSAPFDEVVPT

SEQ ID NO: 37636 - protein, 274 aa, Zea mays
  Clone ID: LIB3060-053-E2_FLI.pep
MYLGSVTGLAFSPLLIHKFGWPSVFFSFGSLGLVWFTTWATKAYSSPLEDPGISAAEKKLIASQSTAGEPVKTIPWRLILSKPPVWALIVSHFCHNWGTFILLTWMPTYYNQVLKFNLMESGLICVLPWFTMAVSANVGGWIADTLVSRGVSVTTVRKIMQSIGFLGPAFFLTQLSHVNSPAMAVLCMACSQGTDAFSQSGLYSNHQDIGPRYAGVLLGLSNTAGVLAGVFGTAATGYILQHGSWDNVFELSVVLYLVGTLVWNVFSTGEKILD

SEQ ID NO: 37637 - protein, 167 aa, Zea mays
  Clone ID: 700615357_FLI.pep
QKLRLLLRPPPPRRLGPLHTDTAGELDVLGHDGDALGVNGAEVGVLEETDEVGLGRLLQRGDGGALEAKVGLEVLGDLTHQALERQLADQQLRALLVLADLPERDGAGAETVGLLHSAGRRGRLARRLGGQLLPWRLAASGLPRRLLRAGHRDSRKASALRCTRICC

SEQ ID NO: 37638 - protein, 212 aa, Zea mays
  Clone ID: 700619294_FLI.pep
LLAFVHPTRTSTISQHIHRRGGVEDTTKNPCKKGRPNKSVDAAGCSIAGELGDGLGSLGDGMFGELSWEDEAHGGLDLAGGDGGLLVVPRELGGLAGELLEYVVDEGVHDGHGLGGDADVGVHLLQDLEDVDFVGLHALLGLLLPLLLAALLAGGLRGRQALLGLGLLTCGRLLRLLLGRRLLLRWLLLGLGRHRVGFVGVEGDGGGLDAVG

SEQ ID NO: 37639 - protein, 224 aa, Zea mays
  Clone ID: 700621760_FLI.pep
QRATCSRTHTHTSTFVPSTAYASPHTGNKVLLNIRSHRTVSLCLLGGLSGLLGRLCLLAPATGRLLRRLLGQQNRVDIGEHTAVSDGHAAQQLPKLLVVPDRQKHVARNNASLLVVPGSITSELQNLSGEVFEDSGEVDGGAGADTLRVAALLQVAPDAADGELEPGLHGPRHRLLPWPADLAPGRSLLPLTPCSGAGGVHGRISASIGLSGTRRKCSGVGSNA

SEQ ID NO: 37640 - protein, 134 aa, Zea mays
  Clone ID: 700257619_FLI.pep
RQSIYRTKLLQHYGSIWYIYIIFFSNNHVNRSSGREDRQHGRLLSRRRDPLLQLFLLQLLLRHRLLLLWRERLLRIHIQRIVPHKEDQQEACNHKQNHHSWVQALVHLLNDHIVRRILELIRHGRRLINANTLL

SEQ ID NO: 37641 - protein, 91 aa, Zea mays
  Clone ID: 700258230_FLI.pep
PAQECCYFPSSGIQNLQTWPAEYCFTIPINVPSVNTDCVIITCLGRLGLRRKRTSRFTGSKGPVNACALYCVPQHIGELEASTVASHCLLI

SEQ ID NO: 37642 - protein, 354 aa, Zea mays
  Clone ID: LIB189-026-F3_FLI.pep
GQCSLPSPKTNRRAANTHARTETSQSNNGEGSVLREDGAEEGAMDARGGQGPGRPHPELRPQQLARAAQASRLAAVRQELPAPVDQLPAPGHQARQLQQGGGGRHHQPPRAARQQVVRHRRQAARADGQRDQERLAHAPQEAPGSHQAGTAAAARDDAGGWRRQEAQARGGGEARGRRSQEGDGRRRRRPGHRCAGVARTVRGLVVGDRVVHDGAGAGARQHGELARVPQGGELHHLLLGRRGVPVRRQLLVRDAVDAAGQPRRRRPHGALRRRVRRRRRRRGRRLLLVRRRRRRPGLLAQSVHGVRRRAPRTAADLDRSRENFRLLIDSSFFSLSLSLSARLASEGTDKDSIS

SEQ ID NO: 37643 - protein, 255 aa, Zea mays
  Clone ID: 700262211_FLI.pep
STWGRMTARRQLLVPMTSQLSSTGVLRLCSTSLHHHNGRWEARIGRVFGNKYLYLGTFDTQEEAAKAYDLAAIEYRGVNAVTNFDISCYLDHPLFLAQLQQEPQVVPALNQEPQPDQSETGTTEQEPESSEAKTPDGSAEPDENAVPDDTAEPLTTVDDSIEEGLWSPCMDYELDTMSRPNFGSSINLSEWFADADFDCNIGCLFDGCSAADEGSKDGVGLADFSLFEAGDVQLKDVLSDMEEGIQPPAMISVCN

SEQ ID NO: 37644 - protein, 168 aa, Zea mays
  Clone ID: LIB3059-045-B4_FLI.pep
QKRPLLLPPPPGRRLGPLPTDTAGELDVLGHDGDALGVNGAEVGVLEEPDEVGLGRLLQRGDGGALEAEVGLEVLGDLTHQALERQLADQQLRALLVLADLPERDGAGAETVGLLHSAGRRGRLARRLGGQLLPWRLAASGLPRRLLRAGHRDSTKGASALLRTRICC

SEQ ID NO: 37645 - protein, 324 aa, Zea mays
  Clone ID: 700264190_FLI.pep
RLALSLTLSSSPPWPGPGPTNRPAARPPTPVTPRREPRAIRPVDEGHLAISSSWALGRTATASRPSQGQAMVESSGHRSTVPAAVGFFRVPGLFVRLSGKGGASNAVDPEDSVWSPTSPLDLKHVIRCSPPRACLGLADALTADGTGSLHSGGRSSFVDSIKPFLERALPKAACGKEAAAAASSSAGVVAATLGKQASEYADCEEYTCVISRGADPRTTHILAGETVEVRRGDVGGGCRKVVFIIEPLALSDRQPRASSSSSPAAPARVVASGRCCCCMKRLLEDRDIFIYLGEKAFCSDECRNGFIEEAAEEELMILDPGRNL

SEQ ID NO: 37646 - protein, 237 aa, Zea mays
  Clone ID: LIB3062-051-C6_FLI.pep
KNWIKAMAMTASLFPFMCFGIGLVLNTIAIFYGSLAAIPFGTMVVVFILWAFISFPLALLGTVVGRNWSGAPNNPCRVKTIPRPIPEKKWYLTPSVIALMGGLLPFGSIFIEMYFVFTSFWNYKVYYVYGFMLLVFLILIIVTICVTIVGTYFLLNAENYHWQWTSFFSAASTAVYVYLYSIYYYHMKTKMSGFFQTSFYFGYTLMFCLGLGTLCGAVGYLGSTLFVRRIYRNIKCD

SEQ ID NO: 37647 - protein, 101 aa, Zea mays
  Clone ID: LIB3066-028-F10_FLI.pep
NKPEAVRSYEDTQVLTLGEARMCTFRISQHRFELQQFFASLSVEAAMAEVESVSRWIGDLRDRYPESSCHSLYLSLLKPEGPVLFVKHFVSSLLFVAYYIH

SEQ ID NO: 37648 - protein, 89 aa, Zea mays
  Clone ID: LIB3066-029-A11_FLI.pep
KKKGSYGQIPPPLGPASHLCPEPNGPYIQPCDPLKLLAWLSIRRLLLCVIARRDPPVRLPSHASPTPLLLGPTRQDLPLPEVDLDPNRT

SEQ ID NO: 37649 - protein, 336 aa, Zea mays
  Clone ID: 700264276_FLI.pep
IMFTTLCVQAKGSCSPLSTHTTLGFRLRGFVSVRCRRAQRRRGPGRCCLLPAKPPEVGDEADVHVPLHLLRQRRQDLHCVTGLQFSRNRTRTTYFGCLARARYRFGDAAQDGLWHEAQGRRQDAGDGDLQVAPHPAPAAPAPVGVQRPAHAEVEAGWRVADVQPPQLPLRDSEVEPAGAVPQLHDDDGAHGEEEELQRQHVDLPFPVADPLAPALVGEHGAEHARAVLDVLVEGDPGGFVEGRVRGDARAVGHGVRRRRRPRLGRTGLGPHCPPSCRWRWHPRPCVRRTASPHSCCCGWPASAAARARARARSRWDHQLPRPVTLRCVRRGGHGRP

SEQ ID NO: 37650 - protein, 176 aa, Zea mays
  Clone ID: LIB3059-049-E4_FLI.pep
QHRIRLQTLCLLGGLGGLLGRLGLLAPAAGRLLRRLLGQQDRVDVGQHAAVGDGHAGQQLPELLVVADRQQHVARDDARLLVVLGSVAGELQDLSGEVLQDGREVDGGTAADALRVAALLEVAPDAADGELEPGLHGPRHRLLPRPAGLATGRSLLRLPSSSSAGGVHGRSCASRV

SEQ ID NO: 37651 - protein, 269 aa, Zea mays
  Clone ID: 700266294_FLI.pep
GAGQMGSGIAQLAAAGGCAVLLLDADPTALSRAVISISASLRRLAAKGQLSQDLRDADLVIEAVVENEAVKKKLFVELDKVTKPSAILASNTSSISITRLASATKRPSQVIGMHFFNPPPVMKLIEIIRGADTSDEVFAAVRSFSERLGKSVICSQDYPGFIVNRILMPMINEAFWALYTGVATKEDIDAGMKLGTNHPMGPLQLADFIGLDVCLSVLRVLHSGLGDSKYSPCPLLVQYVDAGRLGKKRGVGVYSYGHRPSSVRPKSSL

SEQ ID NO: 37652 - protein, 96 aa, Zea mays
  Clone ID: 700340187_FLI.pep
TSQTNLRSGCQMGPSKCWSHWSPKGNGERPLRQTMASFPMARRQLRRLLATLLRIKSKDRLYSLSFSFSANFLITLTYLYVDAVRILSSFVVKRTE

SEQ ID NO: 37653 - protein, 74 aa, Zea mays
  Clone ID: LIB3059-054-B5_FLI.pep
PQDFMFLSRCLRWRLGPLAADPPCQLNVLWHDGHTLSMDGAQVGVLKQANKVCLSSLLEGKHRMALETQISFEV

SEQ ID NO: 37654 - protein, 283 aa, Zea mays
  Clone ID: 700345393_FLI.pep
RGLQVAVAGIPKTIDNDIAVIDKSFGFDTAVEEAQRAINAAHVEASSAENGIGLVKLMGRYSGFIAMYATLASRDVDCCLIPESPFYLEGEGGLFEYIDRRLKENNHMVIVVAEGAGQDLIAQSIPAADQQDASGNKLLLDVGLWLTHKIKDYCKSKKMEMTIKYIDPTYMIRAIPSNASDNVYCTLLAHSAIHGAMAGYSFTVGMVNGRHAYIPFHRVTSTRNKVRITDRMWARLLSSTNQPSFLSQKDIDAAREADKAANRTKSREDAKKQSTPVLANGEK

SEQ ID NO: 37655 - protein, 60 aa, Zea mays
  Clone ID: 700380722_FLI.pep
WVAQTIYEKGSKIVVDMACSIINMAIMEHRSEGLRFSWCKTDGRKLFPQFKTAPLILSCL

SEQ ID NO: 37656 - protein, 241 aa, Zea mays
  Clone ID: LIB3067-042-B11_FLI.pep
NIFLIDYGMLLKTCMVRYCRHNTVTFLHKRHQPSPESKRSGNYHRGNTPNRTTMVLLQEEETSARRIARLGASELGDGFGALGDGVLGELAGEDEADGGLDLAGRNGRLLVVPRQLGRLRRQLLEDVVDEGVHDGHGLGRDANIRVHLLQHLEDVDLVRLHRLLRLLLPLLLATLLARGLARREPLLGLGLLPRRGLLRRRLLLRRLLGGGLLLGLGRHWNTAAVSGWGFLSTRSGRRWLL

SEQ ID NO: 37657 - protein, 58 aa, Zea mays
  Clone ID: 700282050_FLI.pep
YYWNEIVPTFPERNERSRNEERGQVPGSRLLRSRSSQQPQQLFRIFDQCCKSEWSWRS

SEQ ID NO: 37658 - protein, 168 aa, Zea mays
  Clone ID: LIB3068-024-B6_FLI.pep
KRLLPTATPLISLDPDIPDPMAPKAEKKPAEKKPAAEEKAEKTTAGKKPKAEKRLPASKSSGKEGGEKKGKKKAKKSVETYKIYIFKVLKQVHPDIGISSKAMSIMNSFINDIFEKLAGEAAKLARYNKKPTITSREIQTSVRLVLPGELAKHAVSEGTKAVTKFTSN

SEQ ID NO: 37659 - protein, 180 aa, Zea mays
  Clone ID: LIB3068-046-G7_FLI.pep
NALPVRKANQPPVPPPPSVFASAADSKAPVLSPRKTLAPATMKGKADTSKKDEGRLRAGGAAGKRKKAAASGKPKRPPSAFFVFMSEFRQEYQALHPGNKSVATVSKAAGEKWRAMSDQEKQPYVDQAGQKKQDYEKTKANFDKKESTSSKKAKTEDEDGSKSEVDDEDGSSDEENDDDE

SEQ ID NO: 37660 - protein, 108 aa, Zea mays
  Clone ID: 700381024_FLI.pep
STNWNVYFKTVEIMGITDMYILNSIGEASPLPLTSKGYRIFIQRCEEVTGDVAGPPKTISTFLSSFFLTGVEHSLKSSTRASTMSIDGGLLVTCSCFKAVFSIFSLSE

SEQ ID NO: 37661 - protein, 174 aa, Zea mays
  Clone ID: LIB3069-003-G4_FLI.pep
FSNYDSQSSKPYQPFANSERDPMAPKAEKKPAAKKPAEEEPAAPAEKAPAGKKPKAEKRLPAGKSAGKEGGVDKKGRKKAKKSVETYKIYIFKVLKQVHPDIGISSKAMSIMNSFINDIFEKLAGEAAKLARYNKKPTITSREIQTSVRLVLPGELAKHAVSEGTKAVTKFTSS

SEQ ID NO: 37662 - protein, 105 aa, Zea mays
  Clone ID: 700355329_FLI.pep
TMMMRLESQRRLRVDIVAEGGAVEGVDLLQLEGAMVVIIMRWKKLVDMMMMDITHHLCNDMKVAEEGAEGVDAVVGGEGKAMDLLRSSRLVGTSPLGCHNLHFFP

SEQ ID NO: 37663 - protein, 169 aa, Zea mays
  Clone ID: LIB3069-049-E1_FLI.pep
ATSTNTTQPSTMSLRRSELGDGLGALGDGVLGKLTGEDEAHRGLDLAGGDGGLLVIARQLGGLGRELLEDVVDEGVHDGHGLGRDADVGVHLLQHLEDVDLVGLHGLLRFLFPLLALAALLTGGLARREALLGLGLLPRRSLLRLLCRGLLLCRLLRRRLLVRLGCHRR

SEQ ID NO: 37664 - protein, 108 aa, Zea mays
  Clone ID: 700356015_FLI.pep
LQPTSEALEELFPIAMAKPPLQTAAIILLVLLSAASCLHTVDAATLGFCWGKCSVRCAGATARQARAACMSSCGLCCEACNCVPHDIHDCPCYRNMLTAGPKKRPKCP

SEQ ID NO: 37665 - protein, 217 aa, Zea mays
  Clone ID: LIB3070-004-G12_FLI.pep
QRATCSRTHTHTSTFVPSTAYASPHTGNKVLLNIRSHRTVSLCLLGGLSGLLGRLCLLAPATGRLLRRLLGQQNRVDIGEHTAVSDGHAAQQLPKLLVVPDRQKHVARNNASLLVVPGSITSELQNLSGEVFEDSGEVDGGAGADTLRVAALLQVAPDAADGELEPGLHGPRHRLLPWPADLAPGRSLLPLTPCSGAGGVHGRISASIGLSGTRRKC

SEQ ID NO: 37666 - protein, 125 aa, Zea mays
  Clone ID: 700321640_FLI.pep
PQSYWTEYSLMRQSCISPSNFAVISSLSSCAGLKLLTAGQQVHCDAVKWGLDLDTSVSNVLVKMYGECGAMSDYWKVFNSMAEHDEVSWNTMMGVMASSQTPISEIVKVFNNMMRGGLIPNKVTF

SEQ ID NO: 37667 - protein, 286 aa, Zea mays
  Clone ID: LIB3062-022-D4_FLI.pep
VRMDPRNKEVNLDSLMYGTIGGLTEQELKKQEAEYIYRYRYNGGGATQVWLSSGRFVVIDLSAGPCTYGKIETEEGSVSYRSMPRLSQIIFPRGLAAPSASSTQDIFIGQLGGAIATTIEHVIAPDIRFETVDMAVRLLVPIIVLQNHNRYNILQEGHNYSIDVQAIEREVKKMVHPGQEVIIISGSHALHQHEKLAVAVSKATRSHSLHETKSDGRFHVRTKTYLDGAILKEEMERSADVLSAGLLEVANPSLSSRFFLKQHWTDGEDDVKDSIKHRPLWESYMP

SEQ ID NO: 37668 - protein, 131 aa, Zea mays
  Clone ID: 700321669_FLI.pep
LVIKSWAPQVDVLSNPAVGAFVTHCGWNSSLEAITAGVPMLCWPQGAEQKINKVLMTEAMGIGLELEGYNTGFIKAEEIETKVRLVLESEEGREIRTRAAEVKKEAHAALEDGGSSKAAFLQFLSDVKNIN

SEQ ID NO: 37669 - protein, 267 aa, Zea mays
  Clone ID: LIB3062-037-B8_FLI.pep
RPSTIDPHGRPDGIGDADAPVLPYRCAAIGIEALKYISYPAQVLAKSSKMIPVMLMGTLLYGVKYTLPEYLCTFLVAGGVSSFALLKTSSKTIKKLANPNAPLGYTLCFLNLAFDGYTNSTQDLIKSRYPKTNPWDIMLGMNLWGTIYNAVIMFVAPLLFSNWPYANGFEALRFCQENPEVAWDIFLFCLCGAVGQNFIFLTISRFGSLTNTTITTTRKFMSIVVSSVISGNPLSLKQWGSVVMVFLGLSIQIYLKWKRKKGREHKE

SEQ ID NO: 37670 - protein, 89 aa, Zea mays
  Clone ID: 700423671_FLI.pep
TSSQLQVSCRPLPPLPAHIPPSRLQGPDLLPAQVPHQHVVRCHVAAFLSVHTRRARRPASSLITFMCTSSICDPLLHIISTNFTLLGSV

SEQ ID NO: 37671 - protein, 136 aa, Zea mays
  Clone ID: LIB3062-037-H8_FLI.pep
GTSRSCGCTFLPPPSAQISACGLAMASFSEAPPGNPKAGEKIFKTKCAQCHTVEKGAGHKQGPNLNGLFGRQSGTTTGYSYSAGNKNKAVIWEENTLYDYLLNPKKYIPGTKMVFPGLKKPQERADLIAYLKEATA

SEQ ID NO: 37672 - protein, 97 aa, Zea mays
  Clone ID: 700333908_FLI.pep
CIDNVQLHQPVWQVSTGPVLQRVQRRQAGALLRRCPRERQCHCKQWSSRSNQLACVDYCLECGSSVVPLNYICILPKYGVLQLMRFELHLLVLMVGF

SEQ ID NO: 37673 - protein, 224 aa, Zea mays
  Clone ID: LIB3076-052-E9_FLI.pep
QRTTCSRTHTHTSTFVPSAAYASPHTGNKVLLNIRSLRTVSLCLLRGLGGLLGRLCLLAPATGRLLRRLLGQQNRVDIGEHTAVSDGHAAQQLPKLLVVPDRQKHVARNNASLLVVPGSITGELQNLSGEVFEDSGEVDGGAGADTLRVAALLQVAPDAADGELETGLHGPRHRLLPWPADLAPGRSLLPLTPCSGAGGVHGRISASIGLSGTRRKCSGVGTNA

SEQ ID NO: 37674 - protein, 190 aa, Zea mays
  Clone ID: LIB3136-005-B4_FLI.pep
RTSTRRHASHELPVRKANQPPVPPPPPSVFASAADSKAPVLSPRKTLAPATMKGKADTSKKDEGRLRAGGAAGKRKKAAASGKPKRPPSAFFVFMSEFRQEYQALHPGNKSVATVSKAAGEKWRAMSDQEKQPYVDQAGQKKQDYEKTKANFDKKESTSSKKAKTEDEDGSKSEVDDEDGSSDEENDDDE

SEQ ID NO: 37675 - protein, 76 aa, Zea mays
  Clone ID: LIB3066-019-H10_FLI.pep
RFGASFHWLLLGGYFSPPSCPVERLVNYYLSRSVKMSCFSIDLYQIFDVGWSAFVLYSFFVCVCCRNLHEKCTFVE

SEQ ID NO: 37676 - protein, 54 aa, Zea mays
  Clone ID: LIB3066-032-D1_FLI.pep
TVLVPNGSPTLPTPLDRPFLFFYSIKGYKVCDNNTNIVLSMYLLCNPNFIMDTF

SEQ ID NO: 37677 - protein, 197 aa, Zea mays
  Clone ID: LIB3150-016-G3_FLI.pep
AGRGGVEDTTKNPCKKGRPNKSVDAGGCSIAGELGDGLGSLGDGVFGELSWEDEAHGGLDLAGGDGGLLVVPGELSGLAGELLEDVVDEGVHDGHGLGGDADVGVHLLQDLEDVDFVGLHALLGLLLPLLLAALLAGGLRGGQALLGLGLLTCGRLLRLLLGRRLLLRWLLLGLGRHRVGTRGCRGRGGWGGLDAVG

SEQ ID NO: 37678 - protein, 200 aa, Zea mays
  Clone ID: LIB3279-013-H3_FLI.pep
AGRGGVEDTTKNPCKKGRPNKSVDAGGCSIAGELGDGLGSLGDGVFGELSWEDEAHGGLDLAGGDGGLLVVPGELSGLAGELLEDVVDEGVHDGHGLGGDADVGVHLLQDLEDVDFVGLHALLGLLLPLLLAALLAGGLRGGQALLGLGLLTCGRLLRLLLGRRLLLRWLLLGLGRHRVGTRGCRGRGGWGGLDAVGWRL

SEQ ID NO: 37679 - protein, 163 aa, Zea mays
  Clone ID: LIB36-007-C1_FLI.pep
AYETKHMGKNTLASLHFVTATQDFCHDQQKLGDTPDPSAAKSVEGAALPLERVDDVHGGDGLTAGVLRVGDSVANDVLEEDLEHAAGLLVDEPRDALHAAPSRQPPDRRLRNALDVVAEDLAVTLRAALSQPLPALSAPRHGHSNSEERLTIGNLEVGYGRME

SEQ ID NO: 37680 - protein, 162 aa, Zea mays
  Clone ID: 700552318_FLI.pep
ACATAADSKALVLTPRKTLAPTTMKGKANASKKDEARLRAGGGGAGKRKKAAASGKPKRPPSAFFVFMSEFRQEYQAQHPGNKSVAAVSKAAGEKWRSMSEQEKQPYVDQAGQKKQDYEKTKANIEKESTSSKKAKTDDDDGSKSEVDDEDGGSDEDNDDDE

SEQ ID NO: 37681 - protein, 170 aa, Zea mays
  Clone ID: 700553143_FLI.pep
TNPLPRVLLNQIQGHSGEPLGYHVWPRQGREGSGQGRRQAPPQGAARQHPGHHQAGDSQVGEEGRRQAHLRAHLRGDPRRAQDLPRERHPRRRHLHRARPPQDCHRHGRCLRAQASGPHPLRFRRLGRPLSRWRITWWRWRSCCVLGLVLSVLSLSVLFSVVVVLHRSSF

SEQ ID NO: 37682 - protein, 183 aa, Zea mays
  Clone ID: 700238913_FLI.pep
QVLAPRAKFFSTQSLQPWTPAEPVARRRRGRLGARLAAPGRSRCRGPSRPGCSSPSAGSGATSRRAGTRSAWAPAPPSISPPCLSTSPPRCWSWPATRRRTTRRRASSRATCSWRSATTLSSASCWLASPSRTAVSSPTSTRFSCPRRWRRRRLAAAARRASPLRRPPSPQRRQPSPRRRLRN

SEQ ID NO: 37683 - protein, 377 aa, Zea mays
  Clone ID: 700243864_FLI.pep
LAAIVTVPSEFRLQDVQGERKNDESISQGTENSRARVRALNLRQLLVRVAGLHEHSEPVVQVGVGANGRGGGGGGHVAERAGAAGLRGDVVEAVQRHGQRLRPERVVELELLGGLRGRGEALLLGEPGRARPRVSLLLLRRLGHRRRGRRPFRRRRRGGGRGDGGRRRLRPGTRALGPAALPGGVTTCMRPVLLLLQLLGGGLQPLLEVRVPDVLDLVVRPPGQPGGDGGPPVAELLVEGDDGVLLLLAEVAALDVRAQVVDPPEPAALAAPQQPGLLGQRAPVAVAEALDVRDQDLVLLRRPWPPLEPHLLAARSSPHSLLLLLLDLLLLMLCVLARLSLSVGGVGDWACGECKQGGVSLLLACLSFGDLGEHCTV

SEQ ID NO: 37684 - protein, 172 aa, Zea mays
  Clone ID: 700337382_FLI.pep
TAEPPYTRDDGFLSREAFLKDCAKAFSVPPINSEENPQVFSKKFVNIVDPLKQSNNLGRSISKGNLGRIRKEFYFGACKLGKILQAPACFSANEINRFFRNTLSRADVPVSSPDDVLQAASVSASPGNKGVEGVSKGSSPNNSCDVLCNQFGYIKISDSNNALQNLVVDRPA

SEQ ID NO: 37685 - protein, 130 aa, Zea mays
  Clone ID: 700244441_FLI.pep
KILTGHVHPNHCRTNTRRQNQSSSGRSPRESQWQQPAVLHMPARDGIDIQNHQLTLHMRIPGRLYGKIGFCIAGEALQSRIPDLPCLRCINRPSSSLQHPSRPKLSDHQAEQASEVSQSVASQLQWRGTR

SEQ ID NO: 37686 - protein, 90 aa, Zea mays
  Clone ID: 700220117_FLI.pep
HSGCRVRTSRSSYVARNLVLKNLLRASHLELPDCSCPAKRNRPITWFVSVKMSDVLMRVINQGPGYSFFFFLLLLTLDVHLIYGYVLCLG

SEQ ID NO: 37687 - protein, 673 aa, Zea mays
  Clone ID: 700221624_FLI.pep
FASATGRVHNWNGIQQEITGRVQRKVLYEISSAVRIFGSANDTEVRATLWVQEYGRERYVGLAKNQTSDQQWTHLKGKFLLHAPFTKAVIFIEGPPAGIDILVDGLVLSPARKLQAAPCPKIENVLYGTNLLHNNGFTRGLSGWSPMGSCRLSIQTEAPHMLPSILKDRASQKHISGHYILATNRTDVWMGPSQVITDKLRLHVTYRVSAWVRVGSGGHGRHHVNVCLAVDKNQWVNGGQVDADGDQWYEIKGAFKLEKQPSKVTAYVQGPPAGVDIRVMDFQIYAVDRKARFEYLKEKTDKVRKRDVVLKFQGSNAVNLLGSSLRIQQTENSFPFGSCIARHNIENEDLAEFFVKNFNWAVFENELKWYHTEAEQGRLNYKDSDELLEFCEKHKIQVRGHCLFWEVEDAVQPWVQSLQGHHLMAAIQNRLQSLLSRYKGRFRHHDVNNEMLHGSFYEDRLGRDIRAYMFREAHKLDPSAVLFVNDYNVEDGCDTKSTPEKLVEQVVDLQDRGAPVGGIGVQGHISHPVGEIICDSLDKLAILGLPIWITELDVTAENEHIRADDLEVFLREAFAHPAVGGIILWGFWEMFMFREHAHLVDADGTINEAGRRYLALKQEWLTRMNGSVDHQGEFKFRGYHGSYTVEVNTPSGKVARSFVVDKDSPVQVIALNV

SEQ ID NO: 37688 - protein, 382 aa, Zea mays
  Clone ID: 700165039_FLI.pep
MGFSGLWRIVVRLLSPLSAAPLVALVGFGLYELGFPSVAKCVEIGLPQILLLVALSQYIPHAAPLLSTAFERFAVIMSIALIWLYAFFLTVGGAYKNAAPKTQFHCRTDRSGLVGGAPWISVPYPFQWGAPTFDAGEAFAMMAASFVALVESTGAFIAVSRYASATPCPPSVLSRGIGWQGVGILLGGIFGTANGTSVSVENAGLLGLTRVGSRRVVQISAGFMIFFSILGKFGAVFASIPGPIIAAIYCLLFAYVGTAGVGFLQFCNLNSFRTKFILGFSLFMGLSVPQYFNEYTSVAGFGPVHTRARWFNDMVNVVFSSKAFVGGAVAYFLDNTLQRRDGAVRKDRGHHFWDRFRSFKTDPRSEEFYSLPFNLNKFFPSL

SEQ ID NO: 37689 - protein, 402 aa, Zea mays
  Clone ID: 700208847_FLI.pep
FICALCVRDRSQLAPSQFAMAEDRSPKPIHCKAAVCRAAGEPLTIEEIVVDPPKAYEIRIRVICTSLCHTDITFWKAKVAPVFPRILGHEAYGVVESVGEHVEGFAAGDTVVPTFLGQCERCASCASEHSNVCDAVPFVIGPGMRRDGTTRFRDARGSPLHDLLAVSSFSEYTVVDVNQVVKVDPAVPPKLACLLSCGAGTGVGAAWRSAKVEPGSTVAIFGLGSVGLAVVQGAKMCGASKIIGVDLNPDKEEVGRSFGVTDFVNPSQLDKRSVVEVIVEMTGGGVDYSFECIGVPSVMTDAFRCTKMGKGKTIVLGLGRDSDEVCLPSLELLFGRCVMGSLFGGLKPKTHIPVLAKKCMDKELQLDALVTHELGLQDINKAFDLLLQGKSLRCILWMDKDK

SEQ ID NO: 37690 - protein, 544 aa, Zea mays
  Clone ID: 700208983_FLI.pep
KSCTLWCAVLSVTILPITILEKRYICPSAMSIEERKISMISKSTALNPNAEEFVPSSLRSFSDSSKKSDATMIVSGSSKESSTDKPESILRSNSDEEAHQYWQQQLPDDITPDFKVLGQDESPGPDSLSLTGLSINDGIDTSIFSPNQTLGVQHHASPFIRDKLNTRPKINLSGPTYMDERSQAAILSPTAGSMSPNAAPWVKNLRNGGHYNTSRRDATASHYNGDSSIGASLHNLTDAYHGSRRSLSTTMDIMSQLESKVDGRLNQNLRSLSFGNSSPPSPASYAQNGLGNYSNEAFGLPNSPYRSHSAILADDIVSPSAGREHISLDVPRGRYKTTSLPVPGLGSSRGSQVLGGPYNGNHDMISTNTLQNMAGIQTGAAWLETDAAANTYLESKDEVHDFASLRHAVLEQQDRQAFLMGNNPLAKDLTLKELYSIQSRLAQEKARETTYRQRFQIPELQGLIQEQNPPIDLCGLHISEAMHVLNYELNNRRKIVRSTGRRLQAMIISSARTPARLTAAVEQYLMEHGLQYTQAQPGLFRVLL

SEQ ID NO: 37691 - protein, 454 aa, Zea mays
  Clone ID: 700346822_FLI.pep
SCSDDWSSHSSSAGNPDIPYVVVSKSSIVTAVCKEILGCYRKLLGIPDLLNQPNMSILKQLLQTLQPTENFDDVLSEFQPSLAPCNVDYLYCGACKMLEDIMDSVSSFSYLLSSDVLITIQSIVNSVVVLLDKSGEPNGKNIHMGCSKAIIPFLRKRLGYSAHKLLSADVPSEDAGKGWQTKGDLIQKILQIYLRNSDSTSDLLAEIGRELPKEPSLKTKDNQDVSYGFPTLCSSTITSWYRVLHEENTGSLNKTIKQALKARGSVDTILQEIQKSVDAFVSLIGMCKSHEKVSMHAMAVKHGGKFIDTFLKAFNFLERHFEQHNDTIVKMLKQLQKGTRIIQSICSDAKGNKRTMITSKVPPAKRSMERFLFQVKALLHSCSAEKEFQMGNLKHKDLQGHVVSSQAYGNVDEEDEEQTEIDSDLPADEHDNGNAMEEDAVEGSNETPMEEEEE

SEQ ID NO: 37692 - protein, 357 aa, Zea mays
  Clone ID: 700050635_FLI.pep
LPLQHPPVSVVSSPLLTSPAMGKIKIGINGFGRIGRLVARVALQSEDVELVAVNDPFITTDYMTYMFKYDTVHGQWKHSDIALKDSKTLLFGEKPVTVFGIRNPEEIPWGEAGAEYVVESTGVFTDKDKAAAHLKGGAKKVVISAPSKDAPMFVVGVNEDKYTSDVNIVSNASCTTNCLAPLAKVIHDNFGIIEGLMTTVHAITATQKTVDGPSAKDWRGGRAASFNIIPSSTGAAKAVGKVLPELNGKLTGMSFRVPTVDVSVVDLTVRIEKGASYEEIKKAIKAASEGPLKGIMGYVEEDLVSTDFTGDSRSSIFDAKAGIALNDHFIKLVSWYDNEWGYSNRVVDLIRHMFKTQ

SEQ ID NO: 37693 - protein, 159 aa, Zea mays
  Clone ID: 700151344_FLI.pep
FTGLSGVAPNCPVCQRSNGYTAPTVDCNAIVQRYSARLRAQKSEQHQKAHRTVQWPTCQKLQRSEPNGRVTWLAHRTMSVARRTMSGDAPDCPVLLATAASTNGQLGGWGYKYPPTTTLQCIQVFSHQTSYKSYRLHSRHIQRDQILSQVQRSFQSNSD

SEQ ID NO: 37694 - protein, 295 aa, Zea mays
  Clone ID: 700238962_FLI.pep
KTKSDSTGRMHACRRRTVVLSVSLPQDGGVGDHAGDDVGVHVGSRPAVLEVSLALLLGVAADADGRAAVRHAPFEGVDVGGLVAAREAALVALAVRGDVLPVPPPQLLDRLLDHLVATGLPHRLGAVVGVSAGAVPVTLDRLRVEGENDPGHLSDPLENVAGDPYLVAGRDPNGRPDLELPLSRHDFAVDAADVDAGVEAGFVVGVNHVAPKGLIGTGSTVVWSLRTRVSTNRPAKGPAHILLKESVLLLNTVPWHLSCNIGVAENRGSFVPLVTGDWLALWRVAVTSQGCCYPS

SEQ ID NO: 37695 - protein, 213 aa, Zea mays
  Clone ID: 700087386_FLI.pep
QEEVTAAPRGRRDRSRMVDVSRVQKELTECNRDREVSGVSIALHDGANISHLTGTIAGPADSPYEGGTFVIDIRLPGGYPFEPPKMQFITKVWHPNISSQNGAICLDILKDQWSPALTLKTALLSLQALLSSPAPDDPQDAVVAQQYLRDYPTFAATARYWTEAFAKSASTGMEEKVQKLVEMGFPEDQVRSALKSVDGDENMALEKLCSGSG

SEQ ID NO: 37696 - protein, 148 aa, Zea mays
  Clone ID: 700088394_FLI.pep
RTTVDTDAFLHVYKMSHMYGGNRVIYTVFSYLTVTVTAFQNFRSVACNQVAEEVVVTASLIAGSAASIPREAGTLATVLTCDYSPTHSSCVLRTRFSIIGRSNPQGPRDGDGSSSASCGACCSSNIGYGTLRCLLEQDSHHRFYSTGR

SEQ ID NO: 37697 - protein, 159 aa, Zea mays
  Clone ID: 700172780_FLI.pep
FAAKASRSNQASGGCGAMGEQVVTERIQRKLEEANTTVQQHLAGIQDHVNFTMQQAYFKCAYDCFDRRRTQEAINNCVENCGMPVLAVNNVFESEMAKFQERLNRSLMVCQDKFEAAKLQKMKTDATQELESCVNRSIDDSIRALPYVVQQMKSTLNIN

SEQ ID NO: 37698 - protein, 316 aa, Zea mays
  Clone ID: 700217128_FLI.pep
RRPAVLREGGASGTSPAMAGAAARRPGAKPRGGGGAGKRSAWLAADGSKRWGEAFFLLYTPFWLTLCLGVVVPFKLYERFTELEYLILGLVSTVPAFVIPLFLVGKADSVRNFKDRYWVKANIWIIIFSYVGNYFWTHYFFTVLGASYTFPSWRMNNVPHTTFLLTHACFLFYHMASNMTLRRLRHSTAHLPQSICWLFEAAWILALSYFIAYLETLAIANFPYYEFVDRDIMYKVGSLFYAIYFIVSFPMFSRIDEKDEKWSLSRVAVDSLGAAMLVTIILDLWRIFLGPIVPVPESRQCGQPGLAWFQAQNGST

SEQ ID NO: 37699 - protein, 867 aa, Zea mays
  Clone ID: 700550259_FLI.pep
TTVKGYEDQQQHDDPSSSSKAKQKKRKISDLDPKWSKDELTRFYEAYRQHGKDWKKISIAIGGKSSDMVRSLYSAHRTFLSLPEHQATAMGFIALVTGHHNASEKTTSHRGYDHIARASGKARKHGEQQKSIDGPDLHNCHEGEITGFSASFKKRYYGELVRNSRNHAVQRRTPLIPVIAPADRSTIDEPTPGIENVINFNSTKRKYEAANHGCAVAPTNKYSSDRVSGFAETYKADQGHSYLDTMEIGDIAMCQQHFKKTRIQQTVEESQTGIVEHETTMASKEGNKLVSSVNNNQILIDSISEDDMLVLDVLNSLVNAPSKMSELEINIPSGSLGKTDSVLREEGHPTIDLSKQGKPVRKSSASKTRKKKHKKILGAEVPAEAQKKCDDNLVLPETLRVGITDDSSLCTDSGRARTPEASEDISAEVPNTQTEAKPEFIMSGRTRLKSQMHCKTKPMSCNEGSDNFQAKKLLHCLSSEPLRRWCTYEWFYSAVDYPWFSNNEFVHYLDHAKLSHLSRLTRSEWSAIRSSLGKPRRFSNHFLAVEKEKLEDYREKVRKIYAQLNDGSRDSLPADLARPFSIGQQVIVRHPSSRELCDGKVVMMGPDCYKVHFDDPDLGVDTVKDTDCMPVNWLHNRPDNMRRNYLSNDVYNILEMDHIPDLTPSENGNHAINGTTVFEELKSLRLTSDRQPKAESIIHSERPPYRSTSDGPTSSSGFSCPDNNAGHNGELESYVAAFFENSLSQARQMVDEAIQANSGGSDDEKVCMLNQVTGCLGSDSRGVQLPSDLISNCIATVISIKRLSDSRHPFGNVAGVLEHALSMLRPSCPQNLGVYTEIKRDLCTIANQIFALVPTASGNCSPPVSPM

SEQ ID NO: 37700 - protein, 86 aa, Zea mays
  Clone ID: 700337594_FLI.pep
AQYNYNRYTSRPVQFQLTYCYPTPHHLNKNLSCTWKTNKLLYSLHVRSTIYNSSSYIFVLYKEKRKAGQIKLFKLNHDLSPTIFYI

SEQ ID NO: 37701 - protein, 230 aa, Glycine max
  Clone ID: LIB3051-007-E1_FLI.pep
SSQNEYVHIKFDFQITESSQSDKAISTIHYSSRRQYYNNEPKEGLSFSMCKKLVQMMQGNIWISPNSLGLVQGMTLLLKFQIGPSLGKSIFAPKDYSSSQFRGLKVLLAEDDGVNRTVTKKLLEKLGCQVIAVSSGFECLSAISGAGNSFRIILLDLHMPEMEGFEVAKRIRKFHSRSWPLIIALIASAEEHVREKCLLAGMNGLIQKPIVLHQIANELRTVLQRAGEKL

SEQ ID NO: 37702 - protein, 87 aa, Zea mays
  Clone ID: 700341996_FLI.pep
IDKVQHSLPTSSIVHIHHYRQIIKTCTSPLLPQVLQPLQTEVAMSSLVPTSETFLESTSPSSSSQSSNNKAINLSFTNFSKYSLCHL

SEQ ID NO: 37703 - protein, 533 aa, Glycine max
  Clone ID: LIB3051-009-A6_FLI.pep
ENVTSTVNLDSSDYPKHSNFKLHGDTSKGKDELHKFEKVPIGSGIDMCSFEDPLDENPPALISLGGNAKLSGYNDRIPCSLLSKSRDNVPVVSRDDDENSYGCTHPINTKTKSFRLKTGIGDNRISKRLASNFQKVAEKTKDHTHSNNDGDWKRTYCSKRNCNKHQSSQMNIPFKKRKLFNYRSVSNSNGLIRSGGIYYSPENCMNQDGCGSPPGMHKDPGMPSLEACQHQTLRSRGSHVNLRIKSFRVPELFIEVPETATIGSLKRTVMDAVTAVLGGELHIGVFLQGKKVKDDSKTLLQTGISHQNELDALGFTLEPNSSQSLPIVCAAHSPGPKADITQPVIRYPSSPAVIHQRIQGNSDMLPEHQVTSLGSHFENDHDSAPSPVNASVEKGMKDSKELVTVPEMDEELAMVPVHQKSKRSEIIQRRIRRPFSVDEVEALVQAVEKLGTGRWRDVKVCAFDNAKHRTYVDLKDKWKTLVHTARISPQQRRGEPVPQELLDRVLVAHAYWSHQQTKPQHKHHPETETVFSF

SEQ ID NO: 37704 - protein, 45 aa, Zea mays
  Clone ID: 700378508_FLI.pep
ILNYAFEASNLHNDEAAIQQSETTDKIFLALQHLVFLNTYIASSF

SEQ ID NO: 37705 - protein, 520 aa, Glycine max
  Clone ID: LIB3052-012-B3_FLI.pep
KLEEENHNRGLTLDPHRNHHHHHHLLQQQQQPPHHPHPQNLILNSIRHVTDQEGENQEDQESHSHPHQFHIQFQPLHHQQEQQQQQSYTGLDTEILNPLQPPKKRSCLPPLPPPPPPPSSLASSEHARKMGELQHHQQQAAAAAAPSRAAMRGVGGGEIVEVQGGHIVRSTGRKDRHSKVCTAKGPRDRRVRLAAHTAIQFYDVQDRLGYDRPSKAVDWLIKKAKAAIDQLAELPPWNPTATSMQPRQLPQEIVHCENKSLAMDDSMTAAFSSRGESNAFASHQQVEDNENANNISSSSGNKYNTGSGFLPASLDTDNIAETIKTFFPVEATSTSFQSYPPAPPDLGHQDLRLSLQSFQDPIMLHHQPHSHHQPVLFAGTAAAALDFDGGSGWSEHLHQHQQQNHHSEEQRLLYAGGNSGHGGGFVFNTPAPVQVPAFGQFFSQRGPLQSSNTPSIRAWIDPSVDHHHHHHHYLSQLIHQGSVAGGGGFSGFRIPARIQGEEEHDGVSDKPSSASSDSRH

SEQ ID NO: 37706 - protein, 210 aa, Zea mays
  Clone ID: 700346357_FLI.pep
RTLGVRRSDPMAATKVCNVRFEGNVITTTVTASGAAVESWLDEILSVHRRRLHKLVVGLDVEWRPSFSRAYSKTAIVQLCVGRRCLIFQLLHADYVPNTLDEFLSDPDYTFVGVGVAADVERLENDYDLEVANAEDLAELAAKEMGRPDLRNAGLQGIARAVMDAHVEKPQWVRTGPWDASSLSDEQIEYATIDAFVSFEVGRMLLSGYY

SEQ ID NO: 37707 - protein, 79 aa, Glycine max
  Clone ID: LIB3051-032-H11_FLI.pep
GSEQVKSWKKEKVSTQLSTWDVSETPKPAPKAKSEEAKISAWENLQKAKAEAAIRKLEMKLEKRRASSMDKIMNKRILA

SEQ ID NO: 37708 - protein, 135 aa, Glycine max
  Clone ID: LIB3094-027-C10_FLI.pep
QPYLRPHFEHIIHGFLSFFQFCHFVSASLRSGTEGIEGPGPWANGKGPGVRWRHVMVTRGRINGRGGGNRDTLTRGAHGEGGGWGHVHVELRGKFQCSKLLHFLLQPPVFLRQILAAPFQKLAVNLRLLQLRPEN

SEQ ID NO: 37709 - protein, 210 aa, Glycine max
  Clone ID: LIB3093-005-B3_FLI.pep
NNAGVSKDGQIRHFFHRPSKAYTTGTRKRRKVHTDDEGSETRWHKTGKTRAVFAAAGGAVKGFKKILVLYTNYGRQKKPEKTNWVMHQYHLGSTEEEKDGELVVSKVFYQTQPRQCGNPIIIKDSYEKMLNDGSGQDNINISLIPKTTATLLDCYTAPYIDYDHVHVSHNRESSSQLIIPSSVVQVDGSYIRLTMDAKKARFESNTGKRF

SEQ ID NO: 37710 - protein, 99 aa, Glycine max
  Clone ID: LIB3093-006-G6_FLI.pep
GINGQIEDCVKGMVPQILSWMKITTGCFKVGRATFCMLPLVGCQHNEMLLDWVQNSYYTEGFGILGLATSTCLTFRCCDEDCNKLCTKLLGKTMAQVFG

SEQ ID NO: 37711 - protein, 618 aa, Glycine max
  Clone ID: LIB3093-013-D11_FLI.pep
AVVAVPDGLKAWELLKGRPHNVDLILTEVDLPSISGYALLTLIMEHEICKNIPVIMMSSQDSISTVYKCMLRGAADYLVKPIRKNELRNLWQHVWRRQSSTTGINGLQDESVAQQKVEATAENNAASNRSSGDAACIQRNIELIEKGSDAQSSCTKPDCEAESDPVGNMQEFSLLKCGEAYPSGTETQQVETSFRLGQTLMMHDCHAGGLNVSIRKNGEASTTNDKDTDTEHFGNASISGEAHDNPYVQINSSKEAMDLIGAFHTHPNCSLKNSTVNCTGNFDHSPQLDLSLRRSCPGSFENKLTEERHTLMHSNASAFKRYTTRQLQISMPAVLINFSDQQREQITNCEKNISHIATGSNSDSSTPMQRCIVSPTTVQSKESELATSHPPQGHSLPIPVKGVRFNDLCTAYGSVLPSVFHTQSGPPAMPSPNSVVLLEPNFQVNAFYQSNMKESSSEQLYESRGPNGNTTQNHIVYTQEHKSEHAEDRGHISPTTDQSVSSSFCNGNASHLNSIGYGSNCGSSSNVDQVNTVWAASEGKHEDLTNNANSHRSIQREAALNKFRLKRKERCYEKKVRYESRKKLAEQRPRVKGQFVRQVHPDPLVAEKDGKEYDHSDF

SEQ ID NO: 37712 - protein, 409 aa, Glycine max
  Clone ID: LIB3106-019-B7_FLI.pep
RSRPNFPLQLLEKKDVDDVTEQPCSTTSVVTTAAATITSGNNDLHVAEQSKKPPPKRSSTKDRHTKVDGRGRRIRMPAACAARVFQLTRELGHKSDGETIEWLLQQAEPAVIAATGTGTIPANFTSLNISLRSSGSTMSAPSHYFRGNYFNPSTFSTSAAAASAAAVAQLRSRAEWDRNMSMVMEDSRRSMLENTSSISAILNFNPMGNVNVIQQAKQELREESAAAGGGGSLDSVASDSDGSLGRKRRPEQELSQMGSYLIQSSTGSLPSSHASNTAAFWMVAGHGNQAMSGGGGSDGSSDNPIWAIPSVGNSGVYRGAMSAPGGIHFMNFASPMNLIPGAQLGSAMVGGGSGGGNSGSQLLSESNLGMLAALNAYRQIPANGVSESPASAGQPHGGDDGRDSSGQHS

SEQ ID NO: 37713 - protein, 335 aa, Glycine max
  Clone ID: LIB3106-028-E6_FLI.pep
EFKFPFLSYKSKIIVLVYKMAVELMGFPKLDEQKAIQEAASEGLKGMKHLIRTLSNQPSHLNTELTDVTVSKFKKLISLLNRTGHARFRRAPVQYSSPHAPVHNTNASTSSIQLPPPPQNPNIPALAQFPTPAPVAVHHTPVTLDFTKPHNALLSSNAKSVELEFSKETFSVSSNSSFMSSAITGDGSVSNGKIFLAPPATSAGKRPAFKKRCHEHREHSDDVSGNSKCHCVKRRKNRVKSTVRVPAISSKVADIPPDEYSWRKYGQKPIKGSPYPRGYYKCSTIRGCPARKHVERAPDDPAMLIVTYEGEHRHAVQAAMQENAAGVVGLVFEST

SEQ ID NO: 37714 - protein, 404 aa, Glycine max
  Clone ID: LIB3106-060-E1_FLI.pep
VFGFIRSTPEFYSDSIHSYIDPRGESQITRYTGFNSLRAEMDTFSHVPPGFRFHPTDEELVGYYLRKKVASKRIDLDVIKDVDLYKIEPWDLQELCKIGTDEQSDWYFFSHKDKKYPTGTRTNRATKAGFWKATGRDKAIYSKHCLIGMRKTLVFYKGRAPNGQKSDWIMHEYRLETNENGTSQEEGWVVCRVFKKRMTTTQKVGEYDQSPCWYDEQVSFMQDLESPRRNISQTYASYHHHQQQHHHHPCKPELMELQYNNIPHDAFLQLPQLESPKVTQSSCSVVPYGYESNNNNNGSTLQFSSLTQEEQLQYCNNQQSHHSLYGSNDHAVDQVTDWRVLDKFVASQLSHNNQDVSKETSYSNAPIFHVAEQISVAANGSKKEQVSQEYASTSTSSYQIDLWK

SEQ ID NO: 37715 - protein, 244 aa, Glycine max
  Clone ID: LIB3170-053-G12_FLI.pep
AFPFCSNNTSNASFSEHFNNANGGGGNNNNNNNNEGTNYFATSSAPSLFSNSVNASALSHMSATALLQKAAQMGATTSNGGTASLLKSFGSASSSSGGGGSKLVNAANYVSGMFGGNNHVNEQSNSNLQDLMNSFAVGGNSSIFEDGFEAYEHSNNNSNRDPKVHAMSGSSSSIGGSDRLTRDFLGVGQIVRGMSGSGGVAQREQQQQHGFNLSSLEAERYNNNSNNAAPSSGQAFGGGGGNFQ

SEQ ID NO: 37716 - protein, 563 aa, Glycine max
  Clone ID: LIB3170-056-G4_FLI.pep
IMYMMMYRIMLRTRGILVLLCLQGMGLLIILNWLSHSPTEIESYIRPGCIILTIYLRLENSAWEELCYNLESSLRKLAAPNDSFWRTGWIYTRVQHSVAFLYNGQVVLDAPLRLKSPQNCQILCVKPLAVSASSSAQFVVKGFNFLLSNTRLLCALEGKYLVQDSCYDLIDSADAVNGHQELQHLSFSCHVPNVTGRGFIEVEDNGLSSCSFPFIVAEQEICLEICTLDNVIEAAEMADDNQIKTNLMEEKTQALYFIQEMGWLLHRSRVKVRLGPMAPVQDRFHFNRFIWLVGFSMDHDWCAVMKKLLNIIFEGTVDTGDHASVELALLEMGLLHKAVKRNCRPMVEILLKFVPVKASDGGDSNEKQVNKSPDRFIFRPDTVGPVGLTPLHVAASMHGSENVLDALTDDPGMVGTEAWKSAQDATGLTPYDYASMRGYYSYIQLVQSKTSNTCKSQHVLDIPGTLVDSNTKQKQSDRHRSSKVSSLQTEKIETTAMPRRCGLCQQKLAYGGMRRALVYRPAMLSMVAIAAVCVCVALLFKSSPKVYYVFQPFSWESLEYGSI

SEQ ID NO: 37717 - protein, 639 aa, Glycine max
  Clone ID: LIB3170-056-H12_FLI.pep
KASPLSLEQFISITAPLLDLEKEAEISSSIATGASRNLDTAQKRGSTILNLKCVDVQTGLMGKSLIEFQSTKGDVLPAHKFGTHDVVVLKLNKADLGSPALGQGVVYRLKDSSITIAFDDIPEDGLNSPLRLEKVANEVTYRRMKDALIQLSKGVHKGPASDLIPVLFGERPPTVSKKDVSSTPFNKNLDHSQKEAVSKALSSKNVFLLHGPPGTGKTTTVVEIILQEVKRGSKILACAASNIAVDNIVERLVPHRVKLVRVGHPARLLPQVLDSALDAQVLRGDNSGLANDIRKEMKALNGKLLKTKDRNTRKDIQRELRTLSKEERKRQQLAVTDVLKSADVILTTLIGAFSKKLDSTSFDLVIIDEAAQALEIACWIPILKGSRCILAGDHLQLPPTIQSVEAEKKGLGRTLFERLAEMYGDEITSMLTIQYRMHELIMDWSSKELYNSKIKAHPSVTAHMLYDLEGVKRTNSTEPTLLLIDTAGCDMEEKKDEEDSTFNEGEAEVTVTHAKRLVQSGVLPSDIGIITPYAAQVVLLKMLKNKEDQLKDVEISTVDGFQGREKEAIIISMVRSNSKKEVGFLSDRRRMNVAVTRSRRQCCLVCDTETVSGDGFLKRLIEYFEEHGEYLSASEYQNE

SEQ ID NO: 37718 - protein, 167 aa, Glycine max
  Clone ID: LIB3138-090-F6_FLI.pep
IDIYLDLSIFRNYYRCTHKFDQGCQATKQVQRVQEEPILYKTTYYGLHTCKNLANPEIILDPMSPSSSSKFLSFDNSFPTPSKQECPFLSSSNLPSSVKGECKEEVPPSTSSNHYLISSDLTFDSSPRHHVTLSSTLDSEYKSVDISDVLYDSAQLDDAFEPFLEFR

SEQ ID NO: 37719 - protein, 149 aa, Glycine max
  Clone ID: LIB3138-105-F7_FLI.pep
WSSVEVTMDTSRSEGKRVMRYKEEDDDNDDEEEEEVVSEMGFEEDGRRNKRVIRDLYGKRGSKGGGSITPSCQVDNCDADLSEAKQYHRRHKVCEYHAKAPSVHMAGLQQRFCQQCSRFHVLSEFDDSKRSCRTRLAGHNERRRKYAVD

SEQ ID NO: 37720 - protein, 357 aa, Glycine max
  Clone ID: LIB3242-011-H8_FLI.pep
KKKIERKMMLGEHHRGNPTVLVPPWPAHDDPTAEMYSAFLTNDVNAGEYSPYHLQEALTALQRFLPSNETDADSDSSEAAQPDAAVDAYTCDHFRMYEFKVRRCARGRSHDWTECPYAHPGEKARRRDPRRFHYSGVACPEFRKGNCRKGDACEFAHGVFECWLHPARYRTQPCKDGTSCRRRVCFFAHTPEQLRVLPMQSPRSVANSSESYDGSPMRQVSLSSAAAAAFMSSPAASLSPPESPPSVNEMVASLRNLQLGKMKSMPHNRNVSVGSPRGSVLRPGFLSLPTTPTQQPVRSGVKCFDVWDESFEEEPVMERVESGRGIRAKMFEKLSKENSLDASASPPDLGWVSELVK

SEQ ID NO: 37721 - protein, 96 aa, Glycine max
  Clone ID: LIB3242-017-H7_FLI.pep
YSTQRMRIPSMCEPYLGASCEGHLIEVCSDSSSLHLSIRELLNPNFSRCSNKSLDSKVDDFLCFAKMQPCVVAESMKSSASSKRRSITSGSSLPCG

SEQ ID NO: 37722 - protein, 369 aa, Glycine max
  Clone ID: LIB3242-020-E5_FLI.pep
IVMSKPLLGIGEEEGQSNVTLLVSSSVIMESVCLNSSKLKERNYMGLSDCSSVDSSAPSFSDETKSNLNLKATELRLGLPGLQSPERDSDLCLRSSIQFDEKPLFPLHPATDDHHSSSKPAVLGNKRGFSDVMSGFAEEKLLVSSEVNTILSPRPSSNVALKPSSMLENVGAQQSKAKELATAKVGLERSHVFNDSRTNLNDSANNNSSAPATKAQVVGWPPIRSFRKNSLATTTKNVEEVDGKAGSGALFVKVSMDGAPYLRKVDLKNYSAYAELSSALENMFSCFTIGSCGSHGNLGGEVLNETKLKDLLHGSEYVLTYKDKDGDWMLVGDVPWEMFIETCKRLRIMKSSEAIGLAPRAVEKSKRRN

SEQ ID NO: 37723 - protein, 831 aa, Glycine max
  Clone ID: LIB3242-023-E7_FLI.pep
TSLQNQLWFSSVTALTFKPLSFIVLSPPSKIPKFLLVSTFECSLEDSVSHTVGFKFSLFVLVLGLREESMETQSDGNEDNIAAIKNMRQQLETRIESQHKAHMEMLASMQTVIPNLVSSLDLSLKVVSSFNRRPFAPTPSLPQPDPKLSPKKPVELTHRFNAETCADGSIEANLTNPKNQKPKTSMHSNSAFQVESEKVSPLAVVRSMVTVCLLGRVPFSPIDSSTVSRKLENDQMVTPTEKAALQELGGDSGATLAVEIALRAMADDNGGVEVEEFVVSGKARIMVLNVDRTRLLRELPESVQYQQLESSSGDGNANQNQVQHITHSGSNVNGSLPGMGRLVPRPMSDMWPPHGDPHMSALQPMFSGGPRGAPPRVMAMMGAHRGISIPSMHRLPLGPNAPGGSPNAMPQKPRTYEDDMKDLEALLNKKSFREMQKSKTGEELLDLIHRPTAKETAVAAKFKTKGGSQVRQYCDLLTKEDCRRQSGSFIACEKVHFRRIIAPHTDINLGDCSFLDTCRHMKTCKYVHYEYDPTPDVSPTMMGAPPPPKPLKPQRAEYCSEVELGEPQWINCDIRNFRMDILGQFGVIMADPPWDIHMELPYGTMADDEMRSLNVPALQTDGLIFLWVTGRAMELGRECLDLWGYKRVEEIIWVKTNQLQRIIRTGRTGHWLNHSKEHCLVGIKGNPEVNRNIDTDVIVAEVRETSRKPDEMYPLLERISPRTRKLELFARMHNTHAGWMSLGNQLSGVRLVDEGLRARFKAAYPDVEVQPLSPPRASAMEVDTSIAPHTRSPFAATESESTSAQFAEPAAAPESNFVSEEKSMAIDVDIG

SEQ ID NO: 37724 - protein, 225 aa, Glycine max
  Clone ID: LIB3242-101-D5_FLI.pep
LYTLSVCRGYYRCTHRNVQGCMATKQVQRSDEDPTIFEITYRGKHTCTVANNVGSSSPIPLENQEPSLNNTNIPQHQHQQNILQSHEQQQNELLLSLRKGLRVQTENLDSPEQPLVPFRFPLSTNIKNESHVFPSPVLENFTSPSYVSPAASGIGHFSVSPSGVVNSFEGNPNLANSESQINDMIPATTTTSAAPNSSTVGLEFPFDQFEFDGQNFTFDNPRFFS

SEQ ID NO: 37725 - protein, 210 aa, Glycine max
  Clone ID: LIB3242-105-B9_FLI.pep
KRLAAISQTFNIRVEFHGVPVLAPDVTKDVLDVRPGEALAVNFPLQLHHTADESVDMSNPRDGLLRLVKSLSPKVTTLVEQESNTNTTPFFNRFIETLDYYLAMFESIDVSLPRKSKVQINMEQHCLARDIVNIIACEGKERVERHELLGKWKSRLTMAGFRQYPLSSYMNSVIRSLLRCYSKHYNLVEKDGAMLLGWKDRNLISTSAWY

SEQ ID NO: 37726 - protein, 341 aa, Glycine max
  Clone ID: LIB3242-121-D4_FLI.pep
EYANLQRGTNGQSILVKKRNFRIWSEDELRKMVTPELVCAYESMQADLYRLKHLGITETHPTNISSAMSRLPDEAIALAAASHIERELQITPWNLSSNFVACTSQGKENIERMEITGVGDPSGRGMGFSYARAPPKAPVSSAMVKKKAAANRGGSTVTGTDADLRRLSMDAAREVLLKFNVPDEVIAKQTRWHRIAMIRKLSSEQATSGVKVDPTTISKYARGQRMSFLQLQQQTREKCQEIWDRQVQSLSAVNGDENESDLEGNSDLDSFAGDLENLLDAEECEEGEESTNDLKRDKGDGVKGLKMRRHPTLAQAEEEIEDGAAEAAELCRLLMDDDEAD

SEQ ID NO: 37727 - protein, 49 aa, Glycine max
  Clone ID: LIB3242-265-C1_FLI.pep
VSILFALEYLSIQNLDRVPQGLPLLLSDQNKNFTLIISKTPIVEVKLQL

SEQ ID NO: 37728 - protein, 167 aa, Glycine max
  Clone ID: LIB3242-287-G2_FLI.pep
STVSFEIGFSLPTICAKYPYTDQFYGLFSAYAPQISGRIMLPLNMTSDDEPIYVNAKQYHGIIRRRQSRAKAVLDHKLTKRRKPYMHESRHLHAMRRPRGCGGRFLNTKNSVDGNGKIGNEVHKTVGEQLQSSGSQSSEFLQSEVGTFNSSKETNGSSPNIFWFRGD

SEQ ID NO: 37729 - protein, 353 aa, Glycine max
  Clone ID: 701147041_FLI.pep
AEGVWAVVDVSIEIGHDAANAQPSISCRRLPSGCIVQDMPNGYSKVTWLEHWEYDENVVHQLYRPLLSSGVGFGAHRWIATLQRQCECLAILMSSSISSDSHTALSQAGRRSMLKLAQRMTSNFCSGVCASSARKWDSLHIGTLGDDMKVMTRKNVDDPGEPPGIVLSAATSVWMPVSRQRLFDFLRDERLRSEWDILSNGGPMQEMVHIAKGQGHGNCVSLLRANAVNANDSSMLILQETWMDASCSVVVYAPVDVQSLNVVMSGGDSAYVALLPSGFAILPDGHCNDNGCNGSLQKGRGSDDGSGGSLLTVGFQILVNSLPTAKLTVESVDTVNNLISCTIQKIKAALRVA

SEQ ID NO: 37730 - protein, 285 aa, Glycine max
  Clone ID: 701213520_FLI.pep
LQRGSYMEMSFFYPVKLRIKSFRVPELFIEIPETATVGSLKRTVMEAVTAVLGGGLRVGVILHGKKVRDDSKTLLQTGISHDNHLDALGFALEPNCSRNRPSACATTDSLHIPSADMPQPLIGYPSSPAVIHQRIQGFSNMLAKHQATSSGNLVESDHDSAPSPINTSGEKYLSDSKELITVPEMGMEALAVLPVHQKSKRTEIAQRRIRRPFSVTEVEALVQAVEKLGTGRWRDVKLRAFDNAKHRTYVDLKCRINGKHWCTQQEYQLSKGGESLFPKNFWTGS

SEQ ID NO: 37731 - protein, 348 aa, Glycine max
  Clone ID: 701213870_FLI.pep
FPFLLPLSFAKWVIISFSHNTIFFTFSFFFASLRWGFKFHHRNRMFSRLIHPHEGQEDMQGGSNHAHLGDPCLVLTSDPKPRLRWTADLHERFVDAVTQLGGASKATPKAIMRTMNVKGLTLYHLKSHLQKYRLGKQSGKDSDEGLKDASYLQESPGTDNSSPKLPASDANEGHEVKEALRAQMEVQSKLHLLVEAEKHLQIRQDAERRYMGMLERACKMLADQFIGDVIIDRDGQKFQGLENKTSRSPLVDHGGFFPAACTEVGGMHVSEVPPILQPQGAECSSESCLKSLESLGGLTLEGSPGGSKKRMLNLDSMVAPLIWSEANTRTQGIHLAQVNPPGMTRYGM

SEQ ID NO: 37732 - protein, 161 aa, Glycine max
  Clone ID: 701214791_FLI.pep
CFFHMLYIINPDYDFSIIKYYYILFVQHKLEPDLAKRAEHYFSENMRVLKGVEAWAMGRLKDFGMLITASGRSSIQNYECGCEPLIQLYEILLRAPGVLGARFSGAGFRGCCLAFVEADLATEAASFVRSEYLKVQPELASQISKDTAVLICESGDCARVI

SEQ ID NO: 37733 - protein, 304 aa, Glycine max
  Clone ID: 701120778_FLI.pep
ADASGNAPGRIEVGGKPPEVKEKLPIKRSKGSASGGNLNMWITGKNNEPGKIPGESANGIHSKSGESASDGTSEGSDENSQNDSQLKSRERQDSFEDEPSQNGSSVHAPQNGVHNRPQTVVNQTMSILPISTTSAPGAVPGPTTNLNIGMDYWGTPTSSTIPALHGKVPSTAVAGGMIAAGSRDGVQSQVWLQDERELKRQRRKQSNRESARRSRLRKQAECDELAQRAEALKEENATLRSEVSQIRSEYEQLRSENAALKERLGDIPGVATPGKEDLRSGQNDQHVSNDTQQSGQTEVVQGVH

SEQ ID NO: 37734 - protein, 329 aa, Glycine max
  Clone ID: 701139073_FLI.pep
VSHSLSCSLNNNDALTDINTSFRCYLIHQMQQIHSMPGGRFFSGSGSADRRLRPHHQNQQALKCPRCDSLNTKFCYYNNYNLSQPRHFCKNCRRYWTKGGVLRNVPVGGGCRKSKRSSKPNKITPSETASPPPPPHPDHNNNSNSHSSSESSSLTAAAATTTEAVSAPETLNSDSNNNNNMQESKLLIPALETNNSLEQGTGDCGGIFSEIGPFTSLITTTTSTNEPLGSGFGFGNSTLPDASSFQWHYQKVSSNNEELKLPENSFLDHTVDLSGMHSKTSHGGGFGSLDWQGGADQGLFDLPNTVDHAYWSHTHWSDHDNSSSLFHLP

SEQ ID NO: 37735 - protein, 261 aa, Glycine max
  Clone ID: 701142412_FLI.pep
ATEGPQEQKLNGIPLLHGPETERKGSRSMVEGMNFFRRVNRTSCISTEAKKVSSQSMDSNGECDFISDSDSGSALLLLGTVQTAELSEHDNPRNPFKSSKRHKNKFTEHLGAQWDVFRRQDVPKLIEYLERHYDEFSYTHDYHKKMVHPILDQSIFLDSTHKMRLKEEFKIEPWTFQQHVGQAVVIPAGCPYQIRNSKSSVHAVLEFVSPENVTEGIQLFDEVRLLPEDHKAKADMLEVKKMALHSMNTAIKEVRQLTSKT

SEQ ID NO: 37736 - protein, 370 aa, Glycine max
  Clone ID: 701142852_FLI.pep
CLHHDPCHALGDLVGIKKHFRRKHSNHKQWVCERCSKGYAVQSDYKAHLKTCGTRGHSCDCGRVFSRVESFIEHQDACNMGRLRPESQPLQPSACLSRTASSPSPSSETNFSTAPWPTRMIIPKPSEPPTIFMNNPITAITTAETSSKSNNKLLHPNLDLQLSTPTTTNNTSNVANRIDAAISPKRDHHHHHENHSTHLQLSIGSSDMSEKNESNRNSSEKSSNSNINDQNNNNKQSNNMALLRVQEQAREHLRIAMAEKAYAEEARKQAKRQIELAEQEFTNAKRIRQQAQAELDKAYSLKEHAMKQINSTMLQITCHGCKQQFQARNAATTPDENSLVLSYVSSAITTEGGGEVENDNNAKDHGKDNN

SEQ ID NO: 37737 - protein, 326 aa, Glycine max
  Clone ID: 701143241_FLI.pep
VFQYINCEDGKMSGPPGDVANSLMDGYSKGNNEVRRRSRFLRRRGRVRRLKYTWKSAAYHSIRKRITERKDQPCRQYNPCGCQTACGKQCPCLQNGTCCEKYCGCPKSCKNRFRGCHCAKSQCRSRQCPCFAADRECDPDVCRNCWVSCGDGTLGIPSQRGDNYECRNMKLLLKQQQRVLLGRSDVSGWGAFLKNSVGKHEYLGEYTGELISHREADKRGKIYDRENSSFLFNLNDQFVLDAYRKGDKLKFANHSPDPNCYAKVIMVAGDHRVGIFAKERICAGEELFYDYRYEPDRAPAWARKPEASGSKKEDGAPSSGRAKKLA

SEQ ID NO: 37738 - protein, 280 aa, Glycine max
  Clone ID: LIB3242-285-C6_FLI.pep
LMEDHAHAALPPGYRFYPSEEVLVGYYLTKKNENREEGFYGSDLIRELDLYDHDPFELPDAAACFSYGYKGRKKHWFCYAKETKRRNRRKVKSGFWLRKGKVRDISDHNGDDVVLGTRTRFVFYVGNSLKNAARTDWILYEYALVDRFLASFVLCRVVNKPPHKNSPSEIGLSCCAEESVVAVVRHVGVQCDGCAESDVVEAKVCDEGFVNRENEIAENPISGEHGDPAAPVSVAQGSQPVQERLSKLPSGSALFVGAMTSQQLMLSILEEDFIELDDIA

SEQ ID NO: 37739 - protein, 374 aa, Glycine max
  Clone ID: LIB3242-015-B2_FLI.pep
LPYERGFWCRMGSIENASKPRKENPKFELPAGFRFHPTDEELINQYLTKKVVDNCFCAIAIGEVDLNKCEPWDLPGLAKMGETEWYFFCVRDRKFPTGIRTNRATDIGYWKATGKDKEIIMENALIGMKKTLVFYKGRAPKGEKTNWVMHEYRLEGKHNQPKPGKSEWVICRVFEKSRCGKKMHVPKCGRFNNPFGEEPSSGASLLPPLMDSSPYNSETRTTTAGELSQVTCFSDPNQTEDQNNTHDDIVDSMETPILNFSPFSRPDDASTLAKATLSSASNQSAQIAHQIGDSQFPDYCYAPQEPSMLRMLMENHEPCAKQTQKEEFPEGRDFDGDISSMIYSSDMINRMFGNQERSSSASAGPVDTDFLWNY

SEQ ID NO: 37740 - protein, 214 aa, Glycine max
  Clone ID: LIB3242-391-A6_FLI.pep
KDSNEPFYIYATSLDHRNSEENLGEKMMITEDETTLTASKEQQSEMMNGDKDNHGSEDDNSKEWLNLSIGGTTTLLSTAVPPATAKVFSCNFCMRKFFSSQALGGHQNAHKRERGAARRYQSQRSMAIMGFSMNTLTMCRSLGVQPHSLVHKPCRDGIMVAPSFHDAYARIGMAWTPFWTEDQADMVWPGSFRLVPKQPQSPQEPLKLDLDLRL

SEQ ID NO: 37741 - protein, 509 aa, Zea mays
  Clone ID: LIB3136-016-G2_FLI.pep
AREVRGLRCGGGGLASAMASGGSSRYSSYKAPGLRGALLEAAHVSCLEDRYALGPQLGWGQFGVIRSCSDLVTGEALACKSIAKGRLVSPDDVRGVRLEIDVMARLAGHPNVVGLKAVYEDRDSVHLVMELCAGGELFHRLHERGCFPEREAAALFRHLMEVVAHCHAKGIVHRDLKPENILLVSRSPQSPIKLADFGLATYTQPGRSLSGMVGSPFYIAPEVLSGGYNEAADVWSAGVILYILLSGIPPFWGKTKSKIFDCIRSMELRFPSDPWDRVSDSAKELVTGMLRRDPRLRLTAKQVLEHPWMQEHADPQDSCGQCHETGLQREGAGSCSFSTPLASRSRDVSFDTRGPIAWRGGGEDEATCCSPTFAAVCRSSFSAFITDPAPPPCSASSALGGSGFSFGEPCEPLDGGGGGGFPMPMASMPSFSFFCARDSSEPAEPQPVAASSTPRTARGSTPRGVNGRRNHTIGGGGREHLDVAVESVIRWASCTNFSTAPSLRASLVC

SEQ ID NO: 37742 - protein, 280 aa, Zea mays
  Clone ID: LIB3151-016-A12_FLI.pep
LEAPLSLSLSLFAVRSSAPQSNRHLAEMGRKFFVGGNWKCNGTTDQVEKIVKTLNEGQVPPSDVVEVVVSPPYVFLPVVKSQLRQEFHVAAQNCWVKKGGAFTGEVSAEMLVNLGVPWVILGHSERRALLGESNEFVGDKVAYALSQGLKVIACVGETLEQREAGSTMEVVAAQTKAIAEKIKDWSNVVVAYEPVWAIGTGKVATPAQAQEVHASLRDWLKTNVSPEVAESTRIIYGGSVTAANCKELAAQPDVDGFLVGGASLKPEFIDIINAATVKSA

SEQ ID NO: 37743 - protein, 244 aa, Zea mays; identical to SEQ ID NO: 36900
  Clone ID: LIB3151-049-C4_FLI.pep

SEQ ID NO: 37744 - protein, 149 aa, Zea mays
  Clone ID: LIB3151-061-E9_FLI.pep
RRIGGCWLTLLLVHLITLHPRWSLGAIMFEMLVGYPPFYSEDPMSTCRKIVNWRSHLKFPEEASLSLEAKDLISKLLCNVDQRIGTKGAHEIKAHPWFAGVEWEKLYQMEAAFIPEVNDELDTQNFEKFEETAPPMQTSSKAGPWRKLS

SEQ ID NO: 37745 - protein, 482 aa, Zea mays
  Clone ID: LIB3152-035-D11_FLI.pep
AAAPALTVLLKMGSWLPADQFSIKVLPTIVKLFASNDRAIRACLLHHINQFGESMSAQIVDEQVFPHVATGFSDTDGTIRELTLKSMLVLAPKLSQRTISGSLLKYLSKLQVDEEPGIRTNTTILLGNIAGYMNDGTRKRVLINAFTVRALRDTFPPARAAGIMALSVTSSYYEMTEIATRILPNIVVLTFDPNSDVRTKAFQATDQFLQIAKQHHEKLNTGDNSVAESTGVKLKPGNAGLLGWAMSSVTQKGKPSDHAPISTANANNSQASTTSTATPDTQASTLAYAPSTSTSLDQAASASARSSVDGWGELEDGNIHEENSSDKDGWDDVDPFEDKPSPSLLSNIQAAQKRPVVQPKQPVANSSKPNPPKAPKSEDDPLWGPIAAAPPKSAVKSADIKPSTSHNDEDDLWGSIAAPPKSSGKPLKPAVANSDDLWGAIAAPPPATKARPLASSGRGRGTKPAQPKLGAQRIGRTSSTGM

SEQ ID NO: 37746 - protein, 269 aa, Zea mays
  Clone ID: LIB3180-055-F6_FLI.pep
KYPTGLRANRATEAGYWKATGKDKEVYNAAEGVAVLVGMKKTLVFYRGRAPRGDKTNWVMHEYRLEGSGRLPAGLASATGSAAANAAAALKASAYKDEWVVCRVFHKTTGIKKTTTAAPAYQVAMAGAEMDQNQNNIPFPMPMQFSMLPDFSLDPVPPYYPYPNAGAGMPMLPMAAGIGGGAGGLHLNGAALFGNPMAAPQPMSFYHQMGTGTACAGGFDVSAPESRPSSMVSQKDDQANGAEISSMMSVAGPGPATTTTIEMDGVWKY

SEQ ID NO: 37747 - protein, 288 aa, Zea mays
  Clone ID: 700084920_FLI.pep
VNGLELRFCQQCSRFHNLAEFDQQKKSCRKRLAGHNERRRRPPPGPLASRYGRLAAPLGEEPGGRFRSFMLDFSYPRVPSAMRDGFPAVRPGGERVPGSNIQWQAASLDPPPPHHQSAAAGYGAHSYGSPGSSSSSRPPVFPAGPELPPGGGCLAGVPTDSSCALSLLSTQPWDAAGHSAGHGHGHAASLPATAGFDGNPVAMASSYIAPPSPWTDSRAHEGGRRNVPQLPPDVPLGDVHSGPGTHHGQFSGELELALQGNRPAPAPRNGQGSAGAFDQAGSTTEWSL

SEQ ID NO: 37748 - protein, 171 aa, Zea mays
  Clone ID: 700105142_FLI.pep
RLLAEATPKGILKLMNTDGLTIYHIKSHLQKYRIAKYMPVSSTSEGKEEKRAAAANDVQNLDLGTGMKITEALRVQLDVQRRLHEQLEIQRNLQLRIEAQGKKLQKMFEEQMKTSRTVMGPPQGADVAFIGAGEQEEEVEVEDAFDDVQLLAAVSSASVGYRDGGFQSKIS

SEQ ID NO: 37749 - protein, 191 aa, Zea mays
  Clone ID: 700150942_FLI.pep
AGRKKEESRKNEEHVNLIKEYRAKIEAELSNICDGILKLLDSHLVPSSTAAESKVFYLKMKGDYHRYLAEFKTGPERKESAESTMMAYKAAQDIALAELAPTHPIRLGLALNFSVFYYEILNSPDKACNLAKQAFDEAISQLDTLGEESYKDSTLIMQLLRDNLTLWTSDLTEDGADEGKEAPKGEAGDGQ

SEQ ID NO: 37750 - protein, 230 aa, Zea mays
  Clone ID: 700157267_FLI.pep
KYPNGSRPNRTAGKGYWKATGADKSIVPMGSTRAAGIKKALVFYSGKASRGVKTDWIMHEYRVAQADHTLGKKGSHKLDEWVLCRLYNKRNNWDKVKVEEQELEAAPRRQHHRQSAEDSMSDSFQTHDLDIDNASELHNCYGNNMVQGQAMTARNDIGVVTVKEDNDWFTDMNLDDLQASYNMAHTVNPIPAQTANLVTGQGHGYLQGYGYLQYMNSPSMKMWQTILPPF

SEQ ID NO: 37751 - protein, 201 aa, Zea mays
  Clone ID: 700164059_FLI.pep
QTKVFYFDIGENKRGRFLKVSEASVNRNRSTIIVPAGSSGEEGWEAFRSVLLEINNEATRLYVLPNHPNQQHMEPPERLPGLSDDVGAGFIAGHGSQSASGPEVDVERLVDLPPQEEISGMGMSKVIRADQKRFFFDLGSNNRGHYLRISEVAGADRSSIILPLSGLKQFHEMVGHFVDIMKDRLEGMTGANVRTVEPSQR

SEQ ID NO: 37752 - protein, 222 aa, Zea mays
  Clone ID: 700166747_FLI.pep
AAEPDAGFHEAEPGRVGRHVRHLHVLLLVGHGRRGQRLQGPEPHVLREAAAVWPQAEALRRRPLRGHHQRQPLPLLQEKEEPREEEHQSAGDQLEGRRHPAGRVLVEEVRPEAYQGLPLPTVKKKNLLLHPQSGPRLVSSVLSRNESDCSLVTWSSGYYKCSTVRGCPARKHVERATDDPAMLVVTYEGEHRHTPGAVQGPSPLATASPVPVAVSAGNGLVV

SEQ ID NO: 37753 - protein, 117 aa, Zea mays
  Clone ID: 700167008_FLI.pep
NTIPGIEEVNIFKDDVVIQFVNPKVQASIGANTWVVSGTPQTKKLQDLLPSIINQLGPDNLDNLRRLAEQFQKQAPGASGAEAGASAGAAQDDDDDVPELVPGETFEEAAEEKKESS

SEQ ID NO: 37754 - protein, 209 aa, Zea mays
  Clone ID: 700167489_FLI.pep
AASAAAVNFNRHDASTTLQSAATCIPPPTTVRSVSMRDMGTEMTPIASQEPSRTGTPVRATSPNCSQPTTPRRTLGGPSAVGSFISHGGECSSSELSEQELQTKTRREIMLLGTQLGKTSIAAWASKKEEEKDASLSLKPVPMDQSTQNITAIRAAAWEEAEKAKYLARFKREEIKIQAWEDHQKAQIEAEMRKIEVRRLFSVLLFSLP

SEQ ID NO: 37755 - protein, 128 aa, Zea mays
  Clone ID: 700172886_FLI.pep
LSLKPVPMDQSTQNITAIRAAAWEEAEKAKYLARFKREEIKIQAWEDHQKAQIEAEMRKIEVEVERMRARAQDKLMTKLASARHSADEKRAAAELKRNRAAARTAEQAEHIRRTGRVPPSFGCWNWCS

SEQ ID NO: 37756 - protein, 163 aa, Zea mays
  Clone ID: 700223944_FLI.pep
GNERSDNSGSLYGLLLGKNILVVDDNKVNLRVAAGTLKKFGAKVECVESGKDALALLQVPYKFHLCLMDIQMPEMDGFEATKQIRAMEAKANEQAVACDDSEIDGATRAARWRLPVLAMTADVIQATHEECTKCGMDGYVTKPFEEKQLFQALQKFLDPGMSC

SEQ ID NO: 37757 - protein, 308 aa, Zea mays
  Clone ID: 700224773_FLI.pep
RSVDRSMASVIDGNGGSRLVVTELGHLKELAMQLEGHLGGSSPDLCKHLASQISSITDRSISLLITATSSSPHGGASDAPPFIKATTKKRKRMDKKRHEVRVGSAGGGGGDHPADDGYSWRKYGQKEILGAKHPRGYYRCTHKSSQGCAATKQVQRTDEDPAFFDVVYLGDHTCVQSQRAAATAGRQAAADAQAPVYDANLMVKTEGPALEPEQQRRGWDDAPTPFLFSSTPACLVQERSPFSAPSTSENWGVSPATSDSNHVVSFPPFEVAAAAAAQFEFEEVMSAMDRADGEFLEDLDIYVSSFLA

SEQ ID NO: 37758 - protein, 257 aa, Zea mays
  Clone ID: 700240731_FLI.pep
IVSIENSGEKGAMEKADMCVASTSITNTDDTSLCIGIHSHDSIVECQDYAMQHTLYCEKHLPRFLKRARNGKSRLVSKDIFVNLLKGCTSRKDKICLHQACEFLYWFLRNNLSHQHTSLASEHMPQILAEVSKNPDVGEFLLKLISTEREKLANIWGFDTNRSKQIYSENKEGSLVLHKEGTNLSSGPKCKICAHQFSDDEALGLHWTTVHKKEARWLFRGYSCAACMESFTNKKVLERHVQDVHGAQYLQYSILVM

SEQ ID NO: 37759 - protein, 223 aa, Zea mays
  Clone ID: 700241062_FLI.pep
IYVDEQVVEAVDGGRRRDGGHERGHHFLVLGLPPPLGGLERPEGGDVGGARGRGRHAPVLRRGRRRGGGGEVQGRGGAPAPRRVRQSLGLHREAGAQGLQVAARVRVVLRRRRPVGGAGVFAVVDDVVQRRVLVGALHLLRRLAPLRVAVRAAVVAPARFGTTEVVRQSAVPIQINNTCLSEIDVLTLGAWLRESPSGRTSSSYGRRRPGSRRRPSSPSASAV

SEQ ID NO: 37760 - protein, 676 aa, Zea mays
  Clone ID: LIB3136-001-D6_FLI.pep
HLNPSVKTTFQARVYRHSHSKCVLVWVAAGSSSEPINHPNSLVNLLKNLAAIASTQSYQDILKNANSNSILSNAGNNAANGSTVHEQTIRSIPIRGESLAEEPPVKRRVHDFDLNDACFEEVESRTDKIVFKLFGKEPKDFPVDLREQIQHWLSHYPTDMESYIRPGCVILTIYLRLPNWMWDELDDDPASWIEKLISISNDGLWRKGWLYARVQDCLTLSYNGSLMFASPWQLVIGDKHQRLCVTPIAVACSSSVKFSVKGFNIVQPTTKLLCVFGDKYLIQEETQMLLEDSTVQQGPQCLTFSCSFSCTSGRGFIEVEDYDQSSLCVPFVVADKDVCSEIRMLEHGLNLISFDETSERIDDLMAYRNRSLHFLHEIGWLLQRSHVRATSEQPQYCPDRFPVERFRWLLSFAVDQEWCAVLRKLLNTMFQGDIDLDVPSPIEFALGENVLLTAVKKRSKPLVEFLLRYTATDYAPVGSGAGAPVQFLFTPAMTGLSNITPLHIAATISDATGVLDALTDDPRQLGIKAWKNARDATGFTPEEYARKRGHISYIQLVQDKIDRRVSRAHVSVTIPSTIDTAGKHASRLKPADQITFGVEKKQRGMNQTLSCRQCVQQVQQLAFHSRTNRFLSNRPAMLSLVAIAAVCVCVGLIMKSLPQVGGMRPFLWDKIRWGPN

SEQ ID NO: 37761 - protein, 281 aa, Zea mays
  Clone ID: LIB3136-019-C9_FLI.pep
RATTAGFWKATGRDKAIFLGNASRRIGLRKTLVFYIGRAPHGKKTDWIMHEYRLDQENVEIQEDGWVVCRVFKKKSYHQRGLNPAEMAAALDDDELQPFPVPIPGSSLQPTEHKTNPTHLMQYDYPSFDPSMQLPQLMSDDQEQEQPVRPTLLPGHPGVAMASMSSLNIECSQNLTKLTSNGSDEMLHVGHGGGAGGGVVVDRFAGTTTDWSILDKLLASHQNLDRLFHGKVVTTASASPMAVPVYHQQLMELGGSSSSLQRLPLQYLGGETADLLRYHPK

SEQ ID NO: 37762 - protein, 330 aa, Zea mays
  Clone ID: LIB3152-033-G12_FLI.pep
KKERSMDMISGSTAATSTPHNNQQAVMLSSPIIKEEARDPKQTRAMPQIGGSGERKPRPQLPEALKCPRCDSNNTKFCYYNNYSMSQPRYFCKACRRYWTHGGTLRNVPIGGGCRKNKHASRFVLGSHTSSSSSATYAPLSPSTNASSSNMSINKHMMMVPNMTMPTPTTMGLFPNVLPTLMPTGGGGGFDFTMDNQHRSLSFTPMSLPSQGPVPMLAAGGSEATPSFLEMLRGGIFHGSSSYNTSLTMSGGNNGMDKPFSLPSYGAMCTNGLSGSTTNDARQLVGPQQDNKAIMKSSNNNNGVSLLNLYWNKHNNNNNNNNNNNNNKGQ

SEQ ID NO: 37763 - protein, 284 aa, Zea mays
  Clone ID: LIB3245-453-E4_FLI.pep
FTMGSSGADTPSKEQQPPATSGAAIPPVYPDWSSFQAYPPIPPHGFFPSPVASSPQGHPFMWGAQAMIPPYGTPPPYVMYPPGVYAHPSMPPGAHPFTPYAITSPNGNADATGTTVAAGNTDGKPSEGKDKSPTKRSKGSLGSLNMLTGKNPSEHGKSSGASGNGVTSQSGESGSDSSSEGSEGNSHNDSHHKESGQEHDGDVRSSRNGVSRLQSEGKLNQAMAILPIPSSGPATDPTTNLNIGMDYWANTASSAPAIHGKATSTTVPGAVVPAEQWTQDEHEL

SEQ ID NO: 37764 - protein, 443 aa, Zea mays
  Clone ID: LIB3245-490-C9_FLI.pep
YSSVEITPNKGSILSKIISVTVRTIQKDAEEKKASFNPRPYFRLFINWLYDLTTTDGHHDGSNFQVLTAFANAFHLLQPLRVPAWSFAWLELVSHRSFMPKLLMSNSQKGWPFFQRLLVALFKFMEPYLRNAELPEAVDLLYKGTMRVLLVLLHDFPEFICDYHFSFCDVIPSSCIQMRNVILSAFPRNMRLPDPSTPNLKIDLLAEISIAPRIMSDVDGTLKSKQLKTEFDEYLKRPEGSSFLSVLKQNLLLPQNEAAVAGTRYNVPLINSLVLYVGIQAVQQLQQNKANASASVQQIKHTPTMDSFQIETATEMFTNLITSFDTEGRYLLLNAIANQLRYPNSHTHYYSFIILHLFAEATQQEIIQEQITRVLLERLIVNRPHPWGLLITSIELIKNPRYNFWNRSFTHSAPEIEKLFESVARSCGAKAVDEGISVQDGSH

SEQ ID NO: 37765 - protein, 81 aa, Glycine max
  Clone ID: LIB3242-395-E11_FLI.pep
TSLPNWTGFINIFQQCLQLICILVHFYGFLNLWVWIFVPRVSAINKQLTWAMCVLYAYPYSVSTMISVQPVGVSMSRKAMR

SEQ ID NO: 37766 - protein, 50 aa, Zea mays
  Clone ID: 700346585_FLI.pep
KCRTIIYKYNHLKHIWYDIYKSLLRAAYGHKYYLNPNISQHTNMYMNTIQ

SEQ ID NO: 37767 - protein, 427 aa, Glycine max
  Clone ID: LIB3242-402-B6_FLI.pep
FIALQLSHLNPLRKPLHIFTSSSALIRNQREFTKEVTMSDDEREEKELDLTSPEVVTKYKSAAEIVNRALQLVISECKPKAKIVDLCEKGDSYIREQTGSMYKNVKRKIERGVAFPTCVSVNNTVCHFSPLASDETVLEDGDIVKIDMACHIDGFIAAVAHTHVLQEGPVTGRAADALAAANTAAEVALRLVRPGRKNKDVTEAIQKIAAAYDCKIVEGVLSHQMKQFVIDGNKVVLSVSNPDTRVDDAEFEENEVYAIDIVASTGDGKPKLLDEKQTTIYKRAVDKSYHLKMKASRFIFSEISQKFPIMPFSARALEEKRARLGLVECVNHELLQPYPVLHEKPGDYVAHIKFTVLLMPNGSDRVTSHSLQELQPTKTIDDPEIKAWLALGTKTKKKGGGKKKKGKKGAEAEPMDATNDATPQEQD

SEQ ID NO: 37768 - protein, 98 aa, Zea mays
  Clone ID: LIB3152-001-A7_FLI.pep
LASGYTTAHSFFSGGHRRQQRRGMESAAAGRTSPSVAALSAPPTAPRPGRFAAAAAGWTGGPSRRSPGTGAAAAHGPAVAGGPAAAGGPAVGDAPEVA

SEQ ID NO: 37769 - protein, 366 aa, Zea mays
  Clone ID: LIB3150-065-B10_FLI.pep
LGSGPMLGQVLRRLRPAVAAEVARGYSAAAKEMTVRDALNSALDEEMSADPSVFLMGEEVGEYQGAYKISKGLLDRYGPDRVLDTPITEAGFTGIGVGAAYHGLRPIIEFMTFNFSMQAIDHIINSAAKSNYMSAGQISVPIVFRGPNGAAAGVGAQHSQCYAACFAHVPGLKVLTPYSSEDARGLLKAAIRDPDPVIFLENELLYGESFPVSAEVLDSSFCLPIGKAKIEREGKDVTITAFSKMVGYALQAAEILSKEGISAEVINLRSIRPLDRAAINASVRKTNRLVTVEEGFPQHGIGAEICMSVVEESFAYLDAPVERIAGADVPMPYAANLERMAVPQVDDIVRAAKRACYRAVPMAAAA

SEQ ID NO: 37770 - protein, 243 aa, Zea mays
  Clone ID: LIB3180-049-D5_FLI.pep
RRRGQHHGRHRQRLRHRLRGAGVAGAVRRVRQPRRDHGGGRAEPACVRGTPPRRHAPLLVLGDDHAERRKRGAEDGGGGAPPVRHHPGPRRGPRRAGLRHLRQDLHRRLAQEDDGAGRARHVQPARRRYALRGRDARGAPRRRTRLRRPGRHLCLQQRGCMGQRQEVHRGRLVGGGEVAGAQGIGGAQSGGDRGHHRRPAQGHLRTVPQHPHQAYGRGVARLRALLRRARWHHLRPPLINACC

SEQ ID NO: 37771 - protein, 96 aa, Zea mays
  Clone ID: 700348262_FLI.pep
NTNTSKLVGPKKQTVYERSGCRSIIDVSPSDDASEMKHWRTRMAAAMHSLPSLQDPSISLGKAGRWRFFQVDQSDPTTIRRGRARGKVGGRCLCHR

SEQ ID NO: 37772 - protein, 140 aa, Zea mays
  Clone ID: LIB3070-013-F11_FLI.pep
FYLLHRSILHTYIENAMDYVLHHFLNHRRCSILAVFKPMDLHMMMRRGDHRFHDMFLHRAAAAGSVISSPLLHNGDLFGSRDAVSPEASRLYALLQRRQQPSSTQTFALMNYSSSLIDMMYLINHQIEMKNTMHACALHS

SEQ ID NO: 37773 - protein, 232 aa, Zea mays
  Clone ID: 700421759_FLI.pep
APVPIFSPPSHAYDDGGGGGSVCSKLAPRFAPGDDRGRPCPLQQVSEGCHCLRQSFHEHNVLREPDADGAAQVVFGDDLSAVRFSEREGEAEARRRGRRVPAVPVRGRRRRRRRRRQQLVRRVHPLRGRPAPGLPQGVREEPAERATEERQWLRRRAGATVDSSLSLSHTHSRYVVWKRTCTTSLHEHVLQRCFGVRWRDLSFCYKRQSFSRGLMVRTRNFSQSNECLEITQ

SEQ ID NO: 37774 - protein, 319 aa, Zea mays
  Clone ID: LIB3069-022-E10_FLI.pep
ADLLHAHFYESCPYLKFAHFTANQAILEAFAGCRRVHVVDFGIKQGMQWPALLQALALRPGGPPSFRLTGVGPPQPDETDALQQVGWKLAQFAHTIRVDFQYRGLVAATLADLEPFMLQPEGDDTDDEPEVIAVNSVFELHRLLAQPGALEKVLGTVRAVRPRIVTVVEQEANHNSGTFLDRFTESLHYYSTMFDSLEGAGAGSGQSTDASPAAAGGTDQVMSEVYLGRQICNVVACEGAERTERHETLGQWRSRLGGSGFAPVHLGSNAYKQASTLLALFAGGDGYRVEEKDGCLTLGWHTRPLIATSAWRVAAAAAP

SEQ ID NO: 37775 - protein, 79 aa, Zea mays
  Clone ID: LIB3118-009-E3_FLI.pep
CINRPLPPHISLNIDFILYNPKKVDRLQQLKSKDYVKRFPLVISSVCWNLVASALEAMLKWPLTLLSNIHNLLHAHNLL

SEQ ID NO: 37776 - protein, 115 aa, Zea mays
  Clone ID: 700421855_FLI.pep
ILVLSVASTPPRLTNRNVSTRGGGPTTTTKAIEPLAQPTTISNLSFRDVKPVVRGAWIGHLLQVQVHAVIVLLLALLRLGRLPPPFPRFQPQLLADVVVVRHLAPLLRVADHLLV

SEQ ID NO: 37777 - protein, 562 aa, Zea mays
  Clone ID: LIB3062-036-G8_FLI.pep
CFFAGKKMPTTGVIAGTRDGLSSESISRFLLPASECEFVLNSVIEEIQKDPWPVPADQRASRCTGAALSVAANLLGVCVPGSGARIMAFVGGPSTEGPGPIVSKSLSEPIRSHKDLDKDSAPLYDKAVKFYDQIAKQLVHQGHVLDLFACAVDQVGVAEMKVAIEKTGGIVVLAESFGHSVFKDSLLRIFQSTDDNLGLSFNGILEINCSKDVKVQGIIGPCSSLEKKSPLSSDTVIGQGNTSAWKMCGLDRKTSLCLVYDIAKKDGPDSIAQSANNQFYFQFLTYYQHNEGQMRLRSTTISRRWVSGDNHVEELVAGFDQEAAAAVMARLVSFKMETEVDFDPVRWLDRALIRLCSKFGDYQKETPSSFSLSPRLSIFPQFIFNLRRSQFVQVFNNSPDETAYFRMMLDRENVTNTGVMIQPSLISYSFQSGPEPVLLDATAIASDKILLLDSYFTVVIFHGVTIAQWRNAGYQDQEGHEVFAQLLKAPHEEANLIIKERFPVPRLVVCDQYGSQARFLLAKLNPSVTYNSDNPSPGGDVIFTDDVSFQVFMDHLQRLAVQ

SEQ ID NO: 37778 - protein, 827 aa, Zea mays
  Clone ID: 700156317_FLI.pep
QGQHHHGWGRKNALTREAVAKVVDDTYRKMQVCAPDLPSRSHSGSDFSHFRPKEEAPDFYHVDTKVRCLCNSTLLNDNMIKCEDGKCQVWQHITCVLIPDKPTEGAGPDIPPHFYCELCRLKRADPFWVTTGNPLLPVKFMSSGVGNDGASVPQIVEKTFQLSRADRETVQRQEYDLQVWCILINDKVQFRMQWPQYAELQVNGIPVRVMTRPGSQLLGINGRDDGPLVTTCSREGINKISLSRVDARTFCFGVRIVRRRTVPQVLNLIPKEGEGESFEDALARVRRCLGGGGATDNADSDSDLEVVTESVTVNLRCPNSGSRMRIAGRFKPCVHMGCFDLETFVELNQRSRKWQCPICLKNYSLENLMIDPYFNRITSLLHNCSEDVNELDVKPDGSWRVKGDAATRDLSQWHMPDGTLCDSKEDTNPGVVSVNEFKREGTSDGHRTLKLGIKKTPNGLWQVSSKPDDKKPVVRNHIQNNTGYSIPNIVPMISSPTGSCRDGEDVSVNQEGGGIQFDISLNQEFDSFAHNFGQTYNTEDRQQEPQHNAADVIVLSDSDEENDPIVRLPAVYANTPTNGDSFPFVTDAAVSGYPEGYQEDAGVGTSGLGLLSNNTGDFEINNWQMHSYPQPEQGFQFFGTDTDVGNPFVGPHNSFSITPEDYSLDCNVGIEDPSAAHDVSIGRNSNDVHGSLVDNPLALAGDDPSLQIFLPSQPSTVPLQEELSERANTPNGVHPDDWRISLTLAAGGGGNEEPTSVDGLKSQPKVPSKEAGVEPLLDAASALPSMNNDRCNGSNLNPRRIENIFSHPRQPRSVRPRLCLSLDSDSE

SEQ ID NO: 37779 - protein, 167 aa, Zea mays
  Clone ID: 700421861_FLI.pep
RAQLGHAGQRHGAVRHAVEDPAGRRAGLLHGQRQHAGQVPDVRHVGQLHPVPRDRHRPVPHDPVEEPLLAVLVVAGADHVLRPERRPAAAELLRDVLLHAHVAGALLHGVPLHVRRLLRRLIDARAADEQELPHAGRLGPVRHRLDGVEVLAVVVEDDVERRASHGR

SEQ ID NO: 37780 - protein, 292 aa, Arabidopsis thaliana
  Clone ID: LIB146-020-E3_FLI.pep
FFHMDGHQHHHLHQLQYLNKHHLHTQSQTPEIASPVAVGDRFPQWSVEETKELIGIRGELDQTFMETKRNKLLWEVISNKMRDKSFPRSPEQCKCKWKNLVTRFKGCETMEAETARQQFPFYDDMQNIFTTRMQRMLWAESEGGGGGTSGAARKREYSSDEEEENVNEELVDVSNDPKILNPKKNIAKKRKGGSNSSNSNNGVREVLEEFMRHQVRMESEWREGWEAREKERAEKEEEWRRKMEELEKERLAMERMWRDREEQRRSREEMRAEKRDSLINALLAKLTRDGSL

SEQ ID NO: 37781 - protein, 183 aa, Zea mays
  Clone ID: 700421864_FLI.pep
TVAEAAEDWILDDIKGLLGRCNFRDDMLDRKVQFLSGGEKARLAFCKFMVTPSTLLILDEPTNHLDIPSKEMLEEAISEYTGTVITVSHDRYFIKQIVNRVIEVKDQTIQDYQGDYNYYLERNLEARERELAREEELEERAPKVKAKSKMSKAEKAVRKKQKMQAFQQSKQKSKSLKNSKRWN

SEQ ID NO: 37782 - protein, 344 aa, Arabidopsis thaliana
  Clone ID: LIB22-009-A10_FLI.pep
MESSSVDESTTSTGSICETPAITPAKKSSVGNLYRMGSGSSVVLDSENGVEAESRKLPSSKYKGVVPQPNGRWGAQIYEKHQRVWLGTFNEEDEAARAYDVAVHRFRRRDAVTNFKDVKMDEDEVDFLNSHSKSEIVDMLRKHTYNEELEQSKRRRNGNGNMTRTLLTSGLSNDGVSTTGFRSAEALFEKAVTPSDVGKLNRLVIPKHHAEKHFPLPSSNVSVKGVLLNFEDVNGKVWRFRYSYWNSSQSYVLTKGWSRFVKEKNLRAGDVVSFSRSNGQDQQLYIGWKSRSGSDLDAGRVLRLFGVNISPESSRNDVVGNKRVNDTEMLSLVCSKKQRIFHAS

SEQ ID NO: 37783 - protein, 147 aa, Zea mays
  Clone ID: 700422165_FLI.pep
DSSSRAVVLTAHAHTTLFGDITAVAASTSKESGSIHTGGSGGCSCFWSSWSSAAESGSGLAAESWRGAAARMRGRSLASSWSSSSSSSSVERLMQEQRSREAKKAEVTLVPTQVAQLSMADLLLGLRCGGVGQTRNGRQARERERSW

SEQ ID NO: 37784 - protein, 361 aa, Arabidopsis thaliana
  Clone ID: LIB22-030-E10_FLI.pep
AMGSNEEGNPTNNSDKPSQAAAPEQSNVHVYHHDWAAMQAYYGPRVGIPQYYNSNLAPGHAPPPYMWASPSPMMAPYGAPYPPFCPPGGVYAHPGVQMGSQPQGPVSQSASGVTTPLTIDAPANSAGNSDHGFMKKLKEFDGLAMSISNNKVGSAEHSSSEHRSSQSSENDGSSNGSDGNTTGGEQSRRKRRQQRSPSTGERPSSQNSLPLRGENEKPDVTMGTPVMPTAMSFQNSAGMNGVPQPWNEKEVKREKRKQSNRESARRSRLRKQAETEQLSVKVDALVAENMSLRSKLGQLNNESEKLRLENEAILDQLKAQATGKTENLISRVDKNNSVSGSKTVQHQLLNASPITDPVAAS

SEQ ID NO: 37785 - protein, 130 aa, Zea mays
  Clone ID: 700425331_FLI.pep
AGVMATVSAAVVTTIVARAAIARPNALGLPALRARSERVRCSYAKDAAPVSTKGAGASLLAAAGAVTASAGPALALVDERMSTEGTGLSLGLSNNLLGWILLGVFGLIWSLYTIYTSDLDEDEESGGLSL

SEQ ID NO: 37786 - protein, 321 aa, Arabidopsis thaliana
  Clone ID: LIB25-056-B4_FLI.pep
FFLGFSFGIMSDAYCTDCKKETELVVDHSAGDTLCSECGLVLESHSIDETSEWRTFANESSNSDPNRVGGPTNPLLADSALTTVIAKPKCSSGDFLSSSLGRWQNRNSNSDRGLIQAFKTIATMSERLGLVATIKDRANELYKRLEDQKSSRGRNQDALYAACLYIACRQEDKPRTIKEICVIANGATKKEIGRAKDYIVKTLGLEPGQSVDLGTIHAGDFMRRFCSNLAMSNHAVKAAQEAVQKSEEFDIRRSPISIAAVVIYIITQLSDDKKTLKDISHATGVAEGTIRNSYKDLYPHLSKIAPSWYAKEEDLKNLSSP

SEQ ID NO: 37787 - protein, 152 aa, Zea mays
  Clone ID: 700334786_FLI.pep
HKGRVHRQTAFHKKASTAAGGISKFAGGGISLPLPVAPLFSFGPNAFSRSFSSFSRAFLLFSNLEGLASAGLATTSTNAASTPDDMNDRASLRVMWLVSLVRPCTLVGWLYLQLKAAIRGLVPAQRFLDGGRRGIGRSCRDTAIIVATTVEC

SEQ ID NO: 37788 - protein, 332 aa, Arabidopsis thaliana
  Clone ID: LIB25-094-B8_FLI.pep
DKPIENCSICCEDRQSEMMLSLKCTHKFCSHCMKTYVEGKVKTSEVPIRCPQVQCKHYLSAAECKSFLPVTTFKSFEEANVCSKNNGKIYCPYPNCSFLLDPQECLSSGRASSSSSTQSENSCCVECPVCERFVCVDCGVPWHASMSCEEFQILPVDERYPDDITLHRLARYKRWRRCQQCRIMIELAQGCNHMTCRCGHEFCYSCGAEYREGQQTCTCAFWDDDEEEQENAVEENTIQEVEQWPWDTFNSIPTVMDAYSEQERSQLALIQRFLAGGGFSLSDHHTTYQSPPPPCTESSYVEAAMKDLHQLPWLERFVSVISDDYYEEYNSQ

SEQ ID NO: 37789 - protein, 577 aa, Arabidopsis thaliana
  Clone ID: LIB3168-057-F8_FLI.pep
KTLTQSDANNGGGFSVPRYCAETIFPRLDYSAEPPVQTVIAKDIHGETWKFRHIYRGTPRRHLLTTGWSTFVNQKKLIAGDSIVFLRSESGDLCVGIRRAKRGGLGSNVGSDNPYPGFSGFLRDDESTTTTSKLMMMKRNGNNDGNAAATGRVRVEAVAEAVARAACGQAFEVVYYPRASTPEFCVKAADVRSAMRIRWCSGMRFKMAFETEDSSRISWFMGTVSAVQVADPIRWPNSPWRLLQVAWDEPDLLQNVKRVSPWLVELVSNMPTIHLSPFSPRKKIRIPQPFEFPFDGTKFPIFSPGFANNGGGESMCYLSNDNNNAPAGIQGARQAQQLFGSPSPSLLSDLNLSSYTSNNKLHSPAMFLSSFNPRHHHYQARDSENSNNISCSLTMGNPAMVQDKKKSVGSVKTHQFVLFGQPILTEQQVMNRKRFLEEEAEAEEEKGLVARGLTWNYSLQGLETGHCKVFMESEDVGRTLDLSVIGSYQELYRKLAEMFHIEERSDLLTHVVYRDANGVIKRIGDEPFSDFMKATKRLTIKMDIGGDNVRKTWITGIRTGENGIDASTKTGPLSIFA

SEQ ID NO: 37790 - protein, 106 aa, Arabidopsis thaliana columbia
  Clone ID: LIB3176-038-A3_FLI.pep
LNYSRAGEFRDGFSPLRNGMLRQLSRKHQSHSSLNLPRSDRRFLIVPRKLRRLLSKLLEDIVNETVHDPHRFAGDSDIGMNLLKHLEDVDLVSLDTLLLHLFLLVA

SEQ ID NO: 37791 - protein, 162 aa, Arabidopsis thaliana columbia
  Clone ID: LIB3176-118-B11_FLI.pep
SLNLETSRKTVSMAPKAEKKPAEKKPASEKPVEEKSKAEKAPAEKKPKAGKKLPKEAGAGGDKKKKMKKKSVETYKIYIFKVLKQVHPDIGISSKAMGIMNSFINDIFEKLAQEASKLARYNKKPTITSREIQTAVRLVLPGELAKHAVSEGTKAVTKFTSS

SEQ ID NO: 37792 - protein, 304 aa, Zea mays
  Clone ID: LIB3587-225-G2_FLI.pep
NSASARQETKPTGNSRRKEEKEKASSGTATRQQWSDQASASRARTSSLSRFSLALGEVVLLAAVSALAATAAAAAGPLARVRRRVLQNLAERVVLVLERGHPLLQLRIAELQALGLRLQLRQVRLLPLPRLLRGHAVPQQPLQPVLLLVPRRAPALLPARRRLRPRRHLPLLAVLPLGTLVRAGARRGRRRRAAHLRHPPYLLVALRPSFREVVASGAGGALAAGGERARGARLRLLLLLLLLLLLRSHLPPPVLPSPLRQQIRISSLPPPLLLGLRLLPEKKKKSNLCARHGQERDRQGGEKQ

SEQ ID NO: 37793 - protein, 253 aa, Zea mays
  Clone ID: LIB3608-056-B7_FLI.pep
SNKSIKYQFSPIPHTDHGLVTVVDTACWERTNTKSLDFLSRSEASGRASAGHPRVHVRRHGGGGAPLPLHVRMPSYAHVEASLLELAVLLAERAALAAAVHAAVGAGAHLEAVLRAHLGAVEAGVDALAAGEQHDERVQRPAGAAGRGAPVDDLRGLPERDARAHARHAAVVAVVEAVAEPGGPGGDGRLRLHRERRRHRAARLVVAAAAAEGDARGQRLRTFVCRLGIHGGGAPEASPDSRDRERSPALGFL

SEQ ID NO: 37794 - protein, 200 aa, Zea mays
  Clone ID: LIB3596-018-F9_FLI.pep
RTREPTVSVCARERGGGRRRMYPAKPTVATASEPVTGMAAPPVTGIPISSPGPAVAASQWSSGLCACFDDCGLCCMTCWCPCVTFGRIAEVVDRGATSCAAAGAIYTLLACFTGFQCHWIYSCTYRSKMRAQLGLPDVGCCDCCVHFCCEPCALCQQYRELRARGLDPALGWDVNAQKAANNNAGAGMTMYPPTAQGMGR

SEQ ID NO: 37795 - protein, 451 aa, Glycine max
  Clone ID: LIB3242-684-A4_FLI.pep
VNTKDTDKVLNGMPSYAPPLPSSSNSMAMEATNAHPSRISEFGTLEQSLGFRVEDTINLSRNPMFNQMKSNSQALGADIQFGALNKSIATSDINLSAAIAASQALVFQKDSQPTLASTSAGRENWGETNMADASPRTDTSTDDTEDKNQRPERDESSGSKDKSDQKTLRRLAQNREAARKSRLRKKAYVQQLESSRLKLTQLEQELQRSRQQGIFISSTGDQAQSMSGNGAMAFDVEYARWLEEHNRQTNELRAAINSHAGDIELRTIVDNFMTQFDDIFRLKGIAAKADVFHILSGMWKTPAERCFMWIGGFRSSELLKLLLSQLEPLAEQQLMGIYNLQQSSQQTEDALSQGMDALQQSLSETLANGSPSSSGSSGNVANYMGQMAMAMGKLGTLEGFLHQADNLRQQTLQQMLRILTTRQSARALLAISDYFSRLRALSSLWLARPRE

SEQ ID NO: 37796 - protein, 172 aa, Glycine max
  Clone ID: LIB3242-712-F1_FLI.pep
DRKPNPKSEGSLNPMARVKHTPASRKSAKKQAPRASTSTQPPPQSQSPATRERRRAQQVEPQQEPEAQGRKKRRNRSGTVALREIRHFQRSCELLIPAAPFIRCVKQITNQFSTEVSRWTPEAVVALQEAAEEYLVHLFEDGMLCAIHARRITLMKKDIELARRLGGIGRPW

SEQ ID NO: 37797 - protein, 119 aa, Zea mays
  Clone ID: 700337643_FLI.pep
ETDSDSVPPALEENQAVAFATKAAESLGDSAMNAEHYEGPEEADATEKTMKVVEDIVKSLDESSFKEGESKETQKKQPQDYDIMSLIKLRSTYKKCLIARKEGKRPPLEEVDGNACIDH

SEQ ID NO: 37798 - protein, 218 aa, Arabidopsis thaliana
  Clone ID: LIB22-044-B8_FLI.pep
YLEMGKKKCELCCGVARMYCESDQASLCWDCDGKVHGANFLVAKHMRCLLCSACQSHTPWKASGLNLGPTVSICESCLARKKNNNSSLAGRDQNLNQEEEIIGCNDGAESYDEESDEDEEEEEVENQVVPAAVEQELPVVSSSSSVSSGEGDQVVKRTRLDLDLNLSDEENQSRPLKRLSRDEGLSRSTVVMNSSIVKLHGGRRKAEGCDTSSSSSFY

SEQ ID NO: 37799 - protein, 57 aa, Zea mays
  Clone ID: 700338067_FLI.pep
NKEKPGIHQAYPAYYSMTLQLGSLSTRNRNFTYPAIEAHQNLKRIVWSSQDGQAGYV

SEQ ID NO: 37800 - protein, 214 aa, Arabidopsis thaliana
  Clone ID: LIB22-081-B1_FLI.pep
FFLSFVKMASFEESSDLEAIQSHLLEDLLVCDGFMGDFDFDASFVSGLWCIEPHVPKQEPDSPVLDPDSFVNEFLQVEGESSSSSSPELNSSSSTYETDQSVKKAERFEEEVDARHYRGVRRRPWGKFAAEIRDPAKKGSRIWLGTFESDVDAARAYDCAAFKLRGRKAVLNFPLDAGKYEAPANSGRKRKRSDVHEELQRTQSNSSSSSCDAF

SEQ ID NO: 37801 - protein, 84 aa, Zea mays
  Clone ID: 700379438_FLI.pep
DQLRGDPAGRVGAAGGGGAGALPAEPGVLQGAQEGVHHGRPAQDGHRKDPAPHRGAALRAADQCLIVDPGACQVMGRRIGISLH

SEQ ID NO: 37802 - protein, 453 aa, Arabidopsis thaliana
  Clone ID: LIB23-006-F9_FLI.pep
SFDLKKRGFVVIGLYIMSGSSMYKTKLCILFNKTGDCSRPNCTFAHGNAELRRPGESSFTGRRHNMDSDLRDRRHNMDSDLRDRLGRQFSPERRPSLDRSGRRVQRFSGHDNSMPFENRRDKDYRENRRFDERRDYAGGLKVGNRIEDRAEDGRNKFHGYNNVLEEQLKDVEMDVKMLTDDKLRLEASVERKAHEVDILTSRIQELETQLDREKDECRRITSSSKKFVKEYNRFLRAQDDLKRSEARLQKLGNQLSTYLAGSEGNNRDVGLDIVSDEETNGRNLRTACDPHNELQNTSSLSRKKHYVDQYTTKEPVEDGLIGRGEEEKVENEKKRPPCWNMLSSKSYSEEESGAWNDEDTINRSSSKEDNWKRRRFSIGTSATDKVILSTSMAAREFDDVAESEEENPEAANGSPLISLPPPPPFRDAHVQRDEDDVNGDVMEQKKAYDDDSV

SEQ ID NO: 37803 - protein, 85 aa, Zea mays
  Clone ID: 700379581_FLI.pep
LLILLVGLGQIQYVSVSQKVKVKWSTRQDTLEFITHRFTANELVGDSTKLSWPTQITFLLYNSRLVTETPSTAAGTRLYSGSSPA

SEQ ID NO: 37804 - protein, 396 aa, Arabidopsis thaliana
  Clone ID: LIB24-061-B8_FLI.pep
AVIEAATLAISGRPFEVVYYPRASTSEFCVKALDARAAMRIPWCSGMRFKMAFETEDSSRISWFMGTVSAVNVSDPIRWPNSPWRLLQVAWDEPDLLQNVKRVNPWLVELVSNVHPIPLTSFSPPRKKMRLPQHPDYNNLINSIPVPSFPSNPLIRSSPLSSVLDNVPVGLQGARHNAHQYYGLSSSDLHHYYLNRPPPPPPPSSLQLSPSLGLRNIDTKNEKGFCFLTMGTTPCNDTKSKKSHIVLFGKLILPEEQLSEKGSTDTANIEKTQISSGGSNQNGVAGREFSSSDEGSPCSKKVHDASGLETGHCKVFMESDDVGRTLDLSVLGSYEELSRKLSDMFGIKKSEMLSSVLYRDASGAIKYAGNEPFSEFLKTARRLTILTEQGSESVVV

SEQ ID NO: 37805 - protein, 177 aa, Glycine max
  Clone ID: LIB3094-047-F9_FLI.pep
FEENEVYAIDIVASTGDGKPKLLDEKQTTIYKRAVDKSYHLKMKASRFIFSEISQKFPIMPFSARALEEKRARLGLVECVNHELLQPYPVLHEKPGDYVAHIKFTVLLMPNGSDRVTSHSLQELQPTKTIDDPEIKAWLALGTKTKKKGGGKKKKGKKGAEAEPMDATNDATPQEQD

SEQ ID NO: 37806 - protein, 353 aa, Glycine max
  Clone ID: LIB3170-065-B8_FLI.pep
VMISAKEEPGSSVPPAVDGLLRVHKRIIDGLESDFTHAPSGVAGKVSTKLLVPASQAGSLIGKQGGTVKSIQEASNCIVRVLGAEDLPIFALQDDRVVEVVGDPTGVHKALELIASHLRKFLVDRGVIPIFEMNMQTANTHHAEHMPPHQSWGPPQGLPPNVGGGSGFGPPSQYMPPPRQLDSYYPPAEMPPPVDRQPHQGISAYGRDASIGVHASSNTQSAPSIVTQITQQMQIPLSYADAVIGTAGASISYIRRASGATVTIQEARGVPGEMTVEISGTASQVQTAQQLIQNFMAEAAAAAAAPAQPQTTVPAADQGYNSYPAHGSLYASPPSNPGHAGGYSSVYGANYGY

SEQ ID NO: 37807 - protein, 126 aa, Glycine max
  Clone ID: LIB3139-054-A7_FLI.pep
VCFVFGLVIQVQRSVDDQSVLVATYEGEHNHPQFSSQMEATSGSGRSVTLGSVPCTASLSTSTPTLVTLDLTKSQGSNDSKSTKPKGDSPKVPQVLVEQMATSLTTDPNFRAALVAAISGRLLHNN

SEQ ID NO: 37808 - protein, 219 aa, Glycine max
  Clone ID: LIB3242-041-D6_FLI.pep
IKTLIFHTGKSPRGERTDWVMHEHRLEDKDLADKGIAQDSYVVCKVFQKEGLGPGKGTHYARPFNEEEWDDEEIGIPCAALTAQVPTLPITSDGSVANDNHLPASGCIGSASTSCLSGSVPSLGTVNPTGPNDQAVNDDILPMLHIFNDDKWFEEIYNPGQENIVEGAPPSDDFFAGLEDYFAGFSSGQNTGDVGNSDDLDFLELNDLDTPLFYPTTQP

SEQ ID NO: 37809 - protein, 798 aa, Arabidopsis thaliana nossen
  Clone ID: LIB3234-046-A8_FLI.pep
AGASKLLSDAPYNNHFSFSAVDTMLGSAAIAPSQSLPFSSSGLSLGLQTNGEMSRNGEIMESNISRKSSRGEDVESRSESDNAEAVSGDDLDTSDRPLKKKKRYHRHTPKQIQDLESVFKECAHPDEKQRLDLSRRLNLDPRQVKFWFQNRRTQMKTQIERHENALLRQENDKLRAENMSVREAMRNPMCGNCGGPAVIGEISMEEQHLRIENSRLKDELDRVCALTGKFLGRSNGSHHIPDSALVLGVGVGSGGCNVGGGFTLSSPLLPQASPRFEISNGTGSGLVATVNRQQPVSVSDFDQRSRYLDLALAAMDELVKMAQTREPLWVRSSDSGFEVLNQEEYDTSFSRCVGPKQDGFVSEASKEAGTVIINSLALVETLMDSERWAEMFPSMVSRTSTTEIISSGMGGRNGALHLMHAELQLLSPLVPVRQVSFLRFCKQHAEGVWAVVDVSIDSIREGSSSSCRRLPSGCLVQDMANGYSKVTWIEHTEYDKNHIHRLYRPLLSCGLAFGAHRWMAALQRQCECLTILMSSTVSTSTNPSPINCNGRKSMLKLAKRMTDNFCGGVCASSLQKWSKLNVGNVDEDVRIMTRKSVNNPGEPPGIILNAATSVWMPVSPRRLFDFLGNERLRSEWDILSNGGPMKEMAHIAKGHDRSNSVSLLRASAINANQSSMLILQETSIDAAGAVVVYAPVDIPAMQAVMNGGDSAYVALLPSGFAILPNGQASTQRCAAEERSVNGNGGCMEEGGSLLTVAFQILVNSLPTAKLTVESVETVNNLISCTVQKIKAALHCDST

SEQ ID NO: 37810 - protein, 154 aa, Zea mays
  Clone ID: 700344140_FLI.pep
CTGGTTYGQLPTYSNTSAAPSALINGNFLRNISSWMPSRHISTAQEGEDTRFPGRARTLGSVGTEPTAREASAHLHARLLDNTTPSDPLTNTQHTAVNTVRADATVTAEQVDTFDEELKKLVGMGFEKTQAEVALAAADGDPNVAIEILMSQQG

SEQ ID NO: 37811 - protein, 421 aa, Arabidopsis thaliana
  Clone ID: LIB24-061-A10_FLI.pep
TLISWKLCSFRTGPVSKGIQLVKMPQVKIIAKNFMDMVASLPAIKLDKLYNNVFICEAILRSLPPLAKKYVLQMLYIDVPVPATMMEEWVLADGTSKHRVAIDRLIQLRIFSEISDRKRGTSYSLNPTFQNNLQKHIISGGVLPREPMNSDNAIKLPSLQELETYALKQWECFLLQLINSGQGEKLTGISSSMMKIFQRGLLSQRDKDGPRLTESGFQFLLMDTNAQLWYIIREYILNAEERDVDPADLISFLLELSFHVTGQAYNLNTLTEVQNNTLKDLADLGLVKLQQGRKDSWFIPTKLATNLSVSLADSSARKEGFVVMETNFRMYAYSTSKLQCEILRLFARIEYQLPNLIACAITKESLYNAFDNGITSDQIITFLQQNSHPRCADRVPSIPENVTDQVYTLYAHQVSIIQKCV

SEQ ID NO: 37812 - protein, 56 aa, Zea mays
  Clone ID: 700346895_FLI.pep
RFLLSLQRSTNWPSPNVLLLSDIFFHCMTMHHETTCAYCLKPFKASHVLIKFVGAR

SEQ ID NO: 37813 - protein, 409 aa, Arabidopsis thaliana
  Clone ID: LIB146-005-A7_FLI.pep
RTNPRPLKPLSIWLKRQMEEVSSEMEVEVQNRQLSDSSPAQNVKKFGLKNSIQTNFGSDYVFQIVPKIDWTAIAVSLSTNTVKLYSPVTGQYYGECKGHSDTVNQIAFSSDSAASPHVLHSCSSDGTIRSWDTRSFQQVSRIDTGNDQEIFSFSYGGAADNLLAGGCKEQVLLWDWRNSKQVACLEESHMDDVTQVHFVPNKPNKLLSASVDGLICLFNTEGDINDDDHLESVINVGTSIGKIGFLGDGYKKLWCLTHIETLSIWNWEDGSCEVNLEKARELASDSWTQDNVDYFVDCHCPGGEDLWVIGGTCAGTVGYFPVNYKQPGSIGTAEAILGGGHIDVVRSVLQMPCEYGGAAGLFGWTGGEDGRLCCWKSDEDATEINRSWTSSELVVKPPRNRKKNRHSPY

SEQ ID NO: 37814 - protein, 145 aa, Arabidopsis thaliana
  Clone ID: LIB146-006-D8_FLI.pep
FFLIYVAVEDEDDPTTKNSNNTDDFAIEPREGIIFESEDAAKMFYDDYSRRLGFVMRVMSCRRSEKDGRILARRFGCNKEGHCVSIRGKFGSVRKPRPSTREGCKAMIHVKYDRSGKWVITKFVKEHNHPLVVSPREARHTLVST

SEQ ID NO: 37815 - protein, 190 aa, Zea mays
  Clone ID: 700347345_FLI.pep
GGYRNWNDNNERRPFGQGGGWSQSSDWNANKGSGEGNQAFSKSKPSWDAQNASGGDDQAGKKSDTDNSWSQNRSSPSILGQPSGDANNKSSAWDGAPNGGAGRGGSGSWGKSDEDGWNSSSGGSAREKPSWGGGAEAPPRKEDDGAWGKGGEGSRSLGGGGEGGSSSSWDKPADGAWSGNNKGGSGSGGW

SEQ ID NO: 37816 - protein, 75 aa, Zea mays
  Clone ID: 700379903_FLI.pep
ANSNSSQANQEGNANSGVSLVRNLHCLACLQNVMHYLGVSDYKHNNILVRHFCRNIIIPQSQFPYPCQILYPCDQ

SEQ ID NO: 37817 - protein, 345 aa, Arabidopsis thaliana
  Clone ID: LIB22-011-G12_FLI.pep
RLRLLLLQRSSPKSSDQEIIMAVDLMRFPKIDDQTAIQEAASQGLQSMEHLIRVLSNRPEQQHNVDCSEITDFTVSKFKTVISLLNRTGHARFRRGPVHSTSSAASQKLQSQIVKNTQPEAPIVRTTTNHPQIVPPPSSVTLDFSKPSIFGTKAKSAELEFSKENFSVSLNSSFMSSAITGDGSVSNGKIFLASAPLQPVNSSGKPPLAGHPYRKRCLEHEHSESFSGKVSGSAYGKCHCKKSRKNRMKRTVRVPAISAKIADIPPDEYSWRKYGQKPIKGSPHPRGYYKCSTFRGCPARKHVERALDDPAMLIVTYEGEHRHNQSAMQENISSSGINDLVFASA

SEQ ID NO: 37818 - protein, 172 aa, Glycine max
  Clone ID: 701046815_FLI.pep
PSMELQSCGACSKLLTERSTWSNQKFIANSVLSVVAVLVCGHSYHAECLEAMTSEADRYDPACPICMVGDKNLSKLLSRKGLRAESEMKAKNHKISRNRVVDSYLDGGFDVFDRQKDIDLRGKVSKMEPSCSARSSFGKPFLRRHFSLGSKWSRSLSENDSARKKGFWARYR

SEQ ID NO: 37819 - protein, 305 aa, Glycine max
  Clone ID: 701049402_FLI.pep
RRLIIMCGGAIIADFIPRRGGRRLTASELWPNSFAKDDDFDLDYSHIATQQPSTLKRSQPPKVSEQVENKPVKRQRKNLYRGIRQRPWGKWAAEIRDPRKGVRVWLGTFNTAEEAARAYDREARKIRGKKAKVNFPNEDDEYSIQARNPIPPLPFAPQHPPLYQQQYRCDLNNAPKNLNFEFGYDLNHAEAFPSRVDAVNADSVVVSVDENSGSASGSEGAYSTTEFMGSVQNGNGYLGGTVMEKKEKETEVIEAEEEKNKVLELSEELMAYENYMKFYQIPYYDGQSTTNNVQESLVGDLWSFD

SEQ ID NO: 37820 - protein, 204 aa, Glycine max
  Clone ID: 701213194_FLI.pep
VFLLILLFSFLITTMARKKLNLTYITNDPKRKTTLKKRKNGLMKKMNEISTLCGIESCAIIYSPNDPQPEVWPSDSGVQRVLSRFMEMSEVKQSRKMLNQENLLRQMINKGQQQLTRQRNQNRKKEMTNLMFQYLTAGKIFGNPSLVDLNDLSWLIDQNLNEIEKKITMLQIQEVTPVIENGEQEHMHHVQGLESNMDTKQKKH

SEQ ID NO: 37821 - protein, 276 aa, Glycine max
  Clone ID: 701040391_FLI.pep
KIAGEASQSLPLLTRKSIPPTHPTPPPTLNLGFFCSSSSSPLTKQQEKKITFPKTPFSLRMAKTRPGRKDVDSYTIRGTSKIVRAGDCVLMRPSDTSKPPYVARVEKIEQDNRSNVKVRVRWYYRPEESIGGRRQFHGAKELFLSDHYDVQSAHTIEGKCVVHSFKNYTKLENVGAEDYYCRFEYKAATGAFTPDRVAVYCKCEMPYNPDDLMVQCEGCKDWYHPACMGMTIEEAKKLDHFVCSECSSDDDMKKPQATFSASLGADGKVEPKRRKR

SEQ ID NO: 37822 - protein, 175 aa, Glycine max
  Clone ID: 701042306_FLI.pep
PENLPAVALTSRRPTPGGDDMGSTSTGSMEAATAAGADISGENEKLKKDNEKLSGELALAKKQCEELVAFLRDSLNVSPDVIERIIRQGTCVSSNNDAVRFDAIINNDLDDDENAVGECEPQQPPPKGDNGESLKLFGVWLKGQNGKENSIGKCRKRGRQDYPIAATAKELKTLV

SEQ ID NO: 37823 - protein, 67 aa, Glycine max
  Clone ID: 701123836_FLI.pep
VLFLFWFASMVGWFCDCGFSSFSCFLQLSCFCTFKKSFFFFLVFYDNYTFRICAMVLLCLFILFFKK

SEQ ID NO: 37824 - protein, 112 aa, Arabidopsis thaliana columbia
  Clone ID: LIB3176-018-F4_FLI.pep
QYPKLKMAKSYGAIFLLTLIVLFMLQTMVMASSGSNVKWSQKRYGPGSLKRTQCPSECDRRCKKTQYHKACITFCNKCCRKCLCVPPGYYGNKQVCSCYNNWKTQEGGPKCP

SEQ ID NO: 37825 - protein, 68 aa, Zea mays
  Clone ID: 700262053_FLI.pep
RGYSLSLSLSDGAPYLRKIDLKTYKNYKDLSTALEKMFSGFSTGEMSRGYSLSLSLSDGASVSNYVSF

SEQ ID NO: 37826 - protein, 313 aa, Zea mays
  Clone ID: 700267302_FLI.pep
AMYSPKPESSFGPNPNSGTHQQQMELTGANMGPGNGANNNTNMAGRQRLRWTNELHERFVEAVTQLGGPDRATPKGVLRIMGVQGLTIYHVKSHLQKYRLAKYIPDASTDGNKTDNKDPGDLLAGLEGSSGLQISEALKLQMEVQKRLHEQLEVQRQLQLRIEAQGKYLQKIIEEQQRLTGVKSETPAGGASVTVSSDQFPDSERTEPSTPAPASESPTQVGASNRDTGDRTEATKSTCHGDSLSRNEPLTPDSNCQNGSPVASPNHERAAKRQRGSGTEFLDSEAEFSLPRHIFESSSGSEFQQYSMSYSGQ

SEQ ID NO: 37827 - protein, 63 aa, Zea mays
  Clone ID: 700337712_FLI.pep
IAASYVFSGFIIVRDDACVVAVGVLGGSGGMDGSWQSAPCLWSSSRHIYNNIIYLYYGDILYL

SEQ ID NO: 37828 - protein, 419 aa, Zea mays
  Clone ID: 700355809_FLI.pep
LTRRRRRHRRRPEAPSQRNRLPPRIEAMSSDDEVREEKELDLSSNDVVTKYKTAAEILNNALKLVVSECKPKAKIVDLCEKGDSFIREQTGNVYKNAKRKIERGIAFPTCVSVNNTVCHFSPLTTDDAVLEENDMVKIDMGCHIDGFIAVVAHTHVIANGPVTGRAADVLAAANTAAEVAMRLVRPGKKNKDVTEAIQKVAAVYDCKIVEGVLSHQLKQFVIDGNKVVLSVSNADTKVDDAEFEENEVYAIDIVTSTGEGKPKLLDEKQTTIYKRAVDKNYNLKMKASRFIFSEISQKFPIMPFTARALEEKRARLGLVECMNHELLQPYPVLHEKPGDLVAHIKFTVLLMPNGSDRITSYPLQELKPTKSIEDNAEIKAWLALGTKSKKKGGGKKKKGKKGDAAGDPMEATNDATSQE

SEQ ID NO: 37829 - protein, 69 aa, Zea mays
  Clone ID: 700430772_FLI.pep
SLQAKKRYRHITKGPGSVCLLTFQMIRILSLFQAFSNLVVLFSELPQSEVALCLPNLWQAPSSSKPSAF

SEQ ID NO: 37830 - protein, 616 aa, Zea mays
  Clone ID: 700434640_FLI.pep
VDGSAFSSSPHDQLGKSNWNLKNFSWLPNSVLRLLQTPIPGVTDPMLYIGMLFSMFAWHVEDHYLYSINYHHCGAFKTWYGIPGDAAPGFERVASQYVYNKDILIGDGEDAAFDVLLGKTTMFPPNVLLDHNVPVYKAVQRPGEFVITFPRSYHAGFSHGFNCGEAVNFAIGDWFPLGSLASKRYALLNRTPLLAHEELLCRSAVLLSQKLLNCDPRSLDKLEHPYSQNCVKSCFVRLIRFQRRARGLLAKMGSEICYKPKTFPNLSCSICRRDCYITHVLCRCNFDPVCLHHEQELRSCPCKSNRVVYVREDILELEALSRKFEQDVSSYKEGSCISPCKEVEISDTTDEQLPNLGITLDFVNSKAGSSGFMTVDGGNSSSAVSILTSSVHHEAYKHTEARQAINTSMTKGTYTMDESSSGIDGACNEHGSCNASAMECSDNSDSECEIFRVKRRSTSFDKPTSEAKTSTLSEQQVLRRLKKVHPEVQQVISKRQEESGNGSVRAAHMSQKSSNPAPADDETEDMAPIMWRIKRRQSETQDATCPGTRPQSYPPSSGGSGEEFVERTRDAAVELRPKRVKIRLPSNASRQIEQQRSSGQRFAREDRLPLGFPRTF

SEQ ID NO: 37831 - protein, 156 aa, Zea mays
  Clone ID: 700445770_FLI.pep
SFRRNLANGSSSKQSLEQQQQNDDEASCDKAKQTCKRSPLIKINMDGIPIGRKINLSAYDSYQKLSSAVQDLFCGFLDAAQKDESRGRGAEEKMFSGLLDGTGEYTLVCEDSEGGRTLVGHLPWNVFVSTAKRLRVMESSELPHGLIKTASKRADG

SEQ ID NO: 37832 - protein, 100 aa, Zea mays
  Clone ID: 700581639_FLI.pep
DCCPRSSVSGCCHKHEPYKQPDDPWKRPATFLCPSPFKSESSGVWNCGYAFAVGSSDFYMFAFLPHRPLISSLKIGATREITYHWRFSEEMEVKLSLHHF

SEQ ID NO: 37833 - protein, 404 aa, Zea mays
  Clone ID: 700618821_FLI.pep
LACAASNIAVDNIVERLARYRTKLVRLGHPARLLPQVLDSALDAQVLRADNSSLAGDIRKEMKVLNSKLLKAKDRNTKRDIRKELKTLAKEERKRQQLAVTDVLKNADVVLTTLTGASSKKLNGITFDLVVIDEAAQALEVACWIALLKGPRCILAGDHLQLPPTIQSVEAEKKGMGKTLFERLTEAYGEEITSMLTVQYRMHEHIMSWSSKELYNNKIKAHSSVAGHMLYDLEEVTRSSSTEPTIVLIDTTGCDMEEVKDEEESTMNEGEAAVSIAHAKLLVESGVNASDIGIITPYAAQVTCLKMMRNKDAKLKDLEISTVDGFQGREKEAIIISMVRSNSKKEVGFLSDHRRMNVAVTRARRQCCLVCDVETVSSDRFLKRLVEYFEENGEYLSASEYQSS

SEQ ID NO: 37834 - protein, 472 aa, Zea mays
  Clone ID: 700799261_FLI.pep
DWAVKLGINLYYSANLAKSPLYSKQVPYNRVIYEAFGCGSPNDSPVKLKTYSRRQCRAKKIVLAGRWCGKVWMSNQVHPYLADRIKNHEPKEIDETFPSDQKSHAEPVENSSREAASTRKSSSRTIEGKTSKREKEQLEKANAKKPKFTEEDNSKSLEGTAEASTQKIKGRSVLEKTSKKEKAYTKKLKHTEKVSEALKGPSEASFPAPAGMVVRSSSRIANRKIMLKSKMEEEDNGSADRPKSKVEDDKDNPAGRSRAKPLRQKTKVDAKKKTKETRVEKRKAPSPASQKDEEEQSDDVEGRSTTKQRLSLRKKGAKTEGKQRMEKPRFGGSAPPPSSPKRKEEYVCDIEGCSMSFGTEQALSLHKNDICPEKGCCRKFFSHKYLQQHRKVHADDRPLKCPWEGCGMAFKWPWARTEHVRVHTGDRPYVCLEPGCGQTFRFVSDFSRHKRRTGHGASKKAKAKKQGKAAVI

SEQ ID NO: 37835 - protein, 133 aa, Zea mays
  Clone ID: 700350844_FLI.pep
RTPNPSFARCGGEPAMAKSLRSKREKRLRTLRREIAEPFYDKKEAAKLAAQAAALAAAPLPVRGPPPSQDAGSSRAASSASAMDVEMSDAGNNRSKTFLRPLGSISKKKVQLHLKIKKDKRKARKKGKFSFKK

SEQ ID NO: 37836 - protein, 122 aa, Zea mays
  Clone ID: LIB189-032-H12_FLI.pep
GAAEGRQGADQHRAALPGPGDREPGGLRGRGAGGAARGVRQVEGAADDGRVQPVPAQRAGERHHQDAAAELLAGLQARREGRRALPRLEEQAPDRLIGMALVLTSENVDLMENVSCNLRSTS

SEQ ID NO: 37837 - protein, 219 aa, Zea mays
  Clone ID: 700382887_FLI.pep
RSFLPSISSLFIASQETRANQRLRSSSAAAMSLAPSIPSIKVKVGAVSVAPPHRACRSFAVIRSSKAEGPIRRPAAPPLSPPPPMPPKTPALSTPPTLSQPPTPVKPAAPPTSSQPMPPSPEPKPVDATAQMRKPVAGAMTLEYQRKVAKDLQEYFKKKKLEEADQGPFFGFLPKNEISNGRWAMFGFAVGMLTEYATGSDFVQQMKILLSNFGIVDLD

SEQ ID NO: 37838 - protein, 407 aa, Zea mays
  Clone ID: LIB3067-028-B4_FLI.pep
VEKRERGVRNSSPAMSPSADAPGPASSASAPPLAPLIAAQLNYLLSHSKLPIRVVQIWSGCRNGRPADRFRLAIPFCLDYVHWDFVYNALSPKVAPDVVFGPEDERFQPLVDYAAAGNGDKSCLARWDCRAPEGLHALVQELRELYIEYQKERVHMVDDARLAFELSTVLSKEGIEVCMVPSADRPDEAKFAVPLLESDFDFAKLVPGCPWRLPQKIHLQVIFPISRSSSYSSMPSAPRLKLISTPDLRSLLSVEDVKLPPWSNGMCLAEYLPALEDSLNGLLVDASASIGSRRRFIEALAPIFGRPLEADPIFCRRATVLSISGMFTFLVHFAIPLQFPKQQPVVTLQSSQHCNADGMPITSPPINDYPWSPRWDQAEMVERIYDFLTDECQNFKKFCSDAITQQK

SEQ ID NO: 37839 - protein, 109 aa, Zea mays
  Clone ID: 700377749_FLI.pep
EPHFTERNGETQTTSATTVRPHLRQNSNGDAVWNALGGDAGGVALRVGGVGVEQRVGELGRAVSVLEARVRVHGDDAFLDLGQPRAEPLERLLRLGVRRPLLGVALAEV

SEQ ID NO: 37840 - protein, 108 aa, Zea mays
  Clone ID: LIB3067-037-H10_FLI.pep
VLLSEHSLCSTLIWNRHFAVSLCRNQTPGVHTIHLLTEMLQPGSWALRSSCFGFACGHAQGTRRRRRRQAPCPPLKMTGKNHQMVHPFCIVLTSSMSTSGVLFHLQLR

SEQ ID NO: 37841 - protein, 95 aa, Zea mays
  Clone ID: LIB3088-002-D11_FLI.pep
ENPRLSTYDRRLPCCGCGIGWSCFLLGFLCPIIWYVAALLYCCKYYNRDPRERTGLAASAVLAVIITAVTIVTLSVLLICCVNKRFLNSCAVWPK

SEQ ID NO: 37842 - protein, 422 aa, Zea mays
  Clone ID: 700619436_FLI.pep
PPPPSMPALSDVALQAAIAGNLRLLKLVASKMNLREAKDAAGRNALHLAAEMGRLEVCRFLVEESGFEVNFACAEGGSPVHCAAAGGSESVLGYLLDHGGDPVMPDSMGSTPLHDAAEEGHCAAVRMLLSKGVDVDPHGCRGTPLHLACSNDRDQVVRILLEHGADPNKVVGHVLPPLMMAYCGGSLRCMKLLIEAGADVNLIAPSGVILAQAVCDGSTEIVKFLLEVGADPNIPDEDGKIPIMYPAFNGHRELVEILFPKTRPVSSLPDWSVDGIIRSMKDLFFKPQDAAVVEKKIADAKSQGKEAFARGEYPAAVYFYTMVLENDLDATAFANRSLCWLRLREGAKALLDAQQCKMIRPRWSKAWYREGAALSLLKDYQGAVNAFTEALKLDPASLEIKKALREATDSLANVGRSGEQNP

SEQ ID NO: 37843 - protein, 310 aa, Zea mays
  Clone ID: LIB3066-002-B8_FLI.pep
ITKNFSSDALIGEGSYARVYFGVLKDGTKSAVKKLDSSKQPDQEFLVQVSAVSRLKHENVVQLVGYCAEGSTRVLAYEYATRGSLHDILHGKKGVKGAQPGPVLSWMQRARIAVCAARGLEFLHEKADPRVVHRDIKSSNILLFDHDVAKIGDFDISNQAPDMAARLHSTRVLGTFGYHAPEYAMTGQLSTKSDVYSFGVVLLELLTGRKPVDHTLPRGQQSLVTWATPRLSEDKVRQCVDPRLGDEYPPKAVAKMAAVAALCVQYEGEFRPNMSIVVKALNPLLHSRSGNRPTASSASHAAAAAERSGL

SEQ ID NO: 37844 - protein, 51 aa, Zea mays
  Clone ID: 700340357_FLI.pep
DFVPNMRSGWLLRPADVVLAQVFLLLIPCIFYGTVHTIGQPNFWQFNSFRS

SEQ ID NO: 37845 - protein, 293 aa, Zea mays
  Clone ID: LIB3059-058-E10_FLI.pep
IAAVGVIGAGQMGSGIAQLAAAGGCAVLLLDADPTALSRAVISISASLRRLAAKGQLSQAACEDSIKRIRCVSAVQDLRDADLVIEAVVENEAVKKKLFVELDKVTKPSAILASNTSSISITRLASATKRPSQVIGMHFFNPPPVMKLIEIIRGADTSDEVFAAVRSFSERLGKSVICSQDYPGFIVNRILMPMINEAFWALYTGVATKEDIDAGMKLGTNHPMGPLQLADFIGLDVCLSVLRVLHSGLGDSKYSPCPLLVQYVDAGRLGKKRGVGVYSYGHRPSSVRPKSSL

SEQ ID NO: 37846 - protein, 107 aa, Zea mays
  Clone ID: 700341642_FLI.pep
RSRVPNHKEVSTPGSKSNEGSDKAKRKASVLSYQGLRSSKSGVVKKVKVTQQPSNQGKQRKTDETGATAGKAKRPAVAARKAKQLAKKRKVDASTPENTHRSKKPRK

SEQ ID NO: 37847 - protein, 510 aa, Zea mays
  Clone ID: LIB3060-004-G11_FLI.pep
DLAYVRRSGSSSSLATAMDPYKHRPSSAFNAPYWTTNSGAPVWNNDSSLTVGARGPILLEDYHLVEKLANFDRERIPERVVHARGASAKGFFEVTHDITHLTCADFLRAPGVQTPVIVRFSTVIHERGSPETLRDPRGFAVKFYTREGNWDLVGNNFPVFFIRDGIKFPDMVHALKPNPRTHIQDNWRILDFFSHHPESLHMFSFLFDDVGIPADYRHMDGSGVHTYTLVSRAGTVTYVKFHWRPTCGVRSLMDDEAVAVGGANHSHATKDLTDAIAAGNFPEWTLYIQTMDPEMEDRLDDLDPLDVTKTWPEDAFPLQPVGRLVLNRNIDNFFAENEQLAFCPGLIVPGIYYSDDKLLQTRIFSYSDTQRHRLGPNYLLLPANAPKCAHHNNHYDGFMNFMHRHEEVDYFPSRYDAARNAPRYPIPTAHIAGRREKTVISKENNFKQPGERYRAMDPARQERFITRWVDALSDPRLTHEIRTIWLSNWSQADRSLGQKLASRLSAKPSM

SEQ ID NO: 37848 - protein, 76 aa, Zea mays
  Clone ID: 700345541_FLI.pep
RRKESLKIMTETANKRKQIDQVVHYLEERLRELDEEKEELKKYQQLDKQRRSLEYTILDHELNDARNELASVIIHR

SEQ ID NO: 37849 - protein, 130 aa, Zea mays
  Clone ID: 700345580_FLI.pep
RGIHDQKLKRGDSENIKASNGMFLNHSDVDSSKPPVVELLGEFVLASSSRERSTKKLYQNAGDATDKKLLKPLKKDEDVEKMQMHSSIIQSPSVGRAKKEQEKSINREKTDATPTPLRRSSRLRNKVTSP

SEQ ID NO: 37850 - protein, 419 aa, Zea mays
  Clone ID: LIB3060-006-D6_FLI.pep
CRFVQSNKNECDIVQANYRSQTMTSTYMDPSSIHGHSLRADQSEQDAIVVSGRVSVDVAGQRRVVPGLVLLLHLPHVDLGARDDRPRQGLLVRTKPDDGAPDDLREVLLRGRQAPHRCLEHRRELVAAAFLEDLVDGLAVVQPVPLERRLQLRLAPGADDAHDVAVQRLLPGHHRVVQLRGLRPRQLVIDELAGVPVRAHEPHQELLEERVLVERARGDVLLQGGGVGLAVGLPDGDEVVRRGRAGDLDEHPHVPLALLLHGLVGELGVTRRRVHRPQHHRAPEVAGELGVESVDDGFVVEALVGHGDLRALRRRPVAQYLDQRLLVRAPSLHCFPDVFGVFGRGRGRAGDRDGRHGDYRWRSHHRRRCSTSTSTWESWAGEAEEGKAAEGRDDVMDALQAAAAAPPATHGTRAKLHLG

SEQ ID NO: 37851 - protein, 216 aa, Zea mays
  Clone ID: LIB3060-018-C5_FLI.pep
EAVQCHCILLGCNTPKYTLLFCLKSERRESRSCYFLVLVGCFFFVSLTSFLIFSAVMIPLYHYQHKHPHNSVFLGLFTLCLSFSIGVACANTQGKIVLEALVLTAGVVVSLTAYAFWASKKGKEFGYLGPILSSALTILVLTSFLQVFFPLGPVSVGLFGGLGALVFSGFILYDTENLIRRHTYDEYIWASVGLYLDILNLFLSILNMLRSMQSDN

SEQ ID NO: 37852 - protein, 100 aa, Zea mays
  Clone ID: 700473104_FLI.pep
PAFDIMFGYNLHQSMNEKKGKNFGATTNVRQKLQTDKDYKHKIVALSLNSSTSPTGIRLSWTCSLRPSLITHVEFRMRSATHVLLAYLQFSGHGQTSITD

SEQ ID NO: 37853 - protein, 463 aa, Zea mays
  Clone ID: LIB3060-020-A6_FLI.pep
PGIPATMTSLSSAVALPSSCRARPAGGSRRARMVVTRAAASSPKLPNGRRLRVAVVGGGPAGGAAAEALAKGGVETVLIERKMDNCKPCGGAIPLCMVSEFDLPLDLVDRKVRKMKMISPSNVAVDIGRTLAPHEYIGMVRREVLDAYLRSRAQSVGAEVVNGLFLRYEAPKEPNGSYVVHYNHYDGSNGKVGGEKRSFEVDAIVGADGANSRVAKDMGAGDYEYAIAFQERVKIPDDKMVYYEERAEMYVGDDVSPDFYGWVFPKCDHVAVGTGTVTHKADIKKFQAATRLRAKDKIEGGKIIRVEAHPIPEHPRPKRVSGRVTLVGDAAGYVTKCSGEGIYFAAKSGRMCAEAIVAGSANGTRMVEESDLRKYLAEFDRLYWPTYKVLDILQKVFYRSNAAREAFVEMCADDYVQKMTFDSYLYKRVVPGNPLDDIKLAVNTIGSLVRATALRREMEKVTL

SEQ ID NO: 37854 - protein, 109 aa, Zea mays
  Clone ID: 700443867_FLI.pep
RRSSRSGYGNGGAQVSNALGGQAEKCVHEEVINWVDDGHPNQPASAFFVHSFSGAGSYGSPRLLGGQCCLDEQWRRFVDAPNREAEPRSKLEINLTSGSIDGSAQCLGQ

SEQ ID NO: 37855 - protein, 200 aa, Zea mays
  Clone ID: LIB3060-032-B4_FLI.pep
LRARPKGKELVRYESPIEHCPSVDDVKRVLNGTANSFSIIDAYPRYFRVTGSGEVRRLEAAIDSVSGELLLNNGTPWWSFYDTNPSDLAGCQGLNGPMAIVVSEETPQGIIGETLSKFSIWSLYITFVLAVARFIRLQCSDLRMRIPYENLPSCDRLLDICEGIYAARAEGELEVEEVLYWTLVNIYRSPHMLLEYTKPD

SEQ ID NO: 37856 - protein, 52 aa, Zea mays
  Clone ID: 700447089_FLI.pep
RRELLACIVIKVNFAGHAMQFVASFLYKEVTGHGVCGVCVCWQCNNNFIIRS

SEQ ID NO: 37857 - protein, 514 aa, Zea mays
  Clone ID: LIB3060-035-B11_FLI.pep
IIEAGFPASSPDDLDAVRSIAIEVGNPAPGPAGEEDAVHVPVICGLSRCNRRDIDAAWEAVRHARRPRIHTFIATSDIHMQHKLRKTPDQVVAIAREMVAYARSLGCTDVEFSPEDAGRSNREFLYHILGEVIKAGATTLNIPDTVGYNLPYEFGKLIADIKANTPGIEKAIISTHCQNDLGLATANTLAGARAGARQLEVTINGIGERAGNASLEEVVMAIKCRRELLDGLYTGIDSRHITLTSKMVQEHSGLHVQPHKAIVGANAFAHESGIHQDGMLKYKGTYEIISPDDIGLTRANEFGIVLGKLSGRHAVRSKLVELGYEIGDKEFEDFFKRYKEVAEKKKRVTDEDLEALLSDEIFQPKVIWSLADVQATCGTLALSTATVKLIAPDGEEKIACSVGTGPVDAAYKAVDKIIQIPTVLREYSMTSVTEGIDAIATTRVVVTGDVSNNAKHALTGQSFNRSFSGSGASMDIVVSSVRAYLSALNKICSFAGAVKASSDVAETASVPSTE

SEQ ID NO: 37858 - protein, 148 aa, Zea mays
  Clone ID: 700447447_FLI.pep
MPHPPMALLLSPTVSFLVSPCAPRPRALSAAANVSYPASRLQCKNLSSQQSPLNVTATCASFAEKRLVLVHATAEGSEAGAEQPEEPKPATKIEEMPLESKQKMIMEQRARMKLAKKLRQRRKRLLRKRKLRKKGRWPPSKMKKLKNV

SEQ ID NO: 37859 - protein, 123 aa, Zea mays
  Clone ID: 700447531_FLI.pep
AEGCHCSHSATTRLGQHTLLINRRKAASLSEKSLRCRSGKHRKQQPLTEAAATKLHFLSPHQASLSHIACSIRHVMSICHLPNDQTRELAQAGCHETQFQFVMTSAHGVLGTAGRPSRMNRPV

SEQ ID NO: 37860 - protein, 217 aa, Zea mays
  Clone ID: LIB3060-051-C6_FLI.pep
SNHRPGRASHLRFLASPASTIHHTSAAAMADVEKATPVAAPAEGAGGDVAAGRTGAVAALLRRWRTQDLLDRSGSALRAAAWAFSLLAFLVMACNEHGDWRQFDRYEEYRYIVAIGLLAFVYTTLQLLRHGVRLTGGQDLEPKTGLLVDFAGDQVTAYLMMSALSAAIPITNRMREGADNVFTDSSAASISMAFFAFVCLALSALVSGFKLAKQTYI

SEQ ID NO: 37861 - protein, 317 aa, Zea mays
  Clone ID: LIB3060-051-H9_FLI.pep
QLYDYKMVENRSVVEQAHEFQALAKQLKLFLCPLPDKFVVGGIIAKLPPSWKDFATSLKHKRQEFNVEELIGTLDVEERARTKDNGKGVETSTANVVQKRNFRKFNKKKNQNKQENTNKPVQIAQFKKKKNNNKGKGGCFVCGSDQPWARECPDRKFTQDKKSANVVTTETGDETSGYGNSLPFVLSVCNSPEWWMDSGANIHVCADASMFSSYQVGRSGALLMGNGSHAHVLGVGTVILKFTSGKTVPLKSVQHVPFIKKNLVSASMLCRDGYKVVLESNKCVMSKHGTFVGKGYDCGGLFRLSLHDVCNKMVNSV

SEQ ID NO: 37862 - protein, 166 aa, Zea mays
  Clone ID: 700450563_FLI.pep
VANDKKSAGEWQPKEHIYIRMLAASLEAFESGGHGLAAVVEDEAEVDGQVELDSEDLALDGGAEAHGGLEVDESLQQRAAWLRGRHAHLGLDQSQHVGAHAQLERVAGALAERGRRRGRRRRGGRGRRGAVATAGAGHGEHHQVHGEEQRDRGLACHCCRVQKALA

SEQ ID NO: 37863 - protein, 179 aa, Zea mays
  Clone ID: LIB3061-033-D3_FLI.pep
LVFASWNRITSQIGYVSEKHSHALPIQVNSRINVHTSCTITRLLQSIVDTFKSRILYQHNLFPRFRTRAYRHFSFLHPKYRADKVDKRGVGFAIPRRRVDLHAHRLVPNLCDGGDLGAGLGVYRYGHGRRRHQAEAAREPYSSGTRRRGGRRRRRPFGLASLPRSHLVSIEVGPGSIRS

SEQ ID NO: 37864 - protein, 176 aa, Zea mays
  Clone ID: 700451045_FLI.pep
VARWFNHIDALVRLSGITAEGQGVKVESSAVPSAPTPDVAEAQAPVAEEDDDDDVDLFGEETEDEKKAAEERAAAAKASGKKKESGKSSVLLDVKPWDDETDMAKLEEAVRSVQMEGLLWGASKLVPVGYGIKKLQIMMTIVDDLVSVDTLIEDYLCAEPVNEYVQSCDIVAFNKI

SEQ ID NO: 37865 - protein, 480 aa, Zea mays
  Clone ID: LIB3061-035-A8_FLI.pep
EKFSVHSLGLPSLLSDPSAKTPEEALVHIFGEAKRTTPSILYIPQFHLWWDTAHEQLRAVLLTLLNDLPSNLPVLLLGTSSVVFTDLEEECASIFSSRNVYQVDQPSFDDRLRYFSILFESLLSFQMEESRNKSKKQKSAIDLPKAPKEVEGPKVSELKARAEAEQHAVRRMRMCLRDICNRILYNKRFNVFHFPVLEDEVPDYRSIIHKPMDMATVLQRVDSGQYLTRAAFIKDIDLIVSNAKTYNGDDYNGSRIVSRACELRDVVQGMLSQMDPSLVSFCDKIASQGGPLQAVDDEDRAILQAAPVAQLVSGTRISARLRNVQPEVNLSQSYEVLRRQKKSAENEQSMTRDEKSPEDVDLSKPTDAEEAAKEPESNGTTKEANDSPAKEPEVSTSPEPMESDNGKIAAATGDDLLEQLEALKQRFMELTASYGVPQLERLYSKIMKGAIELTSKESNEDHRRLVVRYLWTFVENSNNF

SEQ ID NO: 37866 - protein, 49 aa, Zea mays
  Clone ID: 700453207_FLI.pep
EVPWQGQGRDRFSKRCWCEIAVGKTDCFMRGYVGASCLPPKLLGGPLVS

SEQ ID NO: 37867 - protein, 200 aa, Zea mays
  Clone ID: LIB3061-054-H2_FLI.pep
PEAAPAGNAGADRPDGNGAPAEEPEDHDMPQLVEADVEKALWAQIGILHGGGGLFGDSRYGAQEELDEEEVKEIDSARARRRKAAYEMAIASGGASSLILSNYAQLLYEFDKDIERAEMYFKQAVAAEPADGEAMRRYGMFLWHARGDTGGAEDMFTGAIDAEPESSHHRSSYAWFLWMTGGVETCLMDTGRQSDGNDAD

SEQ ID NO: 37868 - protein, 141 aa, Zea mays
  Clone ID: 700429550_FLI.pep
ETLASERANKKAEAAASKSEADTKTTPSEEAAATPSAVNGAQASLENLLSRAKVISADFSWEKFSTQFADVTTPLTSSLEKEPNKAQIATVRGQEKAKKLAPRIAVVKPAAQKAKQPDPKPEVRALFGGLFKQETVYVDDD

SEQ ID NO: 37869 - protein, 115 aa, Zea mays
  Clone ID: LIB3061-054-H7_FLI.pep
RHHARALLFHESVSLLSLKMASSNGQTEAPAPSVPKNPAMASCRKKKTDDATFLEDLKDHMDEFIHASMDEHKSCFKKTIQKMFGMSKAVAERSAAEANKAEVESALPLQTSVSQ

SEQ ID NO: 37870 - protein, 121 aa, Zea mays
  Clone ID: 700432266_FLI.pep
FKMTNKKGKQTKGPPVPHLCWPIALSELSVSSHTKGITLLQLQLVLQLVERLEQEGFEPCHVDHDILLHDDLGDRWPPLRVDVHWVLEHVVVPWVLVLERRLLLRDVVLDVPERMSRAGWP

SEQ ID NO: 37871 - protein, 68 aa, Zea mays
  Clone ID: LIB3062-016-B9_FLI.pep
PQVGWWRWQALKEPKCRSLTLQLLLHSPPCCTNATFVVPRLILHFLSELFVGFEFHLKRVEFIYLYIG

SEQ ID NO: 37872 - protein, 155 aa, Zea mays
  Clone ID: LIB3062-016-D2_FLI.pep
AGGHRKEEMASKRIQKELKDLQKDPPTSCSAGPVGEDMFHWQATIMGPSDSPYSGGVFLVTIHFPPDYPFKPPKVAFRTKVFHPNINSNGSICLDILKDQWSPALTISKVLLSICSLLTDPNPDDPLVPEIAHMYKTDRHKYENTARTWTQRYAM

SEQ ID NO: 37873 - protein, 157 aa, Zea mays
  Clone ID: 700432294_FLI.pep
LAALTITTLLLYRELLRGPLYYVLVLLFSVLVFWRESPIGIVSLSMMSGGDGFADIVGRRYGSAKLPFNRKKSWAGSISMFISGFLLSAMMMLYFSSLGYIDVIWEEALGKLALVALAATVVECVPVTEVVDDNISVPLATMLVAFLLFSSNRTIVN

SEQ ID NO: 37874 - protein, 127 aa, Zea mays
  Clone ID: 700469733_FLI.pep
ILQLKILKQQQWRLTMKMEQIIIVNRMSETQKMHIMLESLSSGVSVHWVISSHFPANMQVRFGQTLQCWMRSSLGMFTHLSEKLLSLVCADLPMKGLILEFDTIPIFFIELSVLYLYDRGQLFSLFN

SEQ ID NO: 37875 - protein, 164 aa, Zea mays
  Clone ID: LIB3062-018-G9_FLI.pep
HYFITLRHACIPRPDAHRTPHLINRVAVNVGADLVRQGDAALAGQRGGAADVGAAPVGAVGDVLEAAADGAAVGGVVGLLQQAADAAAARLGRHGPAHLDERQARHQRAVHGGTRHRRAHRGRGSHHGRRQEHGQRQRRELRSSHASPSLSLGRAHVRYDGRAG

SEQ ID NO: 37876 - protein, 144 aa, Zea mays
  Clone ID: 700445619_FLI.pep
GEVQEGGEGAQAQGAPRRDGRPRRRRLRPVREARGEEGPGARAAAQDRGGRGGGGCPGQRRLRVPRAPRQEGGQRRGGGRRGGGGVRPPRRGEEEAPLLRLIGLLLDRSTCVRRLLPRTRRSMHGGRTKSRGFDCPSMYIMCSY

SEQ ID NO: 37877 - protein, 254 aa, Zea mays
  Clone ID: LIB3062-019-E1_FLI.pep
PISTTKSPFRWWHGTATNAPPPLEQPLMHKATRSLVQVLLLVGVDDAVCLGVGDAGEEVPLGHLAVVEEGPLRLVDLAGRHPPGAGGAGPGAAGEGQLHPGGLGRLEDVGVVGGLELVLRPVRADQLHLVQHGRRGRHEPAGQPWPGRAGRLPRVAGEGEGVGRRSRGRLIVIACPGSGSGQSWGGGSRHLAPLTPGDPRWMGGWVTALPVPGRDGTGRGGRRYPGEARGGGGGWVGRWTMDVVQCRAHAWRLY

SEQ ID NO: 37878 - protein, 202 aa, Zea mays
  Clone ID: 700427724_FLI.pep
ESDADGSLLHEHWNSDLRLFSYDENGAYNLLQLLLVRAESEILRLPGETQQALQTLDSIKSQMKTAFQGHIERINGNTSLEESHNQQHQVRGEVFTPKHPSLRKGSWADVKYKGEWMKRPISEAEVAWLARILIRLSDWLNDALGLECADAEGSPAGATYIQFDGNTTVGGPRDAARMALGAVCSFMVLVGQAVLKLMRSQR

SEQ ID NO: 37879 - protein, 203 aa, Zea mays
  Clone ID: LIB3062-027-H6_FLI.pep
RPTMALLPRTARLALLSTPRAYSAAAAAGASPTSPAPYGGAPPPAMSKTAEFVVSKVDDLMNWARKGSIWPMTFGLACCAVEMMHAGASRYDFDRFGVIFRPSPRQSDCMIVAGTLTNKMAPALRKVYDQMPEPRWVISMGSCANGGGYYHYSYSVVRGCDRIVPVDIYVPGCPPTAEALLYGVLQLQKKINRRKDFLHWWTK

SEQ ID NO: 37880 - protein, 102 aa, Zea mays
  Clone ID: 700427919_FLI.pep
QTKRPDSHVSDLTLRIQRISSRDSTSKAARTRYCTSSGMSLRRKDTSRGEKLGVPATATAAVSILSPTTMPPPSWEPDACTAVTTVNADTASAISCTRSTMT

SEQ ID NO: 37881 - protein, 77 aa, Zea mays
  Clone ID: LIB3062-030-A5_FLI.pep
PPLVKLKSNHATEIHSALGKCKRIHYSSVVVLSDQYSCSSSSSDPACDVFSWSFSSWLKFPFSLISWMWWCLHHQPF

SEQ ID NO: 37882 - protein, 99 aa, Zea mays
  Clone ID: 700430504_FLI.pep
RASSSSTSACGRASASRPTSPSRSSSSSPSRASPSPSGSSPTSVRTSSSSSTESDSVECVRVSGDGERRSYRIIKAAAVAGLYCSGAGAREARHVKCLL

SEQ ID NO: 37883 - protein, 502 aa, Zea mays
  Clone ID: LIB3062-031-B9_FLI.pep
AAKGEKRKWFPDARWLPPTGVQVGTLYYGNGDPTTPLWPSCAAGDDCERLSMEELDGSEEMPGIPALPVSARDGETILKAMGGDVAPPKWQGGDGAPVYRLGPGPAVLNLTYIGNETLATIENVFAVIEGKEEPDRYVIIGNHRDAWTFGAVDPNSGTAAMLEIAERLSKLQAKGWRPRRTIILCSWDAEEFALIGSTEWAEENMDTLASRAIAYLNVDISVFGPGGLMPRATPQLDELIKEASKMVPDPDEPSQTLYDTMMRHHPPITRVAGAGTDFAAFVQHIGVPSLDMSYGLFEEYPVYHSLYDDYVWVERFGDPLFHRHVAVASVWGLIALKLADDEIIPFNYVSYASELEECTKDIVDKCKGFPVSFSPLQNSIKQLESAATKIYKEKKLLQAENWSLKTSKYTLKVREINDRLMMAERAFTNREGLVGRPWYKHMIYASSDQDDWGTKAFPGIVSAMDKAKKSNTTETWRLLQHEIYRVARAVSKASAVLDGKLT

SEQ ID NO: 37884 - protein, 164 aa, Zea mays
  Clone ID: 700433595_FLI.pep
PAEPVATAKLLVLGRISPRREETPGRQHAEKRRRRNAAAVERPVIRHVEAVGVVPVHLGAAGRHHPRREGAVLDQLGHPALLLGLGGAVHPRAEVGAHGVEALLDDVHGRAHQRVARGAEPGELGEAAHGVRERGDGVVADVQLPERDEEADAVGQLPQVLEVL

SEQ ID NO: 37885 - protein, 503 aa, Zea mays
  Clone ID: LIB3062-031-H9_FLI.pep
TMRRPWRHSGPGSAVAARHGAADLCLREVGDLLPRRFARRAAGSEDLVMRLQIHRKLDRHTGCVNTVGFNEVGDTLISGSDDQKVMLWDWDTGTVKLEFHSGHGGNVFQARFMPCSDDRTIVTCAADGEVRLAKIQDAGDVSTTLLGEHEGRAHNLAIEPGSPYIFYSCGEEGFVQHFDLRTNTASKLFLCRNSTKSVYSSLVHLNALAIDPRNPNLFVVGGSDAYARVYDIRKCKWDGSSDFSHASDCYCPPHLVDNKSVGITGIAFSHLSELLVSYNEENIYLFSKDGGLGPDPKKSVRIGAIEGCKSTMLASGHDVSQPAPQTYVGHVNRETVKRVSFIGPNDEYVASGSDCGRIFIWRKGDGKFLRAMEGDECIVNCIEPHPHAMAIASCGIDNDVKVWTPSAIERAPMIHVDELRPRKRRAKLWRFGIRDLLIQQILVSENRQQSAEEGSSEDHEDNIELLDLVLQAAVEGVSSSSDEEEEDDDDGDNEEAAASDGSE

SEQ ID NO: 37886 - protein, 99 aa, Zea mays
  Clone ID: 700443296_FLI.pep
SFYKHPHFQPVHKSSGVARICIHFEAKFCSVETSTLHRECSNRQGDSTYTRICQKHSDVYEVLKVREEKCAFLIYRHIGECMCSVSNSDVVCTRMKRKV

SEQ ID NO: 37887 - protein, 538 aa, Zea mays
  Clone ID: LIB3062-056-B9_FLI.pep
DHDQNPLPHGKHRVAVSADVSVGDPARPEQLHLAFAEEVDEMRVLFVCGDRGERVVRYGLQKEDDKEWKEVGTDVSTYEQRHMCDWPANSSVAWRDPGFVFDGLMKGLEPGRRYFYKVGSDTGGWSEIYSFISRDSEASETNAFLFGDMGTYVPYNTYIRTQSESLSTVKWILRDIEALGDKPAFISHIGDISYARGYSWVWDHFFSQIEPIAANTPYHVCIGNHEYDWPSQPWKPWWATYGTDGGGECGIPYSVRFRMPGNSILPTGNGGPDTRNLYYSFDSGVVHFVYMSTETNFVQGSEQHNFLKADLEKVNRSRTPFVVFQGHRPMYTSSDETRDAALKQQMLQNLEPLLVTYNVTLALWGHVHRYERFCPMMNSQCVNTSSSFQYSGAPVHLVIGMGGQDWQPVWQPRPDHPDVPIFPQPERSMYRGGEFGYARLVATREKLTLTYVGNHDGQVHDMVEIFSGLVSPSNSSVAEAVDGTKLGTGVSTVRKISPLYLEIGGSVMFALLLGFSFGILVRRKKEAAQWTQVKNEES

SEQ ID NO: 37888 - protein, 162 aa, Zea mays
  Clone ID: LIB3066-008-C6_FLI.pep
AASRPAGRQAAALLVVDSAAVFARQDDETISSLLSWGGSCRSVRQEHRNMHISLLRVYTRALVLLLLELDMGRQHRRRLSACCLKGRLRRRGDKEHALHCTTYVHRRLKTTSTSGQKRGRRGGWRKRARSAGCSNRRRYQRIFLFFFFCLNLCLVTCIWRHD

SEQ ID NO: 37889 - protein, 269 aa, Zea mays
  Clone ID: LIB3066-010-H3_FLI.pep
YRLITRSSFRVYICVVYVAACRSIRSSSTYIYIYTYVPPICNNQQAGAHARTHHACIRLIVYESHDRVREVERDAAQSPAPDVAAHPQVSALAPALPPRVLDEPVLEARGGVGAVADDGDGVVHPGPALPREDAAAVELQAAAHLDGRGHGLLRHRLLQLALARRQLHVVGDGGGVLGGPGAAARVPPRLVRVVGLGGEPAVLDHPPVAVHEVAQVAAAVVGVAVDQLLLRQRHQPPCRDLGDALDRRRRHECPAARARRALVLDRRDG

SEQ ID NO: 37890 - protein, 495 aa, Zea mays
  Clone ID: LIB3066-027-G2_FLI.pep
QMLVISSGNEKYEIMNAINSLMLDGKWSNQESSVKEVVSTARVQSLKKLVKEKLHQWLICKVNDDGKGPNVLCKEGQGVIHLVAALGYDWAIRPIMIAGVNVNFRDAHGWTALHWAASLGRERTVSVLIANGAAAGALTDPTSEFPSGRSPADLASVNGHKGIAGFLAESALTSHLSALTIRESNDSTVEACGLPFAEDLTGIDSVHLAGEGPDAESLEGSLSAVRKSTQAAARIFQAFRVESFHRKKVVEYGDDTCGLSDECTLSLVSLKNVKPGQHDTHLHSAAVRIQNKFRGWKGRKEFMIIRQRIVKLQAHVRGHQVRKNYRKVVWSVGIVEKVILRWRRKRPGLRGFRPQKQLEGPSQIQPAKAEDEYDFLHDGRRQAEARLQRALARVHSMSQYPEAREQYHRLTTCVAEMKQSRVCFRSLLQDVFYFPSGFDHDLMLATLEQMMQDEMLSQAAGGADDFMAGLEDLICIDDAPPRCLPFGEAEPFYIR

SEQ ID NO: 37891 - protein, 269 aa, Zea mays
  Clone ID: LIB3066-028-C4_FLI.pep
SSSPLIILITSVVRWGSNRWIDQLAEVVSIAVVSGGRVAGGHRRGLHHALQQQPVLRRGLEPAVQEGGRRRHGHAVHAVAADVGTVLLLLLRPEQLALQRRRRRRPVVVVLGVERHDGGRRRRAHQLRAAVLGAEADDGPPAAAGAGAVGPGRDAGELLHHGAEVGGVGVEQRDGRAAGRARPPPRGLAHAPALHPDPGLQLRAARATARPARRRARHRPAASCRRHRLRRRRRAAPAVEPAPVGHVRASVTHALARSRSLLCPSACAG

SEQ ID NO: 37892 - protein, 303 aa, Zea mays
  Clone ID: LIB3066-028-F5_FLI.pep
LVGASAAAVFPLSPPYHSSSSSLPPAATMAPGLYTDIGKKTRDLLYKDYNTHQKFSLTTCSPHGIAITAAGTRKNESTFGDLHTQIKNNKLTVDVKANSESDLLTTITVDEIGTPGLKSILTLVVPDQRSGKLELQYLHEYTGVNASIGLNSNPMVNLSGAFGSKALSVGVDVSFDTETSNFTKYNAALSLANPDLIASLHLNNHGDTLVASYYHLVKHHSGTAVGAELSHSISRNESTLIFGSQHSLDPHTTVKARFNNYGMASALVQHEWRPKSFITVSGEVDTRAIEKSTKVGLSLVLKH

SEQ ID NO: 37893 - protein, 80 aa, Zea mays
  Clone ID: 700446195_FLI.pep
VAGSDPHPFAGLGGSSVELMESSRQSLGAYHSYSVGSLGQMQFSSGVRNPSRGQTTLQSRRSQSREDLSSSLADIHFPKV

SEQ ID NO: 37894 - protein, 141 aa, Zea mays
  Clone ID: LIB3059-043-C8_FLI.pep
EGARCLLPPSARKEEESRTLARVWRVVRRRGCSCSSRHRISAPPARSLVSSPVRRGAAMAGKGGPTNLEKEQMFGMAEKEMEYRVDLFNRLTKTCFEKCVEKRYKEAELNMGENSCIDRCVSKYWQVTNLVGQMLGNQPQM

SEQ ID NO: 37895 - protein, 58 aa, Zea mays
  Clone ID: 700446744_FLI.pep
DNITSLIIHFQIHTATADSVLYCMLPLPITYVFHWCLKVSIYEQESMKCTVALHRQNT

SEQ ID NO: 37896 - protein, 241 aa, Zea mays
  Clone ID: LIB3061-011-E11_FLI.pep
ISVEEVGEDMNTTAFTSKIDGQVFLKPNRPALVVSSTSWTPDEDFSILLEAALMYDRRVAAALGEDDSMDEGQLWIDIKNGKQFVYPRLLFIITGKGPDRKKYEDQIKRLKLRRVALRTMWLASEDYPLLLGSADLGVSLHTSSSGLDLPMKVVDMFGCGLPVCAASFSCIEELVKVNKNGLLFSTSSELADELMMLFKGFPEECNALKSLKEGAMKSASSSKWSTEWETNALPLVDQVIG

SEQ ID NO: 37897 - protein, 180 aa, Zea mays
  Clone ID: 700446918_FLI.pep
IDKITRPKPGWGHTSVPPAAAAAAVAATTTLAPTAVAATASVAAATTLAPTAVAATAAITAVTAPATIAAAAATAAVATAAAAAAAATGLGLVNGDVTAVELLAVHVLDSVEHGVLGGEGNEAEAAGPPRLPVGDDLGVEDLAVGGEGILQRLVAGGPGKSADEATVLHISRRHRPSTKP

SEQ ID NO: 37898 - protein, 249 aa, Zea mays
  Clone ID: LIB3061-045-C3_FLI.pep
SSLQQLLQGPFLVYMLEESSLVFFIQLSLLSSFTNPMLISNFMLAYLLTFRLNFLSINRFERKKNLDLAISAFALLRSAAWTIPGDALQEATLTVAGGYDKRLKENVEYLEELKRLALTEGVSGQVKFVTSCSTSERNELLSNCLCVLYTPKDEHFGIVPLEAMAAHKPVIACNSGGPVETVVNEVTGFLCDPSPAEFSKAMLKLVNDHDLAVRLGEQARDHVVQKFSTKTFGDLLNSYVLNIYHERME

SEQ ID NO: 37899 - protein, 238 aa, Zea mays
  Clone ID: 700449763_FLI.pep
MIPPATVLPAPAVSAATPSPTGPGASASLAEGALALERLVLVGASATGAGAGALDFFFLFLDDEEGFFFFLDGAGAGTSAGLVGGEAGAGAGGEAAGGSSATGGVALALGDGAGGDALGADLGGAAAGARVAGVVGAAATGAGVAGVVGGAAAGARVAGVVGGAAAGAGVFLVGVAGGVVAAAGAAAGAVVDFCAAAECAATRQSSTRQRAPARAIAAAAEAAVCGVCSVAVRCSGCF

SEQ ID NO: 37900 - protein, 361 aa, Zea mays
  Clone ID: LIB3062-022-B4_FLI.pep
PLTLVITSTITTMATTSALLALVLLASLLAGTVFSDDIVPIHIPLLDRFQAWQAEYNRTYATPEEFQQRFMVYSENVKFIETMNQPGSSYELGENQFADLTEEEFKDTYLMKLDNVASSPEAMALTVDTMNRAGTSGGSNTNEAPNSVDWRTKGAVTPVKSQQHCGSCWAFAAVASIEGVHKIKTGRLVSLSEQEIVDCDRGGNNHGCHGGHSSSAMEWVTRNGGLTTESDYPYVGRQGQCMSDKLGHHAAKIRGRQAVQGKNEGALQHAVAGRPVAVSINASRAFQFYKRGIFSGPCNTTRNHAVTVVGYGANASGHKYWIVKNSWGERWGEKGYVRMQRGVRAREGVCGIAIAPFYAVM

SEQ ID NO: 37901 - protein, 219 aa, Zea mays
  Clone ID: 700456477_FLI.pep
AAERTHLDSGFGCCYTRNGSPGTRTSCKASPWTAPSPWCTSHCPPVATRIQWCGCTAPRACSSSWRRRRRSTSAPTWASAGGGSTRSSSPRPWSCTRGTPGWARRRWWPRSSATCPRASGTPCAGASSRPAGRAPWSGSPTTWRSGTCWPRSWSAGPPRAAGSWNRSVRRCGLVRDPSSDRRGSVAVPSRARVEMCGGGWRRHTAFGPWGHLYVQRSQR

SEQ ID NO: 37902 - protein, 98 aa, Zea mays
  Clone ID: LIB3062-022-B6_FLI.pep
KDNCPVRTFRGHKNEKNFVGLSVNNEYIACGSETNEVFVYHKAISKPAASHRFVSSDPDDADDDPGSYFISAVCWKSDSPTMLTANSQGTIKVLVLAP

SEQ ID NO: 37903 - protein, 219 aa, Zea mays
  Clone ID: 700428606_FLI.pep
LQDLGIIPDDRFCGCLLSVAANTPAEELGKVISCIERSNVQLGAVVKLLVDRSSSESFREAARELLRSSRGVVKMPYCNCLMDLCVNLNQMEKACALLDAAQQLGIYANIQTRTQTQWSLHLRGLSVGAALTTLHVWMNDLYTSLQTGNEGLPPLLGIHTGQGKNTYSDRGLAAMFEAHLKELDAPFHEAPDKAGWFLTTNVAAKQWLESKAASELVTV

SEQ ID NO: 37904 - protein, 300 aa, Zea mays
  Clone ID: LIB3062-022-D2_FLI.pep
CIYEDKEFTEFKAFDPLFPNKPQKEHCEMHAPWEETKKSQPWWQVADVDGLASLVAERAMENIVNNDLPRPTQTVRVHGPQVKGPENKDDYGMSVVSGGQEPDPVHDTMECSYSVSSTTNDMNSSDGGRWQHHERNNVSGDARGSYSSTNSTPGSKPTYQDASERAKLLDALRHSQTRAREAEIAAKKAYDEKDHVIKLLFRQASHLFACKQWLKMLQLENICLQLRFKEHQIATMFPDLPWMLVKEKVAPSQEHNEGARKKGKRPNRKGGLCDAVAFAVGVGIVGAGLLLGWTLGWLLP

SEQ ID NO: 37905 - protein, 225 aa, Zea mays
  Clone ID: 700428719_FLI.pep
VDAMPHGRFTIDVEFLDLRIATNNATESSSVWPNEGMVQKIASKSALGCLSHMLADSIHADVTINTTDGVLKAHKAVLAACSPVFKSMFVHDLREKESSTVDIGDMCVESCSALLGFVYGTIEQGQFWKHRLPLLAAADKYGIGDIKDCCEESLLEDIGSGNVLERLHVAWLYRLERLKKGCLTYLFVFGKIYDVRDEMHGFFHHADRELMHDMFQEVLSVWKPM

SEQ ID NO: 37906 - protein, 182 aa, Zea mays
  Clone ID: LIB3062-022-E4_FLI.pep
SHDSLSIEHLFEALQILGLQPEEHGDAVVPVGALRDVGRAAAEHLRRRDEPRRAPPEVGVVHGHPEPADHPQVGLRHELPARRLAALLRLHLQVVDHGAHVGVIDAVHRVLDRLRHEPERAFQDVLHPGGHEVAHDGVAEVAPRERRAQAVADVGRHAEPRVRARGEPARDAHATPEVRGDG

SEQ ID NO: 37907 - protein, 137 aa, Zea mays
  Clone ID: 700428755_FLI.pep
FVLSSTRLPLLKEAAGFRRTMAGRGGNGVPAEQEFPGWSVAKAQEDPHPPVRHVHAARGLPAQARHKNEEGPAHFIPGISNSMPSHHHQFPGAQWSKNPTPHVPSPVGFIIEAFQPQKDELKEKARQKFIRLSSGGN

SEQ ID NO: 37908 - protein, 256 aa, Zea mays
  Clone ID: LIB3062-038-E8_FLI.pep
REYFELVRSTASGGGSPPPRYVSRACSAICALMPILTLYYGRMDVTVAFSAFVIAIALLLQRGNPRFAQLTSSVFGLFYCGYLPSFWVKLRSGLAAPALNTSIAYRWPILLGGQAHWTVGLVATLMAISSIIAADTSAFLCGRAFGRTPLTNISPKKTLEGALAGLAGCVLTTVLLSTALRWPRSLLSATAYGILIFLGSLFGDLVESLIKRDAGVKDSGSLIPGHGGILDRVDSYVFTGALCYSFVRVALPSYGV

SEQ ID NO: 37909 - protein, 195 aa, Zea mays
  Clone ID: 700428763_FLI.pep
RHRRRAAQNGGDLGRRGAPPHLQRHRVRGGDVHRHDEGGKGEKGEAEGSCSADTDGDAGGEGPRSHLRVLLRSGHGGGRGREASPGDTERRVPLRRAGRGREDGGVHGQAGGLRREEAGREDRVQGSAAAAAQGPGVSEAEQAGVVVKQQRRRAETWQQITRRGSPAAAAALLSVRFGTTDSWWNFVGLLEQNSM

SEQ ID NO: 37910 - protein, 276 aa, Zea mays
  Clone ID: LIB3062-038-G1_FLI.pep
AKWVSELQTNGSLVVPRIVLEALPAVLLFEKKQKAKAIDIIVSECRDKGYDGIVLESWSRWAIYGVLDDQELRYMALEFVKQLGEALHSVNSKSSSHHLELIYVIPAPRMQKLNNQDFGPKDLMHLADTVDGFSLMTYDFSGPQNPGPSAPLKWIHHSLAALLSAKGSSHSNSHSRMIFLGINFYGNDFLLSGGSGGGAITGRDFVHLLEKYKPSLQWDGKSLEHFFIYSDEGVKHAVFYPTLMSLSVRLDEARNWGTGLSIWEIGQGLDYFFDIL

SEQ ID NO: 37911 - protein, 297 aa, Zea mays
  Clone ID: LIB3066-003-F8_FLI.pep
VATVIAVLMNRGGKRRPIDRHKTLFALMKKRQRKRGQERLAAVTAPPRLAFLGPKELEAFPVDDGWAGLVVLGLGDPHLLEGAEGCQDGSSDPDTVLPLWRSDHLDLHAAGSQGSDLLAHPVSDPREHGGATGEDDVAVQILPNIHVALHDGVVGGLVDAGSFHPDEGWLEEDLGAAEALGADGDDLSVGELVALLHGRAGLGGLHLLVVVQGDVGELLLHVPHDFPLSGGGEGVAALSQDLHQVVGEVATGQVKTKDGVGEGVSLVDGDGVAHTISRVEHDTCGTATGIQREHGLD

SEQ ID NO: 37912 - protein, 161 aa, Zea mays
  Clone ID: LIB3066-004-E5_FLI.pep
QLKTAERSPLPLPLRSILQRSEVNMSDRAKMSWQAYVDEHLMCEIEGHHLAAAAIVGHDGAAWAQSTAFPEFKTEDMANIMKDFDEPGHLAPTGLFLGPTKYMVIQGEPGAVIRGKKGSGGITVKKTGQALVVGIYDEPMTPGQCNMVVERLGDYLLEQGM

SEQ ID NO: 37913 - protein, 314 aa, Zea mays
  Clone ID: LIB3066-020-E7_FLI.pep
ERQIQGCSRRMHILLGDWRLHAYPLYLSPKLVKALEEADRLKQETDRLAKEVEQLQSGRFADVEELVYLKWINACLRYELRNKDAPSGKTVARDLSKTLSPKSELKAKQLIMEYANVGAEDSHLGHVEFGSECSSSRASSGEPDDVSIDIASMTKHTNKNPKKKKFFSKLRKLVLGKGKENREISTLERRVSISSCSFDDFTGRDSHDSYSSFMAEPNMPDSRRHGDHGFGTHSSLDSAKSSPLGTEIVGERSDHSVVKSVSSREEKVNAFGPSIGLDSSKAIPEDVEIHKFADALITSRSGSMSSRRSASFRH

SEQ ID NO: 37914 - protein, 327 aa, Zea mays
  Clone ID: LIB3066-021-A4_FLI.pep
EELKATVQGVLNCCSHYFCFACIMEWSRVESRCPLCKQRFTTITKSSKVDLGLGVRRAVIKVEERDQVYQPTEEEIRRWLDPYENVVCIECNQGGDDNLMLLCDICDSSAHTYCVGLGREVPEGNWYCGGCRLGDEGPSYTGIQRTVAYERQNYRSHVDSSSVSFGMAAPGGTFERPSSINPRHSFQGIDLNLSPREFPGESHLAESQVSTDSVSTPTGRAGRTISGRREIQRYIQSLFRPSLPSRPDTYHNIAQNSGGVSRNEPNRWNFPSSSEANTSQNLPDGIQNHHSDLPFVQAHSNFAPFMSLDGDDFQQIEGVKSNLRNMQ

SEQ ID NO: 37915 - protein, 142 aa, Zea mays
  Clone ID: LIB3066-023-C11_FLI.pep
DELRKAKKKMGEQNIQKAVKSAMDAAEAALSGNKPFCVTHVDVGLDTTAVREAVIKVMDQKGLPIMLFSTDEASNKAVIYAGVPPNAPSGFKVLDWLTPSIAPLKGRGGGGKNGVAQGQGSDASQLKEAMALANSIASMKLC

SEQ ID NO: 37916 - protein, 114 aa, Zea mays
  Clone ID: LIB3066-032-G3_FLI.pep
RTIKKDILFIIIAVSLGMDKFEPPAHVFAVLDVRHQLPRVGAVLGPAVVERRPVHARLHGLGPAARRVRRGVVLRPEHDPRREPAEAVPDVAERRPAAGDDLVGHAQQVHLRHR

SEQ ID NO: 37917 - protein, 214 aa, Zea mays
  Clone ID: LIB3066-033-H3_FLI.pep
TKSSRPTRTEKNPTKSRGRGDRKKRTTTDGAAMACRALALRSLLLPDPLHRLPAAAPPVWRASRGGRRPHLRCCSGGGGGEPGQPPQEAVLEAISKIARSKGRVALTTNMVMGGTVTDDASDEWLVLDQKVNSYPTDRGFTAIGTGGDDFVQSMVVAVESVLQESIPKGRVSQKLSSRGKYVSVNIGPIRVVSSEQVQAVYRAMRRDNRMKYFL

SEQ ID NO: 37918 - protein, 154 aa, Zea mays
  Clone ID: 700428783_FLI.pep
QIDSQSSEIEKLFEENSALSASYQEAIDVTVQWENQVRDCLKQNEELRSHLEKLRLEQVSLLKVSNIATQSDGQTENSISNPPQMVIENISLKDQLIKEQSRSEGLSAEIMKLSAELRKAVHAQNNLARLYRPVLRDIESNLMKMKQETYATIQ

SEQ ID NO: 37919 - protein, 207 aa, Zea mays
  Clone ID: LIB3062-003-E3_FLI.pep
FLRYERQKLHQILIGKDREHTLLLFVIIFLHLSTAGAVLLSEEEDLELVIARKHTSTSNGTKNVSTSTLEQGLGPFLLKNLLERVQGALVLDSLTRCHHHPSADGIDGVRCKTSTISDQPTQSETGKEIVLEVASKDNWLDGIIEPKVQTTINNDSNTGDVKSTVKPSNTIRLECLAVDIDKPIELPFTSSLGSLRVISQPCSRVVQ

SEQ ID NO: 37920 - protein, 111 aa, Zea mays
  Clone ID: LIB3066-010-H12_FLI.pep
AEEKYLLSNWSLLSMRFTLQPNDRTNPPKKKTELKRVIVTEYSQRNNWYLVARTRAAQANRVGRRVFALLLLLLKTKLEPATSSTCIPGEGVVVTSPGRLPARTGVVVTSP

SEQ ID NO: 37921 - protein, 254 aa, Zea mays
  Clone ID: 700348691_FLI.pep
EGKVPLWEALCEKHNAVIELLVESGAELSSGDTALYACIAVEENDAELLLEHGADVDKQDSNGWSPRDLADQQGHDDIQALFKSRKAHRKHASNGRVAPMLIGRFNSEPSMPDMSHENARVRSEVVPQKLLRKRVSFQNSLFGVISSSHAHQDTGRLLSKGLAGTEGPNCRHDSLIRVTISCPEKGGNAAGKLVRLPRSMAELLELGAKKFGIKPGKVLTVGGAEIDEVELIRDGDHILLVSDEWVPDVEQIRP

SEQ ID NO: 37922 - protein, 205 aa, Zea mays
  Clone ID: 700438105_FLI.pep
LGETSIASSISYLDNGVVYVGSRFGDSQLVKLNLQADASGSFVEILERYVNLGPIVDFCVVDLDRQGQGQVVTCSGAFKDGSLRVVRNGIGINEQASVELQGIKGLWSLKSSINDPFDMYLVVSFISETRFLAMNMEDELEETEIEGFDAQTQTLFCQNAINDLLIQVTANSVRLVSCTSRELVNQWNAPAGFSVNVASANASQS

SEQ ID NO: 37923 - protein, 271 aa, Zea mays
  Clone ID: 700466018_FLI.pep
LLQVVNNMNAVVKAFPGQNGATGSREKASILFIESDFWRPETDVQLLNHLREQKNGQLSDGHKVVLLVTSEADKDKYGSIFDIVMCKPIRASTIASSIQQLLKVEIAERKDNQNRPSFLRSLLVGKNILVVDDNKVNLRVAAAALKKYGANVSCVESGKDAISLLQPPHRFDACFMDVQMPEMDGFEATGQIRQMELKANEERKNKLASIEGSTTAEYHLPVLAMTADVIQATYEECIKSGMDGYVSKPFDEEQLYQAVSRLVVGTTDSAV

SEQ ID NO: 37924 - protein, 177 aa, Zea mays
  Clone ID: 700428785_FLI.pep
VVASIHIQSNYIATIQAYTLSSTSTSAMCLPFSCCHRGDHDTKESEVESQPYYHPSPVKEAHDGHRATNDMPPVVEDNSKNGGGHTTGFSSHSDDGVVRGGETTITTEKIVAPPTTTPAPQAASRDLAVQQAPQGTYVSASRPRHNHGRGSSAASPPSEAVVTKVVLPMARRGGEDY

SEQ ID NO: 37925 - protein, 214 aa, Zea mays
  Clone ID: LIB143-012-B10_FLI.pep
YACSACRSTTSPLGCDCETEILRRERLKDAVRLQRRRHLRPNVGAEEPGAVASRPRSDGQVARTKPPIVADGQRERGVAEAEVRVERERREHGLVQRRRAQPEDALLHHVLRLVHLHPVHQLLQVLVVVYGRDGIPHHGRHLGQRLPPDLLHGRAAQRVGRDVAEVVAHRGDQLGRLHPPPSVHHPAHAAPLLGHAARGHDGGEDLPQVGGHRL

SEQ ID NO: 37926 - protein, 74 aa, Zea mays
  Clone ID: 700428912_FLI.pep
EWWCAAWCDAACACDGVKCVAIPAVAAADSQQSTQPRENHLLPNGALFAQTRSKSSHEILPPRDTSCTTLPTKS

SEQ ID NO: 37927 - protein, 208 aa, Zea mays
  Clone ID: 700431089_FLI.pep
REMLDLDTRNLAERHITQHLFSRKALSLVLLVNNGVQVSGTSLHRRRLMPAGRSAGHRRSVSQSSAVASWTLSSSSSGMTRMVQSERGYAAQSSAYPRATTSSLSMPSLWSTVPETSRAGHVMHTPSLQSCGTSRPSSSARDRIVSSSSTSTTRDSPPCSIVTLYARGGCAAAMRAPDGQRDSWALGRRTARRVERVRVGVARWRSEA

SEQ ID NO: 37928 - protein, 154 aa, Zea mays
  Clone ID: LIB143-029-A8_FLI.pep
AGQGEREALALASWIGRSYRAHTGSEIRWSDTEDAAGSPLTLFWKHSDAIICCSLKPAFTLKFANRAGFDILETTVANVQDLPLEAVLDDGGQKALVAQLPKIMLQGLAYLPGGVCRSSMGRQASYEQAVAWKVVGDDGAPQCLALMFVNWTFI

SEQ ID NO: 37929 - protein, 357 aa, Glycine max
  Clone ID: LIB3242-545-F6_FLI.pep
FLNNFCYFLLQPHFCSAIIMGKVKIGINGFGRIGRLVARVALQRDDVELVAVNDPFITTDYMTYMFKYDSVHGHWKHHDVTVKDEKTLLFGDKPVTIFGHRNPEEIPWGSTGADIIVESTGVFTDKDKAAAHLKGGAKKVIISAPSKDAPMFVVGVNEHEYKPELDIISNASCTTNCLAPLAKVINDRFGIVEGLMTTVHSITATQKTVDGPSAKDWRGGRAASFNIIPSSTGAAKAVGKVLPALNGKLTGMAFRVPTVDVSVVDLTVRLEKEASYDEIKNAIKEESEGKLKGILGYTEDDVVSTDFIGDSRSSIFDAKAGIALNKNFVKLVSWYDNEWGYSSRVIDLLVFVAKKSL

SEQ ID NO: 37930 - protein, 167 aa, Zea mays
  Clone ID: 700431616_FLI.pep
SPSRGGPWPWLPSRPCGPRRRGPGCRHGGPGSSAQSASAGCTPSRQRTAAAPLAPEPDPPGSSPQTSGRRPWWRRIHPAWAVHQCRRRCMTRSSCCSTAQRWPCRGCTRGSTQRSPRRLPRRRRRTWPPRARPPPPRRPPRACKSISYYQTKAMISSLCWILVSSLF

SEQ ID NO: 37931 - protein, 276 aa, Zea mays
  Clone ID: LIB3062-026-H10_FLI.pep
FTSPDELLEEEYYDEQLPEKKRRLTPEQVLLLERSFEEENKLEPERKTELARKLGLQPRQVAVWFQNRRARWKTKQLERDFDRLKASFDALRADHDALLQDNNRLRSQVVSLTEKLQEKEDATEGGATADTAAPAVDVEASLADDVEEPAEPAATFEVLQEVKSEDRLSTGSGGSAVVDADALLYGRFAAAVDSSVESYFPGGEDHYHDCGTMGPVNHGAGGGIQSDDDGAGSDEGCSYYADEAAAAAAAFFAGHATHHHADEDEDAGQISWWMWN

SEQ ID NO: 37932 - protein, 224 aa, Zea mays
  Clone ID: LIB3137-061-F6_FLI.pep
KVSALMALLDQVDRKYRHYHHQMQMVMSSFDAVAGAGAARPYTALALQTISRHFRSLRDAVGAQVQSLRRSLGEKDGSAQGGGLPRLRYIDQQLRQQRAMQQFGMMQQPQHAWRPQRGLPESAVSVLRAWLFEHFLHPYPKDSEKLMLARQTGLSRGQVSNWFINARVRLWKPMIEEMYREEFGAEMDSHSSSENAAGNKGKDEAISSEDHEEFQSPSSAAAAA

SEQ ID NO: 37933 - protein, 169 aa, Zea mays
  Clone ID: 700461156_FLI.pep
NPLPRVLLNQIQGHSGEPLGYHVWPRQGREGSGQGRRQAPPQGAARQHPGHHQAGDSQVGEEGRRQAHLRAHLRGDPRRAQDLPRERHPRRRHLHRARPPQDCHRHGRCLRAQASGPHPLRFRRLGRPLSRWRITWWRWRSCCVLGLVLSVLSLSVLFSVVVVLHRSSF

SEQ ID NO: 37934 - protein, 170 aa, Zea mays
  Clone ID: 700618137_FLI.pep
SHDSDKPTTARDELTRVPETFLTARLVGTARKRRICRRGEHREEPISLAAEAVEGAALALERVDDVHGGDGLAAGVLSVGDGVADDVLEEDLEHAAGLLVDEPRDALDAAPPRQPPDRRLGDALDVVAQHLPVTLRAALAEPLATLTAPGHGFFRSGLWWAGEFPRKARL

SEQ ID NO: 37935 - protein, 171 aa, Zea mays
  Clone ID: 700618938_FLI.pep
QRVCSVQATKKRCPAAQRKKRAEEDGSYEADRPQVHGRQGPPQAARHQGGEEVGADDRRREEAPQVQARNRGAARDPQVPEEHGAADPQAALPAPGARDRAGLQDRPPVPEPRRAGAPGGRRGLPRRPLRGHQPLRHPRQARHHHAQGHPARPPHPWRARVAIISEDLMNV

SEQ ID NO: 37936 - protein, 82 aa, Zea mays
  Clone ID: 700433990_FLI.pep
HSTTPSSPEQAQPEPNPARAPADPTAPHQHNPGYPADASLIGSPRSMGSPGSANGRRGDYVRIPEEAEVASKGEGDAAAAVK

SEQ ID NO: 37937 - protein, 186 aa, Zea mays
  Clone ID: LIB143-033-E7_FLI.pep
HWPKSTRKRNRAVAPCGGDLRGSKLGNGLGALGDGVLGELARKDEAHRSLDLPGGYGGLLVVAGELGGLSSQLLEDVVDEGVHDGHGLGRDTNVRVHLLEHLEDVDLVRLDALLGLLLPLLLAALLARHALLRPGLLLGLLLRRLLLRGLLLGLGRHREFDQMERRTRDGKRRIGNLLIGGDERWW

SEQ ID NO: 37938 - protein, 120 aa, Zea mays
  Clone ID: 700434019_FLI.pep
PLRWNCCSTQISCYNNKAHENLHSSSGWRRQNNVPYKTPADHNTPRNTFSYLPRLTWSSRCTLMLTHLWPKHLHHSSQSLRSLLGSSQIYMDVIIPVYAWFTMFPFKSIRSLACLRSFIS

SEQ ID NO: 37939 - protein, 167 aa, Zea mays
  Clone ID: LIB143-057-D9_FLI.pep
NHIQSTPSPSTPTTPSPDPMAPKAEKKPAEKKPAAEEKAEKTTAGKKPKSEKRLPASKSSGKEGGEKKGKKKAKKSVETYKIYIFKVLKQVHPDIGISSKAMSIMNSFINDIFEKLAGEAAKLARYNKKPTITSREIQTSVRLVLPGELAKHAVSEGTKAVTKFTSN

SEQ ID NO: 37940 - protein, 233 aa, Zea mays
  Clone ID: 700468318_FLI.pep
KPEPSMTPVGPHSPIKNEVWETSVPFVPSFSFPDSTTASESQYDPFVDYVEPPKVGNTNNLKPSTISCNITSQHTDQYAVTDKSLNCNDKLTRNITAKGSNEPAYFIAPDRGCSSSLDDTIKVKACDRKKDAVDYNEKTRDFRFHLAEHIKELVKPIWKKGNLSKDAHKLVVRKSVEKVVDSIEPNQVPTTEELITKYIATCGPKIEKLVKAYVDRHSTCHPTIKYSSSEMGA

SEQ ID NO: 37941 - protein, 116 aa, Zea mays
  Clone ID: LIB3059-042-A7_FLI.pep
QRTTCSRTHTHTSTFVPSAAYASPHTGNKVLLNIRSLRTVSLCLLRGLGGLLGRLCLLAPATGRLLRRLLGQQNRVDIGEHTAVSDGHAAQQLPKLLVVPDRQKHVARNNASLLVV

SEQ ID NO: 37942 - protein, 230 aa, Zea mays
  Clone ID: 700473576_FLI.pep
GSDSESESEKVGSPGKLAKGTKKPDQLVEQEKSDVISPADANRPAAIVGLHGEDSESKPAPGGENSEPDTQVSPDRLLRAALLRSRYADVIVKARGILSQGGDKQEELEKLQKEEKERLLAEGTAAMEACRAEAEAEKKRKRNFEREKARQALQEMERTVEINDNLHLKDLELLGTATTEHIVSSVDETSPERSHDGMAGYHPGAVNPLEQLGLFIKVDDEEDDEQCSLH

SEQ ID NO: 37943 - protein, 172 aa, Zea mays
  Clone ID: LIB3067-019-C12_FLI.pep
SLGRGELGDGLGALGDGVLGELPGKDEAHGGLDLTGGDGRLLVIARELGGLSSELLEDIVNEGVHDRHGLGGDANVRVHLLQHLEDVDLVGLHALLALLLAPLALAALLGSGLASGDPLLRLRLLPGGRLLGRGLLLRRLLRRGLLLGLGRHRCGASWGLGCEGGWEEMRGD

SEQ ID NO: 37944 - protein, 210 aa, Zea mays
  Clone ID: 700438513_FLI.pep
RSLTQRGAVACRVRGAGAGGAMATTLSLSSPLFLGAPARGKGYTSRVRCREQQRRTTIVSMLGRKSTARATVVPDPDYRLPIAILGIASAFAYADNLLAAAPVGLLGLLLLFQTTRVRFVFDNEALEVKVGEQLQESGENVFVGGKNRWKYSTFVNWELWWPQFPVLVYFKETQTKPEGQIHFFPVIFDGRQLYDVMVERAGPSKTSGPK

SEQ ID NO: 37945 - protein, 134 aa, Zea mays
  Clone ID: LIB3067-045-C4_FLI.pep
NASKKDEGRLRAGGGGAGKRKKAAASGKPKRPPSAFFVFMSEFRQEYQAQHPSNKSVAAVSKAAGEKWRSMSEQEKQPYVDQAGQKRQDLQRVVPPERELHHRLQERGQYRRVLQARGLHVHQRVCREYWRCWC

SEQ ID NO: 37946 - protein, 112 aa, Zea mays
  Clone ID: 700441113_FLI.pep
RVPVERGATNNMALSFRLVAGVLLVLALALLSSSAEERSAGRAATVSAMGSDHDQTSEAPVPPLRPLGSRKPVAAPPPPRPAHPRASIRPFPPPRPSQPQPQPQPPPPPPRS

SEQ ID NO: 37947 - protein, 168 aa, Zea mays; identical to SEQ ID NO: 37644
  Clone ID: LIB3067-056-F12_FLI.pep

SEQ ID NO: 37948 - protein, 198 aa, Zea mays
  Clone ID: 700441262_FLI.pep
PDDNRRIRERDSRRHVASAENGHRRKEGSKESEYKKGLRPVLWLSPNFPLRTEELLPLLDILANKVKAIRRLRDLLTTKLPPGTFPVKVAIPVVPTIRVLVTFTKFEELQPLDEFTTPPSSPDNSKSPAVQPSSSSWIQWIKAPYLQNLSTAPGPSSRVEDIQDPFAIPSNYVWTTPEEKKKKTQENKNKSKKGRSGA

SEQ ID NO: 37949 - protein, 76 aa, Zea mays
  Clone ID: LIB3069-011-F6_FLI.pep
RSSYRSRAAPTEKPATSNYNTRRTSTQEKPTKGERASLGGGELGDGLGALRDGVLGELAGEHEAHGGLDLAGGDGG

SEQ ID NO: 37950 - protein, 107 aa, Zea mays
  Clone ID: 700441302_FLI.pep
CFTPGKHPRDRDEEGGAKGNGKVWVPKTIRIDDVDEVARSSILSLIGIGGDKAGKDGGRGCKLARVFEQNEEAARTATPHSAAISGLPFLQGNPAALSRSLTFQEGS

SEQ ID NO: 37951 - protein, 318 aa, Zea mays
  Clone ID: LIB3069-022-E8_FLI.pep
LPLTVPLLNLGPSLLAAFPDRAPSTPRGATMPTPSSIIIPLIPAASTRSIIVPVMPAASTCSIIIPVMPATSSPSTAAAAATVLVTITVVIVLTIAPPLRWRASASRMVPPGSRTPIQLPPEIPANLLHMHEITVATTVAAVLLKLPTGCFTEVGHRRILNNYRAPRVKAPLKSIVCCSCLFFLSELNIDIPNHVVSKVITNIQILNLTKLAQLLIDVLIEVLKMLLHLLRINRLALSINSRSYHIRALIHVSKHKSWRYSWPVVQTRTAIPMTTSPNLEVKRAVDPVLLGTKDRSQVLRHDSTCRLTTSIKVLSVQD

SEQ ID NO: 37952 - protein, 115 aa, Zea mays
  Clone ID: 700441426_FLI.pep
MRSSTVTLFLPFFLAYALQSAFISSLQPHSASRSRSSSISFSFSPVSTNLMLMISPREGCLSRSSSALGVGGRLIDALMLQLGLDSPLLQLPRCSSDSEAYSSTVRVPLIPRRSR

SEQ ID NO: 37953 - protein, 162 aa, Zea mays
  Clone ID: LIB3069-035-E2_FLI.pep
ATPTADAHMTITRILRRGELRNGLSALGDGVLGELAGEDEAHRGLDLAGGDGGLLVVARQLGGLGRELLEDVVDEGVHDGHGLGRDADVGVHLLQHLEDVDLVGLHGLLRLLFPLLALAALLGLARREALLGLGLLPRRSLLHLLCRGLLLRGLLGHRLLLR

SEQ ID NO: 37954 - protein, 368 aa, Zea mays
  Clone ID: LIB3069-042-H12_FLI.pep
NVLQINKLKPKDPGAEVIALSPRTLVATNRFVCEICNKGFQRDQNLQLHRRGHNLPWKLRQRSSLVAPSSAAAGSGGRQQQQGEAAPPRKRVYVCPEPTCVHHDPARALGDLTGIKKHFSRKHGEKRWCCERCGKRYAVQSDWKAHVKGCGTREYRCDCGILFSRKDSLLTHRAFCDALAEESARLLAAAANNGSTITTTTSSSNNNDLLNASNNITPLFLPFASSPPPVVVAAAQNPNNTLFFLHQELSPFLQPRVTMQQQPSPYLDLHMHVDASIVTTTGGLADGTPVSFGLALDGSVATVGHRRLTRDFLGVDGGGRQVEELQLPLCATAAAAGASRTASCATDLTRQCLGGRLPPVNETWSHNF

SEQ ID NO: 37955 - protein, 171 aa, Zea mays
  Clone ID: 700444935_FLI.pep
NGVSSDSDAVVLPPPSQTSARSSSIFPYHPDAMAAGAKPDTAAPPQAPSAAKGVFMRRIFPFLLATNVFIGVYVFAKTYKRDQEKKNAQTTAAAALSSPASTSAKAPDPAPAPAPESVLPPLSEDEQWNLYKWILEEERKIKPRNATEKKKIDEEKALLKEIIRDKSLPRL

SEQ ID NO: 37956 - protein, 174 aa, Zea mays
  Clone ID: LIB3070-004-E3_FLI.pep
SLGRGELGDGLGALGDGVLGELPGKDEAHGGLDLTGGDGRLLVIARELGGLSSELLEDIVNEGVHDGHGLGGDANVRVHLLQHLEDVDLVGLHALLALLLAPLALAAFLGSGLASGDPLLRLRLLPGGRLLGRGLLLRRLLRRGFLLGLGRHRCGASWGFGCEGGIGWEEMRGD

SEQ ID NO: 37957 - protein, 264 aa, Zea mays
  Clone ID: 700448482_FLI.pep
ILFVTFVSWPRHTAVTAFPDTPAGDDSFHYFKKVFDVHRIRSTAGALDFSGIGQGYFWEALFTFLYVDILDTTGSLYTMARFAGFVDDATGEFEGQYFAFMSDATAIVFGSLLGTSPVTAFIESSTGIREGGRTGLTALTAAIYFAAALFITPVLASIPSWAVGPPLVLVGVMMMRAVAEVDWDDMRQAVPAFLTLALMPLTYSIAYGLIGGIASYMLLHSWDWACQATRRLGCLKKGGGGADSTNGGVAEQSVEEQRKDMESA

SEQ ID NO: 37958 - protein, 136 aa, Zea mays
  Clone ID: LIB3070-012-A8_FLI.pep
THNRPRPSYQSIRRGGGLAAEAVERAALALERVDDIHGGDGLAASVLGVGDGVADDVLEEDLEHAAGLLVDEPRNALDAAPPGQPTDRRLRDALDVVAQHLAVALGAALAQPLAALAAPRHRRNRELRGRRRRIVP

SEQ ID NO: 37959 - protein, 85 aa, Zea mays
  Clone ID: 700451411_FLI.pep
GGDEHRRAGHRRPRRGPGEEGRARVRRGRGGVRRGRPRLQLRWQLQVRPLQLLITSIDDHGYDYYLSSLWWWLNNNKRGRAGCHT

SEQ ID NO: 37960 - protein, 69 aa, Zea mays
  Clone ID: 700451413_FLI.pep
PCHVHCAACNPFAGAPAPARGLLSSFQPRDFASKPEAPSVCRLVLLEIFFFILFHFSCLVFPLILALYK

SEQ ID NO: 37961 - protein, 189 aa, Zea mays
  Clone ID: LIB3070-014-C11_FLI.pep
SASCPSSAWCARSRRTSRQTSGSRATPCWRSRRPPRPTSSASSRTPTSAPSTPSASPSCPRTSSSPAASVASARSHHLRGSDECLVTKQIGRISVVVLYSLFWIRLQGKTALLILFVISGGRFASKRSSVVLNSCWLFCYGPVFGLAAWYISSARRKLAVLHHVGLLRHSSSSLPSFSSEMLIVGPLFH

SEQ ID NO: 37962 - protein, 226 aa, Zea mays
  Clone ID: 700457589_FLI.pep
LAEMEASSRRRVSLVPLLVVIIGCCACRAQIPIPARTDGFVYGGKPPAWGETVVVEAFLDPVCPDSRDAWPALKMVVEHYSSRVSVVVHLFPLPYHSYAFIACRSIHAVNKLNPSFVYPLLEKFFKYQKRYYNQPTYEKSRATVVDEITKNLVVPIIGETNLAAFRAGFNDSHSDQATRISFKNGCARGVTGTPYFFVNGIPINDSGSPLEYKDWISILRPLVGKM

SEQ ID NO: 37963 - protein, 114 aa, Zea mays; identical to SEQ ID NO: 36770
  Clone ID: LIB3078-012-G8_FLI.pep

SEQ ID NO: 37964 - protein, 174 aa, Zea mays; identical to SEQ ID NO: 37956
  Clone ID: LIB3088-002-C11_FLI.pep

SEQ ID NO: 37965 - protein, 157 aa, Zea mays
  Clone ID: LIB3088-004-E10_FLI.pep
IHNTGKSHCTTYTHQPTTTTTMRSGTSQCLLEKQTTTTPTTRGLRRGELGDGLGTLRDGVLGELAGEDEADGGLDLAGGDGGLLVVPGELGGLRGELLEDVVDEGVHDGHGLGGDADVGVHLLQDLEDVDLVGLHALLRLLPTLLVAALLAGGLARR

SEQ ID NO: 37966 - protein, 119 aa, Zea mays
  Clone ID: LIB3088-011-G7_FLI.pep
AGSMLASISSLQKKKWITSRNAATLRPTATETYHPKHSPATKRRLASEAVEGAALALERVDDIHGGDGLAARVLGVGDGVAYDVLEEDLEHAAGLLVDEPRDALHAAPPSQPPDRRLGD

SEQ ID NO: 37967 - protein, 131 aa, Zea mays
  Clone ID: LIB3116-025-F8_FLI.pep
PPQAARHQGGEEVGADDRRREEAPQVQARNSGAARDPQVPEEHGAPDPQAALPAPGARDRAGLQDRPPVPEPRRAGAPGGRRGLPRRPLRGHQPLRHPRQACHHHAQGHPARPPHPWRARVAIISEDLMNV

SEQ ID NO: 37968 - protein, 70 aa, Zea mays
  Clone ID: LIB3136-008-F12_FLI.pep
SARRSRLRKQAEWEEVANRADLLKQENSSLKEELKQLQEKCDGLTSENTSLHEKLKALEDEKSNGNWYKD

SEQ ID NO: 37969 - protein, 159 aa, Zea mays
  Clone ID: LIB3150-040-A10_FLI.pep
ATSTNTTQPSTMSLRRSELGDGLGALGDGVLGKLTGEDEAHRGLDLAGGDGGLLVIARQLGGLGRELLEDVVDEGVHDGHGLGRDADVGVHLLQHLEDVDLVGLHGLLRFLFPLLALAALLTGGLARREALLGLGLLPRRSLLRLLCRGLLLCRLLRRR

SEQ ID NO: 37970 - protein, 123 aa, Zea mays
  Clone ID: LIB3150-054-G11_FLI.pep
EAPADKLIPIIKSAGMDGYEGNRGKKKGKKSVETYKIYIVEGRYKQVHPDICISSNAMSIINSLINDIFEKLSGEAGKLARYNKKPTITSREIQTYVRLVLPGELAKHAVSEGTKADTKFTSC

SEQ ID NO: 37971 - protein, 127 aa, Zea mays
  Clone ID: LIB3279-014-D8_FLI.pep
STHKWRFPLMTTKRLTWFETLLISTPLLPHDPTTSTNFREEPAPRATAYPAGRLGALPADAAGELDVLGHDGDALGVDGAEVGVLEQADEVGLGGLLQRGDGGGLEAEVGLEVLRDLADQALEGQLA

SEQ ID NO: 37972 - protein, 175 aa, Zea mays
  Clone ID: 700082035_FLI.pep
AFSNSDSQSSKPYQPFANSERDPMAPKAEKKPAAKKPAEEEPAAPAEKAPAGKKPKAEKRLPAGKSAGKEGGVDKKGRKKAKKSVETYKIYIFKVLKQVHPDIGISSKAMSIMNSFINDIFEKLAGEAAKLARYNKKPTITSREIQTSVRLVLPGELAKHAVSEGTKAVTKFTSS

SEQ ID NO: 37973 - protein, 176 aa, Zea mays; identical to SEQ ID NO: 37650
  Clone ID: 700553369_FLI.pep

SEQ ID NO: 37974 - protein, 164 aa, Zea mays
  Clone ID: 700569151_FLI.pep
LLAFVHPTRTSTISQHIHRRGGVEDTTKNPCKKGRPNKSVDAAGCSIAGELGDGLGSLGDGMFGELSWEDEAHGGLDLAGGDGGLLVVPRELGGLAGELLEYVVDEGVHDGHGLGGDADVGVHLLQDLEDVDFVGLHALLGLLLPLLLAALLAGGLGCGWLETR

SEQ ID NO: 37975 - protein, 172 aa, Zea mays
  Clone ID: 700236914_FLI.pep
SPSPSSDITETGRQSSNQALSPLMRRASWMSLGMMVTLLAWMAQRLVSSKRPTRYASAASCSAATAEDWNRRSVLKSCAISRTSRWKGSFRMSSSVLFWYLRISRRATVPGRNLCGFFTPPVAGADLRAALVASCFRGALPPVDFLAVCFVRAIGESCERAGGAARSKDLKL

SEQ ID NO: 37976 - protein, 223 aa, Zea mays
  Clone ID: 700094748_FLI.pep
QRTTCSRTHTHTSTFVPSAAYASPHTGNKVLLNIRSLRTVSLCLLRGLGGLLGRLCLLAPATGRLLRRLLGQQNRVDIGEHTAVSDSHAAQQLPKLLVVPDRQKHVARNNASLLVVPGSITGELQNLSGEVFEDSGEVDGGAGADTLRVAALLQVAPDAADGELEPGLHGPRHRLLPWPADLAPGRSLLPLTPCSGAGGVHGRISASIGLSGTRRKCSGVGTN

SEQ ID NO: 37977 - protein, 278 aa, Glycine max
  Clone ID: 700565486_FLI.pep
SICNLSEDAKTIHIIDFGIRYGFKWPALISRLSRRPGGPPKLRITGIDVPQPGLRPQERVLETGRRLANYCKRFNLPFEFHAIAQRWDTIRVEDLKIETDEFVAVNCLFQFEHLLDETVVLNNPRDAVLKLIKKANPDIFVHGIVNGSYDVPFFVSRFREALYHYSALFNMLDTNVGREDPIRLMYEKELFGREIMNIIACEGCERVERPQTYKQWQLRNMRNGFRPLPLDQRIIDKLKGRLRDDAYNNNFLLEVDGNWVLQGWKGRILYASSCWVPA

SEQ ID NO: 37978 - protein, 226 aa, Glycine max
  Clone ID: 700567730_FLI.pep
FDPTDQEILEHLEAKVRSDIHKLHPLIDEFIPTLEGENGICCTHPEKLPGVSKDGLIRHFFHRPSKAYTTGTRKRRKVHTDADGSETRWHKTGKTRPVFISGKLKGYKKILVLYTNYRKQRKPEKTNWVMHQYHLGNNEEEKEGELVVSKVFYQTQPRQCGSLMKDSYPAKLKGEGVHEVTNHKNTGYVEYYNNSFVSFDQGDQHRSSTAQLVSHFPVHGGATFIP

SEQ ID NO: 37979 - protein, 270 aa, Zea mays
  Clone ID: LIB3156-003-C1_FLI.pep
QLPNGTVQTPTSGAGGTATDKSNKNKRKASLKGSKGSLGSLDVVAVKNNKSPAKPSTSSSNEGSSQSESGSGSSSEGSSTNSKSGSRVKDNSEQGQGNDARSKCTQSSVVEPTQPSSGSVVLNPMMPFWPVPPPMAGPATTLNMGVDYWGTPASVPMHGKVIAAPTSAPSSNSRDIVLSDPTIQDGRELKRQKRKQSNRESARRSRLRKQAEWEEVANRAVLLKQENSSLKEELKQLQEKCDGLTSENTSLHEKLKALEDEKSNGNWYKD

SEQ ID NO: 37980 - protein, 201 aa, Zea mays
  Clone ID: LIB3245-465-E11_FLI.pep
WSSIVLGLIYLICTHLPAEINKVFSTVHTTTTCVTSPSSPVRLPVLLGPTPATLPIPLRIRIIHALSHYFALQQPPHLSPQNRHRVPALPFSTISLSSLQKTACATSCSRAPAVIDCMRSVNTESARNGDGYGEERETVGRAKYGYGERVCWSWSPLNGCATSGLLIYKDRVVKNQNKYMMLQVPRRRVSHLCYTVPGLIN

SEQ ID NO: 37981 - protein, 167 aa, Zea mays
  Clone ID: 700262705_FLI.pep
LNLGWCDGITDKGVTSLASGCPELRAVDLCGCVLITDESVVALANGCLHLRSLGLYYCQNITDRAMYSLAANSRVRSRGRGWDATAKSGGGGKDRERDGLASLNISQCTALTPPAVQAVCDSFPALHTCPERHSLNISGCLSLTSVHCACALHPHRAGRVILSNHAY

SEQ ID NO: 37982 - protein, 471 aa, Zea mays
  Clone ID: LIB3060-011-A11_FLI.pep
LARRTHQLDGHRDPADVQLARRTHRTIVVNIVFSVITKLAIVGLALAGHPLIWAAVLADVGTCMLVIMYSMLLLRSESNGGRKVKKCCASSQHGSHSHARKKHCVSHHCSDGPCNKSTAGCSKESPSAGKHACSDHGHAHTHCKEPSNHRPERHACHDHGHSHNHCKEPSSHVVTEKHVCHDHGNTHSHCEEAGNQLLLVESHGCNDHGHGHSHDRCKELSSPRFTSKHECHDHEHSHCKEPKTPCADSEAACHGHGHGHEHRHCEGDSHSHATGEHGCHEHDAHSHCEEHGHSDTAVEHACEHECHGEHQTVHAVETHHCHDHDHEHGQHELGEIEEPEKDCHDHSHHCCHEPHGKDKVAAEPVEEVTISIAALPKDEGHHHSEEQHNGEHCRKAKDCGGGGGAAPTDCAASKNCCGVKGGDACSSVQAARARETGPCCRSYVKCPRTAAASRSSCCGHSMLKLPEIVVE

SEQ ID NO: 37983 - protein, 270 aa, Zea mays
  Clone ID: LIB143-037-H11_FLI.pep
SEMTKNVKALDEQEVTSQHSRAQTSDAAEEEQQQAVDPLARQSSIMSLTLEELQNSLCEPGRNFGSMNMDEFMANIWNAEEFQAATAGCNKEGAEREPVPVATTTGTSENGGGGSGRGLVRQGSFALPPPLSRKTVEEVWAEISQGPAEFQASAAPQPVAQPQAGSGGGGVAASGRQATLGEMTLEDFLVKAGVVRGAFAGHGHGVGMVPAGPMGMQHNAAPPMMYQVAAAAAPPPGAVYPVMGDGMGYHGGGYPGGVAVVPPPPPSQCV

SEQ ID NO: 37984 - protein, 90 aa, Zea mays
  Clone ID: LIB3061-013-G6_FLI.pep
QDLRRGHWVTKNGCDLQEFSMSLCCFIIELPILVLLSRPLGFNTMMRTASWQLQEFIPSRVTKMVCVLTMSCKLIQLFLVVWVGIVSFPV

SEQ ID NO: 37985 - protein, 166 aa, Zea mays
  Clone ID: 700169404_FLI.pep
SLDGERKAKQATLSKMHRNPRAVIRAAVSLTRRPPAVPAAEALQTLPKATPSPALGAWRPDQAVGPLGSVSRRRAFSSSAAEYGKDVDEVNRKFAEAREEIEAAMESKETVYFNEEASIARDAANEALAAFDALLARLPPTDADALRRSMGLKMEQLKAELKQLED

SEQ ID NO: 37986 - protein, 163 aa, Zea mays
  Clone ID: LIB3062-032-G12_FLI.pep
MFQYVPSLVIIDRWVVENQVGKKTLAIDDCDSRQSVYVYGCKDSVLQVNGKVNNITVDKCTKFGIVFKDVVAAFEIVNCNGVEVQCQGTSPTISIDNTSGCQLYLSKDSLGASITSAKSSEINVMVPSGGADGDWVEHALPQQYIHSFKDGQFTTSPVSHSGA

SEQ ID NO: 37987 - protein, 85 aa, Zea mays
  Clone ID: 700195687_FLI.pep
GTSSPSARHVALRYAPVVHLDPLLTPIKGRTRAFLEKVGRAGPRTGQALSWGRSLPSPAWTLVTPLLQAHPTWARDKHEGRGIST

SEQ ID NO: 37988 - protein, 410 aa, Zea mays
  Clone ID: LIB3060-022-E5_FLI.pep
ASEYIIPYAKFLKSLNHPVCIGARINFQCHNEDVSERRSGVVVRISEIDPMKWPGSKWRSLLVRWEDGAECNGQDRVSPWEIEIAGGSVSVSHSLSASSSKRTKLCPQGNLDVPAMWNGCTDSMETGKLPRVLQGQELMSFRTCHVPCAPQTAEAAKLQSSDASRFLSNAHGCALGGPTSRLAVHSSGFTYQCVGFNESIGFSEVLQGQEISRAVPKFQGMMSEACSLKDRYGLHSYMRAPVAVNGLSATTQECSLALSTPPGAQVPSLYPGNVVNRTVVPQLGLARKFGGGGTNGQQSGPFDRPRELWTRPQHETPDQMNLDQFETRRPSVPVDAAKLGSGGGEVRKTSCRLFGFSLTEKILPADDDDVKEVSYETECQNPRMLDLFGYNCSTPSAALPALCAAAPFGM

SEQ ID NO: 37989 - protein, 253 aa, Glycine max
  Clone ID: LIB3138-082-D7_FLI.pep
WKMSFLAGRLAGKEAAYFFQESKQAVGKLAQKNPLPKTNNNNLNFHEGYDHADVLPEVLRHSLPSKVFRNDEATSFSFSASKWVLHSDPKTQSSVSPDALNPLRAYLSLPQVTFGPKRWQLPEAANTVSASTANESRLDRYATHVNPEKLKAAGEGLAHVGKAFAVATAFVFGGAALVFGMVASKLELQNMSDIKTKGKDYVEPKLENIKEQFVPLKIWAENMSRKWHVERDDVKQKTIIKELSKIWGEKRTD

SEQ ID NO: 37990 - protein, 248 aa, Zea mays; identical to SEQ ID NO: 37069
  Clone ID: 700264738_FLI.pep

SEQ ID NO: 37991 - protein, 177 aa, Zea mays
  Clone ID: LIB3061-020-C12_FLI.pep
RAARNSDPPVCVSVRSRHRQGTEACEGERGAEEDMVHGTLEVLLVGAKGLENTDYLCNMDPYAILKCRSQEQKSSIATGKGTTPEWNENFIFTVSDRTTDLVIKLMDSDTGTADDFVGEATIPLEAVYTERSIPPTLYNVVKGEKYCGEIKVGLTFTPEDTRQRGLPEDFGGWKQSS

SEQ ID NO: 37992 - protein, 221 aa, Glycine max
  Clone ID: 700564491_FLI.pep
DSAAGNCSCKRLRACLLVCLNDLLLFFSELSLTKMCFFLLCVTCILHWATYREKVTCPQCKHPFEFLNVHRSLDGSIQDYMFEESVCLLLRASWFTPLSVEEHVVHEDAYEDLEDYYQYEDDDDDDDMDEVYYGGSSSLRVIGNRRWGDNGYVRAGRQEARPVHRPNFQDSGASSSSHEPKKKEAGKIITGRRAKRAQKREAADKAAEAKHQQHLVRLGRK

SEQ ID NO: 37993 - protein, 158 aa, Zea mays
  Clone ID: LIB3245-496-C3_FLI.pep
QSKARESVAISLSPTVGGGGYNAASANGVMVQKPSNWKTRICNKWEMTGYCPFGSKCHFAHGSTELHKYGGGLVDIDGRDILSTPDSKQAGGSAKAPLESAAASTALPPHADVYHLGIQSQRSAIASQRSGQLQRPIQKWKGPDKISRIYGDWIDENE

SEQ ID NO: 37994 - protein, 42 aa, Zea mays
  Clone ID: 700195369_FLI.pep
VFELHHHLLSFELSAKLRLCVLRLRHPGINTMLVLVRRRPLA

SEQ ID NO: 37995 - protein, 369 aa, Arabidopsis thaliana
  Clone ID: LIB23-026-F4_FLI.pep
KLKTMAITATQNDGVSLNANKISYDLVETDVEIITSGRRSIPAHSGILASVSPVLTNIIEKPRKIHGGSSKKVIKILGVPCDAVSVFVRFLYSPSVTENEMEKYGIHLLALSHVYMVTQLKQRCTKGVGERVTAENVVDILQLARLCDAPDLCLKCMRFIHYKFKTVEQTEGWKFLQEHDPFLELDILQFIDDAESRKKRRRRHRREQNLYLQLSEAMECIEHICTEGCTLVGPSSNLDNKSTCQAKPGPCSAFSTCYGLQLLIRHFAVCKKRVDGKGCVRCKRMIQLLRLHSSICDQSESCRVPLCRQYKNRGEKDKKMVEDTKWKVLVRRVASAKAMSSLSQSKKKKSEVLFKEEAEDLIRIRNKLM

SEQ ID NO: 37996 - protein, 64 aa, Zea mays
  Clone ID: 700378737_FLI.pep
RSECICLKEQIHSNLDQQSNLDQHTKTLYTLGENAKGGDTDNVKHIIPVTLPAHRKATTRVSIA

SEQ ID NO: 37997 - protein, 449 aa, Arabidopsis thaliana
  Clone ID: LIB23-032-A4_FLI.pep
SLNLQRSKSRNQKKTKKMWDLNDAPHQTQREEESEEFCYSSPSKRVGSFSNSSSSAVVIEDGSDDDELNRVRPNNPLVTHQFFPEMDSNGGGVASGFPRAHWFGVKFCQSDLATGSSAGKATNVAAAVVEPAQPLKKSRRGPRSRSSQYRGVTFYRRTGRWESHIWDCGKQVYLGGFDTAHAAARAYDRAAIKFRGVEADINFNIDDYDDDLKQMTNLTKEEFVHVLRRQSTGFPRGSSKYRGVTLHKCGRWEARMGQFLGKKYVYLGLFDTEVEAARAYDKAAIKCNGKDAVTNFDPSIYDEELNAESSGNPTTPQDHNLDLSLGNSANSKHKSQDMRLRMNQQQQDSLHSNEVLGLGQTGMLNHTPNSNHQFPGSSNIGSGGGFSLFPAAENHRFDGRASTNQVLTNAAASSGFSPHHHNQIFNSTSTPHQNWLQTNGFQPPLMRPS

SEQ ID NO: 37998 - protein, 109 aa, Zea mays
  Clone ID: 700379076_FLI.pep
ALPSASLSEINTQSQRMMEYLRRWKAPSMDCLKRSPGCTPKAGLSMATAISTQDFCLVHCNADDTLFGSCVHPQLVQLRCSTSSSMEEAEWTMKCGQPVDHEVFSSNGV

SEQ ID NO: 37999 - protein, 141 aa, Arabidopsis thaliana
  Clone ID: LIB24-034-E9_FLI.pep
PRENVFPERPGQPECQFYMKTGDCKFGTVCKFHHPRDRQTPPPDCVLSSVGLPLRPGEPLCVFYSRYGICKFGPSCKFDHPMRVFTYNNNTASPSPSSSLHQETAITTELRNLLVSSSVEAKPTSLPETTSAKDTIVDAQH

SEQ ID NO: 38000 - protein, 146 aa, Zea mays
  Clone ID: 700340726_FLI.pep
RPFSSSMSSGSSITVSSFFSLFFFLPFLLSKLVSSTTFQSYAFVSPSSEPKSPPNPRSAKRSSIPSSGPPNFPFFNLSFFASFLSISRSSSMLTGPPISISRYSWKLDLGFRLPSASLFLFFFFFFFFFRPFSSSMSSGSSITVSS

SEQ ID NO: 38001 - protein, 587 aa, Arabidopsis thaliana
  Clone ID: LIB24-072-G1_FLI.pep
FRISSQEVSSDVTVHVGEASFSLHKFPLMSKCGFIKKLVSESSKDSDSTVIKIPDIPGGSEAFELAAKFCYGINFDMSTENIAMLRCAAEYLEMTEEHSVENLVVRAEAYLNEVALKSLSSSITVLHKSEKLLPIAERVKLVSRCIDAIAYMTCQESHFCSPSSSNSGNNEVVVQQQSKQPVVDWWAEDLTVLRIDSFQRVLIAMMARGFKQYGLGPVLMLYAQKSLRGLEIFGKGMKKIEPKQEHEKRVILETIVSLLPREKNAMSVSFLSMLLRAAIFLETTVACRLDLENRMGLQLGQAVLDDLLIPSYSFTGDHSMFDTDTVQRILMNYLEFEVEGVRLSNNGVDLAGDMERVGKLLENYMAEIASDRNVSLQKFIGLAELIPEQSRVTEDGMYRAVDIYLKAHPNMSDVERKKVCSLMDCQKLSREACAHAAQNDRLPVQTIVQVLYYEQQRLRGEVTNDSDSPAPPPPQPAAVLPPKLSSYTDELSKLKRENQDLKLELLKMKMKLKEFEKESEKKTSSSTISTNPSSPISTASTGKPPLPRKSFINSVSKKLGKLNPFSITPYNGRGRTKPPKDRRHSIS

SEQ ID NO: 38002 - protein, 115 aa, Zea mays
  Clone ID: 700282282_FLI.pep
LYERSYDARKALQKNGMQLSNSLIVGVKPIDAVHRQQLDKGFTQSNQGGFMVSLPSKSLGLKSAGASNQLGALPRPYDPKANTNVSRDAGRRATGSVAAPTKSIVTNVMDLIFGI

SEQ ID NO: 38003 - protein, 235 aa, Arabidopsis thaliana
  Clone ID: LIB25-034-G5_FLI.pep
NLKERKSLILIKMGKKCDLCNGVARMYCESDQASLCWDCDGKVHGANFLVAKHTRCLLCSACQSLTPWKATGLRLGPTFSVCESCVALKNAGGGRGNRVLSENRGQEEVNSFESEEDRIREDHGDGDDAESYDDDEEEDEDEEYSDDEDEDDDEDGDDEEAENQVVPWSAAAQVPPVMSSSSSDGGSGGSVTKRTRARENSDLLCSDDEIGSSSAQGSNYSRPLKRSAFKSTVVV

SEQ ID NO: 38004 - protein, 176 aa, Arabidopsis thaliana columbia
  Clone ID: LIB3175-033-A2_FLI.pep
LDQGFRSFHYFLMFFLLLSPRSDFTTIEFRVLSHSSLKIKMARTKQTARKSTGGKAPRKQLATKAARKSAPTTGGVKKPHRYRPGTVALREIRKYQKSTELLIRKLPFQRLVREIAQDFKTDLRFQSHAVLALQEAAEAYLVGLFEDTNLCAIHAKRVTIMPKDIQLARRIRGERA

SEQ ID NO: 38005 - protein, 171 aa, Arabidopsis thaliana columbia
  Clone ID: LIB3176-036-A6_FLI.pep
DPKTQSRSLRLRTVRVSSTFSVHLKFLTMMRILMMTWLMNSKDKWSMIMISVQQSKRKSSRMLCHGSLVKLLRQMTLILRTTMMRLMKMMMKRTRKMMRMTRRRMMRMMTRRKKQIKERRAKRSHQLGTRRLEEVNLRKVKQVRGHRNVSSSEEVKNLGLVMMKKKSEECL

SEQ ID NO: 38006 - protein, 119 aa, Zea mays
  Clone ID: 700342801_FLI.pep
CHCKSKHSANNIIHKSRNERVTTFLGGDHCKQKLTIAITWIYTYIHTKFSSFWIHKRSALKCTELLWNKVGLMECSATKRIIIIILPQFNISEDTLHIYMQIEKWVATYMQIEKERMDT

SEQ ID NO: 38007 - protein, 90 aa, Glycine max
  Clone ID: LIB3051-046-C8_FLI.pep
KLQLIAEKETKGAVYCLNAFNGKLLAAINQKIQLYKWVLRDDGTHELQSECGHHGHILALYVQTRGDFIVVGDLMKSISLLIYKVNFKLL

SEQ ID NO: 38008 - protein, 142 aa, Glycine max
  Clone ID: LIB3242-036-C12_FLI.pep
AMLTLSVSIDYEYSLLIITSTFEQSSYHILYLYLSNLIIILTCRPNYSFFFFFLLLLIGSCLEEGAEEFLLKPVKLSDVKRVTDFIMRGEGMKGVKRSKKRSRSDDCIPSLSTAFASVSHPCDLSSPPSPCVSQSKKSRLSI

SEQ ID NO: 38009 - protein, 539 aa, Glycine max
  Clone ID: LIB3242-308-B9_FLI.pep
AALSPEDLTDAEWYYLVCMSFIFNIGQGLPGRTLAKGQPIWLNNAHSSDCKIFSRSLLAKSASIETVVCFPFREGVIELGTTEQVPEDLSVIELIKTSFLNSLHANVPNKSVATLKSRNQEGLSYAAFDHNDYNVKSIPEVGYEIANTTSPDGSSNAFQANQPLDETFMIESITNGTSQVQNWQVIDDELSNCVHNSMNSSDCISQTFACPENIASAPKSNNPSDPCARNFQKCNNPKMTLVDPRSDDLHYQRVLSTLIKSSDQLLMGMHLQKFPQESSFVSWRKEQPMDCKWPRAGTSQKLLKKVLFEVPQMHLDGLHESQEENDYKEGMRVEADENGMNHVMSERRRRAKLNERFLTLRSMVPSISKDDKVSILDDAIDYLKKLERRVKELEAHRVVTDIETGTRRSPQDTVERTSDHYFRKNNNGKKPGMKKRKACGVDETEKEINSDALKGSYANDVTVSTSDNEIVIELKCPSKAGRLLEIMEAINSFNIDFSSVQSTEADGNLYLTIKSVLTGPSVATTKRIKQALQKLASKC

SEQ ID NO: 38010 - protein, 373 aa, Glycine max
  Clone ID: 701203547_FLI.pep
AKLVLSHLLIPLVSPFVKNKVFSLMEGDQHGSNYSFPPGFRFHPSDEELIVHYLENKVSSRPLPACIIAEIDLYKYNPWELPNKSLFGEEEWYFFSPRDRKYPNGLRPNRAAASGYWKATGTDKPILSSCGSRRIGVKKALVFYSGRPPKGAKTDWIMNEYRLVDTTIKSSRLKGSMRLDDWVLCRVRYKGYSQKNSCENQESPSELNLSAKLLRSEENPTKMNCRADMIPDYQYKDYQIIASILVGGPIPPIESMPNLSFKGCKGNNVVSDYEDGFTKGNSQTTIPSLESYFNPLTRKSNEDEQYGNLISFNRKFNTDNRMDGSTSKVLNSRELNCYNQNHSQDDIFNGNPPDPTINFQELNELDFSGRYHQ

SEQ ID NO: 38011 - protein, 242 aa, Glycine max
  Clone ID: 701123582_FLI.pep
DLPPGFRFYPTEEELVFFYLHNQLEGQIHDTSRVIPVIDINGVEPWNLPSLAGELCRGDTEQWFFFSPRQEREARGGRPNRTTASGYWKATGSPGHVYSSDNKVIGMKKTMVFYKGKAPTGRKTKWKMHEYKAIEHSDQSNTAPPKLRHEFSLCRVYVISGSFRSFDRRPLDMPRVELRVVDGDRGAASTSAQAQQRSSSHTSHSGGDAHVTDAGAGSSGTNWNASNRVEEPLWEWEQLDWP

SEQ ID NO: 38012 - protein, 82 aa, Zea mays
  Clone ID: 700431719_FLI.pep
PASAARWRPGLTRRWRRWPWSSCRPRHKMDCPGRQPMQSHCIYLIDLLTCLHHMRDNNLQIDLATSWYIVTVIVLSFCLTKG

SEQ ID NO: 38013 - protein, 346 aa, Arabidopsis thaliana
  Clone ID: LIB25-070-C8_FLI.pep
GSSSMDTAQWPQEIVVKPLEEIVTNTCPKPQPQPLQPQQPPSVGGERKARPEKDQAVNCPRCNSTNTKFCYYNNYSLTQPRYFCKGCRRYWTEGGSLRNIPVGGGSRKNKRSHSSSSDISNNHSDSTQPATKKHLSDHHHHLMSMSQQGLTGQNPKFLETTQQDLNLGFSPHGMIRTNFTDLIHNIGNNTNKSNNNNNPLIVSSCSAMATSSLDLIRNNSNNGNSSNSSFMGFPVHNQDPASGGFSMQDHYKPCNTNTTLLGFSLDHHHNNGFHGGFQGGEEGGEGGDDVNGRHLFPFEDLKLPVSSSSATINVDINEHQKRGSGSDAAATSGGYWTGMLSGGSWC

SEQ ID NO: 38014 - protein, 106 aa, Zea mays
  Clone ID: LIB3069-016-B1_FLI.pep
LENGYLTDDGVFCSGLSNSSSGKFFGGNQLSHSTPKKPQEKFDAGVPETSRSYSAAVPAGTSSKRHATRKWKRSLSDPFRSRPHSAPELVSGCKGSPPVPVAPEER

SEQ ID NO: 38015 - protein, 319 aa, Arabidopsis thaliana
  Clone ID: LIB24-083-C4_FLI.pep
EKKLSALQSQEYKGGDESKLDKTKTSITRLQSLIIVSSEAVLTTSNAILRLRDTDLVPQLVELCHGLMYMWKSMHEYHEIQNNIVQQVRGLINQTERGESTSEVHRQVTRDLESAVSLWHSSFCRIIKFQREFICSLHAWFKLSLVPLSNGDPKKQRPDSFALCEEWKQSLERVPDTVASEAIKSFVNVVHVISIKQAEEVKMKKRTESAGKELEKKASSLRSIERKYYQAYSTVGIGPGPEVLDSRDPLSEKKCELAACQRQVEDEVMRHVKAVEVTRAMTLNNLQTGLPNVFQALTSFSSLFTESLQTVCSRSYSIN

SEQ ID NO: 38016 - protein, 315 aa, Zea mays
  Clone ID: LIB3069-048-B7_FLI.pep
KVSQDEGIKVDRSIEFSYEELSDATNNFSMDHKIGQGGFGSVYYAELRGEKAAIKKMDTKASQEFLNELKILTRVHHTNLVRLIGYCVESCLFLVYEFIENGNLSQHLHGTGYEPLSWTSRVQIALDSARGLEYIHEHTVPVYVHRDIKSANILIDRDLRAKVADFGLTKLSEIGTTSQSLPSLRVVGTFGYMPPEYARYGEVSPKVDVYAFGIVLYELLSAKEAIVRSTEFTDAQGLVYLFEETLSMPNPMEALQEMIDPRLGGDYPIDSAVKIAYLAKSCTHEEPRMRPTMRSVVVALMALSSKDHELTRGHD

SEQ ID NO: 38017 - protein, 881 aa, Arabidopsis thaliana
  Clone ID: LIB22-033-G2_FLI.pep
SSNSSSTCSDEGNVEIMERRRIEMEKKKKRRAVTVVAMEEDNLKDDDAHRLTLNLGGNNIEGNGVKKTKLGGGIPSRAICCQVDNCGADLSKVKDYHRRHKVCEIHSKATTALVGGIMQRFCQQCSRFHVLEEFDEGKRSCRRRLAGHNKRRRKANPDTIGNGTSMSDDQTSNYMLITLLKILSNIHSNQSDQTGDQDLLSHLLKSLVSQAGEHIGRNLVGLLQGGGGLQASQNIGNLSALLSLEQAPREDIKHHSVSETPWQEVYANSAQERVAPDRSEKQVKVNDFDLNDIYIDSDDTTDIERSSPPPTNPATSSLDYHQDSRQSSPPQTSRRNSDSASDQSPSSSSGDAQSRTDRIVFKLFGKEPNDFPVALRGQILNWLAHTPTDMESYIKPGCIVLTIYLRQDEASWEELCCDLSFSLRRLLDLSDDPLWTDGWLYLRVQNQLAFAFNGQVVLDTSLPLRSHDYSQIITVRPLAVTKKAQFTVKGINLRRPGTRLLCTVEGTHLVQEATQGGMEERDDLKENNEIDFVNFSCEMPIASGRGFMEIEDQGGLSSSFFPFIVSEDEDICSEIRRLESTLEFTGTDSAMQAMDFIHEIGWLLHRSELKSRLAASDHNPEDLFSLIRFKFLIEFSMDREWCCVMKKLLNILFEEGTVDPSPDAALSELCLLHRAVRKNSKPMVEMLLRFSPKKKNQTLAGLFRPDAAGPGGLTPLHIAAGKDGSEDVLDALTEDPGMTGIQAWKNSRDNTGFTPEDYARLRGHFSYIHLVQRKLSRKPIAKEHVVVNIPESFNIEHKQEKRSPMDSSSLEITQINQCKLCDHKRVFVTTHHKSVAYRPAMLSMVAIAAVCVCVALLFKSCPEVLYVFQPFRWELLEYGTS

SEQ ID NO: 38018 - protein, 696 aa, Zea mays
  Clone ID: 700260445_FLI.pep
LFVELWKACAGPLSCVPPLGEKVYYLPQGHIEQVEASTNQLAEQQGTPLYNLPWKIPCKLMNIELKVEPDTDEVYAQLTLLPDKKQDENTSTTVEEEEVVVPPALPATNEGPHIHSFCKTLTASDTSTHGGFSVLRRHADECLPPLDMSQHPPNQELVAKDLHGAEWRFRHIFRGQPRRHLLQSGWSVFVSAKRLVAGDAFIFLRGENGELRVGVRRALRHQTTIPSSVISSHNMHLGVLATAWHAVNTDSMFTVYYKPRTSPAEFVVSRDRYYESLKRNYSIGMRFKMRFEGEEAAEQRFTGTIVGIGASDPSGWADSKWRSLKVRWDEPSSISRPERVSPWQIEPSVSPCHVNPLPVRFKRSRSSVNALPSDVSTVTREVTSKVMADSQQNSLTRALHNQGRTQLTVRYHDNSDVKTTQDLTVWSSGTEQQRNNIAAQTKLCLEGWTPTRSPEGYNQIFSAFKPLKDIHNPLGPFPSQISGTHSNSWDTADARYPVQQANYSMLPGTWSLRPHNSGFRMNQQNYLVMPEGANFTGKSAFTSLQDHGTDKCSTGCFGHIESSSHTDHASSSLIRPQPLVLGNGVQKSKGTSFKLFGIPLGSPEKSEPLVSPPSVAYDGKLQTSPSEKGNQLDVVEVDNCSHPSKTVKPLDGPQSDSITENNQPSPEATLNIQNKVQSSSTRSCKKVHHMLHLFPC

SEQ ID NO: 38019 - protein, 361 aa, Zea mays
  Clone ID: 700073076_FLI.pep
PKSSTAISKCMIMGASVSTVYYNLKLKHPTLDMPVIDYDLAVLMQPMLMLGISIGVIFNVIFPDWLVTVLLIILFLGTSTKAFLKGIETWKKETVIQREAAKLLEQTAGEEAEYAALPTGPDVAPNKKALTSDEAPSLIKNIHWKKVGLLSFVWVAFLVLQVTKNYTATCSPWYWVLNLLQVPVSVGVTLYEGFGLMSGKRVLSSKGSGQTTMKFHQVVVYGLFGIAAGLVGGLLGLGGGFIMGPLFLELGIPPQVSSATATFAMMFSSSMSVVEYYLLNRFPVPYAVYFIVVAFVAAIIGQHVVRKLINWLGRASLIIFILAFMIFVSAVSLGGVGVSNMVHKIERHEYMGFEDLCKYDA

SEQ ID NO: 38020 - protein, 968 aa, Zea mays
  Clone ID: 700154435_FLI.pep
FGRIRCAAMPERHQSIDAQLRLLAPGKVSEDDKLVEYDALLVDRFLDILQDLHGPHLREFVQECYELSAEYENDRDEARLGELGSKLTSLPPGDSIVVASSFSHMLNLANLAEEVQIAHRRRIKLKRGDFADEASAPTESDIEETLKRLVSQLGKSREEVFDALKNQTVDLVFTAHPTQSVRRSLLQKHGRIRNCLRQLYAKDITADDKQELDEALQREIQAAFRTDEIRRTPPTPQDEMRAGMSYFHETIWKGVPKFLRRIDTALKNIGINERLPYNAPLIQFSSWMGGDRDGNPRVTPEVTRDVCLLARMMAANLYFSQIEDLMFELSMWRCSDELRIRADELHRSSRKAAKHYIEFWKQVPPNEPYRVILGDVRDKLYYTRERSRHLLTSGISEILEEATFTNVEQFLEPLELCYRSLCACGDKPIADGSLLDFLRQVSTFGLALVKLDIRQESDRHTDVLDSITTHLGIGSYAEWSEEKRQDWLLSELRGKRPLFGSDLPQTEETADVLGTFHVLAELPADCFGAYIISMATAPSDVLAVELLQRECHVKHPLRVVPLFEKLADLEAAPAAVARLFSIDWYMDRINGKQEVMIGYSDSGKDAGRLSAAWQMYKAQEELIKVAKHYGVKLTMFHGRGGTVGRGGGPTHLAILSQPPDTIHGSLRVTVQGEVIEHSFGEELLCFRTLQRYTAATLEHGMHPPISPKPEWRALMDEMAVVATKEYRSIVFQEPRFVEYFRSATPETEYGRMNIGSRPSKRKPSGGIESLRAIPWIFAWTQTRFHLPVWLGFGAAIKHIMQKDIRNIHILREMYNEWPFFRVTLDLLEMVFAKGDPGIAAVYDKLLVADDLQSFGEQLRKNYEETKELLLQVAGHKDVLEGDPYLKQRLRLRESYITTLNVCQAYTLKRIRDPSFQVSPQPPLSKEFTDESQPAELVQLNQQSEYAPGLEDTLILTMKGIAAGMQNTG

SEQ ID NO: 38021 - protein, 282 aa, Zea mays
  Clone ID: 700236447_FLI.pep
SKPEAHTRQRNASDRAPKARPARTYDGHAHAATLGAGLVLAGGVLAVFFTRALVVAGYLVHDLAQQALLAIRAADVDLGVRRRRWRVDGRRGGGGSSVFRLLVATGKLLLDLVQQAFLLLLRCLWWGLNLRVVVLDLVDDDGVVRLHVRGRRRRREVLSLLVVSMRVHHHGRRGRLVVVALIVGLVGRQLLLDLLLKALLLLPLDNLAVLIDHLLFLVVARRAGTGAGAVQLGEKAVLLLGGLVSLLLVVGLGHRDLLHAGRQLLLRLLVLLLLVVVLVPAE

SEQ ID NO: 38022 - protein, 162 aa, Zea mays
  Clone ID: 700242131_FLI.pep
VDRPRPPRHCPGLLRHRRARAPFGVRGHVRHRRDPRQGDPEDREGELRLQARHDHHQPRPQERRQRALPQDGGLRALWEGRPRLHLGGGEAPQGGEAVFCMRRLLCFGRSFWSGLVWSGVPALYHAFLWLLLVILDLPLAYHLYCTVTVLISGTCAGSYCVC

SEQ ID NO: 38023 - protein, 323 aa, Zea mays
  Clone ID: 700211459_FLI.pep
NPHMKLQGLEYEVLQWCICRLEAWFATDMDNISLKTWDQEHVLTGGHGLMVNGYDPVIRALAQGLDIHLNHRVTKIIQRYNKVIVCVEDGASFVADAAIVTVPLGVLKANIIKFEPQLPKEKLSAIADLGVGIENKIALKFDTVFWPDVEVIGRVAPTSNACGYFLNLNKATGNPVLVCMVAGRFAYEIEKLSDEESVNFVMSQLRNMLPQATDPVQYLVSRWGSDPNSLGSYSCDLVGKPADLYERFCAPVGSLFFAGEAACIDHSGSVHGAYSSGIAAAEDCRRRLSAQLGISAGLFQVGKAAMREEMTAEAMVPFQISRL

SEQ ID NO: 38024 - protein, 290 aa, Zea mays
  Clone ID: LIB3069-049-B2_FLI.pep
VQLSEAEIRQLCVDGKRVLLSQPNLLRIHAPVKICGDIHGQFVDLLRLFDLGGYPPASTYVFLGDYVDRGKQSLETICLLLAYKIRYPEKIFLLRGNHEDAKINRVYGFYDECKRRFNVRLWKIFSDCFNCLPIAALIDDKILCMHGGLSPEWTSLDQIKDIERPAEIPDYGLLCDLLWSDPSPDGEGWGESDRGVSCTFGADKLVEFLEKNDLDLICRAHQVVEDGYEFFAQRRLVTIFSAPNYCGEFDNAGALLSIDESLMCSFQILKPTDMGPPHARKQIPNKPARG

SEQ ID NO: 38025 - protein, 1166 aa, Arabidopsis thaliana
  Clone ID: LIB25-088-G4_FLI.pep
VIMKAPSSNGVSPNPVEGERRNINSELWHACAGPLISLPPAGSLVVYFPQGHSEQVAASMQKQTDFIPSYPNLPSKLICMLHNVTLNADPETDEVYAQMTLQPVNKYDRDALLASDMGLKLNRQPNEFFCKTLTASDTSTHGGFSVPRRAAEKIFPALDFSMQPPCQELVAKDIHDNTWTFRHIYRGQPKRHLLTTGWSVFVSTKRLFAGDSVLFIRDGKAQLLLGIRRANRQQPALSSSVISSDSMHIGVLAAAAHANANNSPFTIFYNPRAAPAEFVVPLAKYTKAMYAQVSLGMRFRMIFETEECGVRRYMGTVTGISDLDPVRWKNSQWRNLQIGWDESAAGDRPSRVSVWDIEPVLTPFYICPPPFFRPRFSGQPGMPDDETDMESALKRAMPWLDNSLEMKDPSSTIFPGLSLVQWMNMQQQNGQLPSAAAQPGFFPSMLSPTAALHNNLGGTDDPSKLLSFQTPHGGISSSNLQFNKQNQQAPMSQLPQPPTTLSQQQQLQQLLHSSLNHQQQQSQSQQQQQQQQLLQQQQQLQSQQHSNNNQSQSQQQQQLLQQQQQQQLQQQHQQPLQQQTQQQQLRTQPLQSHSHPQPQQLQQHKLQQLQVPQNQLYNGQQAAQQHQSQQASTHHLQPQLVSGSMASSVITPPSSSLNQSFQQQQQQSKQLQQAHHHLGASTSQSSVIETSKSSSNLMSAPPQETQFSRQVEQQQPPGLNGQNQQTLLQQKAHQAQAQQIFQQSLLEQPHIQFQLLQRLQQQQQQQFLSPQSQLPHHQLQSQQLQQLPTLSQGHQFPSSCTNNGLSTLQPPQMLVSRPQEKQNPPVGGGVKAYSGITDGGDAPSSSTSPSTNNCQISSSGFLNRSQSGPAILIPDAAIDMSGNLVQDLYSKSDMRLKQELVGQQKSKASLTDHQLEASASGTSYGLDGGENNRQQNFLAPTFGLDGDSRNSLLGGANVDNGFVPDTLLSRGYDSQKDLQNMLSNYGGVTNDIGTEMSTSAVRTQSFGVPNVPAISNDLAVNDAGVLGGGLWPAQTQRMRTYTKVQKRGSVGRSIDVNRYRGYDELRHDLARMFGIEGQLEDPQTSDWKLVYVDHENDILLVGDDPWEEFVNCVQSIKILSSAEVQQMSLDGNFAGVPVTNQACSGGDSGNAWRGHYDDNSATSFNR

SEQ ID NO: 38026 - protein, 202 aa, Zea mays
  Clone ID: LIB3594-023-A2_FLI.pep
ARRTREPTVSVCARERGGGRRRMYPAKPTVATASEPVTGMAAPPVTGIPISSPGPAVAASQWSSGLCACFDDCGLCCMTCWCPCVTFGRIAEVVDRGATSCAAAGAIYTLLACFTGFQCHWIYSCTYRSKMRAQLGLPDVGCCDCCVHFCCEPCALCQQYRELRARGLDPALGWDVNAQKAANNNAGAGMTMYPPTAQGMGR

SEQ ID NO: 38027 - protein, 281 aa, Glycine max
  Clone ID: 700841686_FLI.pep
RKGPRAMAGITTFPFKLSHCPLFSTSDSKLFGLPLSNPYSIKFDPSSLSSTSLPYVTARYYGGGGGASPRSPNDPRSRKSSDSDDDDKALDLSTLRSDTVRLIDQSQNMVGVVSIDDAIQMAEDVELDLVILSPDADPPVVRIMDYSKYRYEQQKKKREQQKKSAANRMDLKELKMGYNIDEHDYSVRLKAAQKFLKDGDKVKVIVNLKGRENEFRNMAIGLITRFQNDVGELGIEETKNFRDRNIFIILVSNKVAVQKTQEPPKKRDKSAADEVTISAQA

SEQ ID NO: 38028 - protein, 1012 aa, Arabidopsis thaliana
  Clone ID: LIB22-016-B9_FLI.pep
FELPFFLIAIFIFNLQLSQIDPSRITIMSDHGEKTCPLCAEEMDLTDQQLKPCKCGYQICVWCWHHIVDMAEKDQIEGRCPACRTPYDKEKIVGMTVNCDSLASEGNMERKKIQKSKSKSSEGRKQQLTSVRVIQRNLVYIVGLPLNLADEDLLQHKEYFGQYGKVLKVSMSRTASGVIQQFPNNTCSVYITYGKEEEAVRCIQAVHGFILDGKPLKACFGTTKYCHAWLRNVACVNPDCLYLHEVGSQDDSFTKDEIISAYTRVQQITGATNILQHHSGNMLPPPLDAYCSDSSSAKPIIKVPSTNATSVPRYSPPSGSGSSSRSTALPAAASWGTHQSLATSVTSNGSSDIQRSTSVNGTLPFSAVVANAAHGPVSSNDILKRPSRKEESQIVMDKVKPSVLKPLQHNVVVSGSERITAPDRDPTSNRLSSSVDSAYGGRDIDQPSAYSGRDIDKPSSTVSSFDAANEAVEDVPTVSNLLDGVACMRITMNCRDERPDITMAIGSQSDQGSIRQPGSEVSKLPDLEQCRIDSSINTDKKAISLEDRIPRTRPGWDWISDLQSQMQGSSKLQVEDISTLDSQRPHPEEDIIHSRLLSNLSSSSLDTNHMASRSSLPCEVRGSDRLHLPNGFGEKSMSSVEHSLFANEGRNKVNNAEDAILSNILSLDFDPWDESLTSPHNLAELLGEVDQRSSTLKPSNFLKQHNNQSRFSFARYEESSNQAYDSENYSIYGQLSRDKPIQESAMSRDIYRNNLGSVNGFASNFAGGLDNFAASPLFSSHKNPVSRPQVSAPPGFSAPNRLPPPGFSSHERVGLSSDTTLGNRFLDSTSLRNAYQVPPPVGNSNGASDIDFVDPAILAVGRGMVNADLDMRSGFSSQLNSFENETGLHMLRQQSLSSAQQVNGFHHDLRNLSPSLNDPYGFSSRLMDQTQGSSLSPFSQLPRQQPSANSILSNGHHWDKWNEGQSVNNIGMAELLRNERLGFNGSLYNNGYEEPKFRIPSPGDVYNRTYGI

SEQ ID NO: 38029 - protein, 64 aa, Glycine max
  Clone ID: LIB3139-084-A1_FLI.pep
RRSCMIRVLSFVITSPFGPLTCRMMEQMKLKKQHRNRMTSKNILLLIRIELLLHIFLKGEGVCC

SEQ ID NO: 38030 - protein, 288 aa, Glycine max
  Clone ID: LIB3242-327-B10_FLI.pep
GAGAESGDLKGETAPVDGLLNWQNARLKAEILTHPLYEQLLSAHVACLRIATPVDQLPRIDAQLAQSQNVVAKYSAFGQAIVGDDKELDQFLSHYVLLLCSFKEQLQQHVRVHAMEAVMACWEIEQSLQSLTGVSPGEGTGATMSDDEDEQVDSDANLFDGALDGPDSMGFGPLIPTENERSLMERVRHELKHELKQGYKDKIVDIREEILRKRRAGKLPGDTTSVLKAWWQSHSKWPYPTEEDKARLVQETGLQLKQINNWFINQRKRNWHSSPSTSTVLKSKRKRS

SEQ ID NO: 38031 - protein, 357 aa, Glycine max
  Clone ID: LIB3242-680-B11_FLI.pep
QSLQLQKVQLSNLVSGDTEHQEESAMADASPRTDISTDVDTDDKNPRFDRSQSLVAVASDSSDRSKDKSDQKSLRRLAQNREAARKSRLRKKAYVQQLESSRLKLTQLEQELQRARQQGIFISNSGDQAHSMSGNGAMAFDVEYARWLEEQNRQINELRAGVNSHAGDTELRMIIDGIMAHYDEIFRLKANAAKADVFHLLSGMWKTPAERCFLWLGGFRSSELLKLLVNQLEPLTEQQLVGITNLQQSSQQAEDALSQGMEALQQSLSETLSTGSLGSSGSSGNVANYMGQMAMAMGKLGTLEGFIKQADNLRQQTLHQIHRILTTRQSARALLAIHDYFSRLRALSSLWLARPRD

SEQ ID NO: 38032 - protein, 579 aa, Glycine max
  Clone ID: LIB3242-680-G5_FLI.pep
ASSSGSLDTSASANSFTNFTFSTHPFMTTSFSDLLASPTDNNKPPHGGGGGLSERTGSGVPKFKSTPPPSLPLSPPPISPSSYFSIPPGLSPAELLDSPVLLNSSNILPSPTTGAFVARSFNWKSSSGGNQRIVKEEDKGFSNFSFQTQQGPPASSTATYQSSNVTVQTQQPWSYQETTKQDNFSSGKSMMKTEKSSSMQSFSPEIASVQNNHSNGFQSDYGNYPPQSQTLSRRSDDGYNWRKYGQKQVKGSENPRSYYKCTYPNCPTKKKVERSLDGQITEIVYKGTHNHPKPQNTRRNSSNSSSLAIPHSNPISAEIPDQSYATHGSGQMDSAATPENSSISIGDDDFEQSSQKCKSGGDEYDEDEPDAKRWKIEGENEGMSAPGSRTVREPRVVVQTTSDIDILDDGYRWRKYGQKVVKGNPNPRSYYKCTHPGCPVRKHVERASHDLRAVITTYEGKHNHDVPAARGSGSHSVNRPMPNNASNPTNTAATAISPLQVIQHSDNSHQNQRSQAPPEGQSPFTLEMLQSPGSFGFSGFGNPMQSYMNQQQQQLSDNVFSSRAKEEPRDDMFLESLLC

SEQ ID NO: 38033 - protein, 223 aa, Glycine max
  Clone ID: LIB3242-681-F1_FLI.pep
PHVNAVGSGPGHGPGPGPGPGGLLLVPKSEEVGRPMDFVGSRIGLNLGGRTYFSSSEDDFVSRLYRRSRPVEPGSTISSNSPRCQAEGCNADLSQAKHYHRRHKVCEFHSKAATVIAAGLTQRFCQQCSRFHLLSEFDNGKRSCRKRLADHNRRRRKTQQPTQEIQKSQPSLDNVARSPPDSGAQSSSSVTVAVSPPDYFRQRPYQSTNNPSSISSSLFFSSG

SEQ ID NO: 38034 - protein, 284 aa, Glycine max
  Clone ID: LIB3242-683-E1_FLI.pep
QFSTMATTTQLHLPPGFRFHPTDEELVIHYLCRKCASQHIAVPIIAEIDLYKYDPWDLPGMALYGEKEWYFFTPRDRKYPNGSRPNRSAGTGYWKATGADKPVGKPKPVGIKKALVFYAGKAPKGEKTNWIMHEYRLADVDRSVRKKNSLRLDDWVLCRIYNKKGAIEKQQLPPPSGVRKIECSEMEDEKPEILPPDPPYTAATVADCLYFEASDSVPRLHTTDSSCSEQVVSAEFASEVQSEPKRGSNNNNEFAYNYVDATLGNNQMSPLQDIFMYLSKSFCN

SEQ ID NO: 38035 - protein, 405 aa, Glycine max
  Clone ID: LIB3242-692-B12_FLI.pep
VNNLVVRTRYRSYCPAQCVQIVPKHFPATSSSSSSSSSPVVLFILPCTFFFEDRNCVFEKMGVPEKDPLSQLSLPPGFRFYPTDEELLVQYLCRKVAGHHFSLPIIAEIDLYKFDPWVLPSKAIFGEKEWYFFSPRDRKYPNGSRPNRVAGSGYWKATGTDKIITTEGRKVGIKKALVFYIGKAPKGTKTNWIMHEYRLLDSSRKNTGTKLDDWVLCRIYKKNSSAQKAVQNGVVPSNEHTQYSNGSSSSSSSQLDDVLESLPAIDERCFPMPRVNTLQQQQHEEKVNVQNLGEGGLLDWTNPSVLNSVVDFVSGNNNHNQLVQDQTQGMVNYNACNDLYVPTLCHVGTSVPQKMEEEVQSGVRNQRVQNNSWFLQNDFTQGFQNSVDTSGFKYPVQPVGFGFRN

SEQ ID NO: 38036 - protein, 196 aa, Glycine max
  Clone ID: LIB3242-699-H3_FLI.pep
EEKNLDPPSDIPVFGSLRNFLDCFCVREISATKMDDTETKGRIEETVRRILQESDMDEVTESKIRKQASEHLGLDLSQPYFKAFVKQVVKAFLQEEEQRQKQQQQDEDEEEELGGASKGKEYDDEGDLIICRLSDKRRVTIQDFRGKTLVSIREYYKKDGKELPTSKGISLTEEQWSAFKKNVPAIEKAIKKMESS

SEQ ID NO: 38037 - protein, 287 aa, Glycine max
  Clone ID: LIB3242-700-F11_FLI.pep
NDSSSENDALFSTIEPTADRKDYYEDQGYQNRQHNQLYLHVLQPHFSTNFGPRIPEVLCLVMKIFSFVNQKLYLFPPVQNLFNVLHHDIFNFRNLSFHLSKLAYLFRMLNTVLHVLLQLRPEFLVQAVRSHGCCLSAAVFGHKVILHTLQKSHRHLSPNRFIRNNTISESVVDEVVEGVAVTVVGELVVGGRELLEALERDCVEVATEFSVLGENHRAARHERVDQRSLVLILSHLLLLLLLFSQICAFEPDFGNCVVCASVYLHSLLFLFFSFLFFPLREKEQRER

SEQ ID NO: 38038 - protein, 298 aa, Zea mays
  Clone ID: 700083890_FLI.pep
SVLSPHTPPARDEARIAAAERRSCHLPRAHLPPMLRTHLLPEAWRRPLPQEAGARHQSPRISFHRAAPRSGIQGGQVRCGGPELRWLSSSRNSSSDSQPWTTMCVNADYTTPADSVATSEQAGGEAEATLETGGEAAATLEQTGGETEEPTIVAPANEYTEQEAAPQQKCAKIHDFCLGIPFGGLLLSMGLIGFLFWRSPASLTFGVAPGLAILALAVLSLNVWRSGKSSLPFILAQAGIAAAVAWKHGQAYTTTRKLLPWGFYVALSAAMICFYSYVLLAGGNPPPKKAKAKAKAAA

SEQ ID NO: 38039 - protein, 128 aa, Zea mays
  Clone ID: 700169668_FLI.pep
MTRSLPWCMVNTQRPFTNNGYDTQQNYESFFSSGSASGTSFTSAASSNVSPGTSSGTSSSSWAAALALASAPGTCFWKCSASLLRFSRLSGPSWLIIVGRRSCRLFVWGTPLTTHVFAGMDACTLGFW

SEQ ID NO: 38040 - protein, 201 aa, Zea mays
  Clone ID: 700203560_FLI.pep
SVRHPALLDRQRTLHLLFLGPPLHHPGVAILRQWRQVEVKVPDGTEARRRRHPGRHGDRHGHAVPVVAALVPAERLARGEAPPADAAPVWPAASRRPRQRRRRRLVGVVAPGRCRRRRGGKGGGVPLRRRRLAVAGLVAAERLVGGEGLPADRAPEPKLLLRRWRVGCRRRRAPLGVLVLVLLPTEPELAGPGERGEADGD

SEQ ID NO: 38041 - protein, 152 aa, Zea mays
  Clone ID: 700209590_FLI.pep
RPEEAKGGRRPFHGAKELFLSDHFDTQSAHTIEGKCIVHSFKSYTKLDNVGPEDFYCRFDYKAATGAFTPDRVAVYCKCEMPYNPDDLMVQCEGCKDWFHPSCMGMTIEQAKKIDHYMCSDCAKENGAKRPSNSYSVSPNSDSKIESKRRKR

SEQ ID NO: 38042 - protein, 292 aa, Zea mays
  Clone ID: 700346218_FLI.pep
QIPPCAGHSLISWGNKFLSIAGHTKDPSEGITVKEFDPHTCTWSIAKTYGKPPVSRGGQTVTLVGTTLVLFGGEDAKRCLLNDLHILDLETMTWDDVDAIGNPPSPRSDHAAACHADRYLLIFGGGSHATCFNDLHVLDLQTMEWSRPKQQGLTPSPRAGHAGATVGENWYIVGGGNNKSGVSETLVLNMSTLTWSVVSTVEGRVPLASEGMTLVHSNYNGYDYLVSFGGYNGRYSNEVYTLKLSLKSDSQPIVEEETVSDTISRVREPETEISQDGRIREIAMDSADSDLK

SEQ ID NO: 38043 - protein, 186 aa, Glycine max
  Clone ID: 700793664_FLI.pep
YFSYNTFFLDTQHLEDFLILFGAKPLGYSNNMLGMKRHRDNEGSESLDLAKCLVLFSCPIESNKAQQKGFGAVEFECKTCSRKFSSFQALGGHRASHKRQKLEGEELKEQAKTLSLWNKPKMHECSICGLEFSLGQALGGHMRKHRAALNEGFPIIPSIDQVIAKIPVLKRSNSTRVMCLDLELHL

SEQ ID NO: 38044 - protein, 96 aa, Glycine max
  Clone ID: 700843818_FLI.pep
PNVVVWDGQYGYQNLFDAMLDSVHAAIDNTKIGYVEVVVSESGWPSDGGFAATYDNARVYLDNLVRRANRGSPRRPSKPTETYIFAMFDENQKIQR

SEQ ID NO: 38045 - protein, 29 aa, Arabidopsis thaliana
  Clone ID: LIB25-052-E10_FLI.pep
KVFNFKQKWIMTTTDKLLILFYRNSYILL

SEQ ID NO: 38046 - protein, 322 aa, Zea mays
  Clone ID: LIB3136-052-G6_FLI.pep
ILGSGMSNKMWDALVEHAKTCVLSGKYYIYYSDESRSIGAIFNNIYAFCGLISGEQFYSSESLDDSQKLFADALVKKAYDNWMYVIEYDGKGLLNLKPKKKAASTGQAETHASAGGSTSYQQHLSSTSMPGSSPSGGTDSVGYGVDQSATHLSQLQSSSTNLQTPYDDTFSFLPPNLLTGSANDAMGLELGQLHQVISQGQPIQPANVGYVDWPRNRDSQYADDFTEDIRVKSHQMLESEDMQQLLRVFSMGGASGSLSDDTFNFQPYMPSPLPNPGFESERSHSSGKAVVGWLKIKAAMRWGIFVRKKAAERRAQLVELED

SEQ ID NO: 38047 - protein, 589 aa, Zea mays
  Clone ID: LIB3136-054-E3_FLI.pep
ARFRRRTATCRASSGGGGGRGGENDGLLWLPRRDVMLNGLSSVAAGLAWYPGVASGVDAVCTRADKVNEKTVQCTDPAGQLPCPLVSPTDPVDFKPESKVTRIRQPVHLLSREYQEKYKEAVAKMKALPEENPLSFAAQAAIHQAYCDAYYKYDPTAKDAPFDVHFSWIFAPWHRMYIYFYERALGQLIGDDTFALPFWNWDTPAGMVVPPLFKDSMGNPLYDPNRNPSNVDALVDLDYLNDRNAEPIPFKGPRDEKYKELVNKNLCTVYTQQIRSGKGAESFLGEKYCTDIGSSTSSMGSLERMAHTAVHVWVGKAGPTPSSEACSAATGGFPNHTKGGYSCNNDMGFLGSAGHDPLFYSHHSNVDRMWHIWSTRLGGGQGITEADWLDTSFVFYDDVKSPRKVRIRFRDVLDTRDLGYTYDAESDKDLPWLRCKISSLVPHGKDSPPRSSSARKAAAPAFPLALTKGQVVEVPAVPVPAKDPGKEQLLVIEGIEYDPQANNKFDVAINLPADKALQVGPQYKEYAGSFAVVPGSGAGKTRKVKLSLCITEVLFDIDADGDKTVDVVIVPRTNAKITLNARPTIKNRN

SEQ ID NO: 38048 - protein, 600 aa, Zea mays
  Clone ID: LIB3136-056-B10_FLI.pep
TCVCPCSSPKTKPIPCHPLMTKAVNDPAAVSLSQRPGPAPGRPAAQERVLGDGVLVAQRRGRRPDAEVELLPQVLPGPVLRPDVPHAHVVQGHVDRRPRSGVHLNSVPRNAVPQVVALPACRRPFPSIHPDDPEGVSVDVPRLHLVLAVLEHDLDVVPVAGAHDRRPQVGGAAVGGGAVGDGAHGEDAADLVVVGDLERGVGAHVRHAVHRVAPLPADGRRRVGQADGPGHRHQAVVVRPLRVGPRPTGRQVPPDRAGLVERPVDLDGGATGEGPRRPAGGVGVAQDRRGGDDPAREARGDDDGVVVARLVGGEQHGVGLAQVHVQGRVGGLHGVRALHLHQLHGVPLEPDVQGRGQPHVRNPEPVRPAGLNVKGVAIQAPAVDEQPVREPERHAAVEHVPQVGVVGLVPVADEDGVVGGRRRERDGDLRAAEHADAAEPAGGLVEGQRGEVVVGADLVLGLHDVGEVGARRDRARRPGHAVLERVPPLLEPAPGEEERLVELVEDVDDEVVVGDGLDLRPRELVVDQDPLLLDAQRVDVAVGHRPREEPVRVVAGHEQRQRQRQRQAEDGEQDSSGATGIAVCHCFSSEGELLQFARPG

SEQ ID NO: 38049 - protein, 625 aa, Glycine max
  Clone ID: LIB3093-058-E4_FLI.pep
TLFFWRFTWEKMMMFEDMGFCGDLDMLCGSLGDGDIAVRQTEPDPVVEDDYSDEEIDVDELEKRMWRDKMRLKRLKEQTKSKEGTDAAKQRQSQEQARRKKMSRAQDGILKYMLKMMEVCKAQGFVYGIIPEKGKPVTGASDNLREWWKDKVRFDRNGPAAIAKYQADNAIPGKNDGCNSIGPTPHTLQELQDTTLGSLLSALMQHCDPPQRRFPLEKGVPPPWWPTGNEEWWPQIGLPKDQGPPPYKKPHDLKKAWKVGVLTAVIKHMSPDIAKIRKLVRQSKCLQDKMTAKESATWLAIINQEEALARELYPDYCPPFSSAVANGSMVINDCSEYDVDGAEEEPNFDVEDRKPDHLHPSNLGMERMMGRMPIQQPSHPMKGDVVTNLDFIRKRKISSDFNMMMDQKIYTCEHPQCPYSEVRLGFHDRSARDNHQLNCAYRNSSADYGGGPNFHATEVKPVIFPQSFVQPNTTAQSASLVAPSFDLTGLGVPEDGQKMISDLMTIYDTNVVGNKNLSSTNCVTAENHNLSQASLQRQDSFFPGQGMVLEGNLFAREEGQFDRFKATMNMNMNMNTPFDTNHNNNNIHLMFNSPCDLSSFDFKEDIQGVGMDSLQKQQEVSIWYQ

SEQ ID NO: 38050 - protein, 298 aa, Glycine max
  Clone ID: LIB3170-017-H11_FLI.pep
SEERRRKKVKLWRNGRCEGRRVRQGRSGVQHPRALLLSPPATSFLPSTLNFSQFHHMSNSDGTTNGAITEAQRQQQQQGGKALAVKKPPSKDRHSKVDGRGRRIRMPIICAARVFQLTRELGHRSDGQTIEWLLRQAEPSVIAATGTGTIPASFSSVSLSSPSSTSDYKPQLLAPTPFILGKRIRTDEDSSKDEAVSVGPSLVGPYAPPGPGVVPAWPDFGQIWSFVAAAAAPEMVSVPQQQQQQASLFAHHHRQQQQLAIGEALAARVGNYLPGHLNLLASLSGGPGNSGRRDDEPR

SEQ ID NO: 38051 - protein, 147 aa, Glycine max
  Clone ID: LIB3170-083-A3_FLI.pep
HMWGHGSEFRKGPDSLKGTQPAAMLRLPCYCCAQGCKNNINHPRAKPLKDFRTLQTHYKRKHGTKPFMCRKCGKTFAVKGDWRTHEKNCGKLWYCTCGSDFKHKRSLKDHIRSFGKGHNPHPPFEAFEDEKECITGSDEDEVNAHHT

SEQ ID NO: 38052 - protein, 185 aa, Zea mays
  Clone ID: LIB3069-043-F2_FLI.pep
KSETKYNRVVKKVFLTTMHRTYLGGEINFTDGSINPKSTVGTPAYIAHEVLLEKEYNGKVADVWSCGVTPYVMLTITIPEIRNHPWFLKNLLADLMDDSTMRKQYEEPEQPMQSMNEFMQMDLAEANIPAVGSRGLNQFLNDDIDLDDDMEDLDSDADLDLESKWGHRVCYLTTLNTLLCRRLPR

SEQ ID NO: 38053 - protein, 332 aa, Glycine max
  Clone ID: LIB3170-083-G12_FLI.pep
VEQKTMENIISICDHMPVGFRFRPTDEELVDYYLKHKLLADDFPVHIIPEIDLCKVEPWDVPGRSVIKSDDPEWFFFSPVDYKYLKSKRFNRTTKRGFWKATGNDRKIRIPGTSNVIGTKKTLVFHQGRVPRGAKTNWVIHEYHAVTSHESQRAFVLCRLMKKAEKKNEGGIEAPSFDEGEPSIHMVSDYGNPARAEGIASVDIIPGVDMDEIFRAVDQAEKFSPPVQQSPTGIGLEDFFPNSPLFNARFGSENINMQTSLEVTDDEDELVNSFLVYDEEFVINEERRHCFVNSSTQPKSLRRVYNESSGNWFRLQERVYFYCFPSLFLELN

SEQ ID NO: 38054 - protein, 773 aa, Glycine max
  Clone ID: LIB3139-075-D1_FLI.pep
GCSCSSKDLLCVCSYCFDVLDFQVVQMSVDGDSKELKELNQRLRDGKKIAGGEHGLCEEVKCNGIAEEVKVEQGGTVESSSVQQHIPQPQGAIICWERFLHIRSLKVLLVEIDDSTRHVVTALLRNCSYEVIEAANGLQAWKILEDLTNHIDLVLTEVAMPGLSGIGLLYKIMGHKTRKNIPVVMMSSHDSMGLVFKCLSKGAVDFLVKPIRKNELKNLWQHVWRRCHSSSGSGSESGTQTQKSIKSKSLEKSDNNSGSNDEDDNESIGLNNVDGSDNGSGTQSSWTKRAVEVDSHKPVSQWDQIAECPDSTCAQVVHSNAEMGGNKVVPLAAKDCAEQNEQLVKTAGSQHSNAPDVGPSKFSEQINRGQLDLNCENQSSKLRCKGLSLSDAITSTCDSQMHSGEFEALNKKPKSSDIENKGTNNDEELPSLELSLKRLRGVEDADITIQDDRNVLRRSDQSAFSRYNAASNTKKSPTGCVGSNSPYNNSLEVTKKDSSRDIQSHSCGNPPNQNSNGASNNIDMGSTTNNAYAKSAVMSEPAGASTTKCLYQTSAFQPVKNSLVCTSQQVVLNNTEDMSATILAPPKLDRHKDSAALDFHLHCENHNCIADNMKHQLPPDHDAESIKKMATAAPHCGSSNVEEVLVEGNVGNHSINRSVSGSNNGSNGQNGSSTAVNAGGTNTESNNGLTGNSGSGDASGSGSANRVDQNKTSQREVALTKFRQKRKERRERCFHKKVRYQSRKRLAEQRPRFRGQFVRQTSNENASEATTDS

SEQ ID NO: 38055 - protein, 181 aa, Glycine max
  Clone ID: LIB3139-083-A7_FLI.pep
DSVFVQQNKSLSTFTSNTSCSAMIPVSTSSLSLIFAMWNLGMYQVTNSTPLCPFSSSSLYFTVVCLILSLFSKLVILASSSAIRFGDPDWFFFSPVDFKYLKSKRFNRTTKCGFWKATGKDRDIRTGDTDNTVIGTKKTLVYYQGRVSCGVKSNWVIHEYHAVTFHENQVRFFYSINFNTA

SEQ ID NO: 38056 - protein, 111 aa, Glycine max
  Clone ID: LIB3242-176-A6_FLI.pep
YDSYEKLSSAVDELFRGLLAEMKLSHIGSSQCCSGQRDSCAGGIQNKEQEEKSNKGLLVGSGEYTLVYEDNEGDRMLVGDVPWHMFVSTVKRLRVLKSSDLPAFTLGSKQD

SEQ ID NO: 38057 - protein, 144 aa, Glycine max
  Clone ID: LIB3242-180-H5_FLI.pep
KRRKMKNSKKTCARKYHKSENPRLRWTPELHEYFVEVVEGLGGKNKATPKSILHMMHVKGLRISHIKSHLQMYRNMKGGTILTSMQQEMEENVHVKDHHPICSNCSSQSIIFRSQGTKFKLKASKYDTGIVNQEIHPLENKGLS

SEQ ID NO: 38058 - protein, 175 aa, Zea mays
  Clone ID: LIB3066-001-D6_FLI.pep
SCTTSCCSSTVTDSSSSPPSPAAANAAPAPRKAEAETGGDEDGCAGKAAPAKKRERSSEGKHPTYRGVRMRAWGKWVSEIREPRKKSRIWLGTFPTAEMAARAHDAAALAIKGRATRSARHKSGSCSTCRTCSSTSGTGSGASRRCGPRSMTCWRSMRRRSRCFGNSSLAITKRV

SEQ ID NO: 38059 - protein, 208 aa, Zea mays
  Clone ID: LIB3069-044-A1_FLI.pep
RIKGKLNLCLASGLLEQVPDLEGQSEIPKDSQGSADRSGPPPVLRAQPKSKPELPENAGTSGEGTSDSIRPKGPNAHPTEVSEKVLAKSKQRARARRRLDFLSTPVELKLCTAAASCQRPPQKMDQPGPVAENISPSDACQDISQNVPPERADAITPLASSNHHSPTTPDDPFSLEMHEANASDLLDMSYCDGLIIDSRRDPRDGSLM

SEQ ID NO: 38060 - protein, 227 aa, Zea mays
  Clone ID: LIB3060-032-F7_FLI.pep
PEQSRRDDLESIGYVLLYFLRGSLPWQGLKAATKKQKYDKISEKKLSTPIEALCKSHPVEFASYFHYCHSLTFDQRPDYSFLRHVFRELFEREGYQFDYVYDWTLLKCKQSQKAKVQQGCSHDAGVSSRPVATNVDKHQVGVARPINASGLLEAEQRPAIRMQLNSRSNNLHPERLGVSASHNNVLLQSTSLDNADAPMDHATHSKAQGSIDPHTRGSYSPGPSNRT

SEQ ID NO: 38061 - protein, 637 aa, Zea mays
  Clone ID: LIB3061-030-H4_FLI.pep
VDRRLQEYEQGRTEFAPEEDAHVVGDCVKHVLRELPSSPVPASCCTALLEAFRLDIKESRIKSMRAAISETFPEPNRRLLQRILKMMHTVASHTAENRMTPSAVAACMAPLLLRPLLAGECELEDDFDMSDDSAAQLIAAANAANSAQGIVTTLLEEYESIFNDEHFRCSLSPDSQTGDSGSEESTDDETVDIKDNGFHDAENDVDQELDDAERVLSGKLSETSACVHADLHDYKEVNGNDSDAELSVEDNTLEPNVNLNDTPLSRLIENGKKPSNLASSHETPLSVGEILLSLDAGVPLPGRAAEYSKDRHSSKPNGIQQHVKRTNLWGRSNARKGQRSELVDPSSEEELAIQRLEVMKNDLQVRIAKEARSNAILQASLERRKQALHERRVALEQNVSRLQEQLQAERDLRAALEIGLSMYSSQFSSSHSMDSKTKAELEEIALAEADVARLKQKVAELHLQLNQQRQHQYGSSVDANDCPPHLPNHLSQNTVQTGFDRTVAFCNQEKQRNEESLPCTSHWRSIKQHVLSQGSSRPFSRKHSSDTSLSDSREASTSVLAEGGPLLVNIARTTEGVEYGRPPTVPSSTLVELTTRLDFFKERRSQLMEQLHSLDLGHGSASHDFPYKPSSPWNSPR

SEQ ID NO: 38062 - protein, 99 aa, Zea mays
  Clone ID: LIB3069-002-D9_FLI.pep
SVPFPYLFWQRRSYHRWKIFNTTTATEETRYLYRWNMIRVLFLGNLNLSYGVVNYFVISTYVHFIIALYDHVIQRPQSKGGLGLRAYLETKYFKTIVLE

SEQ ID NO: 38063 - protein, 142 aa, Zea mays
  Clone ID: LIB3061-058-G12_FLI.pep
KERERAKHGLAHSNSHIGLTKLPIHPVLDCLDRRHSSGRGRPVRGHYRPVDLLINSRQAKRVLCSSLCSLYGSLDRRIGRGQGGLERPRIPVPRSLVAVPERVHPESLLLAFVPRAFVAVAVGEAVDAEAVDLVPEVLARVT

SEQ ID NO: 38064 - protein, 129 aa, Zea mays
  Clone ID: LIB3067-054-D11_FLI.pep
EEGNDEGQERRPLKNQLVLLAQCRVCRIYSCIIQKWRMAMTRTQERRRPLKNQLVLLAQWRLYSCMIKKWRTTRRIRHTRCRLHQLQRSLCFVLLGRLYLCNVEWRDCASLKVWLDRPCFLTGSLVTAI

SEQ ID NO: 38065 - protein, 234 aa, Zea mays
  Clone ID: LIB3062-046-C4_FLI.pep
MVHCAKCNIEWNKNDGIFLVEVNRLLRPGGYFVWTSNLNTHRALRDKENQKKWTAIRDYAEGLCWEMLSQQDETIVWKKTNKRECYKSRKFGPELCGHDPESPYYQPLSPCISGTRSQRWIPIEHRTTWPSQARQNATELDIHGVHSEVFADDNSSWDTMVRNYWSLLSPLIFSDHPKRPGDEDPQPPFNMLRNVLDMNAHFGGFNAALLQVWKVCVGDECCSYKCPKLSTTNI

SEQ ID NO: 38066 - protein, 199 aa, Zea mays
  Clone ID: LIB3067-055-C3_FLI.pep
VKSQLRQEFQVAAQNCWVKKGGAFTGEISAEMLVNLGVPWVILGHSERRALLGESNEFVGDKVAFALSQGLKVIACVGETLEEREAGSTMDVVAAQTKAIAEKIKDWSNVVLAYEPVWAIGTGKVATPAQAQEVHASLRDWVKINVSPEVSESTRIIYGGSVTAANCKELAAQPDVDGFLVGGASLKPEFIDIINAAAV

SEQ ID NO: 38067 - protein, 268 aa, Zea mays
  Clone ID: LIB3066-012-E4_FLI.pep
PTRRTFSSSAPAPNLEAAPAAEVDAAGVLADAAEAAASVPAPFPGEVAAAAADSFPPVAALQHIIDAIHTFTGLNWWVCIALTTFIIRSATVPLLVNQLKATTKLRAINPEMEVIKDQMNSMDPKSVQEGQAKMKALFKKHGVSPLTPMKGLLIQGPIFMSFFFAISNMVEKVPSFKGGGTLWFTDLTTPDSLYILPMLTGLTFLATVELNLQEGMEGNPMAGKMKYFSRGVAVLTVPFTMNFATFSVTGPHQTYSPCYMVLLSGDQL

SEQ ID NO: 38068 - protein, 105 aa, Zea mays
  Clone ID: LIB3059-047-F5_FLI.pep
SFNLFLVILSAAGFVLLLLILLVDEDLLARLVAHEGDAGGGHELDAARAETSVQAAGALLLEDAVDSVEDVLVHLPPAHSAHLHLRQTHDPETPHQTPNILVHPF

SEQ ID NO: 38069 - protein, 260 aa, Glycine max
  Clone ID: 700844279_FLI.pep
LIQSFQNSGVTLIQGDMNDHESLVNAIKQVDVVICSFGRLLIEDQVKIVAAIKEAGNVKRFFPSEFGLDVDRHDAAEPVREVFEEKAKIRRVIEAEGIPYTYLCCHAFTGYFLRNLAQIDITVPPRDKVFIQGDGNVKGAYITEADVGTFTIEAANDPRALNKAVHIRLPNNYLSLNDIISLWEKKIGKTLEKIYVSEEEVLKQIKETSFPNNYLLALYHSQQIKGDAVYEIDPAKDLEASEAYPHVEYSTVSEYLDQFV

SEQ ID NO: 38070 - protein, 247 aa, Zea mays
  Clone ID: LIB3069-029-E1_FLI.pep
LYTASEYCEKSYLHSEQKQKVLDNLKDYALRAVVNAVDHLGTVAYKLTDLFEQQASEVSTYELKVARLNQQIFTCQVYTDKEGLRQQQMMGANIKHHKHYILPPTGYKRSLANGHLQADTDQESKPRPYPSAKTLSWHLSSENSTKANAHKPTFALVDTAPSKPSSGKERSASPMRRPLQFNRSTSSDTTQKVGAKNISGVKELSTFHSFDNPKGRAIQKAPVGTKSMLAALFIRHKSSKAKRIAVR

SEQ ID NO: 38071 - protein, 153 aa, Zea mays
  Clone ID: LIB3062-023-B9_FLI.pep
VLLFPTSSRSFLHPTRPPTPNLTAKVRNLLAAPRVWIGAEHGVRRPRLLHLRRGRPRRRRHGGPARGAREGDRLRRRAARLRGARYHRWPANGRQPRRRGPRARNFLHDVGHCNVHPWVLLHKDRLLCLQRLQGLLFFEHPTDLKECAAACWL

SEQ ID NO: 38072 - protein, 478 aa, Zea mays
  Clone ID: LIB3066-005-A10_FLI.pep
PPQFVAIFQPMVILKGGTSSGYKKFVEEKGLKDETYCSDGTALIQISGTAVHNNKTLQVDAVATSLSSTDCFVLQAKNSMFIWNGNASSFEQQQWAAKVAEFLKTGVAVKHCKEGTESSIFWSSIGGKQSYTNRNAAPDVVIREPHLYTFSLRNGKLEVTEIFNFSQDDLLTEDMMILDTHCEVFVWMGQCVETKEKQKAFDIGQKYVRHAVAFEGISPDVPLYKVNEGNEPCFFRTYFSWDSARSVIHGNSFEKKLSVLFGMRSEGGNKGSGDGGPTQRASALAALSSALNPSSQGKQSDEKPTSSDDSEHTQRASAMAALSSALNPSTKPSSTQAQSHSGQGSQRAAAVAALSNVLTAEGSHSPRHSRSSPTSDADKTELVPTSPHQLETGTAEDVRTEPDVSQEQTAKENGGQTTFSYERLISKSTDPVSGINNKRRETYLVDSEFETVFGMTKEEFYEQPRWKQELQKKKADLF

SEQ ID NO: 38073 - protein, 391 aa, Zea mays
  Clone ID: LIB3066-031-A9_FLI.pep
NLQHMAMATAKLNSPATSLLAGGRTRRSAPARCTTVIRAAAGSYSDELISTAKSVASPGRGILAIDESNATCGKRLSSIGLDNTEVNRQAYRQLLLTTAGLGEYISGAILFEETLYQSTTDGKKFVDCLKDQNIMPGIKVDKGLVPLPGSNNESWCQGLDGLASRCAEYYKQGARFAKWRTVVSIPCGPSALAVKEAAWGLARYAAIAQDNGLVPIVEPEILLDGDHGIEGALEVAEKVWSEVFFYLAENNVLFEGILLKPSMVTPGAEHKEKASPEAIAKYTLTMLRRRVPPAVPGIMFLSGGQSEVEATLNLNAMNQSLNPWHVSFSYARALQNSVLKTWQGRPENVEAAQKALLVRAKANSLAQLGRYTGEGESDDAKKGMFQKGYTY

SEQ ID NO: 38074 - protein, 142 aa, Zea mays
  Clone ID: 700205038_FLI.pep
ISPCCRAGHQQRRGSGQPPVVDGEDGEAAGLRAVHRRRPVGRGHVREHRVPGLQQRREAAGQQRGVRVHGGQEAEHGQVLPGRHGGRGQDAGRPGQRAVAAAAQAGGAAAGLVRRLALRGKRRTHSASSSSKQQTSSKDNQW

SEQ ID NO: 38075 - protein, 280 aa, Zea mays
  Clone ID: 700244612_FLI.pep
FTVDKQSTEEERYRISPVSYLLVDGIPHEDHMNHTALVLTCTSTRYIEAGIGLAEWFKRDVVTSPFEELHGATLFHESMGSLDADFHDMASEALDAHDNFGIEIAMREFRDLFEGIQSMTYCCGNFGDDKGARAIVKAFPHIKCTVLAPPKIIATKPADGAKINYVEGDMFSFIPPAQTVVLKLVLHHLTDEECVKLLAQCRKAIPPRKDGGKVIIGDIMIDHSGLMLETHLLMDIGMMTMTKGRQRDEKEWSELFTKAGFSEYKILKEFGARVAFEVYP

SEQ ID NO: 38076 - protein, 181 aa, Zea mays
  Clone ID: 700087221_FLI.pep
RKEPNGNEEGRFQRSRSWSRTVGESAMGKKRQLICLAAAVAAAAILLTASAKKSSDVTELQIGVKYKPESCILQAHKGDKIKVHYRGALTDGSVFDSSYDRGDPFEFTLGNGQVIKGWDQGLLGMCVGEKRKLKIPAKMGYGERGSPPKIPGGATLVFDTELIAVNGKTSGGANPETESEL

SEQ ID NO: 38077 - protein, 598 aa, Zea mays
  Clone ID: 700346942_FLI.pep
LKNSKVNLADAKAICLMECPNPAVDGLNYICDYPEGNIDLSVDDWINRDYDYYEFLTPDMKNSSLQLQGPCYPIIFPTVNVYWSCQFIARASNVSLKHWHETGGVSIDENILIDKTVHKAIDSRSAVLKRYIADIGKSWPVFIVCGGILPVFLSVIWLLMIRYFVAAMTWITVVLFNALVISVTMFFYIKAGWIGNDPLTVVIGESDPYVHISGREISHLHTITILMTAVMIIAFLSSIAIVRRILIATPVLKVAAKVIGEVQALIAFPLLPCLILSILYMFWFSATLHLFSSGQVVRNDCNTDCCSYDLKLGKVNCDNCCGYSIHYTPHISIAILFHLFGCYWATQFILACSSTVVAGSVASYYWARGEISHDIPFLTVVSSLKRLMRYSLGSVALGSLVVSVVEWVRFILECLRRKLKLVDSARESCFGKATSSSSECCLGCIDWTLKSVNRNAYIMIAITGKGFFKASVLATGLIMKNILRIGKVNVIGDVILFLGKLCVSLFCALFAFLMLDTHKYKSAHNKISSPVIPVLVTWALGYVVAKLFFAVVEMSIDTIILSFCQDAEEHQGNAQYAPPALMETLDEQGELQRLTQGP

SEQ ID NO: 38078 - protein, 248 aa, Zea mays
  Clone ID: 700613476_FLI.pep
HNGDGGDGGVRQGVREAWREAAGHLVRRRGVAQAVDQGRGGVRREAAAAAGDDDEGDVPDPGGPGAGRHPAAEHGGPRREGRGGAEHAVPRAPRRRARQGRQAELPVPGHHGAEHGRGAARCRLAAHRRQAWREGGHARQLEARGVRRHRARRLRRGGQEDVPAGVRDRRPALQEGLPPFHQGLASRRTARTSSSSVSPRRPGCADLLCLLVVSLTSTSIYIGSMYVRTMPCRVVSCSGGNRFVALPR

SEQ ID NO: 38079 - protein, 378 aa, Zea mays
  Clone ID: 700441158_FLI.pep
RQARNPPMAHRVLLLLSLASAAAVAAAVDAEDPLIRQVVPGGDDNDLELNAESHFLSFVQRFGKSYKDADEHAYRLSVFKANLRRARRHQLLDPSAEHGVTKFSDLTPAEFRRTYLGLRKSRRALLRELGESAHEAPVLPTDGLPDDFDWRDHGAVGPVKNQGSCGSCWSFSASGALEGAHYLATGKLEVLSEQQFVDCDHECDSSEPDSCDSGCNGGLMTTAFSYLQKAGGLESEKDYPYTGSDGKCKFDKSKIVASVQNFSVVSVDEAQISANLIKHGPLAIGINAAYMQTYIGGVSCPYICGRHLDHGVLLVGYGASGFAPIRLKDKPYWIIKNSWGENWGENGYYKICRGSNVRNKCGVDSMVSTVSAVHASKE

SEQ ID NO: 38080 - protein, 109 aa, Zea mays
  Clone ID: 700441662_FLI.pep
PNTNIHTIVAAKTRSTSAWSLKAGLWDSLRSGLLKNNSSTETVEPPPAPLEVEEPLPVEIVLLERTLPDGSTEQILFSSAGDVDVYDLQALCNKVTFHQSRYFSVLCSQ

SEQ ID NO: 38081 - protein, 263 aa, Zea mays
  Clone ID: 700552476_FLI.pep
SCCRRRRRRRRRGEIRRTMADSGSLRKREEKEEEDDIVCLDPSLFVDRSYEMTTFTFGSHELRLLCLRAASTDFDLTGQLVWPGAVIMNNYLSQYPEIVNGYSVIELGSGIGITGILCSHFCKEVVLTDHNDEVLEIINKNIELQSCSENAHAVLTSEKLEWGNSDHLSSIIEKHPGGFDLVLGADICFQQSSISCLFDTVERIVRIKAGKCRFILAYVSRTKVMDALVLKEAEKHGMRVEEVNGTRTTIANLEGVIFDITLK

SEQ ID NO: 38082 - protein, 499 aa, Zea mays
  Clone ID: 700575182_FLI.pep
FLNPFDAALLSAVKAGVFVAQAAGNGGPFPKTLVSFSPWITTVAAGVDDRRYKNHLTLGNGKLISGLGVSPATHGNMSFSLISAADALLGSSASKYSALDCQRPELLNKRKVQGKILLCGYSFNYISGTASIKKVSQTARSLGAAGFVVAVENSYPGTKFDPVPVSIPGILITDVSKTEDLIDYYNSSTVRDWAGRATAFKATAGIADGLAPTLYNSAPQVALFSSRGPDVKDFSFQDADVLKPDILAPGNLIWAAWAPNGTDESNYAGEGFAMVSGTSMAAPHIAGIAALIKQKNPKWSPSAIKSALMTTANTLDKGSHPLRAQQYTASEMMTLSRATPFDCGSGAVNPKGALDPGLVLDASHEDYITFLCSIPDVNQSEVSNIAGSACNSNSKGQRPFDLNIPSIAVSQLRGTVVVKRTVTSVSDETETYTIMTRMPPEVALEVTPPAVTVVPGASREITVTLTARSVTGTYSFGEIAMKGDRGHLVRIPVVAMGFK

SEQ ID NO: 38083 - protein, 139 aa, Zea mays
  Clone ID: LIB3067-026-D7_FLI.pep
KPASNQEPGRCGDAGDEAKKKEAALASSRLLDPAFKPSKLSQDRLDKFKELHKKRLQITEKPKYKRKLKGTAGRSTKVTSDYKFTNTDASADSSPRDVHHTSSITGIQGDPASGLSSRNKRKLHWGLDIKGRWGRKANM

SEQ ID NO: 38084 - protein, 144 aa, Zea mays
  Clone ID: LIB189-021-F4_FLI.pep
LSTADHQKLLTEKKAALGRRFLRLEWLHHLPGEVRVVPSEVAVGCRLEVAPVAAFLEVKVDDDHARPEIEVLLDNLEDLLVGDRAGAVRVDKHGERLGHADGVGHLDDGAASKAAGDDALGSLPRDIGSAAVNLGWVLAGESAT

SEQ ID NO: 38085 - protein, 138 aa, Zea mays
  Clone ID: LIB3067-026-F6_FLI.pep
HPLFWSPELRLSFLRDTSDRIEKTSETDLINALESIGPVAFGGKWGEKLDAALVTDMGRYRKYNFESTRDLLRYIRNKSGHYRELSDDLKGILGSLPEGFDHYFASRFPKLLIEVYKVLWVHCKDEEAFSKHFNGSSL

SEQ ID NO: 38086 - protein, 141 aa, Zea mays
  Clone ID: LIB143-061-H11_FLI.pep
ASGSHMEKERSLGASTLFNRLEFLQLLEVLPWLLPDLSFVELLHFAILHFNSEIVHRASNHLCLGLHKLLEPQKSIGLLVVLIDGEAGEFLEVKVVLVPRHVLDAARQRPGVVGHGILLCVAGGRYGEGKQYEQGSHERDD

SEQ ID NO: 38087 - protein, 419 aa, Zea mays
  Clone ID: LIB148-037-A10_FLI.pep
SIGSNARQLLCQADGLADGILADGHGLVAGSIVLDVDVDELHALAWQVVGAVERDGLRRVGGAVDVLEDDVVDGHLGGAGLDADVVGAVLLVDDDGVGDIVHGDALVQELAGLERRLGVLVRLDAQAVRGAGDRAPRHLHVFHVLLVLVAPQAADADAVAWAALDAMDADHLAPGADGDAVVADADGGAADGHVAGVADVDAVRVGAVAGGLDRHFVDQHVLALEDVEVEELAVEQRDAADLDVRHKIQHQAIREDLAIVRMLALVLAPHQGSLPVDGAVAVDGQVLDVLDLDPVPLVRAEVAGAEQVAVETDDDGGLAGALQLQPARQVVARRDDDLLYPRRLARVLPRLEDHRGAVRLAVALGAQLRDVQRTRRHRRRPSRHRHRRRARGRRHRCDQQQRGHGRRLHCDIADERHLR

SEQ ID NO: 38088 - protein, 158 aa, Zea mays
  Clone ID: LIB3067-026-H9_FLI.pep
SVVCVCLKKPLTLFAAIVVFDGNAYHGESAPNKKDAEQNAARVVIKSILAKHDTCMVRIVRSKKQLITAVRSSGNTPATFTPIQFTRPVSYAAYGRPDDTTPVLPNESSSLAVQRGINVVPAVGTSVNPSSANVSRSKKRKGRVEGAGGNDTWVAKGH

SEQ ID NO: 38089 - protein, 418 aa, Zea mays
  Clone ID: LIB3060-036-H7_FLI.pep
SNHRTCTRPAVGVHHERGLLAGAADPGDHPAEHRRGQRRRLPRLQVRRACHLHRHPRRARPHQQPAHPVALLVRTARSLVERRGRVRPRHPGPVGCQGEGERRVRLHPPQHRQRHGHPQQGLHPRRRAAHEPVLQHWLRHVGSHDGGDEEGGLERADGDRVLGRSFQRVRLGLPAGSHVGGHRHPVPAGHQQRRRRVRHCSGPVRHIPPEIRHRRRRHRLLGHHRRRRLPLRHRLRHQQLQDGLRLLQGRGDAVLAPLVPGEQAGGALQRRLALCVRGVRHGTHVAGEPGGVPGHGVHRDAGSLHRLRAAHLLPRDDGEEVVRPRAISPREMRHRCRLGGRAMGGPRHRALLPAGGVPRRQGHLQLHAGGRRRRAGAQPRRVGAPRPVLVSWAYHKRLTLFAGFGSYFRCILCSVNLF

SEQ ID NO: 38090 - protein, 233 aa, Zea mays
  Clone ID: LIB3245-460-D8_FLI.pep
DLTTLYGKIESAEYSFPAWFSGGAKSLIRRILDPNPETRIRIEEIRSDEWFQKNYEPIKEIENEEVNLDDVNAAFDDPEDDNEDAFEDETGPLTLNAFDLIILSQGLNLAALFDRRQDCDKLQNRFLSRNPAKVILSSMEVVAQSMGFKTHIRNYKMRVEGLNADKTSHLSVMVEVFEVAPSIFMVELQRAAGDTSEYNTFVNNYCGKLDDIIWKFPTEKGKSRIPRLSKSHS

SEQ ID NO: 38091 - protein, 135 aa, Zea mays
  Clone ID: LIB3067-038-D1_FLI.pep
DRPANFPHFIHSEAWRRSSGTGEALYRERTHGHKPSCKPHKHWNIDTLIIFSHHPNAMVTTSSLETHWQHDNTIPETRGNEHTREYITDVEVQGMDQTDLKILKPAKDLYFCVTTSHGYSVLDVLGGFSFGCFDP

SEQ ID NO: 38092 - protein, 410 aa, Zea mays
  Clone ID: LIB3079-021-D5_FLI.pep
GPVERLFFFRHPEPASTLPLLRSSLSLALRRFYPLAGTIRPHAPFLCSYTHGTDALTMVVAESNSPDDFDSLVARSRRDLDRIRPLVPQLPPPGEDGAFALAAVQATVFRGRGLCLGVSVHHAACDDASTMHFVRTWAATCRLGLENDDGSEDAVLPPRPVLDRSVVADPDDLRGKTLAGMARLAPPPSPPPPQQEEKTPMVMASFLLGREQIDRIKEGAAAKASSFVAASALAWVCLLKCGSVGVAGARRSHMLFSAECRSRLTPPLPAEYFGNCLRPCFVEAATADLLSGETEDGVAAAASAIGSAIQEMEQGVLEGAEGWLGRVLSVLPERPMSVGGSPRHGVYETTDFGWGRPARVEMVSVEKTPGTVALADSPEGDGGIELGVVLPPDAMDAFASCFAHAVGANV

SEQ ID NO: 38093 - protein, 269 aa, Zea mays
  Clone ID: LIB3067-049-D7_FLI.pep
GNAEAGATRRPGEKTRGSQKENEFGRERMAMALLQLLLSLLIVSCAAQSPYASKAPPLSASAPGGSVAPPTTAVSAPQASAQPPTTVAASGPQASAVAPTKAALAPQASAAPPTTAASPQLAATLAPVSSPPLAAAAPPASATPPTTPPSATQPPVSSPPTAMPPAALPPAMAPTPLLAAPPATAPVSPAPTPSVAPTPSPTEAPAPSPTTEAPVPTPSPALAPLSSVSVSPSLSPGPALAQDESAAPGSRTAVAALVSLVAAGLVVLF

SEQ ID NO: 38094 - protein, 391 aa, Zea mays
  Clone ID: LIB3069-040-F10_FLI.pep
HLMWSCLFEMQNWILVIGCIWLTLGLVDDLEKLPFVSAALEQLEEKTKYWIDYRNYGGSPPSKDSFSPGSSFKSRNSFDVNTSQQMSEHKISLSDRDMVNGISELSMSPELSKTSGKGTISKVNEKCTTTIDSNEHDPYTFYQVSDGQHLILHPLNMRCLLNHFGGSDMLPPRITAKILELETVTQSEAIRKRYRFLSHFSLTTTFQFCEIDLSDVVSPNSLAPFLDEIKKREKQRKRAAKKEESERVKAEVAAAVQASAMRFEYTNSSQSHNDVMFSLDDFEALGNNAGPSTSPPASERKLFSDVTRLGFASAQDSPPLRLGTGDANGQSETSRDQGPLATPALSFASIISSSRAVTAADNSEMQKANGAGKKGKKATRVLLSTGGGRRY

SEQ ID NO: 38095 - protein, 445 aa, Zea mays
  Clone ID: LIB3066-030-A5_FLI.pep
LALAAALGPATARAQLRRDHQAPPGPRPHSVTITEFGAVGDGRTLNTVPFQNAVFYVRSFADKGGAQLYVPRGRWLTGSFNLTSHLTLYLEEGAVIVGAKDSSQWLIVEPLPSYGQGLDLPGPRHQSLISGYNLTDVVITGNNGVIDGQGLVWWQWLRSHELNHSRPNLLEFLYSEDIVISNLTFLNSPAWSIHPVYCSNVKVHNVTIKTSLDAPLTDGIVPDSCSNLCIEDSTISVSHEAISLKSGWDRYGISFGRPTSDIRISRVDLLSSSGAALAFGSEMSGGISDIHVNHLRIHDSSKGISFKTSPGRGGYIEDVVISEVQMENVHVGIEFTGNCSTHPDDSFDPSDLPAIDHVTMKNMAGTNISVAGVLSGIEGAPFTAICLSNLNFSMAAGSGPSYWSCSDVSGYSEAVFPEPCTELRDPSSSSSVCYSLASYSAIETA

SEQ ID NO: 38096 - protein, 110 aa, Zea mays
  Clone ID: LIB3068-021-G7_FLI.pep
RLVADILKLKHKHQLDTKGCHWMKTSDLEMFGDFLSICIMGFSKGKRGITSHYELRKNASCFIEMTKYFFLVTWVHKCIIETYFPLNKFMLLHIHMAISRVELHHNKKNV

SEQ ID NO: 38097 - protein, 114 aa, Zea mays
  Clone ID: LIB3059-058-G9_FLI.pep
NSYRQIYDIPSNDYASNYTEETSIQLPEIGTSNTIVQGHVDVNEHRFDGPRTIEEIVPVPLDEIQIHEDVPGQPGAADEIDEVPFSDAPIIGAPFRLISFVARYVSGADLVNQK

SEQ ID NO: 38098 - protein, 172 aa, Zea mays
  Clone ID: LIB3068-025-E11_FLI.pep
MTSVPEPLRYQIYSIAPPFLAALLLGLTGRRFPHRGRRLLRGSGLLGRGLLPWRVLGRRLRRLGGAAGLLSKWLRLSAGGLGLRLGSWLGLGLGGCLRFHYGFRLRGGLGLCGGLRLGGGLSFGLGSGLGLLSAGLGLLRGGLGLGIRLGGGRQLVRVLHLGQLAAGDELLE

SEQ ID NO: 38099 - protein, 250 aa, Zea mays
  Clone ID: LIB3060-018-E3_FLI.pep
RNSTVHSSTHTDSETDTTKLKYQSSLTQAWFYLLQLQAQYRSTRACGDGQSFPEERLEPPHPLGVGGRGVALRRRVVLRRPVQLAHVVAFLLGPLHQLVVHVLVDARLPAQDPEVLAARLADERVLVVIVDVEHPVVADDGDDGEEGREVELDLELGLVAAGVGLVGRALDVVALALAPRLVEHVHRGAVLQQPVGGARVAAVPRLEEGRERRDLVPPPHVPRHVQPPHHRHLLPAAAALRLLPLLRRHL

SEQ ID NO: 38100 - protein, 220 aa, Zea mays
  Clone ID: LIB3068-043-F7_FLI.pep
KHCYLNFQYLKQHKQRGTKLRPDRREAMALPAACSLCGEDGREVVRLVAEDAGTGVREVLHPGQLSNGAVGSDTDRVAEEVAREVLLQVITRVQVPVLLGDLVHLLHALYALGALEDVVQHPQVFVPKRHPEAMDLATGRLPSRQVVRLVRAHGDLRVPGTVHGPLVDVGGPNDDVFIVHYHHFGMNIDHKPPSLLSPDVISARFWVFLRLIFSLLLHLT

SEQ ID NO: 38101 - protein, 419 aa, Zea mays
  Clone ID: LIB3060-019-F3_FLI.pep
LETEGYDQIDSVTTGASVLVEGVVASSQGGKQKVELKVSKITVIGKSDPTSFPIQKKRASREFLRTVAHLRPRTNTFGAVARVRNALAYATHKFFQDNGFVWVSSPIITASDCEGAGEQFYVTTLLSNSTEGGSLLKDIPATKDGRVDWSQDFFCKPAFLTVSGQLNGETYASALSDIYTFGPTFRAENSNTARHLAEFWMIEPELAFADLNDDMACATAYLQYVVKYILENCKEDMDFFNTWVEKGIIDRLNDVVEKNFVHLSYTDAVELLLGSKKKFEFPVKWGLDLQSEHERYITEVAFDGRPVIIRDYPKEIKAFYMRENDDGKTVAAMDLLVPRVGELIGGSQREERLDYLEARLDEQNLNKESYWWYLDLRRYGSVPHAGFGLGFERLVQFATGIDNIRDAIPFPRVPGSAEF

SEQ ID NO: 38102 - protein, 492 aa, Zea mays
  Clone ID: LIB3068-048-C10_FLI.pep
ALPVPAPAVASTLPPSSSAANPARELPVREDMAGKKRKSGSEKPTKHRLPLGADADAVAEASKRRRSGATKQHQADEEASIPPSLSAKILREARKQQEEEMRADSSDEQRPSAAEATAGPSTSSSFPVPAADGENEEDDVDEFDGFDALSEYDGGEVEINEEDEKALAAFMSKDKAAERTLGDIILQKIREKDAEVATGEGRPRVKLDNSIIELYKEVGKFLSRYTSGKIPKAFKRIPSLECWADVVQLTEPENWSPNAVYQATRLFSSNMNTKNAERFYEAILLPRVRNDIRKNRRLHFALYQSLKKALYKPAAFNKGILLPLCRERNCTLREAVIIGSIIQKVSIPFLHASVALVKLAEMEYCGTTSYFIKLFLDKKYALPYRALDAVLAHFMRFVDDERIMPVIWHQSLLAFVERYKNELEKKDKEKLARLLDHQKHYLVTPEIRRELRGSCNRGEKDTNLHTLSPISVITKPIEEDKWDVPQVPMEQD

SEQ ID NO: 38103 - protein, 299 aa, Zea mays
  Clone ID: LIB3060-034-A1_FLI.pep
IYNRIISLYCIKIIKYVWNTSGHRSYTVATVLAVKSNSSSSEVLLGVAVEVVAVADAEHVAVALVVADAVDVGGVLPHAAVFGAVDDVGDGAVAGNPPRRRVGARRRPVAEDHVVARRLGRLRRHPEPDGRLEGDHRVRGHQVRVVHQVLAYRVPGLLVVGLPCQLNWSASIVGRTCGLVDLLLEAVTPLELVGGTCRATGSLVGGLAEEGGELALVEFVGAGAGAEPREEVDGLDEGVVGVEAVGGALRVVAVGQHLVVHVLRDDRRHVRCRHAEQQRRRGSGARHERKPRHARTCFQ

SEQ ID NO: 38104 - protein, 173 aa, Zea mays
  Clone ID: LIB3069-003-H10_FLI.pep
LPAGAAPGGPVAGAQRGPRQVAGVLRHRFADAHGRQGVGRRRRGGQRQLLQPDVADQRRLVLPWRHEPGDAARDGGGAGHVAGARRAGQHHAAVRVPPGRAHADLQEAVGGADGRAARRPQELRRLHALVPPRRAGHVERAALLEALLPQQRSGPLMVHWCLHTYAWKPTARG

SEQ ID NO: 38105 - protein, 315 aa, Zea mays
  Clone ID: LIB3061-033-E7_FLI.pep
VEGSVPETTALLEQRWDKIFYTGNGTVGRIVMAAAAKHLTPVALELGGKSPVIVDSNVDLHVAAKRIVVGKWGCNNGQACIAPDYIITTKSFAPELVASFKRVLERFYGEDPLQSADLSRIVNSKQFKRLTNLIEEKRVADKIVYGGKADEKQLKISPTLLLDVPEDSEIMTGEIFGPLLPIVTVEKIEESFDLINAKPKPLAAYLFTKNRKLQEEFVASVPAGGMLVNDTALHLTNPYMPFGGVGDSGMGCYHGKFGFDCFSHKKGVLIRGFGGEANARYPPYTTEKQKILRGLINGSFIALILALLGFPREKR

SEQ ID NO: 38106 - protein, 150 aa, Zea mays
  Clone ID: LIB3069-004-B7_FLI.pep
SARSGSARAGRERARRTRTASPAATGRRRCSRTARHRGPCLPARSSSPGTPSCSSPAAAVASAAELVATKRITQLPAKKQLQVPDNSSDHENQIICGHNELESNSSNSFDQLCTYGFLFILMPPIDVIDKREKGSLIFLLETRCVGILGV

SEQ ID NO: 38107 - protein, 94 aa, Zea mays
  Clone ID: LIB3069-034-A6_FLI.pep
TRGRATRLDHRLSFTPTMVSSDPSLLLPRSRYCWVISLCYDFSHKINRIGTEQMVEQRTYPRMLLGVSAAIIVSCAWTHFVVRFCRHRTEFNAT

SEQ ID NO: 38108 - protein, 259 aa, Zea mays
  Clone ID: LIB3062-038-G3_FLI.pep
CFSLLANSFSLRKLDAGIVCHECRDHYNEGLVGVLKQALCQNMSPGPKSYIAHILSMFGLCGFPSKLGGNMRNVLCDSELVDLELLLADGESLSAHAAILSARCPKLLPSEKTFVRDGSVTYEWGRRSCYHVRMSDRVDSHALKKILEYAYTGLVTVDDATVKPVKTLAKYCHLRSLHLMLQKEQPRWHSCPIYDLTTALEPAKHSFSDIILEAQSNDKMECHHGSCQLLTPHIHSHKVILSVSCEYLRALFQSGMHER

SEQ ID NO: 38109 - protein, 131 aa, Zea mays
  Clone ID: LIB3069-045-D7_FLI.pep
LPKRRRHSSIPPRVFSARTSRWRSARLLPRTTPTAQMGIASTKIAGGMVLGISLPKTISRSMEEIVEASRIREYKKFDSSTASKTPSRGPFPLPPPPKSAPGKLVDSKALEHLDAPVMADCLYSVYAFCKA

SEQ ID NO: 38110 - protein, 318 aa, Zea mays
  Clone ID: LIB3060-049-G2_FLI.pep
RSCLVPGSRGRRRLQQWPTSPGSRCLASYSSPSTQAWRFIGPTVTPAPSLSSWYLISTWWPCSPACATTSSWISSTPKSARGSRLGFGASRPSLLSCSVTRWLRLCPCQSNLLSGRWQPLPPVAASTLSSSTARSLSCQRRRHGPPRPRMQPPTRFVCHHKAHTAGLGSAPRVRSQGQLGCSLIPNFLAFSLPLSAILAVASVVLACRRGQTGRSGARRDQIRCCCARWQRRSLWFTLLRVKEELMTTTKLGLPIIEPVLCTRRNFRPHLVLISMLDSPPARELIVSREVETKGRVELQRISLYMEATCEQERRGGRL

SEQ ID NO: 38111 - protein, 143 aa, Zea mays
  Clone ID: LIB3245-155-E5_FLI.pep
WLVEVSDEYKLVADTLYLTVYLIDQFLSQNCIQTHKLQLLGITSMLIASKYEEYSAPSAEEFCNITAGTYAKAEVLEMEQQVLNDLGFHLSVPTTNTFLRRFLRAAQASRTVRSVPKPHCNESFQSICIVLNTKLASYISRLI

SEQ ID NO: 38112 - protein, 93 aa, Zea mays
  Clone ID: LIB3069-045-E11_FLI.pep
SCRKHFKVCLGYRGIEGIREAKFLFYLILNNKGDFSPLQSHCSQTCHFPLGHTSLTCQSAGEGNPTLYKFLLHKAKNAHSTLLQQTNNTAIGA

SEQ ID NO: 38113 - protein, 253 aa, Arabidopsis thaliana
  Clone ID: LIB146-008-B9_FLI.pep
LFRSLQGKMLKSASPMAFYDIGEQQYSTFGYILSKPGNAGAYEIDPSIPNIDDAIYGSDEFRMYAYKIKRCPRTRSHDWTECPYAHRGEKATRRDPRRYTYCAVACPAFRNGACHRGDSCEFAHGVFEYWLHPARYRTRACNAGNLCQRKVCFFAHAPEQLRQSEGKHRCRYAYRPVRARGGGNGDGVTMRMDDEGYDTSRSPVRSGKDDLDSNEEKVLLKCWSRMSIVDDHYEPSDLDLDLSHFDWISELVD

SEQ ID NO: 38114 - protein, 358 aa, Zea mays
  Clone ID: 700807107_FLI.pep
INDDPRVALNTYSWTKMASLLLVDSPAGVGYSYADHEDDYTTDDTSRVADLYDFLSKWFAEYAEFLSNPFYVAGCSYSGVIVPVLAHEIIKRNEESGGVKINFKGYSLCNPAIDVDIENNAHVPYAFRMGLISDELFQSLVTTCNGKYWNNSNPSCQENMEQFYTQIKGINMEHILCPPCRYKMGITNQFIEYDSGQMFESLSKTSKHGLECNDQELALEKLFDTRSGREKLHAKKVEVSGPWKRCPKRVLYTRDILTLIEYHLNITSKGYRVFIYSGDHSLLVPFTSTLEWLKKLNYKEIEKWHPWYVENQIAGYSIRYENNILFATIKGAGHVPSDYLPFEVFAAYQRWIDGATSL

SEQ ID NO: 38115 - protein, 69 aa, Glycine max
  Clone ID: 700874265_FLI.pep
LVTKHVVPGSMLYVEGNLETKCFTDPITGIARRIREIAVRRNGRIVFLGEGGDAELQTLPKDLRAVGYY

SEQ ID NO: 38116 - protein, 284 aa, Arabidopsis thaliana
  Clone ID: LIB146-010-F7_FLI.pep
NFEAIFDLQTMEMESFMDDLLNFSVPEEEEDDDEHTQPPRNITRRKTGLRPTDSFGLFNTDDLGVVEEEDLEWISNKNAFPVIETFVGVLPSEHFPITSLLEREATEVKQLSPVSVLETSSHSSTTTTSNSSGGSNGSTAVATTTTTPTIMSCCVGFKAPAKARSKRRRTGRRDLRVLWTGNEQGGIQKKKTMTVAAAALIMGRKCQHCGAEKTPQWRAGPAGPKTLCNACGVRYKSGRLVPEYRPANSPTFTAELHSNSHRKIVEMRKQYQSGDGDGDRKDCG

SEQ ID NO: 38117 - protein, 63 aa, Glycine max
  Clone ID: 700875829_FLI.pep
SEARKEDREKPIVMVSMWLSGICDSEIMHSCTQNYLVCILFWKKNVGMVFRALTRYDGPSTTK

SEQ ID NO: 38118 - protein, 339 aa, Arabidopsis thaliana
  Clone ID: LIB22-004-D10_FLI.pep
RFSGLDKTAIESLPLFRFSALKGSKQGLDCSVCLSKFESVEILRLLPKCRHAFHIGCIDQWLEQHATCPLCRDRVSMEEDSSVLTNGNSFRFLNQSEIREDSSLELYIEREEEEERIHREELSGSSRFSIGESFRKILKLGNKEKTLLDEHVNDKDEKKLMHKFNHRIVVSDVVFKNRWSNVSSSDLMFLNSEMVNSISSERFSSLDHVKRGDEEDQIGILRIKEEMEAKRMLENKLTSMTTMFSSENGDSGSKSRSVMIEPGRRSVSDITAVPRLSISIHGDCSGSAAETASALQNGGNETEERRRRLWLPIARKTAQWFANREKRSQINTTHQHFDV

SEQ ID NO: 38119 - protein, 144 aa, Glycine max
  Clone ID: 700875393_FLI.pep
SHRHTKKKKKKKVVEEFGGKPDIKWRLYVFKAGEVLNEPLYIHRQSCYLFGRERRVADIPTDHPSCSKQHAVIQFRQVEKEQPDGTLLKQVRPYIMDLGSTNKTFINDGPIEPQRYYELREKDTIKFGNSSREYVLLHENSIGQ

SEQ ID NO: 38120 - protein, 417 aa, Glycine max
  Clone ID: 700868488_FLI.pep
SLQKNTTKEMSFAGFLSLQSMSATCGFFFFSFTLLFSFFSFLVFISRMKPWCNCDLCKSYLTVSWLKKFPNLCDWYTHLLRKSPTGTIHVHVLGNTITSNPHNVEHILKTNFQNYPKGKPFSTILGDLLGRGIFNVDGESWKFQRKMASLELGSVAIRTYAMELVNEEIHARLIPIMESTARGELNSVCVLDLQDILRRFSFDNICKFSFGLDPGCLLPNLPVSDLAVAFDLASKLSAERAMNASPFIWKLKRLLNIGSEKKLRETINVVNDVAKEMIKQRREMGFKTRNDLLSRFMGSIDDDVYLRDIVVSFLLAGRDTIAAGLTGFFMLLSKSPEVEELIREEVGRVMGPGQEFPSFEQIREMHYLNAAIHDSMRLFPPIQFDSKFATEDDVLPDGTFVRKGSRVTYHPYAMGRM

SEQ ID NO: 38121 - protein, 317 aa, Arabidopsis thaliana
  Clone ID: LIB22-009-D10_FLI.pep
VAQIKWRSLKVRWDETSSIPRPDRVSPWKVEPALAPPALSPVPMPRPKRPRSNIAPSSPDSSMLTREGTTKANMDPLPASGLSRVLQGQEYSTLRTKHTESVECDAPENSVVWQSSADDDKVDVVSGSRRYGSENWMSSARHEPTYTDLLSGFGTNIDPSHGQRIPFYDHSSSPSMPAKRILSDSEGKFDYLANQWQMIHSGLSLKLHESPKVPAATDASLQGRCNVKYSEYPVLNGLSTENAGGNWPIRPRALNYYEEVVNAQAQAQAREQVTKQPLHDTRGDSKVKRRELQALWHSSDQQHEWDRLNHVSEKQLE

SEQ ID NO: 38122 - protein, 362 aa, Glycine max
  Clone ID: 700870685_FLI.pep
EILNAITEQSKLLQHATTIYLHHTIGDFAEALAAKMPGNLKVVYFVNSGSEANELAMMMARLYTGNLGMISLRNAYHGGSSSTLGLTALNSWKYPIPEGHVHHVMNPDPYHGAFGTDAASYANDVQDHIDYGTSGKVAGFIAESIQGVGGAVELAPGYLKLVYDIIHKAGGVCIADEVQTGFGRTGSHYWGFETQGVIPDIVTMAKGIGNGLPLGAVVTTPEIASVMAQKIQFNTFGGNPVCSAGGLAVLRVLDKEKRQAHCADVGSYLLERLRFLMERHDIIGNVRGRGLMVGLELVTDRTNKTPAKAETAVVFEKLRELGVLVGKGGLHGNVFRIKPPMCFSKDDADFLVDALDYSLSKL

SEQ ID NO: 38123 - protein, 130 aa, Arabidopsis thaliana
  Clone ID: LIB22-061-A9_FLI.pep
EMASKRILKELKDLQKDPPTSCSAGPVAEDMFHWQTTDSPLGKGLPWVLYHGVHKDLRINVVCPGRDAALGIDSVGTVPASLITFASIQALKPDMLISLPCTHSFHSSCLNPWLRACGDCPCCRRAIAKE

SEQ ID NO: 38124 - protein, 278 aa, Glycine max
  Clone ID: 700751675_FLI.pep
GSHMAHAYDFYKPNLASEYPVVDGKLSQTCYLMALDSCYNHLSHKYEKQEGKQFSISDAEYFVFHSPYNKLVQKSFARLVFNDFLKNASFVDEAAKEKLEPFATLSGDESYQSRDLEKASQQVAKPQYDAKVQPTTLIPKQVGNMYTASLYAAFISLIHNKHSTLDGKRVILFSYGSGLTSTMFSLLLREGQHPFSLSNIDKMMDVAGKLKSRHEFPPEKFVETMKLMEHRYGGKEFVTSKDTSLLSPGTFYLTEVDSMYRRFYAKKTSENGLVTNGH

SEQ ID NO: 38125 - protein, 257 aa, Arabidopsis thaliana
  Clone ID: LIB22-063-A3_FLI.pep
SHVFFSPRPLRVFLFVVMAREKIQIRKIDNATARQVTFSKRRRGLFKKAEELSVLCDADVALIIFSSTGKLFEFCSSSMKEVLERHNLQSKNLEKLDQPSLELQLVENSDHARMSKEIADKSHRLRQMRGEELQGLDIEELQQLEKALETGLTRVIETKSDKIMSEISELQKKGMQLMDENKRLRQQGTQLTEENERLGMQICNNVHAHGGAESENAAVYEEGQSSESITNAGNSTGAPVDSESSDTSLRLGLPYGG

SEQ ID NO: 38126 - protein, 368 aa, Arabidopsis thaliana
  Clone ID: LIB22-063-H9_FLI.pep
EMKERQRWSGEEDALLRAYVRQFGPREWHLVSERMNKPLNRDAKSCLERWKNYLKPGIKKGSLTEEEQRLVIRLQEKHGNKWKKIAAEVPGRTAKRLGKWWEVFKEKQQREEKESNKRVEPIDESKYDRILESFAEKLVKERSNVVPAAAAAATVVMANSNGGFLHSEQQVQPPNPVIPPWLATSNNGNNVVARPPSVTLTLSPSTVAAAAPQPPIPWLQQQQPERAENGPGGLVLGSMMPSCSGSSESVFLSELVECCRELEEGHRAWADHKKEAAWRLRRLELQLESEKTCRQREKMEEIEAKMKALREEQKNAMEKIEGEYREQLVGLRRDAEAKDQKLADQWTSRHIRLTKFLEQQMGCRLDRP

SEQ ID NO: 38127 - protein, 222 aa, Glycine max
  Clone ID: 700830015_FLI.pep
VNAEEDLSDDGSQAGEKKRRLNMEQVKTLEKSFELGNKLEPERKMQLARALGLQPRQIAIWFQNRRARWKTKQLEKDYDVLKRQYEAVKSDNDALQAQNQKLQAEILALKSREPTESINLNKETEGSCSNRSENSSDIKLDISRTPAIDSPHSTHQQSRPLFPPSSARPAGVAQLFQTSSRPDLPSCQKIDQMVKEESLSNMFCGMDDQSGFWPWLEQQHFN

SEQ ID NO: 38128 - protein, 423 aa, Arabidopsis thaliana
  Clone ID: LIB22-075-E8_FLI.pep
FSFLLQFPFLESIDIEGEKMPGLTCNACNMEFKDEEERNLHYKSDWHRYNLKRKVAGVPGVTEALFEARQSALAQEKNKSNEAPMLYTCAICAKGYRSSKAHEQHLQSRSHVLRVSQGTSINGEEDIAIIRQLPRRVQHRGSIDDDSEDEWVEVDSDEELAAEEASDSLSKLNVNESGSAEDMDDDGDADKYELDPTCCLMCDKKHKTLESCMLHMHKHHGFFIPDIEYLKDPEGLLTYLGLKVKRDFMCLYCNELCRPFSSLEAVRKHMEAKSHCKLHYGDGDDEEDAELEEFYDYSSSYVDEAGKQIVVSGETDNTVELVGGSELLITEKSENTTTSKTLGSREFMRYYRQKPRPTSQDSNQIIASLSSRYKSLGLKTVPSKEETLRMKVRKEMSKRGETMRTKIGVKSNVIRNLPNNVPY

SEQ ID NO: 38129 - protein, 118 aa, Glycine max
  Clone ID: 700836446_FLI.pep
AEYEELRKNPQKAYLKTITPKFQTLIDLSVIEILSRHASDEVYLGERDNPNWTSDTRALEAFKRFGNKLAQIENKLSERNNDEKLRNRCGPVQMPYTLLLPSSKEGLTFRGIPNSISI

SEQ ID NO: 38130 - protein, 134 aa, Glycine max
  Clone ID: 700874409_FLI.pep
ANMESEALIWGDKLILKGLSFRGFHGALPEERKLGQKFVVDVDAWMDLKAAGKSDHLSDTISYTDIYDIAKEILEGSPQNLLESVAQKIAVTTLTNHKQISAVRVKVEKPHVAVQGPLDYLGVEILRRRSDLSE

SEQ ID NO: 38131 - protein, 326 aa, Arabidopsis thaliana
  Clone ID: LIB22-028-F9_FLI.pep
RLAGTGTQIYTALSSKKTSAADMLKAYQTYMSVCPFKKAAIIFANHSMMRFTANANTIHIIDFGISYGFQWPALIHRLSLSRPGGSPKLRITGIELPQRGFRPAEGVQETGHRLARYCQRHNVPFEYNAIAQKWETIQVEDLKLRQGEYVVVNSLFRFRNLLDETVLVNSPRDAVLKLIRKINPNVFIPAILSGNYNAPFFVTRFREALFHYSAVFDMCDSKLAREDEMRLMYEKEFYGREIVNVVACEGTERVERPETYKQWQARLIRAGFRQLPLEKELMQNLKLKIENGYDKNFDVDQNGNWLLQGWKGRIVYASSLWVPSSS

SEQ ID NO: 38132 - protein, 361 aa, Arabidopsis thaliana
  Clone ID: LIB22-033-E9_FLI.pep
ELSSPYGDTEQKLASYFLQALFNRMTGSGERCYRTMVTAAATEKTCSFESTRKTVLKFQEVSPWATFGHVAANGAILEAVDGEAKIHIVDISSTFCTQWPTLLEALATRSDDTPHLRLTTVVVANKFVNDQTASHRMMKEIGNRMEKFARLMGVPFKFNIIHHVGDLSEFDLNELDVKPDEVLAINCVGAMHGIASRGSPRDAVISSFRRLRPRIVTVVEEEADLVGEEEGGFDDEFLRGFGECLRWFRVCFESWEESFPRTSNERLMLERAAGRAIVDLVACEPSDSTERRETARKWSRRMRNSGFGAVGYSDEVADDVRALLRRYKEGVWSMVQCPDAAGIFLCWRDQPVVWASAWRPT

SEQ ID NO: 38133 - protein, 407 aa, Glycine max
  Clone ID: 700838314_FLI.pep
FAKVYHARHLKTGKSVAMKVVGKEKVVKVGMMEQIKREISAMNMVKHPNIVQLHEVMASKSKIYIAMELVRGGELFNKIARGRLREEMARLYFQQLISAVDFCHSRGVYHRDLKPENLLLDDDGNLKVTDFGLSTFSEHLRHDGLLHTTCGTPAYVAPEVIGKRGYDGAKADIWSCGVILYVLLAGFLPFQDDNLVALYKKIYRGDFKCPPWFSSEARRLITKLLDPNPNTRITISKIMDSSWFKKPVPKNLMGKKREELDLEEKIKQHEQEVSTTMNAFHIISLSEGFDLSPLFEEKKREEKELRFATTRPASSVISRLEDLAKAVKFDVKKSETKVRLQGQEKGRKGKLAIAADLYAVTPSFLVVEVKKDNGDTLEYNQFCSKELRPALKDIVWRTSPAENPTLA

SEQ ID NO: 38134 - protein, 262 aa, Arabidopsis thaliana
  Clone ID: LIB22-008-E8_FLI.pep
LFSSVFPHIVSTFPFFRFDPLFSKETIFSSRRGIRRMVSPENTNWLSDYPLIEGAFSDQNPTFPWQIDGSATVSVEVDGFLCDADVIKEPSSRKRIKTESCTGSNSKACREKQRRDRLNDKFTELSSVLEPGRTPKTDKVAIINDAIRMVNQARDEAQKLKDLNSSLQEKIKELKDEKNELRDEKQKLKVEKERIDQQLKAIKTQPQPQPCFLPNPQTLSQAQAPGSKLVPFTTYPGFAMWQFMPPAAVDTSQDHVLRPPVA

SEQ ID NO: 38135 - protein, 227 aa, Arabidopsis thaliana
  Clone ID: LIB22-082-F3_FLI.pep
IMSDVPSCSSGNDTNNNDSSNFECNICLDLAQDPIVTLCGHLFCWPCLYKWLHLHSQSKDCPVCKAVIEEDRLVPLYGRGKSSADPRSKSIPGLEVPNRPSGQRPETAQPPDPNHGFAHHHGFGGFMGGFAAPMASARFGNVTLSAAFGGLIPSLFNLHFHGFPDAAMYGAAASGGFPHGFSNPFHGGHSHMHSYQRHTGRQGQQDHHLRILLLIVFVVVVFSLFLS

SEQ ID NO: 38136 - protein, 70 aa, Glycine max
  Clone ID: 700853718_FLI.pep
SKIESRPLKQRSLRVVDHLNEGSATYFDYLFYIDIEASMAEPRAQYALGQLQEFARFLRVLGCYPMDTVL

SEQ ID NO: 38137 - protein, 237 aa, Zea mays
  Clone ID: 700571832_FLI.pep
WPEGPPASGSIQGILDWQRRTMEMMYNDISVALDAKRIDRDPRDYLTFFCLGNREVKMDGEYEPSGRPLDGTDYARAQNARRFMIYVHSKMMIVDDEYIIVGSANINQRSMDGGRDSEIAMGAYQPCHLNTKGQVARGQVHGFRMSLWYEHLGMLHDDFLNPGSLECVRRVNQMADRYWDLYAGDSLDADLPGHLLRYPVTVTKEGTVTELPGAKFFPDTQALVLGALSKLPPILTT

SEQ ID NO: 38138 - protein, 291 aa, Arabidopsis thaliana
  Clone ID: LIB23-037-H11_FLI.pep
REIITINSTKNMRKPEVAIAASTHQVKKMKKGLWSPEEDSKLMQYMLSNGQGCWSDVAKNAGLQRCGKSCRLRWINYLRPDLKRGAFSPQEEDLIIRFHSILGNRWSQIAARLPGRTDNEIKNFWNSTIKKRLKKMSDTSNLINNSSSSPNTASDSSSNSASSLDIKDIIGSFMSLQEQGFVNPSLTHIQTNNPFPTGNMISHPCNDDFTPYVDGIYGVNAGVQGELYFPPLECEEGDWYNANINNHLDELNTNGSGNAPEGMRPVEEFWDLDQLMNTEVPSFYFNFKQSI

SEQ ID NO: 38139 - protein, 410 aa, Glycine max
  Clone ID: 700840889_FLI.pep
EVKILKALTGHENVVQFYNAFEDGSYVYIVMELCEGGELLDRILAKKDSRYTERDAAVVVRQMLKVAAECHLHGLVHRDMKPENFLFKSTKEDSPLKATDFGLSDFIKPGKKFHDIVGSAYYVAPEVLKRKSGPQSDVWSIGVITYILLCGRRPFWDKTEDGIFKEVLRKKPDFRRKPWPTISNAAKDFVKKLLVKDPRARLTAAQALSHPWVREGGEALEIPIDISVLSNMRQFVKYSRFKQFALRALASTLNEEELADIKDQFDAIDVDKNGSISLEEMRQALAKDLPWKLKESRVLEILQAIDNNTDGLVDFREFVAATLHVHQLEEDSDKWQQLSQAAFEKFDLDKDGYITPEELRMHTCLRGSVDPLLEEADIDKDGKISLPEFRRLLRTASMGSQNVSSPSVHR

SEQ ID NO: 38140 - protein, 406 aa, Arabidopsis thaliana
  Clone ID: LIB23-047-E8_FLI.pep
QKSQPQTTQKELLQTQEESAVVAAKKPPLKRASTKDRHTKVDGRGRRIRMPALCAARVFQLTRELGHKSDGETIEWLLQQAEPSVIAATGTGTIPANFTSLNISLRSSGSSMSLPSHFRSAASTFSPNNIFSPAMLQQQQQQQRGGGVGFHHPHLQGRAPTSSLFPGIDNFTPTTSFLNFHNPTKQEGDQDSEELNSEKKRRIQTTSDLHQQQQQHQHDQIGGYTLQSSNSGSTATAAAAQQIPGNFWMVAAAAAAGGGGGNNNQTGGLMTASIGTGGGGGEPVWTFPSINTAAAALYRSGVSGVPSGAVSSGLHFMNFAAPMAFLTGQQQLATTSNHEINEDSNNNEGGRSDGGGDHHNTQRHHHHQQQHHHNILSGLNQYGRQVSGDSQASGSLGGGDEEDQQD

SEQ ID NO: 38141 - protein, 368 aa, Glycine max
  Clone ID: 700842281_FLI.pep
SAMNMVKHPNIVQLHEVMASKSKIYIAMELVRGGELFNKIARGRLREEMARLYFQQLISAVDFCHSRGVYHRDLKPENLLLDDDGNLKVTDFGLSTFSEHLRHDGLLHTTCGTPAYVAPEVIGKRGYDGAKADIWSCGVILYVLLAGFLPFQDDNLVALYKKIYRGDFKCPPWFSSEARRLITKLLDPNPNTRITISKIMDSSWFKKPVPKNLMGKKREELDLEEKIKQHEQEVSTTMNAFHIISLSEGFDLSPLFEEKKREEKELRFATTRPASSVISRLEDLAKAVKFDVKKSETKVRLQGQEKGRKGKLAIAADLYAVTPSFLVVEVKKDNGDTLEYNQFCSKELRPALKDIVWRTSPAENPTLA

SEQ ID NO: 38142 - protein, 187 aa, Arabidopsis thaliana
  Clone ID: LIB23-031-E10_FLI.pep
RSSSSAFSKNNNNKSINFHTDPLQNPLITGMPPSSFGYDHSIDLNLAFATLQKHHLSSQATTPSFGFGGDLSIYGNSTNDVGIFGGQNGTYNNSLCYGFMSGNGNNNQNEIKMASTLGMSLEGNERKQENVNNNNNNSENPSKVFWGFPWQMTGDSAGVVPEIDPGRESWNGMVSSWNNGLLNTPLV

SEQ ID NO: 38143 - protein, 297 aa, Glycine max
  Clone ID: 700842377_FLI.pep
VGRDVATCLQEALARKGLDVRVAALVNDTVGTLAVGHYHDPDTVAAIIIGTGTNACYLERVDAIIKCQGLLMTSGRMVVNMEWGNFWSSHLPRTSYDIDLDAESPNPNDQGFEKMISGMYLGDIVRRVILKMSLESDMFGPISPKLSMPFILWTPLMAAMHEDNSPDLREVARILNDIFEIPDVPLKARKIVVKVCDVVTRRAARLAAAGIVGILKKIGRDGSGGITGGRSRSDMKMRRTVVAIEGGLYSKYTLFREYLREALNEILGQDIAKHVILKVTEDGSGIGAALLAASYSS

SEQ ID NO: 38144 - protein, 177 aa, Arabidopsis thaliana
  Clone ID: LIB23-034-E12_FLI.pep
KRDFVCLYCNELCHPFSSLEAVRKHMDAKGHCKVHYGDGGDEEDAELEEFYDYSSSYVNGDENQMVVSGESVNTVELFGGSELVITKRTDNKVTSRTLGSREFMRYYKQKPAPSSQKHIVNSLTSRYKMMGLATVQSKEAIVRMKVMREMNKRGAKSSVRLGMKSNVIRNLPNNVTY

SEQ ID NO: 38145 - protein, 194 aa, Zea mays
  Clone ID: 700571016_FLI.pep
DLKASNILLDVDMKPKISDFGMARMFGGDQNQFNTNRVVGTFGYMSPEYAMEGIFSVKSDVYGFGVLILEIITGKRAVSFHCHEDSLNIAGYAWRQWNEDNAAELIDPVIRASCSVRQVLRCIHIALLCVQDHADERPDIPTVILMLSNDSSSLPNPRPPTLMLRGREIESSKSSEKDRSHSIGTVTMTQLHGR

SEQ ID NO: 38146 - protein, 346 aa, Arabidopsis thaliana
  Clone ID: LIB23-036-E9_FLI.pep
NKSNEAPMLYTCAICAKGYRSSKAHEQHLQSRSHVLRVSQGTSINGEEDIAIIRQLPRRVQHRGSIDDDSEDEWVEVDSDEELAAEEASDSLSKLNVNESGSAEDMDDDGDADKYELDPTCCLMCDKKHKTLESCMLHMHKHHGFFIPDIEYLKDPEGLLTYLGLKVKRDFMCLYCNELCRPFSSLEAVRKHMEAKSHCKLHYGDGDDEEDAELEEFYDYSSSYVDEAGKQIVVSGETDNTVELVGGSELLITEKSENTTTSKTLGSREFMRYYRQKPRPTSQDSNQIIASLSSRYKSLGLKTVPSKEETLRMKVRKEMSKRGETMRTKIGVKSNVIRNLPNNVPY

SEQ ID NO: 38147 - protein, 247 aa, Zea mays
  Clone ID: 700573394_FLI.pep
SLGSNCTHQTPPPPGSLDARHVVQRVPLHVPLHHPPGQGHLLAHREHERLAVAGRAAGSPPDAPHVLARVAGVVEEHHVVHVRKVDAPRRPICAHKEHGVSRLLVQELLDVCDALGLIQRSMEGENFDLRGLPVHPPQRILNFSTCLNLVAENNCFADRRLLDNLQKRCFLVRKGGFWILFFVVISAAVHKDLFKARACSVDTGSHDHLAVRKGFNDLVIDVKRKSGSHEKILCCHWCHGDQLMKHL

SEQ ID NO: 38148 - protein, 265 aa, Arabidopsis thaliana
  Clone ID: LIB23-037-B5_FLI.pep
FQNFPVKSKKKARSSSLMATTLSRDQYVYMAKLAEQAERYEEMVQFMEQLVSGATPAGELTVEERNLLSVAYKNVIGSLRAAWRIVSSIEQKEESRKNEEHVSLVKDYRSKVETELSSICSGILRLLDSHLIPSATASESKVFYLKMKGDYHRYLAEFKSGDERKTAAEDTMIAYKAAQDVAVADLAPTHPIRLGLALNFSVFYYEILNSSEKACSMAKQAFEEAIAELDTLGEESYKDSTLIMQLLRDNLTLWTSDMQEQMDEA

SEQ ID NO: 38149 - protein, 275 aa, Zea mays
  Clone ID: 700573814_FLI.pep
ALVNDTVGTLAGGRYMDTDVVAAVILGTGTNAAYVEHANAIPKWTGLLPKSGKMVINTEWGSFKSNKLPLSEYDKAMDFESLNPGEQIYEKMISGMYLGEIVRRILLKLAHEASLFGDVVPPKLELPFILRTPDMSAMHHDSSHDLKTLGAKLKDIVGVADTSLEVRYITRHICDLVAERAARLAAAGVYSILKKIGRDKVPSGGGKMPRTVVALDGGLYEHYKKFSSCVEATLTDLLGEEASSSVVAKLANDGSGIGAALLAASHSQYQYGASD

SEQ ID NO: 38150 - protein, 274 aa, Arabidopsis thaliana
  Clone ID: LIB23-037-D3_FLI.pep
IPENLSLILHHQAKSQDLIVVVVDFFFKGFTSTIMSQKGLIYSFVAKGTVVLAEHTPYSGNFSTIAVQCLQKLPTNSSKYTYSCDGHTFNFLVDNGFVFLVVADESTGRSVPFVFLERVKEDFKKRYEASIKNDERHPLADEDEDDDLFGDRFSVAYNLDREFGPILKEHMQYCMSHPEEMSKLSKLKAQITEVKGIMMDNIEKVLDRGEKIELLVDKTENLQFQADSFQRQGRQLRRKMWLQSLQMKLMVAGAVFSFILIVWVVACGGFKCSS

SEQ ID NO: 38151 - protein, 318 aa, Glycine max
  Clone ID: 700840105_FLI.pep
KIADFGLAREISSLPPYTEYVSTRWYRAPEVLLQSHLYSSKVDMWAMGAIMAELFTLRPLFPGSSEADEIYKICSVLGSPTTESWADGLKLARDINYQFPQLAGVHLSTLIPSRSDDAISLVTSLCSWDPCKRPTAAEVLQHPFFQSCFYIPPSLRTRAVTRTPPSAGTRGSLDRLGLKRYSGALPNTKITNNFTSPKVQASIASGVQRKLDMANEDGIKSKKSLKTTQQSKYRLPGKGSPTSINKGRTARGVSETAEKLVNMSIGTRRLSLGQTRPPPMKAGVNWISESGNLLRSGQQIPTERTLTRKVAGVLIRSF

SEQ ID NO: 38152 - protein, 159 aa, Arabidopsis thaliana
  Clone ID: LIB23-054-E5_FLI.pep
TDGVVPVENRTVRIPTVNENCFEMDFTGGSKGFTYGGGYNCISHSVSSSSMEVGVVPDGGSVADVSYPYGGPATSGADPGTQRAVPLTSAEREARVMRYREKRKNRKFEKTIRYASRKAYAEMRPRIKGRFAKRTDTNESNDVVGHGGIFSGFGLVPTF

SEQ ID NO: 38153 - protein, 368 aa, Glycine max
  Clone ID: 700839958_FLI.pep
SSPQVMATLKSLCFRGTAFPVCPSNVTNNRNSRSSYWRPAQAAVKPNFHLPMRSFELKNRTSPEDIKALRLITAIKTPYLPDGRFDLEAYDDLVNMQIGQGAEGIIVGGTTGEGQLMSWEEHIMLIAHTVNCFGGKIKVIGNTGSNSTREAIHATEQGFAVGMHAALHINPYYGKTSLDGMLAHFQSVLSMGPTIIYNVPARTGQDIPPHVIQTLAESANLAGVKECVGNDRIKQYTDDGIVVWSGNDDQCHDARWGYGATGVISVVSNLVPGLMRELMFGGVNPTLNSKLLPLIDWLFHMPNPIGLNTALAQLGVVRPVFRLPFVPLPVDKRIEFANLVKEIGREHFVGNKDVEVLDDDDFFLVSRY

SEQ ID NO: 38154 - protein, 150 aa, Arabidopsis thaliana
  Clone ID: LIB24-096-B8_FLI.pep
DMSGASSEDSSIFARCEDVDCNKKIPVELVRMHICYAMFHRTLAARGFGTQTQAKKKPTNKKKSTTSLTDFAVFMNHFRKSFRTDYNGALVKEGSKIGWEMWKSMTEDEKKDYLDKAADEEDEDEDTVEEQADDSDDAEDNEVKETDDDN

SEQ ID NO: 38155 - protein, 449 aa, Glycine max
  Clone ID: 700843126_FLI.pep
LSAYWLGFKSPEQLSRIRNTGVKPEILKNVGKAITTIPENFTPHRAVKRIYEQRAQMIETGEDIDWGFAEALAYATLLIEGNHVRLSGQDVERGTFSHRHAVVHDQTTGEKYCPLDNVIMNQDEEMFTVSNSSLSEFGVLGFELGYSMENPNSLIIWEAQFGDFANGAHVIFDNFLASGEAKWLRQTGLVVLLPHGYDGQGPEHSSARLERFLQMADDNPHVIPEMDPTLRKQIQECNLQIVNVTTPANFFHVLRRQVHREFRKPLIVMSPKNLLRSKACRSNLSEFDDVQGHPGFDKQGTRFKRLIKDQNEHKDVEEGIRRLVLCSGKVYYELDEHRTKVDAKDVAICRVEQLCPFPYDLVQRELKRYPNAEVVWCQEEPMNMGGYTYILPRLISSMKAVNRGGYDDVKYVGRAPSAATATGFLKVHQKEQTEIAEKALQQEPIDFPF

SEQ ID NO: 38156 - protein, 176 aa, Arabidopsis thaliana
  Clone ID: LIB24-093-G2_FLI.pep
VFVYRAYYRCTHRFTQDCLAVKQVQKSDTDPSLFEVKYLGNHTCNNITSPKTTTNFSVSLTNTNIFEGNRVHVTEQSEDMKPTKSEEVMISLEDLENKKNIFRTFSFSNHEIENGVWKSNLFLGNFVEDLSPATSGSAITSEVLSAPAAVENSETADSYFSSLDNIIDFGQDWLWS

SEQ ID NO: 38157 - protein, 331 aa, Glycine max
  Clone ID: 700843557_FLI.pep
QKIIGTTPFEAAAAVVQDYQLPCSAIEFLSEISPLFSDQWCNIKALPGANRLVKHLKSHGVPMALASNSPRESIEAKISYHDGWKNSFSVIIGGDEVRTGKPSPEIFLEAARRLNMEPSSCLVIEDSLPGVTAGKTAEMEVVVVPSLPKQSHLYTAADEVINSLLDLRLEKWGLPPFEDWVEGTLPVDPWYIGGPVVKGFGRGSKVLGIPTANLSTEGYSDLLSEYPAGVYFGWAGLSARSVFKMVMSIGWNPYFNNKEKAIEPWLLHDFNEDFYGEELRLVIVGYIRPEVNFSSLESLVAKIHEDRRVAERALDLPLYSSFKNDSYLRSS

SEQ ID NO: 38158 - protein, 350 aa, Arabidopsis thaliana
  Clone ID: LIB24-102-B1_FLI.pep
RLFEERHLYLNTQSYKNITSENSSIRETHKASHLIMSGLMSFGELEDQFGQISDTTMEEKIPFLQMLQCIEHPFTTTEPNQFLQSLLQIQTLESKSCLTLETNIKRDPGQTDDPEKDPRTENGAVTVKEKRKRKRTRAPKNKDEVENQRMTHIAVERNRRRQMNEHLNSLRSLMPPSFLQRGDQASIVGGAIDFIKELEQLLQSLEAEKRKDGTDETPKTASCSSSSSLACTNSSISSVSTTSENGFTARFGGGDTTEVEATVIQNHVSLKVRCKRGKRQILKAIVSIEELKLAILHLTISSSFDFVIYSFNLKMEDGCKLGSADEIATAVHQIFEQINGEVMWSNLSRT

SEQ ID NO: 38159 - protein, 260 aa, Glycine max
  Clone ID: 700844132_FLI.pep
RFYNQDVIAAVILGTGTNAAYVERAHAIPKWHGLIPKSGDMVINMEWGNFRSSHLPLTEYDLALDAQSLNPGEQIFEKLISGMYLGEVVRRALLKMAEEADFFGDTVPPKLKVPFILRTPDMSAMHHDTSSDLKVVGNKLKDILEISNTSLKMRKIVVELCDIVATRGARLAAAGILGILKKIGRDTVKVGEKQKSVIALDGGLFEHYTKFRECLESALKELLGDEAAETIVIEHANDGSGIGAALLAASHSQYLGVEES

SEQ ID NO: 38160 - protein, 167 aa, Arabidopsis thaliana
  Clone ID: LIB24-107-D7_FLI.pep
FVPQIKILQLDDWVLCRIYKKNSSQRPTMERVLLREDLMEGMLSKSSANSSSTSVLDNNDNNNNNNEEHFFDGMVVSSDKRSLCGQYRMGHEASGSSSFGSFLSSKRFHHTGDLNNDNYNVSFVSMLSEIPQSSGFHANGVMDTTSSLADHGVLRQAFQLPNMNWHS

SEQ ID NO: 38161 - protein, 393 aa, Glycine max
  Clone ID: 700844684_FLI.pep
IIKPNRGLILHLFVLWCIITFCTMPSLFARNQRFSLATLLLLLELLTGNLRMADAQIGVCYGMLGNNLPSANDVIGLYRSNNIKRMRLYDPNQAALEALRNSGIELILGVPNSDLQGLATNPDTSRQWVQKNVLNFWPSVKIKYVAVGNEVSPVGGSSSVAQYVLPAIQNVYQAIRAQGLHDQIKVSTSIDMTLIGNSFPPSQGSFRGDVRSYLDPIIGYLVYANAPLLVNVYPYFSYTGNPRDISLPYALFTAPNVVVWDGQYGYQNLFDAMLDSVHAAIDNTKIGYVEVVVSESGWPSDGGFAATYDNARVYLDNLVRRANRGSPRRPSKPTETYIFAMFDENQKNPEIEKHFGLFNPNKQKKYPFGFGGKRLGKVVIDDFNATTSIKSDV

SEQ ID NO: 38162 - protein, 313 aa, Arabidopsis thaliana
  Clone ID: LIB24-005-G12_FLI.pep
AFYFKEALNNLLHNVSQTLNPYSLIFKIAAYKSFSEISPVLQFANFTSNQALLESFHGFHRLHIIDFDIGYGGQWASLMQELVLRDNAAPLSLKITVFASPANHDQLELGFTQDNLKHFASEINISLDIQVLSLDLLGSISWPNSSEKEAVAVNISAASFSHLPLVLRFVKHLSPTIIVCSDRGCERTDLPFSQQLAHSLHSHTALFESLDAVNANLDAMQKIERFLIQPEIEKLVLDRSRPIERPMMTWQAMFLQMGFSPVTHSNFTESQAECLVQRTPVRGFHVEKKHNSLLLCWQRTELVGVSAWRCRSS

SEQ ID NO: 38163 - protein, 221 aa, Zea mays
  Clone ID: 700572448_FLI.pep
LGAGRGLLYLHEQCDPKIIHRDVKAANVLLDDCCEAIVGDFGLAKLLDHRDSHVTTAVRGTVGHIAPEYLSTGQSSDKTDVFGFGILLLELVTGQTALEFGKAANQKKGAMLDWVKKMHQEKKLDVLVDKGLRSRYDGIEMEEMVQVALLCTQYLPGHRPKMSEVVRMLEGDGLAERWQASQRADSHKSFKVPDFTFSRCYSDLTDDSSLLVQAVELSGPR

SEQ ID NO: 38164 - protein, 80 aa, Arabidopsis thaliana
  Clone ID: LIB24-024-D1_FLI.pep
FLFYSLSVFVSFLFALSFGIILFVSVFCCAWLKQETTSPEAKKMARFFGASYGERGFMGRGFSTFKIGFWKFLFLLGTCV

SEQ ID NO: 38165 - protein, 324 aa, Zea mays
  Clone ID: 700571512_FLI.pep
TLATRRRLQALRRFSTMRPPARGGRGGRGGRFDGGGRGGGGGGRGFGGGRGGRGDRGGRGGRTPRGGRGGGGRGGRGGGMKGGSKAVVVAHKHAGVFISKSKEDALCTKNMVPGESVYGEKRVSVQNEDGTKVEYRVWNPFRSKLAAAVLGGVDNIWIAPGTRVLYLGAASGTTVSHVSDIVGPDGLVYAVEFSHRSGRDLVNMAKKRTNVIPIIEDARHPARYRMLVGMVDVIFSDVAQPDQARILALNASYFLKNGGHFVISIKANCIDSTLPAEAVFAAEVEKLKADQFKPAEQVTLEPYERDHACVVGGYRVPKKQKATS

SEQ ID NO: 38166 - protein, 100 aa, Arabidopsis thaliana
  Clone ID: LIB24-084-F7_FLI.pep
SDAYGTDTLFFAFYYQQNSYQQYLAAKELKKQSWRYHRKFNTWFQRHKEPKIATDEYEQGAYVYFDFQTPKDENQEGGWCQRIKNEFTFEYSYLEDELVV

SEQ ID NO: 38167 - protein, 172 aa, Zea mays
  Clone ID: 700574787_FLI.pep
CHDYVYKSPEAKPYFIVHVIYNSFRLSFVHVPRLIRFIRKLLPHNQWPAPFSHVPPVLQQNACLLGLSVHHLPSVSSLRPDFRTQPKLPMQMYLSSKYSSTPYFDPSLPRPDCFTPPNGATSVEIIPSFTPTKPYSRDSDTRHERGMLLVNMYAAKPAFVSLAIWTASSSVL

SEQ ID NO: 38168 - protein, 436 aa, Arabidopsis thaliana
  Clone ID: LIB24-090-H9_FLI.pep
LVYHKGRAPRGERTNWVMHEYRLVDQDLDKTGVHQDAFVLCRIFQKSGSGPKNGEQYGAPFVEEEWEEEDDMTFVPDQEDLGSEDHVYVHMDDIDQKSENFVVYDAIPIPLNFIHGESSNNVETNYSDSINYIQQTGNYMDSGGYFEQPAESYEKDQKPIIRDRDGSLQNEGIGCGVQDKHSETLQSSDNIFGTDTSCYNDFPVESNYLIGEAFLDPNSNLLENDGLYLETNDLSSTQQDGFDFEDYLTFFDETFDPSQLMGNEDVFFDQEELFQEVETKELEKEETSRSKHVVEEKEKDEASCSKQVDADATEFEPDYKYPLLKKASHMLGAIPAPLANASEFPTKDAAIRLHAAQSSGSVHVTAGMITISDSNMGWSYGKNENLDLILSLGLVQGNTAPEKSGNSSAWAMLIFMCFWVLLLSVSFKVSILVSSR

SEQ ID NO: 38169 - protein, 384 aa, Arabidopsis thaliana
  Clone ID: LIB24-093-A12_FLI.pep
QSSADDDKVDVVSGSRRYGSENWMSSARHEPTYTDLLSGFGTNIDPSHGQRIPFYDHSSSPSMPAKRILSDSEGKFDYLANQWQMIHSGLSLKLHESPKVPAATDASLQGRCNVKYSEYPVLNGLSTENAGGNWPIRPRALNYYEEVVNAQAQAQAREQVTKQPFTIQEETAKSREGNCRLFGIPLTNNMNGTDSTMSQRNNLNDAAGLTQIASPKVQDLSDQSKGSKSTNDHREQGRPFQTNNPHPKDAQTKTNSSRSCTKVHKQGIALGRSVDLSKFQNYEELVAELDRLFEFNGELMAPKKDWLIVYTDEENDMMLVGDDPWQEFCCMVRKIFIYTKEEVRKMNPGTLSCRSEEEAVVGEGSDAKDAKSASNPSLSSAGNS

SEQ ID NO: 38170 - protein, 212 aa, Zea mays
  Clone ID: 700573194_FLI.pep
VTSDGLTVFIENKLGGKHHRFKRGYKNVIDEAIRLNSIGEESHLAMETSGHGALKENHWLDDGAYLMVKLLNKLAAARTLGSSIGSKVLTDLVEGLEEADVTVEIRLKIDQNHADLKGGSFRDYGESVLRHLENAISKDPNLHKAPVNHEGVRVSGYGGWFLLRLSLHDPVLPLNIEAQSNDDAIKLGLAVLAAVNEFPALDVTALNKFVHQ

SEQ ID NO: 38171 - protein, 167 aa, Arabidopsis thaliana
  Clone ID: LIB24-045-H6_FLI.pep
LDDWVLCRIYKKQSSAQKQVYDNGIANAREFSNNGTSSTTSSSSHFEDVLDSFHQEIDNRNFQFSNPNRISSLRPDLTEQKTGFHGLADTSNFDWASFAGNVEHNNSVPELGMSHVVPNLEYNCGYLKTEEEVESSHGFNNSGELAQKGYGVDSFGYSGQVGGFGFM

SEQ ID NO: 38172 - protein, 86 aa, Zea mays
  Clone ID: 700574324_FLI.pep
SVGDATDQGCRSRVSPAPPRLITRLVVAANFMYAWFSVCFAHVLYGFIVQTQLRENVTRIWPSSLSACLAVICMSSPTVSDAWYGM

SEQ ID NO: 38173 - protein, 163 aa, Arabidopsis thaliana
  Clone ID: LIB24-112-B9_FLI.pep
LLSSDPQPELTSTCTSHSCGWKPYSHSNDFAANAFLLLIILFCSFICVLSLHAAIRCCLRPVLQHVPKPDPDLEATHPDAPPTLVYSPGLNLAGNEAECIICLSEFQDGDTLRVLERCKHGFHVYCIQKWLSSSHSSCPTCRTNIFSSPPQLHSQSLPLTSTP

SEQ ID NO: 38174 - protein, 259 aa, Zea mays
  Clone ID: 700575451_FLI.pep
AAASAQYTKGTGDLAGVIRYCPRSVGRSYTSAVCLVLSLLQVLEEQATLGGKEGGKHEGLHGHELDEDVEGRAGGVLQGVTNGVTDHSGLVAVGSLGTEGPRVLAGTSLDVLLGIVPCTAGVGSRDGDLHSRNQGTSKNAGESLDAKEGSNDEGSQHDQSARRNHLLDGSISGDLHTGCVVGLGCSLHQPRNGVELPADLLHHLQGSASNTLHGHGREPVRKHGSNNQTNENLGGEDVDDLHSSSADKGTKKRQGHKSS

SEQ ID NO: 38175 - protein, 214 aa, Arabidopsis thaliana
  Clone ID: LIB24-029-B9_FLI.pep
ESKEKVSKKTNGGTEPTTRVSQLDSSTQKKQPWSKEEIDMLRKGMIKYPKGTSRRWEVISEYIGTGRSVEEILKATKTVLLQKPDSAKAFDSFLEKRKPSASITSPLSTREELGESLPTMTTTTNAKPSKETVVGKSSSSQSSDNNGEVGGSSDADSWSTVQERALVQALKTFPKETSQRWERVAAAVPGKTMNQCKKKFAELKEIIRNKKTGV

SEQ ID NO: 38176 - protein, 97 aa, Glycine max
  Clone ID: 700649675_FLI.pep
AEAKYQASPDSYKDAIIAQDKDKLMELLTYPEVEEAIKRRVDMKTKTYGQELVVTTKEHRTEPVYKINPSLVADLYSDWIMPLTKEVQVAYLLRRLD

SEQ ID NO: 38177 - protein, 775 aa, Arabidopsis thaliana
  Clone ID: LIB25-113-F12_FLI.pep
DHIQSEGFGSGAFSDVVVKAMGSSYHLHRLILSRSSYFRTMLQGPWKEASSPVVNLLVDDKNVNGDAISVALAYLYGYHPKLDDDNAFRVLAAASFLDLQDLCAICTDFIISELRTSNFLAYQVFAESQDYGIHGERVRNACWGYLCQSGAVELREMLPKLSAQTLCALLTSDELWVPSEEKRFELALYAFIANSALSNSDHSNQDSRFERETSFPLDSAISKGKNVMDDFSFRSLDCKLGHLDIEADLRDASDDVIVPLTEGVIDFQRGVSGSNLVFQQSSNSQTNFGRPCTSVVDKTEGSVVAIEGPSEEAYHLSNDSWLSGADSRNSPTLGSSSDGFVVNEWGNCGVSALTWGGRVVGTRQGTGSVKGKYGFTEEEYSAFVNTFEGGSLLYCNMSFEILLNARKELEELGFPCKAVNDGLWLQMLLSQRVQEVAANTCKRCCLISIACACKQGFGVSHGATFNNYYCQENVQNNMMGDMDNVYVPESSQGDGIGIFKPVRISVRGQHIDGLAGIGCEATFVPPPAWPPTPFVYSRVPINRNGQQSIASDGSEGRIDQSGEISKDGLTALVGLSQGTSGVGNNPRGEQTEGGRGSGATVGMSEPKEPSVGTEWENASCTISLDTKTPLCHFPPFRFGVEFEDVHRLANGHVEHSPEFFYAGSLWKISIQAFNDEDPQGRRTIGLFLHRRKAEIVDSVRKVHVYIDPRDKVTARYQLICPSKREVMLFGSFKQRGTLLPKAPKGWGWRTALLFDELSELLQNGALRVAAVVQLV

SEQ ID NO: 38178 - protein, 138 aa, Glycine max
  Clone ID: 700841524_FLI.pep
LSSLLILIPTHVPVPIHVHILVPFTVTTAAISGSMAFSRSALHGSSTNSAISSTVFKPRGCIVRASIRFSCGWRSVPATPYVPVSVVRHGVYGSSASELVPPPRDRGGGHHRPSGRSRTRLGDFVVAAPFEREYCVCF

SEQ ID NO: 38179 - protein, 337 aa, Arabidopsis thaliana
  Clone ID: LIB25-040-C4_FLI.pep
LFSIKSADIFFVLEKEVIGKMGLQELDPLAQLSLPPGFRFYPTDEELMVEYLCRKAAGHDFSLQLIAEIDLYKFDPWVLPSKALFGEKEWYFFSPRDRKYPNGSRPNRVAGSGYWKATGTDKVISTEGRRVGIKKALVFYIGKAPKGTKTNWIMHEYRLIEPSRRNGSTKLDDWVLCRIYKKQTSAQKQAYNNLMTSGREYSNNGSSTSSSSHQYDDVLESLHEIDNRSLGFAAGSSNALPHSHRPVLTNHKTGFQGLAREPSFDWANLIGQNSVPELGLSHNVPSIRYGDGGTQQQTEGIPRFNNNSDVSANQGFSVDPVNGFGYSGQQSSGFGFI

SEQ ID NO: 38180 - protein, 537 aa, Zea mays
  Clone ID: LIB3608-017-E5_FLI.pep
ELAETESKMVLGALASAVASMSLLIVYGVLGALLLWKAARLLDRLWWEPRRLERALRAQGLRGTSYRFLTGDLREYRRSKEEAWARPLPLRCHDIAGHVEPFIHGAVLEHGKTCFTWFGPVPRVTVVDPDLARDVMANKFGHFEKPKFPALTKLFSDGVANHEGEKWVKHRRILNPAFHLEKLKLMLPAFSACCEELVSRWAQSLGPDGSCELDVDPELQTLTGDVISRTAFGSSYLEGRKIFQLQAEQAERLMSIIDKFAVPGYMSLPTKNNRRMRQIKSEIDSILRGLIGKRMQAMKQGESDKDDLLGLLLESNARETGDQSGQPGQGLTMEEVMEECKLFYFAGMETTSVLLTWTMVLLSMHPEWQDRAREEVLGLFGKKNQPGYDGLSRLKTVTMILYEVLRLYPPAIAFSRKTYKEMVVGDVTYPAGVTLELPVLFIHHDPDIWGSDAHEFRPERFAEGVARASKDRLAFFPFGWGPRICIGQNFALLEAKMALSMILQRFQFELAPTYTHVPRRVIMLRPMHGAQIKLRAI

SEQ ID NO: 38181 - protein, 381 aa, Arabidopsis thaliana
  Clone ID: LIB25-063-C7_FLI.pep
STRHVVLVDSQENGVRLVHALLACAEAVQKENLTVAEALVKQIGFLAVSQIGAMRKVATYFAEALARRIYRLSPSQSPIDHSLSDTLQMHFYETCPYLKFAHFTANQAILEAFQGKKRVHVIDFSMSQGLQWPALMQALALRPGGPPVFRLTGIGPPAPDNFDYLHEVGCKLAHLAEAIHVEFEYRGFVANTLADLDASMLELRPSEIESVAVNSVFELHKLLGRPGAIDKVLGVVNQIKPEIFTVVEQESNHNSPIFLDRFTESLHYYSTLFDSLEGVPSGQDKVMSEVYLGKQICNVVACDGPDRVERHETLSQWRNRFGSAGFAAAHIGSNAFKQASMLLALFNGGEGYRVEESDGCLMLGWHTRPLIATSAWKLSTN

SEQ ID NO: 38182 - protein, 565 aa, Zea mays
  Clone ID: LIB3608-031-A9_FLI.pep
QERERERKNMAPLVATATMNHAVAHLLGPNHESFSRHHLSSSLQQNSKRRCNLSFRPRAAESQNGSQTLSPSEVPKRDWFPSDFIFGAATSAYQIEGGWNEDGKKPSTWDHFCHTFPDWIADHSNGDVAADSYHMYKEDVRLLKEIGMDSYRFSISWSRILPNGTLEGGINPYGIKYYKNLINLLVENGIEPFVTIFHWDTPQALVDKYGGFLDERIVKDYTDFAKVCFENFGDKVNNWLTFNEPQTFSSFSYGTGLCAPGRCTPGQKCANPIGNSLTEPYTVGHNLLRAHAEAVDLYNKYYKGENGRIGLAFDVMGRVPYEKSAFTDQQAEQRSWDINLGWFLEPVVRGDYPFSMRSLARERLPFFTDKEQEKLVGSYDMLGLNYYTSRFSKNIDISPNYSPVLNTDDAYASQETNGPDGNPIGPWMGNSWIYLYPEGLKDLLMIMKNKYGNPPIYITENGMGDVDHGDLPMEVALDDHKRVHYLQRHIATLKESRDLGANVQGYFAWSLLDNFEWFSGYTERYGIVYVDRNDGCKRYMKRSAKWFKEFNAAKKAAAKKILTPA

SEQ ID NO: 38183 - protein, 89 aa, Arabidopsis thaliana
  Clone ID: LIB25-105-B3_FLI.pep
FESDQEIIQEQITRVLLERLIVNRPHPWGLLITFIELIKNPRYSFWKQAFIRCAPEIEKLFESVARSCGGLKPVDEGMVSGGWVSDNSH

SEQ ID NO: 38184 - protein, 382 aa, Zea mays
  Clone ID: LIB3594-036-B6_FLI.pep
IAALPGKKRRKAAKESLDSLLNQASIGKSEPRLSEAKFPDSEMYARDNTGDYVLRLGADQSSENLTLLETGEPIYSPTLQEGPIMTAELIKETEELVLRTGSLGAGCSQLLSDMQAFKAANPGCVLEDFVRWHSPPDWSEDCAANSTTVGEGSSRRGRLSDRMQTKEGNLWKELWEAAKPIPAVEQTPIYDEDLAVESIFDALEVIEPSKLFEQLLGVILSVCFVAAESVLAADSNLSKLFYDCKDYIIGVYHNDMSKDELDEMYKVYETMEAIVTHPEEALQIMEQPDEKSVDNKNRFTLKLNFMAKDRPPLWKRTTKDDKISQKVEKNTSEEKNTKIFSNLFDKKVSIFSKKNVRSSEVPPASTSSSSPGPFDESEWTIL

SEQ ID NO: 38185 - protein, 144 aa, Zea mays
  Clone ID: LIB3594-037-D3_FLI.pep
FPAKKEGKSSRLLASRDRERGGVAEKMQSSSMKREISEAHNTIRFGINAGVKADLAPPHPLQSTIQSVRIRRSPSFRGSRVVSHRAARRGGQSRWPVRPPPRGATDSSSPPVWCSMEVAVSIGTTQGQACSTGCSVDNDVKPKL

SEQ ID NO: 38186 - protein, 362 aa, Arabidopsis thaliana
  Clone ID: LIB25-035-C6_FLI.pep
MASRREVRCRCGRRMWVQPDARTVQCSTCHTVTQLYSLVDIARGANRIIHGFQQLLRQHQPQHHEQQQQQMMAQPPPRLLEPLPSPFGKKRAVLCGVNYKGKSYSLKGCISDAKSMRSLLVQQMGFPIDSILMLTEDEASPQRIPTKRNIRKAMRWLVEGNRARDSLVFHFSGHGSQQNDYNGDEIDGQDEALCPLDHETEGKIIDDEINRILVRPLVHGAKLHAVIDACNSGTVLDLPFICRMERNGSYEWEDHRSVRAYKGTDGGAAFCFSACDDDESSGYTPVFTGKNTGAMTYSFIKAVKTAGPAPTYGHLLNLMCSAIREAQSRLAFNGDYTSSDASAEPLLTSSEEFDVYATKFVL

SEQ ID NO: 38187 - protein, 484 aa, Zea mays
  Clone ID: LIB3594-047-D7_FLI.pep
PRRHEMGASLGSAASKDRQQEHGGEAPRPDPCKKTRLSSPLCTIHGSHGHPRLIPGLPDEVSLQILARMPRMGYLKAKMVSRSWKAAVTGAELYRLRKELGVAEEWLYILTKAAAGGQKLVWHALDPVSNQWQRLPLMPGIECRSGGVYGLGLRDLVSVGVGIFDVIRGWLGQKELSGGVPPFCGCAVGAAGGCLYVLGGFSGASASKRVWRYDPSANSWREVSPMRAGRAFCKASLLNDKLYVVGGVSKGENGLIAPLRSAEVFDPATGAWAELPDMLFSKSQAMPTAIADLLKPVAAGVTSYGGKLHVPQSFYSWPFAVDVGGEVFDPETNSWEQMPAGMGEGWPARQAGTRLSAVVEGDLYALEPTTSSSGGCEIKMYDAQEDAWKVAVSQVRAGAFDESDSPCLLAAFLGKLHLVVKDMGSRISVVQMDSLMKPVDSPALSAATTCRTPDVSSEQTHVWKAIASKNIAAAELVSCQVLSI

SEQ ID NO: 38188 - protein, 449 aa, Arabidopsis thaliana
  Clone ID: LIB25-024-G1_FLI.pep
ILILISNFRDFERESVMSSSERVPCDFCGERTAVLFCRADTAKLCLPCDQQVHTANLLSRKHVRSQICDNCGNEPVSVRCFTDNLILCQECDWDVHGSCSVSDAHVRSAVEGFSGCPSALELAALWGLDLEQGRKDEENQVPMMAMMMDNFGMQLDSWVLGSNELIVPSDTTFKKRGSCGSSCGRYKQVLCKQLEELLKSGVVGGDGDDGDRDRDCDREGACDGDGDGEAGEGLMVPEMSERLKWSRDVEEINGGGGGGVNQQWNATTTNPSGGQSSQIWDFNLGQSRGPEDTSRVEAAYVGKGAASSFTINNFVDHMNETCSTNVKGVKEIKKDDYKRSTSGQVQPTKSESNNRPITFGSEKGSNSSSDLHFTEHIAGTSCKTTRLVATKADLERLAQNRGDAMQRYKEKRKTRRYDKTIRYESRKARADTRLRVRGRFVKASEAPYP

SEQ ID NO: 38189 - protein, 167 aa, Arabidopsis thaliana
  Clone ID: LIB25-079-A1_FLI.pep
NGIFHKWKLLVGFNHWLANSGSESDLRQRDLIDERKRKRKQSNRESARRSRMRKQKHLDDLTAQVTHLRKENAQIVAGIAVTTQHYVTIEAENDILRAQVLELNHRLQSLNEIVDFVESSSSGFGMETGQGLFDGGLFDGVMNPMNLGFYNQPIMASASTAGDVFNC

SEQ ID NO: 38190 - protein, 57 aa, Glycine max
  Clone ID: LIB3028-049-B7_FLI.pep
PCDQIINLQHTININVCRVGKTTKHRGIYKPSNMLSNAIPKLYNIIHLKESIQKHPR

SEQ ID NO: 38191 - protein, 399 aa, Zea mays
  Clone ID: LIB3959-019-B11_FLI.pep
MPMKSRDGGRGATTDAYCVAKYGQKWIRTRTIVDSLCPRWNEQYTWDVFDPCTVITVGVFDNCHVDGASGSAARDSCIGKVRIRLSTLETDRVYTHAYPLLMLHPTGVKKMGELHLAVRFACGNAGNMFHAYAHPLLPKMHYAEPLLVRQVETLRCQATNVVAARLGRAEPPLGKEVVEYMLDHRSSLWSMRRSKANFFRLINVLSGPVAIGRWFELVRSWQRPVHSCLAVFTFLVFLATPELVLPTAFLAMAFAGLWRYRGRPRHPPHMEMRLSHADGATADELDEEFDTFPSTRGDAVRFRYDRLRSVAGRVQTVVGDIATQGERMQAALSWRDPRATLLFAVACVAAAVIAYCVPTKVMVGMWGLYAMRPPRFRSRMPSPLMNFFRRLPSRADILL

SEQ ID NO: 38192 - protein, 499 aa, Zea mays
  Clone ID: LIB3959-022-C7_FLI.pep
NSHHAPHLPAFSGAYSSAQVREVIESEMDQDSSDRDGASTIYEESESVSVGEVMKSPVFSEDESSENSFWVDLGQSPLGSDHSEQSSKGKLGSPLPASWFSGRKSAKKASPKVPSKLSRSPIHDNHVMSFDAAVRSVSQEPGPEKGDPDEDNSHINIKNTPISEIEEDNKDAKVNKRFVKFSCADDTAEGEGNATSVFGSCTARENGSTSEICSESQGETKDSAIRRENEGDFRLLGRREAYNGRFNGGRFFGVEESERVPSMGHNVSFTLDDSKLCRNADAGETSGYGMADDDDDDAYSDYDEALDGRKEPEIICKHLDHVNMLGLSKTTLRLRYLINWLVTSLLQLRLPDSGDGEGVPLVYIYGPKIKYDRGAAVAFNIKDCNTGTSLINPETVQKLAEKEGLSLGVGFLSHIRLIDNQKHGAVDVGLSSSLPAANGRREKKNSKNAIIGTEVVTASLGFLTNFEDVYRLWAFAAKFLDSSFLEQERLSSIPEDTER

SEQ ID NO: 38193 - protein, 543 aa, Zea mays
  Clone ID: LIB3632-025-G5_FLI.pep
LRGAASRAAAAPSRHAPAPRHPTSPVGAAAPVAAAAMARAAMSTAVAGVPPPVSLDTISPKVPPVSLDTINPKVLKCQFAVRGEIVTRAQKLQQELQRNPESLPFDEILYCNIGNPHSIGQQPVTYFREVLSLCENPALLDKSETHALYRSDAIERARKILDKIPGRATGAYSHSQGIKGLRDEIAAGIAARDGFHASADNIFLTDGASPAVHMILQLLIRSEKDGILCPIPQYPLYSASIALHGGSLVPYFLDEETGWALEVDELKKQLEEARSKGISVRALVVINPGNPTGQVLTEENQKKIVEFCKNERLVLLADEVYQENIYVEDKQFHSFKKIARSLGYTDDDLPLVSFQSISKGYYGECGKRGGYMEITGFSPQVRDQIYKMASINLCSNITGQILASLVMNPPKAGDESFESFRLERDGILSSLGRRAKALEEAFNSLEGITCNKAEGAMYLFPRLHLPQKAIGAAQAAGTAPDAYYAKRLLEATGIVFVPGSGFGQVPGTWHIRSTILPQEDKIPGIVSRFKEFHDKFMDEFRDY

SEQ ID NO: 38194 - protein, 132 aa, Glycine max
  Clone ID: LIB3039-029-B7_FLI.pep
KLKKKKKNKLASKSVEGSSLSLESINHIHCRNGLSPSVLSVGNGVTNHVLQKDLEHATCLLVDETTDTLHTTPASQTPNRRLGDSLNVIAQHLTVSFRSSLSQTLAPLSTSRHFARKVQLTNNHSRKGNENE

SEQ ID NO: 38195 - protein, 80 aa, Zea mays
  Clone ID: LIB3597-069-F1_FLI.pep
STTKINISTNSYACLNFLRKHMHMPSHRERERHHKIMTKRVFNFHVDVCMTTIHMVCPCRYVCATNGCVYLSLRYILILI

SEQ ID NO: 38196 - protein, 156 aa, Glycine max
  Clone ID: LIB3049-054-C7_FLI.pep
KISFSEMASPIQQQQRSTTTSSGSEGGDPHIIDERKRKRMLSNRESARRSRMRKQKQLEDLTDEVSRLQSANKKLAENIEAKGEACVETEAANSILRAQTMELADRLRFLNSILEIAEEVEGLSVEIPEIPDPLLKPWQIPHPIQPIMATANMFLR

SEQ ID NO: 38197 - protein, 330 aa, Zea mays
  Clone ID: LIB3595-001-B4_FLI.pep
VAAAQLHDPSPAMEASATGAADPHFPIYISSDEEDGHAYFIESYSPEEVQIQQTILLSLYTSRAQTAAACSASSSYPTGASSTPKAGTSSTPKETPIDHKRKRKLKLEDDTNDSKMKRSTRNRFNCAICFEMVLAAEKFVVSHCPHAFCNSCIGRYVAGKVADNVAVIGCPDPACETGFIEMDLCRDIIPPELFDRWSVVLCEELLGDDKFYCPFKDCSALLLNDDSAKIRETECPHCHRLFCARCHVPWHDGIECKEFRKLGDDEKGENDLMLKKLADKEKWQRCPKCRMYVSRKSGCLLINCRCKQYFCYHCAAPMDRETHYCENCKH

SEQ ID NO: 38198 - protein, 256 aa, Glycine max
  Clone ID: LIB3049-049-B9_FLI.pep
HVSLSSNPIQDHTLSCRTNLGVCFFFFFIIFSEEMRKGRGGGASAAAVDVNGSILKEPRYRGVRKRPWGRFAAEIRDPLKKARVWLGTFNSAEDAARAYDAAARTLRGPKAKTNFPPLSPFCYPHPTTDPFFYTGFHDQHHHHNNNNLNNPQRPTSSGMSSTVESFSGPRPPTTTTTTTTTTATPFLTATRRYPRTPPLVPEDCHSDCDSSSSVVDDGDDNIVSSSFRPPLPFDLNALPFDDAAADDDLRRTALCL

SEQ ID NO: 38199 - protein, 330 aa, Zea mays
  Clone ID: LIB3607-041-G10_FLI.pep
QYCRQRRVWDCVQRHSVQSSGCAIKKAQRVDQTQTEQFINEMIILSQANHKNVVQLLGCCLETEVPLLVYEFITNGALFHHLHNTSVPMSWESRLSIAVETASALAYLHLAAKMPIIHRDVKSSNILLDDNFTAKVSDFGASRPIPHNQTHVTTLVQGTLGYMDPEYFQTSQLTEKSDVYSFGVVLIELLTRKKPIMDDIAEDIRSLALQFSMLFHGNKLLEIVDPVVAEEAGVRHVETVSKLALRCLRLKGEERPRMIDVAIELEALRRLMKQHFILKNESLLQESCCNEEMSIDAPSSLFLGVDGISDDEGMEIIPLTCPSKILTSYP

SEQ ID NO: 38200 - protein, 482 aa, Zea mays
  Clone ID: LIB3606-044-E2_FLI.pep
AVGKYRTARTNGERQRLLLPQRRRHPDATAARGDACDARDGPPDPAGGAGEAPGPAPRRHVHAHHVRVHGVRHAARVPRLDAARRRVHGAAAGGHVRPPARRRHRDAHVRRVRARRAGAHRGAPEPQAAAHHDRPSRGVRHRPLRRGRVRRGARGGGPAEVPLLPDQSNRAHADAPPAGARRLDPRRVPGPRRAAPPARVRAAAGHRDHEAAAGQVQPQLQMDGAPRRQVPRGNRHPRQLLRRRRAGARRGPAPAGARATAGAHHRPARARRGRWRQQGRRAVPVRGVAGPAAGQVGHLRVLRLRRHAARRGDAGARTRAGAQRAAVPVGSAEPQRGRRRQRQLLRLGEQEGPLLLPAPRVPGADQGRRPRGAVVGAAAQGAGAPVHRRLPHALRLELDAGEPGARRAHAGVAAVRRPEAERGAAVRRGRGRATSARGQGEGRHRRGGAGADDRGGQGRRGAGQGGGAAEGRGRGPSRRRRH

SEQ ID NO: 38201 - protein, 320 aa, Glycine max
  Clone ID: LIB3051-036-D11_FLI.pep
KIERGVAFPTCVSVNNTVCHFSPLASDETVLEDGDIVKIDMACHIDGFIAAVAHTHVLHEGPVTGRAADAIAAANTAAEVALRLVRPGRKNKDVTEAIQKVAAAYDCKIVEGVLSHQMKQFVIDGNKVVLSVSNPDTRVDDAEFEENEVYAIDIVASTGDGKPKLLDEKQTTIYKRAVDKSYHLKMKASRFIFSEISQKFPIMPFSARALEEKRARLGLVECVNHELLQPYPVLHEKPGDDVAHIKFTVLLMPNGSDRVTSHPLQELQPTKTIDDPEIKAWLALGTKTKKKGGGKKKKGKKGAEAEPMEATNGATPQEQD

SEQ ID NO: 38202 - protein, 285 aa, Zea mays
  Clone ID: LIB3600-033-E10_FLI.pep
PRSDYHMHTEHSRSSIYIHTTAPTEDGQDVLFANWNPSQFAKPRTTRWESDLLDHDPVLLAVGELQRDGGANHAEPHVVAVVLHLLLLAILGIQQPLLFNCLNLSYSIHAVLLLPAADEEVVEVREPAVGRRSALVVVLLLLVPAASTGQVRQQGGGGRAAVPGALVDDAPGHEAVVERDVAGAQLARALGLVARLGDRVRVAARAPGPPALARAPGRVRRLPRRRRRRFHDRVGVGVVVAGGRPQHLAAAAPDGAVLPSVPLHRPASAGIAGFVGGGLFGWRSE

SEQ ID NO: 38203 - protein, 269 aa, Zea mays
  Clone ID: LIB3062-020-E6_FLI.pep
GNENTTQMLSALFSVLPFRYAAIADQSKQSPLQPELNLPMLTRTRSMPSIRLAKYAKWFDDSSEDIRSLCGKALQMLRTHYGWESVDVTVPEIEEMRLAHYVTMGSECTASLAAKYLDSMDRSEVGWDVRIALSAYGSFSSRDYLSAQRLRCRQMYFHEKIFETADAIVTPMTGVTAYALQDDALRTGELDYINGAALVRYSIAGNFLGLPAITVPVGYDRGGLPVGLQFIGRPWSEATLLHLAYAMQEACGKKVHRKPKVHYDLLTKE

SEQ ID NO: 38204 - protein, 561 aa, Zea mays
  Clone ID: LIB3608-060-F2_FLI.pep
EKKMKEVEEVEGHGYGAATPMTPPPSSLGLPSPSVSTLTSAAAARVLARPMPASVPSLRAPSPFVRAMRTRVDPPPPQPLTAPPLLRPRPVLPPPPIPEKQRRGRPRNCDRLLPPPPGFHLAPSARAPLPARGQPSSRGLPFRGQLGGLQLHVLKIHVGEDIVSKIVQVSKITGKAVCVLSVFGAVQDCYLLHSAVILNHKGPLEIIHVFGSILTSDSPGFGCLSATLACGDCSLVGGIAVGPLIAATPVQAIVGSFHNDAFQANKKPKLVACYPSSHVTAGTGGMCCVNSKITIGSLRKHDTSSWFPIGNGSTNHPNSHVTVSNGNTHHPNSQVTIDSRSMCCLSFEDGIGSWSKDDPSSWFPIGTGSTDHSNFQVTVGTESTQYPSSQVPTGIGSAYQSDFHVTLGDRSASIPDSQATVHYGIKHQPNSCVSVGNGSTGSVNSQDIVGHGSTYNPESLPAIGDRSMHNTNFEVVVGVGSTDKGNSQDTLVDGNLNRPSSMVSVDNGSSCYPNCKDAVGDTCAPSSEGSNPEYASCTVVVEQSRLSRDRCESLASDGFLT

SEQ ID NO: 38205 - protein, 217 aa, Zea mays
  Clone ID: LIB3062-005-B8_FLI.pep
LQGGREGKMERKAVVVCAVVGFLGVLAAALGFAAEATRVKVSDVQTSGSPGECIYPRTPALALGLISAASLMLAQSIINAVAGCICCKKHPVPSDTNWSIALISFIVSWCTFIISFLLLLTGAALNDQRGEENMYFGSFCYVVKPGVFSGGAVLALASVALAIVYYVALSSSKGPPPAFAAPQNQGIAMGQPVIIPQQSSEPVFVHEDTYNRRQQVP

SEQ ID NO: 38206 - protein, 244 aa, Zea mays
  Clone ID: LIB3062-008-D8_FLI.pep
GFASGEPNSTSGGRGESRDDEGAAMGQQSLIYAFVARGTVILAEYTEFTGNFTTIASQCLMKLPASNNKFTYNCDGHTFNYLVEDGFTYCVVAVESVGQQIPIAFMDRVKEDFTKRYGGGKAATAAANSLNREFGSKLKEHMQYCVDHPEEVSKLAKVKAQVSEVKGVMMENIEKVLDRGEKIELLVDKTENLRSQAQDFRQQGTNVRRKMWLQNMKIKLIVLGIIIALILIIILSVCHGFKCH

SEQ ID NO: 38207 - protein, 441 aa, Zea mays
  Clone ID: 700084819_FLI.pep
RGRWGRKPQPLLAGAHPAPSTSPRLAMEVSRWTPAAGLLLLLLLPLAATPSRAATMARSPSSSTAVFQLQGDVYPTGHYYVTMNIGNPAKPYFLDVDTGSDLTWLQCDAPCRSCNKVPHPLYRPTANRLVPCANALCTALHSGQGSNNKCPSPKQCDYQIKYTDSASSQGVLINDSFSLPMRSSNIRPGLTFGCGYDQQVGKNGAVQAAIDGMLGLGRGSVSLVSQLKQQGITKNVVGHCLSTNGGGFLFFGDDVVPSSRVTWVPMAQRTSGNYYSPGSGTLYFDRRSLGVKPMEVVFDSGSTYTYFTAQPYQAVVSALKGGLSKSLKQVSDPTLPLCWKGQKAFKSVFDVKNEFKSMFLSFASAKNAAMEIPPENYLIVTKNGNVCLGILDGTAAKLSFNVIGDITMQDQMVIYDNEKSQLGWARGACTRSAKSILSSFP

SEQ ID NO: 38208 - protein, 281 aa, Zea mays
  Clone ID: 700076862_FLI.pep
LERAGRTKKINPKVEMNSAASNGINDTEGGRMISRAASIIVVGDEILFGTTEDNLGAALCKKLHAIGWRVSHVAVVRNEIDSVAEEVERCKSTDDMVFIFGGLGPLHSDVSLAGVAKAFGVRLAPDEEFEDYLSQLMGNNYTGDRNEMALLPEGITELLHHKTLPLPLIKCRNVIALAATNMDELDTEWDCLLGTQESGLMPSKPFVSKHLSTTLSDVQIASVLAKLCLEFSDVYIGCHRISRAGPLVLNLTGKDNQRVDAAAEKLTSSFEGQFSQLNSCK

SEQ ID NO: 38209 - protein, 87 aa, Zea mays
  Clone ID: LIB3062-031-A1_FLI.pep
CDIFHKTEKNVVKQCREEDANCDNTQTVEQQQPSDDRQTVEHAPLQKTDLGKETHVSEAKTLTADADGNLSSSQQTGEYNELLRQYY

SEQ ID NO: 38210 - protein, 355 aa, Zea mays
  Clone ID: LIB3245-113-C3_FLI.pep
PEFTDSLCAAQFRWFIQEYIYFFPALPRVCCVVPLPMQPPPPPWRRRERELVLDDEAAERRAVRDALAALRRLRRGRGEALPLLGVAQRRGGRGVAVAAAADGGPEEPAPGLGGVGGAAHDLASEGAEAEVVEEAAGAHLAEVGGRRRGLASRPLLLGPLVEEDDAGAVDDVGLHPGDVHEALDVGHPDDVVVGGAPDLDGVVVAVGLRQAQRAQGARARARARGGAVQAEHVALAAAVRVAVRPAVREEARRKQRLQPARPLPRVRRRGDLLLLLRLRVRAAAAHDPAVLEAELLERGLVVDRHRTLRSSPSSLGETGKSRTEPSRRRPCSYDPCCRGFRRRREGRKENVGRGQ

SEQ ID NO: 38211 - protein, 124 aa, Zea mays
  Clone ID: LIB3062-031-F11_FLI.pep
YHRHHHHILRPKPRTTQSARRACTLPPLLNQLADATKSRRIKALHFLALIIRRRAEPRRRDRVWLSREVEEDAGGVRVGEPCAGPARAHVERRGGPHERVLVVQHRLPGGGEVGEAEPERDGLR

SEQ ID NO: 38212 - protein, 427 aa, Glycine max
  Clone ID: 700833950_FLI.pep
VNRPPPPPPFISSSGGSGSNNSGGEFLPPPSPGISLGFSKSTFTYEELARATDGFSDANLLGQGGFGYVHRGILPNGKEVAVKQLKAGSGQGEREFQAEVEIISRVHHKHLVSLVGYCITGSQRLLVYEFVPNNTLEFHLHGKGRPTMDWPTRLRIALGSAKGLAYLHEDCHPKIIHRDIKSANILLDFKFEAKVADFGLAKFSSDVNTHVSTRVMGTFGYLAPEYASSGKLTDKSDVFSYGIMLLELITGRRPVDKNQTYMEDSLVDWARPLLTRALEEDDFDSIIDPRLQNDYDPHEMARMVASAAACIRHSAKRRPRMSQVVRALEGDVSLADLNEGIRPGHSTMYSSHESSDYDTAQYKEDMKKFRKMALGTQEYGASSEYSAATSEYGLNPSGSSSEAQSRQTTREMEMRKMKNNQGFSGSS

SEQ ID NO: 38213 - protein, 230 aa, Zea mays
  Clone ID: LIB3062-032-H8_FLI.pep
KLSRKDIKARCPACRGLCNCKPCSLGNSKGSTPKEPPKVERKILSIKISNHQFYKLLPVRLDQEQLDELELEAKIQGTKISNVCVQVAETGQSESLYCNNCKLSMSRLLRCCPTCPFKLCLSCCQKIREGNMSDNTPEDKFKNRLIQQESVHEDGSITCPSIELGGCGDAMLNLIYSSPSSQSEELSSECELDAAGNHSGVKDAQAHGSPVPESNGRLLAAAQAETVSEE

SEQ ID NO: 38214 - protein, 329 aa, Zea mays
  Clone ID: LIB3066-014-A4_FLI.pep
SRNTSASKIASKSSFGGSAPLKNGEFQKMLEMESQKTIVVNCPDVSIPVVEETKPLICGITELDDGLFKDKQLSTKEIATYGLYLCPLWFVTEYLSNAALARTSVASTTVLSSTSGLFTLFIGVLLGQDSINAAKVIAVFISMAGVVMTTMGQTWASDESEAGKSGFTQRTLLGDMFGLMSAIAYGLFTVLLKKFCGEEGEKVDVQKLFGYLGLFTLVALWWIVWPLTALGVEPKFSMPHSAKVDEVVVANSLIGSVLSDYFWALSVVWTTPLVATLGMSLTIPIAMVADMIIHGRHYSAVYILGSVQVFSGFVIANLADRFSRSLGLS

SEQ ID NO: 38215 - protein, 218 aa, Zea mays
  Clone ID: LIB3066-015-F11_FLI.pep
SPADAEPMVTPATFSLRPSAPPAPPRAGLPRARACFAPAIRTSPSVAFSYQPRRFSGIRRAVAVDSEQGFPESPEQEKKPKTYYFLVANAKFMLDEEEHFQEQLAEKLRNYAERDKEQDFWLVVEPKFLDRFPNITKRLKRPAVALVSTDGNWITFMKLRLDRVLQDQFDAESVEEALASNPVELKFEKPEKWTAPYPKYGFGWWEPFLPPKSSNGTA

SEQ ID NO: 38216 - protein, 255 aa, Zea mays
  Clone ID: LIB3066-029-F2_FLI.pep
IKSERGRKAHTSSFLLSLFVFAWPVGGAVGMRRLWRWYQQCLAAHPVRTQVVSSGILWGLGDIGAQTVTYYSARPDRRGHDSSPPDPEDKDNKDNKEFKVDWKRVGITSSFGFAFVGPVGHYWYEYLDRIIRRRFQPNTFKFVASKVATDGFLFGPLDLLLFFSYVGLGQGRSIEQVKEDVKRDFIPALVLGGTIWPAVQIANFRFVPVRYQLLYVNLFCLLDSCFLSWIEQQGDASWKRWFTSFQKIEDQKGKV

SEQ ID NO: 38217 - protein, 123 aa, Zea mays
  Clone ID: LIB3066-030-G4_FLI.pep
ICQQVAVNIAPPETQSSTSYWVWRVDSTYGRGRGGRERGWFSPLWVAFAILIGGLLLDVLISVFLGVSALPVNIIIGVLIVLGLGTALHLALECCHEWGSRRNVANIPRLENIAPTGYHPAVV

SEQ ID NO: 38218 - protein, 167 aa, Zea mays
  Clone ID: LIB3066-040-A5_FLI.pep
SSCCWSQGSDLLAHPVSDPREHGGATGEDDVAVQILPNIHVALHDGVVGGLVDAGSFHPDEGWLEEDLGAAEALGADGDDLSVGELVALLHGRAGLGGLHLLVVVQGDVGELLLHVPHDFPLSGGGEGVAALSQDLHQVVGEVATGQVKTKDGVGEGVSLVDGDGVA

SEQ ID NO: 38219 - protein, 77 aa, Zea mays
  Clone ID: LIB3066-042-B8_FLI.pep
ARQPGRGVLQGQHSDHAAPARQLDPMDFRHQRGWRRRDQGCCCPERICGGSVRWIQSHDLLLLMLRSDQNQNRRPRF

SEQ ID NO: 38220 - protein, 227 aa, Glycine max
  Clone ID: 701067648_FLI.pep
LSRLNFKEAMVDADIDLFKKIHGVTMYQYMENDPKMNQIFNKSMANLCATEMSRILEIYTGFEGISTLVDVGGGNGQNLKMIISKYPLIKGINFDLPQVIENAPPLPGIEHVGGDMFARVPQGDAIILKAVYHNWSDEKCIEFLRNCHKALSPNGKVIVVEFILPEEPEPTEESQLVSTLDNLMFITVGGRERTQKQYETLCKLSGFSNFQVACRAFSSLGVMEFYK

SEQ ID NO: 38221 - protein, 209 aa, Zea mays
  Clone ID: LIB3067-042-A5_FLI.pep
LKNYSDFNIHQLLLSYGDVGTKGALKDEHVFASAKCQALGELLPSLANDGHRVLIFSQWTTMLDILEWALEIIGVTYRRLDGGTAVTERQTIVDTFNNDLSIFACLLSTRAGGQGLNLVGADTVIIHDMDFNPQMDRQAEDRCHRIGQQKPVTIYRLVTKDSVDENIYEIARRKLVLDAAILHSGAELDNSTDVPEKTMGEILASLLLV

SEQ ID NO: 38222 - protein, 238 aa, Zea mays
  Clone ID: 700345788_FLI.pep
NTRQGSCDLLSSQSNFRQPMEEDVGNIEARANHTLRQKKPSFDLQDLLTASDSPSWPDSNLRVNFQMGDEREAIGGDWIDKVVVNNNNSASDWEGDNAALPDFFYQRYHSGMREKQYQRNNMRQKDDHEYEQQRPRFYSTNTDDSDDIDIATSDSSESDALWQLNVQSMNNSISESGSKVKKPQIKLRDGSDARTPIHSQIPSGSRKVANGSSRSVRQPLSRSDSRRLSSNGRQTGGK

SEQ ID NO: 38223 - protein, 451 aa, Zea mays
  Clone ID: LIB3060-096-G3_FLI.pep
MQSVSSLLLAGPSPSSPEAAETTPPPMQPLQCQHERLVGNMCPSLYLAVYRGRIADVTALLLEQPAVAIDCQATTTPGIKGTAIMHGQCDILELTAERNTALHVAAEQGHHELIRELYFRFSDQGLLNRLNSALDTPLHSAARAGHVRAVAVLFELARDRGVNILGCKNEAGDTALHLAARHGHGAAVEVLISAAAEPAAELNNAGVSPLYLAVISGSVQAVRAITTCKDASSLGPGAQNALHAAVFQSSEMVHLLLEWRPALADQVDSGGSSPLHFASSDGDRTIVKAILRASPPSTVYKKDSDGLSALHVAARMGHRRVVKDMLRSYPDAAELRDGNGGTFVHAAARERRSSVVSLAISNSMLRGVLDAQDRDGNTPLHLAVAVGSTGDVEALLREGKVRADVLNNDGHTALDLAARSNAGFFATINLVVALVAFGARLRPQRQDRLEQ

SEQ ID NO: 38224 - protein, 95 aa, Zea mays
  Clone ID: LIB3067-044-A5_FLI.pep
TLLTTYRGNREEQQGIQTRQLMNFVNNLLQLVRCGLLRLQSGCGCGFYSIFLSMDCSCSSPNSCNSVGLQPAEHAESNSGTHIAESKAPHAHGLD

SEQ ID NO: 38225 - protein, 242 aa, Zea mays
  Clone ID: LIB3632-017-A2_FLI.pep
SSKSSSLPPPQGENGIKRGQATVGGHCRPRKRKAGAGAGADSSGRSVLEAGLLPDGVADAAEVAALERAAGALAHGEGRRRALPPLQHLVGRHPAPAPGAAAARRVVVRAVVVRRPPAPGVLGAQDLGPVRDVDGHRRRPRSAGHHPTRLLLGRRGHRRRPRVRVDRGGQERRRRRRGRRRVAAAAADAAPDDVGLVELHAVVGAAHRVDRREQPVRRDHGEAAPAGHPLLSGPGGEKGETT

SEQ ID NO: 38226 - protein, 170 aa, Zea mays
  Clone ID: LIB3067-010-A8_FLI.pep
NNATAAADDDDSATRLVMGVELAQPTAAAAAVTTAEQAQDLIDAARYDDLEDVVALFSAGVSLDSTDSQGRTALHMASANGHLAVVEYLIQNGANVNATNMEKNTPLHWACLNGRIEVIRALISAGASVSALNSHEKTPMDEAVTTGKMDVIDAIGAAVAQAELDAVTVS

SEQ ID NO: 38227 - protein, 108 aa, Zea mays
  Clone ID: LIB3689-258-D1_FLI.pep
KHKKKYDCQKRSTSASAPGYKLHSTVGLGNTLNLVLLLDGVAVGRALDNLFHCITCYGQQLLHGVEMREEHAFRGRHWQPADEHLGALRRSTILIIVPIPSDGAFFFS

SEQ ID NO: 38228 - protein, 412 aa, Zea mays
  Clone ID: LIB3689-259-H10_FLI.pep
LGFPPMAAPTTSRRGPGGARNMDDENLTFETSPGVEVVSSFDQMGIKDDLLRGIYGYGFEKPSAIQQRAVLPIINGRDVIAQAQSGTGKTSMISLTVCQIVDTAVREVQALILSPTRELASQTERVMLAIGDHLNVQVHACIGGKSIGEDIRRLENGVHVVSGTPGRVCDMIKRRTLRTRAIKLLVLDEADEMLSRGFKDQIYDVYRYLPPELQVVLISATLPHEILEMTSKFMTEPVRILVKRDELTLEGIKQFFVAVEKEEWKFDTLCDLYDTLTITQAVIFCNTKRKVDWLTEKMRTNNFTVSAMHGDMPQQERDAIMGEFRSGATRVLITTDVWARGLDVQQVSLVINYDLPNNRELYIHRIGRSGRFGRKGVAINFVRKDDIRILRDIEQYYSTQIDEMPMNVADLI

SEQ ID NO: 38229 - protein, 300 aa, Zea mays
  Clone ID: LIB3069-036-F4_FLI.pep
EMGCAASRLEDEEAVKMCRDRRDLIKQALEQRNRFASSHIAYIESLKRVSVALQRFVAGDDHHELIFDTFISPIKQQKPEMLGLPYGSYEKRTIHVSRYLRSGPNPSVSIEEHPRPVETVRVESNYPMDNDSGMVDRFLPTPSSPVRSSSYYPPPYNRPSYPPPLDQETVRNSSYCMPYDRPSYAPPSTQETMRTSYYASYDRPSYPPPSPQEPLRNSYHVPYDTSYPPPSPQEQEASPWDFFWNPFSSLDSFTYPRPRSSYDNVVTDDELARLQRVREEEGIPELEEEDDECQEHVQMD

SEQ ID NO: 38230 - protein, 73 aa, Zea mays
  Clone ID: LIB3067-049-A10_FLI.pep
PSHPNPLLTKHGYTKWLQKMFLSTPTSANQPMHTHKPPWLVTTNKDLSICAALDKWPSHLFSYDAMNRYTREK

SEQ ID NO: 38231 - protein, 162 aa, Zea mays
  Clone ID: LIB3069-037-A10_FLI.pep
LACINRCLKLHKPSTSSSKVQLLYIVYSEIHFREHQMNILESSTRSGCQVVLNEIEHQRALMKGLYDLIVPTLDPCSRQEKLVQQIFQDISSSSGKVLSFLEPGDNSKKQANLIKYRRKRGKNSGVESHMLGEEAKEIGNKRRCVAKEVYIYMFTCVSFTWA

SEQ ID NO: 38232 - protein, 199 aa, Zea mays
  Clone ID: LIB3332-005-D1_FLI.pep
EAGVVLEEKNWPPFFPVIHNDIGNEIPVHLQSTLYVAFASLLGLVLCLFWNIICVTAAWAKGSGPKIWFLAIIYFILGCPGAYYLWYRPLYRAMRNESALKFGWFFLFYLVHIAFCVYAAVSPSILFVGKSLTGIFPAISLIGDSVIVGIFYFIGFALFCLESLLSMWVIQRVYLYFRGSGKEAEMRREAARSAARAAF

SEQ ID NO: 38233 - protein, 141 aa, Glycine max
  Clone ID: LIB3074-030-C2_FLI.pep
LTPTHTTLSPPSVVRRRQKGEKGIGDGTVSYGMDDGDDIYMRSWTGTIIGPHNTVHEGRIYQLKLFCDKDYPEKPPSVRFHSRINMTCVNHETGVVESKKFGLLANWQRRFTMEDILTQLKKEMAASHNRKLVQPPEGTHY

SEQ ID NO: 38234 - protein, 160 aa, Zea mays
  Clone ID: LIB3587-286-C12_FLI.pep
GQCHREQDHQRQPAARRGGCYAVTAIKSKSGSRMRKAGEIGRNTWTPSGTAHSQSRGAVSSQTAAASKPQQQQPPPPRPPRQPRRPPSPPSRPRARPPSPGETQVTHISSTNTGRRWSGGRIERTTVPWGTAISGETRAWRRGREEKAGHGGREEARSRG

SEQ ID NO: 38235 - protein, 155 aa, Zea mays
  Clone ID: LIB3075-017-D12_FLI.pep
NVLIVPICCSTGKLLLYLLFMFLTFTYFTFYGMVAVGLTPTQQVAAVVSSAFYSLWNLLSGFLIPQSRIPGWWIWFYYICPVAWTLRGIITSQLGDVQARIVGPGFDGTVQEFLEESLGFQQGMAGVTVAVLIGFSLFFFAVYATSIKVLNFQRR

SEQ ID NO: 38236 - protein, 215 aa, Zea mays
  Clone ID: LIB3594-052-E5_FLI.pep
ASRPSLFATGAGLDVVAVGAAVLAMALVQLHDGLHLVVRDGDADVVGEELPEHERVHQRGDEQRRHREHGDHGQRHAERLGEGVVHLGGVADGGDGGAGHRERVRPPRQREAEPPEEVDPHRQRRVQEHGDEVGHPGPVAELARDLGPRHARNAGRRHEEEEHRVELLRQRLVGGEPLVQRDEQHAVVRQPHGEEEDGALPEPHVGAQQRAHEVA

SEQ ID NO: 38237 - protein, 179 aa, Zea mays
  Clone ID: LIB3076-052-A10_FLI.pep
PLQTRGRRATDKPTPSPLLCLLSCPPAPMSPPLEPHDYIGLSASRSKAPAEEAASGAGPMYVKVSMDGAPYLRKVDIKMYSSYEDLSLALEKMFSCFIAGQSGLHKSSSKDRLTNGSKVDALKDQEYVLTYEDKDADWMLVGDLPWDYFTSICRKLKIMRGSDAVGIAPRTVEQTGQNK

SEQ ID NO: 38238 - protein, 143 aa, Zea mays
  Clone ID: LIB3912-027-C2_FLI.pep
HGQKQPRTARVQGVGEMRIYQSSSRVALWKHSTVHTRMKKDVNSMNMAPVSIKPACLRIAGIARLPMADAPVKNFAALIHMRAANMGHQLLYKAHASICSRILVENMNASAASTSTVIAIFAFPLQRERWEGEGEGGLKTFFF

SEQ ID NO: 38239 - protein, 103 aa, Zea mays
  Clone ID: LIB3078-012-A11_FLI.pep
YYSTIGKAYKACFERRSGLPLRNEERQHGQHEGLVGESRRPRVGGVLLLELLCQPLNSEAAFNEVVIFDCFALAPSLVKFRHKQIKDSWRHRISETEKSIAQF

SEQ ID NO: 38240 - protein, 232 aa, Zea mays
  Clone ID: LIB3596-043-H2_FLI.pep
EKGGLLVPVWFCFVRALVPGLLNKLQPLPSEFRSSGLPVPPDLGFEEAPSRASGMEHCYLRQPISRAEAVPERRSRLWQMDALPLPPRAEVLCPQPRRAARIPFAVSVNKAIPSALPPYRPASACDILDDLILSKNDFSDGADSSSGQAGFLCGSPPVRANNPVVHDPQFGKRALPSMSPLGSSSHVKLKVEAGSLLGSCFGAPKVSHEEAASAEVVSKRWPKVPFHGASAF

SEQ ID NO: 38241 - protein, 308 aa, Zea mays
  Clone ID: LIB3078-020-A4_FLI.pep
CDPDKPVVLERMEFPDPVIKVAIEPKTKADADKMATGLIKLAQEDPSFHFSRDEETNQTVIEGMGELHLDIIVDRLKREFKVEANVGAPQVNYRESISKVAEIQYVHKKQSGGSGQFADIIVRFEPLEAGSGYEFKSEIKGGAVPKEYVPGVMKGLEESLPNGVLAGYPVVDFRAVLVDGSYHDVDSSVLAFQIAARGAFREGMRKAGPRLLEPIMKVEVITPEEHLGDVIGDLNSRRGQVNSFGDKPGGLKVVDSFVPLAEMFQYVSTLRGMTKGRASYTMQLAKFDVVPQHIQNQISVAKTEEAAA

SEQ ID NO: 38242 - protein, 468 aa, Glycine max
  Clone ID: 700796005_FLI.pep
GIRERRIRERKQEEQESGMEGLAMLKQLIAQLQHLFDTYHSQSSLIFQQQHPRWTTSLDIEDNSVDDFCGLVMTAGKSGSFRMSEPGKPPPTKKSRRDRSRGKSSGRSCTTEVMEQEIWKDFPEDLFEAVIARLPISTFFRFRSVCRQWNSMLNSQSFSQHCTQVTQENPWFYTITHENVNSGAMYDPSLKKWHHPTISTPPTKLIVLPVASSGGLVCFLDIGHRNFFVCNPLTQSFKELPARSVKVWSRVAVGMMANGNFAGSGYKIVWVGCDGEYEVYDSVRNSWSRPGNMPVGMKLPLSLNFRSQAVSIGSTLYFMRSDPDGIVSYDMATGVWKQYIIPAPLHLTDHTLAECDGQVMLVGLLTKNAATCVCIWELQKMTLLWKEVDRMPNIWCLDFYGKHVRMTCLGNKGLLMLSLRSKQMNRLVTYNIAKKEWLKVPGCVVPRGRKRQWIACGTAFHPCLTAVV

SEQ ID NO: 38243 - protein, 191 aa, Zea mays
  Clone ID: LIB3078-015-F3_FLI.pep
YYDGNSLQAAGGANTGVAWCLQDELLAVNVKRLRRGQVRLLHAAEVGDGADGCADGPLQIAAPAAVLHDGPHGAEQVAVGDPARLALQRPDEAVRHGPDDRRVGVGHHGEVAFALAVSADEHGVASAGALPGARRRALVLPLPEPVPGHAAQVGEVQDRGAVAGVHHGVQPGAVHQRAHDDLVDLVVQDGP

SEQ ID NO: 38244 - protein, 178 aa, Zea mays
  Clone ID: LIB3078-024-D11_FLI.pep
QHVRVHAMEAVMGCWELEQSLQSLTGASPGEGTGATMSDDEDNQVDSEANMFDGNDGSDGMGFGPLMLTEGERSLVERVRQELKNELKQGYKEKLVDIREEIMRKRRAGKLPGDTASVLKAWWQAHSKWPYPTEDDKARLVQETGLQLKQINNWFINQRKRNWHSNPTSSGEKTKKKR

SEQ ID NO: 38245 - protein, 784 aa, Glycine max
  Clone ID: 701212811_FLI.pep
SSISQKPSRMTESMPAVEPSPEPPASDIVFDDFSTDFSAFPIPSMDSLFNTTDGLPFPSDLEFGMDFNNNNGEFEITFDDLDDIYIPSDAEDFLLPDACNPNYASVSPPIDDSSAKNSDSDASAVSGDGVSRFFNSQVSESDSADNVRVPSVPSPEAEFCEREESSNGPVSSQGSGNGGSGVYEAMHSPSPDSGPYERDITSFHAHAATNNGVKMEEVPAFDLKRKKGSCEGSATKHRRFSSSVENNNNNKTEKQFQSDLNGIEDEDEKRKARLMRNRESAQLSRQRKKHYVEELEEKVRSLNSIIADMSSKMSYMVAEIATLRQQVGAAAGVMCPPPPPPAPGMYPHHPPMAPMPYPWMPCAPYVVKPQGSQVPLVPIPRLKPQQPASAPKSKKSESKKSEGKTKKVASISLLGLFFFIMLFGGLVPVVDFRFGGLVDNVPGTGSSNYVSDRVYGHGGGKVWSLNGPRNGSGRDGDVGFSNGRFSVSDRVKNYEKRGRNLREERHDRKGPDDSSRQGNASEPLVASLYVPRNDKMVKIDGNLIIHSIMASEKAMASQTAEAKKDKRETGLAIPKDLDSALAIPGVGRSRDQHPHVYRVSPEQRKALGSGSTKALKDHMKSSATDGKMQQWFREGLAGPMLSSGMCTEVFQFDASPSPGAIVPATSVANVSTENHQNATSVKKTRNRRTLHELPEPLNGSSLNITEEQVKNLQKDHFHGNKSSMVVSVLVDPREAGDGDVDVDGMMRPKSLSRIFVVVLIDSVKYVTYSCGLPRASPHLVTGYV

SEQ ID NO: 38246 - protein, 215 aa, Zea mays
  Clone ID: LIB3079-041-B8_FLI.pep
LQWPIEEVEALREKSVTLKNRLIKAGHHVEVTGIQTAQADVEVSFEVSPAALAGAETLDPALAYDAEKLCGVKRADVRGGVGPFGLWVLASANRKERTAVFFRVFKPAAGSDKPVVLMCTDPTKSSLNPNLYRPTFAGFVDTDISNGKISLRSLIDRSVVESFGAGGKTCILSRVYPSLAIGKDARLYVFNNGRAHVKVSRLTAWEMKKPVMNGA

SEQ ID NO: 38247 - protein, 256 aa, Zea mays
  Clone ID: LIB3079-016-H6_FLI.pep
SSPSPSPPMAATATSFATLAVARSAGQRFLLASKAAPSPLLSLRGARLPSQGVSLSGGLAASPSHSRARFATSASAEPKEAELQSKITNKVYFDISIGNPVGKNVGRIVIGLYGDDVPQTTENFRALCTGEKGFGYKGSSFHRVISDFMIQGGDFDKGNGTGGKSIYGRTFKDENFKLVHTGPGVVSMANAGPNTNGSQFFICTVKTPWLDGRHVVFGQVLEGMDVVSLIESQETDRGDRPKKKVVISECGELPVV

SEQ ID NO: 38248 - protein, 133 aa, Zea mays
  Clone ID: LIB3079-021-D7_FLI.pep
QEYWEEQPSSFLSEYAHFSGNSFTESTPPVSAASPDIFQLSKISPAQSPSMGSGEQALEPKHESAASPRPENLRPDALFSGNTADPSIFNNAIAMLLGNGIDAEYKPVLGDGIVLDSSSWNNMQHAFQMAGFK

SEQ ID NO: 38249 - protein, 136 aa, Zea mays
  Clone ID: LIB3088-047-F7_FLI.pep
LLKHTTQSDPGHQPAAEANGSKQDDTAGSFRATSERRQQPEHGDSRSCDEGPGDERQHHRERVPAARQLRVHPAEVDVPLEQDGHARGRRRGSKRQNCSDPVPNNKKAYKHRVVKISFSLQRVDIKTSKAKTPKKL

SEQ ID NO: 38250 - protein, 55 aa, Zea mays
  Clone ID: LIB3088-049-F5_FLI.pep
DKIKPTSMKKEGSEYSTEFLHSGYENSPHDKYSVHRRAKYPSHSNITDFLTDDWN

SEQ ID NO: 38251 - protein, 120 aa, Glycine max
  Clone ID: LIB3094-078-E1_FLI.pep
SWHSLPFPCFKQWLWLLMSKEATCMTTRANMEVGVSRDTNAHHNARGDVARPNTTSPACFSVRSAAGNACVCPRGIMVIKLCALATTTGRPRKEDPSALELQLHQIVAFHYIFIISLGPI

SEQ ID NO: 38252 - protein, 615 aa, Zea mays
  Clone ID: LIB3150-054-G3_FLI.pep
FAKRFETRTASRYESDELDRSTSPIARQSAPATVAMTEEAEAKAKGNAAFAAGRFEEAVQHFSDAIALAPDNHVLYSNRSAAYASLWRYAEALDDAKRTVALKPDWAKGYSRLGAAHLGLGDAPKAVEAYEKGLALEPSNEALKSGLAQARQSASAPRRPVGSGADAVGKMFQGPELWSKVAADPTTRGYLDQPDFVQMLREVQRNPGRLNSYLSDQRMVQVLTLMLNIKFQNQSSGAPDPAAAQSNPPPPKQQPEAKAREPEPDPEPEPMEVTEEDKEQKERKASAQKEKEAGNAAYKRKDFDTAIQHYTEAMELDDEDISYITNRAAVYLEMGKYDECIKDCDKAVERGRELHADFKMISRALTRKGTALAKLAKSSQDYDAAIEIFQKALTEHRNPDTLKKLNDAERAKKELEQQEYYDPRIADEEREKGNEFFKQQKYPEAVKHYTEALRRNPKDPRVYSNRAACYTKLGALPEGLKDAEKCIELDPTFSKGYTRKGAIQFFMKEYDKALETYQAGLKHDPKNQELLDGVRRCVEQINKASRGELSEEELKERQNKAMQDPEIQNILTDPIMQQVLTDLQENPRAAQAHLKNPGVMQKIQKLVSAGIVQMK

SEQ ID NO: 38253 - protein, 490 aa, Glycine max
  Clone ID: LIB3106-102-C2_FLI.pep
FHMKMISSASNENKTVVDMDDHLAGLGYKVRSSELCQVAANMERLENVISSTDLSQLASDTTLYDPSNIGLGSWVDTLLSEFDQTASLPLQYDFATDPNHNKQLALVTTVEEDSGIRLVHMLMTCADSVQRGDFSFAGSLIENMQGLLAHVNTNCGIGKVAGYFIDALRRRISNTLPTSSSTYENDVLYHNYYEACPYLKFAHFTANQAILEAFNGHDCVHVIDFNLMQGLQWPALIQALALRPGGPPLLRLTGVGPPSAENRDNLREIGLRLAELARSVNVRFAFRGVAAWRLEDVKPWMLQVSLNEAVAVNSIMQLHRVTAVDAAVEEVLSWIRSLNPKIVTVVEQEANHNGEGFLERFTEALHYYSTVFDSLDACPVEPDKAALAEMYLQREICNVVCCEGPARLERHEPLAKWRDRLGKAGFRPLHLGFNAYKQASMLLTLFSAEGFCVQENQGSLTLGWHSRPLIAASAWQAAPLRDDETLRFGH

SEQ ID NO: 38254 - protein, 243 aa, Glycine max
  Clone ID: LIB3107-057-C11_FLI.pep
WKATGTDKIITTEGRKVGIKKALVFYIGKAPKGSKTNWIMHEYRLLDSSRKHNLGTAKLDDWVLCRIYKKNSSSQKVEANFLAMECSNGSSPSSSSHVDDMLGSLPEINDRCFTLPRVNSLRTMHQQDEKFGSPNMGSGFFSDWVNSTDLDSISEFESGCQTQRMVNYDCNDFFVPSLPPLGHVDYMVDAPLEEEVQSGVRTRRVDGPGHFQPNPDTRLLPGSGDPFGFGFIMGQQVGFGVRE

SEQ ID NO: 38255 - protein, 246 aa, Zea mays
  Clone ID: 700102274_FLI.pep
PVMMIHSIAWSSNGGEAWWCGVVCSSVGPFPMNLIQYHNKSSDEHVVNVREHSDAKRVPSKQHIGDGKLAVHLGDHAAGVAEVEGARPLEVAALDLEVAHLLRGVGGQEDVHLRLQLEYRGFLRGEEQVALVRAVPSEHLPSVVHAEYLLQHGEDGLAGGVEEDAAVADTEDGALDLQHGGAVGVGDGEVAVGEADGLLGHRQGHHVRRTELRGHHRHGGRRRRRTSVVRRRHRISQTDRPPPPWH

SEQ ID NO: 38256 - protein, 81 aa, Glycine max
  Clone ID: LIB3107-060-H11_FLI.pep
TTTIFWQKCTRSKKRLTLKTYSTSNYILLSFFLFLFQFQLVCPLSTPKPYKTPAYFSVEPLKNVSLNFLNVQEVSKLSDPA

SEQ ID NO: 38257 - protein, 153 aa, Glycine max
  Clone ID: LIB3107-056-E11_FLI.pep
RKLERVKPITQYQRVVILVISSARLAIEGSLLFKPLVAIEQATKKPKLMVTDLSCHQELPNPTMKQQPRMHPCPICGLEFAIGQALGGHMRKHRTAINDGLLCGKPSSSLSILKESSKDGDQKLNLRLDLNLTPLEEDDLKLNLRTPVLNCFI

SEQ ID NO: 38258 - protein, 362 aa, Glycine max
  Clone ID: LIB3109-022-B12_FLI.pep
AYTCKKNSQQPNQQAGIGTNNPQIPPPLQPSPPSSVTTGIGGSDYIQGSIRPGSMADRARMAKIHQPDAALKCPRCESTNTKFCYYNNYSLSQPRHFCKTCRRYWTRGGALRSVPVGGGCRRNKRNKGNSARSKSPMKPSASANSSSSGCTPDHVMMTHLPTPITPTQFPFLASLHHYNGDYVSGGIGSHFGAITTPLVARNNGNNTSDVEFQIGTSSASSLGNISGGAMLSNNGLGDQQWRFNNLQQVQHQFPFLSTNFEPQIGVFQFGGGENNNAEPPSYAKGHGGRFNNIRSKMDSINSSVSGIVPQLNTIKLEENQGLSLSKNLLMTSSGNGVLWNNGSSGNAWSEVPSFIPSPNHLL

SEQ ID NO: 38259 - protein, 178 aa, Zea mays
  Clone ID: LIB3115-025-G8_FLI.pep
IDADKSPEPHKTPKQLGATQVDPVPERCPQASRGTQCKSQGGSTRSCKKVHKQGMALGRSVDLTKFNGYTELVAELDEMFDFNGELKGCSKEWMVVYTDYEGDMMLVGDDPWNEFCSMVHKIFVYTREEVQRMNPGALNSRPEDSGLANSTERGSASTAAAREAPGYQSASSLNSDNC

SEQ ID NO: 38260 - protein, 104 aa, Zea mays
  Clone ID: LIB3115-030-C5_FLI.pep
HKRKLKEEYGIEPWTFVQRLGDAVFIPAGCPHQVRNLKSCTKIALDFVSPENIQQCLSLTEDFRRLPVGHRAKEDKLEVKKMIVYAVEHALAILKEPCTPRESA

SEQ ID NO: 38261 - protein, 115 aa, Zea mays
  Clone ID: LIB3115-030-C7_FLI.pep
CKVACWLSVRPVHKRPARRAQVLCRVPILILDLKVGMMLHEQFCDVFSFTNSSVVECRLPFVVLGIQVRICFCKNLNSTKMATVNSPVQRSSTFSISHVDFHTRCQKLHYILSCS

SEQ ID NO: 38262 - protein, 222 aa, Zea mays
  Clone ID: LIB3116-018-F6_FLI.pep
GLQLVYYHSGGLRINPNLYNNGKVCLSLLGTWDGRGCEKWNPAQSTMLQVLVSIQALILNDKPYYNEPGYESYANTPNGERLALDYNDNTFLHSCKTMLYSLRRPPEHFADLVAGHFRVHGHTILAACKHYMAGNDIGSVVPEEEEEEEEEESSEHKSGDAGASGSAPELGVIKAIPTKRRSSFNPSLKVLYEDLLMEFNVKGADTRKFIDEKLKKNKPAAA

SEQ ID NO: 38263 - protein, 220 aa, Zea mays
  Clone ID: LIB3116-025-C6_FLI.pep
SISHSLFFFSSFFTAFDRSYKTQFENKLLAKILYTRFIHLSPFWVQKETCLCTTLESSSHTAPPSFLVTYDPCVLLDPRSQVARWRVCSLCLCMDQRSPGLRGRALHYPELLARRDEHIPGHVSGEHEVAVLVLVSDGVLVVVAAALCRRGEGVGEERVQSLPELPVALVHPEVHLPEVGRAVHAHLHVQASLLLLLLGLLGRLRRCRLEGVLPVRPHRR

SEQ ID NO: 38264 - protein, 250 aa, Zea mays
  Clone ID: LIB3117-005-E8_FLI.pep
KVESSSNNRATMATKIFSLLMLLALSACVANATIFPQCSQAPIASLLPPYLPSMIASVCENPALQPYRLQQAIAASNIPLSPLFQQSPALSLVQSLVQTIRAQQLQQLVLPVINQVALANLSPYSQQQQFLPFNQLSTLNRAAYLQQQLLPFSQLATAYSQQQQLLPFNQLAALNPAAYLQQQILLPFSQLAAASRASFLTQQQLLPFYQQFAANPATLLQLQQLLPFVQLALTNPAASYQQHIIGGALF

SEQ ID NO: 38265 - protein, 198 aa, Zea mays
  Clone ID: 700083767_FLI.pep
AVGVLNYIQRRRKRTTDLFCETLCTNTHNPLPSPATSSHMPWMILFSDPLYHHRLQTPTTSIYNTPYLLGCCTPELEQKRVRHTLGSVASLLLLSKLARRAQPRHRALADDTGSVLPGAQGTWEQLLELVEECAPLFRAHVRQLHETGAGREQLVGAPAPGLMLAGFAGVVSSACRFTLPKARTVGLGFPNEAETLHG

SEQ ID NO: 38266 - protein, 190 aa, Zea mays
  Clone ID: LIB3136-018-G10_FLI.pep
EIGRLSGALRGHQPPRLRSGFLLERQGDGVWGVPLSTRGREGRRLMEIRNALEMIQRGENVRLESIFYGGLDIHDRHRDMRLDIDNMSYEELLALEERIGNVSTGLSEEAVIKLLKQRKFSSWRLKASLDPEPCCICQVFSVLHSFSKLCAFFSSVGHDVSFTYINHIELLKNVHFVVSNYVHWAFSWFT

SEQ ID NO: 38267 - protein, 248 aa, Zea mays
  Clone ID: LIB3136-018-F9_FLI.pep
PVALERPPDVGHSAGALLSRDEIERRSPSRRDGIDSALEARLRASYCAYLHCLGNRLGLPQTTIATAVVFCHRFFFHRSHACHDRFLVATAALFLAAKAEETTCLLNTVLRASCEVSQNQEFNLLPYMLCGDWFEQYRESVIQAEQMILTTLDFELEVAHPYASLSSALGKLGLTHTVLFNVAWNLINEGLRSSLWLQFKPHHIAAGAAFLAAKFLHYDITFHPNFWHEFKTSPYIVQDVVQQLKELL

SEQ ID NO: 38268 - protein, 322 aa, Zea mays
  Clone ID: LIB3136-049-D5_FLI.pep
GEAGCGGAFAGEKSPSSTASSSQEAESRRKVSKKHSQGKKKAKVDWTPELHRRFVQAVEELGIDKAVPSRILEIMGIDSLTRHNIASHLQKYRSHRKHMLAREVEAATWTTHRRPMYAAPSGAVKRPDSNAWTVPTIGFPPPAGTTPRPVQHFGRPLHVWGHPSPTPAVESPRVPMWPRHLAPRAPPPPPWAPPPPADPAFWHHAYMRGPAAHMPDQVAVTPCVAVPMAAARFPAPHVRGSLPWPPPMYRPLVPPALAGKSQQDALFQLQIQPSSESIDAAIGDVLTKPWLPLPLGLKPPSVDSVMGELQRQGVANVPQACG

SEQ ID NO: 38269 - protein, 67 aa, Glycine max
  Clone ID: LIB3138-059-D3_FLI.pep
QQWLYPSNLNIQMPNLPASKLIKMLHPIPVTIIKPLQALKLYYIQTSSPKEERVNTACTIIAYKNVI

SEQ ID NO: 38270 - protein, 198 aa, Glycine max
  Clone ID: LIB3138-130-B4_FLI.pep
ISREMIELQGGEIGVRSRPGKGATFAFYIAARTADAPPPSVQQSLSSPALMSGRRPSENTRARYSILVVEDNLVNQKILRMQLQKLGHEVHVVSHGREALDFLETTSCWEGGTASHTHVSIILMDIEMPVMNGLECTRRIREAESEGRVKRHLPIIAVSANAREGQVRYAMECGVDDAISKPFRVADLMPIIERLALV

SEQ ID NO: 38271 - protein, 320 aa, Glycine max
  Clone ID: LIB3139-072-A12_FLI.pep
LRSVHIFVVWMDPSSGQHQQMSSQSLENMLACSKAHQERKPTPQPEQALKCPRCDSTNTKFCYYNNYSLSQPRYFCKSCRRYWTKGGTLRNVPVGGGCRKNKRSSSSSSTSKRVQDQAFTPNVNPLTGLPSLMSYDSNDLTLALARLQKQSCGQLGYDDHDLSMLGNHHTNTPCGDNILGMHHHSSSSSTNPGFLDALRSGFLGTQSNNNMHQNMYYGYGNGDMGEVDNGGGVGVSSSGEMMMMMMPYNNDQEMSIASTQAVTVTTMKQEICNGREQKVLWGFPWQLNGDTNMGELDSGRASNWNGINSSWHGLLNSPLM

SEQ ID NO: 38272 - protein, 404 aa, Glycine max
  Clone ID: LIB3139-043-E6_FLI.pep
SSLHWGSLRFLSPFFSFPGLCQFSMEVPEMEGKTESHMTSAAAFVEGGVQEACDDACSICLEDFCKSDPATVTNCKHEFHLQCILEWCQRSSQCPMCWQPISLRDATSQELLEAVELERSLRDTPSRNAAIFHHPTLGDFELQHLPMGVNEADIEERIIQHLTAAAAMRRSHHLSRREGHRTRPSAHGRPHFLVYSTQPSAPPSAAGGGSEPAAIPVGSPSTPLTFDGNEQSSLQQIPHVQTQSSSLTSASTVSTTNLQGVHSDDRSFASHSFPASQDRAQPSEQSFSDSLRSRFNAVSMRYKDSISKGTRGWKERLFSPNSSMSELGSEVRRELNAKIASVSRLMERLETRENNSAAGTSLSNHLVNRSIAETSNQSNVEARGENSLHGNNTPTTFSASSDSK

SEQ ID NO: 38273 - protein, 301 aa, Glycine max
  Clone ID: LIB3139-059-A2_FLI.pep
ISHKAPFFCICSIQQQTPRTFPSDALQRQLQQLFHLHDSGLDQAFIDALPVFQYKEIVGLKEPFDCAVCLCEFSEKDKLRLLPMCSHAFHISCIDTWLLSNSTCPLCRGTLLTQGFSVENPIFDFDDLMEDEMCPWNGENGFNTRQKTVVVEESVEKEKGVFPVRLGKFKKLSSVEGGGESEVGETSSSNLDARRCFSMGSYQYVVGNSDLRVALNHDEISKGQVTRLNKGMELDDGKLSVEDVEGKKISSVSKGDSFSVSKIWLWPKKGKLPTSLDGQIGMPMPSFLNTDFPRMRDTEGA

SEQ ID NO: 38274 - protein, 133 aa, Glycine max
  Clone ID: LIB3139-094-C12_FLI.pep
LLSEKLEDTYSLTSLAITSLIISQNPSAALSGEARWSGTASSVKVALAIPGGARVNAVNGSSSLSASLTLTLIPLALRLSVEFQWFLTALSVRPGNNRAMVAHLLPYRAWAAMMDVIAREVREYVSSNFSDNN

SEQ ID NO: 38275 - protein, 357 aa, Zea mays
  Clone ID: LIB3150-028-B10_FLI.pep
GKQRRDNKAICCLFLRSWRVLGMADASSRTDTSTVLDMDDKNQRLENGQSGAMALASNSSDRSDRSDKPMDQKVLRRLAQNREAARKSRLRKKAYVQQLESSKLKLASLEQELQKARQQGIFISSSGDQTHAMSGNGAMTFDLEYSRWQEEENKQINELRTAVNAHASESDLRLIVDGIMAHYDEIFRLKGIAAKADVFHILSGMWKTPAERCFLWLGGFRSSELLKLLVNQLEPLTEQQLMGLSNLQQSSQQAEDALSQGMEALQQSLAETLAGSLGPSGSSGNVANYMGQMAMAMGKLGTLENFLRQADNLRQQTLHQMQRILTIRQAARALLAIHDYFSRLRALSSLWLARPRE

SEQ ID NO: 38276 - protein, 208 aa, Zea mays
  Clone ID: LIB3150-057-D4_FLI.pep
LANKAAALSPMDAAPPSPTPQVYLGEQYVNSSTLSDVTFLVEGKRFYAHRIALLASSDAFRAMFDGGYREKDARDIEIPNIRWDVFELMMRFIYTGSVQVTSEIAQDLLRAGDQYLLEGLKRLCEYTIAKDVNLDNVSDMYDLSEAFHAVSLRHTCILYILEHFNKICTRAGSAQLIQRVIPELRNFLTKALSSSRSPSTTDDRNLQT

SEQ ID NO: 38277 - protein, 226 aa, Zea mays
  Clone ID: LIB3150-116-B4_FLI.pep
STQRPSTRRAPWDLPAGRVPALVLCRVAAVRFMADPDTDEVFAKIRLAPVRPNEPGYADDAIGAAAASGAQEDKPASFAKTLTQSDANNGGGFSVPRYCAETIFPRLDYSADPPVQTVLAKDVHGVVWKFRHIYRGTPRRHLLTTGWSTFVNQKKLVAGDSIVFMRTENGDLCVGIRRAKKGGIGGPEFMHHHHQQPPPPQGGGYAGFSMFLRGEEDGGKMMAAAA

SEQ ID NO: 38278 - protein, 120 aa, Zea mays
  Clone ID: LIB3150-117-G4_FLI.pep
KTGAERKDAAENTMVAYKAAQDIALAELAPTHPIRLGLALNFSVFYYEILNSPDRACSLAKQAFDEAISELDTLSEESYKDSTLIMQLLRDNLTLWTSDISEDPAEEIREAPKRDSSEGQ

SEQ ID NO: 38279 - protein, 424 aa, Zea mays
  Clone ID: LIB3150-041-B9_FLI.pep
AAAATTSTATPPPPSRSPLPAPSTSSRIEAMSSDDEVREEKELDLSSNDVVTKYKAAAEILNNALKIVVSQCKPKVKIVDLCEKGDSFIREQTGNVYKNAKRKIERGIAFPTCVSVNDTVCHFSPLATDDAVLEENDMVKIDMGCHIDGFIAVVAHTHVITNGPVTGRAGDVLAAANTAAEVAMRLVRPGKKNKDVTEAIQKVAAAYDCKIVEGVLSHQLKQFVIDGNKVVLSVSNADTKVDDAEFEENEVYAIDIVTSTGEGKPKLLDEKQTTIYKRAVDKNYHLKMKASRFIFSEISQKFPIMPFTARALEEKRARLGLVECMNHELLQPYPVLHEKPGDLVAHIKFTVLLMPNGSDKITSHPLQELKPTKSIEDNAEIKAWLALGTKSKKKGGGKKKKGKKGDAAEADPMEEATNGATSQE

SEQ ID NO: 38280 - protein, 51 aa, Zea mays
  Clone ID: LIB3156-011-A9_FLI.pep
EPPFLLLTLHRLWGFHVPVRKIILPVFLYVYTCILSWFLFYQITQGDIDYM

SEQ ID NO: 38281 - protein, 101 aa, Zea mays
  Clone ID: LIB3156-001-D9_FLI.pep
NRSKCRRWFSGLGFFFPRTNRRTAEPGLPGYGTSGRRTFRCSGGSRASPGCSRTSRTRTRRSGSSASRSRASRCTSHKFSAGHPVRSCPSSSDLPCICQRS

SEQ ID NO: 38282 - protein, 54 aa, Zea mays
  Clone ID: LIB3158-005-A5_FLI.pep
DMSNLEIDSCVLTNWIHNRQKAHKFGATYSYSITYIGLFDFTSKIRYYNSKQDI

SEQ ID NO: 38283 - protein, 115 aa, Arabidopsis thaliana
  Clone ID: LIB3168-075-A12_FLI.pep
LSEHQLVRRLRTINRGTSKIDSTNTLSDYHLLNRRRSHSLKPRFIRIIIKVSFIISSVDSSGKTIFYQETQRSISDGIHNKKSDSETCTLSLGDKREENSVKKENDLQLLASLAL

SEQ ID NO: 38284 - protein, 450 aa, Arabidopsis thaliana
  Clone ID: LIB3168-076-A1_FLI.pep
MGLKRPYDAEEMQKCNAKHARQLSYKNHNQFDEAIPYHHASMEKKTNVLVEDLIGLCENPTWTNDANHVDKGFETTGLCQEDSQSGVTTQSDLSHQSSGSDFTWKPVEDVYTCLMNQPPRNQVLVGSNHQADIPEFVKEEILDQSEARTKEDLEGKLMGKCVIPMSDSDLCGTGQGRKECLCLDKGSIRCVRRHIIEARESLVETIGYERFMELGLCEMGEEVASLWTEEEEDLFHKVVYSNPFSAGCDFWKQLKGTFPSRTMKEFVSYYFNVFILRRRGIQNRFKALDVDSDDDEWQVEYNIFNSTKSLDEEDNNGNRSSYEDNEEEEETSSNDDDEEEEEEDDSSSNDAHCVDTDKASRDGFGEEVNVEDDSCMSFELQDSNLIFSHNPIKNRECHRSGEDSYSFDDQRFTSDCWNKNNDLLPTSNIIEEIFGQDDWEDKDDNNLKEK

SEQ ID NO: 38285 - protein, 460 aa, Arabidopsis thaliana
  Clone ID: LIB3168-076-H9_FLI.pep
SSDPSPQNFEPLYQISNNPSPPQQQQQHQQQQQQQQHKPPPPPIQQQERENSSTDAPPQPETVTATVPAVQTNTAEALRERKEEIKRQKQDEEGLHLLTLLLQCAEAVSADNLEEANKLLLEISQLSTPYGTSAQRVAAYFSEAMSARLLNSCLGIYAALPSRWMPQTHSLKMVSAFQVFNGISPLVKFSHFTANQAIQEAFEKEDSVHIIDLDIMQGLQWPGLFHILASRPGGPPHVRLTGLGTSMEALQATGKRLSDFADKLGLPFEFCPLAEKVGNLDTERLNVRKREAVAVHWLQHSLYDVTGSDAHTLWLLQRLAPKVVTVVEQDLSHAGSFLGRFVEAIHYYSALFDSLGASYGEESEERHVVEQQLLSKEIRNVLAVGGPSRSGEVKFESWREKMQQCGFKGISLAGNAATQATLLLGMFPSDGYTLVDDNGTLKLGWKDLSLLTASAWTPRS

SEQ ID NO: 38286 - protein, 212 aa, Arabidopsis thaliana
  Clone ID: LIB3168-044-C2_FLI.pep
RKLSSFPFLALNTIMTLESYAGDVHTVPQSENSMEERGGGELFVPPLNFAMVDNGIFRSGFPEPVSFSFLQSLRLKSIIYLCPEAYPEVNREFAKSNGIQVFQFGIERCKEPFVNIPDEVIREALQVLLDTENHPVLIHCKSGKHRTGCLVGCVRKIQRWCLSSIFDEYQRFAAAKARISDQRFMELFDISNLKHTPLSFSCSKRYTNTIDY

SEQ ID NO: 38287 - protein, 339 aa, Arabidopsis thaliana
  Clone ID: LIB3168-044-E11_FLI.pep
RRLSKTLSNHKKYSPIIILMESTDSSGGPPPPQPNLPPGFRFHPTDEELVIHYLKRKADSVPLPVAIIADVDLYKFDPWELPAKASFGEQEWYFFSPRDRKYPNGARPNRAATSGYWKATGTDKPVISTGGGGSKKVGVKKALVFYSGKPPKGVKSDWIMHEYRLTDNKPTHICDFGNKKNSLRLDDWVLCRIYKKNNSTASRHHHHLHHIHLDNDHHRHDMMIDDDRFRHVPPGLHFPAIFSDNNDPTAIYDGGGGGYGGGSYSMNHCFASGSKQEQLFPPVMMMTSLNQDSGIGSSSSPSKRFNGGGVGDCSTSMAATPLMQNQGGIYQLPGLNWYS

SEQ ID NO: 38288 - protein, 164 aa, Arabidopsis thaliana
  Clone ID: LIB3168-045-F9_FLI.pep
AICVLSASGAVSTATLLQPAPSHGTIIYEGLFELISLSTSYLNTTDNDYPNRTGSLAVSLASPDGRVIGGGIGGPLIAASQVQVIVGSFIWAIPKGKIKKREETSEDVQDTDALENNNDNTAATSPPVPQQSQNIVQTPVGIWSTGSRSMDMHHPHMDIDLMRG

SEQ ID NO: 38289 - protein, 125 aa, Glycine max
  Clone ID: LIB3170-013-D8_FLI.pep
PLEPPSIRNQREFTKEVTMSDDEREEKELDLTSPEVVTKYKSAAEIVNRALQLVISECKPKAKIVDLCEKGDSYIREQTGSMYKNVKRKIERGVAFPTCVSVNNTVCHFSPLASDETVLEDGDIA

SEQ ID NO: 38290 - protein, 817 aa, Glycine max
  Clone ID: LIB3170-086-H2_FLI.pep
GLLRLGFLPQMDNARSANGEENAAGIPDDLRCKRSDGKQWRCTAMSMPDKTVCEKHYIQAKKRAANSAMRANLKKAKRKSQSLSLNESDNVYMESKSDDFDVPLSSIGLSQKKLSKNQFRYEPERDAPRRGSSARRSSNLNDDDDDDDDDDVDGDADADVALYEEENWVSCDSPPDSSRKRSRRSLEANATTEYSDGTSAGSSDEDTGGQTCHQCRRNDRDRVTWCQRCDRRGYCDSCLSTWYSDISLDEIQRICPACRGICNCKTCLRSDNSIKVRIREIPVLDKLQYLHVLLSSVLPVVKQIHCEQSFEVELEKKLRGAEIDLPRIKLNSDEQMCCNFCRIPITDYHRRCPSCSYDLCLSCCRDLREATADHNKEPQTEQAKTSDRNILSKFPHWRSNDNGSIPCPPKECGGCGYSSLNLSRIFKMNWVAKLVKNVEEMVSGCRISNADGPPETGLNDLKLCQYSHREASDDNYLYCPASDDIKTDGIDNFRKHWKTGEPIIVKQVFDGSSISSRDPMVIWRGILETIDEKAKDENRMVKAIDCLDGSEIDIELAQFMKGYFEGLILENGWPQLLKLKDWPSPSASEEFLLYQRPEFISKLPLLQYIHSKWGLLNVAAKLPHYSLQNDVGPKIYISYGISDELGRGDSVTNLHFNMCDMAYLLVHTNEVKLKDWQRTKIEMMQKAKANKEFEAKESHGDPQISSRGSSPDSSLGTKSSGLEIDSNQNKSIMDQGFEIYSSAEGNTANCKLPFNQNGDVSEKTHPGVLWDVFRRQDVPILTKYLKIHWKEFGKSDDLGNEFVEWPLYDGAIFLDKH

SEQ ID NO: 38291 - protein, 212 aa, Glycine max
  Clone ID: LIB3170-006-F2_FLI.pep
RQTKTHSNPSLLSLGLFRWRFHAFRFLHDALGLLHGLYGSLLRRLSGDLLRRGLSGLGLGLGGRSFGLGFGNSLLLRCSSFGLGSGLGGGLSRSFGGLLGSSSGFNRSRLSRCELERVFDLNELASSNRLLEMNENKLLVGWRQLLVLAFDEFGYRVLARTGSLLQTRYRLRYHRGEGRMGEGLLGRRRFLGLGLRCGGHDDAQIEKGITVD

SEQ ID NO: 38292 - protein, 358 aa, Glycine max
  Clone ID: LIB3170-058-E12_FLI.pep
VNMGLPSTQTSTGSKRQPETSMAKPKPHTEAAAAPEPPKAVKREGNLKGTTSSSEQEAPKTPDPKTLRRLAQNREAARKSRLRKKAYVQQLESSRIKLNQIEQELQRARAQGILMGGGNALLGGEQGFHMAMSGISSEAAIFDVEYARWLEEHHRIVCELRAVLQEHLHENELRLYVDNCLAHYDQVMNLKSMVAKTDVFHLVFGVWKTPAERCFMWIGGFRPSELIKIILGQIEPLTEQQILGICGLQQSTQEAEEALSQGLDALNQSLSETITSDSLWCPPNMTNYMGQMAVAINKLSTLESFVRQADNLRHQTIHRLHQLLTTRQAARCLVAISEYFHRLRALSSLWSTRPRQDQ

SEQ ID NO: 38293 - protein, 353 aa, Glycine max
  Clone ID: LIB3170-058-E2_FLI.pep
QALQEERKKVAPETAEAIDQFLVKLRACAKGESAFTFILDDPAGNSFIENPFAPSSDPSLTIKFYERTPEQQSSLGYLVGSTHIEGTHDQAPERGEVTADQVRREPHGSIGATAGHRAIAQSNSSEIAEALFRYTAPEEVMTFPTSCGACAARCETRMFVTNIPYFQEVIVMASTCDSCGYRNSELKPGGRIPEKGKKITLNVKNVNDLSRDVIKSDTASVKVPELDLELASGTLGGIVTTVEGLITKISESLERVHGFTFGDSLDEQRKNKWIDFKARLNKLLSLEEAWTLILDDALANSFVAPATDDLKEDNQLSFEEYERSWEQNEELGLNDIDTSSADAAYESTNTTKT

SEQ ID NO: 38294 - protein, 431 aa, Arabidopsis thaliana columbia
  Clone ID: LIB3175-052-H2_FLI.pep
FQIVREVKAGDIIGEIGVLCYRPQLFTVRTKRLCQLLRMNRTTFLNIIQANVGDGTIIMNNLLQHLKEMNDPVMTNVLLEIENMLARGKMDLPLNLCFAAIREDDLLLHQLLKRGLDPNESDNNGRTPLHIAASKGTLNCVLLLLEYHADPNCRDAEGSVPLWEAMVEGHEKVVKVLLEHGSTIDAGDVGHFACTAAEQGNLKLLKEIVLHGGDVTRPRATGTSALHTAVCEENIEMVKYLLEQGADVNKQDMHGWTPRDLAEQQGHEDIKALFREKLHERRVHIETSSSVPILKTGIRFLGRFTSEPNIRPASREVSFRIRETRARRKTNNFDNSLFGILANQSVPKNGLATVDEGRTGNPVRVTISCAEKDDIAGKLVLLPGSFKELLELGSNKFGIVATKVMNKDNNAEIDDVDVIRDGDHLIFATDS

SEQ ID NO: 38295 - protein, 368 aa, Arabidopsis thaliana columbia
  Clone ID: LIB3175-048-B6_FLI.pep
QQKKNQSEQWSQTETRPNNQAVSYNGREQRKGEDGYNWRKYGQKQVKGSENPRSYYKCTFPNCPTKKKVERSLEGQITEIVYKGSHNHPKPQSTRRSSSSSSTFHSAVYNASLDHNRQASSDQPNSNNSFHQSDSFGMQQEDNTTSDSVGDDEFEQGSSIVSRDEEDCGSEPEAKRWKGDNETNGGNGGGSKTVREPRIVVQTTSDIDILDDGYRWRKYGQKVVKGNPNPRSYYKCTTIGCPVRKHVERASHDMRAVITTYEGKHNHDVPAARGSGYATNRAPQDSSSVPIRPAAIAGHSNYTTSSQAPYTLQMLHNNNTNTGPFGYAMNNNNNNSNLQTQQNFVGGGFSRAKEEPNEETSFFDSFMP

SEQ ID NO: 38296 - protein, 293 aa, Arabidopsis thaliana columbia
  Clone ID: LIB3176-010-H6_FLI.pep
SPNHKPKLLNSVSMAIIKPNRDLKPDGVTVVTREVWAENLESEFELISEIIDDYPFISMDTEFPGVIFKSDLRFTNPDDLYTLLKANVDALSLIQVGLTLSDVNGNLPDLGDDLHRGFIWEFNFRDFDVARDAHAPDSIELLRRQGIDFERNCRDGVESERFAELMMSSGLVCNEEVSWVTFHSAYDFGYLMKILTRRELPGALGEFKRVMRVLFGERVYDVKHMMKFCERRLFGGLDRVARTLEVNRAVGKCHQAGSDSLLTWHAFQRMRDLYFVQDGPEKHAGVLYGLEVF

SEQ ID NO: 38297 - protein, 368 aa, Arabidopsis thaliana columbia
  Clone ID: LIB3176-021-A3_FLI.pep
RKHNKNRKKKKLMVLNMESTGEAVRSTTGNDGGITVVRSDAPSDFHVAQRSESSNQSPTSVTPPPPQPSSHHTAPPPLQISTVTTTTTTAAMEGISGGLMKKKRGRPRKYGPDGTVVALSPKPISSAPAPSHLPPPSSHVIDFSASEKRSKVKPTNSFNRTKYHHQVENLGEWAPCSVGGNFTPHIITVNTGEDVTMKIISFSQQGPRSICVLSANGVISSVTLRQPDSSGGTLTYEGRFEILSLSGSFMPNDSGGTRSRTGGMSVSLASPDGRVVGGGLAGLLVAASPVQVVVGSFLAGTDHQDQKPKKNKHDFMLSSPTAAIPISSAADHRTIHSVSSLPVNNNTWQTSLASDPRNKHTDINVNVT

SEQ ID NO: 38298 - protein, 328 aa, Arabidopsis thaliana columbia
  Clone ID: LIB3176-021-G10_FLI.pep
NSSTEKDNMEDHQDIGESKSVDTTNRKLDDDKVVVKEERGDSEKEEEGETGDLISEKTDSVDIHKKEDETKPINKSSGIKNVSGNKTSRKKVDWTPELHKKFVQAVEQLGVDQAIPSRILELMKVGTLTRHNVASHLQKFRQHRKNILPKDDHNHRWIQSRENHRPNQRNYNVFQQQHRPVMAYPVWGLPGVYPPGAIPPLWPPPLQSIGQPPPWHWKPPYPTVSGNAWGCPVGPPVTGSYITPSNTTAGGFQYPNGAETGFKIMPASQPDEEMLDQVVKEAISKPWLPLPLGLKPPSAESVLAELTRQGISAVPSSSCLINGSHRLR

SEQ ID NO: 38299 - protein, 467 aa, Arabidopsis thaliana columbia
  Clone ID: LIB3176-102-B7_FLI.pep
FRWDSNRVLERLGEDMEKLMTESGLKPVVIDSNQDLSRVYCGICSNIGDDDYDGDAVVVDGDLISTPFCSHKFCKACWSKYLKKNFFSVEKNHTAISCPDRDCRAAVGPETVEKLTVRDQAMYELYILKSYREKYLGWKLKLCPARGCNYVIEFHLASEDEEHSLNIVCLCGHIFCWRCMLESHRPVTCNNASDWLSRDLEKLIEEVDKPSTVSWIDANTKPCPHCFIPVEIDGERPWAQFLTCVCSGRFCWKCFRSPETHGTSGSCLAPARSSNVGFNHWNRAKPGISCLDLWNASQVNLVNAKYELEAFEESIIKKPSDLKEQDVKVLREGLMLIVQCRQFLKWSCAYDYIHTEYDMAKREYLRFLQQNASGIVHSFSQSIKEETEAKELTCGKLLSETTNIGNFFYHFIKTLREGLPEVQAESYDNYGGPYWLCDRCTYGNSWFQRACKMCCDPTASKMDELSD

SEQ ID NO: 38300 - protein, 343 aa, Arabidopsis thaliana columbia
  Clone ID: LIB3176-113-E7_FLI.pep
LFNTPVDVVKLNIPDYFTIIKHPMDLGTVKSKLTSGTYSSPSEFSADVRLTFRNAMTYNPSDNNVYRFADTLSKFFEVRWKTIEKKSSGTKSEPSNLATLAHKDIAIPEPVAKKRKMNAVKRNSLLEPAKRVMTDEDRVKLGRDLGSLTEFPVQIINFLRDHSSKEERSGDDEIEIDINDLSHDALFQLRDLFDEFLRENQKKDSNGEPCVLELLHGSGPGNSLTQHCDGSELEDEDVDIGNYEHPISHISTVRTEKADSVGGLNQMEDASRGKLSLIEGADGHQDGNSAPKEKELPPEKRYRAALLKNRFADIILKAQEITLNQNEKRDPETLQREKEELEL

SEQ ID NO: 38301 - protein, 900 aa, Arabidopsis thaliana columbia
  Clone ID: LIB3177-078-F8_FLI.pep
NTIIDLVEKYGPKKWSTISQHLPGRIGKQCRERWHNHLNPGINKNAWTQEEELTLIRAHQIYGNKWAELMKFLPGRSDNSIKNHWNSSVKKKLDSYYASGLLDQCQSSPLIALQNKSIASSSSWMHSNGDEGSSRPGVDAEESECSQASTVFSQSTNDLQDEVQRGNEEYYMPEFHSGTEQQISNAASHAEPYYPSFKDVKIVVPEISCETECSKKFQNLNCSHELRTTTATEDQLPGVSNDAKQDRGLELLTHNMDNGGKNQALQQDFQSSVRLSDQPFLSNSDTDPEAQTLITDEECCRVLFPDNMKDSSTSSGEQGRNMVDPQNGKGSLCSQAAETHAHETGKVPTLPWHPSSSEGLAGHNCVPLLDSDLKDSLLPRNDSNAPIQGCRLFGATELECKTDTNDGFIDTYGHVTSHGNDDNGGFPEQQGLSYIPKDSLKLVPLNSFSSPSRVNKIYFPIDDKPAEKDKGALCYEPPRFPSADIPFFSCDLVPSNSDLRQEYSPFGIRQLMISSMNCTTPLRLWDSPCHDRSPDVMLNDTAKSFSGAPSILKKRHRDLLSPVLDRRKDKKLKRAATSSLANDFSRLDVMLDEGDDCMTSRPSESPEDKNICASPSIARDNRNCASARLYQEMIPIDEEPKETLESGGVTSMQNENGCNDGGASAKNDQETSGSFFELRLCSPGMTRARPDNKVNASAKDLSNQHKISLGDFPTEEMSSEPLCTVDSIPLSAIDKTNTAETSFDIENFNIFDGTPFRKLLDTPSPWKSPLLFGSFLQSPKLPPEITFEDIGCFMSPGERSYDAIGLMKHLSEHSATAYADALEVLGNDTPESILKKRQLNKSIQGKENQHQPHDQLGNRSQVECRALDFSDCGTPGKAKVPSASPGGYSSPSSYLLKSCR

SEQ ID NO: 38302 - protein, 78 aa, Arabidopsis thaliana columbia
  Clone ID: LIB3177-022-G12_FLI.pep
GTVGLTSQFTKPLRLLDGSSEFVLTYEDKEGDWMLVGDVPWRMFINSVKRLRVMKTSEANGLAARNQEPNERQRKQPV

SEQ ID NO: 38303 - protein, 161 aa, Arabidopsis thaliana columbia
  Clone ID: LIB3177-088-C2_FLI.pep
LDPAGTGSLYNEGEADIVVNHVISLIYAGVSPMAIAVQSPYVAQVQLLRERLDDFPVADGVEVATIDSFQGREADAVIISMVRSNNLGAVGFLGDSRRMNVAITRARKHVAVVCDSSTICHNTFLARLLRHIRYFGRVKHADPGSLGGSGLGLDPMLPYLG

SEQ ID NO: 38304 - protein, 92 aa, Arabidopsis thaliana columbia
  Clone ID: LIB3177-089-A2_FLI.pep
EKEIVDIYSSDEEYDEDDDDDDDTDGESSDEDDEEEDRNLSGDDSESSEDDYTDSNSDSDDDDEEDDDDEEEEEEEDSLVDKVTRLLKGKQD

SEQ ID NO: 38305 - protein, 330 aa, Arabidopsis thaliana columbia
  Clone ID: LIB3177-094-C10_FLI.pep
KSLLSFFLSFFLSLSSQASMQSKNMIVASSHQQQQQQQPQQPQPQLKCPRCDSSNTKFCYYNNYSLSQPRHFCKACKRYWTRGGTLRNVPVGGSYRKNKRVKRPSTATTTTASTVSTTNSSSPNNPHQISHFSSMNHHPLFYGLSDHMSSCNNNLPMIPSRFSDSSKTCSSSGLESEFLSSGFSSLSALGLGLPHQMSHDHTINGSFINNSTTNKPFLLSGLFGSSMSSSSTLLQHPHKPMNNGGDMLGQSHLQTLASLQDLHVGGNNEDMKYKEGKLDQISGNINGFMSSSSSLDPSNYNNMWNNASVVNGAWLDPTNNNVGSSLTSLI

SEQ ID NO: 38306 - protein, 135 aa, Arabidopsis thaliana columbia
  Clone ID: LIB3177-079-E4_FLI.pep
SWQITGILFPRSHSTGHSLIQPAGNLDRFTLRLPDDVRRQLMKTSRTMGHVALLPQARSSRSGYRSGSVGSERSAFPYGRKSNNNNRRLHSLSFSFSFRSGSVRSTFSGDAPKNLPTSIEAGERSFERLRPDERV

SEQ ID NO: 38307 - protein, 185 aa, Arabidopsis thaliana columbia
  Clone ID: LIB3177-087-A8_FLI.pep
LVMSFSRRLRSAFSRHFPVSDYGCFSNNVEFSGHLKQESSNFREVPVVIMSSENVLTRIDRCLEEGAQDFLLKPVKLADVKRLRSHLTKDVKLSNGNKRKLPEDSSSVNSSLPPPSPPLTISPESSPPLTVSTESSDSSPPLSPVEIFSTSPLSSPIDDEDDDVLTSSSEESPIRRQKMRSPGLD

SEQ ID NO: 38308 - protein, 596 aa, Zea mays
  Clone ID: LIB3180-017-E8_FLI.pep
VRPMRALVVVSFASACLLLLLQLAGASHVVYNYKDLEAEAAAATDQVPPSIVNPLLRTGYHFQPPKNWINDPNAPMYYKGWYHFFYQYNPKGAVWGNIVWAHSVSRDLINWVALEPALRPSIPGDRYGCWSGSATVLPDGGGPVIMYTGVDHPDINYQVQNVAYPKNVSDPLLREWVKPSHNPVIVPEGGINATQFRDPTTAWRGPGPEQWRLLVGSAAGSSPRGVAYVYRSRDFRRWRRVRRPLHSAPTGMWECPDFYPVSKGGAPRAGLETSVPPGPRVKHVLKNSLDLRRYDYYTVGTYHPWAERYVPDDPAGDEHRLRYDYGNFYASKTFYDPAKRRRILWGWANESDTAADDVAKGWAGIQAIPRTVWLDPSGKQLLQWPIEEVEALRAKSVTLKNRVIKAGHHVEVTGIQTAQADVEVSFEVSPAALAGAETLDPALAYDAEKLCGVKRADVRGGVGPFGLWVLASANRKERTAVFFRVFKPAAGSDKPVVLMCTDPTKSSLNPNLYRPTFAGFVDTDISNGKISLRSLIDRSVVESFGAGGKTCILSRVYPSLAIGKDARLYVFNNGRAHVKVSRLTAWEMKKPVMNGA

SEQ ID NO: 38309 - protein, 75 aa, Arabidopsis thaliana nossen
  Clone ID: LIB3234-048-F4_FLI.pep
YDLQFQVGGILSPSDSLSSSHLTTLHFLSESETTWFCKIRIYRICSVSSSCLVSLPEPNRQNLSHVPSCLYPFTV

SEQ ID NO: 38310 - protein, 69 aa, Arabidopsis thaliana nossen
  Clone ID: LIB3234-050-C2_FLI.pep
ISHMASPQSLGYPTISPFNTRYMSPYRPSPSNASPAMAGSSNYPLNPLRYSESAGTFSPYASANSLPDC

SEQ ID NO: 38311 - protein, 347 aa, Arabidopsis thaliana nossen
  Clone ID: LIB3234-026-H11_FLI.pep
CSSSSLLHIFFKVFQTMSVFESETSNFHVYNNHEIQTQPQMQTFLSEEEPVGRQNSILSLTLDEIQMKSGKSFGAMNMDEFLANLWTTVEENDNEGGGAHDDGEKPAVLPRQGSLSLPVPLCKKTVDEVWLEIQNGVQQHPPSSNSGQNSDENIRRQQTLGEITLEDFLVKAGVVQEPLKTTMRMSSSDFGYNPEFGVGLHCQNQNNYGDNRSVYSENRPFYSVLGESSSCMTGNGRSNQYLTGLDAFRIKKRIIDGPPEILMERRQRRMIKNRESAARSRARRQAYTVELELELNNLTEENTKLKEIVEENEKKRRQEIISRSKQVTKEKSGDKLRKIRRMASAGW

SEQ ID NO: 38312 - protein, 336 aa, Glycine max
  Clone ID: LIB3242-680-D10_FLI.pep
KSLFSFFPIPISNSPAMSTAAAAGGDMEAGFAKLQGEDFEYYMQTYSIVLGRNSKKSTVDVDLSSLGGGMNISRHHARIFYDFARRRFALEVLGKNGCLVEGVLHLPGNPPVKLDSQDLLQIGDKEFYFLLPVRSILGGPVGPRHYPNHATPGPVVPHYNNYHLGPGPVKKAPRREYYEEEFDDEDDVGGRKMRRDGYDGYGYAGGKSSLSAPMDKKSEGRSRVDRDADNLQLQQLEEKDVVSSVATVLSDLCGPGEWMPMEKLHTELLEQYSSVWHHNRVRRYLTSEDWPGPESKGKPWYGLLMLLRKYPEHFVINTRSKGRVTHEFVSLVSLLS

SEQ ID NO: 38313 - protein, 96 aa, Glycine max
  Clone ID: LIB3242-680-E6_FLI.pep
SCLFLGLPLLDCIKSFLRFTLLLQSLETHFVPPHPPLELIYIDFFITIIILNYHLWLSLPGGNIPFSKGSRKHIQIPTKSHIFKHHHHFPGKSKKV

SEQ ID NO: 38314 - protein, 76 aa, Glycine max
  Clone ID: LIB3242-694-G10_FLI.pep
YIHIQSFYLLLNITQKAIYCRIKSSSSISHNTDVVTISSWKLLANVIAVFFSVPRTGQCDECASCKEYGNRTHGTV

SEQ ID NO: 38315 - protein, 411 aa, Glycine max
  Clone ID: LIB3242-049-F5_FLI.pep
LGHDTDILDTYDTIIPEESDSFLKEAERWKRMMEMISRGDLKEMLCTCAKAVAGNDMETTEWLMSELRKMVSVSGNPIQRLGAYMLEALVARLASSGSTIYKVLKCKEPTGSELLSHMHLLYEICPYLKFGYMSANGAIAEVMKEESEVHIIDFQINQGIQWVSLIQAVAGRPGAPPKIRITGFDDSTSAYAREGGLEIVGARLSRLAQSYNVPFEFHAIRAAPTEVELKDLALQPGEAIAVNFAMMLHHVPDECVDSRNHRDRLVRLAKCLSPKIVTLVEQESHTNNLPFFPRFVETMNYYLAIFESIDVALPREHKERINVEQHCLAREVVNLIACEGAERVERHELLKKWRSRFTMAGFTPYPLNSFVTCSIKNLQQSYQGHYTLEERDGALCLGWMNQVLITSCAWR

SEQ ID NO: 38316 - protein, 206 aa, Glycine max
  Clone ID: LIB3242-052-C10_FLI.pep
PSQNGSSVHAPQNGVHNRPQTVVNQTMSILPISTTSAPGAVPGPTTNLNIGMDYWGTPTSSTIPALHGKVPSTAVAGGMIAAGSRDGVQSQVWLQDERELKRQRRKQSNRESARRSRLRKQAECDELAQRAEALKEENATLRSEVSQIRSEYEQLRSENAALKERLGDIPGVATPGKEDLRSGQNDQHVSNDTQQSGQTEVVQGVH

SEQ ID NO: 38317 - protein, 625 aa, Glycine max
  Clone ID: LIB3242-053-H12_FLI.pep
TLFFWRLTWEKMMMFEDMGFCGDLDMLCVSLGEGDIAVRQTEPDPVVEDDYSDEEIDVDELEKRMWRDKMRHKRLKEQTKSKEGTDATKQRQSQEQARRKKMSRAQDGILKYMLKMMEVCKAQGFVYGIIPEKGKPVTGASDNLREWWKDKVRFDRNGPAAIVKYQADNAIPGKNDGCNSIGPTPHTLQELQDTTLGSLLSALMQHCDPPQRRFPLEKGVPPPWWPTGNEEWWPQIGLPKDQSPPPYKKPHDLKKAWKVGVLTAVIKHMSPDIAKIRKLVRQSKCLQDKMTAKESATWLAIINQEEALARELYPDYCPPFSSAGGNGSLVINDCSEYDVDGAEEELNFDVEDRKPDHLLPSNLGMERMRGRMPIQQPSHPMKGDVVTNLDFIRKRKISSDFNMMMDQKIYTCEHPQCPYSEVRLGFHDRSARDNHQLNCAYRNSSADYGGGPNFHATEDKPVIFPQSFVQPNTTTQSASLVAPSFDLTGLGVPEDGQKMISDLMTIYDTNVVGNKNLSSSNCVAVENHNLSQASLQQQESYFPGQGMVLEGNFFAREEGQFDRFKATMNMNTHTPFDTNHSNNNNIHLMFNSPCDLSSFDFKEDIQGGVGMDPLHKQQEVSIWYQ

SEQ ID NO: 38318 - protein, 311 aa, Glycine max
  Clone ID: LIB3242-325-B5_FLI.pep
GLVAFPFSHSLLKSMDTAQWAQGIGVVKQPMEGSKPPPPPPPPMLERRARPQKDQALNCPRCNSTNTKFCYYNNYSLSQPRYFCKTCRRYWTEGGSLRNVPVGGGSRKNKRSTPPAPPSAPAPTKKLSDLATPNFPQSASQDPKIHQGQDLNLAYPPAEDYSTVSKFIEVPYSTELDKGTTGLHQNPTSSSTTTSASSQLSAMELLKTGIAAASSRGLNSFMPMYNSTHGFPLQDFKPPHGLNFSLEGFENGYGGLQGIQEGPTGGARILFPTVEDLKQQVPSTNEFDQQNRSQEGSAHGYWNGMLGGGSW

SEQ ID NO: 38319 - protein, 432 aa, Glycine max
  Clone ID: LIB3242-144-G11_FLI.pep
RAIIPFSATIWLCKMGRTPCCSHEELRKGAWTVQEDQKLITYIQKHGTGSWRTLPQKAGLKRCGKSCRLRWFNYLRPDIKRGKLSQEEEQTIIKLRAVLGNRWSSIAKHLPMRTDNEIKNYWNSYLKKQFEKNAVDPSSSKPNSTDSSSESKSNDTCMVPSEKTDCHEPNTSQSHQHNLSRSISSSTHLLNKVASKILASGYLELIKSCQPVVAGNSKSESVVKTGIGLESDNIRDPLEPNLTSPSHSITSAKLLNKMATSLPHKVHGLEAAKAVFSKLMENSEKGATASDDSFVGGCLNALSPFEDKPHITKTIDSPSGPTLMFNHVTTPSCFSEDNEDNWQCVSSNYVSFKICAANGGDCSVSEINLGESSSSTSSFLFENADLGTCDDEISKYIQYCREKNLWTSNANNVGITRPYDVRGRYLKRDNIS

SEQ ID NO: 38320 - protein, 109 aa, Glycine max
  Clone ID: LIB3242-433-F5_FLI.pep
ENKPADIIQGQMDTDYLSRLTHALTTVRHVNKTDVVTLGTTFGSLCNIMGASMEDLARCPGIGERKVKRLFDTFHEPFKHVESSRQAIPETSVQNKPASPSSLIDQEQC

SEQ ID NO: 38321 - protein, 259 aa, Glycine max
  Clone ID: LIB3242-463-E7_FLI.pep
YLIIIRCRNIMGRGRVELKRIENKINRQVTFAKRRNGLLKKAYELSVLCDAEVALIIFSTRGKLYEFCSTNSMLKTLERYQKCSYGAVEVSKPGKELEQSSYREYLKLKARFESLQRTQRNLLGEDLGPLNTKDLEQLERQLDSSLKQVRSTKTQFMLDQLADLQNKEHMLVEANRSLTMKLEEINSRNQYRQTWEAGEQSMSYGTQNAHSQGFFQPLECNPTLQIGSDYRYNPEASEQQLAATTQAQQVNGFIPGWML

SEQ ID NO: 38322 - protein, 161 aa, Glycine max
  Clone ID: LIB3242-028-E4_FLI.pep
VKSHLQKYRTARYKPEPSEGTSEKKVTPMEEMKSLDLKTSKGITEALRLQMELQKRLHEQLEIQRKLQIQIEDQGKRLQMMFEKQREMGDSKVNVSLDEPSAAAPSDTVETTNEERHKFESIPKAIPEEKESSTTKQIAGEAEEMIKEDEVAPPTKRVKSS

SEQ ID NO: 38323 - protein, 269 aa, Glycine max
  Clone ID: LIB3242-137-G7_FLI.pep
TSGGTQKVGVKKALVFYGGKPPRGIKTNWIMHEYRLTDNKPNNRPPPGCDLGNKKNTLRLDDWVLCRIYKKSNTHRSPMEHDREDSMDDMIGGIPPSINVGHMSARFHHLSKMTTAYNNGALLENDHHNLLEGMMIGNSNGGMNTTTTTTPGPMSSHLGGSKEELSFVPTMTHSSNTSKRTLSSLYWNDEDVAGTSSSNKRFNLELSGDNNNHGSVVRDDQENGTASSIATLLNQLPQTPSLHQQSILGSIGDGLLRTTYQIPGMNWYA

SEQ ID NO: 38324 - protein, 237 aa, Glycine max
  Clone ID: LIB3242-151-D11_FLI.pep
FWLDHVASYVPLFILLLVLVLCLLCLIFSAVFIIVLQNEWVICRVFQKSSGVKRTHISGMMMLDSYGNEMVYSSSALPPLTDSSPSIGNNTKALSVTDSAYVPCFSNPIDVPRGIFDSLNNINISINSNTLYGVSSNHSFYNTQGVQLQAPPTLPLPSSSNHYLRAFLENQGNGSNMSNNGFEPEREMVSVSQKTSLSTDVKAEISSLGKRHFENQNNPIASAAAVAPMDLATLWNY

SEQ ID NO: 38325 - protein, 168 aa, Glycine max
  Clone ID: LIB3242-311-C1_FLI.pep
AVKSAVEEVLGWIRILNPKIVTVVEQEANHNGEGFLERFTEALHYYSSVFDSLDACPVEPDKAALAEMYLQREICNVVCCEGPARLERHEPLAKWRDRLGKAGFRALHLGFNAYKQASMLLTLFSAEGFCVQENQGSLTLAWHSRPLIAASAWQAAPLGDDETLRFEH

SEQ ID NO: 38326 - protein, 50 aa, Glycine max
  Clone ID: LIB3242-080-D12_FLI.pep
EDRGSPYQVAKAVVLQIGQRFFCISHCLMQPLWNSCPQSSDPTFSPSANS

SEQ ID NO: 38327 - protein, 296 aa, Glycine max
  Clone ID: LIB3242-388-G1_FLI.pep
DLKRGMFSQQEEDLIISLHEVLGNRWAQIAAQLPGRTDNEIKNFWNSCLKKKLMKQGIDPATHKPLLSAQEHIIIKEEKETILETPPPMLLPMSQGILASSQESPLVVNNSSYCDGGLNVTEAASREVFMSKNAALDPLSYFEFQMGYNPIRQFDQNHVGTNSSYGFSSLPCLNSSSDHGNVSVAAEFSDNNSASKISSLMKESSSNSSSMSVYPAGGGCQMMENAGFSWDGENNNTKIDPLLQFHVNVLKSEEFKTSSWQEEQILTQNLIDFTNYPLMSLSEDLTGANFDVFQQM

SEQ ID NO: 38328 - protein, 461 aa, Glycine max
  Clone ID: LIB3242-478-G7_FLI.pep
GTCAICLYTMKPGQGHAIFTAECSHSFHFHCITSNVKHGNQICPVCRAKWKEVPFQSPASNMPYDRLNQVSPREEGWATVLRRLPSPQGDAARQISSLYHVTEPAIFDDDEALDQQTSVTHPKNEIDNDVINTVEIKTYPEVSSVPKSASRDAFAVLIHLKAPHSGRKQNIGENNTESPPLVENSRASVDLVTVLDVSGSMAGTKLALLKRAMGFVIQNLGPSDRLSVIAFSSTARRIFPLRKMTDTGRQQALQAVNSLVSNGGTNIAEGLRKGTKVFSDRRWKNSVSSIILLSDGQDTYTVNSRPNVGTDYLSLVPNSIHRNNGTGMQIPVHAFGFGSDHDATSMHSISEISGGTFSFIEAEDVIQDAFAQCIGGLLSVVVQELQVQVRCVHPQLQLSSVKAGSYQTSLMGNARLATISVGDLYAEEERDFLVTVNVPVDQSSDETSLLTVRCLYRDPIT

SEQ ID NO: 38329 - protein, 313 aa, Glycine max
  Clone ID: LIB3242-502-H8_FLI.pep
QSEYIPREPREPSGSGADQETTNKDVNKMLRRLAQNREAARKSRLRKKAYVKQLESSRLKLMQLELEIGKARKQGLYMGTALDAGYIGSTSETINPGIVAFEIEYGQWVEEQERRNEELRHAFQTQAPGVQLNVVVQSVLNHYSNLFRMKAEAVKADVLYLLSGAWKPSVERIFLWIGGSRPSQLLNIIVPQLEPLTDQQIVSINNLRLSSQQAEDALSQGLEKLQQSLVHDMAVDPLSVGNLGLQMARTMEKFEALEGFVNQADHLRQQTLLHMSRILSIHQAARGLLALGEYFHRLRTLCSLWSARSCELA

SEQ ID NO: 38330 - protein, 203 aa, Zea mays
  Clone ID: LIB3245-472-E7_FLI.pep
IQQQQQQQQQSVCQRNSLWTPHHAMSCRPCPSVSVQQRRREKHVLPGLLLGPRRVHGVVLPLLLLVLAHVRAHRVVEAGGEREAAAAALRRGAAEAERAQLVTEPVLLPRLVGHARPSRGEVVVAGGVRGRRRGPVERGAAPRGGHVVVVLALVRGDHGAQVVGRALHVLAHGAPDRRALVVAPWVWISLHHLLPVLPPPIAV

SEQ ID NO: 38331 - protein, 183 aa, Zea mays
  Clone ID: LIB3245-473-C7_FLI.pep
TGHTRRSELTTIDERQPPAAEPERPFLFSFTQRDRERSQAAKATHRFYRSALPPPLALSASAPSKSTASKQAGAMGLPMRRERDAEAELNLPPGFRFHPTDDELVEHYLCRKAAGQRLPVPIIAEVDLYRFDPWDLPERALFGAREWYFFTPRDRKYPNGSRPNRAAGNGYWKATGADKPVAP

SEQ ID NO: 38332 - protein, 178 aa, Zea mays
  Clone ID: LIB3245-474-D9_FLI.pep
SLCGNMVQENSCQKLCSSHQLFELTNSGPFFEGGASFESDQWLEAQGQMSAAQLVTSLDFRLSRLSRLAVLCTGEFCTRVPAVGPLNASLPSKSNPVSTFKAWHIFLEFTYGARPRSPRPHDTALLATISSAIFTLILNASTSDLRILLSVTAVLNCWLASESCWNSVAFSPLSRSTC

SEQ ID NO: 38333 - protein, 92 aa, Zea mays
  Clone ID: LIB3245-425-C4_FLI.pep
HNLEREHELCLGQGRELSLVFDRWSSSWSPITAVVTTTEPPTAPTTATATRVIVPLAFSWLQELVDAQGLLAPFFSFSTFFLFQVLVRAQLD

SEQ ID NO: 38334 - protein, 154 aa, Zea mays
  Clone ID: LIB3245-439-D1_FLI.pep
HNQSCHQYVQCDICGTKQLKKNFQRHHRMHEGSCVTERVKCHIEDCKCSFSKKSNLDKHVKAVHEQRRPFVCQFSGCGKRFSYKHVRDNHEKSSAHVHTEGDFVEADEQRPRSVGGCKRKPVSVESLMRKRVAAPDDGPAHADATEYLRWLLSV

SEQ ID NO: 38335 - protein, 258 aa, Zea mays
  Clone ID: LIB3245-441-D8_FLI.pep
PLAKRAMAKFALGHHREASDAGCVRAVLAELILTFLFVFAGVGSAMATGKLAGGGGDTVVGLTAVALAHTLVVAVMVSAGLHVSGGHINPAVTLGLAATGRITLFRSALYVAAQLLGSTLACLLLAFLAVADSGVPVHALGTGVGALRGVLMEAVLTFSLLFAVYATVVDPRRAVGGMGPLLVGLVVGANVLAGGPFSGASMNPARSFGPALVAGVWADHWVYWVGPLIGGPLAGLVYDGLFMAQGGHEPLPRDDTDF

SEQ ID NO: 38336 - protein, 191 aa, Zea mays
  Clone ID: LIB3245-443-F8_FLI.pep
AHSEGAQPRGSGGLVPPDPGRREERGVQVLAGRRQHVEAAVHALDVVVAEIHEQVAGPGAAAVVHPLLLGHHHRRIRERQVVVHDLRLRRARLAPRVGDLRVGGAHVHGLLLFDCAGGCPLPQPHLLPLVLLVVQPAQHPVIQPERPLLGAAAGVSEPVLVHDPVCLDPARRLAGVEDERLLDPERAGVGA

SEQ ID NO: 38337 - protein, 222 aa, Zea mays
  Clone ID: LIB3245-572-A10_FLI.pep
GLWASACVRAATDRRPGTMSFTGTQDKCTACDKTVHFIDLLTADGAIYHKTCFKCSHCKGVLSMCSYSSMDGVLYCKTHFEQLFKETGSFSKNFTPGGKSSDKGELTRAPSKLSSAFSGTQDKCAACQKTVYPLEKLTLEGESYHKSCFKCSHGGCILTTSSYAALNGVLYCKIHFAQLFMEKGSYNHMNKKSPSQEVLPDVADEEQPPEPAPPQDEKEEDN

SEQ ID NO: 38338 - protein, 158 aa, Arabidopsis thaliana
  Clone ID: LIB35-015-F6_FLI.pep
KPSRKTVSMAPKAEKKPAEKKPASEKPVEEKSKAEKAPAEKKPKAGKKLPKEAGAGGDKKKKMKKKSVETYKIHIFKVLKQVHPDIGISSKAMGIMNSFINDIFEKLAQEASKLARYNKKPTITSREIQTAVRLVLPGELAKHAVSEGTKAVTKFTSS

SEQ ID NO: 38339 - protein, 186 aa, Arabidopsis thaliana
  Clone ID: LIB35-054-D9_FLI.pep
KKTKRMGRAREIGEGNSSSLREQRNLREKDRRMRMKHLFSILSSHVSPTRKLPVPHLIDQATSYMIQLKENVNYLKEKKRTLLQGELGNLYEGSFLLPKLSIRSRDSTIEMNLIMDLNMKRVMLHELVSIFEEEGAQVMSANLQNLNDRTTYTIIAQAIISRIGIDPSRIEERVRKIIYGYIYFEA

SEQ ID NO: 38340 - protein, 532 aa, Glycine max
  Clone ID: LIB7-02-D11_FLI.pep
PDCDYSDADLVVEGIPVSVHRCILASRSKFFHELFKREKESSEKEGKLKYNMNDLLPYGKVGYEAFLIFLGYVYTGKLKPSPMEVSTCVDNVCAHDACRPAINFAVELMYASSIFQIPELVSLFQRRLLNFIGKALVEDVIPILTVAFHCQSNQLVNQCIDRVARSDLDQISIDQELPHELSQKVKLLRRKPQQDVENDASVVDALSLKRITRIHKALDSDDVELVKLLLNESDITLDEANALHYAAAYCDPKVVSEVLGLGLANVNLRNSRGYTVLHIAAMRKEPSIIVSLLTKGACASDLTFDGQSAVSICRRLTRPKDYHAKTEQGKETNKDRICIDVLEREMRRNPMAGDACMSSHTMADDLHMKLLYLENRVAFARLFFPSEAKLAMDIAHAETTSEFAGLSASNSKGSNGNLREVDLNETPIVQNKRLLSRMEALTKTVEMGRRYFPHCSEVLDKFMEDDLPDLFYLEKGTHEEQRIKRTRFMELKDDVHKAFNKDKAEFSRSGISSSSSSSSLRDSVVHYKARKV

SEQ ID NO: 38341 - protein, 151 aa, Zea mays
  Clone ID: LIB83-001-F8_FLI.pep
RRGAGPGARHRGRPRQDGDHHHDDERDHHGDWRAGGLRLPGAPAAAARDRGRGGRRARPRPLRLPLRREGGAGRRGLVRVARRVVRHGRVLGRRRVRRPGPRLHLPQPPVTATHGHGAEAYVLLLCSALRLMMSARKWSALILQLFDASAN

SEQ ID NO: 38342 - protein, 327 aa, Arabidopsis thaliana
  Clone ID: LIB9-024-C9_FLI.pep
LIESLRRRRFFPPVNLCLIVFFNLIVLNSSSYLGFRSQSEEEVMDVSARKSQKAGREKLRREKLNEHFVELGNVLDPERPKNDKATILTDTVQLLKELTSEVNKLKSEYTALTDESRELTQEKNDLREEKTSLKSDIENLNLQYQQRLRSMSPWGAAMDHTVMMAPPPSFPYPMPIAMPPGSIPMHPSMPSYTYFGNQNPSMIPAPCPTYMPYMPPNTVVEQQSVHIPQNPGNRSREPRAKVSRESRSEKAEDSNEVATQLELKTPGSTSDKDTLQRPEKTKRCKRNNNNNSIEESSHSSKCSSSPSVRDHSSSSSVAGGQKPDDAK

SEQ ID NO: 38343 - protein, 144 aa, Arabidopsis thaliana
  Clone ID: LIB9-40-H7_FLI.pep
VSQSLGEANREMASFTASASTVSAARPALLLKPTVAISAPVLGLPPMGKKKGGVRCSMETKQGNVSVMGAGVSAAATAALTAVMSNPAMALVDERMSTEGTGLPFGLSNNLLGWILFGVFGLIWTFFFVYTSSLEEDEESGLSL

SEQ ID NO: 38344 - protein, 186 aa, Arabidopsis thaliana
  Clone ID: LIB9-022-F1_FLI.pep
KSKMRILCDACENAAAIIFCAADEAALCRPCDEKVHMCNKLASRHVRVGLAEPSNAPCCDICENAPAFFYCEIDGSSLCLQCDMVVHVGGKRTHGRFLLLRQRIEFPGDKPKENNTRDNLQNQRVSTNGNGEANGKIDDEMIDLNANPQRVHEPSSNNNGIDVNNENNHEPAGLVPVGPFKRESEK

SEQ ID NO: 38345 - protein, 561 aa, Arabidopsis thaliana
  Clone ID: LIB9-18-E8_FLI.pep
EFSYFCSSFVEKKMHPIFDAILQNDLPAFLGLVEARESSLEERSEEQNTNNTVLHVAAKLGHRELVAKIIELRPSLLSSRNAYGDTPLHLAALLGDVNIVMQMLDTGLELYSARNNKNQTPLHLAFVSIFMEAAKFIVEKTNSVDLDELNFALSSGSTCIVGIILERFPELARKNAWEVEDGSRSTLLHYACDKGDLELTSILLGLNQGLEEALNSKGLSPLHLAVQRGSVIILEEFMDKSPLSFCVRTPSKETVFHLAARNKNTDAFVFMAENLGTSSPILLKKKDQQGNTVLHIAASVSCGSPLIRYIVGKKIIDIRDRNNMGYRAYHLLPRQAQDYEFISSYLRCDTKTSEEVDSKKAERNEPHIGHSEVIRLLKLIEISTSEIAERKKSKKHHVKRGHKSLEHEMHIEALQNARNTIAIVAVLIASVSYAGGINPPGGVYQDGPWKGKSLVGFMATAYVAASLVTIPHFPGTRWLFPVIISVAGGSLTVLFSYLGVETISHWFKKMNRVGRGLPIYFIKNNRVEDIPAIAKNEGEMPSLARTNSDLAASEGSGYFTY

SEQ ID NO: 38346 - protein, 357 aa, Zea mays
  Clone ID: LIB3606-020-H8_FLI.pep
LTAISLLCLISGLVSQQCSFHTVSPLDLSHDIMLIFSSVLSLCEGKHLDGKLTAGQNTVSALGRFVLIIWLFVVLIINSSYTASLTSILTVQQLATGITGIDSLISSGLPIGYQAGKFTRNYLIEELNIPESRLVPLNTIQEYADALKRGPKDGGVVAIVDEMPYVEIFLSYHCNFRIVGQEFTKEGWGFAFKRDFPLAADLSTAILQLSESGQLQRIHDEWFTRPSCSSDDSEVGATRLGLGSFWGLFLVCALICLLALLVFFIRICWQYNKYSNSEAAGEPSAAAAAAAAVDAAAAAADAVERQRRPSRLGSFKDIIQFVDKKEEEIKKTMKRRVSEKDNNQAAGSSEAHSVASA

SEQ ID NO: 38347 - protein, 313 aa, Arabidopsis thaliana
  Clone ID: LIB9-031-G6_FLI.pep
VENFKPLLVSFMANNNNIPHDSISDPSPTDDFFEQILGLSNFSGSSGSGLSGIGGVGPPPMMLQLGSGNEGNHNHMGAIGGGGPVGFHNQMFPLGLSLDQGKGHGFLKPDETGKRFQDDVLDNRCSSMKPIFHGQPMSQPAPPMPHQQSTIRPRVRARRGQATDPHSIAERLRRERIAERIRSLQELVPTVNKTDRAAMIDEIVDYVKFLRLQVKVLSMSRLGGAGAVAPLVTEMPLSSSVEDETQAVWEKWSNDGTERQVAKLMEENVGAAMQLLQSKALCIMPISLAMAIYHSQPPDTSSSIVKPEMNPPP

SEQ ID NO: 38348 - protein, 284 aa, Arabidopsis thaliana; identical to SEQ ID NO: 38116
  Clone ID: LIB9-042-C11_FLI.pep

SEQ ID NO: 38349 - protein, 105 aa, Arabidopsis thaliana
  Clone ID: LIB9-027-E5_FLI.pep
IIICLKGFVNLLKTPKSSLHCLVFEFQQNSMISQKPKEDVTNQNVHQTYIRNFSKTKNSSKFKGKMQLITSLYFFKSCKRSFSSSSHFLLLTISICKFQNNKKTF

SEQ ID NO: 38350 - protein, 412 aa, Glycine max
  Clone ID: LIB3242-553-A5_FLI.pep
ARTSTTEVISSGINGTRDGALQLMHAELQVLSPLVPVREVNFLRFCKQHAEGLWAVVDVSIDSIRESSGAPTFVNGRRLPSGCVVQDMPNGYSKVTWVEHAEYEESQVHQLYRPLLSSGMGFGAQRWVATLQRQRECLAILMSSAAPSRDHSAITAGGRRSMVKLAQRMTNNFCAGVCASTVHKWNKLNAAANVDEDVRVMTRKSVDDPGEPPGIVLSAATSVWLPVSPHRLFDFLRDERLRSEWDILSNGGPMQEMAHIAKGQDHGNAVSLLRASAINSNQSSMLILQETCIDAAGSLVVYAPVDIPAMHVVMNGGDSAYVALLPSGFAIVPDGPGSRGPHQNGPTSSTTTTTNGGDNGVTRVSGSLLTVAFQILVNSLPTAKLTVESVETVNNLISCTVQKIKAALHCES

SEQ ID NO: 38351 - protein, 131 aa, Glycine max
  Clone ID: 700841740_FLI.pep
SPSHVFRPVPVRPIVETASSQDDADDAGPATSLSLSLPGVESAEISNRATTVPVMPVNTVAAPAPVPAEVGLGALNLSGEFMAVMHEMIRKEVRSYMEQQKNGMMCFQGMEMMEGFRNVSVKRIGISRVDS

SEQ ID NO: 38352 - protein, 289 aa, Zea mays
  Clone ID: 700050522_FLI.pep
LGPKLHPGESLNISYLSPFLKALGSNYSNGANFAIAGAATQPRDVPFALHIQVQEFLYFRDRSLELIDQGLSGPIDAQGFQNALYMIDIGQNDVNALLSNLPYDQVIAKFPPILAEIKDAVQTLYSNGSRNFWIHGTGALGCLPQKLAIPRKNDSDLDQYGCLKTYNRAAVAFNAALGSLCDELSAQMKDATLVYTDLFPIKYGLVANHTKYGFDKPLMTCCGYGGPPYNYDFSKGCQSKDVAACDDGSKFVSWDGVHLTEAANAVVARAILSSQYSKPSLKFDQFCRA

SEQ ID NO: 38353 - protein, 82 aa, Zea mays
  Clone ID: 700204155_FLI.pep
SVSWRPSPLSLVATTATVTPPLCARCQGPSGPSLATSNYQATQWCVRERFRGRAAAPSGEDDLTTDVRSTRRSLPSSSPLSI

SEQ ID NO: 38354 - protein, 159 aa, Zea mays
  Clone ID: 700048522_FLI.pep
KKISERMKLLQDLVPGCSKITGKAVMLDEIINYVQSLQRQVEFLSMKLATVNPELGFDIEQIISKQMLLSQDRHLAFYGVEPGSSGLTGPFNQGIMQPELMCTIANPVDVLHGAIHDASTMNHIPSMWEGLQNMPQMNFNPGVAADSGTNNSGSMKIEQ

SEQ ID NO: 38355 - protein, 335 aa, Zea mays
  Clone ID: 700051738_FLI.pep
EFFPIPSNPCVLGITEQGLRIQISYLSKYSPKGTANKQRTLLAQGARNGDPMQFEARKMLINIAELRLTSPVLLLVLVLGSPVRLDDQEDLLPDERAVFVVDDLALPPHPVRQALDLHQHVHVFPDDHRAPGPQDPVHLQEDAVHLTPVLVQGEHRIRMDEVVGPRVGRHALAPVLVASDEAALVDGPERGRVRHGRDHVHDPQRVAGQRQRRGEPAQARVHVQHVAVPPLLLELAGHRLVVPDPPPPQLRVLRERPGRDAPDSAAGDPGRHGREPLRPSLHRAAGDVAGLGDLRQRRYAGLHLVVPCRVRVLARAEGPGRLGGLAAGVVVGLLP

SEQ ID NO: 38356 - protein, 282 aa, Zea mays
  Clone ID: 700201581_FLI.pep
GRRDYLRYALDNAEAFGGTGWAVSEFSWDIKYAGLQVLASQLLVEAKEERLRLSAEEVAVVEQLRSNAEYYVCSCMNRNPGGAKHNAGRTPAGLLFIRPWNNLQYVSGAASSSPSTRTSSPRWASPYAAAPATTVANPPPATRATCWLSPSPRPTTSWARTRCAPATWSDTARRTRGGCTTARRRARRTGTTGTSSAACRGSTRGTARGRRTRTTSSAPSSAGPTARTSSTTTAARTCRLRPARTTRRPWSGSSPGSCSWRGSRHARRRRRRRIFDRRGRFP

SEQ ID NO: 38357 - protein, 340 aa, Zea mays
  Clone ID: 700201839_FLI.pep
KIDNCCRNGTILPKSMDEAQSKSAFQMQVFKMPPDLNRTKLFPPANFKIVGASSLNPDYACGQPVPVSPTAFPDPSGLDSTTLAVATWQVVCNITTTKGAKPKCCVTFSAYYNDSVIPCSTCACGCPANRRGPTCSTTAQSMLLPPEALLVPFDNRSQKALAWAELKHYNVPRPMPCGDFCGVSINWHVSTDYNKGWSARVTLFNWEDVDMANWFAAIVMDKAYDGFEKAYSFNGTAVGKNTIFMQGLEGLNYLVKQTNMSGSDYLVPGKQQSVLSFTKKLTPGLNVVAGDGFPTKVFFNGDECAMPQRIPISTGFSTRLSSGLALVPFLVASAFLLLQQ

SEQ ID NO: 38358 - protein, 86 aa, Zea mays
  Clone ID: 700051804_FLI.pep
RKRAICSGCRRGGACPRHSSCSLVRLLLSHSPPVIVNLTLTEHTHLFSASTQLQYYPSHGSSAYFCHLSLYTVVDWSTGELIPAFS

SEQ ID NO: 38359 - protein, 173 aa, Zea mays
  Clone ID: 700051838_FLI.pep
KTMFFSSSLHLVSSPHSAMLRMGCCGGDRRRHRAAPVADRRPRGHGVHGLVHPPEREPLAVALHLHAVVARREHPRDHAPLQRLPVADAGVLEPAFLHALPPPGEGLVPLEAVRGLERHRVADLPREHLLRLGPRGAGVRQPSRLHGVERRGVVPQRAREPRLPPPGVEGVLV

SEQ ID NO: 38360 - protein, 259 aa, Zea mays
  Clone ID: 700203684_FLI.pep
HQLITSISFYYCLRDQAAATGEGDLFYKVKYLAWDMETVVGDLMATELRLGLPGTVDDCSQHQQQTQLKVAAPPSNPTRGKKRPAAEEEEANKRDAEAAPPAAKAPVVGWPPVRSYRKSCFQQAKQQAVSSSSKAADKEDAAAPAPSCTASAAASNATASAGAGSFVKVSMDGAPYLRKLDLRMYKGYRELREALEAMFVSSGSANNNNNLSEFAVTYQDKDGDLMLVGDVPFEMFASTCRKLRIMKRSEATGLGSARQ

SEQ ID NO: 38361 - protein, 322 aa, Zea mays
  Clone ID: 700048427_FLI.pep
VLGKIWSVAFKYHFRMPPYYTLVLRSLASLEGLAVAADGTFKTFQAAYPYVVRKLLSENSLETRRLLNQAIFNKRKEFQWQKIDAFLKLASARTNFKYNSEVLPEPDMKSMNVASLVEISDAYSLDRAIATPERALHTANLCVRLLLSKESIVIRRLIMTANAKSLARDLISRDALMFRVLLSKVIADVVYQWMLSATGLKRVMETKIQTPMTTGKNEGHLVLAEEPSTLMVLQAAVKDRRIQLMFTKFVRELREEPVLMIRVSWNVFLISVSSAAVGLHRFLVFFLKEDGARFLDDKVKKMKIWLMEFSKRTANLEIQGIL

SEQ ID NO: 38362 - protein, 219 aa, Zea mays
  Clone ID: 700205630_FLI.pep
SVPSPGCSPVDLLHRLSTTRGGRRGALIDSPKMSEVVAMAGQAYMKQLQAHPLRTKAITSGVLAGCSDAVAQKISGVSKLQLRRLLLIALYGFAYAGPFGHFLHKLMDRFFKGKKGKETTAKKVLVEQLTASPWNNMMFMMYFGLVVEGRPFGQVKNKVKKDYASVQLTAWRFWPIVSWINYEYMPLQLRVLFHSFVASCWAVFLNLKAARSIANTKKA

SEQ ID NO: 38363 - protein, 91 aa, Zea mays
  Clone ID: 700206973_FLI.pep
LILFFFVVLQRPSLRCLLVVILELAEVPFLLDQLDVVVLAVELPLVRDVVRRADGASSMAALEAALVVHGVVHSNPLNWIDCLAASDTLLP

SEQ ID NO: 38364 - protein, 159 aa, Zea mays
  Clone ID: 700047958_FLI.pep
HRPLPGRQGVGPARGLLRQVPAYRGEVHLEAVLGEADDPHRRVRVLEVRVQPGEARDPAVPGDAVRAQVPHHGEHRAAGRGGRALQQVMRDGGHRPDRSMSEREHSECRVFSLAISFFLLFPSRRRKKKSLLLLGGGRSLLLFASRVKFTYLVKVLFHH

SEQ ID NO: 38365 - protein, 144 aa, Zea mays
  Clone ID: 700051632_FLI.pep
RVLRLISVICLHDKECTVSSSLLQNKGKMARGGRLLILSLGLVLLYFVSGSVAAAAAQKTWCVAKPSASNDILSLNLNYACSQVSCGVIQKGGPCYYPDNLVSRAAVAMNLYYAANGRHPWNCYFNNSALVVQSDPSYGSCTYY

SEQ ID NO: 38366 - protein, 117 aa, Zea mays
  Clone ID: 700044561_FLI.pep
YHLDDGRDRDHHLILNIHPAPRELNPPSMVVVLRERPPSSPLGRLRPRSIVLRMYGVVVHLRPEAQQYHFVGLLNLRQDLDVASILERCHHEDFYSILVSSSLQRHMSPHSPFRATF

SEQ ID NO: 38367 - protein, 358 aa, Zea mays
  Clone ID: 700045215_FLI.pep
QRSQRMRQISSLLQGLARSLSVGRDRDRDRDRKGNGAGDRKTAVPAVLRTSGTLWGDGSDTFAAVCSRRGEKGINQDCSIVWEGFGCQEGTIFCGIFDGHGQWGHYVAKAVRDSLPPSLLCHWQEALALASLIDDGEKKLGDCQFDLWKRSYVAACAAVDDELRRSRRLDAVQSGCTALSIVKQGDLMIVANVGDSRAVLGTTSGDGTIVAVQLTVDLKPNLPQEKERIRRCNGQVYCLADEPGVHRVWQPSRESPGLAMSRAFGDYCVKDCGVISAPEVTQRRIGSSDQFVILATDGVWDVLSNDEAVHIVAGTPDRAKAAKRLVECAVRAWRRKRRDIAVDDCSAICLFFHPPPPP

SEQ ID NO: 38368 - protein, 250 aa, Zea mays
  Clone ID: 700093523_FLI.pep
VIQMPEGEIEELPYALKKVEPGDRLEVSQENGTELSEKASFYKGVFYNYLSIGMDAQVAYGFHHLRDEKPYLAQGPVANKLIYAGYSCTQGWFCTPCTASPQLRGLKNILRLSIKKANCSEWEQVKMPSSVRSLVVLNLYNYGSGRHPWGDLRPEYLEKKGFVEAHSDDGLLEIFGLKEGWHASFVMAELIKAKHIAQAAAIKFEMRGGEWNRAYVQMDGEPWKQPLLQEHSTIVEINKVPYHSLMINGE

SEQ ID NO: 38369 - protein, 58 aa, Zea mays
  Clone ID: 700042216_FLI.pep
RSSSRPAEFPLSFKTPVRACVPTPNGASVPHRAALGAVKMNNSDGCENKTQTFLNTWR

SEQ ID NO: 38370 - protein, 349 aa, Zea mays
  Clone ID: 700076005_FLI.pep
HASVLGFQLNPTPMHMPGLIIPSSDDSKVFLTYYNDSLVRDGTSGQVVSFAGVAKILGGLNPNYGNSAPKVMFYSARGPDPEDNTLSNADILKPNLVAPGSSIWGAWSSVGLDSAEFAGESFAMLSGTSMAAPHVAGLAALIKQKFPSFSPAAIASALSTTTTLSDRQGKPIMAQRTYSNPDLTQSPATSFDMGNGFVNATAALDPGLIIDCSYDDLFSFLCGINGSSPVVKNYTGNSCVASTMTGADLNLPSITIAVLNQTRTITRTVINVAADESYSVNYSAPNGTAVSVVPTQFFIPSGQKQLVTFVVNATINSSTASFGNVGFQGNKGHRAIMPFSVISKVVYSS

SEQ ID NO: 38371 - protein, 394 aa, Zea mays
  Clone ID: 700151403_FLI.pep
TILDVHGVGWKNFSKIARDLVRCMQKIDGDYYPETLHQMFIVNAGPGFKLIWSTVKGLLDPKTSSKIHVLGTKYQSRLLEAIDASQLPEYFGGSCTCSNHGGCLRSNKGPWSDPSIMKLVHSMESLKEIGQVSDIEETVTGSMRLRALKLPERISDTSNAESGSDVDDLGSPVAPEDVEYPSLAPVREEARESGSTTYSGSIGMSRMADKVVGSNGRYNSTGNETRQVNAEQGSLINGGLLAPGQRAPNDAVGNDDGFLKYISRRVVAIFLEVLSFLRFFIRRRQHSENVHSHTATAPSSLANLQTIKEDRVNPCLERLDRLESMFNQLSKKPPELPEDKDRAIQDSFDRIKSIEFDLQKTKKVLHATVIKQMQMAETLEAVTEPDLRRRKFCT

SEQ ID NO: 38372 - protein, 295 aa, Zea mays
  Clone ID: 700151656_FLI.pep
VIPIFNGECGACAYCESDRTNLCGTYRVDASKSTMVSDGGTRFSVADRVSGRTVPVYHFLNTSTFAEYTVLDAACAVKVNPEAPLQKMCLLSCGISTGVGAVWNTANVSAGSTVAIFGLGAVGLAVAEGARLRGAARIIGVDINPEKFTKGREMGVTDFVDSRASDKPVHEVIREMTHGGVDYSFECTGINGVLREAFVSTHDGWGLTVVLGIHATPKMLPLHPMELFDGRRITACVFGDVKGKSQLPAIVDKCVNGDLDINLDGFITHRMPFSDINKAIQLLEEGKSLRCVLNL

SEQ ID NO: 38373 - protein, 143 aa, Zea mays
  Clone ID: 700151887_FLI.pep
LKVSRRHIDLTKYEPLMLNQPLGYTQHSFRHSDGKNLFSEALFSGGEEDNSLVSPDLEFFIILVGAVHVADQVDHAGAVSPLVVVPGHELHEVAVQGNASLSIKDARPAVTLEIGGNKVLLNVTQDALEATFCLGLDRSLDLI

SEQ ID NO: 38374 - protein, 837 aa, Zea mays
  Clone ID: 700152959_FLI.pep
LPPQLICQLHNVTMHADAETDEVYAQMTLQPLSPQELKDPFLPAELGTASNQPTNYFCKTLTASDTSTHGGFSVPRRAAEKVFPPLDFNQQPPAQELIAKDLHGNDWKFRHIFRGQPKRHLLTTGWSVFVSAKRLVAGDSVLFIWNDNNQLLLGIRRANRPQTVMPSSVLSSDSMHIGLLAAAAHAASTNSRFTIFYNPRASPCEFVIPMAKYVKAVYHTRISVGMRFRMLFETEESSVRRYMGTITGISDLDPVRWPNSHWRSVKVGWDESTAGEKQPRVSLWEIEPLTTFPMYPSPFALGLKRPWPAGLPSLYGGRGDGLTSSLMWLRDRANPGFQSLNFSGLGMSPWMQPRLDNSLLGLQSDMYQTIAAAAAFQSTTKQVPPSAMQFQQPQNIADRSALLSSQILQQVQPRFQQIYPQNLNENKIQGHTQPEYLQVQQQLQRCQSFNEQKPPMHPQQQQQEPQKQQCVQTPQDQQMQEQKHLHNFHSLPDALSAFSQLSPATHSPPSALQTVPAFSHQQNFPDTNISSLSPSTGPSMHGMLGRLPSEAASSLPCVAMNAPVSVSDPWSSKRVAVESVNPCRPHVSPHIEHLDMATCNMPQSSALAPLPGRECLVDEDGCSDPQNHLLFGVHIDSHSLLMQGGIPALQNDNSSGTIPYSTSNFLSPSDNDFPLNQPLRSAGCLDESDYLPCAENAEQANQQFATFVKVYKSGTVGRLLDITRFSSYDELRSEVGRLFGLEGQLEDPLRSGWQLVFVDREDDVLLVGDDPWQEFVNSVSCIKILSPEEVQRMGKPGIQLLSSAPSRRLGNGCDSYASMQEPRGLDAGMAPVGSVEF

SEQ ID NO: 38375 - protein, 295 aa, Zea mays
  Clone ID: 700072074_FLI.pep
AKMLRRNIRQRREYLYSKSLEGPQRALFEKKRRIRAALEEGKPIPTELRNEEHDLRRQIDLEDQERQVPKSIVDNEYATATIREPKILLTTSRNPSAPLTQFVKELKVVFPNSQRMNRGGQVISEIVEACRSHDITDLILVHEHRGQPDGLIVSHLPHGPTAYFGLLNVVTRHDIKDRKTMGKMSEAYPHLILDNFSTQIGERTATILKHLFPVPKPDSKRIITFANRDDYISFRHHVYEKPGGPKSIDLKEVGPRFELRLYQIKLGTVEQKEGQSEFVLRPYINTAKKQKTLGA

SEQ ID NO: 38376 - protein, 277 aa, Zea mays
  Clone ID: 700152962_FLI.pep
ERRGRVSSKRPKPKQRTLAFPHQGVHPSSHGDGVQDGDGGDEREGGVPALVHGDEVEEGAPLRGVQDRRAVARRAGGQGGRPRGRVRGARGRAARRRLPLRRLRLRLRHRRQLPEEQDLLHRLVTGGVEDQGQDPVRDIEARPAAAAGRGPLRGAGHRPLRDGLRRHQRPRAMRPPLRSAPIYVLTCAWACSPTTHCSVVSSHLRSCVCVCDRPDANWRWCAPVAIDAANLTRLRVCLLCYFRFSGEMVQAWCVDVDGWSRSSGEWQRTNETSTSAT

SEQ ID NO: 38377 - protein, 398 aa, Zea mays
  Clone ID: 700154924_FLI.pep
LLSPTSRSGSRERGCREIEIRRPRVGAPPPATAAMAGTVTVPGSSTPSTPLLKDELDIVIPTIRNLDFLEMWRPFFQPYHLIIVQDGDPTKTIKVPEGFDYELYNRNDINRILGPKASCISFKDSACRCFGYMVSKKKYIYTIDDDCFVAKDPSGKDINALEQHIKNLLSPSTPFFFNTLYDPYREGADFVRGYPFSLREGAHTAVSHGLWLNIPDYDAPTQLVKPKERNERYVDAVMTIPKGTLFPMCGMNLAFDRDLIGPAMYFGLMGDGQPIGRYDDMWAGWCVKVICDHLSLGVKTGLPYIWHSKASNPFVNLKKEYKGIFWQEDIIPFFQNVTIPKDCDTVQKCYIYLSGQVKEKLGTIDPYFVKLGDAMVTWIEAWDELNPSTPAAANGKAK

SEQ ID NO: 38378 - protein, 612 aa, Zea mays
  Clone ID: 700094420_FLI.pep
QGHMEQLEASAHHQQLDQYLPMFDLPPKILCRVVNVELRAEADSDEVYAQIMLQPEADQNELTSLDAEPQEREKCTAHSFCKTLTASDTSTHGGFSVLRRHAEECLPQLDMSQNPPCQELVAKDLHGTEWHFRHIFRGQPKRHLLTTGWSVFVSSKRLVSGDAFIFMRGENGELRVGVRRLMRQVNSMPSSVISSHSMHLGVLATASHAISTGTLFSVFYKPRTSRSDFIVSVNKYLEAKKQKISVGMRFKMRFEGDDAPERRFSGTIIGIGSLPAMSKSLWADSDWRSLKVQWDEPSSILRPDRISPWEVEPLDAANPQSPQPPLRAKRPRPPASPCMVSELPSGFGLWKSPIESSCTLSFSEPQRARELFPSIPTSTLSSSSNVSFNSKNEPSMLTSQFYWSARHTRADSCAASTNTVVIEKKQEPSSGGCRLFGINICSAEEEVLPEVTAPGVGYEQTAASVELNSDKLSQPSDVNNSDALAASSERSPLESQSRQVRSCTKVIMQGMAVGRAVDLTKLSGYSDLCQKLEEMFDIQGELGSTLKKWRVIFTDDEDDMMLVGDDPWDEFCRMVKRIYIYTYEEAKKLTSKSKLPVSSDSSKLSAANSLSE

SEQ ID NO: 38379 - protein, 276 aa, Zea mays
  Clone ID: 700097238_FLI.pep
CTNVLVELEAGEHVVVDGVGEVVEQVLERANAGDEPLDEVTEDGEHGEPAVLDLLELELIHLLLGLAEAERVEEGPAGVGRVAGAGEELLEAEEVLLAHGARVVPVLEAAVLGEAHERHVEDEERVGVGPVVVGARGRDDARLEPRQRGLRRDDAHLAEDLRGDGAHRAQHGVAAVDHLAVGQPLGLDEAPGALRVREAQRVEAIVAGQRAIEVGEGLLGREPQLPVGTLLGWRAGAGPDDEGRLPRRRPRDGRLHGAAQQLPAGEESLGRHRSGT

SEQ ID NO: 38380 - protein, 155 aa, Zea mays
  Clone ID: 700098737_FLI.pep
SGFMARYRSDLQGELSSLDDSMEDPNGYLRFDVGGIEELENYFIFNDRHRGMRMDIDGMSYEELLALGERIGTVNTGLSDDALSACLNRRLYMPTASGSHEDCERKCSVCQEEYLAGEEVGEMACKHYYHLSCIDHWLRQKNWCPICKSVALKIN

SEQ ID NO: 38381 - protein, 363 aa, Zea mays
  Clone ID: 700101807_FLI.pep
FMKKMLYLYFRCRPSFSTFWFAAFPLHQLWISFLFPDITDERSKIDDHNSKFDLGVPDDLDVSIELRNWLFALEGTEEVGYLFSPRGGDGISREEKCWHSTFRNLHISGKSSDRLKLGGRRKVSPEKAFPVERFTAGIEGLQAIKPRLRDQCTKKGPSNNHEMGRDFNSSSSVGDHGVDVEATMVIGEDEIEGAKWTMDNVKFSVKEPIEAVATKEELEHLVMLCRSEADAMGRITAGILRLLKLDKSLGQGTIEQLRNLGSGGMDNIFSPRRLSRQNSFGSIGTPRTPTMQAIADVMGSKTTLEATISSLQGEISESKAKCMALISQASSTEDQNRAEDIRQLSEKLESMQSLVTRLRTLII

SEQ ID NO: 38382 - protein, 224 aa, Zea mays
  Clone ID: 700097379_FLI.pep
PKKRKATARWTSQQVRVSADDGHSWRKYGQKDILGARHPRAYYRCTHRNSQNCLATKQVQRADDHPALFDVVYHGEHTCRPAAAGGGSKRAQQHNPHAQAALQGLAARLTVATTTTDNAAGLPPMTPESCPVRGASSPWSLASPVGSDFNGCLHQGISPCPVPGYRDWTSDVDLQEVVSSAFAAVSSVAPLPVPDDEFMPLECVEYVFDQNFDIDTAMPSLYYP

SEQ ID NO: 38383 - protein, 276 aa, Zea mays
  Clone ID: 700100816_FLI.pep
FIYRVQTGICDSLQRQWQCRGGSQRKGLAVDVEHLRARQVRFLHAAEVDDLAGGCAGALQLLVAAAGVGHDGFHGGEQAAVGDPLGLAFHRLDEAVGHGPHRRAGLRRHAELAFAVAVAADKHRLAAARALADARRWTVILPLPVPGPGHVAEEGEVEDGIAVARVDDGVELGAGHQRPDDGLVDLVVQDGALLERVHRADGLVVPVLLVAVRVGDLRAQPREVEHQGVAAAAPLHQPLHRHPDVVLGGHPERVLLVVSEHDDAVAGEGEALAEEL

SEQ ID NO: 38384 - protein, 259 aa, Zea mays
  Clone ID: 700105418_FLI.pep
SVRLAAFRESGYKMLLQGGEVVNEEEVTVLENSYGVNGNGVPAIYPMDGHAENGHKTMAKGLDGKNGFVSKSLEKRAVAALNKFGENAKMMSDPMWIRRLQPTPEPTVMVAEKPTLASIWSAKGGTGRLFVLGEVVHIFRPLVYVLLIRKFGIKSWTPWLVSLAVELTSLGVHSHATDMNHRLGKVHQLSSAERDELKRRKMMWALYVMRDPFFASYSKRHLLKAEQVLNPVPLIGFLTGKLVELLEGIQTRYTYTSGS

SEQ ID NO: 38385 - protein, 212 aa, Zea mays
  Clone ID: 700106650_FLI.pep
YLFFTVGLGLFNCKPGQLCAGPNNNTRFAASMNNVSFVFPQTDSLLHAHYYKIPGVFTTDFPAYPPVQFDYTGQNVSQALWQPVPATKLYPLRFGSVVQLVLQDTSIVTPENHPIHIHGYDFFILAEGFGNFDPKKDVEKFNYVDPPQRNTVAVPVNGWAVIQFVADNPGVWLMHCHLDVHITWGLAMAFLVEDGYGELQSLEPPPVDLPMC

SEQ ID NO: 38386 - protein, 381 aa, Zea mays
  Clone ID: 700236002_FLI.pep
DADLYAPAKELYLGDRCQVADTPAPWQFWMVMLKNGNLDTTAAACPENGRPARPFPQTSRFPCPAGAGCMNQPLLFHNRTALDDAGRRLRGGLFGTYDLDAAAGLGAGDVSFYSVTWEKDVAASGRGGGWAFHHKLRTSTKYPWLMLYLRSDATRGFSGGYHYDTRGMTKTVPESPDFKVRLTLDVKQGGGRNSQFYLMDMGSCWKNDGRGSTSARRGTPSGTAAACTAATGPASPTAPTTCTAPPGTRRARSSPPPTATPTATRRRRRSCSCCRTPCGASSATRRPGGRGGSATPGRGTSTSAPCPRRSTSTRTPARRRPGGGGRRSTSARRYTSATGPRRRSGRSVASTSLCRTSVPSHSNGPATAAGRQTLYCHCTLR

SEQ ID NO: 38387 - protein, 301 aa, Zea mays
  Clone ID: 700239275_FLI.pep
LSSPATASDHPSTPIHPPARRRLDPLPCLPCPRPNPVAAATAIAAAAAGGRAVGAEMKEVVLHVYDVTNSDSEKTNNTILQINRIFKDRIGLGGIFHSAVQVYGEDEWSFGFCESGSGVFSCPIGKNPMYTYRERIVLGETECGIAAVNRILRELSREWPGHSYDLLSRNCNHFCDVLCERLGVPKLPGWVNRFANAGDTAVVVAENTAVKFRQAKTEIVNASRVAYRFMAGLTSKNQASPESPGNNQNRGSPSFQGAWFKNIVSAGAKPSSSGSTRTHFQDADDGTPLQHQSSTEQSTQL

SEQ ID NO: 38388 - protein, 235 aa, Zea mays
  Clone ID: 700240467_FLI.pep
VTNSDSEKTNNTILQINRIFKDRIGLGGIFHSAVQVYGEDEWSFGFCESGSGVFSCPIGKNPMYTYRERIVLGETECGIAAVNRILRELSREWPGHSYDLLSRNCNHFCDVLCERLGVPKLPGWVNRFANAGDTAVVVAENTAVKFRQAKTEIVNASRVAYRFMAGLTSKNQASPESPGNNQNRGSPSFQGAWFKNIVSAGAKPSSSGSTRTHFQDADDGTPLQHQSSTEQSTQL

SEQ ID NO: 38389 - protein, 201 aa, Zea mays
  Clone ID: LIB3354-069-F11_FLI.pep
NPTFTSIICGSWILNVGTGDDVGSVTRFPLLLPLVLPFPLERQTCKHDRFRGSHCSDPNSCLVLLDRRVEQVSYHVYAAVLELSGDGVLVHVDVVLVDGVHDELVALGLHPRGDEGRQVQARVAVQHELVADDLLRRLPRDRPLRHPVPRQALAHVARREGGGHRVVVVPAGARVREHHGCRCGTVLGFVFGGGGTLVLME

SEQ ID NO: 38390 - protein, 198 aa, Zea mays
  Clone ID: 700235889_FLI.pep
AAAAAATGASGFEFGVDPNVDPELALALRLSMEEERARQEAIAKKAAEDTSNTEHNNVPSSNSDSVMAEGEPASNAAAGDKEQPKDDDDLLQQALAMSMEGGASGSAAVTDSAMAEAGAVDPDLALALQMSVQDANMSSDTDMSKVFEDRTFVSSILNSLPGVDPNDPSVKDLLASLHSQGEQEKKEDTSDKTEDDKN

SEQ ID NO: 38391 - protein, 133 aa, Zea mays
  Clone ID: 700242839_FLI.pep
AYAWARPAEPEPQPQPPRRRVGPGEEAAQVPRPQPGPLHQPAVPGGGGGDGGGCDESETGGEAGGRALLRLQPGTPQDRGLQVQQQQLPRAQDRHARLQKPRDEMSALLPSLCSFSPPVVLVFVLPHLTWMMN

SEQ ID NO: 38392 - protein, 378 aa, Zea mays
  Clone ID: 700103877_FLI.pep
RQARNPPMAHRVLLLLSLASAAAVAAAVDAEDPLIRQVVPGGDDNDLELNAESHFLSFVQRFGKSYKDADEHAYRLSVFKANLRRARRHQLLDPSAEHGVTKFSDLTPAEFRRTYLGLRKSRRALLRELGESAHEAPVLPTDGLPDDFDWRDHGAVGPVKNQGSCGSCWSFSASGALEGAHYLATGKLEVLSEQQFVDCDHECDSSEPDSCDSGCNGGLMTTAFSYLQKAGGLESEKDYPYTGSDGKCKFDKSKIVASVQNFSVVSVDEAQISANLIKHGPLAIGINAAYMQTYIGGVSCPYICGRHLDHGVLLVGYGASGFAPIRLKDKPYWIIKNSWGENWGENGYYKICRGSNVRNKCGVDSMVFTVSAVHASKE

SEQ ID NO: 38393 - protein, 212 aa, Zea mays
  Clone ID: 700236816_FLI.pep
TVGLEFPASKFTSTEAGNIDSYSIFTPTCHASFASSKNKVMKRLHSAGKMGEQYDPCTEKHSTVYFNLAEVQKALHVNTVIGKSKWETCSEAVNTHWGDCERSVLHIYHELIQYGLRIWVFSGDTDAVIPVTSTRYSIDALKLPTITPWHAWYDDDGEVGGWTQGYRGLNFVTVRGAGHEVPLHRPKQALTLIKSFLTGSPMPVQSSTHSNM

SEQ ID NO: 38394 - protein, 354 aa, Zea mays
  Clone ID: 700243086_FLI.pep
TQATTANLLRLQLIMGSMTWLAAVLAALVVAASSSVASHASPPGKLEVGFYEHSCPQAEDIVRNAVRRGIAREPGVGAGLIRMHFHDCFVRGCDGSILINSTPDNKAEKDSVANNPSMRGFDVVDDAKAVLEAHCPRTVSCADIVAFAARDSAYLAGGLDYKVPSGRRDGRVSKEDEVLDNNVPAPTDEVDELIESFKRKGLNADDMVTLSGAHTIGRSHCSSFTERLYNFSGQLGRTDPSLDPAYAEHLKMRCPWPSSNDQMDPTVVPLDPVTSATFDNQYYKNVLAHKVLFISDNTLLENPWTAGMVHFNAAVEKAWQVKFAKAMVKMGKVQVLTGDEGEIREKCFAVNPHY

SEQ ID NO: 38395 - protein, 216 aa, Zea mays
  Clone ID: 700243517_FLI.pep
NQHRRIDRASSGLSWVLLLADRLVGGDEDVAVDEPRQATADEGADPVHPVAGEVAGRHGGAEGAGRVHGAAAEGAGGQDVGADDEADGHGRDGAQGPLLRVGRGGVHGVHQREGDHDLHHHALDLADPGDAVRRDSLSVCDVLQEKARHGSAEKLGNPVEDAGEDGDVAADGEAEGDGGVQVAAGDVGGHGDADEERERMGDGDGHQAGGVQSAAL

SEQ ID NO: 38396 - protein, 227 aa, Zea mays
  Clone ID: 700243667_FLI.pep
GRQRRRVGRPRLIRPLPEVLLVGGVRGQRVDDGHERGGLRQAGQRRQEEAVRVGHQVRVLRVALGGHQPPHQRRPVRDVAAQRVLPEVERRVLRRGEPQQRRQQRRQVRGRRQARPPRRVALVRVPRVHGLPVPRLQLGVALHGLVGRVVHGHVGVAPPPDGRPEQQPVGGVRVVLDEQPETVRLRRVLHGHSSVTREHHVSLNAARISSFPCTALHEALQLHRCSS

SEQ ID NO: 38397 - protein, 205 aa, Zea mays
  Clone ID: 700106765_FLI.pep
APLAPASCCFFPSSRAAASAPNQATRQQQQPCTAAALAPSGPVLPRSRRRPLPSYLIAHRSMAAKWAQKTVVIPAHRRGCHLITPKILREIEGDLAGFKCGLAHFFLQHTSASLTINENYDSDVQADTETFLNRIVPEGHNAPWKHTMEGPDDMPAHIKSSMFGCSLTIPITDGRLNTGTWQGIWLCEHRDHASPRKIVITLNGV

SEQ ID NO: 38398 - protein, 138 aa, Zea mays
  Clone ID: 700239558_FLI.pep
LSGTLGYVAPEYLLDGKLTEKSDVYAFGVVLLELLMGRKPVEKMSQTQCQSIVTWAMPQLTDRTKLPNIVDPVIRDTMDPKHLYQVAAVAVLCVQPEPSYRPLITDVLHSLVPLVPVELGGTLRVAEPPSPNLKHSAC

SEQ ID NO: 38399 - protein, 290 aa, Zea mays
  Clone ID: 700220425_FLI.pep
QPRKGGNPSQLIPNPKPPIHPSPPHPLRAAMACSFAAATVVSFAPTPAARPLAAAPQSVSVSRSAVATAARPLRLVASRSARAIRLVARAGGVDDLPLVGNKAPDFEAEAVFDQEFINVKLSDYIGKKYVVLFFYPLDFTFVCPTEITAFSDRYEEFEKLNTEVLGVSIDSVFSHLAWVQTDRKSGGLGDLKYPLISDVTKSISKAFGVLIPDQGIALRGLFIIDKEGVIQHSTINNLAIGRSVDETMRTLQALQYVQENPDEVCPAGWKPGERSMKPDPKGSKEYFAAV

SEQ ID NO: 38400 - protein, 445 aa, Zea mays
  Clone ID: 700220482_FLI.pep
TSRLSTATQLQQYAARMYGGQMSFSGGGGLVGQQQLAGRAPMLGQGQLGMLQGQGNAASAAHFGLQSQMLAQARQKVMAQNTQLNNANTAQVLQGMQPMGVMGAMGMNQTRPNVTIPYGAQQRFAQAQMRPQASQQPALSPQKVPGQGLSRTASITALNSQLSGSSQNGQMVAMSMPQQQQQQQQWLKQMQPSMGSPLSPQQQYQNQQRLLLMQHLQQKTGLNQQQLLQIQQQHPHLNVQQLIKQQQFLKQFQQQQPLQSPRVLASGSQKSANLTGSQPGTPLSGGTMTGGSGSQGAEGTSQLLGKRKIQDLVAQVDPLGKVDPEVEDLLLEIADDFIGSVTAFACTLAKHRKSSVVEAKDVLLHLEKNWNLSIPGFSRGDKNPQRNSAKQLVDPQHSESDVTGIRGTSNKLGANNSVGNHQIRPPMAEPSAMPTMGPLSKAPRF

SEQ ID NO: 38401 - protein, 500 aa, Zea mays
  Clone ID: 700220675_FLI.pep
SGAAFSFTDDVDPSTEPSFDPVVVRVKSDVVEQQIRSARDMPRESDLLFSDTTKQINPLYAAVDHSTNGGSDLTLSQVACRAIILDGTSMPPQAYESIITVFIIDSCGVRGIIPGTILGFLVEKLQEFAAKDINDFFLEHNPRILPPSSGGDLLGLFSTLLGPKHDDQYLHALVRELLDETRFIQALHNSINPNLVAMVTIVSTPSSTLIDAQVVFDEMQPRMNVNTGVARLNPQGSFQYGSINLSQVYKLGNEPHVIINGKKRTTLYFRPATPRSLGALYNKKNVFTLDFPTMPIDGPVIRTSVINSTYKNFLEIVFQNNDTSVQTYHVDGYAFWVVGMDYGEWTENSHGTYNKWDVVSRCTTRAFPGAWTAVTLSLDSPGFWNVRTEDLDTWYITKLTSASYMGVVLLGSSAIKFLCIMRGTQGVLIVASALQIIVTFSGLWRNVARYPSSLSAAPLVALVVFGLYELEIPSVTKCVEIGLPGLILLLIFAMYLPHTV

SEQ ID NO: 38402 - protein, 802 aa, Zea mays
  Clone ID: 700089329_FLI.pep
IALDPNYARNYRRFATGGLAGQVLVLTKKSWGGYHKKVLRDGEGPIHSMKWRADLLAWANDAGVKVHDMRTDKGIAFIERPKGIPRPEFLLPHLVWQDDTVLVVGWGTSVKIAAIRTDLSQGLNGLQRTITTASSEKYVDIVGSFQTGYHISGVAPFGDLLVVLAYIPDEDEKEKTFSTSVTSRQGTAQRPEIHLVSWKNDELTTDALPIHGYEHYKAKDYALAHAPFSGSSNAGGQWAAGDEPLYYIVSPKDIVVAKPRDAEDHIAWLLQHGCHEKALAAVEAGQGRTELLDEVGSRYLDHLIIERKYAEAAQRCPKLLRGSPSAWERWVFHFAHLRQLPVLVPYIPTENPQLSDTAYEVALVALTTNPSFHELLLTTIKNWPPTLYSASPVISAIEPQLNSSSMADSLKESLAELYVINGQYEKALSLYAELLKPEVFEFIEKYNLHDAIHDKIVNLMIVDNKRTVHLLIQHRDIIPPYEVVEQLLHTSKKCDKRYLLHLYLHALFEIDIHAGKDFHDMQVELYADYETRMLLPFLRTSQHYRLDKAYEIFAQKELVREQVFVLGRMGNAKEALSTIINKLEDMQEAVEFVTEQHDDELWEELIRQCLQKPEMVGNLLEHTVGNLDPLYIVSLVPDGLEIPRLRDRLVKIVTDYRTETSLRNGCNDILKADCVNLLVKYYHEARRGVYMVSMDEEVHGNRADDGSSRGHERSSSVRALDIKSRTRCGARCCLCFDPLPIQDISVIVFYCCHAYHLSCLEGGLDSMRSNSGQDSDGGMDDEDGSPSGQSRMRCVLCTTAAS

SEQ ID NO: 38403 - protein, 141 aa, Zea mays
  Clone ID: 700224462_FLI.pep
SSIEIVVTLNYPLSNQIRVQLETLLSEKSRLAQENSTYARENRFLREIVDFHQFTTHDVVSLDDGDMEGTEPEEDDDNDNGLICAENVLPAVEENPVDEEHCPVPSKLESPVASLGEPSSSPRSSDCHSASKPDASASDVA

SEQ ID NO: 38404 - protein, 271 aa, Oryza sativa nipponbare
  Clone ID: LIB3433-043-B5_FLI.pep
PNGAAPISSTDKPISARWRILMPDGSYGKYPKPRRLAASEIPEIVEQYRQAAINAIEAGFDGIEIHGAHGYIIDQFLKDGINDRTDEYGGSLSNRCRFLLEVTRAVVSAIGADRVAVRISPAIDHLDAYDSDPIKLGMAVVERLNALQQQSGRLAYLHVTQPRYTAYGQTESGQHGSAEEESRLMRTLRGTYQGTFMCSGGYTRELGLEAVESGDADLVSYGRLFISNPDLVERFRLNAGLNKYVRKTFYTPDPVVGYTDYPFLGQPKSRM

SEQ ID NO: 38405 - protein, 145 aa, Zea mays
  Clone ID: 700085101_FLI.pep
SSERSLNESESRQVRSCTKVIMQGMAVGRAVDLTRLDGYADLHRKLEEMFDIQGELSANLKKWKVIYTDDEDDTMLVGDDPWNEFLRMVKRIYIYSYEEAKSLTRKAKPPVVGDTIKPDPNKLPPESDVPHDSNNNAPVAADYQD

SEQ ID NO: 38406 - protein, 616 aa, Zea mays
  Clone ID: 700221310_FLI.pep
YFLIKIKLEQNLLDAYSGDGWNGQSREKIKPEKELQRARKQIIKCKIAIRDIIRQLDLYTSTGSVDDPLMPTDQSTNPEHTMCSTCKSHESFPSNKIIFCKGPCKRACHEKCLEPPLNKSVLPTSSHGWLCKFCLCKVRILETINAHLGTSFTVKCHFEDIFKETTELIDSEDALDEDWLSEYSGDEDYDPDENEASGDCMDSGEKIMSDDSNGSGSPLYSPNDDIPDFISADLNVVEGFCHTNLDLGIDAVEDDFAQILTYQRPRRDVDYRRLNEEMFGKITGNEEQSEDEDWGHERRKKRTHSGVAGDNSVGFLNVISDEKSQKKGRKLFRIPPAAVEVLRRAFAENELPPRDVKENLSRELGISFEKIDKWFKNTRCAALRDRKAEGNSHNTAPSKSSKNKGKAGISGKTGRNGHVTGPCNNLRTNEEKTGISGKFDSGDNSCLVPFSEVINVPTRLPHNFEMRKMESTRSPARLHNKGGCLSATIQIKESTLLPTGKPCWQSEMSHPTTNEVSTSAQATTWIDAGACAEEQEPTPWVDIGASDYQPFLDVIDDMCGLEWRLQRLKENMLSSSIDGQTAASESDKRNQTVVLVPTAELKEKLPHDGLFGHYCP

SEQ ID NO: 38407 - protein, 478 aa, Zea mays
  Clone ID: 700082985_FLI.pep
LGVVTPTMAIVLLALLLFPSAYAQPWSVCGNTGNYTAASTYQDNLSQLAASLPKKASSNTSPLFATGTAGAVPDLVYALALCRGDINASACKDCVTIGFEDAQQLCAFNKEATVYYDSCLVSFSNEDFLSTTVNGNENEVTVLMDAQNFTESADYIRLLLFTLLNDTSESAINSIRRFTTARMDISSLPTIYCAVQCTPDLTADECAACLQDFPQVTLQYLDGQRGGRLLGVRCNMRYEIYKFYQGDPMLRIISLASAVPTIGKTPPGTPVTVYPQPPPAAPPAPQMITTPIAAQEETGRKGKLWIIGIAIPLVAILLCSTFTFLWLRRPKKGVLSSQDRAGANRIEENALVWTIEQKSSEFTLFDLSELLEATKSFAEENRLGQGGFGPVYKGQLSDGQEIAVKRLASHSGQGFTEFRNEVELIAKLQHTNLVRLLGCCIQAEEKFWCMNICRIKAWTSLSLMKDKAVCLIGINGVP

SEQ ID NO: 38408 - protein, 167 aa, Zea mays
  Clone ID: 700084820_FLI.pep
KWKGSEVIYFGDHLLSDLRGPSKAGWRTAAVIRELEDEIEIQNGDSYRFQQAKLSIIHDLLGKVHAAVVSTEKGQVYKALLNELNAERRQCRSGMRDLFNTSFGATFLTDTGRESSFSYHIHQYADIYTSKLENFLSYAPESWLHPPHDIKIMPHNAKVPASLFSTS

SEQ ID NO: 38409 - protein, 348 aa, Zea mays
  Clone ID: 700219691_FLI.pep
LLKQRAATNARRLAKADSFFRLREGKKRKKWQGKRHDTPSAPSRSSIDQVCGRRRASLAGGLSLHGQRHGARHGAVLERVQHLQVPPGLAPLQVGHVLPEPVHAGEGHQPLRVELPGVLLLDTLEPALGDLAPVARVRLALVEEVHEQGRRLVALVRVDVVARHAVHDDLGRTAVGCGKRGQAAGHGLNHRQPESLVESRLHEGALGVADVAVQLAVADAVHLGGDPADVPVQVVLLDEVKHLLELGLLLLVLGRVAMVAADDHEVHQLLQPLVPAVQLHQPSQVLHTVETSHGEDDWLVPVVQNELVLRVLGLAVQELLNLRVKGGQPLVRLGVREVDGQVRARRHD

SEQ ID NO: 38410 - protein, 244 aa, Zea mays
  Clone ID: 700222024_FLI.pep
TVNPNRMTPTASLLLPAPPFVSISDVRRLQLPPRGGHRPRPCWKGLECGSVQTRMVSSFVGSRTRRRNVICASLFGVGAPEALVIGVVALLVFGPKGLAEVARNLGKTLRAFQPTIREIQDVSREFRSTLEREIGIDEVSQSTNYTPTTMNNNQQPAADSNIKPAPAPYTSDELVKVTEEQIAASAAAAWNPQQPASSQQQEVYTTPSEDAPTSGGSDGPAAPALAASDSDPKQVNLDKAETQR

SEQ ID NO: 38411 - protein, 249 aa, Zea mays
  Clone ID: 700223475_FLI.pep
RSCARSTTLTGKKTFINHLVNQLARHQFLKIACQLERKNIASAYSLLRVIESELQSYLSAVNTRLGHYNSLIQAASEVREQGAIDDRDTFLHAVRDLLCIHSNVQATVPTYMSAHALVQQISALQSDLLSLQSELENTLPADRKRCINELCTLIQTVEQLLFASSTTAEPILTPWPLMRALDDMENANAQVEVSVEEVTKARTQKIKIFENRAHEVGRERQIFVDFFCNPERLKNQVRELTSRVKALQD

SEQ ID NO: 38412 - protein, 346 aa, Zea mays
  Clone ID: 700088489_FLI.pep
KKLYDEVKAGEIMKLEYQRKVALLNRQKKHNAAIEVLEKTKAAVTHLHTRYIVDMQSMDSTVSEIQYLRDNQLYPRLLDLTDRMAKMWEDMKIHHANQLKIVLNLKSVDIPDSNIETSDYHHSHTRQLRDIVDKWITNFTDFMNCQKEYINALYGWLKLNLIPIESSLKEKVASPPRMQQPPIKAFLYAWHEHLAKLPDDLAKTAIVTFRAVLDTILGVQDEELKQKEICEQTRREYIRKARAFEDWCHKHPQPRAIDVDPDSGEGTGHKDVVTEKRFAVESLKSKLDDEIESHNKLSKQVREKSLSILKAHLPELFRALTDFSDASFEMYSKLRLMSLMQDQGNN

SEQ ID NO: 38413 - protein, 341 aa, Zea mays
  Clone ID: 700089067_FLI.pep
HTKVDGRGRRIRMPAICAARVFQLTRELGHKTDGETIEWLLQQAKPAVVAATGTGTIPANFTSLNISLRSSGSSFSIPAHLRAAGPRFGGARGDPWERVVGVGLGFGAAAEDPPSATSSASSPLLLSFHSGSVGLDVSPSPSSAAAGSDLSKKRRWEQEMQQQHQQQYHQQQQMAGYTTQSQMPGAVWMVPSASSNAQAAAAAGGGGGGSNANESIWTFPQPASGGGGAATVYRGVPSGLHFMNFPAAPMALVPGGGQQLGLGGPVPVGGAGNDSSGSASGGGGGEGHMGILAALNAYRAHSAVSDAAPEQNGAEGGSRQHQQHGGGGERQESVSPPSDGS

SEQ ID NO: 38414 - protein, 275 aa, Zea mays
  Clone ID: 700157894_FLI.pep
EVRRSKWKMLTALKCPEVWRPCVYMYISLALSVDIQEGMFFWYTDQSAGLSFHEGFIGFMFAIGSVGSLVGVILYQNILKDHSFRSLLFSSQLLLSLAGMLDLILVLRLNLKMGIPDYYFAVIDEGVSKMINRIKWMPLLVLSSKLCPTGIEGTFYALLMSIDNIGSLTGSWVGGLLLHLLRITRTEFKNLWAAILIRNMMRLLPLALLFLVPRSDPNSTLLPSDLLNEGDDDEAQRVENVELTSLPANRNSCDGKSLHDGERDDDEASLLANRS

SEQ ID NO: 38415 - protein, 394 aa, Zea mays
  Clone ID: 700158374_FLI.pep
DPSHVSIGPYHHIKNPKLVRKQDKIRSLNTVMSAAARVDVESYIDVVAGIEAKARSCYANTFDNHIDSNDFVRMLLLDACYVLVNFGGIGGGGHRGSDMMEDVGVVRDVIYLAENQIPFFVVDEIRKLTIPDGGGGSAPDAITVYVRNLLRELQYSVAMPAVAEPPGPDNLLHLLHMHLMPTVALPSSRSTVGTGKPRRFGRWRSATEYYCAGVGFRSRPLGGKGARSILEVKLDYYGRTLEIPHLKIDAETSRLLRNLMALEQSNPEEVGSHVTAYCVFLSQLAGTVQDVELLSRRGIIAHGLGSHNEVATSLANLCKGIAFGGDDPESNYLRATWEGLEESFRSRPRRWAAWLMLKYFRNPWLAVGLAAAGVGLVCTVVQAVYAVLAYTSNP

SEQ ID NO: 38416 - protein, 157 aa, Zea mays
  Clone ID: 700160175_FLI.pep
HVAGGNILPLQLPELTTSRARQTAFHLLVALAEDGSASGELFLDGGELPEMAGPRGEWSLVRFSCTQGRDGVKLMSHVVHDAYGPSRKLVIGKVMFLGLPSLAPPGEFAVYVNGVKMANSTGATLGYQRRGALGAAQVEGLSLVVVEEFELKVVTSS

SEQ ID NO: 38417 - protein, 205 aa, Zea mays
  Clone ID: 700160929_FLI.pep
AEELVAELASRGLRAVAVRADVSDPDAVRALFDRAEEAFGSPPHVVVACAGIMDAKYPALVDTAVEDFDATFAVNTRGKFLVCREAARRIPPNSGGRIVTFSSTTVAVLPPGYAAYAASNAAVEAMTKVLAKEVAPKGITANVVAPGPVRTELFLAGKDEAFLERVKNSMRIAETTDIAPVVAFLASEASGWVNGQVIRVNGGAA

SEQ ID NO: 38418 - protein, 344 aa, Zea mays
  Clone ID: 700161930_FLI.pep
NRTIEQEASSSNKKPSSIHVSTNGGARRTAEEGVVSGPPASLVCGGPGLPGRPSHGRGEQDRAGDRVLGPEQGRGHAARGLRLGPLHHGDHVLPRRLRPAARRLPVPPGPVGPPDGRHRGRHQALPVRGRAGDALRRRLRLRLLAPVDAGGAGPVRLPLERLPRRVEAGRAPPLRRRVARRRRPVPGARLARRPLRRAGARARQAQHPRRARQAAAPDGHAALRVPARRLPAPRARHGHLRARPRPDLRRRRLRGQVAPRVGRVDGGVPGHQVLRRPHGVGDDARLGAPQERLLRRRAVRAEGGQLRRLHDLGPLLRQTLQLHQHGQGLRLIGFLDSVQSRHAC

SEQ ID NO: 38419 - protein, 423 aa, Zea mays
  Clone ID: 700170064_FLI.pep
KQQQFVPKDWWVEDLTDLDIDAYKQVITAVKTKGTVPKDVIGEAIKAYTYKKLPSLSKVSMIHGDAKVRAMLVTITCLLPSEKGSVSCSFLLKLLKATNLLKCGEMCRKELMKRIARQLEEASVLDLLIPTVDGDTTVYDIDLILSIVEEFVRQDSKNAQRHNGGEVNDHVSAPSASMVAVAKTVDGYLTEVARDPNIPVYKFFSLAETVSTGSRPVHDGLYRAIDMYLKEHPSLGKSDKKRLCALMDCKKLSPDACAHAVQNERLPLRIVVQVLYHEQTRACAAATAIRADSIGIGSYESSRSGATTNTEDEWDGVMAVEDLSLSKTTKLVDKCDTAASTVVVGKDKDHGGNKGATGRVAKGGAGAATPKKALGKTVSGKGQTGERSSSDSSDSAVAVAVLTSQEHPKRTTRARNAAKSAAA

SEQ ID NO: 38420 - protein, 229 aa, Zea mays
  Clone ID: 700171206_FLI.pep
ARRQRHPSRQKPRRPRNLGTVAPLSLSLKSCCWSPLPSLRPPTMDEAQVVESKDGTISVASAFAGYQEAVQDRDHKFLTKAVEEAYRGVDCGDGGPFGAVVVCNDEVVVSCHNMVLKHTDPTAHAEVTAIREACKKLGKIELSDCEIYASCEPCPMCFGAVHLSRIKRLVYGAKAEAAIAIGFDDFIADALRGTGFYQKANLEIKKADGNGALIAEQVFEKTKEKFQMY

SEQ ID NO: 38421 - protein, 282 aa, Zea mays; identical to SEQ ID NO: 38021
  Clone ID: 700171786_FLI.pep

SEQ ID NO: 38422 - protein, 514 aa, Zea mays
  Clone ID: 700172325_FLI.pep
SRPFRAPARLLRLSSSAMFSHGADSAHDAGTVGVSSGVGATVPARFVWPYGGKRVFVSGSFTRWSEHLPMSPVEGCPTVFQAICSLSPGIHEYKFYVDGEWRHDERQPTISGEFGIVNTLYLTREFNQINALLNPSTPGSRMNMDVDNENFQHTVTLSDGTIPEGTVRVSEAAIQISRCRVSEYLNLHTCYDLLPDSGKVIALDINLPVKQSFHILHEQGIPVAPLWDSFRGQFVGLLSPLDFILILRELETHGSNLTEDQLETHTISAWKEAKRQTCGRNDGQWRAHQHLVHATPYESLRDIAVKLLLNDISTVPVIYSSSSDGSFPQLLHLASLSGILKCIFRYFKNSTGNLPILNQPVCSIPLGSWVPKIGDPNSRPLAMLRPNASLSSALNMLVQAGVSSIPIVDENDSLLDTYSRSDITALAKDKVYTHVRLDEMTIHQALQLGQDANTPFGFFNGQRCQMCLRSDPLLKVMERLANPGVRRVFIVEAGSKRVEGIISLSDIFKFLLSL

SEQ ID NO: 38423 - protein, 164 aa, Zea mays
  Clone ID: 700165953_FLI.pep
RTRTHQRTGHQPQIPQETKIINQIKQINQPDHVTGAGGRPSHRSIVAQASVLPEVGEVEGRVVELGQELVRRRRGRRRRDLRVAARRVGVGAEPGLAGRADHRRRLRRDHLLLRLAVPPDRRGEVAGVHRRQREVLARVQHRGRRLVLALLHLQQRVLLLHLHR

SEQ ID NO: 38424 - protein, 376 aa, Zea mays
  Clone ID: LIB3060-098-F6_FLI.pep
GQPLRGMEMESTPLLTPYKMGDFNLAHRVVLAPLTRCRAFGNVPQPEHMALYYRQRATPGGFLIAEACAVSESARGYPDVPGLWTHQQVVAWKPIVDAVHASGAVFFAQLWHTGRASPSEFQPNGQAPISSTDKQIPAQVNHSGDVNTFAVPRRLETEEIPHVVNDFRVAARNAIKAGFDGVEIHAANGYLFDQFMKDSTNDRDDSYGGSLENRCRFTAEVMAAVADEVGANRLGVRLSPFADYMDCHDSNPEALALHVIDETLNPLGVLYCHMVEPRMRVNPDDGIMTLEHMLLPFRRAFRGTFIANGGYDREEGNDAIARGYADLIAYGRIFLANPDLPMRFAKNAPLNKYDRSTFYTSDPVVGYTDYPFLDQL

SEQ ID NO: 38425 - protein, 253 aa, Zea mays
  Clone ID: 700163870_FLI.pep
MMHSVGYFGLPVMPATCITISEIVSGSSEQIFPEIFLQSLHECRVCLSENTGRSLLQLPCHHLFCLMCMKSNCRIHVIEGNLTQVWLREDAVAYFKNMFDGGLRPTSNAFNKVIDRWVKVDMLNEAHGFFDMMLEKDIDDVTVVIFYFGGQHVGWEMKTKWLSNGWLCLVCGASDTQELPLHFIKLAKDTYTFDCMFEKIGYGTVRLWFTCCPYYLFEEIIATRNHFFRNVLEHYQCGIEMIRRDLFTGHWKH

SEQ ID NO: 38426 - protein, 102 aa, Zea mays
  Clone ID: 700166248_FLI.pep
KGAQLVAFQLVVPLASIEYIFFFLLLCFIPFFFSLWMTWMCIQLQLLSPSPVDWGVWDLGCCYLLAIATQLLPLLLRCCWLGLYTLCSLWLSVRVHLFTVYD

SEQ ID NO: 38427 - protein, 298 aa, Zea mays
  Clone ID: 700166786_FLI.pep
LNRLCPVDVFLKAMLDVPFVFKRVDAMLYIASFYLEINRLRMSYATLEGACQEMRSSRLFHKVLEAVVNFGNFMSTNSGSPSSKGLEPNTVLKIADVKGADGKAALMQFIVQEIVKPEGYDVMQHGSGACKMSTNTLQCDAECRKHGLEVVAKLAAQLSNTKKAASIDIKRLSQSVSELGMGLGKVHDVVRLNSMVTSVDSARRFHNSMSTFLRHAEEEILKLQSQESICLSSVKEMAEWFIGESVNDEAHMFRIFAGVKEFLAMLDHICKEAGEVSSNNWVGATTASWMAAPMGMMP

SEQ ID NO: 38428 - protein, 182 aa, Zea mays
  Clone ID: 700168187_FLI.pep
WRSKQDRYDEMRRKKDEEREAQERQLEEEARARKAKEEAAAALEFEKWKGAFSVDAEGTTESETQDDGQGLLHNFVEYIKKQKCVPLEDLAAEFRMRTQDCINRIVTLESMDRLSGVMDDRGKFIYISTEEMKAVAEYMRKQGRVSISHLANNSNQFIDLEPKAQYEVESQQDDSAEAGTEA

SEQ ID NO: 38429 - protein, 159 aa, Zea mays
  Clone ID: 700167952_FLI.pep
QNERWNDKYSRVETMMLFWNRSRPSCRKRHREPPPVQCGHRKKSSHLYFQSWIADMVASPRSTSTHTQHTGTLHRRYVHLDTSCMVWSHTMSPLILLCFTGHPFYLPTGMPSSETPQQINLSLPPLPPTAIREYSHMEENMYKDHLSTNLEKYFFFFLF

SEQ ID NO: 38430 - protein, 92 aa, Zea mays
  Clone ID: 700172062_FLI.pep
EDLRHDLACMFGIQGQLEDPYRTDWKLVYVDHENDILLVGDDPWEEFVSCVKSIKILSSVEVQQMSLDGDLGCIPPQTQACSASDDANAWRA

SEQ ID NO: 38431 - protein, 278 aa, Zea mays
  Clone ID: 700167601_FLI.pep
GDARPGDFLFFHYSGHGTRLPAETGQHDDTGYDECIVPCDMNLITDQDFRELVQKVPEGCLFTIVSDSCHSGGLLDSAKEQIGNSTKQNKTQSREPDEPRHSGSGSGFRSFLKETVRDVFESEGIHIPHSRRHGDDDQDDGYAQPTGNGRTKNRSLPLSTLIEMLKEQTGKDDIDVGSIRMTLFNIFGDDASPKIKKFMKVMLGKFHQGQSGEQGSGGGGVFGMVGALAQEFLKAKLEGKEEEAFKPALEQEVHSVDEVYAGSKAWAPNNGIDQWVPD

SEQ ID NO: 38432 - protein, 148 aa, Zea mays
  Clone ID: 700165611_FLI.pep
RAQAAPPRRRGRPRGGRGAAARHGRRRQRPDQARRHAAPDGGGHGVRGHRSAPVRERCGGGRRVGVVRRVVVFIVHIVRLICCRLSVGRDCWTDTKACLFPLLLLLCVSREMPTAAVAGFKVRRSEPVRNCTVLYSGLFCFVGRVAHC

SEQ ID NO: 38433 - protein, 372 aa, Zea mays
  Clone ID: 700170013_FLI.pep
HHKKKHRSLESRGADFDAERRLYSHAFKKSSSLLSRLMKHKFGWVFNKPVDPVTLGLHDYFTIIKHPMDLGTIRGRLSRGQYRNPKEFAEDVRLTFHNAMTYNPKGQDVHFMAEQLLGIFEAQWPEIEAEVNYLASCPPLPKKFPPPPIDLRFLERSDSMRHHVALDTNSRPISHTPTYTRTPSMKKPRAKDPNKRDMTIDEKRKLSENLQNLPPVKLDAVVQVIKNKNLSVKQHDDEIEVEIDSMDAETLWELDRFVSNYKKNLSKQKRKAERAMLARQDAELRAQHPIQQPQPTPVPQEPFGEKSPKQVVKDSLEGEQLPASAPEQNGENRQNASSSSNSSSSSSGSGSSSSGSDSDSSSSDGSDAGNSS

SEQ ID NO: 38434 - protein, 292 aa, Zea mays
  Clone ID: 700195724_FLI.pep
QAFKIMHDEGLALVPLWDDRQGTITGMLTASDFVLILRKLQRNIQVIGNEEPISAWKEAKLQFYGGPDGAAMQRRPLIHVKDSDNLVDVALTIIRNEISSVPIFKCMADSSGVPFLNLATLQGILKFLCSKLQEEAEGCSLLHNQLLSIPIGTWSPHTGRSSSRQLRTLLLSSPLNTCLDILLQDRVSSIPIVDDNGSLRDVYSLSDIMALAKNDVYARIELEQVTVQNALDVQYQVHGRRQCHTCLQTSTLLEVLEGLSIPGVRRLVVIEQSTRFVEGIISLRDVFTFLLG

SEQ ID NO: 38435 - protein, 187 aa, Zea mays
  Clone ID: 700197143_FLI.pep
VRIKISDVCQKQDIYRLVKVIGTHKVPEKYSIGKKMTNVALEILNLNKKEIITMDTISNHDFTEEECKRLRQSMKCDLISRLKVGDILEKAKILQYVRVNDWFENEKQRLGHLRDRASETGRRKELREYVEKLQLLNDSEERTRRIIEILELHVDSHMDPNYESAEETDEKGTGIYLPVMLMLHVAC

SEQ ID NO: 38436 - protein, 95 aa, Zea mays
  Clone ID: 700193609_FLI.pep
PAAILQHIVSSVGDTAGSSVGAWSRLLQAAHRRQLLRYLRRQQPRDLAALRLLLQDGLEDQAEDRLVPVLRLHLPELLATLLPQRLALRRAVGRR

SEQ ID NO: 38437 - protein, 64 aa, Zea mays
  Clone ID: 700196144_FLI.pep
LASGYTTAHSFFSGGHRRQQRRGMESAAAGRTSPSVAALSAPPTAPRPGRFAAAAAGWTGGPSR

SEQ ID NO: 38438 - protein, 412 aa, Zea mays
  Clone ID: 700208306_FLI.pep
AATAAACRAVMATKRSVGTLGEADLKGKKVFVRADLNVPLDDAQKITDDTRIRASVPTIKFLLEKGAKVILASHLGRPKGVTPKYSLKPLVPRLSELLGVEVVMANDCIGEEVEKLAAALPEGGVLLLENVRFYKEEEKNEPEFAKKLASVADLYVNDAFGTAHRAHASTEGVTKYLKPAVAGFLMQKELDYLVGAVANPKKPFAAIVGGSKVSSKIGVIESLLAKVDILILGGGMIYTFYKAQGYSVGKSLVEEDKLELATSLIEKAKAKGVSLLLPTDIVVADKFAADAESKIVPATAIPDDWMGLDVGPDATKTFNEALDTTKTVIWNGPMGVFEFEKFAAGTEAIAKKLAELTTTKGVTTIIGGGDSVAAVEKAGLADKMSHISTGGGASLELLEGKTLPGVLALDDA

SEQ ID NO: 38439 - protein, 216 aa, Zea mays
  Clone ID: 700213806_FLI.pep
GIYLLMANYKRSTGLRSVMVLGSWEIMFVKNDKDPGKFRQLDEILYVEGYPGYQQLMNVANHHMELVCEVKEVSNMKFFRLDNSKVLSWLCCKVYDLKEVFPKLGKNYAAQTEKEKLKEAVQMIREYLKDEPWLALLCKKLQLDINAITVDATTKTAEASVYADSCPAPALPSESKTANGGAKSSKGRPAKKAKTEVGSKNIKDMFRRVTRSGSGS

SEQ ID NO: 38440 - protein, 369 aa, Zea mays
  Clone ID: 700217322_FLI.pep
SERPLDSPHPAVLPVFTKSFATMARLLIPLPFAAASASSLHLAVSRLPLAAVSAARRECLFGGRVVGGVVRAPARLSKRGLCAGAEAGDSAVTVEAMEWVKKDRRRLLHVVYRVGDLDKTIKFYTECLGMKLLRKRDIPEERYTNAFLGYGPEDSHFVVELTYNYGVESYNIGTGFGHFGIAVEDVAKTVELIKAKGGTVTREPGPVKGGKSVIAFIEDPDGYKFELIERGPTPEPLCQVMLRVGDLDRAINFYEKAFGMELLRKRDNSEYKYTIAMMGYGPEDKNAVLELTYNYGVKEYDKGNAYAQIAISTDDVYKTAEAIRVNGGQITREPGPLPGITTKITACTDPDGWKTVFVDNIDFLKELEE

SEQ ID NO: 38441 - protein, 723 aa, Zea mays
  Clone ID: 700212223_FLI.pep
FGQAETDTDEVYAQIMLMPEPEQTDVPAEKPSSAPAASPRPAVRSFCKTLTASDTSTHGGFSVLRRHADECLPPLDMTQSPPTQELVAKDLHGMEWRFRHIFRGQPRRHLLQSGWSVFVSSKRLVAGDAFIFLRGENGELRVGVRRAMRQLSNVPSSVISSQSMHLGVLATAWHAINTKSMFTVYYKPRTSPSEFIIPYDQYMESVKNNYSIGMRFRMRFEGEEAPEQRFTGTIVGCENLDPLWPDSSWRYLKVRWDEPSTIPRPDRVSPWKIEPASSPPVNPLVHSSRAKRPRQNVPPPSLESSVLTKEGATKVEIDSAQTQHQNSVLQGQEQMTLRNNLTESADSDSTVQKPMMWSPSLNGKAHTHFQQRPAMDNWMPLGRRENDFKDTRSAFKDARTASQSFGDTQGFFVQAYDDNHHRLSFKNQGSTHRFADPYFYMPQQSSVTVQSSTRTQTANNDLCFWGDQNAMYGNPSDQQQGFNFGQNPSSWLNQPFPQVEQPRVVRPHATVAPFDLEKTREGSGFKIFGFQVDTTSPSPVQLSSPLPAIQEHVLQTRPSAPVNELQPVQIECLPEGSVSTAGTATENIQQAPQSSKDIQSKSQGASTRSCTKVHKQGVALGRSVDLSKFTDYGELQAELDKMFDFEGELVSGSQNWQIVYTDDEGDMMLVGDDPWEEFCSIVRKIYIYTKEEVQKMNSKSAAPRKEESPAAGGGGGCAAATNE

SEQ ID NO: 38442 - protein, 195 aa, Zea mays
  Clone ID: 700218074_FLI.pep
LQFVVHTYLFPRTAIEASVEIIISSLRLRATSCIAARRRHVIIGGIAALCLSSAKSGPEKPGQRNPKPPLGHPGGGDRGSGGRGSRGRRITVLLMGVIVVRVVGGQLEAADRAGAVEVEPWDDAVLVEDVLAGELLGGGAEVEVVHADGTLSAAVGLHHVGRDSDVRERGDGGLGGGRGAVAVGVVLGELLDELL

SEQ ID NO: 38443 - protein, 452 aa, Zea mays
  Clone ID: 700210576_FLI.pep
FESCPLGSMSAAACGHPFCGTCWRGYISTAISDGPGCLMLRCPDPSCAAAVGQDMINSLADVEDTEKYGRYLRRSYIEDNRKTKWCPAPGCEYAAEFVMGSGSYDVNCNCSYGFCWNCTEEAHRPVDCATVSKWILKNSAESENMNWILANSKPCPKCKRPIEKNQGCMHITCTPPCKFEFCWLCLGPWSEHGERTGGFYACNRYESARQEGVYDESERRREMAKNSLERYTHYYERWAANQSSRQKALGDLQSLQNDKLERLSDIQSQPESQLKFIIEAWLQIVECRRVLKWTYAYGFYLPEHEHAKRQFFEYLQGEAESGLERLHQCAEKELQIYLDAESPSKDFNDFRTKLAGLTSVTRNYFENLVRALETGLNDVGPSTSHGTCSKSATSKSLGGKSKSGKNRASSTSSKSGGSSRGVDDSNIWTCDQCTYANPKSARACQACDHQHR

SEQ ID NO: 38444 - protein, 237 aa, Zea mays
  Clone ID: 700210561_FLI.pep
QCPLFRQNGGGLAEYAVASENLTVKRPPEVSAAEGAGLPIAAGTALQALRTIGAKFDGTGKAMNVLVTAASGGVGLYAVQLAKRAGLHVTATCGARNVELVKSLGADEVLDYRTPEGASLQSPSGKKYDGVVHCTVGTSWSTFEPVLAATGKVIDITPNLTAILKSALHSVTFARKRLVPLLLSPNKADLEFLVGLLKDGKLKTLIDSRFPLSEVSKAWEKSIEGHATGKIIVEMAD

SEQ ID NO: 38445 - protein, 343 aa, Zea mays
  Clone ID: 700211194_FLI.pep
QQKKLNLPILPTTTIGSFPQTVELRRVRREYKAKKISEEEYVTAIKEEINKVVKLQEELDIDVLVHGEPERNDMVEYFGEQLSGFAFTANGWVQSYGSRCVKPPIIYGDVSRPNPMTVFWSKTAQSMTSRPMKGMLTGPVTILNWSFVRNDQPRFETCYQIALAIKKEVEDLEAGGIQVIQIDEAALREGLPLRKAEHAFYLDWAVHSFRITNCEIQDTTQIHTHMCYSNFNDIIHSIIDMDADVITIENSRSDEKLLSVFREGVKYGAGIGPGVYDIHSPRIPSAEEIADRIDKMLAVLDTNILWVNPDCGLKTRKYTEVKPALTNMVSAAKLIRTQLASAK

SEQ ID NO: 38446 - protein, 236 aa, Zea mays
  Clone ID: 700210857_FLI.pep
FRSVPFVLVSTELGNPTGVVHINVDKADQPLPLTTVFHKLIPLETTPYTLFQTIIGNGYPIALLDEEKILLIGKKITAIGLCQAKDAESVEITSCPEIPFFLSELTKDEMQAQLASRARILFWGSIALGTLSVCLVGHAIYRGWTRIKLRREARQARQMFEEAEDAIHRDDSSDDDEIGDGQLCVVCLRKRRRAAFIPCGHLVCCSECALTIERTPHPLCPMCRQDIRYMMRVYDS

SEQ ID NO: 38447 - protein, 158 aa, Zea mays
  Clone ID: 700265383_FLI.pep
MSSHLAAALVQREKQQQTMRSLSSRDLGPSAARASALGSPLSSSWSKWGSPSGTPDWGINGEELGKLRRSSSFELRSGGDDPDLSWVHTLVKESPPEKQVTTAESISSVGPSPLMPPGMNNGDGSGLSTQLDGHDQAAVIGALLEQMQLDQQIGSLAT

SEQ ID NO: 38448 - protein, 248 aa, Zea mays
  Clone ID: 700264938_FLI.pep
DMMSIFSNDGVGRSIDSSSSETRRSHRRILWDAFSRRGSRGYPESDADEMGFFSTWLDLGDDIFEELGESRYFHRRRHGSIRVSQYSRSRIREHRRAVFDSGNEQNTAACPLGIHQIGRCTCNSFFIAEESSARASISRIVMLTEALFEVLDEIHRQPASLSLSMVSVQAPESVVDSLPCKSYKKLETPQCSDDMEQCHICLTEYEDGDQIRTLPCKHEFHLQCVDKWLKEIHRVCPLCRGDVCEVAS

SEQ ID NO: 38449 - protein, 146 aa, Zea mays
  Clone ID: 700335911_FLI.pep
GFLPKHARSRRDRLEISAREAATQIFYVPPHGIQQFLVDAASSFGDSRHCVVAREITKIHEEFWRGTLGEANEAFATRQPKGEITVLIEGKLISDDEIPSEDFLEHELRELTAKGYTLSAAVKLVTEATSAKKKDVYALALRLFGK

SEQ ID NO: 38450 - protein, 254 aa, Zea mays
  Clone ID: 700336078_FLI.pep
TFLDANPSQVVTIFLEDYTAVGSLPRVFNASGLTKYWFPVAKMPKSGGDWPLLKDMISQNQRLLVFTSKRAKEASEGIAYEWNYVVENQYGDEGMVAGKCPNRAESPAMDSKGQSLVLMNFFTTNPSQTGACGNNSAPLDSMLKTCHDASGNRWPNYIAVDFYMRSDGGGAPLATDIANGHMVCGCDNIAYCKANSTFGTCVIPPPPPPSPPKASTPGSRGSTAGGDASAGTMALSSQWSFLLGLASLLLLSRS

SEQ ID NO: 38451 - protein, 200 aa, Zea mays
  Clone ID: 700334483_FLI.pep
IAISDVLMYYLKSVFGFDKDQFSEILMVVGVGSIFSQILVLPFLSQIIGEKGVLCISILASIAYALLYGVAWASWVPYFSSSLGIIYVLAKPAIYAIISGEVLSTDQGKAQGFIATVQSVAILLAPLFMSPLTSYFISEEAPFDCKGFSFIVASFFLAISFCLAWMLNPGMKDKGTKAAVSDSADEEAAQAPLLAKWNRP

SEQ ID NO: 38452 - protein, 160 aa, Zea mays
  Clone ID: 700335072_FLI.pep
TAFLKMLSWKIFRLLRRSITNAVTLCNKSEKKSFERSSIGSSFTQLYSSRKEQQLGSHIRDRPKIGFLLHCLLLVLQLEHVLLKSITAIHAIPMTTGFYAIAVWRSIHSTFQPAVSRYTLGYYEARFFHLFIISQVFQNKFWIFPLDQMSHRITPSDSFF

SEQ ID NO: 38453 - protein, 88 aa, Zea mays
  Clone ID: 700336343_FLI.pep
GRSASSSTPSASRSTPGSRTCPRSPNPTPLTHGLDSGKEEERSWLTVLYYSLFLQATLPIFSCVRHKKRLDGLLVFPAVWCFRIGGRL

SEQ ID NO: 38454 - protein, 66 aa, Zea mays
  Clone ID: 700379131_FLI.pep
RRRPRLKESLSVNVMLEFLVMSWISNSIERCQSQNYQYVPCKPISNFIKHGRAQDTFAMNDMEYLW

SEQ ID NO: 38455 - protein, 556 aa, Zea mays
  Clone ID: 700281975_FLI.pep
SSSISLPTRKETLGATRGFSNLRSPPPRFGSPSLEGSGIFWRGRMAGGVVDQSLLPQIHALFSDPLRVVSYKWLSRNFSVSSNDAKRLLQDFVNKHGTDLQVIYSVSGWLKNNPQNYCVKLISGPKLEARQIFKDSCSVQIYSIQACIPKDTAVLWNPEFVQAEELFNQPFDYENCLRDNRFCGVLNSFVKRTSNGKHVSSLPPKPLNSAAAAVQSKPSVTPKEQFVTARRQDLPVSSKQGADTKSEKDNFTVLDKAGNGPVVKEQSVDAHASKSKAQNGKALPSNGGSLANMWGRASAKPKPPSTTNSTAVASVAATADAQICAKEEADGNSSDDEHGIKYKRGSTNANNRKRRAVFDYSDDEEDDNIVSIASPELPKQHTPDPVVGIAEDAEVNQKSLENEHDVPNNGKGSSTVVDSDFTSECKIKTIDPMNDSGITLKEKSSDPPINDKKQDSAAEPASKSPKRRKVLKTRIDERGREVTEVVWENEASADDKAEQNVNTIDATASGATVPSKPKPATNADKSKAPSKTAAGNKKAAKAGAKQGSIMSFFKKA

SEQ ID NO: 38456 - protein, 423 aa, Zea mays
  Clone ID: 700342215_FLI.pep
EYKFFVDGEWRHDERQPTISGEFGIVNTLYLTREYNQINTLSSPSTPGSRMNMDVDNENFQRTVTLSDGTVSEGTLRVSEAAIQISRCRVSEYLSLHTCYDLLPDSGKVIALDINLPVKQSFHILHEQGIPVAPLWDSFRGQFVGLLSPLDFILILRELETHGSNLTEEQLETHTISAWKEAKRQTNGRNDGQWRPQQHLVHATPYESLRDIAVKLLQNGISTVPVIYSSSSDGSFPQLLHLASLSGILKCICRYFKNSTGNLPILNQPVCSIPLGSWVPKIGDLNSRPLAMLRPNASLSSALNMLVQAGVSSIPIVDDNDSLLDTYSRSDITALAKDKVYTHVRLDEMTIHQALQLGQDANTPFGFFNGQRCQMCLRSDPLLKVMERLANPGVRRVFIVEAGSKRVEGIISLSDIFKFLLSL

SEQ ID NO: 38457 - protein, 375 aa, Zea mays
  Clone ID: 700342882_FLI.pep
FTIPPQNTSCDPRSLRRASIMSAYCGKYADELIKNAAYIGTPGKGILAADESTGTIGKRLSSINVENVEENRRALRELLFCCPGALQYISGVILFEETLYQKTKDGKPFVDVLKEGGVLPGIKVDKGTIEVVGTDKETTTQGHDDLGKRCAKYYEAGARFAKWRAVLKIGPNEPSQLAIDLNAQGLARYAIICQENGLVPIVEPEILVDGPHDIDRCAYVTETVLAACYKALNEHHVLLEGTLLKPNMVTPGSDSKKVTPEVIAQYTVRTLQRTVPAAVPAVVFLSGGQSEEEATLNLNAMNKLSTKKPWALSFSFGRALQASTLKAWAGKVENVEKARAAFLARCKANSEATLGTYKGDAAADTESLHVKDYKY

SEQ ID NO: 38458 - protein, 394 aa, Zea mays
  Clone ID: 700342975_FLI.pep
TPRFTFSIMAPFPRRLPAAVPLLLLLGAAVASAGAEDTDGGNSRRRHSRLLFAFGNSLTDTGNGAIFPVTAGGPFTRPPYGETFFGRPSGRACNGRLVLDFLVEELKVPEPTPYLAGRTAADFAKNGANFALGGATALDQAFLASKGIKSFVPISLINETSWFQNVSKLLDASHYDERKIMAKSIFYVGEIGVNDYFAALSNNDSVDVAVSLVPHIIDTIRSALTVMIDAGARTVVITGMLPIGCEPQQLAQFAGSPAGDYDPTTGCITRFNQLAEHHNHMLRMMLRELRTKYRRRRPLTLHYADIYRPVIEAVASPASYGFGDRPLAACCGGGGGPNNFNFIAFCGTPASTTCTDPSKFVSWDGIHFTEATNRLLARKMLQELLSRGAYNVAI

SEQ ID NO: 38459 - protein, 291 aa, Zea mays
  Clone ID: 700344988_FLI.pep
SSSGGPPSCLGPRSSRSSGCPRSPSSSWRAAPSPSRRSGTSSSADTRGSTPSTSTPCRTTSSMCPRAPPSTADRSPARRCPGDQLPWWMLRSACWPMPLLDFSNERFVLLSESCIPVFNFPTVYEYLINSAHSFVESYNIDTPQCAGRYNRRMAPHIMADQWRKGSEWFELNRELAVQIVADYKYYSIFRKHCRPSCYPDEHYIPTYLHLFHGPLNANRTITWVDWSRGGPHPASYGATDITEDFIQAIRNNGTQCFYNSKPTSVCYLFARKFAPNALPRLMNLTSTVLDF

SEQ ID NO: 38460 - protein, 190 aa, Zea mays
  Clone ID: 700346227_FLI.pep
DIQLMPFVDYYSLILWKTIAICIYGTNVLSANYVMKTDDDAFVRVDEVLSSLDRTNVNHGLLYGRVNSDSQPHRDPYSKWYITPEEWPEESYPPWAHGPGYIVSKDIAKEVYRKHKSGELKMFKLEDVAMGIWINEMKKDGLDVKYENDGRILVEGCEDGYVIAHYQEPRDMMCLWDQFQKTKRGTCCKE

SEQ ID NO: 38461 - protein, 168 aa, Zea mays
  Clone ID: 700380146_FLI.pep
LAKLYAAKYKLRSRAKVYKIASRNLSRPLKDKKGQSPEYHNLLRMGLVDSIDGLQYTRMSMVPDPDYTPLPFGWRPDHEKILLEYIKLTDQQTLKEQRNCTREDGLITPQDNILMLVWGYKKNAVLLPSKVSDAQGSTEDLGSDTDELNEKELGNEGNQSFQKLAEMS

SEQ ID NO: 38462 - protein, 166 aa, Zea mays
  Clone ID: 700551650_FLI.pep
LARICDGILALLDSHLVPSAGGAESKVFYLKMKGDYHRYLAEFKSGAERKDAAESTMNAYKAAQDIALADLAPTHPIRLGLALNFSVFYYEILNSPDRACNLAKQAFDEAISELDSLGEESYKDSTLIMQLLRDNLTLWTSDTNEDGGDEIKEAAAAPKESAPEGQ

SEQ ID NO: 38463 - protein, 183 aa, Zea mays
  Clone ID: 700552895_FLI.pep
RSGAKEVLDERRRLNMAFDVAKGMNYLHRRSPPIVHRDLKSPNLLVDKKYTVKVCDFGLSRLKANTFLSSKSLAGTPEWMAPEVLRDEPSNEKSDVYSFGVILWELMTLQQPWCNLNPAQVVAAVGFKGRRLEIPKDLNPLVAVLIESCWANEPWRRPSFANIMDTLKPLINKVPAQLIRSDS

SEQ ID NO: 38464 - protein, 135 aa, Zea mays
  Clone ID: 700351058_FLI.pep
IDLCFANEDEAREVIGGGLESDPEEALAFLGKYCKWAVVTLASKGCMAKHGKQVVQVPAIGESNAVDTTGAGDLFASGFLYGLVKGLPLEECCMVGACSGGSVTRALGGEVRPENWQWMYKQMHARGMLLPELKN

SEQ ID NO: 38465 - protein, 181 aa, Zea mays
  Clone ID: 700351905_FLI.pep
LLINWICTLLNRYHVPRSFLQPGSNDLVLFEHFGGDPSKISFVMRQTGSVCAQVSEAHPAQIDSWSSQQPMQRYGPALRLECPKEGQVISSIKFASFGTPSGTCGSYSHGECSSTQALSVVQEVTTSYPFSCFNVSTEFLWVADSVTANSAGLHRSEQLQRASVIELFWKSMYRGHKKPCS

SEQ ID NO: 38466 - protein, 225 aa, Zea mays
  Clone ID: 700352112_FLI.pep
ATSEAWLSKHIDDSVGYSSNGSNVVIWDTLSPPATSQTSIMCHEGGARSISVFDSDRGYGSISPLVVTGGKNGDIALHDCRFLSTGKSKHHRVTTEHGVEASSMHDIKSSTFGGTDSGMVWHIPKAHLGSVTKVTTIPNTSLFLTGSKDGDVKLWDAKNSQLVFHWTKMHERHTFFQPTSRGFGGVVRAAVTDLQVLPNGFVSCGGDGSVKLVQIKDDLAAAYQR

SEQ ID NO: 38467 - protein, 268 aa, Zea mays
  Clone ID: 700381679_FLI.pep
KDFSFQDADVLKPDILAPGNLTWAAWAPNGTDESNYAGEGFAMVSGTSMAAPHIAGIAALIKQKNPKWSPSAIKSALMTTANTLDKGSHPLRAQQYTASEMMTLSRATPFDCGSGAVNPKGALDPGLVLDASHEDYITFLCSIPDVNQSEVSNIAGSACNSNSKGQRPFDLNIPSIAVSQLRGTVVVKRTVTSVSDETETYTIMTRMPPEVALEVTPPAVTVVPGASREITVTLTARSVTGTYSFGEIAMKGDRGHLVRIPVVAMGFK

SEQ ID NO: 38468 - protein, 643 aa, Zea mays
  Clone ID: 700381747_FLI.pep
QCATRTHQRGNETQSEARPATSAALAAMDSDYGVPRELSEVQKKRALYQPEVPPCLQGTTVRVEYGDAAIAADQAGAHVISHAFPHTYGQPLAHFLRKTAVVLDAKVISEHPVVRVGIVFCGRQSPGGHNVVWGLYEAIKAHNQNSKLIGFLGGSDGLLAQRTLEITNEVLASYKNQGGYDMLGRTKDQIRTTEQVNGAMASCQALKLDALVIIGGVTSNTDAAQLAETFAEAKCATKVVGVPVTLNGDLKNQFVETTVGFDTICKVNAQLISNVCTDALSAEKYYYFIRLMGRKASHVALECALQSHPNMVILGEEVAASKLTIFDITKQICDAVQARAEKDKNHGVVLIPEGLVESIPELYALLQEIHGLHGKGVSVENISSQLSPWASALFEFLPPFIRKQLLLHPESDDSAQLSQIETEKLLAQLVETEMNRRLKEGTYKGKKFNAICHFFGYQARGALPSKFDCDYAYVLGHVCYHIIAAGLNGYMATVTNVKSPVNKWRCGAAPISSMMTVQRWSRGPSATQIGKPAVHMASVDLKGKAYDVLRQNSSRFLLEDVYRNPGPLQFEGPGADSKPISLCVEDQDYMGRIKKLQEYLEKVKSIVKPGCSQDVLKAALSAMSSVTETLNIMTSSSTGQTAL

SEQ ID NO: 38469 - protein, 361 aa, Zea mays
  Clone ID: 700350156_FLI.pep
ISAPLPLQHPPVSVVSSPLLTSPAMGKIKIGINGFGRIGRLVARVALQSEDVELVAVNDPFITTDYMTYMFKYDTVHGQWKHSDIALKDSKTLLFGEKPVTVFGIRNPEEIPWGEAGAEYVVESTGVFTDKDKAAAHLKGGAKKVVISAPSKDAPMFVVGVNEDKYTSDVNIVSNASCTTNCLAPLAKVIHDNFGIIEGLMTTVHAITATQKTVDGPSAKDWRGGRAASFNIIPSSTGAAKAVGKVLPELNGKLTGMSFRVPTVDVSVVDLTVRIEKGASYEEIKKAIKAASEGPLKGIMGYVEEDLVSTDFTGDSRSSIFDAKAGIALNDHFIKLVSWYDNEWGYSNRVVDLIRHMFKTQ

SEQ ID NO: 38470 - protein, 372 aa, Zea mays
  Clone ID: 700348263_FLI.pep
RHPSASAAMAGTVTVPGSSKPSTPLLKDELDIVIPTIRNLDFLEMWRPFFQPYHLIIVQDGDPTKTIKVPEGFDYELYNRNDINRILGPKASCISFKDSACRCFGYMVSKKKYIYTIDDDCFVAKDPSGKDINALEQHIKNLLSPSTPFFFNTLYDPYREGADFVRGYPFSLREGAHTAVSHGLWLNIPDYDAPTQLVKPKERNERYVDAVMTIPKGTLFPMCGMNLAFDRDLIGPAMYFGLMGDGQPIGRYDDMWAGWCVKVICDHLSLGVKTGLPYIWHSKASNPFVNLKKEYKGIFWQEDIIPFFQNVTIPKDCDTVQKCYIYLSGQVKEKLGKIDPYFAKLGDAMVTWIEAWDELNPAGPAAGKDKAK

SEQ ID NO: 38471 - protein, 207 aa, Zea mays
  Clone ID: 700352703_FLI.pep
THINLSSLNQTKLLKDALSNLFCKSYVTSLLPSTEFFSQGRTDASNQSVAFFVIDKLRHHVSAATISCLPQPKKKSLLLIVPLPILPQARASLHMAPVSNGMDHDLPHHLAKLLPRNSSDFHCLILVVSESNLPFLFLFGAKVFDLKHHSNLTHQLLVPIQISQIHSSAHVISMHLNLDTTPSTATLMALDFSGASVHHVRMILRHS

SEQ ID NO: 38472 - protein, 411 aa, Zea mays
  Clone ID: 700352848_FLI.pep
KMACIDNAMRALFLLALFCVVHGEKAKSKDNDAKASGPGGSFDITKLGASGNGKTDSTKAVQEAWASACGGTGKQTILIPKGDFLVGPLNFTGPCKGDVTIQVNGNLLATTDLSQYKDHGNWIEILRVDNLVITGKGKLDGQGPAVWSKNSCVKKYDCKILPNSLVMDFVNNGEVSGITLLNSKFFHMNIYKCKDMLIKDVNVTAPGDSPNTDGIHMGDSSGVTITNTVIGVGDDCISIGPGTSKVNITGVTCGPGHGISIGSLGRYKDEKDVTDINVKDCTLKKTANGVRIKAYEDAASVLTASKIHYENIKMEDSGYPIIIDMKYCPNKLCTANGASKVTVKDVTFKNITGTSSTPEAVNLLCSAKIPCTGVTMDDVNIKYSGTNNKTMAVCKNAKGSAKGCLKELACF

SEQ ID NO: 38473 - protein, 87 aa, Zea mays
  Clone ID: 700352882_FLI.pep
HALPHQAAFNKDALKSLNITHILIVAKSLDPVFPAEFNYKKIEVLDIPDTDLLKHSDECFGFIDEAISSGGNVLVHCFAGRSRRSIK

SEQ ID NO: 38474 - protein, 399 aa, Zea mays
  Clone ID: 700353715_FLI.pep
FFSISGSEFVEMFVGVGASRVRDLFKKAKENAPCIVFVDEIDAVGRQRGTGIGGGNDEREQTLNQLLTEMDGFEGNTGIIVIAATNRADILDSALLRPGRFDRQVSVDVPDVRGRTEILKVHGGNKKFDSDVSLDVIAMRTPGFSGADLANLLNEAAILAGRRGRTAISSKEIDDSIDRIVAGMEGTVMTDGKSKSLVAYHEVGHAICGTLTPGHDPVQKVTLIPRGQARGLTWFIPMDDPTLISRQQLFARIVGGLGGRAAEEVIFGEPEVTTGAAGDLQQITGLAKQMVVTFGMSEIGPWSLMEGGAQSGDVIMRMMARNSMSEKLAEDIDSAVKQLSDEAYEIALRHIRNNREAIDKIVEVLIEKETLAGDEFRAILSEFVEIPVENRVPPATPAA

SEQ ID NO: 38475 - protein, 410 aa, Zea mays
  Clone ID: 700356055_FLI.pep
MACTDNAMRALFLLVLFCIVHGEKEESKGIDAKASGPGGSFDITKLGASGNGKTDSTKAVQEAWASACGGTGKQTILIPKGDFLVGQLNFTGPCKGDVTIQVDGNLLATTDLSQYKEHGNWIEILRVDNLVITGKGNLDGQGPAVWSKNSCTKKYDCKILPNSLVMDFVNNGEVSGITLLNSKFFHMNMYQCKNMLIKDVTVTAPGDSPNTDGIHMGDSSGITITNTVIGVGDDCISIGPGTSKVNITGVTCGPGHGISIGSLGRYKDEKDVTDINVKDCTLKKTMFGVRIKAYEDAASVLTVSKIHYENIKMEDSANPIFIDMKYCPNKLCTANGASKVTVKDITFKNITGTSSTPEAISLLCTAKVPCTGVTMDDVNVEYSGTNNKTMAICTNAKGSTKGCLKELACF

SEQ ID NO: 38476 - protein, 372 aa, Zea mays; identical to SEQ ID NO: 38470
  Clone ID: 700352695_FLI.pep

SEQ ID NO: 38477 - protein, 101 aa, Zea mays
  Clone ID: LIB3594-052-G8_FLI.pep
KKTTQRERTEEEQRTMGSGGANTAPLITPYKMGKFDVSHRVVLAPLTRQRSYGNVPQPHAILYYQQRATKGGLLIAEATGVSDTAQGCVCRLLDHQATTAA

SEQ ID NO: 38478 - protein, 208 aa, Zea mays
  Clone ID: 700466764_FLI.pep
QGPGNAFAGSAGTSFTPHIITASPSEDVAAKIVAFASQSSKAVCVLSAMGSVSRAVLRHPADGSPMARVHASPQPYKNPAVYEGFYEILSLTGSYNLAQGGGLSVTLCSPERNVIGGVLGGPLVAAGTVQVVLGSFHQGGSRSKSKKAGKQQQAAAFSPDSLTGGQEASPSSGHNQNLTPPPSVTGGWPTSGIFDTRSSSIDINSSRG

SEQ ID NO: 38479 - protein, 232 aa, Zea mays
  Clone ID: 700473589_FLI.pep
AQPPPPPEMERPAASGALIYAMVARGTVAVAEHTSYTGNFRDIAAQCLHKLPAGNNRFTYTCDAHTFNFLVSDGYAYCVVATESAGRQIPMAFLEMIKEEFNRRYSGGEAGTATANSLTRDFGPRLRDQMQYCTDHPEEVSKLSRVKAQVDQVKSIMMENIDKAFDRGQQIDGLVTRTEQLHDEAVDFRRQGVQLRRRMWYQNMKVKLIVLGVVVALILIIVLSICHGGCSK

SEQ ID NO: 38480 - protein, 101 aa, Zea mays
  Clone ID: 700474494_FLI.pep
KFTWQESISGVDSIQGYRFCSWEIRRQLSSGVVAPPCKHTLRAAPSCIDLTMPGPLGSRIGVPTLPYLAVQVRMITCAYFTRATITGWHTEIVVLSNMERL

SEQ ID NO: 38481 - protein, 521 aa, Zea mays
  Clone ID: 700468853_FLI.pep
IEMEGRMTSLEATMKVSSSMASSISRNADPDQQTLRPNSVEQFYFPRPGQSLPGIPPFFGPPSSSLYLPNDNEAKFGNQFESNPSQNTDWDPQAIVSNLTFLEQKIKQVKDIVQSMSNRENQLAGGSSELAAKQHLVTADLTSIIIQLISTAGSLLPSMKNPLLSSNPAVRQLGNTLGSPMGLGMNANQRPSVDSKTDIPDTGKTSDYDELMNSLNPAQDERDEMIKCPNPCGGEGSEPTPMEDHDVKESDDGGEGENLPPGSYVVLQLEKEEILAPHTHFCLICGKGFKRDANLRMHMRGHGDEYKTPAALAKPTKDSGADHAPVTRYSCPFVGCKRNKEHKKFQPLKTILCVKNHYKRSHCDKSYTCSRCNTKKFSVIADLKTHEKHCGRDKWLCSCGTTFSRKDKLFGHVALFQGHTPALPMEDVKVSEASEQPQDSEPMNEMARSNMYSFPCSSSDGISNLDMKMADDVRGYFSPLNFDPCFGALDDFTRPGFDISENPFSFLPSGSCSYGQQNGDS

SEQ ID NO: 38482 - protein, 599 aa, Zea mays
  Clone ID: 700473307_FLI.pep
GCTTNSLVHLTLRISELLHSLGQDVPGSGGSNWTDHETLLLLEALEIFKGKEWHEIAEHVATKTKEQCMLHFLQMPISEPFLDGDDFNETPQKITKQDSAETGPSDVPDKMDVDGNAEGKESTDEKAYKKADSSSAETRTKLADQNISAKEDTMKLGDDDLVASIVDEPNKSSLVDPAHKKNSANADVSGEHPSNFITNILRSTFEAVDHFLGKEDMGSFAEAGNPVMALAAFLASLVERDDAVSSCCSSLRAISEMSPALQLATEHCFILPDPPSDLKDPASTFSPCAGGESQEGADTTQNVNDTDKNNSEREDSDLALEKESATFTSQKQHLEELSDAKETFIGGPEAEAKSNSTKDSDNPIAKVGSSVASDKMRDGCNANAIPCPATSNHTTEPSSVASQEASPASTKDTAIPEQVERPSSEELLADVSLPQGKVEPKKTEPAPAASSSIQQHGCKQAGNGNTEPKSKENAAADDDPITRLQRAAGTAISAAAVKAKFLVEQEEGYIRQLAALVIEKQFQKMETKMSFLTEVGNLVLRSRDLTERMRKKLLLERSMIIASRMGAAAASRTIQHGAPVTTRLPVGHVHALNPQLRRP

SEQ ID NO: 38483 - protein, 280 aa, Zea mays
  Clone ID: 700466165_FLI.pep
LSQVTGSQHTATPKPQAPPGPGSLLRPISSKSNKHLWEAISARMRDQGFDRSPTMCTDKWRNLLKEFKKARSHSRNSGGGSGSGGNGNAKMAYYKEIDDLLKRRGKATGSGTAGCVGSSAGKSPKSNCKIDSYLQFTTDNGFEDANIPFGPVEANGRTILSIDDRLEDDRHQLPLTAADAVATNGVNPWNWRDTSTDGGDNRGNFGGRVILVKWGDYTKRIGIDGTPEAIKEAIKSAFGLRTRRAFWLEDEDEVVRTLDRDMPVGTYTLNLDDGTCELSS

SEQ ID NO: 38484 - protein, 150 aa, Zea mays
  Clone ID: 700441330_FLI.pep
RPRSWVLPLPPYIHHPSSLSHFVTSTPIRSATSLKERTSLPQSQASQPASLAPHISFLRSSPTCTASSGFTPSNSQAFKNIIGFGFSAATSAETATASNQWSHFKACRSGRRRVSKLETTAVLTPAFLKALNTLSASGSQSFQAFSVIKY

SEQ ID NO: 38485 - protein, 311 aa, Zea mays
  Clone ID: 700443674_FLI.pep
RLQNFLGIWSFVSDIPNVAPEPNCEQGISMMSISDSGVSNQDNAAGDSILLDIASATLVSDIGTCDKLLVGSSSGAGVNLLPLATGQTETAGSVDSTPDKVPYTPDKDMFSKDSIYEDFCVDDADLAFENYEELFGTSHIQTEQLFDDAGIDIYFEMKEAPAGNSTEQSKLKQPANSNAVSADSGMSNPGVKGDSSVCTPLRQARSSLSLSFAGLTGESSAGDHQDCVVSSLLLMGEPPWQPPGPEGSIAGGSRDSALTRYKEKKMRRKFDKKIRYASRKARADVRKRVKGRFVKAGEAYDYDPLCQTRSY

SEQ ID NO: 38486 - protein, 65 aa, Zea mays
  Clone ID: 700578570_FLI.pep
FFDVHNRMRSAFPATPAHAASCPPFARERYMRSVARMSLGHAVTAARFRPLHQVFFFLQLTKLGI

SEQ ID NO: 38487 - protein, 210 aa, Zea mays
  Clone ID: 700581676_FLI.pep
LFNFISGKHLKILNLGDGQGRTSGVTAVLQSTDDDSVDPHLERIKNQAGNEESDEEDEDFVADKDDSGSPTDDSDAEGSDASMSGGEKEKPSKKEASSSKPPVKKKQKSGPDEGSQKKKPKKKKDPNAPKRAIAPFMYFSKAERANIKSSNPELATTEIAKKLGERWQKMTAEERQPYVEQSQVDKQRYAEESAAYRGAAAQQGSGAGSE

SEQ ID NO: 38488 - protein, 150 aa, Zea mays
  Clone ID: 700583452_FLI.pep
ANMQIILELTRCRGRNSRGGLHKCAPCTAMPNNKIVAANMEEKGAGGKAAVPHDELPRFTIFLIPNRREPPLDLVELVCLHHRISLGNGVPGSSPVVELAVVLVGVAVECAVQVPTPAVESRKSNPLPAGAAPVRPYLPPFGDRQQQPAP

SEQ ID NO: 38489 - protein, 109 aa, Zea mays
  Clone ID: 700614540_FLI.pep
TTPRDSNQRMLIEENLFGRAALNVIACEGTDRVERPETYKQWQVRNQRAGLKQQPLNPDVVQVVRNKVKDCYHKDFVIDVDHRWLLQGWKGRILYAVSTWVANDAPSYI

SEQ ID NO: 38490 - protein, 390 aa, Zea mays
  Clone ID: 700621992_FLI.pep
RNLINLLLENGIEPYVTIFHWDVPQALEEKYGGFLDKSHKSIVEDYTYFAKVCFDNFGDKVKNWLTFNEPQTFTSFSYGTGVFAPGRCSPGLDCAYPTGNSLVEPYTAGHNILLAHAEAVDLYNKHYKRDDTRIGLAFDVMGRVPYGTSFLDKQAEERSWDINLGWFLEPVVRGDYPFSMRSLARERLPFFKDEQKEKLAGSYNMLGLNYYTSRFSKNIDISPNYSPVLNTDDAYASQEVNGPDGKPIGPPMGNPWIYMYPEGLKDLLMIMKNKYGNPPIYITENGIGDVDTKETPLPMEDALNDYKRLDYIQRHIATLKESIDLGSNVQGYFAWSLLDNFEWFAGFTERYGIVYVDRNNNCTRYMKESAKWLKQFNAAKKPSKKILTPA

SEQ ID NO: 38491 - protein, 181 aa, Zea mays
  Clone ID: 700622043_FLI.pep
QRGSRGSTGSGSSKGEMSSAFSGDETAPFFGFLGASAALVFSCMGAAYGTAKSGVGVASMGVMRPELVMKSIVPVVMAGVLGIYGLIIAVIISTGINPKAKPYYLFDGYAHLSSGLACGLAGLAAGMAIGIVGDAGVRANAQQPKLFVGMILILIFAEALALYGLIVGIILSSRAGQSRAD

SEQ ID NO: 38492 - protein, 219 aa, Zea mays
  Clone ID: 700619187_FLI.pep
FVKSELMEDGSAPRRATPAPTRRSRSADFHNFSERRRRDRINEKLRALQELLPNCTKTDKASMLDEAIDYLKSLQLQLQMLVMGKGGGMAPVVPPELQQYMHYITADPAHQMMPPPLRPSAGQLQPAAGRQFQITHQAAAANNDNDPQRRRQSNVESDFLSQMQNLHPSDQPPHHHNFLRPPRLQLFTPEQRGGGGGLPNTSHNAGWISGRSSSYNFME

SEQ ID NO: 38493 - protein, 241 aa, Zea mays
  Clone ID: 700805023_FLI.pep
ALSTFQFHSASAAGRRLRDSDSPTARRMSEEDKTAASAEQPKRAPKLNERILSSLSRRSVAAHPWHDLEIGPDAPAVFNVVVEITKGSKVKYELDKKTGLIKVDRVLYSSVVYPHNYGFVPRTLCEDNDPMDVLVLMQEPVVPGSFLRARAIGLMPMIDQGEKDDKIIAVCADDPEYRHYNDISELSPHRLQEIKRFFEDYKKNENKEVAVDAFLPATTAREAIQYSMDLYAQYILQSLRQ

SEQ ID NO: 38494 - protein, 59 aa, Zea mays
  Clone ID: 700806037_FLI.pep
KLGIAKAGAGSHHFFLAAALVTLAPVGSFFSTLLITPTATVCLMSRTANLPRGGYAENV

SEQ ID NO: 38495 - protein, 419 aa, Zea mays
  Clone ID: 700424933_FLI.pep
VKREVKILKALKGHQNIVHFYNAFEDDSYVYIVMELCEGGELLDRILAKKNSRYSEKDAAVVVRQMLKVAAECHLRGLVHRDMKPENFLFKSNKEDSPLKATDFGLSDFIKPGKKFHDIVGSAYYVAPEVLKRRSGPESDVWSIGVITYILLCGRRPFWDKTEDGIFKEVLRNKPDFRKRPWSSISPGAKDFVKRLLVKNPRARLTAAQALSHPWVREGGEASDIPVDISVLSNMRQFVKYSRFKQFALRALASTLNEEELSDLKDQFDAIDIDKSGSISIEEMRHALAKDLPWRLKGPRVLEIIQAIDSNTDGLVDFKEFVAATLHIHQMAELDSERWGIRCQAAFSKFDLDGDGYITPEELRMVQHTGLKGSIEPLLEEADIDKDGKISLSEFRKLLRTASMSNVPSPRGPPNPQAL

SEQ ID NO: 38496 - protein, 206 aa, Zea mays
  Clone ID: 700433052_FLI.pep
PSEEQKEGIRDLKIRHAEQDKKECLGNSSIDGNKTSMEHAHISSVSCEDGGGALWDIFRREDVGKLKEYLTKHSKEFRHMYCCPVEKIFNPVHDETFYLTNKHKRKLKEEYGIEPWTFVQRLGDAVFIPAGCPHQVRNLKSCTKIALDFVSPENIQQCLSLTEDFRRLPVGHRAKEDKLEVKKMIVYAVEHALAILKEPCTPRESA

SEQ ID NO: 38497 - protein, 93 aa, Zea mays
  Clone ID: 700433713_FLI.pep
RGVFFLSVDDVVKLTLTDVEFFTCVAAKTCGTDHKAEFFLKLLDVFRLPQRSLQSLDISLLLWTVRSNHSSCDSWTYQLPLEPRELPPQMQGP

SEQ ID NO: 38498 - protein, 92 aa, Zea mays
  Clone ID: 700430292_FLI.pep
QNSTQKVQEWMMEYNSVIPLTVRMTVQYAWKNMIMRIRRLHCNANIISTLAAFTSGWKGARLARSVQRLCCSMRMNDPADGSLPRRQVEDPS

SEQ ID NO: 38499 - protein, 113 aa, Zea mays
  Clone ID: 700397533_FLI.pep
KRNSLIKAWEENEKTKAENKAAKKVSAILSWENTKKANIEAELKKIEEQLEKKKAEYAEKMKNKVAMIHKEAEEKRAMVEAKRGEEVLKAEEMAAKYRATGHAPKKLIGCFGA

SEQ ID NO: 38500 - protein, 249 aa, Zea mays
  Clone ID: 700431783_FLI.pep
RNKPPGPARRPPRVPLDQDEYDGGYDDREEGRFAGGTRAAAMPKPPAGFVLDDQGRCIAAASKRIVTIIDDTNNRPLECIIRRVFRSSQDHDCMLLCPVDMPVQVLKSTNFSGWVAVDDDQLKQIIPSVAYALARVHMHFVESGFCYTARGGFCFPEEAIQEFHDSGEGVPFEGVEICCFNLDGAHYMIYTPVDPLLFVAIKDKDGVLRIAEDDLMEDPAVLDAVDEETEFTALVEEEEALLETVLGER

SEQ ID NO: 38501 - protein, 82 aa, Zea mays
  Clone ID: 701158362_FLI.pep
CLSLVLQFERLNLGNFIVSSGNSRSFFFCFFPVVPSLSFSYGLYEHHRPQLFCPRCLPVRNGRPKCWFLSLCLIWQKYLLCC

SEQ ID NO: 38502 - protein, 109 aa, Zea mays
  Clone ID: 701158775_FLI.pep
ELIWNSHTHTPVIPCYSYLNLFFHSTKWVKSGQRMWHMVELQLPVKNRQKVVKLRGVDQEEIAKLTVTDFTCTSRDARYRLWACSAGCKPTLLQLFGLLQLQSIERKIL

SEQ ID NO: 38503 - protein, 118 aa, Zea mays
  Clone ID: 701161853_FLI.pep
AEYHKTLDFKLLVSVLNMNHFQEANSIYIYIFHLSAYYNACLYMHPLLCFILMSSSLSYGPTSDLQIPRLLGGLQFVPSEEIWPPLAEHPLNIRMGRRQTNLQDVCFFGEEAARSEDI

SEQ ID NO: 38504 - protein, 35 aa, Zea mays
  Clone ID: 701158693_FLI.pep
TIPSPMLISITVNEQTADAQATIAIAKLKLNLHIT

SEQ ID NO: 38505 - protein, 42 aa, Zea mays
  Clone ID: 701158985_FLI.pep
NKSSILVLHFAAVTGVCLRIFAPPCYGLSLKFSIITLQIKLY

SEQ ID NO: 38506 - protein, 69 aa, Zea mays
  Clone ID: 701164923_FLI.pep
SLHLHPPVTRLNSINHSSAVIFCFDSWLPRLIYHGYDLFYYCNFPHFFPAPFLSLQTLCISFLLFYDRY

SEQ ID NO: 38507 - protein, 121 aa, Zea mays
  Clone ID: 701161040_FLI.pep
VVLHDGVIREKPSTPEEARKFIKGYSESHAATIGSVLVTNVKTGARREGWDKAEVYFHKIPDEVVESLIEEGDVFYVAGGLLVEHPLTSPLVEAIVGTIDSVMGLPKALTEKLIKESLSET

SEQ ID NO: 38508 - protein, 144 aa, Zea mays
  Clone ID: 701161549_FLI.pep
TEASLLPANAERLLQIHDMSSFGFIDYHDRRYAALAILSLNGRQLYGQPIKVNWAYTSTPREGTSGHFNIFVGDLCPEVTDATLFAFFSGYSTCSDASVMWDQKTGRSRGFGFVSFRNQQDAQSAINDLNGVFSSSMFLTYVPF

SEQ ID NO: 38509 - protein, 278 aa, Zea mays
  Clone ID: 701161833_FLI.pep
KILEVHSRGKALAKDVDFDKIARRTPGFTGADLQNLMNEAAILAARRDLKEISKDEISDALERIIAGPEKKNAVVSEEKKRLVAYHEAGHALVGALMPEYDPVAKISIIPRGQAGGLTFFAPSEERLESGLYSRSYLENQMAVALGGRVAEEVIFGQDNVTTGASNDFMQVSRVARQMVERFGFSKKIGQVAIGGPGGNPFLGQQMSSQKDYSMATADVVDAEVRELVEKAYSRARQIITTHIDILHKLAQLLIEKETVDGEEFMSLFIDGQAELFVA

SEQ ID NO: 38510 - protein, 166 aa, Zea mays
  Clone ID: 701180355_FLI.pep
SRPLAPPAPSPETAAHHPEARRQPRTPAAARRTGRRRRRWRHGQRWRPAACSPRCTWRATRSAGRSTSGPRTATTPSQGRSPIWQPTSSAPQTVQARQKKTLQRVTSSYSCTKTSRATECWLVTSHGNCSLRLLKDCTSSENPASGDKGRGEGDRNYKAEEPTTNG

SEQ ID NO: 38511 - protein, 160 aa, Zea mays
  Clone ID: 701173259_FLI.pep
TTGAARGFRRHRVVEIRVPELAPVGVQAVDVDDPVERGVLVHVRAALRGQLHQAEVAILLHVAVELVRDDGVVPRRVEDAHQIGVAVHVRVSDQDAFEVDVVFFGGLLVPLHNDVCELGNVVSCVALSSYVELLGLVLGEPLEPPDEESVRTVCCGIVSR

SEQ ID NO: 38512 - protein, 154 aa, Zea mays
  Clone ID: 701178370_FLI.pep
ASCRGTWRARSRRSTGAATWPSSASCSCRCCSRPWWRCRGWTTTGTTGRTSLPVGFLFPAAGLVVASFCYLQFFPPPSGEQGFWPHAYSEHILNPEREGQAQSTASSNQHRRLSSRGHVAVEMSTAIATATASQDASSLGPMEEMEMEEGRGAR

SEQ ID NO: 38513 - protein, 297 aa, Zea mays
  Clone ID: 701178432_FLI.pep
AGKRQSGKDATGKVAHSAGSSLRRYNEAALKKVLNLMLVDFYVCSKSKCLSLFFRCLSFLFALLQEVQELIVSWKSYFETCVCAFIYAPSRNRQMLFDGEKTQSVIQSCDVRPVPLTVHRPTMKEAKRVYCNLTQLYYEMECSTTDETLPDAGSVKNVEQGQGKKNEVTADPGESISDLSARLELLNKNEAATIPSSKNETTPLHEAAKCGNAQLTLELLEQGLDPCVKDARGKTSYSLASDKEVRNTFRRFMALNLDKWDWHAADVPSALTKEMEESQAAKQADKDAKRKARAKEL

SEQ ID NO: 38514 - protein, 201 aa, Zea mays
  Clone ID: 701181114_FLI.pep
VPTARAEVVDWTKNNTTIQSVESPPKYMSEESPTLLQSSQTTTVFSNQINGNSDGTYHLSFSSGNVTDSLPDWPVDEFFSNSEYVPNLGFSEHGSSKGDNAKLESAGGSLQCRLAEGSIAEELLGQVPGLITDDYMSRVPENSWTVPEVPSPPTASGLNWHGNLCFPAYDSTMFVPEITSLQNSQNQFTVPSSFKRRRREY

SEQ ID NO: 38515 - protein, 495 aa, Zea mays
  Clone ID: LIB3060-091-B1_FLI.pep
PRAGAMMNLNLKQPLVLPAHHSNVVGSRLSSSSPSAAAASRRTGGGVSSRSGSRRHVRLPRISCSATEEVSGAVSSVTVERMLTVTASVEASPAIGQMYFQRAVDDIGDLLGKTLLLELVSSELDAKSGVEKTRVTAYAHKTLREGHYEAEFKVPASFGPVGAVLVENEHHKEVFIKEIKLVTGGDSSTAVTFDCNSWVHSKFDNPEKRIFFTLKSYLPSDTPKGLEDLRKKDLQALRGDGHGERKVFERVYDYDVYNDLGDPDKNPAHQRPVLGGNKQYPYPRRCRTGRPRTKKDPETEMREGHNYVPRDEQFSEVKQLTFGATTLRSGLHALLPALRPLLINKKDLRFPHFPAIDELYSDGIPLPPQTGFDAIRTVVPRMVKLVEDTTDHVLRFEVPEMIERDRFSWFKDEEFARQTIAGLNPLCIQLLTEFPIKSKLDPEVYGPAESAITKEILEKQMNGALTVEQALAAKRLFILDYHDVFLPYVHKVREL

SEQ ID NO: 38516 - protein, 98 aa, Zea mays
  Clone ID: 701182246_FLI.pep
RPAGSPPSQHFKGAGRKHQKSQRRSLDRRLLHLDPPNRQRKALCNRAGVPVRPDGRGAGRPLPQEEGRHHRLYKFDPWELPCKYPVIYNHAKNSEIVV

SEQ ID NO: 38517 - protein, 94 aa, Zea mays
  Clone ID: 701181082_FLI.pep
CEKAGIKCALQRRFWQRVMYDAGQMHKACIIRELCQMRCKSERNQLFMFRLQAAPLFPDIHNFSEEDCQADQWGKSVENLVVLRQMAFASVNRT

SEQ ID NO: 38518 - protein, 531 aa, Glycine max
  Clone ID: 700556229_FLI.pep
ASFRQGYTTTAFVSPHQAMRVPVPSSPQANPKPTNNVVRTIALPNLNNSTTPPTGLCYEPTSVLDLCRSPSPGTEKPTTDHSVLVTNSQDYLDLEDHALHNLDWDSIMKDLGLHDDSATPVLKTFLHPDDDDDDDNNNNPSCDDFTLFDHALEFTTLSDIYSNQNFAFDFNHLPHDFNHLNGFDFIEELIRAADCFDTKQLHVAQLILERLNQRLRSPVGKPLHRAAFYLKEALQSLLSGSNRTPRISSLVEIVHSIRTFKAFSGISPIPMFSIFTTNQIVLDHAASSFMHVIDFDIGLGIQYASLMKEIAEKAADSPVLRITAVVPEEYAVESTLVRDNLAQFALDLRIRVQVEFVPLRTFENLSFKAVKFVNGENTAVLLSPAIFRHLGNAAAFLADVRRISPSVVVFVDGEGCAETATASAASFRRGVVSSLEYYSMMLESLDASTVGGGGEWVRRIEMMQPAAEDFGGGGECVAAGSAVEGGVLRRRNEAGAVKPVCGFSSRVPVSEVSNQRISRGKTPERTGAFLA

SEQ ID NO: 38519 - protein, 185 aa, Glycine max
  Clone ID: 700557240_FLI.pep
DADDVLMVNFAFKLNKIPDESVSPENPRDELLRRVKRLAPRVVTVVEQEINGNTAPFLARVAETLSYYGALLESIEATTVGKDNSINNSDRVRLEEGLSRKLHNSVACEGRDRVERCEVFGKWRARMSMAGFELKPLSQSMVESIKARLISANNRVNSGLTVKEENGGICFGWMGRTLTVASAWR

SEQ ID NO: 38520 - protein, 391 aa, Glycine max
  Clone ID: 700563528_FLI.pep
SAYHVFLAPSLRISVPFEKSLVIQFIHIHGGNDNKDLAGLDWKSIEKSFRFESKSSGLLLGDQSLSFRQHEIRYSECSICSFAISRSINSYTSRFLFDNYTLIVSEYLDSKRLHQILSDSGDELRKLAGVLEEDFGRVVPVYVFDLDYTSLLLLDRYHQSVAFKDMVIAVRTRNTQTVSDYSCNGRHVFTQTRELERPIVGSILQSMWGVSPTHLNWSPQHNETLVDYTWSMGQTPFGPFSEMLSLSFVQKDAARRNVLLTSLNYSITSAIDVLQSVETHGGAKNLLKQKQHVEFVQRWNLFKYKLNKAMSALSHLDFEMALFYLRSSDHDLYAIHSIVYHASQEIEASLVCFRDPPFPWGSVLLSASAFLSVSYIYARRDKLFRNKRKQF

SEQ ID NO: 38521 - protein, 287 aa, Glycine max
  Clone ID: 700565482_FLI.pep
CRYDFTENLGSGTCPGLMVQGYDPVIKVLAKDIDIRLNHRVKKISSGYNKVMVTVEDGRNFVADAAIITVPIGILKANLIEFEPKLPDWKVSAISDLGVGNENKIALRFDKVFWPNVELLGTVAPTSYTCGYFLNLHKATGHPVLVYMVAGRFAYDIEKLSDEAAANFVMQQLKKMFPNASKPVQYLVSRWGTDPNSLGCYSYDLVGKPTDVYDKLRAPLGNLFFGGEAVSLDNQGSVHGAYSAGVMAAENCESYMLEKLGHAEKLSLASVRHEMLETLIPLQISRM

SEQ ID NO: 38522 - protein, 308 aa, Glycine max
  Clone ID: 700566764_FLI.pep
LTGTMLEGHQLLGFGFFVIGLWHLFNHIKLHALSSKSYTSTLWFPTTISRYLELHFIMASCTIFIAMELFIAPIHHQPLDPDGTIPTTHLHNFEHSSMAMAFLVYAIFAIVLDRIKCTKAQHELTHLLGAIAFTQQFLLIHLHSRDHMGPEGQYHFLLQLLIIISLSTTLMGIGFPKSFLVCFVRSVSIIFQGVWLMVMGFLLWTPGFQAKGCSMHLDESDEYVVRCSDHESLHRAISLVNIQFSFLLILVTIFAMSFYLILVRRYGGEKVEYVFLTKEEHYREEDGFVKPNNDVESQSQEKSMQEQI

SEQ ID NO: 38523 - protein, 310 aa, Glycine max
  Clone ID: 700657806_FLI.pep
IELMKWESITLSSPTSCTPNSNTNWLVENNSRSTKWTPEENKLFENALAVHDKDTPDRWHKVAEMIPGKTVVDVIRQYKELEVDVSNIEAGLIPVPGYSSTAISPFTLDWVNTPGYDGFKGCGKRPSSVRPIEHERKKGVPWTEEEHKLFLLGLKKYGKGDWRNISRNFVITRTPTQVASHAQKYFIRQLSGGKDKRRASIHDITTVNLTETITTSCSEDTNRSTSPHVLSQPQQQNSTPTTPRTHFQWTNQSNTGVAMTLNPAHERVFMSPYGANSFGVKIEGQNLHESSYLGPQTQNMVFQMQQSSQH

SEQ ID NO: 38524 - protein, 422 aa, Glycine max
  Clone ID: 700605662_FLI.pep
KADDDSWSHIIEALLVGSGTSTGTVDWLLEELLKDKLQQWLSCRSQEKDEETGCSLSKKEQGIIHMVAGLGFEWALNPILTCGVNINFRDINGWTALHWAARFGREKMVASLIASGASAGAVTDPNAQDPTGKTAASIAAGNGHKGLAGYLSEIAVTSHLSSLTLEESELSKSSAELQADMTVNSVSKENLTASEDQASLKDTLAAIRNVTQAAARIQSAFRSHSFRKRRAREVAASAGGIGTISEISAMSKLAFRNSREYNSAASAALSIQKKYRGWKGRKDFLALRKKVVKIQAHVRGYQVRKHYKVIWAVGILDKVVLRWRRKGAGLRGFRQEMDITENENEDEDILKVFRKQKVDVEIEEAVSRVLSMVDSPDAREQYHRMLEKYRQAKAELAGTSDEASLSTSVGDDLFIDDFYPFP

SEQ ID NO: 38525 - protein, 511 aa, Glycine max
  Clone ID: 700679114_FLI.pep
IQRDQRQLPDQLTDSWTNDEVLALFRIRSSMENWLPELTWDHVSRRLAEVGFKKSAEKCKEKFEDESRYFDNINNYGKNNFRFLISELEELCQNSDPGAHDHNGVVVRSEKTHHLGGHALEENSRDIETTTATKRCDIGSDTVVEKSNSKVRKRKRRDRFEMFKGFCESVVNKMMAQQEETHNKLLEDMVKRDQEKFAREEAWKKQELDRMKKELEIMAQEQAIAGDRQATIIEFLKKCATTTITSLSPPSQNAKYYITNDSNLPNCASHSQNPNNPSNEDNNLEPTPSSKMIQNHGQTTLGAENPSTSDTLLQVPSSSNSSPTTHNPSSSLNSHNNIIPLESNSVSTYKPTSTTPMASSENSKDDIGRRWPRDEVLALINLRCTSLSSNEEKEGNKGPLWERISQGMSALGYKRSAKRCKEKWENINKYFRKTKDNVNKKRSLNSRTCPYFHQLSCLYGQGKIVPQSEREGNYCLNPTPNSGQVPPDDDHQVQDDESSQVGSAGLVQYAC

SEQ ID NO: 38526 - protein, 250 aa, Glycine max
  Clone ID: 700673717_FLI.pep
FKMCLSGGVWCAEMVEAMKKVAKLDVELSVEERNLFSVGYKNVVGSRRASWRILSSIEQKEDSKGNELHVKHIRDYRNKVELELSNICSDIMIILDEHLIPSTNIAESTVFYYKMKGDYYRYLAEFKAGNEKKEVADQSLKAYQTASTTAESELQPTHPIRLGLALNFSVFYYEILNSPERACHLAKQAFDDAVSELDTLNEDSYKDSTLIMQLLRDNLTLWTSDIPEEGEDLKMESAARVDQGEDELGR

SEQ ID NO: 38527 - protein, 386 aa, Glycine max
  Clone ID: 700673748_FLI.pep
LIRFSGTIVGVEDISPHWVNSKWRSLKVQWDEPAAVPRPDRVSPWEIEPFVASASTPSVQPTMVKTKRPRPPSETPDVDTTSVASVFWDAGLQQADMAQKNVLAESKWNDNTGTWHHMQTDMNSKSNSGNTMLRNQTEGSWLSSPHSSCPSHLFQDVTDDSKIVSAWPVSKPHSSKLNNDHVLDQVDKESKVETATSYRLFGIDLIDPSRNSPSVEKASAQAVNVPKVTTEGCTSTLSRTDAGHKSDVSMASSMERKQEQLQVSPKDTQSKQICRSRTKVQMQGVAVGRAVDLTMLDGYGQLINELEDMFNIKGQLQHRNKWEIVFTDDEGDMMLVGDDPWPEFCNMVRRIFICSSQDVKKMSCGSKLPISSVEDGTVISSDTTET

SEQ ID NO: 38528 - protein, 454 aa, Glycine max
  Clone ID: 700606260_FLI.pep
SCPATAQFFPVTARWSRFISQLRPLFPATVKLEAQTMSVSASQTEEQVSTRKPTTLCEECKSNPSKYTCPGCSLHSCSLPCVKSHKDRTGCSGKRNQTQFLPLSKFDDNVLLSDYKLLEEVKRVAESAQRMRNKLGIYAYFRLPRYLRSLKNAAGSRRTKLLFLPNGMSRREKNRSQYDQRKKFISWTIELHFHSTDIVLLDHEVDENTSFYSILEKHLKPGPWKNQLRQFCEVQLDCLKLFIRKYPKGPKSSFKELDIKAPIRQQLANIVILEFPVVFVFLPSHRINFEVIKDVNTSKHKSLQKDCEDNQFPQGLSFREEVIEDDNNSADPQVFDLMKQVESSLSHEVMTQNMSSEKAPNDSPEKSLFEGASGGNLSHSLTETNELKFSEDMTFDFDQDLMDFYTDILDQTNPGDLFDFDGEFSKKTENEIDLIGTSDLFPMPEELEEGEILE

SEQ ID NO: 38529 - protein, 77 aa, Glycine max
  Clone ID: 700681361_FLI.pep
NYIQSLQRQVEFLSMKLEAVNSRLAPRIEVFPPKDFDQQTFDTTGMPFASQATREYSRGSSPEWLHMQVGGGYERAT

SEQ ID NO: 38530 - protein, 353 aa, Glycine max
  Clone ID: 700983461_FLI.pep
SFMAPQTISIHYHTTRFLPQPDVFIRTSHGTRIPAHAGILASMSPVFDNFIDRPRKHRSSERIIQIHGVPCDAVTAFVGFLYSSRCTEEEMDKYGMHLLALSHVYMVPQLKQRCIKGLTHRLTTENVVDVLQLARLCDAPDLHLRCMKLLANNFKAVEATEGWKFLVKHDPWLELDILRFIDEHETRKKKSRKYRMEQGLYAELSEAMECLEHICYDGCTHVGPYDAAEVKRERTPCGRFATCQALQVLIRHFATCEKKVRGGCVRCKRMWQLFRLHSYVCHHTDSSCKVPFCRQFQLRMQQEKRKDDAKWKLLARKVASAKVMSSLSLPKRKRDEETRVNINNPGIRSFKLL

SEQ ID NO: 38531 - protein, 288 aa, Glycine max
  Clone ID: 700986825_FLI.pep
GAGESMVEHADLKDGGGDAVSWQIGRCKTEILQHPLYEQLLSAHVACLRIATPVDQLPRIDAQLAQSQNVVAKYAVFGHNNIVADDKELDQFMSHYVLLLCSFKEQLQQHVRVHAMEAVMACWELEQSLQSLTGVSPGEGTGATMSDDENDQVDSDANLFDCSFDGADSMGFGPLVPTESERSLMERVRQELKHELKQGYKEKIVDIREEILRKRRAGKLPGDTTSVLKAWWQSHSKWPYPTEEDKARLVQETGLQLKQINNWFINQRKRNWHSNPSTSTALKSKRKR

SEQ ID NO: 38532 - protein, 184 aa, Glycine max
  Clone ID: 700736976_FLI.pep
SARSSPALCQPLSFLSFMFASDLEQERYFFSTKVAKYPNGNRSNRATNSGYWKATGLDKQIVTSKGNNQVVGMKKTLVFYRGKPPNGSRTDWIMHEYRLILNASQSQSHVVPMENWVLCRIFLKRRIGAKNGEESNSKVVFYDFLAQNKTDSSSSVASGITHESDEHEESSSSNTFPYTIRRKP

SEQ ID NO: 38533 - protein, 301 aa, Glycine max
  Clone ID: 700732853_FLI.pep
KLNLACAAVAMTRGSLVKSQNPDSGPQASNFSEVGSHATLKGSGPFGNDDPSKLQNKDIKAQIGIPSSPSMQNKSAVVAMRPTISGSSGEQSDDEEAEGEINMTGNMTPVDAKRVRRMLSNRESARRSRRRKQAHLTELETQVSQLRSENSSLLKRFTDVSQKYSNAAVDNRVLKADVETLRAKVKMAEETVKRITGLSPMLHAMTEMSSLGMPLFDESPSETSADAAVPVQEDPNHHLCQPTSNNGLGGISSIETVQQNVAAVVGGNKMGRTTSLHRVASLEHLQKRIRGGADSRGTPSN

SEQ ID NO: 38534 - protein, 719 aa, Zea mays
  Clone ID: LIB3245-191-E9_FLI.pep
SAAQDPLSQLMSAIEGLKPVQEDSLAHIKSAIGEAIKSIPEPIPDALAKLSHEILDAAPPPLAELMKPFAQLMAPNNNGNGPSDVHAEGSSSSSSAQVPAEAKNEPKVRPSLGLKTVLKEAAGPVPNAGASQVQQPLMYPSVEEMLFPCNSVDKSVCKGKIDAQSKGKSVTSSGIQPAPHSLRTHAPPPPHPCISEWSRAQRSQHRQLKFEDNAKATNDSRWRIPMYKMPYAPPPPAVPPPGYVPSPHFPYPGRLLSSGHPYGDLAGNMENSAPHSLHRWIQCDGCGAQPIVGPRYKSNVKEDYDLCDSCFQRMGNEMEYTKIDKPILPHRFLRDPHVYRKVHHPRVLMKSRREKLESRFILDVTVLDGTLMTPSTPFTKIWRMHNNGSVVWPRGTQLVWVGGDQFALQTSVPLEIPVDGFPVDKEIDVPVDFVAPTRPGRYISYWRLASPSGQKFGQRVWVHIQVEDPSFVNDNNRNAAINLNLPPESYSSNTTNLIDVNIEPADSALSAHAKRTKEFHFCSTDFPEPSKSVPFTLATTSLSAAAPTNQTGDVPMSSTPAAACLPSVNVPMHEVVTTHTPSPITPVLPTTIHFSAPVSAPAIAPELASGAVGVPPPVSAVVPELSELDVHNEEKLLRELEEMGFRQVDLNKEILRQNNYNLEQSVDDLCGVNEWDPLLAELEEMGFDDTEMNKELLAKNEGSIKRAVMELIAREKKDK

SEQ ID NO: 38535 - protein, 181 aa, Zea mays
  Clone ID: LIB3245-584-C9_FLI.pep
RRDREHGEPPGPDPEAGEGPVAQGAHAGGAGVQHQHGPLRAAVRRDAGLLHGHLRVHRPGAAEGRQGADQHRAALPGPGDREPGGLRGRGAGGAARGVRQVEGAADDGRLQPVPAQRAGERHHQDAAAELLAGLQARREGRRALPRLEEQAPDRLIGMALVLTSENVDLMENVSCNLRSTS

SEQ ID NO: 38536 - protein, 233 aa, Zea mays
  Clone ID: LIB3245-584-D10_FLI.pep
YCRRRRSRAEPMGQQSLIYAFVARGTVVLAEYTEFTGNFTTIAAQCLQKLPASNNKFTYNCDGHTFNYLVEDGFTYCVVAVESVGRQIPIAFLDRVKEDFTKKYGGGKAATAAANSLKREFGPKLKEHMQYCVDHPEEVSKLAKVKAQVSEVKGVMMENIEKVLDRGEKIELLVDKTENLRSQAQDFRQQGTNVRRKMWLQNMKIKLIVLGIIIALILIIILSVCHGFKCGSK

SEQ ID NO: 38537 - protein, 495 aa, Zea mays
  Clone ID: LIB3060-095-E6_FLI.pep
PRAGAMMNLNLKQPLVLPAHHSNVVGSRLSSSSPSAAAASRRTGGGVSSRSGSRRHVRLPRISCSATEEVSGAVSSVTVERMLTVTASVEASPAIGQMYFQRAVDDIGDLLGKTLLLELVSSELDAKSGVEKTRVTAYAHKTLREGHYEAEFKVPASFGPVGAVLVENEHHKEVFIKEIKLVTGGDSSTAVTFDCNSWVHSKFDNPEKRIFFTLKSYLPSDTPKGLEDLRKKDLQALRGDGHGERKVFERVYDYDVYNDLGDPDKNPAHQRPVLGGNKQYPYPRRCRTGRPRTKKDPETEMREGHNYVPRDEQFSEVKQLTFGATTLRSGLHALLPALRPLLINKKDLRFPHFPAIDDLFSDGIPLPAQTGFDAIRTVVPRMVKLVEDTTDHVLRFEVPEMIERDRFSWFKDEEFARQTIAGLNPLCIQLLTEFPIKSKLDPEVYGPAESAITKEILEKQMNGALTVEQALAAKRLFILDYHDVFLPYVHKVREL

SEQ ID NO: 38538 - protein, 509 aa, Zea mays
  Clone ID: 700467013_FLI.pep
ETELWSLIEAKGDIPAARSGHTVIRAGATLILFGGEDTKGKKRHDLHMFDLKSSTWLPLNYKGTGPSPRSNHIATLYDDRVLLIFGGHSKSKTLNDLYSLDFDTMVWSRVKTHGPHPSPRAGCSGTLCGTKWYIAGGASKKKRHAETWVFDVLQCKWSVCVVPPSSSITTKKGFSMVPFYHKDKIALIAFGGNKKEPCNKVEVLVVLQNEHSFSWRSAPEVDTMVYEYSPSNKELADHLHKCAPLYSNSSIARHSLTSVIEHPPRREPLSESLLKQSSLGTSLHTQLDHAEECSLGQKLQKPIDDDRYDDVDDSSSCQDSTPKGPYSKRTGPGFQNGAENMVTGGSKVRRIARCSSDVGQSHLYNTKIADLIRRNTTLEDQLATALASKDQLDKSLASVIHSRGQLEKMLANKDKEAEMLKEKIACLELAQEESNSLSNTVHADNVRLEREVAFLKAVTGETQKELHSTRRVLAGEQSRAFQLQVEVFHLKQRLQILEGRSGTPNKQPL

SEQ ID NO: 38539 - protein, 448 aa, Glycine max
  Clone ID: 700790823_FLI.pep
SRCLLVKILTRLSFGDFQWCKRKELMDRLNGSANLMIVSDLDFTMVDHDDPENLALLRFNALWEAYYRHNSLLVFSTGRSPTIYGELRKQKPLLTPDITIMSAGTEITYGESMVPDDGWKQYLDHKWNRDIVMEETAKFPELTLQSETEQRPHKVSFYLEKGKAPNVTQTLSKRLENRGLDVKIIYSNGIALDVLPQAAGKGQALAFLLEKLKADEQGPINTLVCGDSGNDAELFTVPEVNGVLVSNAQEELLQWYAENARGNPRIIHATERCAAAIVQAIGNFSLGPNVSPRDIGDLMSNRKVHSPSHEVVMFYIFYERWRRGEVENPEQYIQKLKSVFHSTGNFVHPSGIDQPMHQTIDTLAKAFGDKTGKDFRVWVDCISLAEVSLGSWLVKFDKWELSGNESRGCSTKALMNAKVDVPDEYTWMHLHHTWLDDVGGQDDVSWLL

SEQ ID NO: 38540 - protein, 172 aa, Glycine max
  Clone ID: 700787704_FLI.pep
FVVYWRCSSINKTVERYQRKIEDLGVSNKGIHENTQHLKEVDMSMAKKIEHLEDSRRKLLGDELDKCSIDELQQLENQLERSLDKIRATKNQLFRKRIEKLKEEEKCLLEVNKRLREQYRIERQRCLSDQDVEFATKKEGEEVETELFIGRPERRMPLKLKPTTYSAHAYIA

SEQ ID NO: 38541 - protein, 194 aa, Glycine max
  Clone ID: 700993947_FLI.pep
TLLLSSFIAFHHARRSFIPIILPSLSPNFDSFDQIRDTHPTKTLRNPSMTLGSGGSSVVVPRNFRLLEELERGEKGIGDGTVSYGMDDGDDIYMRSWTGTIIGPHNTVHEGRIYQLKLFCDKDYPEKPPSVRFHSRINMTCVNHETGVVEPKKFGLLANWQREYTMEDILTQLKKEMAAPHNRKLVQPPEGTYF

SEQ ID NO: 38542 - protein, 495 aa, Zea mays; identical to SEQ ID NO: 38537
  Clone ID: LIB3689-221-D1_FLI.pep

SEQ ID NO: 38543 - protein, 315 aa, Zea mays
  Clone ID: LIB3060-093-C9_FLI.pep
MKYFWDTLLDADLESDALGWQYITGSLPDGRELDRIDNPQFEGYKFDPHGEYVRRWIPELARLPTEWIHHPWDAPVSVLQAAGIELGSNYPLPIVELDAAKGRLQAALSEMWQLEAASRATMNNGTEEGLGDSSEVLFPQELQMEVDRQPAPAEAAANVHVPVPMPARRRGDQMVPTMTTSSLNRAGTEVSADLVVANSEEEDTRAQVPFHAHLHPRAEAPPAARRTNNGARQHDVFQQPRNHRREALLAPSASEASSSWTGREGAVVPVWSPPAASGHSDAFAADEADVSSRSYLGRHPQSHRLMNWSQLSQSS

SEQ ID NO: 38544 - protein, 391 aa, Zea mays
  Clone ID: LIB3595-018-F10_FLI.pep
EKPLLSHLRFFPWVVNEVYFKVWRQGRTGYPLVDAGMRELWATGWVHDRIRVVVSSFFVKVLQLPWRWGMKYFWDTLLDADLESDALGWQYISGSLPDGRELDRIDNPQFEGYKFDPHGEYVRRWLPELARLPTEWIHHPWDAPESVLQAAGVELGSNYPRPIVELDAANSRLQDALSEMWELEAASRAAMENGMEEGLGDSTDEPPIDFPQELRMEVDRQPVQPAIHAPGVTGRRREDQMVPSMTSSFIRAETELTADFGHTSEDSRPEVPSNIHHLQARPEREETVDGGTGNAVRVHGNHHQQNLQNNMHRVLGIAPSISEASSSWTGRDGGVVPVWSPPAASGHSDSYAADEADISSRGYLDRHPQSHTMMNWSQLSQSLTTGWEVDN

SEQ ID NO: 38545 - protein, 316 aa, Zea mays
  Clone ID: LIB3600-042-H10_FLI.pep
YPLVDAGMRELWATGWTHNRIRVIVSSFAVKFLQIPWIWGMKYFWDVLLDADLESDILGWQYISGSLPDGHELSRLDNPEVQGQKYDPDGEYVRTWIPELARMPTEWIHSPWAAPNSILQVAGVELGFNYPKPIVELHMARECLDDAISTMWQLDTAAKLAELDGEVVDDNLNNIRNFDIPKVVLNKKLSPSTSSMEHRVLSTNGKDEKSQPTEVKALYKQIIRDDMMNDSNMDDTCSTANLKVTRKRSSSDSAFNVPSCSSSLVMESRIHHNEPSSVLYSGYFQKTADRDGTSKVEDNDSEDSGTSISRPSKKAA

SEQ ID NO: 38546 - protein, 269 aa, Zea mays
  Clone ID: LIB3632-011-E12_FLI.pep
RRWLPELARLPTEWIHHPWDAPESVLQAAGVELGSNYPRPIVELDAANSRLQGALSEMWELEAASCAAIENGMEEGLGDSTDEPPIDFPQELRMEVDRQPAQPAIIHTPVVAGWRREDQRVPSMTSSLIRAETELTADFGNTSEDSRPEVPSNIHLQARAEREETVDGATGNTVRVNGNQQQQNLQNNMHRVLGIAPSISEASSSWTGREGGLVPVWSPPAASVHSDPYTADEADISSRSYLDRHQQSNTMMNWSQLSQSLTTGWEVDN

SEQ ID NO: 38547 - protein, 411 aa, Zea mays
  Clone ID: LIB3959-024-G4_FLI.pep
GDLSRCPWDELIFEDESERGSNALLARAWSPGWQNADKALTAFLDGPLVDYSANHKKADSASTSLLSPYLHFGELSVRKVFHLVRMKQLMWSNDGDRAGEESCTLFLRAIGLREYSRYLTFNHPCSLEKPLLSHLRFFPWVVDEVHFKVWRQGRTGYPLVDAGMRELWATGWVHDRIRVVVSSFFVKVLQLPWRWGMKYFWDTLLDADLESDALGWQYISGSLPDGRELDRIDNPQFEGYKFDPHGEYVRRWLPELARLPTEWIHHPWDAPESVLQAAGVELGSNYPRPIVELDAANSRLQGALSEMWELEAASRAAIENGMEEGLGDSTDEPPIDFPQELRMEVDRQPAQPAIIHTSVVAGWRREDQRVPSMTSSLIRAETELTADFGNTSEDSRPEVPSNIHLQAFRGW

SEQ ID NO: 38548 - protein, 271 aa, Zea mays
  Clone ID: LIB4074-017-D11_FLI.pep
YKFDPHGEYVRRWLPELARLPTEWIHHPWDAPESVLQAAGVELGSNYPRPIVELDAANSRLQDALSEMWELEAASRAAMENGMEEGLGDSTDEPPIDFPQELRMEVDRQPVQPAIHAPGVTGRRREDQMVPSMTSSFIRAETELTADFGHTSEDSRPEVPSNIHHLQARPEREETVDGGTGNAVRVHGNHHQQNLQNNMHRVLGIAPSISEASSSWTGRDGGVVPVWSPPAASGHSDSYAADEADISSRGYLDRHPQSHTMMNWSQLSQSL

SEQ ID NO: 38549 - protein, 501 aa, Glycine max
  Clone ID: 700755180_FLI.pep
TWQCTLASPWRSCSSWRGSTWALSSSSSSSSGRSHTSATSSSHSKTTRNSATLITPSCLSRFQCSMRKRCTRCRLEQLVIFHGLRIVSSSKCLMILLTLPVKQMVEMECQRWASKGINIVYQIRETRGGYKAGALKEGLKRNYVKHCEYVAIFDADFRPEPDFLRRSIPFLVGNPDIALVQARWRFVNSDECLLTRMQEMSLDYHFTVEQEVGSATHAFFGFNGTAGIWRIAAINEAGGWKDRTTVEDMDLAVRASLRGWKFLYLGDLQAKSELPSTLRAFRFQQHRWSCGPANLFRKMVMEIVRNKKVRFWKKVYVIYSFFFVRKIIAHMVTFFFYCVVIPLTILVPEVHVPIWGAVYIPSVITILNSVGTPRSIHLLFYWILFENVMSLHRTKATFIGLLEYGRANEWVVTEKLGDSVNNNKNKSGDAAKKNNAIKATPKKTRSKFVERLNLLELGFAAFLFVCGCYDYVHGKHNYFIYLFLQTLTFSIVGFGYVGTIV

SEQ ID NO: 38550 - protein, 379 aa, Glycine max
  Clone ID: 700760775_FLI.pep
LAVFVLHSLHSFAMSDLGSDLPAAAAALSAEDRAGLVNALKDKLQLLAGQHVDILETLPPKVRQRVEILRDLQSQHDEVEAKFLEERSKLEAKYQKLYEPLYTKRYEIVNGVVEVEGVTNVAVPEEANKAAEDKGVPEFWLTAMKTNEALAEEITERDEGSLKYLKDIKWCRIDDPKGFKLEFYFDSNPYFKNSVLTKTYHMIEDDDPILEKAIGTEIEWHPGKCLTQKILKKKPSKGSKNAKPITKTEKCESFFNFFNPPQVPEDDDDIDDDAVEELENLMEHDYDIGSTIRDKIIPHAVSWFTGEAAQSDFEDIDEDDYEDEEGDDDDDEDEDEDEDEEDEEEKKGKSKSKSKLQSGGRAIPGKDQPMERPPECKQQ

SEQ ID NO: 38551 - protein, 322 aa, Zea mays
  Clone ID: 700154473_FLI.pep
VLRMASAQAVGQGERGHFVLKSGHTIPAVGLGTWRAGSDTAHSVRTAIAEAGYRHVDTAAQYGVEKEVGRGLKAAMEGGINRKDLFVTSKLWCTELAPDRVRPALEKTLKDLQLDYLDLYLIHWPFRLKDGAHMPPEAGEVLEFDMEGVWREMEGLVKDGLVKDIGVCNYTVAKLNRLMRSANVPPAVCQMEMHPGWKNDRIFEACKKHGIHVTAYSPLGPSEKNLAHDPLVEKVANKLDKTPGQVLLRWALQRGTSVIPKSTKDGRIKENIQVFGWEIPEEDFRALCGIKDEKRVLTGEELFVNKTHGPYKSATEVWDHED

SEQ ID NO: 38552 - protein, 440 aa, Zea mays
  Clone ID: 700100789_FLI.pep
LGVRRRYKVAGQDSEVTYFHSYIDGVDFVFVEAPPFRHRHNNIYGGERLDILKRMILFCKAAVEVPWYAPCGGTVYGDGNLVFIANDWHTALLPVYLKAYYRDNGLMQYARSVLVIHNIAHQGRGPVDDFVNFDLPEHYIDHFKLYDNIGGDHSNVFAAGLKTADRVVTVSNGYMWELKTSEGGWGLHDIINQNDWKLQGIVNGIDMSEWNPAVDVHLHSDDYTNYTFETLDTGKRQCKAALQRQLGLQVRDDVPLIGFIGRLDHQKGVDIIADAIHWIAGQDVQLVMLGTGRADLEDMLRRFESEHSDKVRAWVGFSVPLAHRITAGADILLMPSRFEPCGLNQLYAMAYGTVPVVHAVGGLRDTVAPFDPFNDTGLGWTFDRAEANRMIDALSHCLTTYRNYKESWRGLQARGMAQDLSWDHAAVLYEDVLVKAKYQW

SEQ ID NO: 38553 - protein, 166 aa, Zea mays
  Clone ID: 700347658_FLI.pep
RLYARLLSLSLSLSLSLSLSLSLSTSRCSLSFRAVLAGIGRSSLQLTVWLFCFLLWLNSRQEEREQGGGRQRLPARRRCPRSHPVLHVKSSCSFISCMDDMMKTRWNSGIRVDMDDLVASVRAGTCTASTSCRPCGGRAFLPDPMPAELTQEHRSTESLWSRLMHG

SEQ ID NO: 38554 - protein, 204 aa, Zea mays
  Clone ID: LIB3118-013-A1_FLI.pep
HKNKSGSPLIIVPDERSEKCIHLLAVLIIQTYELATSSFLMHYALRSYLEGIVPPPRIQGHSATPLMVARLHSASVTRVAANPLCTSRGQPGRSSRRPSSCASGPGGIAPSMRMLSAVHRQYAGMSASSRQHLLFSSGHGRRGPMPQVRLVTYQRQLGSGLCGMAHPGTQEVPALALAAASTESRTAAARMRRRWLLLDDDAIN

SEQ ID NO: 38555 - protein, 163 aa, Zea mays
  Clone ID: LIB3150-036-E6_FLI.pep
PSRDHYTCMVDLLGRAGHLKEAEELIKDMPTEPDSVLWASLLGACRLHKNVELGERTAGRLFELDPENSGPYVLLSNMYAEMGKWADVFRVRRSMKDRGVSKQPGCSWIEIGSKMNVFLARDNRHPCRNEIYSTLRIIQMEMGRTSIDEIDDDLMNYCSEACG

SEQ ID NO: 38556 - protein, 487 aa, Zea mays
  Clone ID: LIB3180-002-E11_FLI.pep
NLLLPRCLLSAPTTMARASVSGSAAVAKALIPLNPASGGRLPSLLPARLHVPGSSRVLRGASLRCYAAAAAAVAEQSRIKVQNPIVEMDGDEMTRVIWKMIKDKLIFPYLELDVKYYDLGILNRDATNDEVTVESAEATLKYNVAVKCATITPDETRVKEFKLKSMWRSPNGTIRNILNGTVFREPILCKNIPRILSGWKKPICIGRHAFGDQYRATDMIINGPGKLKMVFVPDGADPMELDVYDFKGPGVALSMYNVDESIRAFAESSMAMALSKKWPLYLSTKNTILKKYDGRFKDIFQEVYEEQWKEKFEENSIWYEHRLIDDMVAYAVKSDGGYVWACKNYDGDVQSDFLAQGFGSLGLMTSVLLSSDGKTLEAEAAHGTVTRHFRLHQKGQETSTNSIASIFAWTRGLEHRAKLDKNDSLLDFTHKLESACVETVESGKMTKDLALLIHGPKVTREFYLSTEEFIDAVAQQLRGKIQLPTTV

SEQ ID NO: 38557 - protein, 502 aa, Glycine max
  Clone ID: 700863882_FLI.pep
ADDVKLTFSNAMNYNPSGNDVHLMADTLNKYFELRWKAIEKKLPKSDVLPIPAKPDNSEGVKTKRQAPPSKKRKIASLPPQPKVMPPTKKVMSDQEKHDLGRELESLLGEMPMHIIDFLKEHSSNGRECGDDEIEIDIDDLSDDTLFTLRKLLDDFLQEKQKNKAKVEACEVEVLNDSGPSNSSLQPFKGNDPADEEVDIGGNEPPVSSYSHVEIEKDTTYRVNKSLSPGSSNDTDSDSSSDSEADDVKASPANVAKAPENLGSEAQLDEMTMAAATLERNQSVSGLDQLEDNSQHKPSSFDSDCQQDGDSAPTERQVSPDKLYRAAVLKKRFLDTILKAREKTLTQGEKGDPEKLRQEREKLEMEQKKEKARLQAEAKAAEDARKRAEEEAAAEARRKRELEREAARQALLQMEKTVEINENSRILEDLEMLRAVPAEQLPSSVDETSPAHSQDGLGSFKFGSSNPLEQLGLYIKADDEEEEGEPPCIPNPVNDVEEGEID

SEQ ID NO: 38558 - protein, 128 aa, Glycine max
  Clone ID: 700866402_FLI.pep
LQPYLHESRHRHALKRVRGTGGRFLSAKQLQQFNAELVTDAHSGPGPVNVYQKKDASEAESHPSRTGKNASITFTAISGLTSMSGNSVSFRRPEHNFLGNSPNIGGSSQCSGGLTFGGGARQCTSVGR

SEQ ID NO: 38559 - protein, 109 aa, Zea mays
  Clone ID: LIB3180-005-H3_FLI.pep
DNINSLMSELVVEREALLRALRIESSNCSKLKELNKDLTQKLEIQTQRLELLTSQRMANENALAKPIDTRSINDATMYADEGDEVVERVLGWIMKLFPGGPKRRTSKLL

SEQ ID NO: 38560 - protein, 171 aa, Glycine max
  Clone ID: 700792673_FLI.pep
KYYQANRPSFPWKNMSGGVAIIGWGICQGMKRGSGICGISKDSPPTSSAISIMEFRNLNRSASSMVCALRMSLAASISTYASSFTFMLGAKRAFSPSNRLTSSVRSSSCFCFLHPAIAGRTRGSTPYASSSSRTSPDLLPPTIPNSPGVESKPLDLGVSLGLGKLGFCRSD

SEQ ID NO: 38561 - protein, 488 aa, Glycine max
  Clone ID: 700794075_FLI.pep
RSEIGTRSNFGSSVRAESVVGVGGGGGAKRFDAASSVAAAEMKMVVRHRDLREIVEAIKENFDNAASAGDQVSEMLEISRAQLDRSFKQLRKTVYHSSSILSNLSSSWTSKPPLAVKYRLDTGSLDEPGGPKSLCSTLERLLAWEKKLYEEVKAREGVKIEHEKKLSALQTQEYKGEDEAKIFKTKASINRLQSLIAVTSQAVSTTSTATIGLRDSDLVPQLVDLIHGFMYMWRSMHHYHEIQSNIVQQVRGLVNRSSRGDSTSELHRQATRDLESAVSAWHSSFCRLIKFQRDFILSLHGWFKLSLVPVHNDNINSRETSDTYQFFDEWKLALDRVPDTVASEAIKSFINVVHVISSKQVEELKIKKRTETASKELEKKASSLRNLERKFYSSYSMVGISLPDSAPDNGQVLDARDPLAEKKLELATCQRRVEDEMLRHSKAVEVTRAMTLNNLQTGLPGVFQALTSFSSLFTEALESVCTRSYAIK

SEQ ID NO: 38562 - protein, 126 aa, Glycine max
  Clone ID: 700872020_FLI.pep
PFFVTRFREALFHYSSLFDMLEAIVSREEWERMLIEKEIFGREALNVIACEGCERVERPETYRQWQARILRAGFLQQPFEREIVKRAIEKVTTSYHKDFVIDEDSQWLLQGWKGRIIYALSCWKPA

SEQ ID NO: 38563 - protein, 356 aa, Glycine max
  Clone ID: 700874908_FLI.pep
FFFFLSLCVLLMDPKGSKQQPQQSQEVVPNFLSLPQQQQGNTNNNNMGENKPAEVKDFQIVVAENKEESKKQQQQLAPKRSSNKDRHTKVEGRGRRIRMPALCAARIFQLTRELGHKSDGETIQWLLQQAEPSIIAATGTGTIPASALAAAGNSLSPQAASLSSSLHQHQQKIDELGGSGGSSSRASWQMVGGNLGRPHLGVGVATAAGLWPPHVSGFGFQTPPTTTTPTTTTSSSGPSNATLATESSNYLQKIAFPGFDLPTSATNMMGHMSFTSILGGGGGGGAQHMPGLELGLSQDGHIGVLNQQALNQIYQQMNQAGRVHHHQHQHHHQHHQQQQHHQQTPAKDDSQGSGGQ

SEQ ID NO: 38564 - protein, 537 aa, Glycine max
  Clone ID: 700996114_FLI.pep
EVFRLLFDFAVSPRFLSGKGGIMEENVGDIPSVYRWELTNRAVHAAARGGNLKILEELLANCSDVLAYRDADGSTVLHAAAGRGQVEVIKYLTSSFDMINSTDHQGNTALHVASSRGQLPTAEALVSAFPSLMSLRNNSGETFLHRAVSGFKSHAFRRLDKQVELLRNMLSGKNFHVADIINVKNNDGRTALHMAIIGNIHTDLVQLLMTAPSINVNICDVDGMTPLDYLRQHPKSASSDILIKKLISAGGMFGCQGHSSRKAIASHLRMQSIGSSPGTSFRVSDTEMFLYTGIENVSDASGDHGSGGMSSSSSEHIPYDLNATENRVPIAAKRPSTVNHAAASLKRVLLWPRVKDKKSEGFKKSSTTDEGSVDSCRKRNNSFDETPTPLRQRFSRPSSLPNNKRTLSVRSQQSSPNAKKRFASGPVHGVIQSMPHANVSGRSRSSSFSKSSISSPRSIDKQKGIFIDNDIAGPSCSSQPSPPPDDDESPKLVKRTSVGRKLRDHYFCFGAPGINVKNSVHRQQESQSYKAHVVAVA

SEQ ID NO: 38565 - protein, 408 aa, Glycine max
  Clone ID: 700998216_FLI.pep
TLSHTCSSIKFLPKTTMPFPWKKNRVPRISQFVADLQSPKRGGSLVVETGFPTSLIDLFVKNQSRFQKHRSKKPPPPKSLSATDPPPPPPPPPPSPATSPPPSRVPAVPTTPVEQDDTAVSAPDRITECSGSHWSRVNAVVLVAKILMVLVLVASVERLTVGITASAFALLLLEYAGLRRAVVSCSVAESRWRWFQKVSRKERVVVERIEFEFAELNKGLSIDEIEVVGTTNEGGICCSEIGDVASKVLEPCLCDEDVSECKIRPSRSGRFRSKMVKLVSKKFRGSKKKNKHNEGESGSEISSAVGEEKLPILEIEEEEEEENGDNKSSNTKPDCGITCSYEKKVNRVENSGSSMVLVMIIALVGLLLGRFPALVLLMTWCCLMKILGILWRTQKVPMNMIKCSVSNS

SEQ ID NO: 38566 - protein, 234 aa, Glycine max
  Clone ID: 700873011_FLI.pep
GVRQMTSGFGESTRASAPSPSCSGNSSNDAGDFECNICFDLAQDPVITLCGHLFCWPCLYRWLHHHSHSQECPVCKALVQEEKLVPLYGRGKTQTDPRTKLYPGMEIPHRPSGQRPQTMPPPPPPEVNPFGSYGFGLMGGFIPMATARFGNFTLSTAFGGFIPSLLNIHFHGFQDATVYGTTSGYPFGFNGFHGGNARGFMQATGQVQRQEDNVLKNLLMLIGFLVLLTVIFVW

SEQ ID NO: 38567 - protein, 159 aa, Glycine max
  Clone ID: 700877274_FLI.pep
QRRGEEKAMQPTSGGGGLARFRSAPASWLESVLLKEEEEEEDPLSFTQLLSTIDDAPSHSQHQLYGAALSNKDKTPEIFMLEDSVPCRVRAKRGCATHPRSIAERVTHSLFSLYLTNSFTFCYLFSFRLRFAGLVSVTASESCKNLCQTWISKQILQIC

SEQ ID NO: 38568 - protein, 313 aa, Glycine max
  Clone ID: 700835320_FLI.pep
FFNTIYSLSFSFSFLICAVKQLEVVLMSEALEDVPSMKGGCEEEEEGLNLKATELRLGLPGCESPEREGAFRSVVVSGAKRGFSDAIDENWNGGSEKDAALFSPRGAVSVSAAKSLTLTATDCTNQPTALGASVLKETVPRSPKPLHEKKPQISAPAAKAQVVGWPPIRSFRKNSMASQPQKNDTDAEAKSGCLYVKVSMEGAPYLRKVDLNSFTTYKDLSLALEKMFSCFTLSQCGSYGVSSRENLSESRLMDLLHGSEYVLTYEDKDGDWMLVGDVPWEMFTESCKRLRIMKSFEAIGLAPRAMEKCKSRN

SEQ ID NO: 38569 - protein, 252 aa, Glycine max
  Clone ID: 701009339_FLI.pep
WLLLIQALASRPGGPPFVHVTGVDDSQSFHARGGGLHIVGKRLSDYAKSCGVPFEFHSAAMCGSEVELENLVIQPGEALVVNFPFVLHHMPDESVSTENHRDRLLRLVKSLSPKVVTLVEQESNTNTSPFFQRFAETLSYYTAMFESIDVALPRDDKQRINAEQHCVARDIVNMVACEGDERVERHELLGKWRSRFSMAGFAPCPLSSLVTDAVRNMLNEFNENYRLEYRDGALYLGWKNRAMCTSSAWRCY

SEQ ID NO: 38570 - protein, 608 aa, Glycine max
  Clone ID: 701004695_FLI.pep
HTQHSTMDALRVAPTTPPLLRRHPLRKMAPHPLTARPRRAPLIVATLSMPPEATHSSAVAIVEDPSEAAPPPRPRVSPDSLQYPPGFVGAIPASSRSDGGDGDGMNNAMTYLTNILSSKVYDVAIESPLQLAPKLSARLGVKVWLKREDLQPVFSFKLRGAYNMMAKLPTELLEKGVICSSAGNHAQGVALAAKRLNCSAVIAMPVTTPEIKWKSVEALGATVVLVGDSYDEAQAYAKKRGVEEGRTFIPPFDHPDVIMGQGTIGMEIVRQMQGPIYAIFVPVGGGGLIAGIAAYVKRVNPEVKIFGVEPTDANAMALSLHHDQRVILDQVGGFADGVAVKEVGEETFRICKELIDGIVLVSRDSICASIKDMFEEKRNILEPAGALALAGAEAYCKHHGIQGKNIVAITSGANMNFDKLRVVTELANVGRKQEAVLATVMAEEPGSFKQFCELVGQMNITEFKYRYNSNEKAVVLYSVGVHTISELRAMQERMESSQLKTYNLTESDLVKDHLRYLMGGRSNVQNEVLCRLTFPERPGALMKFLDSFSPRWNISLFHYRGEGETGANVLVGLQVPKSEIDEFHDRANKLGYDYKVVNNDDDFQLLMH

SEQ ID NO: 38571 - protein, 248 aa, Glycine max
  Clone ID: 701007356_FLI.pep
AAEGLNREQYVYLAKLSEQAERYEEMVEFMQKVVVGSTPASELTVEERNLLSVAYKNVIGSLRAAWRIVSSIEQKEEGRKNDDHVSLVKHYRSKVENELTQVCASILSLLDSNLVPSASASESKVFYLKMKGDYHRYLAEFKVGDERKTATEDTMLSYKAAQDIASADLPPTHPIRLGLALNFSVFYYEILNQSDKACAMAKQAFEEAIAELDTLGEESYKDSTLIMQLLRDNLTLWTSDVQDQLDEP

SEQ ID NO: 38572 - protein, 385 aa, Glycine max
  Clone ID: 701011957_FLI.pep
RCLIERYGFSEDDITVLIDTDESYTEPTGKNIRSALTRLVRSAEPGDVLFVHYSGHGTRLPAETGEDDDTGYDECIVPSDMNLITDDDFREFVDGVPRGCRITIVSDSCHSGGLLEEAKEQIGESTKGEEEQSSSGFGFSSFLHRTVEDAIESRGFHIPSALRHNRGRDDDGDEAQNRDIELPDGGYVKNRSLPLSTLIDILKQKTGKDDIDVGKLRPTLFDVFGEDASPKVKKFMNVIFNKLQHGSDESGGGILGLVGGLAQEFLKQKLDDNDEGYAKPALETKVESKHEAYAGPTKRGLPDGGILMSGCQTDQTSADASPAGNAASAYGAFSNAIQAIIEETDGAITNQELVQRAREKLKNSGFTQKPGLYCSDHHVDAPFVC

SEQ ID NO: 38573 - protein, 349 aa, Glycine max
  Clone ID: 700832820_FLI.pep
IPGKGRGLVASQPLKAGQIVLTESPLILYSASPLLTPSSSPYTYCDHCFRILPLTHNSTTVTCPSCSNHSFCSQKCFSLALKSSHSTWVCKALMSLQQHPNSTLLQQHPQERQVQARLIVASHKLFLHNHTPSELDTFLSLHGTPDDAILDAANFLHSLISPLFPPQAQLSVDLIAQLLAKDRLNSFGLMDPYSPDGPQRSIKAYAIYPKATFFNHDCVPNACRFDYVDSTNDDYEHNSTDIVIRLIEDVDEGKEVCISYFRIGRDYCTRKRILMEDYGFTCGCDRCKIEANWDGEENNSDLPHVRFLSKYVCERKNCAGTMAPLPPKDDVPSNVLECNFCGNFKIDAA

SEQ ID NO: 38574 - protein, 189 aa, Glycine max
  Clone ID: 700833337_FLI.pep
PEPGTATGVPELTFSPNSSICTLLRLDPLEFRPSKRFPRPKWPLDAKRERKDPPPPTGLGSVRVGSISGAGAEETGGDGEACLVLLLDEDDRFVFFLLPTNGDVSQGATFGPIPSAVLAKMAWLREVVVVVVAELGVGGVTARAFKLFLFGKVGFHGLEQRWILHSPIPKRVFSFQTLFFFFFSRSQNK

SEQ ID NO: 38575 - protein, 317 aa, Glycine max
  Clone ID: 700838658_FLI.pep
SYLRVVASTMGEVAVMHSEPLQFECNDISVNMTEKEVYPPESNVERLPGEESSQSTDHKNINDLQERGYMEYGCQHYRRRCRIRAPCCNEIFDCRHCHNEAKNDINIDQKHRHDIPRHQVKQVICSLCGTEQEVQQNCINCGVCMGKYFCGTCKLFDDDISKQQYHCSGCGICRTGGSENFFHCYKCGCCYSTLLKNSHPCVEGAMHHDCPVCFEYLFESRNDVTVMPCGHTIHKSCLNEMREHFQYSCPLCLKSVCDMSKVWEKFDIEIAATPMPEQYQNKMVWILCNDCGKTSHVQFHFVAQKCPNCKSYNTRQT

SEQ ID NO: 38576 - protein, 410 aa, Glycine max
  Clone ID: 700837637_FLI.pep
DPQRKRAFAATVEHAGTTSSSQGMVRGSGGEIVQVEGGHIVRSTGRKDRHSKVCTAKGPRDRRVRLSAHTAIQFYDVQDRLGYDRPSKAVDWLINKAKSSIDQLAHLPPWKPTLPSPAPPHLNDDHSDKPNPNPNPNPNPNPNPNHSPDAQILNQFDHDDGAGAGSSYLPMDNDAIRSFFPTTTSSLVQFQSYPPDLLSRTSSQDLRLSLQSLQDPILLHHNHNNNEHVLFAGTAFDNMVAWNNNSNNNHNNNNHNNNNNNNNNTASNDTCGGGGGGGGGGGGFVFNAPSTLPGPATVASPTVVFGHGYGQGQYFSQRGPLQSSNSPSVRAWIDAPSFVAAAADHRHHHYLSPAAAAAALVYQSAPSTAAFTAAPGGFSGFRVPARIQGEEEHDGGMSDKPSSASSDSRR

SEQ ID NO: 38577 - protein, 571 aa, Glycine max
  Clone ID: 700838292_FLI.pep
SDFSGVTPKKKEIQTPNPMLTPSATPGAAGLTPRIGMTPTRDGFSFSMTPKGTPLRDELHINEDMNMHDSTKLELQRQADMRRSLRSGLGSLPQPKNEYQIVMPPVLEDAEEPEEKIEEDMSDRIAREKAEEEARQQALLRKRSKVLQRELPRPPTASLELIRNSLMRTDGDKSSFVPPTSIEQADEMIRRELLTLLEHDNGKYPLDDKVIKEKKKGAKRAVNGSAVPVIEDFQEDEMKEADKLIKEEALYLCAAMGHEDEPLDEFIEAHRTCLNDLMYFPTRNAYGLSSVAGNMEKLAALQNEFENVRNKLDDGKEKMVRLEKKVMVLTQGYEMRVKKSLWPQIEATFKQMDVAATELECFKALQKQEQLAASHRINNLWGEVQKQKELEKTLQNRYGSLIEELEKMQNVMDQCRLLAQQQEEIEANNHARESTEIIESKAGETDVQSTENCETVPDSVEHGHALAVESSDDGTADQQVDIVHDQATSSVSHDMDVDSDKLANPTPAAENVDGKLEVTATASYTDDGKTMLEMGAAVEVSSSPNHDVVADAVNSHDNSMEETNAVGEETN

SEQ ID NO: 38578 - protein, 553 aa, Glycine max
  unsure (1)..(553): unsure at all Xaa locations
  Clone ID: 700849822_FLI.pep
AWGRCKCNRSYWXXXXXXXXXXXXXXXXXXXXXXXXXSXXDMNGYQTTHVAAQYGQTAFLYHIVSKWNADPDVPDNDGRSPLHWAAYKGFADSIRLLLFLDAHRGRQDTGGCTPLHWAAIRGNLEACTVLVQAGKKEDLMLADNTGLTPAQLASDKNHRQVAFFLGNARRLLDKRCDGNSRLGKISKLGLAPVLWCIILVLLVTYIHSVILATKMPKLTAAAGLLAWFGVFLASVGLVMFYRCSSKDPGYIRMNMHDNQDTKDDEPLLKIEINNPALLAGNWSQLCATCKIVRPLRAKHCSTCDRCVEQFDHHCPWVSNCIGKKNKWDFFVFLVLEVLAMLVTGGVCLTRVLTDPLAPHSFGAWIQYVANNHIGAISFLIADFFLFFGVFTLTVVQASQISRNITTNEMANAMRYSYLRGPGGRFRNPYDHGIKKNCSDFLINGYNEDVECIEELGNSEEGIGMMHMARSSNLANGDSHTHTEYARGNGNGHHAINVDSNSNSTNSKIHHGHINGHVHSSHCSHNNHGKTRNDNVPLGLGLGLGRNRSVTASS

SEQ ID NO: 38579 - protein, 103 aa, Glycine max
  Clone ID: 700843917_FLI.pep
LLFMQALPVFTFSNQAGLDMLETTLVALQDITLEKIFDDHGRKILFSEFPQIIQQGFACLQGGICLSSMGRPVSYERVVAWKVLNEEENAHCICFMFVNWSFV

SEQ ID NO: 38580 - protein, 340 aa, Glycine max
  Clone ID: 700845984_FLI.pep
PESTPNAMEAESLNEKSIRRIHKALDSDDVELLKLLLNESSVTLDDAYALHYACAYSDSKVIQEVLSLGMADILRRNSRGYTVLHVAARRKDPSILVALLNKGARASDTTPDGQTALAICQRLTRCKDYHEKTVQCKESNKDRLCVDVLEREMRRNSMTVNMSVSSQLTADDLHMRLDYLEDRVAFARLLFPAEARVAIENAEADSSSLYANSSALKVTNGNPKEVDLNESPSARTRKLQLRLHALMKTVENGRRFFPHCSEVLDKFLEDDEMPDVFFLEKGSEEEQRIKKARFMELKDDVQKAFHKDMAENNHSGFSSTVSSSSSSTRREGLNHRVRRK

SEQ ID NO: 38581 - protein, 377 aa, Glycine max
  Clone ID: 700964632_FLI.pep
LITADLTSIIVQLISTAGSLLPSVRHTLTNANPLVGQLDQLHGINLPFESEPSSGIRPQNNSGNKLFDQSIQNDLPNKLEMEQNYNMEEHEPKDEEDVDEGENLPPGSYEILQLEKEEILAPHTHFCTICGKGFKRDANLRMHMRGHGDKYKTPAALAKPHKESGSEPKLIKRYSCPYNGCKRNKDHKKFQPLKTILCVKNHYKRTHCDKSYTCSRCNTKKFSVMADLKTHEKHCGKDKWLCSCGTTFSRKDKLFGHIALFQGHTPAIPLDETKGMAEPPDIQNRESNNKVESINFCFGSNSSSENVVQNMMDMKGNNDDPMNYFSSLNFEGCNFGAFNEFSQPPFEDSDGCFSFPMSGSFNYAPKFGGGESSSDNL

SEQ ID NO: 38582 - protein, 233 aa, Glycine max
  Clone ID: 700909505_FLI.pep
KASQVPPQQHIPSGEVVGNSASTASQTKARMRWTPELHEAFVEAVNHLGGSEKATPKGVLNQMKVEGLTIYHVKSHLQKYRTARYKPEPSEGTSEKKVTPMEEMKSLDLKTSKGITEALRLQMELQKRLHEQLEIQRKLQIQIEDQGKRLQMMFEKQREMGDSKVNVSLDEPSAAAPSETVETTNEERHKFESIPKAIPEEKESSTTKQIAGEAEEMIKEDEVAPPTKRVKSS

SEQ ID NO: 38583 - protein, 339 aa, Glycine max
  Clone ID: 700903290_FLI.pep
ERSSSIDMESCVPPGFRFHPTEDELVGYYLKRKINSLKIDLDVIVEIDLYKMEPWDIQDRCKLGYEQQNEWYFFSHKDKKYPTGTRTNRATAAGFWKATGRDKAVMSKNRIIGMRKTLVFYKGRAPNGRKTDWIMHEYRHQTSEHGPPQEEGWVVCRAFRKPSPSHRPGFDHPWCSTSSQQQHFFRDQIQSYSSRPLSIADILDETNNVPHPNAEGTSFSHPFSSDHQQHLNNLLSNQTVAIMDKQLIELPQLDSPTASLAIKECNQQQHNGLTNEEYCSDERSNNSNAQGIDWKSLDNLFGSQLSDNAAYFSHPNLPLMMPHNHDQASHILGCFPDSS

SEQ ID NO: 38584 - protein, 105 aa, Glycine max
  Clone ID: 700907607_FLI.pep
CYSNIKCYIQLNKSNIRSFICTLLILNLLSLTVTRCVKCEGVGCRNKCTCKIINDLVQEHLINQCTWNLIKVNHHSKIINDDLLSLQSFSEEFKKKGCEKDIGLG

SEQ ID NO: 38585 - protein, 751 aa, Glycine max
  Clone ID: 700957918_FLI.pep
DEPGDEEEFRRCTRSASGGWRCKERAMRGRSFCERHFLYQQQRNRSAKKKRASGGVGVPQKRGMKQRKKPEGDLENGVVGAGVVGADGDGADGDHTGGPHVVEEFAGLFGEGHDGGVNLGLGCESFDLWGEVEGQHVHMGGFGGGCGKLGQVEGQVLGQPWSNANAGGGVFDAVLGGHASGAGVGVCENDFLDLSSGGLEADFDSLYDQGFQALLCQGGGCEEDVGFIGSDWAIPNFAALGGSTGFQGLSGENAYQFRGEEVAGCVGNPGGYGKVEDDSFGGIDVPGSNSRHHGDNASDSKMLVLGVEEGMERLLDGGLASSEEAKGVAFRPVARRGRPKGSKNKDKQFHTTLNRQSVGENVKGGTNGISSVTVSGSVFKAVDEGAVLGEIARPKKRGRQNGLNTVNNVTILESERSVFSVEEDKAGDEGVGLGEIVKPKKLGRRKGSNRISNVTVLESERSLFSGEEDKAEDEVAGLGEIVRPKKRDRPKGSNRMSIITVLKSERPLLSVEEGSADDEGAGLGEIVRPKKRGRPKGSRNKKNILHVSNNVVVMFAGPKKLGRPEGSEGRKKSVVLVGNKVVGEIAGPNKCGKTKGSKNKIKNVVEVGNEVAGAGEIAGPKKHGRPRGSTKIKKNALEVNNEVSGAGEITGFKKRGRPKGSTKKRYTVVYASSNEVACEVARQDLENKMLSNLCQKVSDELVSINNKYGPAMSTRSNSRSFVFEGQKFPGMSNDINLEGDGGSTSVWSSGL

SEQ ID NO: 38586 - protein, 312 aa, Glycine max
  Clone ID: 700962257_FLI.pep
TRTMNRGIEVLSPASYLRSSNWLFQESLGTRWTPQENKLFENALAVFDKDTPDRWLKVAALIPGKTVGDVIKQYRELEEDVSVIESGFIPLPGYTAADSFTLEWVNNQGFDGLRQFYGVTGKRGASTRPSEQERKKGVPWTKEEHRQFLMGLKKYGKGDWRNISRNFVTTRTPTQVASHAQKYFIRQLSGGKDKKRSSIHDITMVNLPEAKSPSSESNNRPYSPDHSVKDVNPPSQNQRLSTTMVIKQEHDWKLPCETVPMLFNSTNGNMFMTPLCGISSYGSKPLQEQYFLSGCQFGPYDTIMQMPSMQNQ

SEQ ID NO: 38587 - protein, 573 aa, Glycine max
  Clone ID: 700959795_FLI.pep
VYFLWLTQNDMLFVYCLQSRTDRIVFKLFGKDPSDFPLLLRSQILNWLSRSPTEIESYIRPGCIILTIYLRLEKSAWEELYCNLGSSLRKLLAASNDSFWRTGWVYARVQHAVAFLYNGQVVLDVPLRLKSPQHCMISCINPLAVPASASAQFIVKGFNLSQSSTRLHCALEGKYLVHASCHDLIGGADAPIQHLSFSCQIPSVTGRGFIEVEDHGLSSCSFPFIVAEQEVCSEICKLENVIEEAETTDDIQIKNQHMEEKTQALDFLQEMGWLLHRSHVKFKLGSMAPFHDLFQFNRFAWLVDFSMDHGWCAVMKKLLDIIFEGGVDAGEHASIELALLNMGLLHRAVKRNCRPMVELLLRFVPVKTSDGADSEMKQVAEAPDRFLFRPDTVGPAGLTPLHVAASMSGSENVLDALTNDPRMVGIEAWKSARDSTGLTPNDHACLRGYYSYIQLVQNKTNKKGERQHLVDIPGTVVDSNTTQKQSDGNRTCRVPSLKTEKIETTAMPRQCRACQQKVAYGGMKTAMVYRPVMLSMVTIAVVCVCVALLFKSSPRVYYVFQPFNWESLEYGAM

SEQ ID NO: 38588 - protein, 248 aa, Glycine max
  Clone ID: 700964450_FLI.pep
CGFPRESILILTDDMEERNPQKFPTKYNILKAMRWLIEGSQSGDSLVFQFSGHGCQELDTNGDFDELDERDEAICPVDWEKQGIILDDDINAAIVRPLPYGAKLHAIIDSCNSGTVLDLAYVWSQRDTWDYQYGGPDKDTSGGLAICISGCGDYQSSKEIPVLSGGGGGNAVTGVFTYSFIYTMLNEPAGLSYGGLLSSMRSTIRGMLNNPNASLFNTDFTLAPRQDLQKPQLSSSMEFDVYTARVEL

SEQ ID NO: 38589 - protein, 104 aa, Glycine max
  Clone ID: 700959801_FLI.pep
AAELSIFMNDRRISTQVKASAQARQVGRQISISSPGFIYEPYEPREKIPFWKRWFTRSGWRRTKNDIILELKSAYAIAKLRKKGYSKNQFYNEAANMYKENVGA

SEQ ID NO: 38590 - protein, 453 aa, Glycine max
  Clone ID: 700909970_FLI.pep
FGGHKSFQSIIGGGLKDLVSDIVHMGRHSCCYKQKLRKGLWSPEEDEKLLNHITKHGHGCWSSVPKLAGLQRCGKSCRLRWINYLRPDLKRGAFSQQEENMIVELHAVLGNRWSQIAAQLPGRTDNEIKNLWNSCLKKKLRQRGIDPTTHKPLSEVENDKDMNMMPPSTDKSTQKASVGSNEVVSNLVDHHQPPKTMPNSSSERYPLEVSTTSSTQELFLDRFGTTTTTCHENNNNTSDLVGSYFSFQHLNYGTTTSMALSSNPNTSLCFILPSTSSDINNNNSIITSSSMLPSIFPTQHVKLQSNNNNPSSISSDGVQNWETSNNTNKNNGNMQLQSSTNYLDSTWGVAESMKIVNINKEAQVVPLQAEQEDLKWSEYLNTPFILGNNTTQNHQIQTSQSIYTEVIKPETGFIIDESCTSNWHHHQPPPAFQLSDIYSKDLQRFSVTFGQTL

SEQ ID NO: 38591 - protein, 271 aa, Glycine max
  Clone ID: 700954134_FLI.pep
ETLYIFIIVTDPNKLNKTMIPNVEIPHWDADGGGPLSPFISSSSNADKCSLLFSSDHFRMFQFKVRICPRGRSHDWTECPYAHPAEKARRRDPRKYHYSGTACPDYQKGNCKRGDTCQFSHGVFECWLHPSRYRTHLCKDGTTCRRRVCFFAHTTEQLRLVVTDSSSSSFVSSPTSVLNSSSFSDSSPYSFVREIVNSTRNVKIEDSGLTRCVFGSPRGGFLSVNGCEEEPAMERVESGKDIRARIYAKLSRENTIGASDPDIGWVSELVK

SEQ ID NO: 38592 - protein, 259 aa, Glycine max
  Clone ID: 700853826_FLI.pep
MALSSLFVLMTQYGLEYPNFYEKLYALLVPSIFMAKHRARFFQLLDSCLKSPLLPAYLAASFAKKLSRLLLSVPPSGALVITALIHNILRRHPSINCLVHREDGVDEGKGDHRTDEGMATNSDNAKTVAMPSQKSGIDHFNSSETDPKKSGAMRSSLWEIDTILHHYCPPASRFALSLGNDLTVRAKTTEVNVGDFSAGSYATILGAEISRRVKQVPLAFFKATPSSLFSETDFAGWTFKCEETPKMINDNNDSTKDLS

SEQ ID NO: 38593 - protein, 212 aa, Glycine max
  Clone ID: 700852990_FLI.pep
NLDGLTPDTFLSRGYDSQKDLQNLLSNYGGAPRDIETELSTAALSPQPFGVPGIPFKPGCSSDIAINDPGVLNNGLWANQTQRMRTYTKVQKCGSVGRCIDVTRYKGYDELRHDLARMFGIEGQLEDPQRTEWKLVYVDHENDILLVGDDPWEEFVSCVQSIKILSSAEVQKMSLDGDLGHVPVPNQACSGTDNGNAWRGQYEDNSAASFNR

SEQ ID NO: 38594 - protein, 748 aa, Glycine max
  Clone ID: 700888246_FLI.pep
RKLTAMNKLLMEENDRLQKQVSQLVCENGFMRQQLHTPSATTTDASCDSVVTTPQHTLRDASNPAGLLSIAEETLTEFLSKATGTAVDWVQMPGMKPGPDSVGIFTISQSCSGVAARACGLVSLEPTKIAEILKDRPSWFRDCRSLEVFTMFPAGNGGTIELVYTQTYAPTTLAPARDFWTLRYTTSLENGSLVVCERSLSGSGTGPNPAAAAQFVRAETLPSGYLIRPCEGGGSIIHIVDHLNLEAWSVPEVLRPLYESSKVVAQKMTIAALRYIRQIAQETSGEVVYGLGRQPAVLRTFSQRLSRGFNDAVNGFNDDGWTVLNCDGAEDVIIAVNSTKNLSGTSNPASSLTFLGGILCAKASMLLQNVPPAVLVRFLREHRSEWADFNVDAYSAASLKAGTYAYPGMRPTRFTGSQIIMPLGHTIEHEEMLEVIRLEGHSLAQEDAFVSRDIHLLQICSGIDENAVGACSELVFAPIDEMFPDDAPLVPSGFRIIPLDSKPGDKKDAVATNRTLDLTSGFEVGPATTAGADASSSQNTRSVLTIAFQFPFDSSLQDNVAVMARQYVRSVISSVQRVAMAISPSGINPSIGAKLSPGSPEAVTLAHWICQSYSYYLGSDLLRSDSLVGDMMLKQLWHHQDAILCCSLKSLPVFIFANQAGLDMLETTLVALQDITLDKIFDEAGRKALCTDFAKLMEQGFAYLPAGICMSTMGRHVSYDQAIAWKVLTGEDNTVHCLAFSFINWSFV

SEQ ID NO: 38595 - protein, 203 aa, Glycine max
  Clone ID: 700890165_FLI.pep
KNMEDGSVNLPPGFFFSPTDEELVLHFLYCKASLIPCHPNIIPDLHPSQLAPWELNGKALLSGNQYYFFTKVNENRARENGYWKDTGVTEPILSTFDKKVGMKKYLVFHIGEAPQGTETSWVMQEYYICSSGFDTASYRSARRRRKHDQSWSKWVLCKVYEKIRSQQGVNCYSDDDDSGSELSWLDEVYLSLDDDLEEIGMPI

SEQ ID NO: 38596 - protein, 223 aa, Oryza sativa nipponbare
  Clone ID: LIB3598-050-D10_FLI.pep
RKQLNIISTHHPHPSEILPCDDHHFIQHRYRLKTTQKQIQTCTEFEVKTYINRPKGKSFTASSDPSPSSPWRRRWQRCPCWRRRRCRPRLRSSPACSSPRPWRRPPCSSPAHSPVGGRCRSCPCRRWQSPWCTAPSRRSSAWRRQRSRRPSAWPARSSRRGSRRSGPCSRRLCPSPPATCWRSCPSPPAPSPTPSPSPPAPSPSSPPWYPAPCRRRAPPPPTP

SEQ ID NO: 38597 - protein, 92 aa, Glycine max
  Clone ID: 700891856_FLI.pep
VRCTCHANLRKIDLNVYKSYPELLKALGNMFKCTFGEYSEREGYNGSEYAPTYEDKDGDWMLVGDVPWNMFVSSCKRLRIMKASEAKGLGCF

SEQ ID NO: 38598 - protein, 376 aa, Glycine max
  Clone ID: 700888891_FLI.pep
GNSAKVFSVLSWSRYSKSPPSTKDGAEFSGRSEPCKPGAHCATLKKLYAAEKKLFKALKEEGIVALEFDRKSMLLRKQEDENLDVVKIDKTRSSVDKLESDLISLRQCISDTTSSILEMIDEELLPQLVALTAGLTQMWRTMHESHKAQALISQHLSNLSDNHNMILNSEYHHQATIQFETEASYWYNSFCKLVKFQREYVRTLYEWIKLAESLKDSNECSNHSSILAICDQWERGLNESPDKETSEAIKSLVSCIRSITGQQIQEDNILKRLEKLDRKFQKCLNSLAEMQQRIDGDMADTSPRHPIHLKKTETEALKKQVESAKANYLDAVQYSRAMTLDHLQKTLPPLFQSLMEFSNASAQAIEAINTTGKPVE

SEQ ID NO: 38599 - protein, 182 aa, Glycine max
  Clone ID: 700895420_FLI.pep
RESFAGAGHRTCISASCMPFSSLGVQIVSISIYTATPKQIRELMNVDGLTNDEVKSHLQKYRLHTRRPIPMVHNSSDPQAAPFVLVGNIFVQSPEYAAVATSTASREVATVAAPARIYAPVATHPTPVSHPPDDSIKKPQFKKVKLFELSNSDDRANHSEGAVHSNSPTSSSSTHTSTSPGY

SEQ ID NO: 38600 - protein, 286 aa, Glycine max
  Clone ID: 700899010_FLI.pep
NLLSWLQQGMPLVLAKSDSIQIREVWNDNLEEEFALIREIVDDYPYIAMDTEFPGIVLRPVGNFKNSYDYHYQTLKDNVDMLKLIQLGLTFSDEHGNLPTCGDESGTCCIWQFNFREFNVNEDVFANDSIELLRQSGIDFKRNNENGIDAHRFGELLMSSGIVLNDNVHWVTFHSGYDFGYLLKLLTCQDLPDTQVGFFNLINMYFPTVYDIKHLMKFCNSLHGGLNKLAELLEVERVGICHQAGSDSLLTSCTFRKLKDNFFSGSLEKYAGVLYGLGVENGQGSH

SEQ ID NO: 38601 - protein, 701 aa, Glycine max
  Clone ID: 701039913_FLI.pep
RLKKKMTVEKKMNDSGDEFPVGMRVLAVDDDPTCLLVLETLLRRCQYHATTTNQAIKALALLREHKDKFDLVISDVHMPDMDGFKLLELVGLEMDLPVIMLSANGDTKLVMKGISHGACDYLLKPVRMEELKNIWQHVIRRKKFDSKEKNKTRNIDKPTSNSSNGLGSSGTGNSDHNEKLTKKRKDQDEDEDEEQENDHDNDDPSAQKKPRVVWSVELHRKFVAAVNQLGIDKAVPKKILDLMNVEKLTRENVASHLQKYRLYLKRISCVANQQTNMVVALGGADPSYLRMNSVSGVGHIQSISGSGQLHNNAFRSFPPSGIINRLNTPAGLNVHGFPSGVLQLSQSQNLKNTNDNLKFQSAIVPANQNGVHGMTVSVGLDQLQNNKGVMSVQNLTTVFDAKTTFPISNKLPDPRPKITNSGSHTPDVSFSNNALMLEPRPQGTQGSVRIETLSSSVASQHSEFSLSLLDQGRYSDNWASTVQPSVIQTNSYPPSECFGQTNIPPTDNMASVPLQGGNLSGASITSLSRQSYDSMTDMHSEGVTFTNRPGHISSNVPYQGWHDNNQDATHHSNILSINSLTPVNGAAVPAGHAAMNSALHRNLDFNYCDPLQMKHEGFVELTDEALSKQHQGNIMNLPKSQQSHFSNNLGSLEDLVSSMMKQENDKMKLLDGNLICNNYSGGLSRCDSRFSSTFQNIMHPR

SEQ ID NO: 38602 - protein, 146 aa, Glycine max
  Clone ID: 701155564_FLI.pep
ISSLFPSQRAMARTKQTARKSTGGKAPRKQLATKAARKSAPATGGVKKPHRFRPGTVALREIRKYQKSTELLIRKLPFQRLVREIAQDFKTDLRFQSSAVSALQEAAEAYLVGLFEDTNLCAIHAKRVTIMPKDIQLARRIRGERA

SEQ ID NO: 38603 - protein, 117 aa, Glycine max
  Clone ID: 701156037_FLI.pep
EEQEEETTSKSLSCVRLDIAFTPESESSETFLQSFTFFLSRRKTSYCLWRLRMSGKGAKGLITGKTSATNNKDKDKKKPISRSSRAGLQVLRSLSLSPSFTNIDSLVTVKILYTGIL

SEQ ID NO: 38604 - protein, 525 aa, Glycine max
  Clone ID: 701050039_FLI.pep
FSNSSSVFFPFFLVSLSMGSVDCYPSRTDDAAVVSLDSLPLGFRFRPTDEELVNYYLRQKINGNGRQVWVIREIDVCKWEPWDMPGLSVVQTKDPEWFFFCPQDRKYPNGHRLNRATNNGYWKATGKDRRIKSGKDLIGMKKTLVFYTGRAPKGNRTNWVMHEYRPTLKELDGTNPGQNPYVLCRLFKKHDESLEVSHCDEAEQTASTPVAYSTEEIQSDLAVVAGSPSQVTEDDKHQAMIPAHSEEAISNVVTPVVCRSDRYDACHAPNQIVLPTAEEFQPLNYYDPRNELLDDKLFSPVLAHIQPEFHYQANIESDDWYGLQYGTNETNMSDFLNSVVNWDQVSFEDLNCQQQSYPLFNVKDSVLSSDLDSELAIMTCMHAGSAEGPNNGRKPLVITSEFRSTTGIPVDCGGDEQKSNVGLFQNNSQRAFTDVNIGQVYNVVDDYEQRGIYSAVASGNTGIIRRHREVQNEQLSSNSTQGTAQRRIRLSMATHGSNKMVKSGSCAQEELNLKSVIAMVRILFF

SEQ ID NO: 38605 - protein, 282 aa, Glycine max
  Clone ID: 701056828_FLI.pep
DRPSYDGYNWRKYGQKQVKGSEYPRSYYKCTHPNCPVKKKVERSFDGNIAEIVYKGEHNHSKPQLHKRNSAAGTQGSGVMSDGMVQDMWSNSHSERNEGNEVRIENTGLSMHSDYYVKVPQPNDSSLNIGATNAGGGSMENSCGLSGEYEEGSKGFEAQEDEHRSKRRKNENQSNEAALSEEGLVEPRIVMQSFTDSEVLGDGFRWRKYGQKVVKGNPYPRSYFRCTNIMCNVRKHVERAIDDPRSFVTTYEGKHNHEMPLKNTGTVASERDSQASLSKDKP

SEQ ID NO: 38606 - protein, 83 aa, Glycine max
  Clone ID: 701051067_FLI.pep
VLDEIINYIQSLQRQVEFLSMKLEAVNSRLNSGIEAFPPKDFGQQAFDPAGIPFGSQAPREYSRGSSPDWLHMQIGGSFERTT

SEQ ID NO: 38607 - protein, 329 aa, Glycine max
  Clone ID: 701212455_FLI.pep
GSNGGSSNNNNNKVLEKPGQDQLVQQQQQQQEAPKCPRCDSSNTKFCYYNNYSLSQPRHFCKACKRYWTRGGTLRNVPVGGGCRRNKRVKRPLITTNPSSAAIDTAASNNSSNSSSAPLQPPIDTASTSNHINPLFYGLPSSSSDVNLPLFSRFGSRISSSGFDLQLNNALGLGFSSGVLSNEASDNNGYRNWFGSNNTLLSSYTSTTSTTTPAMSSLLSSSLLQQKFMTDGVDSTNTFQHGLGLTPLEQLQMASDHSSEAGMVALKDVKVELGQNNRLEWNNGAACQSQIQHVGLYDPSLYWNNSAATALGVWNDQAANIGSSVTSLI

SEQ ID NO: 38608 - protein, 315 aa, Glycine max
  Clone ID: 701212551_FLI.pep
RSPLNKSEFPCFASPPPLLAWVEMQEAGLGMGMGMMSGEVSAAGDHHRQVKAEIANHPLYEQLLSAHVSCLRVATPIDQLPLIDGQLSQSHHLLRSYASHHSHSLSPHDRQELDNFMAQYLIVLCTFKEQLQQHVRVHAVEAVMACRDIESTLQALTGVSLGEGTGATMSDDEDDLQMDGSLDQSSADGHDMMGFGPLLPTESERSLMERVRQELKIELKQGFKSRIEDVREEILRKRRAGKLPGDTTSVLKAWWQQHAKWPYPTEDDKAKLVEETGLQLKQINNWFINQRKRNWHSNSQSVNSLKSKRKREYAH

SEQ ID NO: 38609 - protein, 277 aa, Glycine max
  Clone ID: 701213026_FLI.pep
SHFFFFVEIILSFLNVDQKFESLPLGAIIICLQIRFYCLQNRGSGASLMAKAAMNSHAPALYSLAVIQFNGSGGTKNDKDLRAGVALCARAAFLGHIDALRELGHCLQDGYGVKLNVTEGRRFLVQANARELAAVLSAGNTKRPWLTWSHHPVTHPRLRSGCPLMSDYGCNVPAPDAHPASQFMSEWFDIRGGFPGPDMRLCSHSGCGRPETRRHEFRRCSVCGLVNYCSRACQALDWKFRHKAECATVERWLDDDGEGVAGENDGGGDDGVMMVNS

SEQ ID NO: 38610 - protein, 720 aa, Glycine max
  Clone ID: 701213039_FLI.pep
IPWTIIMADKGGKSCPICTEEMDLTDQQLKPCKCGYEICVWCWHHIMEMAQKDETESRCPACRSPYDKERIVTMAANCQRLVAEMNSQHKKKMQKLNLKPKSVDGRKHLSDVRVIQRNLVYIIGLPLNLADEELLQRREYFGRYGKVMKVSISRTANGIIQHSANSSCCVYITYSKESEAVQCIQSVHCFVLEGRPLRACFGTTKYCHAWLRNVPCSNRDCLYLHDHGSHEDSFTKDELVLAFARSRVQQIIGATNNLHRRSGNVLPPPVDNPKHMSSATKLVSQSPLDKCENQIKGFASGIGAVTSTVLPAVTSWVRCVSGNLPHDTSSSCSGNLANRKIEASNDPQALVSGVASTERSINIRKSGEAENSSDVCSNGAFVPSETNNHNSGGNSKTSFMDNDQDTVAPSVSTGFLELSRQHDFNIDTAVGINSNGDVHGLCSGLSSISINIHLEDSYLTPDSDGLPFTRNSIDSSLGQHLQQDNEYSTEHSSTPAFWEDIIVDDVLNIDSKQQKFSKGINYSSSSGLHSSCLTQNVNHSSHQPFQQDQICHQNHFRKPSTESFNEHLETGHVKYGESKDNGAGVDSMVASDMGENNIISDILSLELDAWEGSLVNLLGESDELYRPFKAPILRKVQDKNQSRFSFARQDDFMNGASNLLQSFAVTGRDPEGNFSSGALMGNKDTLTGKYPHVFPSGNSVPSDKLVGSQSLVPSNFSCEC

SEQ ID NO: 38611 - protein, 459 aa, Glycine max
  Clone ID: 701204934_FLI.pep
LSSVTSSPLQFFSMMSLSVSPSLGSPYQMKCEQRGLVLIHLLLAGANFVATGDLQNANLTLEQISQHASLDGDTMQRIASYFSEALADRILKTWPGIHRALNSSRITMVSDEILVQKLFFELLPFLKFSYILTNQAIVEAMEGEKMVHIVDLYGAGPAQWISLLQVLSARPEGPPHLRITGVHHKKEVLDQMAHKLTEEAEKLDIPFQFNPVLSKLENLDFNKLRVKTGEALAISSIMQLHSLLALDEDASRRKSPLLSKNSNAIHLQKGLLMNHNTLGDLLDGYSPSPDSASSSPAASSSALMNSESFLNALWGLSPKVMVVTEQDFNHNCLTMMERLAEALFSYAAYFDCLESTVSRASMDRLKLEKMLFGEEIKNIIACEGCERKERHEKMDRWIQRLDLSGFANVPISYYGMLQGRRFLQTYGCEGYKMREECGRVMICWQERSLFSITAWRPRK

SEQ ID NO: 38612 - protein, 374 aa, Glycine max
  Clone ID: 701205228_FLI.pep
QTPKQLLYDCARILSEGNEQEATSMINKLRQMVSIQGDPSQRIAAYMVEGLAARVATSGKCIYQALRCKEPPSNDRLAAMQILFEVCPCFKFGYIAANGAIAEAVRDEKKVHIIDFDISQGTQYITLIQTLASMPGRPPHVRLTGVDDPESVQRSIGGINIIGQRLEKLAEELGLPFEFRAVASGTSNVTQSMLDCRPGEALVVNFAFQLHHMRDETVSTVNERDQLLRMVKSLNPKLVTVVEQDMNTNTSPFLPRFVEAYNYYSAVFNTLDATLPRESQDRMNVERQCLAKDIVNIVACEGEERIERYEVAGKWRARLSMAGFTPSPMSTNVREAIRKLIIKQYCDKFKIKEEMGGLHFGWEDKNLIVASAWK

SEQ ID NO: 38613 - protein, 169 aa, Glycine max
  Clone ID: 701206157_FLI.pep
DAEHVTVVNKNEKKRAFSQIDDENSSSGGDRKIKTNKSQVVGWPPVCSYRKKNSMNEGSKMYVKVSMDGAPFLRKIDLGLHKGYSDLALALDKLFGSYGMVEALKNADNSEHVPIYEDKDGDWMLVGDVPWEMFMESCKRLRIMKRSDAKGFGLQPKGSLKGFIESAAK

SEQ ID NO: 38614 - protein, 134 aa, Glycine max
  Clone ID: 701207169_FLI.pep
IPSVNFVDLNKTSSLPSSPPMGVAPGKTCKKCRCVNNRSCTKVLKLGNALGRAVDLARFNGYTELIAELDSMFDFQGTLISGGSGWHVTCLDDEGDMMQLGDYPWQDFLGVVQKMIICPKEGTDNLKPGSSANP

SEQ ID NO: 38615 - protein, 155 aa, Glycine max
  Clone ID: 701207952_FLI.pep
EFEIAITLYFHPDVCEKQLDLYHHLKLYPEDESGPQSTKKPVVVESYNEIVFPEPSEGFLARVQNHPAVNVPRLPAGLNLPSPVPIDTVNDKERGDTKDHPLTQWFMNFSEADELLKLAAARQQVQAHIVKLRRQLSLVEGLPQLSKPPSGYECT

SEQ ID NO: 38616 - protein, 373 aa, Glycine max
  Clone ID: 701209450_FLI.pep
FPNLHSSLPLSLSFFLSLCSLNGAATREHGNTKRPRCHTRPKNHHHNNKASAGTRRKVPAMRLIQHKVLLLQQLQPHPAQALLQDLQKVLDQRRSLAQRPDRRRLQEEQKGRRQALFLFVIFITKTFNLGALPFPSRLNTNHHIPTIINTGLFNNNQLSPFLDVKSALFQLDAPPAALSNSLMGIAPPSAQNNNFWALGRSQSSTLSDPLNSTMQSMQQSLNVHSSLASSIESLSCVNRDLHLKMQQQRYATMMSGGDTHHKGDENSGVSFPQTVNGFENQKLVMNPVMFQKPVESLPAGSAVTEGPSGASVTTVAPPTEWFFGNSSFPSTGNGGGNGNNNINININDANNNWSDALAWGNFQQQQQQYSALP

SEQ ID NO: 38617 - protein, 664 aa, Glycine max
  Clone ID: 701210281_FLI.pep
ENLLRKCQYHVTTTNQAVEALTMLRENRNKFDLVISDVNMPDIDGFKLLELVGLEMDLPVIMLSAHGDTKLVMKGVTHGACDYLLKPVRIEELKNIWQHVVRRKNFDSRDQNKASNEEKAPNFAGGGSQGLRSENSADQNKRLGKKRKDQSDEEEEGGEENEDDEDPSAQKKARVVWSVELHRKFVAAVNQLGLDKAVPKKILDLMNVEGLTRENVASHLQKYRLYLKKAAQQANMVAALGGSDSYLRIGSIDGYGDFCTSSGSGRITNATLPSYASTGIFSRLNSPAALNMRGISSSALIRPVQSQNINSSLNTLGNIQPSIFPANQSSSLLQGIPTSIELNQSKQRNCTTGISQLSQVDSSGFTVASGFPDHRATVNGPNNSLPCVSNNHIMLQGNPQTHGPGAFSNQSSVRAASLCAESFDVGLCGSSNLLDHNRCNDNWQNAAQLSKFPANSLPLCEAFSNDQLPPTSINDSNSSTHIGNNSPVDFSSRMGISVPLEDTRNELRCQEGLIGNIVQPSSYTPRQRWEEHKLDYNQNMSCPFNSVNSHASSSGVTSSMGHVLNQNNTICSNRVDASSLVGQLNGASPSISRCTEVEKFSSDIRLKPNEAYILEQMKSQDGFMQNTFGTLDDIMGVMVKREQNESTLLDGEMGFDAYPVGSCN

SEQ ID NO: 38618 - protein, 303 aa, Glycine max
  Clone ID: 701204661_FLI.pep
KDFSTFFFTEIVYKGQHSHPKPQSTRRTNSQSIHQPSSSCTNSGITDHSVVTLGNPQMDHFSIQEDSSASVGEEEFEQTPQTSYSGGDGDNLGPDAKRWKGDNENDGYSVSASRSVREPRVVVETTSEIDILDDGFRWRKYGQKVVKGNSNARSYYKCTAPGCSVRKHVERAAHDIKAVITTYEGKHNHDVPAARGSGKYNSNRNSQNSNISAPIRPSAVNCYSNSSSFTNSLYNNTRLPATGNQESFSLDKFKNPGSFGYSDLNRPMGSHTNHAQYTDAAYSRAKDERKDDSFLQSFLSKDF

SEQ ID NO: 38619 - protein, 340 aa, Glycine max
  Clone ID: 700968295_FLI.pep
YYLDPVPMTRRCSHCSHNGHNSRTCPNRGVKLFGVRLTDGSIRKSASMGNLTHYAGSGSGPLHTGLNNPGSPGETPDHAAAVADGYLSEDFVPGSSSSSRERKKGVPWTEEEHRMFLLGLQKLGKGDWRGIARTYVISRTPTQVASHAQKYFIRQSNVSRRKRRSSLFDIVADEAADTAMVQQDFLSANQLPTETEGNNPLPAPPPLDEECESMDSTNSNDGEPAPSKPENTQSSYPMLYPAYYSPVFPFPLPYWSGYSPESTKKEETHEVLKPTAVHSKSPINVDELVGISKLSLGESIGDSGPSSLSRKLIEEGPSRQSAFHATPTCGSSNGSAIHAV

SEQ ID NO: 38620 - protein, 486 aa, Glycine max
  Clone ID: 701117761_FLI.pep
GLCSKTLPFQVYWERKMLVLFETPAGFALFKVLDEGKLSKVEDLWKNFSSADTARQVVKLKAFSKFENTSEALEAATLLIDGKASKGLRKFLRVHCENETLGVADSKLGNVIKEKLKIDCIHNNAVMELMRGVRNQLTELISGLAVQDMAPMSLGLSHSLSRYKLKFSAEKVDTMIVQAIGLLDDLDKELNTYAMRVREWYGWHFPELTKIIQDNILYARAVKLMGDRVNAASLDFSEILPEEVEAELKEASVISMGTEIGELDLANIRELCDQVLSLSEYRAQLYDYLKSRMNTIAPNLTAMVGELVGARLIAHGGSLLNLAKQPGSTVQILGAEKALFRALKTKHATPKYGLIYHASLIGQAAPKFKGKISRSLAAKTALAIRCDALGDGQDNTMGLENRAKLEARLRNLEGKELGRFAGSAKGKPKIEAYDKDRKKGAGGLITPAKTYNPSADSVIGQMVDSAIDEDAQEPSVADKKKEKKDK

SEQ ID NO: 38621 - protein, 249 aa, Glycine max
  Clone ID: 701126225_FLI.pep
FVHPGEKARRRDPRRFHYSATVCPEFRRGQCDRGDACEFSHGVFECWLHPSRYRTEACKDGRNCKRKVCFFAHTPRQLRVLHSNENSNKKKCTNMSPHNNNNNTNNCCLVCHCSSSTRSPTSTLFGMSHFSPPLSPPSPSSPSRFETNHHHGVVKYNKDVLSELMCSMEGLNFGEASLLSAASKPHNNLSSWLDVSEDHNQKQFSTLSPTITACGSFSNNGNGRFLREESGVVDDVISPDLAWVNELLM

SEQ ID NO: 38622 - protein, 237 aa, Glycine max
  Clone ID: 701121085_FLI.pep
RWRETVNKIGLNRTGKSCRLRWVNYLHPDLKRGKLTPQEQHLVMDLHSKWGNRWSRIARKLPGRTDNEIKNYWRTHMRKKKALEKKHASASASSPVSSSCQSSLSSNNHVVDSHASKESFYDTGGYDDMMMGLIGGEKGYSMDDIWKDIVLSGEENSIYNNNNLQPVYEEGHSEEGFNFSCPPPMMIMPSPPSWDQYNISSQPLWVMDEEESNKMLFPTLSDQYFSHYEQGNEFLTG

SEQ ID NO: 38623 - protein, 282 aa, Glycine max
  Clone ID: 701125611_FLI.pep
STLAVIKYIDSNMDLTANLNSSFHFACVATKTSRWDPSYGRMSGSDYFNSMHYGAGDDSAAESEYVSGFCIERKIDLTSHIKWWGSNKSRHSDVGTRLSEEKKLGSAGDICIEIKQLEQKVQPTAPYQMPQLGRPQNEKKHRSSSVSALSILSQSAAYKSLQEKASKTLENIIDNDENENKNTINKLDHGKAVEKPSNHDGGNDRLDIATGMSGTMSLQRNVYPLTPFLSAPLLTAYNTVDPLVDPVLWTSLVPMLPAGLSHTAEVTKTETSSTYTMFRPEE

SEQ ID NO: 38624 - protein, 265 aa, Glycine max
  Clone ID: 701127521_FLI.pep
KRAFQAKMVGDNTKKLKVAENLEDSIDGELVLSIEKLQEVQDELDKINEEASDKVLEVEQKYNEIRKPVYDKRNDVVKSIPDFWFTAFMSHPALCELLNVEDQKIFKYLGSLDVEDNKDVKSGYSITFNFNPNPYFENTKLTKTFTFLEEGTTKITATPIKWKEGNGLPNGLDHDKNGNKRARIDISFFSWFSDCEQKDDVDEIHDEVAELIKDDLWPNPLTYFNNELDEEDVDSEADDEENDEDDSEDDDQEENDAGSEDGNHS

SEQ ID NO: 38625 - protein, 463 aa, Glycine max
  Clone ID: 701127538_FLI.pep
EKKTIVHLIFMSLLTVAHQRGSGEFIRFTESHGGGGDDVSGDGEHGCGHDDGSGAGGSLGLNFNQVMQQGEVTMQGGSLVSGYNRGDPELREIVSALTHVVSSGSGQRSTEWTQQSGFPMMSASSLSRLSAFSSSSPSPSSGASWVGHKRGREEEENSTSHNLMQQQQQSAPRLFRNIGDFMVPSQGDSSSVTEEAPTSTTTTVTAVTENPPGGGERRRKYRGVRQRPWGKWAAEIRDPHKAARVWLGTFDTEEAAARAYDEAALRFRGNRAKLNFPENVRAVPPIQPFQATTRLTVSDSTTSQFRPLSAVAPPFIQQPQIQGSSDLIRDYLQYSQLLQSDFQQQQIQQQQQQQRQQQQRQRQQRQQQQQQQQQPSSLLQQLYYNAQFASLQSPSMLSSSPSFSSSVSPAPFPLFTTSASFPLFSSQQMGYFQPPESRNPAGGVPEFPTSTWSDTSSQPPPSG

SEQ ID NO: 38626 - protein, 55 aa, Glycine max
  Clone ID: 701123158_FLI.pep
SRLNQNYSVRYKKSTPPSPYIDNTTEEKETNINIFTLTKISQKHQQKLSKQLKEG

SEQ ID NO: 38627 - protein, 236 aa, Glycine max
  Clone ID: 701123944_FLI.pep
EAKRVECDESNWGSNNNNNDNRFSGNTIQVQPICFRDMGTEMTPITSQEPSRTGTPIRATTPATRSPIHSGTSTPMRGQNGLQQVAEGGHGTTRKCGDQGSTSPCKKTHEDHQARKLSPLESRAMAWDEAERAKFMARFKREEVKIQAWENHQIRKAEMEMKKMEVKAERMKALAQERFANKLASTKRIAEEKRANAQVKLNDKALRTTERVEYIRRTGHVPSSFSFSFKLPSICW

SEQ ID NO: 38628 - protein, 363 aa, Glycine max
  Clone ID: 701131711_FLI.pep
VLSIEEMYVSIMFHKFETKVLTKKSLIMQKYRLYLSRIQKENDQRSSSSGMKHSDFPSKDMGSFGFQNSVIKQQNDVAIDNYNHSDGSLQLQNVETKSHEADPKGIVSQSTIAKKGRILTGNIADTNMRESLRVGLNQTFPPLESEGNHAVFDCSMPTPYSWTEVPHMQLKEEHKSLVYLEDSFNQLPLHGKQQQHIHVDQSQSVASISSAPSITEEEAAACIEPKPLFADYNNDYASSVSSTGNAVATFPIQPGSLIMNGQSSERISTTTSGLKTQEYNNLSSISDQEIYQRNLLGCEAASASLDEDLHFYWLEGECYNNMNFGLQNIGMSEYYDPGLISEAPIHLYDSADYSVMDQGLFIA

SEQ ID NO: 38629 - protein, 265 aa, Glycine max
  Clone ID: 701133796_FLI.pep
FDGQQHLLSDLGCFSQPRPGAISVSRSGRSKTLTPSNLDELFSAEISSSPRYSDPAVASVFSPRHKSTIMNQFQQLQSSLSPINTSVSSPRNVEHPLLQASFGVSSPGRMSPRSMEPISPMSSRLSAFAQREKQHQQLRSLSSRDLGANVPASMVGSPVNSWSNWGSPHGNGKVDWSVNGNELGRLQRSSSFELGNNGEEPDLSWVQSLVKESPSEIKEKLTGSGPVASVDGPSSNPKSNPQVESVDHSVLGAWLEQMQLDQLVV

SEQ ID NO: 38630 - protein, 411 aa, Zea mays
  Clone ID: 700076335_FLI.pep
KGDKDDEDLARAIQDSLNMNPYTPYNPYAPSHAQPRGHRLCAGCKHEIGHGHYLSCMGIYWHPQCFRCNSCGHPIRETEFTLLSTDPYHKLCYKELHHPKCDVCLQFIPTNRSGLIEYRAHPFWGQKYCPSHEHDRTPRCCSCEKMEPRNTKYMSLGDGRSLCMECLGSAVMDTGECQPLYHSIRDYYEGMNMKLDQQIPMLLVERQALNEAMEGESRGPHHMPETRGLCLSEEQTVSSILRRPRIGGNRLLDMRTQPQKLTRRCEVTAILVLYGLPRLLTGSILAHELMHGWLRLKGYRNLNAEVEEGICQVMSYLWLESEILPSSSRHAQPSSSYASSSSSSYSYPPTSSKKGGISHTEKKLGEFFMHQIAHDTSTAYGDGFRTAYAAVNKYGLRQTLNHIRLTGGLPV

SEQ ID NO: 38631 - protein, 101 aa, Zea mays
  Clone ID: 700195076_FLI.pep
IKRLLFSTRATAVFPHSSQHIFQNGKSTKHTPGYLHYLTIDRSELINKLDGTPHCSCEDRATEPKQRTVRRRLPTSQNKNGSSEVAAVYRGNGVLSTLDFI

SEQ ID NO: 38632 - protein, 392 aa, Zea mays
  Clone ID: 700242965_FLI.pep
LSAENNSNNLSVHRAHVRVKRHVVVAQGGPLQSVAYLERCAETGPVRFLGLRRLARRQRTGISSRARSLALVASGGRRRRGGSSRRMRIHLRLPPAGHAVAVVEQQLLARDGAGEERSVLLLLLRVAEPRHVLHAAALLEEVRQRGVVEQLREGRDPGHPLRAGRGMRRRRVRVRRALQEHGGVRVVVEAAVLVLVVVGELRHRRHRRHLAAGLLVDPAQHPVVQPHGGVAELHGAVGVRCLRVGGEAVLVHDPVGLGALGRAALVEDERLLDADALAGGGAAVDGLVGPGGLPVAGPRGAVRPDPVRVLAVAGAEEVPLLVPVRSPGWQVPWIELVDVDVGDDGDRARRVGGAVAEVVEDQLLVRRVETEPRRQHVRVRHDHWPARPTDRR

SEQ ID NO: 38633 - protein, 167 aa, Zea mays
  Clone ID: LIB3059-047-G8_FLI.pep
LGSYLFFPLLDVGHGRQCTLLGTCKSYLFCCFAGPKDASLHHLPLFGTAWTAVVLLPAARKGMAGREWILLSFRVWHPVICLPCFVGGMAYCRVLWFWRLLLTADVVGPLLSPLVNRTLYTIILLVAVYVHHRSCCLLHVLLCSILPCILVLARYQMLWCKNVSACS

SEQ ID NO: 38634 - protein, 380 aa, Glycine max
  Clone ID: LIB3107-077-E11_FLI.pep
ITLCSEKSAPSFVSLSQKKNSTHCRVCLSMAEDWDLHAVVRGCSTVTSSSVSSSSSPSSSGFASSYFHPEAAVSSSSSSYSGFNIFKGEQGISQVLSLSAYPFEARSSIEELHELCKPFFSKSQPLTLQASSPLSSLSSYSSAPPKSVSTQEKQQQRSKQAHAVTTPRSKRRKNQLKKVCQVPVENLSSDIWAWRKYGQKPIKGSPYPRGYYRCSSSKGCLARKQVERNRSDPTMFIVTYTAEHNHPAPTHRNSLAGSTRQKPLVPQTATTTEEDSDKSKSLTKPTSPATSGAEEEAPTPSQGEKSESREEKEDVMDDEEEDEFGLSDMVLSDDFFESLDELSQLTAPSVVTGDCFSDPFSAIAIPSWVASGAATASGCR

SEQ ID NO: 38635 - protein, 346 aa, Glycine max
  Clone ID: LIB3242-315-C9_FLI.pep
EGSDSKLKYMGAGEESTAKSSKVSSAAQETPTALAYPDWSSSMQAYYAPGGTPPPFFASTVASPTPHPYLWGSQHPLMPPYGTPVPYPAIYPPGSIYAHPSMAVNPSIVQQSTEIEGKGADGKDRDLSKKLKGTSANTGSKAGESGKAGSGSGNDGISQSGESGSEGSSNASDENTNQQESAAKKKGSFDLMLVDGANAQNNSAGAISQSSVPGKPVVPMPATNLNIGMDLWNASSGGAEAAKMRHNQSGAPGVALGDQWVQDERELKRQKRKQSNRESARRSRLRKQAECEELQKRVESLGGENQTLRDELQRLSEECEKLTSENNSIKEELERLCGPEAVANLG

SEQ ID NO: 38636 - protein, 146 aa, Zea mays
  Clone ID: 700051775_FLI.pep
GKLKGYKKILVLYTNYGKQRKPEKTNWVMHQYHLGSDEEEKDGELVVSKVFYQTQPRQCGSGSATAKDAIPLAANAATDHHHHHHHDGGNGGGNNMLKEAGIVDFYSPAALISYNQAASNSRVAASAHLVPNFEVHTTSGAAGFGP

SEQ ID NO: 38637 - protein, 332 aa, Zea mays
  Clone ID: 700241578_FLI.pep
KDRNTKRDIRKELKTLAKEERKRQQLAVTDVLKNADVVLTTLTGASSKKLNGITFDLVVIDEAAQALEVACWIALLKGPRCILAGDHLQLPPTIQSVEAEKKGMGKTLFERLTEAYGEEITSMLTVQYRMHEHIMSWSSKELYNNKIKAHSSVAGHMLYDLEEVTRSSSTEPTIVLIDTTGCDMEEVKDEEESTMNEGEAAVSIAHAKLLVESGVNASDIGIITPYAAQVTCLKMMRNKDAKLKDLEISTVDGFQGREKEAIIISMVRSNSKKEVGFLSDHRRMNVAVTRARRQCCLVCDVETVSSDRFLKRLVEYFEENGEYLSASEYQSS

SEQ ID NO: 38638 - protein, 266 aa, Zea mays
  Clone ID: 700282284_FLI.pep
ALPAPINQAGSGVTAAATPRPRGAGADPPMDLPPLSHQALFAAVRSADAPAVRAVLADAEASATSLAALAAAQTDAGETALYVAAEAGSEEVVRLLLPLYDFEAATVRSRLDLDAFHVAAKQGHTGVVKEFLGRWPGLCSVCDSSNTSPLYSAAVKDHLDVVNAILDTDDSCIKIVRKNGKTSLHTAARIGYHRIVKALIERDPGIVPINDRKGQTALHMAVKGKNTDVVEELLMADVSILNVRDKKGNTALHIATRKWRPQNISM

SEQ ID NO: 38639 - protein, 95 aa, Zea mays
  Clone ID: 700337862_FLI.pep
VKVALTTWKWIEGRKYLIFWMFLMNFWPYFFHSYPSSGTTISWLPLPASASAAAVSSSSSSSLLWFLSSPPLTLHASLQLWLETLATHKSSSSRT

SEQ ID NO: 38640 - protein, 243 aa, Zea mays
  Clone ID: 700347220_FLI.pep
GHWARDCKAGDWKNKCYRCGERGHIERNCQNSPRSLRRERSYSRSPSPRRGRGRSRSYGRSRSRSRSYSRSRSLSRSPRGGRRDRDDRRSRSPSYSRSPMRSASPPVKEKERSPAPDGSRSPRSRSPQDQVMSPPPKDNGEGNGSDRGGSPRGRENSRSCSRSRSPSGSNRSPAANGRSRSPGGERSPSPGGERSPSPRGERSPSPRADRSPSPNGNGNNDAAADVDADAAARSGSPTGSKSP

SEQ ID NO: 38641 - protein, 247 aa, Zea mays
  Clone ID: 700350355_FLI.pep
RRGRPPGSGKKKQFEALGSWGIAFTPHILAVKAGEDVASKIMTFSQQGPRTVCILSANGAISNVTLRQPATSGGLVTYEGRFEIISLSGSFLLAEDGDTRSRTGGLSVALAGSDGRVLGGCVAGMLMAATPVQVVVASFIAEGKKSKPAEARKVEPMAAPPPPPPQMAAFVPAPVATSPPSEGTSSASSDDSGSPINHGAMPFSHSSQHQHPHQHQQHMPPAYASGGWSLSVHQQNRHDSDMKMMSN

SEQ ID NO: 38642 - protein, 94 aa, Zea mays
  Clone ID: 700421514_FLI.pep
IEHVKCRLRMTRLNWSPLIYSLFAAACCGCNPAAAAASTVFFSLWIAAAAVQTAATVSACSQPNTPLLFYRQLPMTVLILHSFIHKDGRMADLS

SEQ ID NO: 38643 - protein, 152 aa, Zea mays
  Clone ID: 700423057_FLI.pep
VIRKQKRESPEKSSPMLAYYILDGSIYQAPQLCNVFASRISRAMHHISKAFTIACSKLEKIGNVETEPDAVASESKTQKEAIDLKELKRIDHILSSLKRKIGAAPPPPPYPEGYVPPSAEQEKAPDDVAASEAPPQLDPIIDQGPSKRPRFQ

SEQ ID NO: 38644 - protein, 358 aa, Zea mays
  Clone ID: 700800972_FLI.pep
KLPPPFFYLLFPPRRFLLRLAAELASRGPWCFRRPTMVELEPSVKSEHGGGVGLVLPPGFRFHPTDEEVITSYLLHKFLNPSFAPHAVGEVDLNKCEPWDLPSKAKMGENSKEWYFFCHKDMKYPTGTRANRATKEGYWKATGKDREIFKPAGRARDRELVGMRKTLVFYMGRAPRGTKTNWVMHEFRLEGKSRHTCNDLRFNPKDEWVVCKVHHKGAEEASAAKKAAGGGGEEQYYSTATPNVSSVEGGDEFLVDSLLDYSSYFNCFAPGGLPLPSTTANSAAAPATNDDDSSSWSMLRHAPADQQAMVGSYSLHHQAMEAKAVGGVTSPSFSAGLPSSPVADYVGNDASGYHTNNY

SEQ ID NO: 38645 - protein, 490 aa, Zea mays
  Clone ID: 700804994_FLI.pep
EYHSEEEDEGEESNGQDNDDPSAPKKPRVVWSVELHRKFVAAVNQLGIDKAVPKRILELMNVERLTRENVASHLQKYRLYLKRLSAVASQQASIVAALGGNDPFMRMSAFEGLHGYQSFVSSAALPSFSPQGLLNRNNPASFAIQGVSASRPIQIATGNTTMSHSIGDPNNKYHLSLPGTSSLQGNLAQGLPTPVGQVQLPQKWIHEETDDLSTILSASGQANNGVPGTLQSVTNSHLLQQGFVERRQDKVVIQPSSSASSDRPEGTVGVSSSLMDSCASHQRVVPLSAFSSSAAPMNGSFCSNGVAELGAASSGGTSIFPSNDLRIERDSKVGASSFGSVILLSPDTVPNQKYLNFGGGSDLRPNMEGGNAGNLLNPKLLWSCLPASQPPNLIGSHHPMSQRLNLGGSMVRQTTASASAAAPQTRIDMFISGDAPKSASDLSFPKVHSELSSSSCSFDGLLNSIIKVEKDDASFSDDLGCDLYSLGACI

SEQ ID NO: 38646 - protein, 146 aa, Zea mays
  Clone ID: 701163921_FLI.pep
NHNAPPFSARFAEALGYYAALFDSLDAVAAATATASAAGDRAQVERMVLGEEIKNVLLCEGAGRLERHERLSQWAMYMDASGFRRVPLSFRAIRESELKLASFGMSGCRYQVESDGLLLGWGSTRLYSVSAWRPNKSGTRECTFRS

SEQ ID NO: 38647 - protein, 316 aa, Zea mays
  Clone ID: 701167084_FLI.pep
RGGGGGGGMAMVASQGGGRRDAEAELNLPPGFRFHPTDEELVVHYLCRKVACQQLPVPIIAEVDLYKFDPWDLPEKALFGRKEWYFFTPRDRKYPNGSRPNRAAGRGYWKATGADKPIAPKGGGGAAGIKKALVFYSGKAPRGFKTDWIMHEYRLADADRAPGKKGSRKLDEWVLCRLYNKKNNWEKVKAEEPEAAAPLRNQQGAAEDSMSDSFQTHDSDIDNNAFGVQNGFGNMVHGQAMTMRNGIGSVARTVKEDSYWFTDLNLDDLQAPYNVTHVLNPNPVQTMNLAAGQGHGYLQSMSSPSTKMWQTILPPF

SEQ ID NO: 38648 - protein, 132 aa, Zea mays
  Clone ID: 701174191_FLI.pep
ISLIIRWCEGGGDERRLRSNGRIGFRTRSEVEILDDGFKWRKYGKKAVKNSPNPRNYYRCSSEGCGVKKRVERDRDDPRYVITTYDGVHNHASPGAAAIIVPYGSGGGNSGFYSPPHSGSPSATSYSGSLAF

SEQ ID NO: 38649 - protein, 122 aa, Zea mays
  Clone ID: 701186148_FLI.pep
GSRELPDLSGLQRAQEQQPTIARSNGSRHRHTNAHVSRTRENYTKHLTGFDDSRQLFQASAFNIVSQLAQMSSLDAGKGQSLFVLTCLLDGSWSYSNSIRAPHDFELPADRGKITHCPCVRL

SEQ ID NO: 38650 - protein, 139 aa, Zea mays
  Clone ID: LIB189-022-B5_FLI.pep
GNMPFVPAMNSTASVDDLIMNLHSDQGSNSFGCSDLGWENDTKTPDITSIAPISTIAEGDESAFVDSNSNSSFVLPALENSAVDLTDGLTDLESYMRFLLDGGPSDSVDSLLNLDGSQDVGSDMDLWSFDDMPIVGDFF

SEQ ID NO: 38651 - protein, 231 aa, Glycine max
  Clone ID: JC-GMFL02220088E04_FLI.pep
TSTAMAASSFTTSSILFPFTTSSKSPPSQLFPSFPCKHHTLRLRPVSVSAASTPTPSIQADKSPVSATPSKLLPFRIGHGFDLHRLEPGYPLIIGGINIPHDRGCEAHSDGDVLLHCVVDAILGALGLPDIGQIFPDSDPKWKGCASSVFIHESVRLMHEAGYEIGNLDATLILQRPKLSPHKDAIKANLSALLGVDSSVVNIKAKTHEKVDSLGENRSIAAHTVVLLMKK

SEQ ID NO: 38652 - protein, 164 aa, Zea mays
  Clone ID: UC-ZMFLMO17002E04_FLI.pep
SSAGGGVGEGVEETVVGCLGPVGLGLGRGGPAAQALAGRAEAQRGGRQHRQLLSCICICTYNGGGTGTGTPCVAAAGDDDGACGCGPASLSARSSCSSRCSRRFSSLSDSQQRFSSSQSTSVCFSFVLARLFWNHTSTCRGLSFSCFANAIFCFCSKTKRTPAG

SEQ ID NO: 38653 - protein, 222 aa, Zea mays
  Clone ID: UC-ZMFLMO17240B07_FLI.pep
NETSRKRSSDGGPGAETTTGGNTECVLAPNHTLGNATILPQHCFSAPVIKPSATNVANSRAIGTALSPPPGVMVPVHNAVPSDLSVKDERELKREKRKQSNRESARRSRLRKQAETEELATQVESLAAENTSLRSEIGRLTESSEKLRLENSALMVKLKDTAEPSPSKAAASPSSPRASAENFLSMIDSANAPSVSRHTEHGGPRLRQLLDSSPATDVAAVS

SEQ ID NO: 38654 - protein, 284 aa, Zea mays subsp. mexicana
  Clone ID: UC-ZMROTEOSINTE101D11_FLI.pep
GGFLHPLMPLVVNPLSAEPAKSGNSKDNSLNKKLKEIDGSAVSSGNSEKTSGDHSLEGSSDGNNPKVSGTPKKRSLDDRTTSETCGVSAINDTPGESGRLPALSSVRIPDTTMKPCVSTGSDFKVSGATSTEWPAKDDKASKRERRKQSNRESARRSRLRKQAETEELARRVELLTAENTSLRSEISRLTESSQKLRMENSALMEKLADGTSDQAQEASAGHQTPTAPSSACVVKNFLWMMDGEGASRGGGGSGCSSRRRDHGAPMLRQLLSSGPLAADAVAAS

SEQ ID NO: 38655 - protein, 129 aa, Zea mays
  Clone ID: UC-ZMFLB73084B12_FLI.pep
WKASTRRTPLLCTWTGRSWPTACIASVHELHTSMDDCGGLSNRRTVGVYFSVAVQGHWIGPRRTPLLCTWTGRSWPTACIASVHELHTSMDDCGGLSNRRTVGVYFSVAVQGHCCGIFVADCQGVGRSM

SEQ ID NO: 38656 - protein, 84 aa, Zea mays
  Clone ID: UC-ZMFLMO17297E04_FLI.pep
SVLYMLMLGKNASLQGRTTSLILNYTIFVLILLLCDMLIYWCLCHFIHCLFDMAYIQIYKFSTLLPPFQIARCFSFSRHLLLCT

SEQ ID NO: 38657 - protein, 349 aa, Glycine max
  Clone ID: JC-GMLE01810018H11_FLI.pep
CSALSKFVNKTADGGITALHMAALNGYFDCVQLLLDLNANVNAVTYNYGTSMDLIGAGSTPLHYAACGGNLKCCQILVAHGASRLALNCNGWLPLDIARMWGRHWLEQLLAPSSDATMPTFSHSNYLSLPLMSVLNIAREYGLQSSTASSDEIDFCAVCLERPCSVAAEGCGHELCVRCALYLCSTNNVSSEMVGPPGSIPCPLCRHGVVSFVKLPGSQAKENKLHVSLGLCTPCMLHPRDLDKPSLSHTPEVGRNRVASVPSEILCPVTCSPFPSMAIPLCTCNDGPCPSFEPREVETQDGLPHHSQASTVDQDKIEGPRLDKTTCSSMFWGRRSCSREHQCNSEINA

SEQ ID NO: 38658 - protein, 314 aa, Zea mays subsp. mexicana
  Clone ID: UC-ZMFLTEOSINTE065B01_FLI.pep
YVLVVIIIINQAINTEFTHTPARLQWFITATGIVYFAFAYFVPTISAMRNWLATSAALTLAYDVALLAILIRDGKSNKQKDYDVHAGSQAEKVFNALGAVAAILVCNTSGLLPEIQSTVREPAVRGMRRALLLQYTAGAAGYYGISVAGYWAYGSAVSEYLPNELGGPRWAAVLINATAFLQSIVSQHLFTVPIHEAMDTRLQRLDEGMFSRYNLTRRVCARGLVFGFNVFVTALFPFMGDFVNLVGSLALVPLTFTFPSMAVLKIKGKSGGRCNRLWHWGIIVLSSALCVATTAAAVRLIFNNARIYHFFADM

SEQ ID NO: 38659 - protein, 267 aa, Zea mays
  Clone ID: UC-ZMROB73055C03_FLI.pep
VERSRRRPAMKVQCDVCTAEAASVFCCADEAALCDACDRRVHRANKLAGKHRRFSLLHPCSSSSSSAAHKPPLCDICQERRGFLFCKEDRAILCRECDAPVHSASDMTRRHSRFLLTGVRLSSAPVDSAGPSEEEEQENSRGPCNDESCSSGSGAGGATTATASDGSSISEYLTKTLPGWHVEDFLIDDASAGDVGACSDGLYQGQNGQISGVLQEAYLPWTEREQVQTDVADERASWERWVPQMHAEFGGGGKRPRASPSPPCSYW

SEQ ID NO: 38660 - protein, 379 aa, Glycine max
  Clone ID: JC-GMFL02220051B06_FLI.pep
LMSSSESTNARTRTASWFSTPFFVIVLPVAVAALLYRLEPFKPVLLPVQLGRSTVAVPARNGHMQDGSERVGEGHLEGPEDLAYDAAARVVYTGCEDGWIKRVTVNDSVVDSAVEDWVNTGGRPLGLVLKPNGELIVADAEKGLLRVSSEKEIELLVDEFEGLKFKLTDGVDIADDGTIYFTDASHKYPVKDAVFDVLEGKPNGRFFSYNPATKKTTLLAQDLYFANGVAVSADQQFVVFCESVLMRCNKYFVLGPKTGTIEKFCDLPGMPDNIHYDGQGHYLIAMFTALSPELELAYRYPFIRKAFAMFTKYVGSLSISKNGGVLVVDLEGKPTAHYYDPKLALTSAIKIGNHIYAGSIFYPFVTRFDVEKYPALPTV

SEQ ID NO: 38661 - protein, 76 aa, Glycine max
  Clone ID: JC-GMFL02220097F03_FLI.pep
DVLLLGDGPWPEFVNSVGCIKILSPQEVQQMGNNGLELLNSVPIQRLSNGVCDDYAGREDPRNLSTGITIVGSLNY

SEQ ID NO: 38662 - protein, 280 aa, Glycine max
  Clone ID: JC-GMLE01810005E06_FLI.pep
RKACVPPVLHLPFRVYHLPSRHSSFQPRKMSTFATRSLVSVESTTTIEGTEADNVDSDSLFRGCVLEGRWDFVLTAYRNDSNYHKIKINESRGTALHVAVNDGKVELVNTLVVAILNHEGREVLRDDSALKTTNERGDTPLHLASSRGFIGMCKCIIGELKERKDLIRVRNNKGETPLFRAVLTCHTKTFVYLHHVSKDIDVPLRNYDGDTILHHAIWREFLDLAIIIIHCYPGLVEMRNKDGATPLKVLACKPSAFRSGINLPWWKKILYYGKCCVRGG

SEQ ID NO: 38663 - protein, 61 aa, Glycine max
  Clone ID: JC-GMLE01810036B12_FLI.pep
PSQFENSRGEAPLIYRISSTFMIVSSFCTCVEIAGSYRVIVICSMRNAKCSNFFFEYIFYY

SEQ ID NO: 38664 - protein, 384 aa, Glycine max
  Clone ID: JC-GMLE01810063F05_FLI.pep
GFCPLEIAKSAYVNMFPSTNYTSSGSYPRFPSSSSSTSPYPSFTLLHPENSSSSNNTFLHDPLALTYIPSHYHAPIPETLANWAVADCAILNQDLGGALYGITKKPMKKATKKDRHSKIHTSQGLRDRRVRLSIEIARKFFDLQDMLGFDKASNTLDWLFTKSKKAIKELTRSKHSVESFEFSSSSEGEVVSTIQQQDLQQQHGINLENGKLKEPAAYCVKAKMKESREKARARAREKTSSKVLCNTSGEGKVQELKKKCPATENPQILNQLRSTLQPPHPQNVGGEVPRDDDFNVIEESIVIRRKLKHTLMSSNIHHQNAVIPKEASVNNSDYHSFPNLSPNWEANNGANGRSTFCAIASMNLSTGLQIFGKSWEECTNPHPS

SEQ ID NO: 38665 - protein, 169 aa, Glycine max
  Clone ID: JC-GMLE01810085D12_FLI.pep
SSFFLNTANMDQAKLARMQASVRIGGKGTPRRKVKKVHRAAGTDDKKLQTALKKLNVQPIQAIEEVNMFKSDGNVIHFSAPKVHASVPANTFAIYGHGEDKELTELVPGILNQLGPDSLASLRKLAESYQSMQKEKGEDGEKKDDDDEDDDDIPELVAGENFESKAEVE

SEQ ID NO: 38666 - protein, 45 aa, Glycine max
  Clone ID: JC-GMST02400051B09_FLI.pep
YISSYFPSHAPKLSLMELSVPTLNDKKYRTSSISKLNTKNCKSKI

SEQ ID NO: 38667 - protein, 256 aa, Glycine max
  Clone ID: JC-GMST02400061C10_FLI.pep
KILVFLVSSLTQMAKLIHFLLFLFIQTISAQTPAAPAGPTNITQVLEKAGQFTTFIKLLKASQIADRINSQLNNSNQGLTVFAPTDNAFSSLKAGTLNSINSQDQMQLIQFHILPTLYTISQFQTASNPLHTQAGNSDDGEYPLNVTTSGNQVNVTTGVVDTTVSNTIYSDTQLSVYQVDKVLLPMKLFGATAPAAAPAEAPAPSKPEKNVRAGAADASSGSSGSSVDASNAVSLNRKTVKGFIMTVAIIVSCLWM

SEQ ID NO: 38668 - protein, 126 aa, Glycine max
  Clone ID: UC-GMROMINSOY044A01_FLI.pep
ITGENEKLKKDNETLSCELARARKQCDELVAFLRDRLMVGPDQIDRIMRQGSCGSENAVGEGGGGGHCLKLFGVWLKGDTLTDKRNNHKRGREDQMGFGGPRLKESKPVVDFSRNRMMMINEKGKG

SEQ ID NO: 38669 - protein, 221 aa, Glycine max
  Clone ID: UC-GMROMINSOY065E09_FLI.pep
FCFLSFLMGQQSLIYSFVARGTMILAEHTDFSGNFAEVALQCLQRLPASDNKFTYNADGHTFNYLTYNGFTYCVVAVESVGRQLAMAYLERIMEDFSKRYGGGKATTATAKSLNKEFGSKLKEHMQYCVEHPEEVSKLAKVKAQVSEVQQVMRANIDQVLDRQVKIDVLVGQTEDLRNQAGVFRERGDQIRRKMWYQNMKIKLIVLAIVIAIILIIVLLVT

SEQ ID NO: 38670 - protein, 179 aa, Glycine max
  Clone ID: UC-GMROMINSOY122A06_FLI.pep
ALQPGEAIAVNFAMMLHHVPDECVDSRNHRDRLVRLAKCLSPKIVTLVEQESHTNNLPFFPRFVETMNYYLAIFESIDVALPREHKERINVEQHCLAREVVNLIACEGAERVERHELLKKWRSRFTMAGFTPYPLNSFVTCSIKNLQQSYQGHYTLEERDGALCLGWMNQVLITSCAWR

SEQ ID NO: 38671 - protein, 167 aa, Glycine max
  Clone ID: UC-GMROMINSOY169A04_FLI.pep
SFMSSAITGDASVSYGKLGSSLFLTPPPVSAGKPPLSSAPIKKRCHDHREHSDEISGKLSGSSKCHCTKRRKNRVKKTVRVPVISSKIADIPPDEYSWRKYGQKPIKGSPYPRGYYKCSSVRGCPARKHVERAPDDPTMLIVTYEGEHRHSMQENISGGVGLGFEST

SEQ ID NO: 38672 - protein, 160 aa, Glycine max
  Clone ID: UC-GMROMINSOY172D07_FLI.pep
GMFLLWEQVVGWPPIRSFRKNSMATQPQKNDDNAEAKSVCLYVKVSMDGAPYLRKVDLKNFGTYMELSSALEKMFSCFTISQCGSHGVCGRDKLTENRLMDLLHGSEYVLTYEDKDGDWMLVGDVPWEMFTDSCKRLRIMKSSEAIGLAPRAMEKCKSRN

SEQ ID NO: 38673 - protein, 173 aa, Glycine max
  Clone ID: UC-GMROMINSOY261A05_FLI.pep
ITTCVESVLHKPLLFPSSKKSICTSLIHGSFQRWLFTVRKSGTFSLLETENTQTVRDRTGLPEAGTGRLPELTNRSENRKPFLKLGVKTRGCNGLSYTLNYADEKGKFDELVEDKGVMILIDPKALMHVIGTKMDFVDDKLRSEFIFVNPNSKGQCGCGESFMTTGSSGSSKP

SEQ ID NO: 38674 - protein, 340 aa, Zea mays
  Clone ID: 700047552_FLI.pep
QFAAAAALSSPRGSAPSAMAKKRKHTDAQAETAGAEKPDDSAPARPERTLFGFKDPAPDAVPDSAASRAAVAPFRNREKVLITCSRRITYRYRHLMQDVLSMLPHAKKDSKVESKQSKGNALNEMLELRSCSSCLFFECRKQKDLYLWMVKSPGGPSVKFLVNAVHTMEELKLTGNHLKGSRPLLTFSTNFDEQPHWKLVKEIITHIFATPKDHRKAKPFHDHVFVFSIVDGHVWFRNYQISVPHNEIDKVDKGGMDKMTLIEVGPRFCLNPIKIFGGSFGGPTWYENPYYISPNQIRALEKRQKAGKYAKKVKAKVRRKMHEMENTLEPDEFAELWKGE

SEQ ID NO: 38675 - protein, 150 aa, Glycine max
  Clone ID: UC-GMROPIC025F07_FLI.pep
CNYCQRKFFSSQALGGHQNAHKRERTLAKRAMRMGFFSERYANLASLPLHGSFRSLGIKAHSSLHHGFSPTMRRPEIKNNARFDQGYVGHPIFLEDDESDLLWPGSFRQVAEAGDSHQNFILTGSSNLSFTEVNPPVDIDNSTPDLTLKL

SEQ ID NO: 38676 - protein, 363 aa, Zea mays
  Clone ID: UC-ZMFLB73063B11_FLI.pep
LREAQEKSGSLSSDSNSEMAYASPGTDDTSTDLDTDEKNHMLELGQLVSLTASDSGNKAKDKLLGQKALRRLAQNREAARKSRLRKKAYVEQLENSRLKLSQLEQELQRARQQGIFIPTPGDDQQPNSTSEKGALAFDKDYAGWEDEHRKQISELRAALSAHAGDDELRRIVDGVMAHHHEAFRLKCVAARADAFHVLSGMWKTPVERCFMWLGGFRPSEILKFLASHLDPLTERQLASVHGLQQSSQQAEEGISQRVQALQQSVAETLASSGSPCLPVPAGRAPPPGDDAAPDCSGTMAAAVAKLVALESLVHEADGLRRQTLEQMQRVLTTRQSARALLVISDYLSRLRALSSLWIARPRE

SEQ ID NO: 38677 - protein, 303 aa, Zea mays
  Clone ID: UC-ZMFLB73181A07_FLI.pep
NTRTIRINENKHAHHILERRAEQVAVSAADIAQKPGPPPQVPTLKATPPIIHSLFSDAGHMQSREMLPITISDSVPYLLPLGSISDEVPSSAAPCLCRNVLFSPCTGCCSTEQSRVPAHVWSHVAPPTGAWLSASEEEDVTQLSAERRRVGEQQQEEDRDPVSTAEASSASAPAAEPRPWSARTSCARRSTDCRYLPCASILSCRCRCTSICSCSFLCIRATLLEESPCGSATVPSSHSSAGWFSEDEDERSSVPSPLSPSGEATPRLTATSRYFCRCLLRWYSVSPGTAIALSTDLGVALSA

SEQ ID NO: 38678 - protein, 164 aa, Zea mays
  Clone ID: UC-ZMFLMO17041A05_FLI.pep
GFAMGSEGSSGPVVVPRNFRLLEELERGEKGIGDGTVSYGMDDADDIFMRSWTGTIIGPPNTVHEGRIYQLKLFCDTDYPDKPPTVRFQTRINMTCVNQETGLVEPSLFPMLGKWEREHTMEDILTSLKREMSTPQNRRLYQPHEGNEDQRVEQKGVSLRCVIM

SEQ ID NO: 38679 - protein, 222 aa, Zea mays
  Clone ID: UC-ZMFLMO17277C02_FLI.pep
PLHCWMKHGPLSRGAPSLVIIFILLTTLFIILVIDLRLGLVRLLFIFLLFLLGRSLLSCSALALVVGSDGLVVLELELVSLGYIGSLVRLAQGFPPVASSFPHRSDRLVLRVLLLELLAKFLHEHEESAGSPLRLVGVLAGLPFPALGGLLRPLALHRQLGIGLGGALGFGPLHGGFERRHGAQRSDPRLAEGIPVAGGRIGVESRAKLPLAARGEREGGKG

SEQ ID NO: 38680 - protein, 181 aa, Zea mays
  Clone ID: UC-ZMFLMO17297C12_FLI.pep
PEPAAEKAKRPAEAPAADAEKPPAPKAQAVGWPPVRSYRRNVMTVQSVKSKKEEEPEKQQSAANAGGNGSAFVKVSMDGAPYLRKVDLKMYNSYTELSVALKKMFSTFTTSGNNMNEGKLVDPVSGADVVTTYEDKDGDWMLVGDVPWEMFVESCRRLRIMKSSEAIGLAPRTKDKCKNRS

SEQ ID NO: 38681 - protein, 116 aa, Zea mays
  Clone ID: UC-ZMFLMO17419C07_FLI.pep
WCVSNMNSFLFSCSEIHSIRPSSLERATSGDGDWGRGRLVGRLLGVGEILGVVDDGKEEGARGAARNLLPEAEVVERDLEEVAAGARVRVRLQLRVPLHVLDLHLVVRRHLAAAKP

SEQ ID NO: 38682 - protein, 57 aa, Zea mays
  Clone ID: UC-ZMROMO17026D01_FLI.pep
MLVSKAYYSCAAWTLFLSSFYLYRFIQKDFAGHRVDMHVIPRLYILTVYSIRKKSQS

SEQ ID NO: 38683 - protein, 257 aa, Zea mays
  Clone ID: UC-ZMFLB73062G04_FLI.pep
GIVDPERQKSREIRQGTMGRGKVVLQRIENKISRQVTFAKRRNGLLKKAYELSILCDAEVALVLFSHAGRLYQFSSSSNLLKTLERYQRYIYASADAAVPSSDQMQNNYQEYVKLKARVEVLQHSQRNLLGEDLALLSPSELDQLENQVDKTLKQIRSRKTQVLLDELCDLKRKEQMLQDANRVLKRKLGEFEAEAASPPQLAWQGEGGMLSHDPPQPEHFFQALESNPCLQPTYHTMDMNQQPVPAPGGCYPAWMS

SEQ ID NO: 38684 - protein, 203 aa, Zea mays
  Clone ID: 700048809_FLI.pep
FIYHSLGPSNTTAELCLGKMNRKPGDWDCRACQHLNFSRRDICQRCSEPRGVADRGSGGGGGGDYASFGGRGGSSFGGGFGAAGSDVRPGDWYCSCGAHNFASRSSCFKCSAYKEEAAVNSGAGGFDGDMSRSRGYGFGSGAAAAAGAGAARTTNRPGWKSGDWICTRSGCNEHNFASRMECFRCNAPRDSGSAAMTYENYLH

SEQ ID NO: 38685 - protein, 483 aa, Zea mays
  Clone ID: LIB143-015-F10_FLI.pep
SAHFTDEEIEQSYEEFYEDVHTEFLKFGELVNFKVCRNGSFHLRGNVYVHYKSLDSALLAYSSMNGRYFAGKQITCEFVAVTRWKAAICGEYMRSRYKTCSHGVACNFIHCFRNPGGDYEWADWDNHPPRYWIRKMVALFGPSVDEMNEKASHTPDFRSSVGSDRKKLKISCNRYVSRGSRNEDVHTRHSPQDYSHSKQERSSHNMNYEYRRHKRDSSAADKHRRQDVGDTNDRQFSTMGNDSKSHRHKHEERHRSDHGNGEKEDDSKTRPRKHCSVRRGSLEVGYSDWSPDFTGTDISKGPSGEKSTSRYDDAKGSRRGSSEYYNLERHHSTAQKQSRNEHSTTRRRRHDIEDYHDEKNDGRGESRKHNRHESNDRWVATNSDVDSDVDRYQSSSCKGTRLGRKDDDPGIEVRHQRSGRSTKDDKRRKHHSGNRWHSGTEEGTSDSSGGDLSSDSWSGRSRNSENFSAHRSRRKRSRSKESG

SEQ ID NO: 38686 - protein, 576 aa, Zea mays
  Clone ID: LIB3060-034-H1_FLI.pep
LTLCNQVLPPLCAELRNMVMQPMILPMVLTIAESQDKGDFELATLPALVPVFTSASGETLLLLVKHADLIINKATQEHLISHILPMLVRAYDDNDPRLQEEVLRRTVSLSRQLDTKLVKQAVLPRVHGLALKTTVAAVRVNALRCLGDLVPSLDKEGILGILETVRRCTAVDHTAPTLMCTLGVANAIYKQCGVEFAAEYVIPLIFPLLTAHQLNVQQFAKYMLFVKDITSKIEEKRGVTVTDNGNTEVKASPSLANGIHSEPMPGQIPAAKSSPAWDEDWGPTKKTGVPSLSVDSSAQTKQPSVHPFDFSTQTKQSTPLPFDLSTQVKQPSLVSHATAATIPPAQPQPVQSLVPSSGPQSSGSCAPVDIEWPPRRSSSSDFSASLSISKENESGRLSSDGLDDIDPFADWPPKPSNVTSITATEHRPSINQNISGFSSGNIGFGGSGNSIGQAKSNQMSWSNTSNLMGMNSTGSYLNQGSAALGFGNPIGGLSTGLSNPSSSSTGLSMMQPKSDFGSLSMSANNAANGPPRLAPPPSTSVGRGRGRNQGQSALSRASRPPHSNSSSGQQPILDLL

SEQ ID NO: 38687 - protein, 107 aa, Glycine max
  Clone ID: LIB3170-071-E9_FLI.pep
FLPLTLKGLGSIIDQERGVCFSNGENGTDEPAKCLCLNALGEIAIKYKPLISNKKSNKRTGSKHLKTRKCMIQKTGQEEQIKEICNVFDIFLHGYFAVSMVDGRRNT

SEQ ID NO: 38688 - protein, 90 aa, Zea mays
  Clone ID: 700048879_FLI.pep
SSTTGHPLVAAHIIANFAASSCKRFSITYCFVVCRLFLAALLDALGASVQRASAAGLGSQLLASLLVSLLLLKESQVVFVEVLVLLLRGL

SEQ ID NO: 38689 - protein, 237 aa, Zea mays
  Clone ID: LIB3596-033-H2_FLI.pep
SNKSIKYQFSPIPHTDHGLVTVVDTACWERTNTKSLDFLSRSEASGRASAGHPRVHVRRHGGGGAPLPLHVRMPSYAHVEASLLELAVLLAERAALAAAVHAAVGAGAHLEAVLRAHLGAVEAGVDALAAGEQHDERVQRPAGAAGRGAPVDDLRGLPERDARAHARHAAVVAVVEAVAEPGGPGGDGRLRLHRERRRHRAARLVVAAAAAEGDARGQRLRTFVCRLGIHGGGAPEA

SEQ ID NO: 38690 - protein, 170 aa, Glycine max
  Clone ID: 700725037_FLI.pep
NDVHVMAKTLLEKFEEKWLQLLPKVAEEEKRQLEEEAQAQLDIQLALETTYANKAKDISTELCEIDMHLKSLKEMVIQQCRALDIIAETNPMFQPSSTEDVVLDLDAQSDYTLWRLKAFVKDSLEEQVKVNAGAGINPNDNPDDKKNKKRRDSGDSSGKTNPKRKKLSTL

SEQ ID NO: 38691 - protein, 683 aa, Glycine max
  Clone ID: LIB3170-072-D10_FLI.pep
DDMLMNVFLLWICRSSHPHRNWWLRIFMQMNGDLNISFEVNRVDTCFRVVGVFLSAPKGLLLGMHLYFLEGENGELRVGVRRAMRQQGNVPSSVISSHSMHLGVLATAWHAILTGTIFTVYYKPRTSPAEFIVPYDQYMESLKNSYSIGMRFKMRFEGEEAPEQRFTGTVVGIEDSDPKRWRDSKWRCLKVRWDETSNTPRPERVSPWKIEPALAPPALNPLSMPRPKRPRSNAVPSSPDSSVLTREASSKVSIDPSPANGFPRVLQGQEFSTLRGNFTESNEFDTAEKSVVWPPTAVDDEKMDVSTSRKYGSESWMSMGRNEPTYSDLLSGFGTSGDPSHSSLKDQMSPAYSARKQSLDHEGKLHMPHPWPVMPSSLSLNILDSNAKGPTHGGDTSFQARGNLRFSAFGEYPALHGHKVEDSHGNLMPPPPAPQTQYQSPCSRELMSKHVSAKTCEAVKPKDGDCKLFGFSLISGPIVPEPSLSQRNVSEPAGQMHLTAHQQRTSENDEKSDHSKGSRPVDDLVVDDHDRPLQTSQSHTKDVQAKPLSGSARSCTKVHKKGIALGRSVDLTKYSGYDELVAELDQLFEFGGELLSTKKDWLIVYTDNEGDMMLVGDDPWQEFCAMVCKIYIYPKEEIQKMSPGTLSSKNEENQSVMASDGADAKVVKCQPHQKFNSENGLDA

SEQ ID NO: 38692 - protein, 389 aa, Glycine max
  Clone ID: LIB3242-683-E4_FLI.pep
PVLFFSMHSQKVVEMEDKTESHMSSAAAFVEGGIQESCDDACSICLEEFGASDPSTVTTCKHEFHLQCILEWCQRSSQCPMCWQPISLKDPTSQELFEVVEQERSLRATPSRNAAIFHHPAFGDFELQHLRMSLNDADFEERIIQHLAAAAAMRRANQLGWREGQRARSSAHGHPQFLVFSNQPIAPSSVAGGENDPTAIPNRSPSTPITSVGNEASQQILHLQTQSSSSASGSPVMATNPRGIYSNERGSTACSSPANQDRAEPSELQSFSDSLRSRLNAVSMRYKESISKGTRGWKERLFSRSSSMSKLGSETRRREINSGIASVSRLMESLETSENNRVVGTSLSNHTEGCSIGGVSNQNNVEARGENSSHDDNTPAACSANSHLN

SEQ ID NO: 38693 - protein, 67 aa, Zea mays
  Clone ID: 700048992_FLI.pep
QATGPTNQDLSNDLQLLILLFPLPDFMSLYKNLLQHKKNSRYVTDRSTNHKRNCTYGEGVHCQFYNM

SEQ ID NO: 38694 - protein, 275 aa, Arabidopsis thaliana
  Clone ID: LIB146-023-C1_FLI.pep
FWLHPFFAGLKEDDMGMSMSSPLMWDRGLQSLNFQGMGVNPWMQPRLDTSGLLGMQNDVYQAMAAAALQDMRGIDPAKAAASLLQFQNSPGFSMQSPSLVQPQMLQQQLSQQQQQLSQQQQQQQQLSQQQQQQLSQQQQQQLSQQQQQQLSQQQQQQAYLGVPETHQPQSQAQSQSNNHLSQQQQQVVDNHNPSASSAAVVSAMSQFGSASQPNTSPLQSMTSLCHQQSFSDTNGGNNPISPLHTSSKSNFDLASSFCCRFFTSSFVISNIYNTD

SEQ ID NO: 38695 - protein, 303 aa, Zea mays
  Clone ID: 700049542_FLI.pep
GHCNELACRLAPAPRDNETSSSAQPQKPPRRRQQRWRKRGGGAAIVRGMSYGGSSSLAPGAKRPFEYGRTHVVRPKGTHKATIVWLHGLGDNGTSWSQLLETLPLPNIKWICPTAPSRPVSLFGGFPCTAWFDVADLSEDAPDDTEGMDASAAHVANLLSTEPADIKLGVGGFSMGAATALYSATCFAHGKYGNGNPYPVNLSLAVGLSGWLPCARTLKNRIEASPEAAQRASTIPLLLCHGKADDVVLYKHGQRSTDALKANGFSNVLFKSYNSLGHYTVPEEMDEVCKWLTANLGLGTSSS

SEQ ID NO: 38696 - protein, 649 aa, Arabidopsis thaliana
  Clone ID: LIB22-063-C9_FLI.pep
SASPGVSIRGRVRKMAKWKPDSDNESDLESEADSADDSNDSDDEFQICQICSGEDERKKLLHCSECDKLFHPDCVVPPVIDLPSEAWICFSCKEKTEEYIQARRLYIAELQKRYEAALERKSKIIEIIRSLNLPNNPLDDIVDQLGGPEKVAEMTGRRGMLVRASNGKGVTYQARNTKDITMEMVNMHEKQLFMDGKKLVAIISEAGSAGVSLQADRRAVNQKRRVHLTLELPWSADRAIQQFGRTHRSNQTSAPEYRLLFTNLGGERRFASIVAKRLETLGALTQGDRRAGPSGPSLSAYNYDSNFGKKSLMVMYRGIMEQEKLPVLPPGCSIDEPETVKEFLTKARAALVAVGIVRDSVLANGKDVGRFSGRIIDSDMHDVGRFLNRLLGLPPDIQNRLFELFTSILDVLVHNARIEGSFDSGIVDMKANSVELLSTPKTVHVDQMSGASTMLFTFTLDRGVTWESASSMLEGKRRDGLGSANDGFFESKREWLGRRHFILAFESAASGLFKIVRPAVGESIREMSLSELKTKYRKLSSLEKARTGWEDEYEVSSKQCMHGPKCKLGEYCTVGRRIQEVNVVGGLILPIWGTIEKALSKQARHSHKRIRVIRIETTTDNQRIVGLSIPNAAVETVLQDLAWVQEIDD

SEQ ID NO: 38697 - protein, 451 aa, Zea mays
  Clone ID: 700050718_FLI.pep
FDRIRVGLIQFDSAGGMASEKHFKYVILGGGVAAGYAAREFAKQGVKPGELAIISKEAVAPYERPALSKGYLFPTNAARLPGFYVCVGSGGEKLLPEWYSEKGIELILSTEIVKADLSTKTLTSAAGANFTYEILLIATGSSVIKLTDFGTQGADSNNILYLREIDDADKLVAAIQAKKGGKAVVVGGGYIGLELSAALKINDFDVTMVFPEPWCMPRLFTADIAAFYEAYYTNKGVKILKGTLAVGFDADANGDVTAVKLKDGTVLEADIVVVGVGGRPLTTLFKGQVAEEKGGIKTDASFETSVPGVYAIGDVATFPLKMYNELRRVEHVDHSRKSAEQAVKAIKGKESGEPVPEYDYLPYFYSRSFDLAWQFYGDNVGETILFGDSDPTSSKPKFGSYWIKDGKVLGAFLEGGSPDENKAIAKVAKTQPPVANLEELKKDGLQFASKI

SEQ ID NO: 38698 - protein, 700 aa, Arabidopsis thaliana
  Clone ID: LIB23-041-G1_FLI.pep
QFPAKKPTRQWAAWTHQEEESFFTALRQVGKNFEKITSRVQSKNKDQVRHYYYRLVRRMNKLLGPDLSLDAKNPKDTNAAMLRWWSLLEKYSCKASKLHLKPRRFKLFIEALEHQLLKDRRKSIRKRTCQGENLSSASLGNISSHSRERGLDNRPFKLILSDGQNVKKLGPGRASTKHGESLSVNLGDEKEDTAFGRGGRQRRKQAGYRKWEKAAIDGVSLVADAAEHLERTSIDKDMDDQTDLGPTRYLTGKSPLSLCSAGDVPLSDANMQFSAKLKLQLFPIDECTRRSLEMDKHNPHLELTLSNRKKISSVLEHLNRKWGSSSCATGELLLFPYNARKETVTCHQRWTHDSFLSAAEVHSMVGSPSVFRLRYGWFVHDASGSIISQVPTSDPCPSLEDDMNVDRLNEVNMLLTESGPLSVHSTAEQTTSVEPSQGLVCASGVHDRPARSRDDYEPASTSITPLEHLSGGNAQSPGEWADSLTNISIGDLLSEVPDDIDSDGVDPPATEGSHYLLRDVPFTSDSFDAAIAAHILRHQNKPSAQLPLTSGSSSLWDDEETRDAFSFQKNRFANSTELASVASPKGVGRVNGEPSQLVEASSGDEGSYNPHDDGDPMEEGPADPHTMDSPGKTPCGLADVYWPDSLGPLDLDIRSSKYTDDLILSESLGGLSRLIATSLDAFQNCSLFGFDNKKDKSNMV

SEQ ID NO: 38699 - protein, 175 aa, Arabidopsis thaliana columbia
  Clone ID: LIB3177-073-A11_FLI.pep
VKNMRILCDACESAAAIVFCAADEAALCCSCDEKVHKCNKLASRHLRVGLADPSNAPSCDICENAPAFFYCEIDGSSLCLQCDMVVHVGGKRTHRRFLLLRQRIEFPGDKPNHADQLGLRCQKASSGRGQESNGNGDHDHNMIDLNSNPQRVHEPGSHNQEEGIDVNNANNHEHE

SEQ ID NO: 38700 - protein, 356 aa, Zea mays
  Clone ID: 700050847_FLI.pep
RRSAMKAPSLLVRCFPGLLPSKDTSCVPIVSEKDLQLPSLAVEIIPSKSAHPYKYAGEKVDVQGFDIFKGKVSVADMISFSPSEVASSKYDGALKSWENSITLVNIIRNEIRDGQLSFRGKRVLELGCGSGVSGIFSCLKGASTVHFQDMNAETIRCRTIPNVLANLEQARDRQNRPSEESPVTPSRQLLDPNVHFYAGEWDELPTVLSAVPPPAAPADLSFSEDDFMDGGSSSHDGSSVVVGQDYCPRRSRKLSGSRRAWERANNETDQADGGYDVILVSDVPYAANSLKKLHALISKCLRPPYGVMYYVASKKSSVGSNGGARQLRALMEEGGVLGGHLLTEVCDREIWKFFFK

SEQ ID NO: 38701 - protein, 747 aa, Glycine max
  Clone ID: LIB3093-024-F2_FLI.pep
SDGTSAGSSDEDTGGQTCHQCRRNDRDRVTWCQRCDRRGYCDSCLSTWYSDISLDEIQRICPACRGICNCKTCLRSDNSIKVRIREIPVLDKLQYLHVLLSSVLPVVKQIHCEQSFEVELEKKLRGAEIDLPRIKLNSDEQMCCNFCRIPITDYHRRCPSCSYDLCLSCCRDLREATADHNKEPQTEQAKTSDRNILSKFPHWRSNDNGSIPCPPKECGGCGYSSLNLSRIFKMNWVAKLVKNVEEMVSGCRISNADGPPETGLNDLKLCQYSHREASDDNYLYCPASDDIKTDGIDNFRKHWKTGEPIIVKQVFDGSSISSWDPMVIWRGILETIDEKAKDENRMVKAIDCLDGSEIDIELAQFMKGYFEGLILENGWPQLLKLKDWPSPSASEEFLLYQRPEFISKLPLLQYIHSKWGLLNVAAKLPHYSLQNDVGPKIYISYGISDELGRGDSVTNLHFNMRDMVYLLVHTNEVKLKDWQRTKIEMMQKAKANKEFEAKESHGDPQISSRGSSPDSSLGTKSSGLEIDSNQNKSIMDQGFEIYSSAEGNTANCKLPFNQNGDVSEKTHPGVLWDVFRRQDVPILTKYLKIHWKEFGKSDDLGNEFVEWPLYDGAIFLDKHHKRKLKEEFGVEPWSFEQNLGEAIFVPAGCPFQARNVQSNVQLGLDFLSPESVGDAVRLAEEIRCVPNEHEAKLQVLEVGKISLYAASSAIKEVQKLVLDPKYANFRLVLAIALTWRPDRLWRS

SEQ ID NO: 38702 - protein, 983 aa, Arabidopsis thaliana
  Clone ID: LIB3168-018-G10_FLI.pep
GFCSVIPKVTTFNFSTKFSVKVTMNEKGEKTCPLCTEEMDLTDQHLKPCKCGYQICVWCWHHIIEMAEKDKTEGRCPACRTRYDKEKIVGMTVSCERLVAEFYIDRKKSQKAKPKPAEGRKDLTGVRVIQRNLVYVMSLPFDLADEDMFQRREYFGQYGKVVKVAMSRTAAGAVQQFPNNTCSVYITYSKEEEAIRCIRSVHGFILDGRNLKACFGTMKYCHAWLRNMPCSNAECLYLHEIGAQEDSFSKDETISAHMRKMVQDITGWRDHYVRRSGSMLPPPVDDYVDNESSTRIIPKVVLNNVHSAAKNSPPNDSNSHSVTLPAGAMWGMHSSVPNTPSSREPLRDKSATVSSAVAINPTQISSRSDELRKPALEAAGGNVLKPQSLLDGKTDFPELSSSNKTQISNSRNVVSASVDNSRAISEPSDCTDLPEHTSLSNGNKMINRRIQNGCSNVVSVDADSVVDGYHGITRSDKSHIDHASIKPTLTEVSQDYLQRCVDEPREVQPLQKSGRTNANEVGVSREEVNRGTSLMSPLGTGHYLEAEDDISLFYRQRLKDPEVLSCQSNGFLRPSNCMQPCSSQYKAEHDETRTVFGSSYSDSRGSNIAPISNGYTEMPLSEPNQLNGSLNHSILVPDKARDTQPIENCFVDSHESPSEIDDRIIANIMSLDLDEYLTSPHNYANPFGESDEEARSLKLASSSKVEDNQSRFSFARQEEPKDQAFDSYNASNQMSRGNDFYQNSSERQSPNMGMFGTYNGLSSCYRRGLDYVTESSTLPSSYKPTSVPRCPVSAPPGFSVPTPSRPPPPGFSSNGRDHQMIDGFSGNSRFSDSIAYGNHYQQSLPIENVRDVQYMDPAILAVGQGFENASLDFRSNFQGNTNMYGSAAKLQQQQQQAVMQNPLSMQNPLSSHQNCRFTDSLGMAPRFIDQSQGNNLLTRNMALPNGHWNGLMSNEIQTRNRLQNERLVGSTNWIPGYNGTFRM

SEQ ID NO: 38703 - protein, 545 aa, Arabidopsis thaliana columbia
  Clone ID: LIB3176-111-C8_FLI.pep
SSFAPLAIHAPSRSLDLEVGNFGNQTGFVGEMYGTGDILRSVSIPSETDKPIIVELAVAAMEELVRMAQTGDPLWLSTDNSVEILNEEEYFRTFPRGIGPKPLGLRSEASRQSAVVIMNHINLVEILMDVNQWSCVFSGIVSRALTLEVLSTGVAGNYNGALQVMTAEFQVPSPLVPTRENYFVRYCKQHSDGSWAVVDVSLDSLRPSTPILRTRRRPSGCLIQELPNGYSKVTWIEHMEVDDRSVHNMYKPLVQSGLAFGAKRWVATLERQCERLASSMASNIPGDLSVITSPEGRKSMLKLAERMVMSFCSGVGASTAHAWTTMSTTGSDDVRVMTRKSMDDPGRPPGIVLSAATSFWIPVAPKRVFDFLRDENSRKEWDILSNGGMVQEMAHIANGHEPGNCVSLLRVNSGNSSQSNMLILQESCTDASGSYVIYAPVDIVAMNVVLSGGDPDYVALLPSGFAILPDGSVGGGDGNQHQEMVSTTSSGSCGGSLLTVAFQILVDSVPTAKLSLGSVATVNSLIKCTVERIKAAVSCDVGGGA

SEQ ID NO: 38704 - protein, 431 aa, Arabidopsis thaliana
  Clone ID: LIB24-092-E2_FLI.pep
FGRDHWKEMYNLTFSPSLSSSLLSFTQQTPAAIVSSSPPDLVLQQKLRFVVETSPDRWAYVIFWQKMFDDQSDRSYLVWVDGHFCGNKNNNSQENYTTNSIECELMMDGGDDLELFYAASFYGEDRSPRKEVSDESLVWLTGPDELRFSNYERAKEAGFHGVHTLVSIPINNGIIELGSSESIIQNRNFINRVKSIFGSGKTTKHTNQTGSYPKPAVSDHSKSGNQQFGSERKRRRKLETTRVAAATKEKHHPAVLSHVEAEKQRREKLNHRFYALRAIVPKVSRMDKASLLSDAVSYIESLKSKIDDLETEIKKMKMTETDKLDNSSSNTSPSSVEYQVNQKPSKSNRGSDLEVQVKIVGEEAIIRVQTENVNHPTSALMSALMEMDCRVQHANASRLSQVMVQDVVVLVPEGLRSEDRLRTTLVRTLSL

SEQ ID NO: 38705 - protein, 511 aa, Arabidopsis thaliana columbia
  Clone ID: JC-ATXLIB327428P4D10_FLI.pep
KKTERKKLFFFSLKAPPFFLLNTQHMKIPASSPQDTTNNNNNTNSTDSNHLSMDEHVMRSMDWDSIMKELELDDDSAPNSLKTGFTTTTTDSTILPLYAVDSNLPGFPDQIQPSDFESSSDVYPGQNQTTGYGFNSLDSVDNGGFDFIEDLIRVVDCVESDELQLAQVVLSRLNQRLRSPAGRPLQRAAFYFKEALGSFLTGSNRNPIRLSSWSEIVQRIRAIKEYSGISPIPLFSHFTANQAILDSLSSQSSSPFVHVVDFEIGFGGQYASLMREITEKSVSGGFLRVTAVVAEECAVETRLVKENLTQFAAEMKIRFQIEFVLMKTFEMLSFKAIRFVEGERTVVLISPAIFRRLSGITDFVNNLRRVSPKVVVFVDSEGWTEIAGSGSFRREFVSALEFYTMVLESLDAAAPPGDLVKKIVEAFVLRPKISAAVETAADRRHTGEMTWREAFCAAGMRPIQLSQFADFQAECLLEKAQVRGFHVAKRQGELVLCWHGRALVATSAWRF

SEQ ID NO: 38706 - protein, 192 aa, Glycine max
  Clone ID: UC-GMROPIC010D08_FLI.pep
SGVFDAKAREQLFEKTVTPSDVGKLNRLVIPKQHAEKHFPLSGSGDESSPCVAGASAAKGMLLNFEDVGGKVWRFRYSYWNSSQSYVLTKGWSRFVKEKNLRAGDAVQFFKSTGPDRQLYIDCKARSGEVNNNAGGLFVPIGPVVEPVQMVRLFGVNLLKLPVPGSDGVGKRKEMELFAFECCKKLKVIGAL

SEQ ID NO: 38707 - protein, 144 aa, Glycine max
  Clone ID: UC-GMROPIC109G12_FLI.pep
RGEPLSTNRQYDRDSFGEDPESESSNEDPSGASLVTELTSQMARSQFLQELSTKPPGLTQEALDCLHQEVFSSNASEIGLDSRVLQDCSICLESFTDGDELIRLPCGHKFHSVCLDPWIRCCGDCPYCRRCIVVNTHSSLNEDE

SEQ ID NO: 38708 - protein, 198 aa, Glycine max
  Clone ID: UC-GMROPIC112C12_FLI.pep
NLRIMEQELQRNSVHDDEAATTTSSGDKPAIPRGGGTRHPLFRGVRKRRWGKWVSEIREPRKKSRIWLGSFPAPEMAAKAYDVAAYCLKGRKAQLNFPDEVHRLPLLPSACTARDIQAAAAKAAHMMIVQAASATADSPEKSSSITSDCGGGGGGDDFWGEIELPELLNAKWWASDHDVTPWPESELPPQQPFTTACL

SEQ ID NO: 38709 - protein, 236 aa, Glycine max
  Clone ID: UC-GMROPIC093D12_FLI.pep
QLQQSQRVVEKYSALAHNGVVDEKELDQFMTHYVLLLCAFKEQLQQHVRVHAMEAVMACWDLEQSLQSLTGVSPGEGTGATMSDDEDDQAESNANLYEGSLDGGETLGFGPLVPTESERSLMERVRHELKHELKQGYKEKIVDIREEILRKRRAGKLPGDTTSLLKAWWQSHSKWPYPTEEDKARLVQETGLQLKQINNWFINQRKRNWHTNNPSSSSNSKSKRKSAGEASNQSFM

SEQ ID NO: 38710 - protein, 151 aa, Zea mays subsp. mexicana
  Clone ID: UC-ZMROTEOSINTE101H05_FLI.pep
AHIQQLDQFMRKLEEIRQEKEAAAAVTAGTAVAITATPTVNAGATTADATLKSGRSGERGRGGRKKAKVPTEQPVPVPVPLPPIDLELPVDPNEPTYCLCNQVSYGEMVACDNPNCKIEWYHYGCVGVKEQPKGKWYCPNCIGFQKKRKGK

SEQ ID NO: 38711 - protein, 289 aa, Glycine max
  Clone ID: UC-GMFLMINSOY001F04_FLI.pep
LIFAGKAIFGEKEWYFFSPRDRKYPNGSRPNRVAGSGYWKATGTDKIITTEGRKVGIKKALVFYIGKAPKGTKTNWIMHEYRLLDSSRKNTGTKLDDWVLCRIYKKNSSAQKAVQNGVVPSNEHTQYSNGSSSSSSSQLDDVLESLPAIDERCFPMPRVNTLQQQQHEEKVNVQNLGEGGLLDWTNPSVLNSVVDFVSGNNNHNQLVQDQTQGMVNYNACNDLYVPTLCHVGTSVPQKMEEEVQSGVRNQRVQNNSWFLQNDFTQGFQNSVDTSGFKYPVQPVGFGFRN

SEQ ID NO: 38712 - protein, 203 aa, Glycine max
  Clone ID: UC-GMROPIC061G02_FLI.pep
SALAGEFCRGDTEQWFFFSPRQEREARGGRPNRTTASGYWKATGSPGHVYSSDNKVIGMKKTMVFYKGKAPTGRKTKWKMHQYKAIEHSHQSNTAPPKLRHEFSLCRVYVISGSFRSFDRRPLEMPRIELRVDGDRGAASTSTQQRAAVVDGLSSSDTSSHSGGGRGGSHISEAGAGSSGTNWNASNSRVEEPLWEWEQLNWP

SEQ ID NO: 38713 - protein, 270 aa, Glycine max
  Clone ID: UC-GMROMINSOY171C07_FLI.pep
FTCNQALIEAVERSDRIHVIDFDIGFGVQWSSFMQEIALRSSGAPSLKVTAIVSPSTCDEVELNFTRENLIQYAKDINVSFEFNVLSIESLNSPSCPLLGKFFDNEAIVVNMPVSSFTNYPSLFPSVLHFVKQLRPKVVVTLDRICDQMDVPLPTNVVHVLQCYSALLESLDAVNVNLDVLQKIERHFIQPAIKKIILGHHHFQEKLPPWRNLFMQSGFSPFTFSNFTEAQAECLVQRAPVRGFHVERKPSSLVLCWQKKELISVSTWRC

SEQ ID NO: 38714 - protein, 370 aa, Zea mays
  Clone ID: UC-ZMROB73014D08_FLI.pep
RHSSPTGDAAQRLAHCFADGLEARLAGTGSRLYQSLMLRRTSVADFLRAYRLYMTTCCCKRVAFAFANKTIHDAFALAGRRRRLHIVDYGLGYGFQWPGLLRGLAAREGGPPELVRITGIDLPQPGFRPAQQIEDTGRRLSDCARQLGVPFEFRGIAAKREAVSPEDLGIDPAAEVLVVISLCHFRLLTDEIEVEISSSAAAAGPSGRRRPTARDQVLCNIRRMRPDVFIHGVVSGGYGTTYFPTRFREAMFHYSAQFDLLDATVPRDSPERLLLERDIFGRAAMNVIACEGADRVERPETYRQWQARNRRAGLKQLQLQADVVKVVRDKVKDKYHRDFGIDEDQGWLLHTWKGRVLYGLSTWVAQHADP

SEQ ID NO: 38715 - protein, 395 aa, Glycine max
  Clone ID: UC-GMROMINSOY049F09_FLI.pep
EMAQETFLFTSESVNEGHPDKLCDQISDAVLDACLEQDPDSKVACETCTKTNMVMVFGEITTKANVDYEKIVRDTCREIGFISDDVGLDADKCKVLVNIEQQSPDIAQGVHGHFTKRPEEVGAGDQGHMFGYATDETPEYMPLSHVLATKLGARLTEVRKNGTCAWLRPDGKTQVTVEYYNDNGAMVPVRVHTVLISTQHDETVSNDQIAADLKEHVIKPVIPEKYLDEKTIFHLNPSGRFVIGGPHGDAGLTGRKIIIDTYGGWGAHGGGAFSGKDPTKVDRSGAYIVRQAAKSVVANGLARRCIVQVSYAIGVPEPLSVFVDTYGTGKIPDKEILQIVKENFDFRPGMITINLDLKRGGHRFLKTAAYGHFGRDDPDFTWEVVKPLKSEKPQA

SEQ ID NO: 38716 - protein, 406 aa, Glycine max
  Clone ID: UC-GMROMINSOY176C09_FLI.pep
ALLLFFDTMARSWLIDIGGFAKKVKSTTLSSADQIKDCGAYRECPNCSYHIDNSDVSTEWPGFPLGVKFDPSDVELLEHLAAKCGIGNTQQHMFINEFIPTLEGDQGICYTHPENLPGAKKDGSYVHFFHRTTNAYATGQRKRRKIHHQQGLTEEHVRWHKTGKTKAIIEDGAHKGFKKIMVLYVRSSENGSRSYKSNWVMHQYHLGTVEEEKEGEYVVSKIFCQQQKQTEKNEGNPMAEDPDNIISRTGPRTPKPNPPNPPRAGKSVDCDDNIDETVLLSSALDTKTIPGESHAPQSDIQDQDFTGNAAWLAGESQAEESTKYDGCDDILLCKEILDSSAILNDPGLDSTNLEDIAGYATQRARNDNESCGISVLDSLELDTPDFDLSSLYFCSQDSILDWMDRL

SEQ ID NO: 38717 - protein, 204 aa, Zea mays
  Clone ID: 700050947_FLI.pep
VSFTHIIKSAEPAFSVLVSRFFLGETFPIPVYLSLLPIIGGCALAAVTELNFNMVGFMGAMISNLAFVFRNIFSKRGMKGKSVSGMNYYACLSIMSLVILTPFAIAMEGPQMWAAGWQKALAEVGPNVVWWIAAQSVFYHLYNQVSYMSLDQISPLTFSIGNTMKRISVIVSSIIIFHTPVRAVNALGAAIAILGTFLYSQAKA

SEQ ID NO: 38718 - protein, 476 aa, Glycine max
  Clone ID: UC-GMROPIC087G02_FLI.pep
LVAVPTMEVVVTPTLENDTITTLYEASLNGSVSTLNTLIQRNPLILHRVSLSPFSETPLHIASLLGHLEFCEALLKRKPSLASEVDSERRSPLHLACAEGHTEVVKALLHTNPDVCLAMDKDEMLPLHLAVMRGHTGVIKELTRARPGSIQQNTIDDGSVLHLCVRYNHLEALIFLVQSATRNQQQFLLAKDKEGDTVLHLAVRLKQIKTIKHLLMLPEMRTAISALNKAGLTALEMLERCPRDFISLKIEKMLLEAEVQTGTAQQGSPSPRIATQPSNQSKRSKIWETLWLKYLQYQSNWIEEKRGTLMVVATVIATMTFQSAISPPGGVWQEDTITGGHNCTTYGICKAGTAVLAYDWPHGFLKFMTFNTTSFFSSLAVVLLLISGFRLENKLMMWILTMGMTLALTFMGLTYFWAQSLVTPDHIVDKVNRMGIPLSIVWVIMLLVAVLVHGVNLFLWVKKYVKKWKKQKLLQS

SEQ ID NO: 38719 - protein, 187 aa, Zea mays
  Clone ID: UC-ZMROMO17089F02_FLI.pep
HSIDMTAAEVEAAKDIAEEKAVVPLPPSPAKPADDDSKAIVALVVKDAAAGKPSTAIIGGSTERDAYLAKIVSDKRLSLITAWEESQKARADNRAAKKLAFITSWENAKKAEMEAELRKIEEQLQKKKAAYEEKLKNKLAMLHRTAEERRAQTEARRGEETILAEEMAAKYRAKGEGPTKLFGLLKA

SEQ ID NO: 38720 - protein, 92 aa, Zea mays subsp. mexicana
  Clone ID: UC-ZMROTEOSINTE058A11_FLI.pep
GKADQHPVGTGCRAMNSQTKPYNKAQQNTIKDCINGSHAISLTPIGSTTTTTKPPRWQSNRGGRVRFGAVWSYSSKDIVGNVYLKLLRIYIK

SEQ ID NO: 38721 - protein, 458 aa, Glycine max
  Clone ID: UC-GMRONOIR010A05_FLI.pep
STNIFPPMLDNNNCSASNSGAPSSSDAAFALSENGVANNKRKRRPAGTPDPDAEVVSLSPTTLLESDRYVCEICNQGFQRDQNLQMHRRRHKVPWKLLKRETAQGGHQKKRVFVCPEPTCLHHDPCHALGDLVGIKKHFRRKHSNHKQWVCDKCSKGYAVQSDYKAHIKTCGTRGHSCDCGRVFSRVESFIEHQDACTVRQHRPELQALQPACSSRTASSASPSSEANFSIAPPLQGLPVLPKPAEQQQQPATTTVLLTSEIHGNKSTTSHNLELQLLPSSTNSQAKRNTKENYGLKLSIGSCSNDKGNSSEPPERACSEAHRSPPERNNNNNNNNVSDYSTLEVARLQEFAGEELKLAIAEKAYAEEARREAKRQIEIAELEFENAKRIRKQAQAELSRAEELRKQAIKKIGSTVMEIACHTCKQQFQSSTVGVPSSEETSIVMSYMSSATTEGEAE

SEQ ID NO: 38722 - protein, 381 aa, Glycine max
  Clone ID: UC-GMROPIC104A06_FLI.pep
KRKEDRVSNLPDEVLHRILSTLDAKSAVQTCVLSKRWRHVWTSLPVLNFLDSSFDDFLHFQCFVDHFLSRRDASSNISVLNFACTDHELDDGHTHIVDSIIDHVTLTPPITIQGLYIVAECIVGKLPQLSICQSLTTLKLAHISTETTTFDFLSLTHLHLFDCRFECGLEELLDPFRDCLNLKHLYLHRCQYYGGFQRFKIFAPKLTLLSIALMRVDEMFDSDCTIQLFTPKLQSFTYCDFDLYDFSIEGDLPFIEEVDIDMGCLAKDTYSLLQLIELFQVMGNAQFVSLSPDIIDVLATFPDLLDGRSSPFTRVRTFVLNMDTPSSSFVIPPNVMAYLFSGSRGLDFLISMNGKVWKKVYKTSFQNEKCNTITIFLPKFL

SEQ ID NO: 38723 - protein, 351 aa, Zea mays
  Clone ID: UC-ZMROB73050H05_FLI.pep
TKTHTHTKHAMGAMTLPPGFRFHPTDDELVGYYLKRKVDNLKIDLEVIPVVHLYKSEPWELPEKSLLPRRDLEWFFFCPRDRKYPNGSRTNRATSTGYWKATGKDRRIACDGGVYGLRKTLVFYRGRAPGGERTAWVMHEYRLCQDLAHGTCNFIGAYALCRVIKRHEGGLPQGESYAKGAAGSARSGQMSKVSSSSSLVSNDQLSASFTPPPTLDVGTMAGSGNAFQSPVGYGYGVTTTATATATTAGLPSSALATPLLIVPSPHDTFSIGGDGDFLPAAAESRAFARAPVRHRGNGDGRRLGAGAEMGQLRLPKHVLEWCRHGGGESGDAVPAGERRLRRPAGGLLLLG

SEQ ID NO: 38724 - protein, 203 aa, Zea mays
  Clone ID: UC-ZMFLB73180A09_FLI.pep
SRESDRMELELGLAPPNPHQPLAAAAEFVGLLSSSAGSCGNKRVLGDAFGAAKAATLPLFVCEDGDGGGGDRDRDGVVDHEQQSNNVPRKKRLVGWPPVKCARRRSCGGGYVKVKLEGVPIGRKVDVSIHGSYQELLRTLESMFPSGNQQDHAEDEVVVSHERRRRHPYVVTYEDGEGDWLLVGDDVPWEVFVKSVKRLKILA

SEQ ID NO: 38725 - protein, 109 aa, Zea mays; identical to SEQ ID NO: 38489
  Clone ID: UC-ZMFLB73070H05_FLI.pep

SEQ ID NO: 38726 - protein, 252 aa, Zea mays
  Clone ID: UC-ZMFLB73301E09_FLI.pep
HTHTLVVCARAAVGLASEAMKLKQEQADDDCSKMQGGRGLMSSLELRLGMSSDNGDASCGGDPWLGVGVHPWSLASRQAEKVALEQDHQQRSPPQPVGWPPVGAFRRSHLQVSSKTVEEPAGKVKSGGERLAPAATMFVKVNMEGCAVGRKVDLLAHRGYASLSRALQAMFRGFLSDGQWRIVGSEDDADDDNEQQPEPTKKGGSKSNKKAYILLYEDNEGDRMLVGDVPWELFMASVKRLYIAQDPRKTKN

SEQ ID NO: 38727 - protein, 206 aa, Zea mays
  Clone ID: UC-ZMFLB73083H12_FLI.pep
DRKYATGQRTNRATHSGYWKATGKDRAVVAGGEVAVGMRKTLVFYRGRAPRGKKTEWVMHEFRLHPHAAPCLLAAAAPNKEDWVLCRVFYKSRTTSPRPESEDARDGTPSAEPQLPAALPLAPLADTYAAPTVAEQVYCFSGLPALPFRRPVSLGDLLEFDASEKESVTTAMTSVSNNTSSVLELAPNCNWNQENGMSRMWSPLGI

SEQ ID NO: 38728 - protein, 516 aa, Zea mays
  Clone ID: UC-ZMFLB73093H08_FLI.pep
GMELAGAASPHPPPESHVAPPRPPPQPPEEDLCEDRGDMSVTGEKPCTHRESDVGQTNSCSLNNSSECENHTPSNDEISEPESNLEMAKTDQGGDVPSGEKVLKKPDKILPCPRCNSMDTKFCYYNNYNIKQPRHFCKSCQRYWTAGGSMRNIPVGAGRRKSKSSSASCRSVLIPVPGSSSVANPGGEASLFPLSVKANQAAVSFGPDSPLCTSMASVLKIGGGGEQVKSCSPASAAAQPRNGETQTQTCAPSSAATTPSDGPGNGLQKGAESAHQNQNQNQNGIIGHSNGVTPVHPIPFFPGPPFVYPWSPAWNGIPAMAAAVCAAPATAEAAISSEHGTASSTVQWNVPPAIVPVLPPGFCGPIPVPVIPPPSVWPLITPWPNAAWSAPWLGPSASVPPGSSRSSGSSTCSDSGCGSGSPVLGKHSRESRPQGDEKAERRCLWIPKTLRIDDPVEAAKSSIWTTLGIEPGDRGMFRPFQSKHGRQQELQASGAARALQANPAALSRSQSFQETT

SEQ ID NO: 38729 - protein, 245 aa, Zea mays
  Clone ID: UC-ZMFLMO17217A09_FLI.pep
LTGQSRQEAKSMAGQLRQRRERRRRRVLAGGGAVAVLALVGDDQHRRVGGVALHMLPGGAAAHRAALVVAAWVGRPLDGFLAVLAPRVLVGGDVRHFGADRRHADRALHTVLPALRAVAAPAVSTVLAAGDVLRVRVVVALALLRRTGGRRLRAAGRAGRRWEHEERRASRAPVRHAPVPGRHRRQERRARAGHAEPGVPAVTGHRLGEVQRQGPRGGSRRRLRGLGGGRSLRLRLRPRRHGATP

SEQ ID NO: 38730 - protein, 381 aa, Zea mays subsp. mexicana
  Clone ID: UC-ZMFLM017209A11_FLI.pep
NPCLSKLHHFLLFLKKRNKAKKRRPICARLPATELLSFFFNLCCLLLGEEHLEEHVVPDVDGSREAPVDAVVVELHLLVGPVPVAAGVAVGPHEHRRRGVHEHEPPPLLGGGLLRRAELLHLRGVEVQVAALHGGLVRPQRLRAPAVAAVVPGPVLEVRHRGEHAHDDAPAQVLQVVDGAQRHAPRAALRVVERQVGHAVLAAAEAAPDEAPPLVEEGGAGEPVRRRHQHVVEAGHLGHPLVVGLVQVEAPVARVRGAVVVGLPGAHQERRPEHADGEVVRPVVVHLVLVRRVRRQVLGIRHLGQEAEQRLHVVPRQRVPDEGERLPAGELQELQRVEARQLASGGPPPPLEEAQVGAAVLEAVLVLLDHVARLVVVVGRL

SEQ ID NO: 38731 - protein, 219 aa, Zea mays
  Clone ID: UC-ZMFLMO17181F03_FLI.pep
PRREAARRQGSGGGMATGPVVPEEHHVRAVRQGRRRRQRRQVLAGGRRRCRVREGELGRRALPAQSGPQDVQELPAAVQGAREHVQLLHHRKLWVSRDERHEREQAGGSAQRLRVRADLRGQGRGLDARRRCAVGDVRRIMQAPSDHERIRSHWPGAKGHGEMQEQKLRRRRTDGSLHLSTTRGGWMQEEQISMAFAALLVSVSYSSSLPFRPLYLPDQ

SEQ ID NO: 38732 - protein, 207 aa, Zea mays
  Clone ID: UC-ZMFLMO17367H01_FLI.pep
CDVANSCGLPFEFNAVPAASHEVELQHLAIRHGEIIAVNFAYQLHHVPDESVSTENHRDRIIRMIKSINPRVVTLVEQESNTNTAPFFPRYMETLNYYTAMFESIDVALPRDDRRRMSAEQHCVARDIVNLIACEGAERVERHELFGKWKSRFAMAGFRPYPLSSVVNNTINTLLHTYNSYYRLEERDGVLYLGWKNRVLVVSSAWC

SEQ ID NO: 38733 - protein, 511 aa, Zea mays
  Clone ID: UC-ZMFLMO17187A03_FLI.pep
VLESLTVKSNMLAKIPECGSYGIHHAGSSSSAEPEQVHQAEPKVSRRQADGHPVAYGIFNSVDVDGKPPALVSSDSSSCVPLSSHDKEHQTSSLYRGVVQYTADREDDENSSGCTHPSTIENKGCKPQYLGNHRIRKLLASKVRKAARNKICGGIPSKKICGGLSKKGSKLNLCGKKMSTTHQKVQRMIFKKKKLAHRTSFAKEMLTEASGTSFAMEGQNKSCEAENYHVKLRIKSFNIPELFIKVPENATIGSLKRAVMDVVNSIMEGDLRVGVLLQGKDIQDDNKTLCQAGICHDKKLNNIDFTLECEREREPPSGVIIQEQMDFLTTDMVEPLARMKCEEPFPEADVGDDSQQPRAPYRSRSLSDLYSVHCPVQMASQDTSVSSQAIVPVSPAPSDVGALAIVPLCKSKGSEVGQRRMRRPFTVGEVEALVGAVEQLGTGRWRAVKTLAFDSIDHRTYVDLKDKWKTLVHTASISPQQRRGQPVPQELLDRVLLAQAYWSQQQQQARL

SEQ ID NO: 38734 - protein, 223 aa, Zea mays
  Clone ID: UC-ZMFLMO17265E12_FLI.pep
ISNWFINARVRLWKPMIEDMYKEEIGEAELDSNSSSDNGQRNKDKAPSPEENEDLQTPTSQACQTSQLGESKAIVGGVMGFSGVLAGGFHTEANPDDSFMSLMLKAQRPGETEGTGLLHDAVAHHSDDGARFMAYHLAEFGRYGNSSNVSLTLGLQHAENSLAVPPNTQPGFPGVRDQDMYNATAPPLNVASTSSEYDSASQIDQQQQRQRFEPSPLMHDFVA

SEQ ID NO: 38735 - protein, 368 aa, Zea mays
  Clone ID: UC-ZMFLMO17010F10_FLI.pep
LDRSIVGQPMGSNDPSTPSKASKASKQVLETVDQPPATTSSGTVSVYPEWPSFQAYQAIPPHGFFPPTVAANPQAHSYMWGAQPMVPPYGTPPPPYVMYPPGAVYAHPSTPPTMHPFSHYPMPTNGHAETPGTAPSAPEMNGKSEPGRTSAPSANGITSHSESGSESESEGSDANYENDSHSKDNDGKEDGNSQNSISYSASQGVLNQTMAMLPIQPGAMVGGVSSSTANLNIGVHYWEAPGSAAVSATHGKAPAGSARGDQWDERELKKQKRKQSNRESARRSRLRKQAECEELGQRAETLRSENSSLRAELERIRKEYEQLLSQNASLKEKLGGSSDPIPDMNEQNDGNGSDKKQSDSDAQPGSES

SEQ ID NO: 38736 - protein, 184 aa, Zea mays
  Clone ID: UC-ZMFLMO17133C08_FLI.pep
HTQPSGEQNLVAWARPLFRDRRKFCQLADPLLHGGYPKRGLYQALAVAAMCLQEQAASRPLIGDVVTALSYLAAHPYDPNAPSTKDSKTCPSTPRAKTHRRTTSVPDAQHAAESLILNFPDMRKETVRGGEFEKDRTEGSGSSSSSGRNDCLDVPRLLSVPNGKVCGEGNNIQKSTVKVGAREN

SEQ ID NO: 38737 - protein, 193 aa, Zea mays
  Clone ID: UC-ZMFLMO17289A06_FLI.pep
QMVVPLSMMAHMNQILQLRLFELNSKVLLHFFYSRLVPLVLLLVEGSTPIYIGEHGWEMLLVVKKATQEAGSKFELLGFASVHNFYHYPESIRLRISQILVLPPYQGEGHGLGLLEAINYIAQSENIYDVTIESPSDYLQYVRSSIDCLCLLMFDPIKPALGAIVSSLKETNLSKRAQSLRMVPPVDLMETVR

SEQ ID NO: 38738 - protein, 402 aa, Zea mays
  Clone ID: UC-ZMFLMO17204B05_FLI.pep
TCYRSSVSTVVKHRWIVDLHEPRDLVPVVPVLAALARSGSGGDALVVVLMERDGHRRRVQELRLLLDCWRGGEAAQPLLVEVELLAAVHALPVPEETAAAAASGTDDASSVQHAADLMSGGRGRHRQAAVHVLVPAAAAVGLEAPRVGAGLLLPPRRQLRLPLVGDVPLEDPADGPHLSFLHARRRRRGGGGRREAELVHHPVGLGALAGAAAVVHEGLLEPDGHGLDGVRGGRVDMPVDAGGLPEAGAGDPVGPDAVPVLPSSQAEEVPLLFATSSRARLREVPWIMLVDVHLLDDLHAERLPGHLPAEVERDELLVGRVEPEPREHRVIFLFISGSGGRERFSTPLHLVHAHYYFSSELLDYHDLPIFLPRNCGCGRIVYNIIFPATARSRSSIDMSGCS

SEQ ID NO: 38739 - protein, 345 aa, Zea mays
  Clone ID: UC-ZMFLMO17161H03_FLI.pep
PVPAHPPRLAQANAALAVPSTSRMPGSPSKHDRQPHAAGTAAPPKLTLPKPDRIRSPSPSPTLPSPNSLRSAGTEMDDDDMPHSSSPSPPSSSALPVDGPVTIAAAPPGAAMVVALPIHRTAASLYASAAAAGGGGGGREDAWSDGATSALIDAWGERFVALGRGSLRHPQWQEVADAVSSRDGYSKGPRSDVQCKNRIDTLKKKYKVERAKPVSAWQFFDRLDFLLAPTYGNDRARGLRELAHAIRRLGEAYERVEAAKLEQAAEMERQRMDFAQELESQRVQFFLNHASPATVARPAAGGSSRRTSVVTDAGGSSNHHSCYRISHGDRHRHAPRSHYQPAAVP

SEQ ID NO: 38740 - protein, 188 aa, Glycine max
  Clone ID: uC-gmronoir071g02_FLI.pep
SEQLSGVMPVSPAEDDITHSLINRDSFGHYNMGGIAEVLLALERIEQDAELTHEQILLLETNLFLNGLNFYDHHRGMRLDIDNMSYEELLALEERMGTVSTALPEEAFAECLKRSIYQSAYTHECCNEDKDDIKCCICQEEYVVGDEVGDLQCEHRFHVVCIQEWLRHKNWCPICKVSAAMSNSSSPH

SEQ ID NO: 38741 - protein, 255 aa, Zea mays
  Clone ID: UC-ZMFLB73175E01_FLI.pep
RSYVAMGRGRVELKRIENKINRQVTFSKRRNGLLKKAYELSVLCDAEVALIIFSSRGKLYEFGSAGITKTLERYQHCCYNAQDSNGALSETQSWYQEMSKLRAKFEALQRTQRHLLGEELGPLSVKELQQLEKQLECALSQTQLMMEQVEELRRKERHLGEMNRQLKHKLEAEGCSNYRTLQHAAWPAPGSTMVEHDGATYHVHPTTAQSVAMDCEPTLQIGYPPHHQFLPSEAANNIPRSPPGGENNFMLGWVL

SEQ ID NO: 38742 - protein, 346 aa, Glycine max
  Clone ID: UC-GMROPIC022D09_FLI.pep
FQGSFSELIWMGTDEESTAKVSKPSSTSSTKIPLAPSYPDWSSSVQAYYAPGVTPRAFFASTVASPTPHPYLWGSQQPLIPPYGTPVPYPAIYPPGNVYAHPSMATTPSTTQNGTELLGKESDGKDRVSAKSSKGVSTNSGSKAGDNGKAGSGSGNDGVSQSAESGSEGSSDASDENTDQQESATNKKGSFDQMLVDGANARKNSVSTIPHSSVPGNPAVSMSPTSLNIGMDLWDASPAGAEAAKMRHNQSSASEAVTPPTIMGREVPLGEQWIQDDRELKKQKRKQSNRESARRSRLRKQAECEELQKRVESLRSENRILREELQRVSEECKKLTSENDSIKVIQ

SEQ ID NO: 38743 - protein, 442 aa, Zea mays subsp. mexicana
  Clone ID: uC-zmroteosinte001f08_FLI.pep
IWSSHRFCIGVEMGRHSCCYKQKLRKGLWSPEEDEKLMNHITKHGHGCWSSIPKLAGLQRCGKSCRLRWINYLRPDLKRGAFSQDEEDLIIELHAVLGNRWSQIAAQLPGRTDNEIKNLWNSCIKKKLRQKGIDPNTHKPLTEADRSGAAPTISTERTSGSSDINPSSAGALGNLSHLLSETAQSSMLMPVYDKNRAETPNLARPKVPPKELFLEQLTAGHESPSTCRSSGQTLYFPFQQPLGYNSESGSGDGANMNSLWFNQSDFNCSTISTVMPPASPSALSTSMGLNLPPDNSRHGGTGIGSTAVDSFYWDGTNPSSSSSTGSRGSNSMGFEPQSTSSILENSVFPWTDIGQEKDTRAHLVEELKWPDLLHGTFAETTTAMQNQSQTLYDDVIKAESQFSMEGICASWFQNQQPQQQLQATPDMYDKDLQRMQLSFENI

SEQ ID NO: 38744 - protein, 272 aa, Zea mays
  Clone ID: UC-ZMFLMO17269A02_FLI.pep
IENHEDEWRYFVHYLGWNKNWDEWVANDRLLELTEENVRKQQELDKNQVVDKTMKSGRSTQHKPKVSNADAKADKDDTKSLISVKGKKRKSQLGTEIQDKEKRSSHSLLVLQFPLPLKKQLVDDWEFVTQMGKLVKLPRSPTVDDILKKYLEHRAKKDGKINDSYAEILKGLRCYFDKALPAMLLYKKERDQYAEEVKGDVSPSTVYGAEHLLRLFVKLPELLASVNMEEDALNKLQLKLLDVLKFLQKNQITFFTSAYDGSCKGADEDKTK

SEQ ID NO: 38745 - protein, 124 aa, Zea mays
  Clone ID: UC-ZMFLB73139A10_FLI.pep
TAQAAGGDDEQSRAEELVKEERPGGRWGRVQKKERLAEGALPTALMKLASSSTRATLVPRLASADARFASALCRALATSFCAFSIALARFSSSFLCTLHALVSVSKHWTVRTTLVSECGGVDRC

SEQ ID NO: 38746 - protein, 75 aa, Zea mays
  Clone ID: UC-ZMFLMO17319B09_FLI.pep
GTTRHILAPRRSFLPFLPSKVASVAHALTLLLVQSGHLYCLICSARAGVILTHFPWYHFSQLSQQIQNWSLPSLV

SEQ ID NO: 38747 - protein, 757 aa, Zea mays
  Clone ID: UC-ZMFLB73134D03_FLI.pep
ERRERGRCRKKKRTREGEVNTNREGRRRTRSGVELKAPAAVMATADQSRIFMKDVKRVIIKVGTAVVTRHDGRVSTGNFGVLCEQVKEINALGYEVIIVSSGAVGVGKQRLNYRKLVNSSFADMQKPQTELDGKACAAVGQSGLMALYDMLFTQLDVSSSQLLVTDSDFENPNFRERLRETVESLLDLKVVPIFNENDAISTRKAPYEDSSGIFWDNDSLAGLLAIELKADLLVLLSDVDGLYSGPPSEPQSKMIHTYIKDKYHNEITFGDKSRVGRGGMTAKVKAALVASNSGTPVVITSGSASGSIIRVLQGEKIGTLFHKDASLWEPSSDVSACEMAVTARECSRRLQNLSSDERNKILLDVADALEKNENLIRTENEADVAAAQDAGYEKFLVDRLTLKPGKISALAKSIRTLARMEDPINQILKRTEIAENLILEKTSCPLGVLLVIFESRPDALVQIASLAIRSGNGLLLKGGKEAMRSNKVLHKVITGAIPSNVGEKLIGLVTSRDEIADLLKLHDVIDLVIPRGSNKLVSQIKTSTKIPVLGHADGICHVYIDKSANMNMAKQIVMDAKIDYPAACNAMETLLVHKDLIKAPGLDDLLLSLKTKGVAIFGGPVAHEVLCIPEANSFHHEYSSMACAIEFVDDVQSAIDHIHCYGSAHTDCIVTTDDKVAETFLRQVDSAAVFHNASTRFSDGARFGLGAEVGISTGRIHARGPVGVEGLLTTRWIMRGSGQVVNGDNDIAYTHKNLPLP

SEQ ID NO: 38748 - protein, 245 aa, Zea mays
  Clone ID: 700051167_FLI.pep
VLLLSDPELRRPQHQARPPSRVTEMALPNQGTVDYPSFKLVIVGDGGTGKTTFVKRHLTGEFEKKYEPTIGVEVHPLDFTTNCGKIRFYCWDTAGQEKFGGLRDGYYIHGQCAIIMFDVTSRLTYKNVPTWHRDLCRVCENIPIVLCGNKVDVKNRQVKAKQVTFHRKKNLQYYEISAKSNYNFEKPFLYLARKLAGDPNLHFVEAVALKPPEVTIDMAMQQQHEAELAAAAAQPLPDDDDDLIE

SEQ ID NO: 38749 - protein, 323 aa, Zea mays
  Clone ID: UC-ZMFLB73363C10_FLI.pep
TPPRDTVAAAAAAATGVAVDGILTEFPLLSDDCVATLVEKEVEHMPAEGYLQKLQRRHGDLDLAAVRKDAIDWIWKVIEHYNFAPLTAVLSVNYLDRFLSTYEFPEGRAWMTQLLAVACLSLASKIEETFVPLPLDLQVAEAKFVFEGRTIKRMELLVLSTLKWRMHAVTACSFVEYFLHKLSDHGAPSLLARSRSSDLVLSTAKGAEFVVFRPSEIAASVALAAIGECRSSVIERAASSCKYLDKERVLRCHEMIQEKITAGSIVLKSAGSSISSVPQSPIGVLDAAACLSQQSDDATVGSPAVCYHSSSTSKRRRITRRLL

SEQ ID NO: 38750 - protein, 354 aa, Zea mays
  Clone ID: UC-ZMROB73061G12_FLI.pep
EALGLLGCVNEVVAAVAATWGPMTDGARVETAPRLAQWRVDPLPCYTYRKSLPFLIGLWNWCISVERNNKQTCVKLFAENTSSLKNGSSAPIASFIAKLIVSLPPNQQTIVHPGIFDKQLKYDGFVWTIDSTVTGRFVIEIEFLDLKVADPSGGEPASIWASRQVKQCSDSTALSSLARMLHEDVLTDITINAADGSVGAHRAVLATRSPVFRSMFSHDLREKELSTVDITDMSLDACRAFLSYIYGDVRGGEEFLANRLALLRAADKYDIGDLREACHESLLEDIDARNVLERLQTAHLYRLPRLKGGCLRFLVDFRKVYEMHDDDLNAFLQTADRELVAEVFHGVLAAWSGR

SEQ ID NO: 38751 - protein, 165 aa, Zea mays
  Clone ID: UC-ZMFLB73069E07_FLI.pep
WLRALATDAAGELDVLGHDGDALSVDGAEVGVLEETDEVGLGGLLERQHGVALEPEVCLEVLRDLAHQALEGQLADQQLRALLVLADLAQRHGSGPVPVGLLHAAGRRRRLPRRLGGELLAGGLASRGLAGGLLRTSHPPLLSSSSARRGNLLFGCLDGTSSLRM

SEQ ID NO: 38752 - protein, 351 aa, Zea mays
  Clone ID: UC-ZMFLB73162H04_FLI.pep
QANQDTQGQGDMGRGRAPCCAKVGLNRGSWTPQEDMRLIAYIQKHGHTNWRALPKQAGLLRCGKSCRLRWINYLRPDLKRGNFTDEEEEAIIRLHGLLGNKWSKIAACLPGRTDNEIKNVWNTHLKKKVAQREKKKAGAGSGDAGTPATAPLSSATSSTTTHNSSGGSDSGDQCGTSREPDATDVCPLQLEDMDVSDMLVDGAPPAAQPMPSPSSSSSLTTCVGGVEELIELPVIDIEPEIWSIIDGESAVARHGGDAAAPCTGTGTAVSTSEAEEAAANDWWLENLEKELGLWGYAEEDTQAHPDLLDHYTGLSPLCALEGDPVSTYFQTGPAAAEPELLVVVEPSAVLL

SEQ ID NO: 38753 - protein, 356 aa, Zea mays
  Clone ID: 700051902_FLI.pep
VGGCHTSSSHMDDEWRPVMAMLVFNLISAVMTALVKKALQQGLNALVLITLRQLVATLFLAPIAYFKERNTRPKLTLEIFVYHFFSAALGASLSQYSFFYGLKLTTATFAITFANMAPVLTFLIAIALRVESLNMKSKSGSAKMVGTLMSLGGVLLLSLYKGMAVTHHSSGTPPPSQVQLGNDGDRKVWMLGTVALLANCLVFSLWLLLQSRLTNKYPALYSSTAFMFFISTLQTGSLTVTVEWHHASVWIVTKKLEMVTILYSGIMASAAGFLIMTWCVHKRGPVFTAAFIPIVQIMVAIIDFFFLHEQLYLGSVLGSALMIFGLYLLLWGKKKDAMAACSAGTTKHDEEASINK

SEQ ID NO: 38754 - protein, 323 aa, Zea mays
  Clone ID: UC-ZMFLB73192C03_FLI.pep
RQRAARLLGHAIELQQRRLQGGAAGMEDLYSIHPGISRHGAAATSEASGVAGGPGSPPPPPPPAADLTELVKAQIAGHPRYPSLLSAYIDCRKVGAPSEVATLLEEIGRERCAAASAGGEVVGMDPELDEFMETYCRLLERYKEELSRPFDEAASFLSSVRTQLSSLCGGAASLSDEMVESSEDEPCSGDTDATTDPGQEHSSRLADRELKEMLLKKYSGCLSRLRSEFLKKRKKGKLPKDARSALMDWWNTHYRWPYPTEEDKVRLAAMTGLDPKQINNWFINQRKRHWKPSEDMRFALMEGGVSGSSSGTTLYFDTGTIGP

SEQ ID NO: 38755 - protein, 202 aa, Zea mays
  Clone ID: UC-ZMFLB73193G04_FLI.pep
RSYEQRRQRNQQHITTTRGTSTQEMPTKGERASLGGGELGDGLGALRDGVLGELAGEHEAHGGLDLAGRDGGLLVVARELGGLAGQLLEDVVDEGVHDGHGLGRDADVRVHLLQHLEDVDLVRLHALLALLLATLALAALLAGGLARGDPLLRLGLLPGGRLLRRGLLLRRLLRRGLLLGLGRHRSWVGRGIGNRLQGKCEE

SEQ ID NO: 38756 - protein, 275 aa, Zea mays
  Clone ID: UC-ZMFLB73232B04_FLI.pep
ITCISAEISSMGRGRIEIKRIENNTSRQVTFCKRRNGLLKKAYELSVLCDAEVALVVFSSRGRLYEYANNSVKATIERYKKAHAVGSSSGPPLLEHNAQQFYQQESAKLRNQIQMLQNTNRHLVGDSVGNLSLKELKQLESRLEKGISKIRARKSELLAAEINYMAKRETELQNDHMNLRTKIEEGEQQLQQVTVAQSVAAAAATDVELNPFLEMDTKCFFPGGPFATLDMKCFFPGSLQMLEAQQRQMLATELNLGYQLAPPDTDVANNNPQQF

SEQ ID NO: 38757 - protein, 293 aa, Zea mays
  Clone ID: UC-ZMFLB73301E08_FLI.pep
ARSISFVLSPFEETTPLFCASSCSEISSMGRGRIEIKRIENNTSRQVTFCKRRNGLLKKAYELSVLCDAEVALVVFSSRGRLYEYANNSVKATIERYKKAHAVGSSSGPPLLEHNAQQFYQQESAKLRNQIQMLQNTNRHLVGDSVGNLSLKELKQLESRLEKGISKIRARKSELLAAEINYMAKRETELQNDHMNLRTKIEEGEQQLQQVTVAQSVAAAAATDVELNPFLEMDTKCFFPGGPFATLDMKCFFPGSLQMLEAQQRQMLATELNLGYQLAPPDTDVANNNPQQF

SEQ ID NO: 38758 - protein, 218 aa, Zea mays
  Clone ID: UC-ZMFLMO17086C07_FLI.pep
KMANQNIFAGAETTTGGNTECVLAPNHTLGNATILPQHCFSAPVIKPSATNVANSRAIGTALSPPPGVMVPVHNAVPSDLSVKDERELKREKRKQSNRESARRSRLRKQAETEELATQVESLAAENTSLRSEIGRLTESSEKLRLENSALMVKLKDTAEPSPSKAAASPSSPRASAENFLSMIDSANAPSVSRHTEHGGPRLRQLLDSSPATDVAAVS

SEQ ID NO: 38759 - protein, 232 aa, Zea mays
  Clone ID: UC-ZMFLMO17092D01_FLI.pep
HRPSMARGKVQLRRVENPVHRQVTFCKRRAGLLKKARELSVLCDASVGIIVFSAHGKLYDLATTGTMEELIERYKAASAGEATTDGCGRHNRMDPKHETTVLQQEINLLQKGLRYIYGNRANEHMNVDELNALERYLEIWMYNTRSAKMQIMAQEIQALKSKEGMLKAANEILQEKIVEQSSLLDVGMVVADQQNGRFSTVPLVEEVISSNPLTILSGYSSCRGSEMGYSFC

SEQ ID NO: 38760 - protein, 290 aa, Zea mays
  Clone ID: UC-ZMFLMO17217H05_FLI.pep
LLAYCKSLQEPAREEQAGIVASMGRGRIEIKRIENNTSRQVTFCKRRNGLLKKAYELSVLCDAEVALIVFSSRGRLYEYANNSVKATVERYKKAHTVGSSSGPPLLEHNAQQFYQQESAKLRNQIQMLQNTNRHLVGDSVGNLSLKELKQLESRLEKGISKIRARKSELLAAEISYMAKRETELQNDHMTLRTKIEEGEQQLQQVTVARSVAAAAAATNLELNPFLEMDTKCFFTGGPFATLDMKCFLPGSLQQMLEAQQRQMLATELNLGYQLAPPGSDAANNNPHHQF

SEQ ID NO: 38761 - protein, 249 aa, Zea mays
  Clone ID: UC-ZMROB73075D01_FLI.pep
RNKRGLIDYGMLLKTCTVRYCRHNTVTFLHKRHQPSPESKRSGNYHRGNTPNRTTIVLLQEEETSARRIARLGAGELGDGFGALGDGVLGELAGEDEANGGLDLAGRNGRLLVVPRQLGRLRRQLLEDVVDEGVHDGHGLGRDANVRVHLLQHLEDVDLVRLHRLLCLLLPLLLATLLACGLARGEPLLSLGLLPRRGLLRRRLLLRRLLGGGLLLGLGRHWNRAAVSGLGFLSTRSGRRWLLVWGRGC

SEQ ID NO: 38762 - protein, 167 aa, Zea mays subsp. mexicana
  Clone ID: UC-ZMROTEOSINTE004C12_FLI.pep
QKRRLLLPPPPRRRLGPLPTDAAGELDVLGHDGDALGVNGAEVGVLKEPDEVGLGRLLQRGDGGALEAEVGLEVLGDLTHQALERQLADQQLRALLVLADLPERDGAGAETVGLLHSAGRRGRLARRLRGQLLPWRLAASGLPRRLLRAGHRDSRKASALRRTRICC

SEQ ID NO: 38763 - protein, 214 aa, Zea mays subsp. mexicana
  Clone ID: UC-ZMROTEOSINTE011E09_FLI.pep
ISIVTVPSDNSCYRRRPDTAAPNYSKTREHTREACNRRLRSLGRGELGDGLGALGDGVLGELPGEDEAHGSLDLAGGDGGLLVVPRELGGLGSELLEDVVDEGVHDGHGLGGNADVRVHLLQHLENVDLVSLHALLALLPAPLSLTALLAGGLARWDTLLRLGLLPGRRLLGRGLLLRRLLRRGLLLGLGRHRCGATWSSGLEAGWIGRKCEQT

SEQ ID NO: 38764 - protein, 216 aa, Zea mays subsp. mexicana
  Clone ID: UC-ZMROTEOSINTE030D12_FLI.pep
LDSISIVTVRSNNSCYRRRPDTAAPNYSKTREHTREACKRRPRSLGRGELGDGLGALGDGVLGELPGEDEAHGGLDLAGGDGGLLVVPRELGGLGGELLEDVVDEGVHDGHRLGGNADVRVHLLQHLENVDLVGLHAFLALLPAPLSLAALLAGGLARWDTLLRLGLLPGRSLLGRGLLLRRLLRRGLLLGLGRHRCGATWKLGFGGGMDWEEMRA

SEQ ID NO: 38765 - protein, 199 aa, Zea mays subsp. mexicana
  Clone ID: UC-ZMROTEOSINTE059E07_FLI.pep
IKSLNHIHNSQIDLPRTSVHDCSTRSDRVHRLVQTLQKQEDKSSNQALSPLMRRASWMSLGMMVTLLAWMAQRLVSSNRPTRYASAASCSAATAEDWNRRSVLKSCAISRTSRWKGSFRMSSSVLFWYLRISRSATVPGRNLCGFFTPPVAGADLRAALVASCFRGALPPVDFLAVCFVRAIGESCERAGGAARSKDLK

SEQ ID NO: 38766 - protein, 320 aa, Zea mays subsp. mexicana
  Clone ID: UC-ZMROTEOSINTE067H07_FLI.pep
RMLNCIAEATGTFIPVSSLLLDMLEMKELRGRPDGVGKAVNLFSVKQVDKKTVKTRAFQEACIYSVVDELAKHLTQWSYSIAFFEMSFIPLVRLRSFCKTIKADRFRKEMKDLIYQIEANVEFIKSKRVGIAFSPNDPAVESFLQTEKEEHCSPLSKFVATLHQRAQDRMDALDETSVIVGAESSTFSRRLSEAQKQQDEQDDDEGTIAFSKNWLSENKKPKTPKEDKKRPREDDDVATEEDRVEDLVLSSDEEDDNNEEADDGFVPVEGDSDEDFVDPDSEYKKQKKAKLKKRNKRQPFPHKAPSRTKSNSGPKKKARH

SEQ ID NO: 38767 - protein, 270 aa, Zea mays subsp. mexicana
  Clone ID: UC-ZMROTEOSINTE106E02_FLI.pep
LKPIGVWSGLDIGHVSGTGSLVQNKLVGAPGGGSSPHVVQNADIPVKQTTSSSSREQSDDDDMEGDAETTGNGNPVQHRLQRRKQSNRESARRSRSRKAAHLNELEAQVSQLRVENSSLLRRLADVNQKFNEAAVDNRVLKADVETLRAKVKMAEDSVKRVTGMNTLFPAVSDMSSLSMPFNGSPSDSASDAAVPIQDDLNSYFANPSEIGGSNGYMPDIASSAQEDDDFVNGAQVAGKMGSTDSLQRVASLEHLQKRMCGGPASSGSTS

SEQ ID NO: 38768 - protein, 93 aa, Glycine max
  Clone ID: UC-GMFLMINSOY043H04_FLI.pep
QLGIPNVIILFHLILKFLSLLKKLSYYSNRQKLHIFSLRFIGTDCHTKSSSMSTSSSGTSGGLKKLKKLSQLSVLVIGLAFFEPFLGFFFKTF

SEQ ID NO: 38769 - protein, 264 aa, Glycine max
  Clone ID: UC-GMFLMINSOY047E10_FLI.pep
NSHSLSHLEIIVSYSISFHTKHMALEALNSPTTTAPSFPFDDPTIPWAKRKRSKRSRDHPSEEEYLALCLIMLARGGTTTVNNRHVSPPPPQPQPQPQPTPDPSTKLSYKCSVCDKSFPSYQALGGHKASHRKLAAAAEDQPPTTTTSSATATSSASGGKAHECSICHKSFPTGQALGGHKRCHYEGNGNGNNNNSNSVVTVASEGVGSTHTVSHGHHRDFDLNIPAFPDFSTKVGEDEVESPHPVMKKPRLFVIPKIEIPQFQ

SEQ ID NO: 38770 - protein, 281 aa, Glycine max
  Clone ID: JC-GMLE01810037C06_FLI.pep
ERSMEFKPPKFYGEGLNCLKLWRAVTRLGGYDKVTSCKLWRQVGESFKPPKTCTTVSWTFRGFYEKALLDYERHKIKGGELNVPVASHPEPINIENQASVSGRARRDAAARAMQGWHSQRLLGNGEVSDPIIKDRNSVSVQKREKQLKSINIHKRKKPSSPYMDNAVKAARSKPSKPQLDTTVIDIGPPADWVKVNVQKTKDCFEVYALVPGLLREEVRVQSDPAGRLVISGEPEHPNNPWGVTPFKKVVSLPSRIDPHQTSAVVTLHGQLFVRVPFEHLE

SEQ ID NO: 38771 - protein, 113 aa, Zea mays
  Clone ID: 700052490_FLI.pep
CGSTLLLPHTVYNNINTNIIKPTARPCPFLPTASASLSPFRLQTSRLPNLSRYWALRPACRPQSSPFPLTPCHRTTWRGCTELCSRPCHDVSQGSAGESASWQWGDQPEACLL

SEQ ID NO: 38772 - protein, 374 aa, Glycine max
  Clone ID: UC-GMFLMINSOY001G04_FLI.pep
TKPMGRAPCCEKVGLKKGRWTAEEDEILAKYIQANGEGSWRSLPKNAGLLRCGKSCRLRWINYLRADLKRGNISAEEENTIVKLHASFGNRWSLIANHLPGRTDNEIKNYWNSHLSRKIYSFPGAGAGASAGIMDTPKVVYIPPKRKCGRTSRWAMKKNKTYTQKVNDRINQRHTQIGFPQQNSDTAVPTPPTPSLESEGLSNAVNDFKVLDGDVAEFDEPRTEELEAEVNKRDNSVGGVEESSNTDEDILGLCELEGINEDSGMLLGFSDILESCLAETTCGVWDISEERESNDVVAADACRDKIASSEEGSCSSMNQDWDWESVLEFSNAVDNWEDQDKLLTWLWEDDDCKRLGETDTQILQNDMVIDWFLS

SEQ ID NO: 38773 - protein, 201 aa, Zea mays
  Clone ID: 700102025_FLI.pep
GSCFSPSSPHPTPHQTDSIRQDKHPCRRHAGARAPTATTRRTSASGSGCCPTGSRRGGRARGSSSGWRSWWRRWPACRRRTRRRRPAPRRWSATWAGWTATTRCCAPATPSWPAACSRWAASSRCSRWPAPPSTSRRWSPTTPCSAPGSRPSPRCSPSGSENLSLSRRERANFCRRAAVYLVLVYLFINHPCHGLLFLSVL

SEQ ID NO: 38774 - protein, 139 aa, Zea mays
  Clone ID: 700612741_FLI.pep
THNRPRPSYQSIRRGGGLAAEAVERAALALERVDDIHGGDGLAASVLGVGDGVADDVLEEDLEHAAGLLVDEPRNALDAAPPGQPTDRRLRDALDVVAQHLAVALGAALAQPLAALAAPRHRRNRELRGRRRRIVPLCG

SEQ ID NO: 38775 - protein, 336 aa, Zea mays
  Clone ID: 700201601_FLI.pep
SSSAATRRRSSTCPRASGSTRRTRSWWRTTSARAPRGAARRCPSSPRSTCTASTPGTCRSAPSLGAASGTSSRRGTASTPTAPAPTAPLGRATGRPRARTSPWSTGAGRRGSRRRSCSTTASRRAGSRRSGSCTSTASPKPAAPAPRSPAPARSGWMTGCCAACTTRRTSGRRCSSRRRRRRRRRRWSRRRRSRTPTPTRGRRSRRSTTTRSRSWALCRRSTTWAQPQPLPASSCPRRRWRTSATSAATTGSRASTSTTCRCRGMPPISTAPCSSRRWPPRWSRTAASPSSEILRRLRGPDAAQRKLCIVQIFFMEPTTTKKKFLLISCSSGVVQK

SEQ ID NO: 38776 - protein, 157 aa, Zea mays; identical to SEQ ID NO: 37965
  Clone ID: LIB143-046-C10_FLI.pep

SEQ ID NO: 38777 - protein, 241 aa, Zea mays
  Clone ID: 700202112_FLI.pep
FSRRRCSSHIPREDACSSPIDTMAVFSDLHTADGLKSLEAHLAGKTYVSGDSITKDDIKVFAAVPSKPGAEFPNAARWYETVSAAVASRFPGKAVGVNLPAGSAPAAAAPADEAEDDDDLDLFGDETEEDKKADDERAAAAKASSKKKESGKSSVLMDVKPWDDETDMKKLEEAVRSVQMEGLTWGASKLVPVGYGIKKMTIMLTIVDDLVSIDTLIEDHLTQEPINEYVQSCDIVAFNKI

SEQ ID NO: 38778 - protein, 196 aa, Zea mays
  Clone ID: 700202311_FLI.pep
AKPELTKLKKKEIFLGVLRLHCHKVRVRHRLVRLCEGGRGEEKMQIFVKTLTGKTITLEVESSDTVDNVKAKIQDKEGIPPDQQRLIFAGKQLEDGRTLADYNIQKESTLHLVLRLRGGTMIKVKTLTGKEIEIDIEPTDSIDRIKERVEEKEGIPPVQQRLIYAGKQLADDKTAKDYNIEGGSVLHLVLALRGGY

SEQ ID NO: 38779 - protein, 169 aa, Zea mays; identical to SEQ ID NO: 37663
  Clone ID: LIB3070-014-C4_FLI.pep

SEQ ID NO: 38780 - protein, 125 aa, Zea mays
  Clone ID: LIB3088-003-A3_FLI.pep
EDHYNPARRIYRAGKLATRRVGWGTGERTQQRTLLTDPRIPQRAQLLVNLVTALVPSETACLASSPGRTRRTEVWISRDVMVGFLLYRASLAASPASFSKMSLMKEFMMDMALEDMPMSGCTCFS

SEQ ID NO: 38781 - protein, 134 aa, Zea mays
  Clone ID: LIB3088-041-D8_FLI.pep
THNRPRPSHQSIRRGGGLAAEAVERAALALERVDDIHGGDGLAAGVLGVGDGVADDVLEEDLEHAAGLLVDEPRNALDAAPPGQPTDRRLRDALDVVAQHLAVALGAALAQPLAALAAPRHRRNRELRGRRRRT

SEQ ID NO: 38782 - protein, 299 aa, Zea mays
  Clone ID: LIB3136-016-A8_FLI.pep
VAVLREGAHQQGRVDQGGGRAPGRAHQGARRGVLALAAQGRRPPALRQELPPPLDQLPPPRPQARQLHGGGGRAHRQAAQRPRQQVGPPRASPSPSYPSSFVSFPKLAGYVTCRWSLIAGRLPGRTDNEIKNYWNTHIRRKLLSRGIDPVTHRPVTEHHASNITISFETEVAAAARDDKKGAVFRLEEEEERNKATMVVGRDRQSQSQSHSHPAGEWGQGKRPLKCPDLNLDLCISPPCQEEEEMEEAAMRVRPAVKREAGLCFGCSLGLPRTADCKCSSSSFLGLRTAMLDFRSLEMK

SEQ ID NO: 38783 - protein, 223 aa, Zea mays; identical to SEQ ID NO: 37976
  Clone ID: LIB3137-016-H12_FLI.pep

SEQ ID NO: 38784 - protein, 309 aa, Zea mays
  Clone ID: LIB3182-004-E8_FLI.pep
ARSRRGRRHQTSRWWSDPIRSGWLDGRGHTSRGTVAGDVAGLAAVVAGAVASTPAAAEPPSATAATAWAVPGHVAGLAAVVAAATTTAAATAVAAAAAGAVPGHVARLAALEAATASSSSSVAAAPVAASAIAASAVGARAVPCHVAGLAALVARAGTAPAAGSPAAAPATTVAATAAARSATAAGAVAAAASSSASAAPDEGSVGAGHVDGLSAAVVTLRDGKLHLLALRERAEALRLDRRLVHEEIFAAVLGGDEPEALGVVEPLHRPPLSRRLYAWRWRSQREPGERGQRATPSWCRSGSSALWSR

SEQ ID NO: 38785 - protein, 135 aa, Zea mays
  Clone ID: LIB84-022-D1_FLI.pep
PVPDYEEAPSLASEAVEGASLALERVDDVHGGHGLAARVLGVGDGVADDVLEKDLEHAAGLLVDEPRDALHATPPSQPPDRRLGDALDVVAEHLPVALRAALAQTLAALAAPRHRRRLSDADQRTGNFSGVGEIG

SEQ ID NO: 38786 - protein, 395 aa, Zea mays
  Clone ID: 700074528_FLI.pep
TKESQAASQIFHLLHFQPRPHTSSRNLLPMAGGGGAGAGSSSGGGGGGGREGDWDCGSCGNRNYAFRSLCNRCKQPRLLVDPNTPRDSKWLPRAGDWICTGCSNNNYASRKNCKKCGLPKEEAAMPALQMAGMTMPTYATYIARLQSLAASASAYKMNFGMAANSPLQQQLLANANWPYGMAGRYGMQSSGWPFGNGNPNQFLGVPKDWRNGDWLCSCGFHNYSSRTQCKECGAPVPSGIPSTTMKATSDASSTLGTKRLASEDLANDWDNKRLNPGNDNYPLSELQIIYFWVLSKELEAAMASLPFPSLTTGAQWHYHLGRECLVLWEKGQNGVTGTGCATTATITTMHLVRFATGAKLRKNLQFTLVCYSLLLDYFVPGYVAACSSSFLKTAV

SEQ ID NO: 38787 - protein, 180 aa, Zea mays
  Clone ID: 700170367_FLI.pep
LFVGSQMVPDRWKAAGQDRQRDQELLEHAHPAEAAEQGDRPGDTPPHQRAHVQHNHIVRGLGPGEGAQVPRPEPGPLHQPAVPGGGGGHAAEAGEAGGGRALLQLQPGAPQERGLQVQQLPRAQDRHARLQKTRDEMRASIHLCLSLSVTSPLITRRSSSHQLICRSINSVSLSLSRYVN

SEQ ID NO: 38788 - protein, 184 aa, Zea mays
  Clone ID: 700241190_FLI.pep
VSHSSQQTPRSRPRSQTRPSKAQSPPTADQSAASMAPKAEKKPAAKKPAEEEPATEKAEKAPAGKKPKAEKRLPAGKSGAGEGKKGKKKAKKSVETYKIYIFKVLKQVHPDIGISSKAMSIMNSFINDIFEKLAAEAAKLARYNKKPTITSREIQTSVRLVLPGELAKHAVSEGTKAVTKFTSS

SEQ ID NO: 38789 - protein, 136 aa, Glycine max
  Clone ID: 700684721_FLI.pep
VKLHFWSLSFTPILILVLFNLIHTFGPPNFINPFINCSYKIGLLNGLATGTRDMIDLDKFCTPFLSQVFHSLGTQRKITLYLSPNFGVIQLEKVAYESQPRSEIFKSLALTGFVITPPPPFFFVFCSPMWYYVYTT

SEQ ID NO: 38790 - protein, 412 aa, Glycine max
  Clone ID: 700795271_FLI.pep
LFAVEETTSIKKRKDADNKHDDKEFGDHFPTKKARVVWSVDLHQKFVKAVNQIGFDIGPKKILDLMNVPWLTRENVASHLQKYRLYLSRLQKENDQKSSSSGIKHSDSPSKDLGSFSFLNTANKQQNDIATDSFSYSDGTLLIQMDATSYEGDLKGIVSEPTTEKRRASTSEIPDPKVQKSSQKSLNKPFTSVESSEANHAVFDCTIPTEYSWSEFPKGPLKEEQKTPVQLEDSLCQLPLHGTQHHIQIDQSQSIASINSNPSITEEEVAAKLETKPLYAGYESDYVNPVSSIGSAVEAFRSQSKSLMVSDQSSEPTFTSNLSLKTQGFNLDCISDLDFYQRNLLLGGEVASAPLDEDLNFFLLQSECYNMNFGLQNIDMSEYYDPRLTAEVPSHFYDSADYSSVDQSLFIA

SEQ ID NO: 38791 - protein, 313 aa, Glycine max
  Clone ID: 700684719_FLI.pep
KLLNQQVSFFFSFFLLNYSSFYKLLLYHSSGVYLQEVLLPGGHGLMVRGYLPVVNSLAKGLDIRLGHRVTKVVRRYNGVKVTVENGKTFFADAAVIAVPLGVLKAKKILFEPKLPDWKEAAIADLGIGLENKIILHFENVFWPNVEFLGVVADTPYECSYFLNLHKATGRAVLVYMPSGQLAKDVEKMPDEAAVNFAFMQLKKIFPDASSPIQYLVSRWGSDINSLGSYSYDAVGKPHELYERLRVPVDNLFFAGEATSMSYPGSVHGAYSTGTMAAEDCRMRVLERYGEVDLFQPVMGEEGSMSIPLQISRL

SEQ ID NO: 38792 - protein, 386 aa, Zea mays
  Clone ID: 700220859_FLI.pep
IFNIPLLSIATSFVAEDISRSATKHPSSGKLELTSVSSALILAAGIGIMEALALFLGSGLFLKLMGVSPVSPMHRPAKLFLSLRALGAPANVIMLAVQGIFRGFKDTKTPVFYIGLGNLSAVALLPLLIYGFKLGITGAAISTVVSQYIITVLLIWSLSKRAVLLPPRIDQLEFGGYLKSGGMLLGRTLSILLTMTIGTSMAARQGPTAMAAHQICLQVWLAVSLLADALAVSAQALIASSYAILDYKKVQKTAMFALQIGVFSGLALAIGLYASFGNISRLFTSDPEVLTVVKSCALFVCASQPINALAFIFDGLHYGVSDFEYVAQATIVVGVTSSLVLLWAPSVFGLAGVWAGLTTLMGLRMAAGILRLLQKAGPWSFMHEEP

SEQ ID NO: 38793 - protein, 310 aa, Zea mays
  Clone ID: 700382886_FLI.pep
LPCRTTQLHRPLQGRRDHGNWIEILRVDNLVITGKGNLDGQGPAVWSKNSCTKKYDCKILPNSLVMDFVNNGEVSGVTLLNSKFFHMNMYRCKDMLIKDVTVTAPGDSPNTDGIHMGDSSGITITNTVIGVGDDCISIGPGTSKVNITGVTCGPGHGISIGSLGRYKDEKDVTDINVKDCTLKKTMFGVRIKAYEDAASVLTVSKIHYENIKMEDSANPIFIDMKYCPNKLCTANGASKVTVKDVTFKNITGTSSTPEAVSLLCTAKVPCTGVTMDDVNVEYSGTNNKTMAICTNAKGSTKGCLKELACF

SEQ ID NO: 38794 - protein, 414 aa, Zea mays
  Clone ID: 700082426_FLI.pep
RRYQKKCTLGLLSALYMHAAMVTYRAHERTMLPRLEVAGRSSGPVEDPLVPGLEEDCVPVRELAREAVEDLVERVSRLGGLREQHGLLHGRVGEEALLPQDDVGGDGREDGVEPGDVLLRDEHADVLPRDGVREGQHDVVGDDHGDAAEHHRLHQPRAPRRPAQRAQAEHRALHVLVVRRRVVRRDVEERVVLEVLPDRRACASRVVTALGIVAGVVEQTAEVDEDGARGVRRDKVSLHLLGRRERRDCDGPVLEADMVLLSEGLDQRGTLEQGKDPASDRFLFLIMEASAKVMWRDEEVVGALRPVPVRPVGGDELDGAAHHPGGLEGEREAGRGQVAGGVHGRVEPVRLLGVEGPDGARQQEPVHEDLRGEHVVQAPGVLLQQLLVVLAGEVVHVHLQPPDGVVFQHVAGAS

SEQ ID NO: 38795 - protein, 476 aa, Zea mays
  Clone ID: LIB3245-493-D6_FLI.pep
LASQPSCSAADMAASTTAAAAASLLLLLLVSLAAAADMSIVSYGERSDEEARRMYAEWMAAHGRTYNAVGEEERRYQVFRDNLRYIDAHNAAADAGVHSFRLGLNRFADLTNDEYRATYLGARTRPQRERKLGARYHAADNEDLPESVDWRAKGAVAEVKDQGSCGSCWAFSTIAAVEGINQIVTGDLISLSEQELVDCDTSYNQGCNGGLMDYAFEFIINNGGIDTEKDYPYKGTDGRCDVNRKNAKVVTIDSYEDVPANDEKSLQKAVANQPVSVAIEAAGTAFQLYSSGIFTGSCGTALDHGVTAVGYGTENGKDYWIVKNSWGSSWGESGYVRMERNIKASSGKCGIAVEPSYPLKEGANPPNPGPSPPSPTPAPAVCDNYYSCPDSTTCCCIYEYGKYCFAWGCCPLEGATCCDDHYSCCPHDYPICNVRQGTCLMGKDSPLLSVKATKRTLAKPHWAFSGNTADGMKSSA

SEQ ID NO: 38796 - protein, 57 aa, Zea mays
  Clone ID: 700202866_FLI.pep
SGTNEQGLSWNDSRCNPTQTNKVLLIFQFYWTGALQSWSSISTSIHQKLIASLAPCI

SEQ ID NO: 38797 - protein, 371 aa, Zea mays
  Clone ID: LIB3068-038-F11_FLI.pep
LDLLIIPIPASTPSLSQPHNQFLFQSIAVSMAATQSCQAAACFPAAVAVDEEHGHHSHQLKGGAQEEAENDNKPELRRGPWTVDEDLTLVNYIADNGEGRWNNLARAAGLKRTGKSCRLRWLNYLRPDVKRGNFSADEQLLILDLHTRWGNRWSKIAQHLPGRTDNEIKNYWRTRVQKHAKQLNCDANSKRFKDAMRYLWMPHLADDVDTIAAANDDDEDHHHHLRLLVLHHHQAQHLQQAAAAAGGAANDLAAGAYDVRQLHALPSSGMAATSSSDSLASESYDDGGLLFANLRAGEMLMDGGDWAAQQEADQGLWPPPPPTSDLDQSVVQAAGAGAGQFQDMELSGWVQGFSESITDNFWALEEIWKMQ

SEQ ID NO: 38798 - protein, 217 aa, Zea mays
  Clone ID: 700202956_FLI.pep
IPMASRRRTLLKVIILGDSGVGKTSLMNQYVNKKFSNQYKATIGADFLTKEVQFEDRLFTLQIWDTAGQERFQSLGVAFYRGADCCVLVYDVNSMKSFDNLHNWREEFLIQASPSDPDNFPFVLLGNKVDVDGGNSRVVSEKKAKAWCASKGNIPYFETSAKDGTNVEDAFQCIVKNALKNEPEEEFLGGQPLDYLQNDSTSSLLTIDHHLHTGKEI

SEQ ID NO: 38799 - protein, 190 aa, Zea mays
  Clone ID: LIB3075-043-B5_FLI.pep
QNLCYLAKLFLDHKTLYYDVDLFLFYVLCECDDRGCHMVGYFSKEKHSEESYNLACILTLPPYQRKGYGKFLIAFSYELSKKEGKVGTPERPLSDLGLLSYRGYWTRVLLEILKKHKGNISIKELSDMTAIKADDILSTLQSLDLIQYRKGQHVICADPKVLDRHLKAAGRGGLDVDVSKLIWTPYKEQG

SEQ ID NO: 38800 - protein, 77 aa, Zea mays
  Clone ID: 700443709_FLI.pep
LSAVLQEPFQDLEGRRLEIRRSSNATCFLAEPQRGGMANYFVHHPFKQTILHVTVGAQEIALVLHHRCICCVLSCLL

SEQ ID NO: 38801 - protein, 223 aa, Zea mays
  Clone ID: 700447219_FLI.pep
GLLDTMVKLTMIARVTDGLPLAEGLDDGRDLKDADFYKQQAKLLFKNLSKGHHEASRMSIETGPYYFHYIIEGRVCYLTMCDRSYPKKLAFQYLEDLKNEFERVNGNQIETAARPYAFIKFDTFIQKTRKLYLDTRTQRNLAKLNDELYEVHQIMTRNVQEVLGVGEKLDQVSEMSSRLTSDTRIYADKAKDLNRQALIRKYAPVAIVIGVVLMLFWLKNKIW

SEQ ID NO: 38802 - protein, 132 aa, Zea mays
  Clone ID: 701164745_FLI.pep
AWEARYLGSMLQRDGDIDQDVSHRIKAGWIKWRQASGVLCDKRVPQKLKDKFYRTTIRSAMLYGAECWPTKRRHIQQLSGAEMRMLRWICGHTRLDQVRNDDICDRLGVEEKLIQHRLRLFGHVHRRPPEAS

SEQ ID NO: 38803 - protein, 249 aa, Zea mays
  Clone ID: 701160956_FLI.pep
PRPPTVSYDPVTSNSFGLSLFSILNALGIIAFAFRGHNLALEIQATMPSTFKHPAHVPMWRGAKVAYLLIAMCLFPVAVGGYWAYGNMVPPGGMLAALYAFHSHDISQGVLATTCLLVVLNCLSSFQIYSMPVFDSFEAYYTGRTNRPCSAWVRSGFRVFYGFLSLFISVALPFLSSLAGLLGGLTLPVTFAYPCFMWICVKKPERFSFSWYLNWGLGLLGTAFSLAFSLGGVWSIVNNGMKLKFFKPN

SEQ ID NO: 38804 - protein, 89 aa, Zea mays
  Clone ID: LIB3608-020-B12_FLI.pep
GFDRFLQSCLQVMAGGSSRVELVGFRVHYYLPEPSDGRQNHQEHPKNDAHPVGQPGEAEPLGLVDCEPHDAGKEIGGRREGEPAEETEQ

SEQ ID NO: 38805 - protein, 54 aa, Zea mays
  Clone ID: LIB4074-016-E5_FLI.pep
PMVFGTHGGLVYMYTYKILVFKIRYNGAKQSHTRSVFEGQDFLCASVFHVDYNP

SEQ ID NO: 38806 - protein, 261 aa, Zea mays
  Clone ID: 700203248_FLI.pep
KTLAFPHQGVHPSSHGDGVQDGDGGDEREGGVPALVHGDEVEEGAPLRGVQDRRAVARRAGGQGGRPRGRVRGARGRAARRRLPLRRLRLRLRHRRQLPEEQDLLHRLVTGGVEDQGQDPVRDIEARPAAAAGRGPLRGAGHRPLRDGLRRHQRPRAMRPALRSAPIYVLTCAWACSPTTHCSVVICVRVCVCVCDPPDANWRRCAPVAIDAANLTRLRVCLLCYFRFSGEMVQAWCVDVDGWSRSSGEWQRTNETSTSAT

SEQ ID NO: 38807 - protein, 57 aa, Glycine max
  Clone ID: 700684806_FLI.pep
PFIFTYLKRTRTRKMVSNAQNGLLFIHEKFVFFDILANSTNGTNCGDYRNKEAHKAQ

SEQ ID NO: 38808 - protein, 144 aa, Glycine max
  Clone ID: 700846162_FLI.pep
EKPTWLIAMANLFVVIHVIGSYQIYAMPVFDMIETVMVKKLNFEPSRMLRFVVRNVYVAFTMFIAITFPFFDGLLGFFGGFAFAPTTYFLPCIMWLAIHKPKRYSLSWFINWICIVLGLCLMILSPIGGLRTIIIKAKTYEFYS

SEQ ID NO: 38809 - protein, 220 aa, Glycine max
  Clone ID: 700895783_FLI.pep
IVLAFRGHNVLPEIQGTLPSNFEQTSKRPMRRGVSISYVLISMCMFPLAIAGFWAYGNQINDGGLLTSFPQFHKRQITKFSMGAIYVLVIIHCLTSFQIYAMPVFDNLEIRYTSIKNQRCPRLVRTCIRLFFGGLTFFISVTFPFLPRLSALLGSMTLVPITYAYPCFMWLSLKKPRPRGFVWCFNVALGCVGMLLSALLVAAAIRTLALNGLDANFFKP

SEQ ID NO: 38810 - protein, 179 aa, Glycine max
  Clone ID: 701000683_FLI.pep
VLIAYLVVALCYFPVALIGYWVFGNSVDDNILITLNKPTWLIVTANMFVVIHVIGSYQLYAMPVFDMIETVMVKQLRFKPTWQLRFVVRNVYVAFTMFVGITFPFFGALLGFFGGFAFAPTTYFLPCIIWLAIYKPKKFSLSWITNWICIIFGLLLMILSPIGGLRSIILNAKNYGFYQ

SEQ ID NO: 38811 - protein, 195 aa, Glycine max
  Clone ID: LIB3109-029-F8_FLI.pep
TTTLFYVLCGCLGYAAFGNDAPSNFLTGFGFYEPFWLIDFANVCIAVHLVGAYQVFVQPIFGFVEKWSKENWTESQFINGEHTLNIPLCGSYNVNFFRVVWRTAYVIITAVVAMLLPFLNDFLALIGALSFWPLTVYFPIEMYIKKSNMQRFSFTWTWLKILSWVCLIISIISLVGSIQGLSVSIKKYKPFQAEQ

SEQ ID NO: 38812 - protein, 69 aa, Zea mays
  Clone ID: 700204545_FLI.pep
FTNLALGQANTHILSHSRTRANPQPFCTQRISIKSGTWQPPTSMTSGHQGTSYLPLNQIFFPSFAQRQQ

SEQ ID NO: 38813 - protein, 363 aa, Zea mays
  Clone ID: 700043633_FLI.pep
SPFYMTPRSLVPLQHSPSVTEGNICTPIADKSFSSDSKSHHVVNMVADGFNWRKYGQKQVKSSDNSRSYYRCTNSGCLAKKKVEHFPDGRVVEIIYRGAHNHEPPQKTRFAKERVTPISVPSGGETLRLVNTEIVESSTPTCELERSAISETSEQHLFCSSDCEGDAGNKSEDEHPSAEALPKRRTLEATAPNLTPVRRTVREQKIIVQAGKMSDGYRWRKYGQKIVKGNPNPRSYYRCTHGGCPVRKHVEKAPDDVNNIVVTYEGKHNHDEPFRSSSIPVSVISPSATATEQPNTSSTSDERPPTITQKDANSESDKETTLKFGGEKALESAQTLLSIKTNSDDMKNSVLKETSAAVPVQNN

SEQ ID NO: 38814 - protein, 347 aa, Zea mays
  Clone ID: 700051638_FLI.pep
SLVITRRMHDARSVVVVGSSNRRSVAPAAEVVVMVVVVVEALAGGGGDLGVDVGGEPRVLRRAQPLPLPLAALIARRHAALQELHQAGGAVVLVQVRRPAAVVVVREAGQLEGRGGGAEGAEVAVVVRGGGGGFWRRRGRRLVQELALQRVGEAGHVCRRRGGGAGAGAGAGHVHQRREVGDGLYVARLVVGRRLRAAPLACGWCCCCSCTTYDQALLEHPAQHPLVLGPGGLGDDDDGCALAVAVAVELGVEAVLVHDPSGLLAPGRPPRVEDERLLGTDERLAPEDVPVLARGLPVPGLRGPVGPQPRRVLAVLEAEEVPLLLPHPRQRWRNQITYHNSLLLLPL

SEQ ID NO: 38815 - protein, 172 aa, Zea mays
  Clone ID: 700241077_FLI.pep
ASSYARAKPRNPLPPVLRPTHPGAMTLGSSGAGSSVVVPRNFRLLEELERGEKGIGDGTVSYGMDDADDIYMRSWTGTIIGPHNTVHEGRIYQLKLFCDKDYPEKPPSVRFHSRINMTCVNHETGMVDPRKFGLLANWQRDYTMENILTQLKKEMAASQNRKLVQPPEGTFF

SEQ ID NO: 38816 - protein, 261 aa, Zea mays
  Clone ID: 700264791_FLI.pep
KIFRCQLPRNNAFYSAQPPKHDGSDKPLCPGAPVCHWCGTWKGDKICSSCKKARYCSEKHQALHWRTGHKNDCLQIISSAASNSVLPAVGIVPASISWPEFEIKIDYEGTFDSDSGDENNSKSLVMQRHGKLDAMMQSWMDHFEADADNKCWASFQERVSRAPNQVLRYCREPNAKPLWALSFGCPSDADIPSCSYCRGPLCYEFQVMPQLLYFFGVGNQPDSLDWATIVVYTCQGSCDQTVSYKEEFAWVQLYPTTTTRR

SEQ ID NO: 38817 - protein, 399 aa, Zea mays
  Clone ID: 700476085_FLI.pep
DDETEETEDPHQPPPAGPSAAAADSDDDDEEEEVEVTLGVLSKPKHPGLLLRHLFPSKAGGIPAWLDPVNLPSEKSSCCGFCGEPLQFVLQIYAAVEDNVAAFHRTLFMFMCPSMACLLRDQHEQWKHKHGNPCRSVKVFRCQLPRTNAFYSVQPPKHDRSDKPLCPGAHVCHWCGTWKGDKICSSCKKARYCSEKHQALHWRTGHKNDCLQIISSSAASNSVLPTVGKVPANTSWPEFEIKIDYEGRFDCDSGDENNSKLLVMQRHGKPDAMMQSWMDQFEADSDNKCWASFQERVSRAPNQVLRYCREPNAKPLWALSSGCPSNADIPSCSYCKGPLCYEFQVMPQLLYFFGVGNQPDSLDWATIAVYTCQGACDQSVSYKEEFAWVQLYPTTTTRQ

SEQ ID NO: 38818 - protein, 579 aa, Zea mays
  Clone ID: 700206727_FLI.pep
GFRDEGYREDPGGGGGWPDGVLVRVLPSQDGGGGREPVRADGPHGGARPLEIANRMQNMVCVETMMHLTCTNMPVEKIDHALETIKSNGIQNVLALRGDPPHGQDKFVQVEGGFACALDLVQHIRAKYGDYFGITVAGYPEAHPDAIQGEGGATLEAYSNDLAYLKRKVDAGADLIVTQLFYDTDIFLKFVNDCRQIGITCPIVPGIMPINNYKGFLRMTGFCKTKIPSEITAALDPIKDNEEAVRQYGIHLGTEMCKKILATGIKTLHLYTLNMDKSAIGILMNLGLIEESKVSRPLPWRPATNVFRVKEDVRPIFWANRPKSYLKRTLGWDQYPHGRWGDSRNPSYGALTDHQFTRPRGRGKKLQEEWAVPLKSVEDISERFTNFCQGKLTSSPWSELDGLQPETKIIDDQLVNINQKGFLTINSQPAVNGEKSDSPTVGWGGPGGYVYQKAYLEFFCAKEKLDQLIEKIKAFPSLTYIAVNKDGETFSNISPNAVNAVTWGVFPGKEIIQPTVVDHASFMVWKDEAFEIWTRGWGCMFPEGDSSRELLEKVQKTYYLVSLVDNDYVQGDLFAAFKI

SEQ ID NO: 38819 - protein, 342 aa, Zea mays
  Clone ID: LIB189-001-G3_FLI.pep
RPPRRPANIATYTGHSHLMATTETMEMGVVVDGVSSNVSGGCGGLVVTELSHIKELVRQLEVHLGGSPDLCKHLASQIFSLTERSIGLINSSSSGLDGARRKRSAGDAGLASPLSATPTSGVTDGPFKNTKKRKAMEQRRQRVSSAGGENPVDDGRSWRKYGQKEILGAKHPRGYYRCSHRYSQGCQATKQVQRTDEDPTLYDVIYHGEHTCAPHRPAAAAAEHNPDAHGHLQTLSAGLTVKTEGLPDPPRGRGRGAATPLYLSASSTPPSTSENWGVSPATSGSTHVASFRPFEAAEWRGQAEHQEVVSALVAAIAPPPAVDSLDDLLIDIDLDDIASFFA

SEQ ID NO: 38820 - protein, 419 aa, Zea mays
  Clone ID: 700042436_FLI.pep
LKPLQPRLGGRAEAAGDVDDEAVADVVLLEPLHGRVDVVHLDDLDLGPDAVLPRELEHGLAVPDAADIVPSHALPARHDGVGRQLERLARRAHDHHLPQRLQQRQQRRDRVPRRHRVDDAVHGPRRRLHLVLVPADEELVRAEVLDGLLALAGGRADDGDLHPEGLAELDGDVAEAAEADDAEVLAGLVEAVAHHGAVHGDAGAEQRRGAVQRQAVGDADHVVLARDQDVGESPPGGRAAVRVVDAVGGEHDPRAVVVVPLAAAVAGAAGPHEVAHADRVAGLEPRDAAADAGHHAHDLVPRDDWVHGVSPVVLDDVQVGVADPAVEHLDRDIVVFRNPSGEAVGGEDAGVVPGRPSERRLAALLFHRRHLLPLLHGRPWPRQPQCSRGRGEGWPCTSSDSERGSRRTSSGGIREWNGD

SEQ ID NO: 38821 - protein, 135 aa, Zea mays
  Clone ID: LIB3059-057-C5_FLI.pep
LASGSITLLLQYIVSSVVDTAGSCVARAGTWLLQLQAAHRRQLLRYLGRHQRRELALRLLLQEGLQDHTVCRLVPVQRLHLPDLVAALLLQRLALWRAVGRRRRAALVPQELDALAQERAADAADAAGSELLARA

SEQ ID NO: 38822 - protein, 70 aa, Zea mays
  Clone ID: 700457949_FLI.pep
WEKNVRSFYEAWLSTIGSTQKLNLVIQHLLDTLAFRKLMSIPWFLPSPSCWDGLIHVQKADVRNHSKIIR

SEQ ID NO: 38823 - protein, 37 aa, Zea mays
  Clone ID: 700801541_FLI.pep
RRGMESAAAGRTSPSVAALLPAVSPTEETMCCSIAAG

SEQ ID NO: 38824 - protein, 91 aa, Zea mays
  Clone ID: 701163417_FLI.pep
VHSSINYKRMAQVSLQQIDSNLHIKYTYTQRIIYHKLARKHVSNLNSRTSMRMLTISSNAESTTKPSDHRCKCGYCKSKHSASKYLWRCVP

SEQ ID NO: 38825 - protein, 299 aa, Zea mays
  Clone ID: 700043810_FLI.pep
ARRQAGGWHEGRLRRGPHHHAQDRRQAQAGGVRQPMVRCRPRPVPGPAVRLAPELPDRRVPRRLRVGHRGAVGGPGDLRQEPRAGGDPLPLGHARRARVRVPGAARPQRRQVRRGGVVQGGLPDLQRGRAGLPRQPEPGPRAEHPGHLGVPGGAHGRRRGVPRRRRPARRGGRPAVPWRQLRPARARRRPGGVRRAQGEGDQERPPRHVLHVRLLRAGYRHRQGPPREPRRPHRRPRQQQRLGLRHQLRPRQVSEGMMLACVYRRRTYSYVLQVAPVFVKGALGARDCTASVFVCMLWS

SEQ ID NO: 38826 - protein, 136 aa, Zea mays
  Clone ID: LIB3061-006-D7_FLI.pep
ICQAGVFVGIALALLLFVSFGRLAEIFSKDPMVIQIVRSGVLFVSASQPINALAFIFDGLHFGVSDFSYSASSMMVVGAISSLFLLCAPPFFGLLGVWAGLALFMSLRMTAGFMRLGWRAGPWWFLHRKEPKYRLQ

SEQ ID NO: 38827 - protein, 662 aa, Zea mays
  Clone ID: 700045236_FLI.pep
PRHHRAAQHRALPDSTPAASRCPLSMSLHHCRAATTPAMPATGLSSAGASPFRLPASSSSAQGHLRLSPPAATASATACRRRLLLRCAASSGGGGGSGSDPVLEEQRRRQAELAARIASGEFTVQGPGWIAPLVGRLSKLGPPGELAAALLTRVAGAGGPEIPQAVGSINAVVGQAFFVPLYDLFLTYGGIFRLNFGPKSFLIVSDPAIAKHILRENSKAYSKGILAEILEFVMGTGLIPADGEIWRVRRRAIVPALHQKYVTAMIGLFGEASQRLCEKLDKAAVDGEDMEMESLFSRLTLDVIGKAVFNYDFDSLSYDNGIVEAVYVTLREAEMRSTSPIPTWEIPIWKDISPRQKKVNEALKLINSTLDELIAICKRLVEQEDLQFHEEYMNEQDPSILHFLLASGDDVSSKQLRDDLMTMLIAGHETSAAVLTWTFYLLSKYPKVMAKLQDEADSVLGDGLPTIEDVKKLKYTTRVINESLRLYPQPPVLIRRSLEDDILGGYPIGRGEDIFISVWNLHHCPKHWDDAEVFNPERWPLDGPNPNEINQNFSYLPFGGGPRKCVGDMFATFETVVATAMLVKRFDFQMAPGAPPVDMTTGATIHTTEGLKMTVTRRTRPPVIPNLEMKIITDSQESTLSAPSMVVSAASVASGEDQGGIS

SEQ ID NO: 38828 - protein, 181 aa, Zea mays
  Clone ID: LIB143-003-A10_FLI.pep
FATAARPPAVRLIMAASSTATSVHDFIVKDASGKDVDLSTYKGKVLLIVNVASQCGLTNSNYTELAQLYEKYKDQGFEILAFPCNQFGGQEPGTNEEIVQFACTRFKAEYPIFDKVDVNGNNAAPIYKFLKSSKGGLFGDSIKWNFSKFLVDKEGRVVDRYAPTTSPLSIEKDIKKLLGSS

SEQ ID NO: 38829 - protein, 261 aa, Zea mays
  Clone ID: 700045378_FLI.pep
LQASNNEQSVQARDLRIAEDEHLHELGPALVAEQALLPVRPPRVRQAKPRASAAEVADAGAGVGSSEHAHHGGERRADEQAVGAELWPAAGVVEQRRAAPAHLGQHHGRRRDLRRFRPVEEERVQRVVVVVRASVPLRAEPAETEATVGVANDDAGALEVAPPVEVRSTEAVHGGLVAAPELTVSEVCFCHERHGERWLDVVVGELQLRRRRLGFSRAFAPVKEATRGDEGWPARRLHGPAARHERHHESAQAWMRSRSMR

SEQ ID NO: 38830 - protein, 104 aa, Zea mays
  Clone ID: LIB143-047-E1_FLI.pep
QTGHNQPTNKLGYVQHRRPNKLIANLKLRPKLATLKRGFLRGTVTFSIPVTQMLMRSGGGGDDGELVCCWWSLASTAGASLVPTGAECRGLGAEPSPEFGTSSP

SEQ ID NO: 38831 - protein, 183 aa, Zea mays
  Clone ID: LIB148-057-H10_FLI.pep
KTFYNSLFLVPVQFPLISATRGEVRHFSLSLYPSAKIYNRAPSTSTKQTHAICTIELQTVRTLHQILEKNYAFICLKMCTRYRAFLSFFPLKQGVKRSNPFQSHLCLNIAILYTATKYEDICKYSVSTIAACQLRIEEHRWQVLQHSEAELLPTKFGCPSLVNICKQLILPNQCLIQDLLHRN

SEQ ID NO: 38832 - protein, 349 aa, Zea mays
  Clone ID: 700045814_FLI.pep
KGLFPLSIIYTRGHCTFFRPSHTAFYPGKIKDGMQQRMTWHCSAAWRPSLQARRPLGGAGDDGEQVVAEGVAEVLGEVLHGAFAGDVGLDEEGEHGEHGQPAVLDLLHLEDGGLVGVAGQAQGVEGPTGVQLVLKVQSVGDPVVLGAADEDDLRDHGHHQVDGDAVAEVVEGVAVQEQRAGLEPDSLRATVSAELVAGLWDDSASGTEHGPSGMDQLVGLVLGEVLWLLAQAKRVVAIVSRDLSGEVLRHLRPVQQPIRQVDPPVRTIPLGELVADVWRRRRYRSGLGLLGRLLAEKGDNLLSPRGGRCGGVAGGAREVELGAQNLGWSERRHCRRPTIQRKICSKRGW

SEQ ID NO: 38833 - protein, 194 aa, Zea mays
  Clone ID: LIB189-007-C7_FLI.pep
HHEGADRCPCSPGARCERRLQYKRRLWLPDTTVSSTASVLYAASVLSAAAAAAAAMAIPHSTTAAKPVPAVRILRRRQRRQPVPGPVRRVPEAPVQPGGDALRLATVPGAAAAVLPPDQAGGAAAPVPGDIRCGPAVLPAAAAAGRARGADGGPGSAAADGDVRPAAAAARSLPLQRSCRRCLLLRKLCTVVIM

SEQ ID NO: 38834 - protein, 159 aa, Zea mays
  Clone ID: 700460850_FLI.pep
ELGHQVTLIRQVAEKVFANVGKTIGYKVGTMIEIPRAALVADEIAEQAEFFSFGTNDLTQMTFGYSRDDVGKFIPVYLAQGILQHDPFEVLDQRGVGELVKLATERGRKARPNLKVGICGEHGGEPSSVAFFAKAGLDYVSCSPFRVPIARLAAAQVLV

SEQ ID NO: 38835 - protein, 253 aa, Zea mays
  Clone ID: 701166811_FLI.pep
DFAEDNLLGEGGFGCVFKGILPDGRPVAVKKLKIGNGQGEREFKAEVDTISRVHHRHLVSLVGYCTAEGQRMLVYDFVPNNTLYYHLHVSETSLDWRTRVKIAAGAARGIGYLHEDCHPRIIHRDIKSSNILLDNNFEAQVSDFGLARLAADSNTHVTTRVMGTFGYLAPEYALSGKLTAKSDVYSFGVVLLELITGRKPVDASQPLGDESLVEWARSLLTKAIEHREFGDLPDPRMENRFDENEMFHMIVAA

SEQ ID NO: 38836 - protein, 111 aa, Zea mays
  Clone ID: 701166872_FLI.pep
RGGITQTKILRLFRSSRGLASFRVADRARNNLSHQKPESLHGARADERGGGLGVEQLQRGAARLDAPWRLVLVDGAALADQQVHERVEGAGFHQPYVQRRPHGRCTSCRRR

SEQ ID NO: 38837 - protein, 99 aa, Zea mays
  Clone ID: 701169011_FLI.pep
QHGRRRTSKTLIYHTCLLIRQSERSREDDTFLSHDISLLTVSSNNSSMGGGGQRRKQNRHQSSVNHLCWMTRISHPCRSALWASLGQGTCDGLQGGTRS

SEQ ID NO: 38838 - protein, 367 aa, Glycine max
  Clone ID: LIB3242-299-B5_FLI.pep
LFTHTLSLSLSVTHREKLRHPRSHFAHTISHCSFFFLFFFFFFFSLNGMMEHNIIVNNNVIAPFVIKTYNMVNDPTTDKLITWGPANNSFIVLDPLDFSHSLLPTFFKHNNFSSFVRQLNTYGFRKVDPDRWEFANEWFLRGQKHLLRNIVRKKHGGAGRTNSNSHYSHPLKLEELDDEAMVMEIARLKEEQKALEEELHEMNKRLETTEKRPQQMMAFLCKVVEDPQILSRILREREKKHLGEKKRRLIPPPPPTAATSSSSSSGIKTEFEEDEGNYNIKSSSPETGLEIDNNSNNICSPPPLGCWGEQGCYGYNCASVPAPLTVVAPAFPTMGGGYLRRGGFWGEMAAEGNAVPPYPFSLLEGGF

SEQ ID NO: 38839 - protein, 853 aa, Arabidopsis thaliana
  Clone ID: LIB22-069-B3_FLI.pep
AMMMVHSMSRDMMNRESPDKGLDSGKYVRYTPEQVEALERVYTECPKPSSLRRQQLIRECPILSNIEPKQIKVWFQNRRCREKQRKEAARLQTVNRKLNAMNKLLMEENDRLQKQVSNLVYENGHMKHQLHTASGTTTDNSCESVVVSGQQHQQQNPNPQHQQRDANNPAGLLSIAEEALAEFLSKATGTAVDWVQMIGMKPGPDSIGIVAISRNCSGIAARACGLVSLEPMKVAEILKDRPSWLRDCRSVDTLSVIPAGNGGTIELIYTQMYAPTTLAAARDFWTLRYSTCLEDGSYVVCERSLTSATGGPTGPPSSNFVRAEMKPSGFLIRPCDGGGSILHIVDHVDLDAWSVPEVMRPLYESSKILAQKMTVAALRHVRQIAQETSGEVQYGGGRQPAVLRTFSQRLCRGFNDAVNGFVDDGWSPMGSDGAEDVTVMINLSPGKFGGSQYGNSFLPSFGSGVLCAKASMLLQNVPPAVLVRFLREHRSEWADYGVDAYAAASLRASPFAVPCARAGGFPSNQVILPLAQTVEHEESLEVVRLEGHAYSPEDMGLARDMYLLQLCSGVDENVVGGCAQLVFAPIDESFADDAPLLPSGFRIIPLEQKSTPNGASANRTLDLASALEGSTRQAGEADPNGCNFRSVLTIAFQFTFDNHSRDSVASMARQYVRSIVGSIQRVALAIAPRPGSNISPISVPTSPEALTLVRWISRSYSLHTGADLFGSDSQTSGDTLLHQLWNHSDAILCCSLKTNASPVFTFANQTGLDMLETTLVALQDIMLDKTLDEPGRKALCSEFPKIMQQGYAHLPAGVCASSMGRMVSYEQATVWKVLEDDESNHCLAFMFVNWSFV

SEQ ID NO: 38840 - protein, 301 aa, Arabidopsis thaliana columbia
  Clone ID: LIB3175-082-B8_FLI.pep
NQIGSCSRSRCSLTYLLEFIIIVIITMSLFLKDDSIQIREVWNDNLESEMALIREVVDDFPFVAMDTEFPGIVCRPVGTFKTNTEYHYETLKTNVNILKMIQLGLTFSDEKGNLPTCGTDNKYCIWQFNFREFDLESDIYATDSIELLRQSGIDFVKNNEFGIDSKRFAELLMSSGIVLNENVHWVTFHSGYDFGYLLKLLTCQNLPETQTGFFEMISVYFPRVYDIKHLMKFCNSLHGGLNKLAELLDVERVGICHQAGSDSLLTSCTFRKLQENFFIGSMEKYSGVLYGLGVENGQIVH

SEQ ID NO: 38841 - protein, 352 aa, Zea mays
  Clone ID: 700072585_FLI.pep
PQMDDDDGSLGIRNWGFYDTMKGNLGLQLMSSMPPDRDTKPLLPRAGFLQQHGHHNASHQLHAQQSQHYRDSTCGGGASGGMPTEQHSIHMDFSRNEAWLHPSHHHQHPHDQKVLHSRPTVPAGHVGHPGHGSHPVHGGHIVHHHPTGYGSISDAQHTLQMMQPQLESQLQEPPPCKGDEAPPPPIEDHSVVSTGPPVKKRQRGQQQSRQPKSPKPKKPKKVAVLPEGGALNGHAPRRRGPKKAVGMVINGIELDLANLPTPVCSCTGTPQQCYRWGAGGWQSACCTTAISTYPLPMSTKRRGARIAGRKMSQGAFKKVLEKLAGEGYNLVNPIDLKTFWAKHGTNKFVTIR

SEQ ID NO: 38842 - protein, 326 aa, Zea mays
  Clone ID: 700073545_FLI.pep
PGAENSVRRRRMAMVAAAEGSGRRDAEAELNLPPGFRFHPTDEELVVYYLCRKVARQQVPVPIIAEVDLYKFDPWDLPEKALFGRKEWYFFTPRDRKYPNGSRPNRTAGKGYWKATGADKSIVPMGSTRAAGIKKALVFYSGKAPRGVKTDWIMHEYRVAQADHTLGKKGSQKLDEWVLCRLYNKRNNWDKVKVEEQELEAAPRRQHHLQSAEDSMSNSFQTHDSDIDNVFELQNCYGNNMVQGQAMTPRNDIGVVTVKEDNDWFTDMNLDDLQASYNMAHTVNPNPAQTANLVAGQGHGYLQGYGYLQYMNSPSMKMWQTILPSF

SEQ ID NO: 38843 - protein, 1017 aa, Arabidopsis thaliana
  Clone ID: LIB146-011-F11_FLI.pep
GQPDCMRELLVAGADPNAVDDEGETVLHRAVAKKYTDCAIVILENGGSRSMTVSNAKCLTPLHMCVATWNVAVIKRWVEVSSPEEISQAINIPSPVGTALCMAASIRKDHEKEGRELVQILLAAGADPTAQDAQHGRTALHTAAMANNVELVRVILDAGVNANIRNVHNTIPLHMALARGANSCVSLLLESGSDCNIQDDEGDNAFHIAADAAKMIRENLDWLIVMLRSPDAAVDVRNHSGKTVRDFLEALPREWISEDLMEALLKRGVHLSPTIYEVGDWVKFKRGITTPLHGWQGAKPKSVGFVQTILEKEDMIIAFCSGEARVLANEVVKLIPLDRGQHVRLRADVKEPRFGWRGQSRDSVGTVLCVDEDGILRVGFPGASRGWKADPAEMERVEEFKVGDWVRIRQNLTSAKHGFGSVVPGSMGIVYCVRPDSSLLVELSYLPNPWHCEPEEVEPVAPFRIGDRVCVKRSVAEPRYAWGGETHHSVGKISEIENDGLLIIEIPNRPIPWQADPSDMEKIDDFKVGDWVRVKASVSSPKYGWEDITRNSIGVMHSLDEDGDVGIAFCFRSKPFSCSVTDVEKVTPFHVGQEIHMTPSITQPRLGWSNETPATIGKVMRIDMDGTLSAQVTGRQTLWRVSPGDAELLSGFEVGDWVRSKPSLGNRPSYDWSNVGRESIAVVHSIQETGYLELACCFRKGRWSTHYTDLEKIPALKVGQFVHFQKGITEPRWGWRAAKPDSRGIITTVHADGEVRVAFFGLPGLWRGDPADLEVEPMFEVGEWVRLREGVSCWKSVGPGSVGVVHGVGYEGDEWDGTTSVSFCGEQERWAGPTSHLEKAKKLVVGQKTRVKLAVKQPRFGWSGHSHGSVGTISAIDADGKLRIYTPAGSKTWMLDPSEVETIEEEELKIGDWVRVKASITTPTYQWGEVNPSSTGVVHRMEDGDLCVSFCFLDRLWLCKAGELERIRPFRIGDRVKIKDGLVTPRWGWGMRTCCGSGCKWEIENKIPVEGRAALDW

SEQ ID NO: 38844 - protein, 347 aa, Zea mays
  Clone ID: 700073918_FLI.pep
LDRFAGLDLDGFRPSIAKTSVYIWNNGNGIIHHFCCVLCIRYYPLSQIIGETFKDLVGSAYYVAPEVLKRKYGAEADIWSAGVILYILLSGVPPFWAENEDGIFDAVLRGHIDFSSDPWPSISNGAKDLVKKMLRQDPKERLTAAEILNHPWIREDGEAPDKPLDITVIGRMKQFRAMNKLKKVALKVVAENLSDEEIMGLKEMFRSLDTDNSGTITLEELRSGLPKLGTKISESEIKQLMEAADVDGNGTIDYAEFISATMHLNRLEKEDHILKAFEYFDKDHSGYITVDELEEALKKYDMGDDKTIKEIIAEVDTDHDGRINYQEFVAMMRNNSPEIVPNRRRMF

SEQ ID NO: 38845 - protein, 360 aa, Zea mays
  Clone ID: LIB3061-003-D6_FLI.pep
AEADADDPSSSTPSLPMAVLGGGGGEGRSGVPNKLVVAALATGEEAAPALSPDTVVEVNSEEEVPYRMAVHPRGDGVFCAFPNGCRLYRWESQEGEGPQRLALEPDQDALAELKDVGLQLAVSFSGEGSILAIGGEDGYLRVFNWPTMGSVLTEIDTKTSIKDLTISSDEKFLAVNRSSGPCRVWDLQSSEVVASLPRETGEIFGFCRFSNKADNSHVLFITVMEGDYGKIVSWNTTSWTRTGSKKITREAISAFAVSPNGALLAIGTIEGSIIVVGSKDMRTLVTVKKAHLGIVTTLTFSQDSRTLLSTSFDSSARVTSVGSPKSNGTSIWPMLLVVILAILVYYCTQHKEDILAMLQR

SEQ ID NO: 38846 - protein, 430 aa, Zea mays
  Clone ID: LIB3062-015-F4_FLI.pep
LEPSPSVGLLPRASLSDGGSIKSTPVKSVIGQGGPSIVKKAHSSNPTDGDGSSKKMKKEIKKVDACNVTRLQVKNGTNNEPADRKGPHASLSACSVNSTSLKSVIAQGGPSIANKIISKLTEDMTVVTSIDGHPTKTWIVMTYKGGKVSIWDYQEKKTVMELKVNEESGKIARIAHGISQNFKETGVPHSVCSAKFIAQGKWLVVGNSDGYIYVYTYTDTKLKEAKKFRAHDNSVDVLAVHPTEAYLLSSSAYGKTIKLWSWGSDSIMNWVQIKTFNVKPTYPDGVRSLRFNPRDTNTFACVTYEDRVKVGDIKNPSGLTTILKGPLKADYCFSHTHPHLMVTLSRTSPDAQIRNLKTGKVDQTLSLSGGKTTCIACHPTLPILVTALDDGTVCFWDASIYRLEEKVKITGSCALDLVFIADINGSARYF

SEQ ID NO: 38847 - protein, 190 aa, Zea mays
  Clone ID: 700074175_FLI.pep
GSSCAEMGLTFTKLFRRLFAKKEMRILMVGLDAAGKTTILYKLKLGEIVTTIPTIGFNVETVEYKNISFTVWDVGGQDKIRPLWRHYFQNTQGLIFVVDSNDRERVVEARDELHRMLNEDELRDAVLLVFANKQDLPNAMNAAEITDKLGLHSLRQRHWYIQSTCATSGEGLYEGLDWLSNNIANKARSI

SEQ ID NO: 38848 - protein, 268 aa, Zea mays
  Clone ID: LIB3066-005-A11_FLI.pep
HTILTKDGKNHLIKKDVPCETDQLTHVYTLIIRPDATYSILIDNEEKQTGSIYEHWDILPPKQIKDPEAKKPEDWDDKEYIPDPEDKKPEGYDDIPKEIPDPDAKKPEDWDDEEDGEWTAPTIPNPEYKGPWKQKKIKNPNYQGKWKAPMIDNPDFKDDPYIYAFDSLKYIGIELWQVKSGTLFDNIIITDDPALAKTFAEETWGKHKEAEKTAFDEAEKKKEEEEAAKGGDDDDDDLEDEADDDKADDDKADSDAEDDKDSEEHDEL

SEQ ID NO: 38849 - protein, 258 aa, Zea mays
  Clone ID: LIB3066-023-E5_FLI.pep
GRGVEGRGSIAIPNPHLAAPTTAAGLRPFRLPRMSTESGELLGIDPVELRFPFELNKQISCTLQLTNKTDKQVAFKVKTTSPKKYCVRPNNGMVAPRSKADVVVTMQAQRDVPPDMQCKDKFLVQSATVAKEVVPKEVTGDMFTKDSGNVVEEVKLKVVYVAPSSSQSERFEDGNLGSLSYQEETKEPKESEKIITEPFALISKLMEEKNSAIELNNKVRQELDFLRRDISKRHGGFSLVLVLVVAILGILLGFLMKR

SEQ ID NO: 38850 - protein, 283 aa, Zea mays
  Clone ID: LIB3060-032-D8_FLI.pep
AINHSSRTYLEGIKFGDFRYTENNFSQKLNGLDSSDAHALTSSDMNAPRWTSTCKIAPYANHSYQTGKQNRLHVLPSDDLQFAHRDHAAGTEKPNFEKVGSGAIPSADLCIKDDFDKRFQEDLDEAVRQSLGYDAYPAGTISTSNETEVYGTGLKNAAGEYNCFLNVIIQSLWHIRRFRDEFLKTSSLHKHVEDPCAVCALYGIFIDLSKAAKGHGEAVAPTSLRIALSKSYPNSKFFQEGQMNDASEVLGVIFECLHKSYTSRTVCHDGVSAAQIYFIFPQY

SEQ ID NO: 38851 - protein, 299 aa, Zea mays
  Clone ID: 700074961_FLI.pep
YSLPIPELAYMPQLILKRPEVIVYGCEASVHHEVDRADVPRLVAGQVEHRLGDVLGHGVDALEVGLAADKGQEVLERVICARALGQVRHRQRRGHGIGGHAVDAHPVAAELRGDALGEPDHGVLGRRVDVRARPADGAGHAGQRHDGAPLPRDHSARRVLHPQEHAVHVDVEHPARLREVHGADVRHLGARHAGVVHHHVQCAEPLRRSVHGAAHVLLRRHVAVDEHGALRVTSQGVAQLLPGLILDVRDADLGAVLHEEANDGLADAGGATSDEGHLPFQSLTRGGEGRRGARGGHRL

SEQ ID NO: 38852 - protein, 237 aa, Zea mays
  Clone ID: LIB3061-014-H8_FLI.pep
MHETLILLMIDHDTQQLSTHASCFFIQKIPRSGDDDDVLLLLHACSPLRTTAVAAARRGLLLLLGGRAGDEVLVDDAGEAGADHGPHPVHPLVSPATGAHDGGPERARRIHHGALQRAAGQHVGPRQEPHGERRRQRSGAGADPPRFVHHRRKVGVHEPERHGRLQHRRVPSAHAPGQRVLRQMHPSGGEPEHERGGDGAEQLRGPVDEGADEADPAGDQRAEGDGRVDVAAGDVGG

SEQ ID NO: 38853 - protein, 185 aa, Zea mays
  Clone ID: 700075169_FLI.pep
AGAVAVDAQAGADTHPRVHLQQRHGEPAQGRDGPHPQAAGALRRRGRRQRLLLVPEPPLPLPPPPSCEGMMGDLDYYGGDDLFAISRQMGYASGGGSGSASSAAVAHHEQQHQLYYSPCQPASMTVFINGVATEVPRGPIDLRSMFGQDVMLVHSTAGLLPVNEYGVLTQSLQMGESYFLVTRGY

SEQ ID NO: 38854 - protein, 133 aa, Zea mays
  Clone ID: LIB3062-023-A5_FLI.pep
AAVDQRRWALQPGDVPGVHQAHAQVHKRHGEAGQGQQQGGPGAAAVEHGRRRKTHQVLEIREEMRCRRPGPGKETRCSSNPSSCIIRVRLSSDFRVESRQSGVTDRPVAAVVCCTCWSSGLERCLCFPRGATD

SEQ ID NO: 38855 - protein, 201 aa, Glycine max
  Clone ID: LIB3242-304-F10_FLI.pep
MDQVAPPPILMHRKRDLSYAVVSPAPNPSWSWDWDSVRFAGKPPPPLSSPNDDVVFEESVAPPLQLNLGGRTNNSNSNKRVRSGSPGTSSYPMCQVDNCREDLSKAKDYHRRHKVCEAHSKASKALLANQMQRFCQQCSRFHPLSEFDEGKRSCRRRLAGHNRRRRKTQPEDVTSATPAPAAAANLEIFDLLTAIAGASQG

SEQ ID NO: 38856 - protein, 501 aa, Glycine max
  Clone ID: LIB3242-140-C4_FLI.pep
CNLHEGYSFSFSGQLTFLGGNGHKWYEAYHGPIPNSFSNLTHLTQLILEDNSLGGCIPPSLGRLPLLQSLSLSGNHLKGQIPPTLGGLRNLAQLNLARNSLTGPIPLSFKTLINLQYLDLSHNLLSSPIPDFVGDFKNLTYLDLSSNLLTGKIPVSLFSLVNLLDLSLSYNKFAGNIPDQVGNLKSLTSLQLSGNLLTGHIPLSISRLQNLWYLNISRNCLSDPLPAIPTKGIPSLLSIDLSYNNLSLGILPDWIRSKQLKDVHLAGCKLKGDLPHFTRPDSLSSIDLSDNYLVDGISNFFTNMSSLQKVKLSNNQLRFDISEIKLPTELSSIDLHANLLVGSLSTIINDRTSSSLEVIDVSNNFISGHIPEFVEGSSLKVLNLGSNNISGSIPISISNLINLERLDISRNHILGTIPSSLGQLLKLLWLDVSINGLTGQIPSSLSQITGLKHANFRANRLCGEIPQSRPFNIFRPVAYIHNLCLCGKPLQPCKKQWSMGQ

SEQ ID NO: 38857 - protein, 267 aa, Glycine max
  Clone ID: LIB3242-307-D11_FLI.pep
FCWSCLYRWLHLHSDAKECPVCKGEVTLKSVTPIYGRANNVRGPEEDSALKIPPRPQAKRVESLRQTIQRNAFALPVEEMIRRLGSRIELTRDLVQPPEPDAARETAERTTSLLRFLTAQGIRREHQNLVAPPEDVMGLAQNNVNTSEAGDPRTRVQSHLLRRTQSHRATLSTLSSALTSAERLVEAYFRSNPLGRNQEQPPPPVEDRDSFSSIGAVINSESQLDTAVEIDSMVSLSTSSSRRRNDASRVSDVDSGDSRAPRRRRLN

SEQ ID NO: 38858 - protein, 466 aa, Glycine max
  Clone ID: LIB3242-294-H8_FLI.pep
KPSFFEFKPHNRSNMVPADFDNHASEKSTQIDGQGKAQAFDSSPLVKNESASPSNELSLSSPVQMDCSGGSARVEGDLDELNPRSNITTGLQASQVDNRGSGLSVAADRVSDDGYNWRKYGQKHVKGSEFPRSYYKCTHPNCEVKKLFERSHDGQITEIIYKGTHDHPKPQPNRRYSAGTIMSVQEERSDKVSLTSRDGNGSYMCGQGSHLAEPDSQPELSPVATNDGDLDGLGVLSNRNNDEVDDDDPFSKRRKMDLGIADITPVVKPIREPRVVVQTLSEVDILDDGYRWRKYGQKVVRGNPNPRSYYKCTNTGCPVRKHVERASHDPKAVITTYEGKHNHDVPTARNSCHDMAGPASASGQTRIRPEESDTISLDLGMGISPAAENTPNSQGRMMLSEFGDSQTHTSNSNFNFVHTTTVPGYFGVLNNNSNPYGSRENPSDGPSLNHSAYPCPQNIGRILMGP

SEQ ID NO: 38859 - protein, 292 aa, Glycine max
  Clone ID: LIB3242-293-E6_FLI.pep
PFFSISHGHHHRHLLGGIQGSIYNITLNTVTSSKSQQMDSKFRKKNRNVNSYTSEQDQDTDIAQENLAESPPSSTVFNIDGLVPSPTSSSKRRRAIQKRVVQIPMKETEGCRLKGESNTPPSDSWAWRKYGQKPIKGSPYPRGYYRCSSSKGCPARKQVERSCVDPTMLVVTYSSDHNHPWPPSRNHARPTKKPEPVPDPVEPEEKFADESMITTAEELGWLGEMEATSSTVLESPFMATTYHADVALIPMREEDESLFADLGELPECSVVFRQGLLAERRRYTAPWCGTTS

SEQ ID NO: 38860 - protein, 435 aa, Glycine max
  Clone ID: LIB3242-040-A7_FLI.pep
LLQNECLRLRRTRTRSMNQLGGVSVILLVLSVLCFHVRAQTSAPSSGDAVSNFQPSLAVVIGILGVMFLLTFFLLMYAKFCHRRHGGASAVGDSENQLTFVRSRSRFSGIDKTVIESLPFFRFSALKGLKEGLECAVCLSKFEDVEILRLVPKCKHAFHIDCIDHWLEKHSTCPICRHRVNPEDHTTFTYSNSLRMLAGEESNIEILVQREEEEHHGSSRFSVIGSSSFRKTVKEEELLIQKGAEDSDGNQKGYHKHNHRITISDVVFKHRWSNVSSSDLMFLNSEMLNDTSSNRFSSNLESITRGVVVENEQIMNIKEEMERKISFENKVVGALNNIVSDHKEDPPFTSDSAPKYVNPGEKRSMSEITAVSRFGDLGMKMRVLKDSDSLQNNLKEERMRQIWFPIARRTAQWFVNREERRSLQSQNNKQQPLDV

SEQ ID NO: 38861 - protein, 51 aa, Glycine max
  Clone ID: LIB3242-036-B4_FLI.pep
LMVRDSGISFKPTICQVCGFFSSVYLNILVNLRIPCMIIMIDRLVRPRVTF

SEQ ID NO: 38862 - protein, 163 aa, Glycine max
  Clone ID: LIB3167-004-A2_FLI.pep
SELSNICDGILKLLDSRLIPSASSGDSKVFYLKMKGDYHRYLAEFKTGAERKEAAESTLSAYKAAQDIANAELPPTHPIRLGLALNFSVFYYEILNSPDRACNLAKQAFDEAIAELDTLGEESYKDSTLIMQLLRDNLTLWTSDMQDDGADEIKEAAPKQDDQ

SEQ ID NO: 38863 - protein, 441 aa, Zea mays
  Clone ID: 700075316_FLI.pep
LDDTPIRRAEAASAADGHLPAPVAAMSKKKAVTTMTLKDFHGGSIPSELPLPSAPGVTPRPADRTVASASPVAAAVARPRVPVASPAAAAAAAAMPSFLTNPSRIGRHFDEDERTPFEPTTPRRPAPSPTSFAPAPVVAPTRSGPGNAWGPKKEASSAPSPVGHAPASAGDQIWSATRIAQASAVEKVISGRWHPPKPTSPPAPVSVPVLETPVAPPEIERPRSVGVRELDSGVERGAAPVRPASHEGRIGEGRAGEVPERPKLKLLPRSKPIEDPEQRPTYVEAKQVHQVQVTAGLMKAEDNHDLHQNARATETGVLGADAESRVAERPRLNLKPRSYVTGQSDEIAVKERPSLFGGARPREQVLKERGVDVLASDLEKTSPVGRLLYVVMHHVNIDRCISVVAGHKFLFIYWILISKGVRASSRVPKKTIGKSMNSLCG

SEQ ID NO: 38864 - protein, 205 aa, Arabidopsis thaliana
  Clone ID: LIB146-018-F11_FLI.pep
AGKKSQISSTPPMRFRYAMVCSSNQNRSMEAHALLKRQGLDVASYGTGSHVKLPGPSLREPNVYDFGTPYKQMFDELRRKDPELYKRNGILQMIKRNLSVKLAPQRWQDNAGDGVFDVVMTFEEKVFDSVLEDLNNREQSLTKTILVMNLEVKDNHEEAAIGGRLALELCQEIEGNETWEDTIDDIVAGFEKQHRRKLVYSISFY

SEQ ID NO: 38865 - protein, 275 aa, Arabidopsis thaliana
  Clone ID: ARABL1-06-F3_FLI.pep
FFFSSRNFLRFQNFPVKSKKKARSSSLMATTLSRDQYVYMAKLAEQAERYEEMVQFMEQLVSGATPAGELTVEERNLLSVAYKNVIGSLRAAWRIVSSIEQKEESRKNEEHVSLVKDYRSKVETELSSICSGILRLLDSHLIPSATASESKVFYLKMKGDYHRYLAEFKSGDERKTAAEDTMIAYKAAQDVAVADLAPTHPIRLGLALNFSVFYYEILNSSEKACSMAKQAFEEAIAELDTLGEESYKDSTLIMQLLRDNLTLWTSDMQEQMDEA

SEQ ID NO: 38866 - protein, 254 aa, Arabidopsis thaliana
  Clone ID: LIB25-021-F6_FLI.pep
QKEMGRGRVELKRIENKINRQVTFAKRRNGLLKKAYELSVLCDAEVALIIFSNRGKLYEFCSSSNMLKTLDRYQKCSYGSIEVNNKPAKELENSYREYLKLKGRYENLQRQQRNLLGEDLGPLNSKELEQLERQLDGSLKQVRSIKTQYMLDQLSDLQNKEQMLLETNRALAMKLDDMIGVRSHHMGGGGGWEGGEQNVTYAHHQAQSQGLYQPLECNPTLQMGYDNPVCSEQITATTQAQAQQGNGYIPGWML

SEQ ID NO: 38867 - protein, 160 aa, Zea mays
  Clone ID: 700151851_FLI.pep
FILLNHLWLLIYHLSKLCLCQLLIEPCLHEILLQITWNSLMGEVFGVVVEALGVEGCTAGCRLVRTSVVLLHGIDLRTGAARGVDGLLILLGGGGGCLLPHNDRLPVLPDRSDPGHPLIPPSQSLSLRSLHGSLSRVSHSSLSLSLLSLFSLSLSPFKTH

SEQ ID NO: 38868 - protein, 253 aa, Zea mays
  Clone ID: 700152422_FLI.pep
NHVSSAALAKQTQPATANPSSDSSPARGSPPQLFVPGGPRPPPEMSYAYLFKYIIIGDTGVGKSCLLLQFTDKRFQPVHDLTIGVEFGARMINIDNKPIKLQIWDTAGQESFRSITRSYYRGAAGALLVYDITRRETFNHLASWLEDARQHANANMTIMLVGNKCDLSHRRAVSYEEGEQFAKEHGLIFMEASAKTAQNVEEAFVKTAGAIYKKIQDGVFDVSNESYGIKVGYVVPGQSGGAGSSSQGGGCCS

SEQ ID NO: 38869 - protein, 266 aa, Arabidopsis thaliana
  Clone ID: LIB24-100-A11_FLI.pep
RFQNFPVKSKKKARSSSLMATTLSRDQYVYMAKLAEQAERYEEMVQFMEQLVSGATPAGELTVEERNLLSVAYKNVIGSLRAAWRIVSSIEQKEESRKNEEHVSLVKDYRSKVETELSSICSGILRLLDSHLIPSATASESKVFYLKMKGDYHRYLAEFKSGDERKTAAEDTMIAYKAAQDVAVADLAPTHPIRLGLALNFSVFYYEILNSSEKACSMAKQAFEEAIAELDTLGEESYKDSTLIMQLLRDNLTLWTSDMQEQMDEA

SEQ ID NO: 38870 - protein, 456 aa, Arabidopsis thaliana columbia
  Clone ID: LIB3176-028-H11_FLI.pep
ESTTMQSSFKTVPFTPDFYSQSSYFFRGDSCLEEFHQPVNGFHHEEAIDLSPNVTIASANLHYTTFDTVMDCGGGGGGGLRERLEGGEEECLDTGQLVYQKGTRLVGGGVGEVNSSWCDSVSAMADNSQHTDTSTDIDTDDKTQLNGGHQGMLLATNCSDQSNVKSSDQRTLRRLAQNREAARKSRLRKKAYVQQLENSRIRLAQLEEELKRARQQGSLVERGVSADHTHLAAGNGVFSFELEYTRWKEEHQRMINDLRSGVNSQLGDNDLRVLVDAVMSHYDEIFRLKGIGTKVDVFHMLSGMWKTPAERFFMWLGGFRSSELLKILGNHVDPLTDQQLIGICNLQQSSQQAEDALSQGMEALQQSLLETLSSASMGPNSSANVADYMGHMAMAMGKLGTLENFLRQADLLRQQTLQQLHRILTTRQAARAFLVIHDYISRLRALSSLWLARPRD

SEQ ID NO: 38871 - protein, 266 aa, Arabidopsis thaliana columbia
  Clone ID: LIB3175-053-F8_FLI.pep
EKEEEEEEEEKTMENEREKQVYLAKLSEQTERYDEMVEAMKKVAQLDVELTVEERNLVSVGYKNVIGARRASWRILSSIEQKEESKGNDENVKRLKNYRKRVEDELAKVCNDILSVIDKHLIPSSNAVESTVFFYKMKGDYYRYLAEFSSGAERKEAADQSLEAYKAAVAAAENGLAPTHPVRLGLALNFSVFYYEILNSPESACQLAKQAFDDAIAELDSLNEESYKDSTLIMQLLRDNLTLWTSDLNEEGDERTKGADEPQDEN

SEQ ID NO: 38872 - protein, 335 aa, Zea mays
  Clone ID: 700153269_FLI.pep
SDPDHARLPDHHHHHHHHPQIPNGEAHRRGGSVPGAGRGGSRRAGAGSRARGDAERAAERDGDPGEGRAVHHVHAADEGDAAGHAAEQPAEQLVRQQRRRVHGVRAHRQRLQQPQARHAQLADAAAAGGAGAGPRPAPVLQHGLLPDRQQPRPHPGLRPRRALHAQHHRHRQQPGQRLLGRRRGHHQQRAQRRQAPRRLLRRQGAPAPGAVRGQGARRRARRVPGEAQEGRVLGRSLRVGRLRRRRANGRRRRQGRRLELRRPRRRPWLPVVRVRPCVVSRDGRTDDKLVEDENAMTEAGHGRLLPFPSLSEIVSGRVPLPFFLSVYLFKLLSSR

SEQ ID NO: 38873 - protein, 805 aa, Arabidopsis thaliana
  Clone ID: LIB23-007-D7_FLI.pep
NGREMVGLVREPLNVYDNNAIRVLNTRSEQVGHIERTVAAVLAPMIDSHTIVVEGIVPNTRSNSNRYRIPCQIHVFAKLEASSTVKSTISRGGLVLISESDTSFGLSEAVVVKEQMGNGDKRSVDKIFKLVDENVKLMGKLVAAEPPREVIKSELFAHQKEGLGWLLHREKSGELPPFWEEKDGEFLNTLTNYRSDKRPDPLRGGVFADDMGLGKTLTLLSLIAFDRYGNASTSTPTEEPLDGEGDKIEKKGKKRGRGKSSESVTRKKLKTDDVVGMNVSQKTTLIVCPPSVISAWITQLEEHTVPGILKVYMYHGGERTDDVNELMKYDIVLTTYGTLAVEESWEDSPVKKMEWLRIILDEAHTIKNANAQQSRVVCKLKASRRWAVTGTPIQNGSFDLYSLMAFLRFEPFSIKSYWQSLIQRPLGQGNKKGLSRLQVLMATISLRRTKEKSLIGLPPKTVETCYVELSPEERQLYDHMEGEAKGVVQNLINNGSLMRNYSTVLSIILRLRQLCDDMSLCPPELRSFTTSTSVEDVTDKPELLQKLVAALQDGEDFDCPICISPPTNIIITRCAHIFCRACILQTLQRSKPLCPLCRGSLTQSDLYNAPPPPPDSSNTDGEDAKSSTKSSKVSALLSLLMASRQENPNTKSVVFSQFRKMLLLLETPLKAAGFTILRLDGAMTVKKRTQVIGEFGNPELTGPVVLLASLKASGTGINLTAASRVYLFDPWWNPAVEEQAMDRIHRIGQKQEVKMIRMIARNSIEERVLELQQKKKNLANEAFKRRQKKDEREVNVEDVVALMSL

SEQ ID NO: 38874 - protein, 408 aa, Zea mays
  Clone ID: 700155851_FLI.pep
PDRVGPCAAAAWAHLGRPPARLDRPGTAAARSAMEGNKDDAAKCLRIGKGALEAGDRARAIKFMSKAKRLDPSLPIDDLLTSLLNAQDDSPASSSSSPPPPPQTAAAGASEAAEADGLRERKHKGKKREEEEEATPAAREYTAEQLEVVRQVKKHTRDYYQILGLEKDCSVEDVRKAYRKLSLKVHPDKNKAPGAEDAFKAVSKAFQCLSDAESRKRYDLVGSDEPVAHHRRASTARAYNGFYEDDFDPDEIFRNFFFGGMAPATTRQFGQFGTFHFRTGGMHAHAHAQQNSGGSTVRMLIQLLPVLLLLLLNFLPSSEPVYSLSRSYPYEHKFQTPRGVAYYVKMSNFEEQYPHQSTERATLERHVERDYYSIITQNCRAELQRRQWGLSYQTPHCDMLKNFEAAAK

SEQ ID NO: 38875 - protein, 676 aa, Arabidopsis thaliana
  Clone ID: LIB24-013-E4_FLI.pep
ANQKGEIEKMEGEVATNGVILKHNGVKDISLETCWPEKKKPVEATSLSSGSSDIEEEISVECPKRVANQRRKRSKADEIKTKSSRKRKCDDENKCEENEKKQRSSVKKRATTWKEEEVVVDDEKKCEQQLQLVPSSKATSRSRSKKSVSVDTWLVNNEIDVSALSSRSESELSDSYLKTEYFNDCRSMTRSLKANLGELAICHQCSKGERRYLFICTFCEVRLYCFPCIKKWYPHLSTDDILEKCPFCRGTCNCCTCLHSSGLIETSKRKLDKYERFYHLRFLIVAMLPFLKKLCKAQDQEIETEAKVQDSMASQVDISESLCSNEERVFCNHCATSIVDLHRSCPKCSYELCLNCCQEIRGGWLSDRPECQLQFEYRGTRYIHGEAAEPSSSSVSEDETKTPSIKWNADENGSIRCAPKELGGCGDSVLELKRILPVTWMSDLEQKAETFLASYSIKPPMSYCRCSSDMSSMKRKAASRDGSSDNYLYSPDSLDVLKQEELLHFQEHWSKGEPVIVRNALNNTAGLSWEPMVMWRALCENVDSAISSNMSDVKAIDCLANCEVKINTLCFFEGYSKGRTYENFWPEMLKLKDWPPSDKFENLLPRHCDEFISALPFQEYSDPRSGILNIATKLPEGLLKPDLGPKTYVAYGLQMSSVEEIQSLSFTVICQMLLIF

SEQ ID NO: 38876 - protein, 554 aa, Arabidopsis thaliana
  Clone ID: LIB24-011-H7_FLI.pep
SIDMGITKTSPNTTILLKTFHNNSMSQDYHHHHHHNQHQGGIFNFSNGFDRSDSPNLTTQQKQEHQRVEMDEESSVAGGRIPVYESAGMLSEMFNFPGSSGGGRDLDLGQSFRSNRQLLEEQHQNIPAMNATDSATATAAAMQLFLMNPPPPQQPPSPSSTTSPRSHHNSSTLHMLLPSPSTNTTHHQNYTNHMSMHQLPHQHHQQISTWQSSPDHHHHHHNSQTEIGTVHVENSGGHGGQGLSLSLSSSLEAAAKAEEYRNIYYGANSSNASPHHQYNQFKTLLANSSQHHHQVLNQFRSSPAASSSSMAAVNILRNSRYTTAAQELLEEFCSVGRGFLKKNKLGNSSNPNTCGGDGGGSSPSSAGANKEHPPLSASDRIEHQRRKVKLLTMLEEVDRRYNHYCEQMQMVVNSFDIVMGHGAALPYTALAQKAMSRHFRCLKDAVAAQLKQSCELLGDKDAAGISSSGLTKGETPRLRLLEQSLRQQRAFHQMGMMEQEAWRPQRGLPERSVNILRAWLFEHFLHPYPSDADKHLLARQTGLSRNQVSLHIYI

SEQ ID NO: 38877 - protein, 206 aa, Arabidopsis thaliana columbia
  Clone ID: LIB3176-118-F10_FLI.pep
RIKRREHLLDSVPDKSLFWIIWRVSSKLLDSRWLLCAFWSTAIDLLIILNFNRYNLYKLVDHFHNRGLYRSIFLSIMEGEESFEKFSPEVRLKDPVVGKAASLLPPIILFHGSSDYSIPCDESKTFTDALQAVGAKAELVLYSGKTHTDLFLQDPLRGGKDELFDDIVSVIHAEDNDGLTKDSLAPPRKRLVPELLLKLAREISPF

SEQ ID NO: 38878 - protein, 206 aa, Arabidopsis thaliana columbia
  Clone ID: LIB3175-016-G5_FLI.pep
SGLSTRLKLYRTRRFCTKGENKLEKTESSVAHHSDTESSVSRYDETYKKLDKLDFVTAAKILFTEPPKKNKFGFDWHVVQFIIVCLPSVAVYLVAQYARRKMKIMDAELGEKKRKEEEKKEKEEAEQKALQVEAATKSHEELMEMRQRLGKIEETIKEIVLETKKPSGNAPTKTQEDQSTKLSPKEVSQPEKEHKGNVQKPGDGPH

SEQ ID NO: 38879 - protein, 179 aa, Zea mays
  Clone ID: 700156369_FLI.pep
QHSSSQSHPLSSLRFASSAPIPPPPPPPSSVPFRRASSPEMANARSGVAVNDECMLKFGELQSKRLHRFITFKMDDKFKEIVVDQVGDRATSYDDFTNSLPENDCRYAIYDFDFVTAEDVQKSRIFYILWSPSSAKVKSKMLYASSNQKFKSGLNGIQVELQATDASEISLDEIKDRAR

SEQ ID NO: 38880 - protein, 107 aa, Arabidopsis thaliana
  Clone ID: LIB23-023-G2_FLI.pep
SDQGSNSFDCSEFGWSDHGPKTPEISSMLVNNNEASFVEETNAAKKLKPNSDESDDLMAYLDNALWDTPLEVEAMLGADAGAVTQEEENPVELWSLDEINFMLEGDF

SEQ ID NO: 38881 - protein, 179 aa, Zea mays
  Clone ID: 700344504_FLI.pep
REKTSLSSRRPRSPTSRLLPACLPACKKEFVMASKRILKELKDLQKDPPTSCSAGPAGEDMFHWQATIMGPPDSPYAGGVFLVNIHFPPDYPFKPPKVSFKTKVFHPNINSNGSICLDILKEQWSPALTISKVLLSICSLLTDPNPDDPLVPEIAHMYKTDRPKYESTARSWTQKYAMG

SEQ ID NO: 38882 - protein, 267 aa, Zea mays
  Clone ID: 700213782_FLI.pep
EQLFVFAMVMETHVPFFLDGVARKIASAGYGVFALDYPGFGLSEGLHGYIPSFDTLVDDVAEHFSKVKGNPEYRGLPSFLFGQSMGGAVALKVHFKQPNEWNGAILVAPMCKIADDVVPPWPIQQVLIFMAKLLPKEKLVPQKDLAELAFKEKKKQEQCSFNVIAYKDKPRLRTALEMLRTTQEIERRLEEVSLPLIILHGEADMVTDPAVSKALYEKAKSQDKKLCLYKGAYHAILEGEPDQTIFQVLDDIISWLDQHSTKEGISL

SEQ ID NO: 38883 - protein, 411 aa, Zea mays
  Clone ID: 700092132_FLI.pep
WRPNPSGEAASACIYYLHQVLRDPTEVFPAAAAMATLNPFELLGADDNDDPTQLIAAAAAAAQKAEAKKSAVAPAGKAAQPAATTKFPTKPAPPSQTVRDARGGGSSARGGFGRGERGRGRGGRGYGQNRGFSGDNGSDFQGGYGGGGYGDGAVTGGSEGERERDTRPPYRGGGRRGGYRNVEFADDSERPPRRNYERHSGTGHGYEMKRDGAGRGNWGTATDELIAQDAEDSPKMEEAAPVAEKQGEQNDAPAADENKDNKDATANEEEEKEEDKEMTLEEFEKIREEKRKALLALKAEERKVEVDKDLQSLQPLSNKKENDEVFIKLGSDKDKKKENAERDERAKKSVSINEFLKPAEGERYYGGRGRGRGRGDRGGFRGGYGGGYSRGPAAAAPSIEDQAQFPSLGGK

SEQ ID NO: 38884 - protein, 436 aa, Zea mays
  Clone ID: LIB3069-030-G11_FLI.pep
PEAEPANHPARSRKQAAKQCELTVRSVQPTMEAPPVPELMDLDAPPPAAADAAAAAPVPPAVSDKKKEGEGGDTVTGHIISTTIGGKNGEPKRTISYMAERVVGTGSFGIVFQAKCLETGETFAIKKVLQDRRYKNRELQLMRAMEHPNVICLKHCFFSTTSRDELFLNLVMEFVPETLYRVLKHYSNANQRMPLIYVKLYMYQLFRGLAYIHNVPGVCHRDVKPQNVLVDPLTHQVKLCDFGSAKVLVPGEPNISYICSRYYRAPELIFGATEYTTSIDIWSAGCVLAELLLGQPLFPGESAVDQLVEIIKVLGTPTREEIRCMNPNYTEFRFPQIKAHPWHKIFHKRMPPEAIDLASRLLQYSPSLRCSALDACAHPFFDELRAPNARLPNGRPFPPLFNFKHELANASPDLINRLVPEHIRRQNGVNFGHIGS

SEQ ID NO: 38885 - protein, 375 aa, Zea mays
  Clone ID: LIB3245-443-A11_FLI.pep
HLPGIRQAARPALLLPSFSSSSSTTLLCHRLPPILPLVLQLLRVRANHAMAASAGTVYEADAEAVVRRITPALDRARHKGQAGKIAVIGGCREYTGAPYFAAISALKVGADLSHVFCTKDAATVIKSYSPELIVHPILEESYSVRVDERASVSSKILTEVAKWMERFDCIVVGPGLGRDPFLLECVSNIMRHARQANIPTVVDGDGLFLVNNNLNLVEGNPLAILTPNVYEYKRLVQKVLNCDVDEETASEQLIALCQKIGDVTIMQKGKADVISDGKTVTQVSTFGSPRRCGGQGDILSGSVAVFASWARHFVLTNEEPTEKRVNPMTLGCIAASLLLRKAASHAFEKNKRSTVTSDIIEFLGKSLEDICPAEH

SEQ ID NO: 38886 - protein, 460 aa, Zea mays
  Clone ID: 700093091_FLI.pep
LAAIAGAAPPPKLEDFLGGGVASGGPEAVAPAEMYDSDLKFIAAAGFLGGSAASAAASPLSSLDQAGPKLALPAAAAAPAPEQRKAVDSFGQRTSIYRGVTRHRWTGRYEAHLWDNSCRREGQSRKGRQVYLGGYDKEEKAARAYDLAALKYWGSSTTTNFPVAEYEKEVEEMKNMTRQEFVASLRRKSSGFSRGASIYRGVTRHHQHGRWQARIGRVAGNKDLYLGTFSTEEEAAEAYDIAAIKFRGLNAVTNFEISRYNVETIMSSNLPVASMSSSAAAAAGGRSSKALESPPSGSLDGGGGMPVVEGSTAPPLFIPVKYDQQQQEYLSMLALQQHHHQQQAGNLLQGPLVGFGGLYSSGVNLDFANSHGTAAPSSMAHHCYANGTASASHEHQQHQMQQGGENETQPQQSSSSCSSLPFATPVAFNGSYESSITAAGPFGYSYPNVAAFQTPIYGME

SEQ ID NO: 38887 - protein, 158 aa, Arabidopsis thaliana
  Clone ID: LIB25-040-H2_FLI.pep
FFIGFTLSLEQKNMANAEKTSSGSDIDEKKRKRKLSNRESARRSRLKKQKLMEDTIHEISSLERRIKENSERCRAVKQRLDSVETENAGLRSEKIWLSSYVSDLENMIATTSLTLTQSGGGDCVDDQNANAGIAVGDCRRTPWKLSCGSLQPMASFKT

SEQ ID NO: 38888 - protein, 364 aa, Arabidopsis thaliana columbia
  Clone ID: LIB3176-033-A2_FLI.pep
RKMASKLCDSCKSATAALYCRPDAAFLCLSCDSKVHAANKLASRHARVWMCEVCEQAPAHVTCKADAAALCVTCDRDIHSANPLARRHERVPVTPFYDSVSSDGSVKHTAVNFLDDCYFSDIDGNGSREEEEEEAASWLLLPNPKTTTTATAGIVAVTSAEEVPGDSPEMNTGQQYLFSDPDPYLDLDYGNVDPKVESLEQNSSGTDGVVPVENRTVRIPTVNENCFEMDFTGGSKGFTYGGGYNCISHSVSSSSMEVGVVPDGGSVADVSYPYGGPATSGADPGTQRAVPLTSAEREARVMRYREKRKNRKFEKTIRYASRKAYAEMRPRIKGRFAKRTDTNESNDVVGHGGIFSGFGLVPTF

SEQ ID NO: 38889 - protein, 150 aa, Arabidopsis thaliana columbia
  Clone ID: LIB3177-060-E1_FLI.pep
RVKDNVCGGDSRLIIRIPKQFLSDHNKMINKKKKKKAKITSSSSSSGIDLEVNGNNVDSYSSEQYPLRKCMHCEVTKTPQWRLGPMGPKTLCNACGVRYKSGRLFPEYRPAASPTFTPALHSNSHKKVAEMRNKRCSDGSYITEEMICKG

SEQ ID NO: 38890 - protein, 746 aa, Zea mays
  Clone ID: 700093672_FLI.pep
LIIQRTHYTTEQIKPPMSSLLLRVLLIQLAAVECLSAAIPGCPTQCGGVEIPYPFGVGTNCSRKGFRIKCINGSAGEEIPVLLPTTRYQNIRVLNLSVSPLPEARVLLPVAWQCFNATGGVTGIYSGDVDFNPEGVYRISNTQNELFVLGCDTYAFTKGVRVHNVNARFPYRYFTGCITVSVDEKDPRDGACAGLGCCRVDIPPGITDTSMTFSSTWTRANQTFCPCDYAFIVEKGNYTFKASDLVSHTPDNRLPLDWWTMPLRLDWAIRDNNGDSMTSISCAQAPNEPEYGCRSKHSECTNSTNGPGYFCKCAHGYDGNPYVQSDGECTNINECQDPKSHNCSSGSKCIDTDGGYYCQCNFFRRGQQCDPLIPMAAVALLTTFAAVVLGCVAIVLLQTLNNRKRFNRNGGKLLNAQGITTYTKRELKKITNGYSKRLGGGHFGNVYEGTIVDGRKVAVKCPLRTRVSSHRCHWKNLIRPRRVPLPQQRVEEDGSFMNEIRFQFEVSRHKNLVQLLGCCLETDIPILVFEFVANGSLEDILHSAKKPCTLSLPERLDIAIGSAEAIAYMHSLDNQKRVHGDIKPSNILLDDDLNPKVSDFGSSKLLAIHSYYVRAVAADIGYMDPLYMKTEHFTLECDVYSFGVVLLELITRRRASWYEQDQQGNKILPIEFVKCFKDHGSGCAMYDSRLDFSGEDTQSRCNKRCLDMIGMLAVRCLKEDKRERPTMAEVVEELKRVKVLLLGTHI

SEQ ID NO: 38891 - protein, 139 aa, Arabidopsis thaliana
  Clone ID: LIB24-121-G6_FLI.pep
IFIRNNITTQTRIQIDLKFQNEITKANPRQHSKTLKSSTTESIESSSLSLKSINNIHSSHRLPPSVLSVSNGVTDNIFQKDLENATCLLVDQTTNTFNTTSTSQSPNRRFSDSLDVVSQNLPMTFGSTFAQTFASLSTT

SEQ ID NO: 38892 - protein, 353 aa, Glycine max
  Clone ID: 700736030_FLI.pep
QKVCGVLVHASLYGATTAYVITSATSIRAILKSNCYHKEGHQAPCKYGDAVYMMLFGLVQIIMSFIPDLHNMAWVSIVAAIMSFTYSSIGLGLGITTVIENGRIMGSLTGVPASNIADKLWLVFQGIGDIAFAYPYTVILLEIQDTLESPPPENKTMKKASMIAILITTFFYLCCGCFGYAAFGNQTPGNLLTGFGFYEPYWLIDFANACIVLHLVGGYQIYSQPIYGAVDRWCSKRYPNSGFVNNFYQLKLPRLPAFQLNMFRICFRTAYVVSTTGLAILFPYFNQVIGVLGALGFWPLAIYFPVEMYFVQRKVEAWSRKWIVLRTFSFICFLVSLLGLIGSLEGIISEKLS

SEQ ID NO: 38893 - protein, 277 aa, Glycine max
  Clone ID: 700846625_FLI.pep
FVLSHLPDFNSITGVSLAAAVMSLSYSTIAWVASVHKGVQENVQYGYKAKSTSGTVFNFFNALGTVAFAYAGHNVVLEIQATIPSTPEKPSKVPMWRGVVVAYIVVAICYFPVALIGYWMFGNEVDSDILISLEKPTWLIAMANLFVVIHVIGSYQIYAMSVFDMIETVMVKKLNFEPSRMLRFVVRNVYVAFTMFIAITFPFFDGLLGFFGGFAFAPTTYFLPCIMWLAIHKPKRYSLSWFINWICIVLGLCLMILSPIGGLRTIIIKAKTYEFYS

SEQ ID NO: 38894 - protein, 439 aa, Glycine max
  Clone ID: LIB3139-044-F11_FLI.pep
IKMVSDSCPPLKEPESDKKWEEKGPPRNAKWWYSTFHAVTAMIGAGVLSLPYAMAYLGWVPGTLILLMSWCLTLNSMWQMIQLHECVPGTRFDRYIDLGRHAFGPKLGPWIVLPQQLIVQVGCDIVYMVTGGKCLKKFMEIACTNCTQIKQSYWILIFGGIHFFLSQLPNFNSVAGVSLAAAVMSLSYSTISWVACLARGRVENVSYAYKKTTSTDLMFRIFNALGQISFAFAGHAVALEIQATIPSTPEKPSKIPMWKGAIGAYVINAICYFPVALVGYWAFGRDVEDNVLMEFERPAWLIASANLMVFIHVVGSYQVYAMPVFDLIESMMVKRFKFPPGVALRLVARSAYVAFTLFVGVTFPFFGDLLGFFGGFGFAPTSYFLPSIMWLIIKKPKRFSTNWFINWISIYIGVCIMLASTIGGLRNIATDASTYKFYT

SEQ ID NO: 38895 - protein, 330 aa, Glycine max
  Clone ID: JC-GMFL02220127B05_FLI.pep
ATSLSAILRSNCYHKKGHEAPCKYGGNLYMALFGLVQIVMSFIPDLHNMAWVSVVAALMSFTYSFIGLGLGIATVIKNGRIMGSLTGIPTDKIADKFWLVFQALGDIAFAYPYSILLLEIQDTLESPPPENQTMKKASMVAIFITTFFYLCCGCFGYAAFGNDTPGNLLTGFGFFEPFWLIDLANACIILHLVGGYQIYSQPIYSTVDRWASRKFPNSGFVNNFYRVKLPLLPGFQLNLFRFCFRTTYVISTIGLAIFFPYFNQILGVLGAINFWPLAIYFPVEMYFVQQKIAAWSSKWIVLRTFSFACFLVTVMGLVGSLEGIVSAKLK

SEQ ID NO: 38896 - protein, 694 aa, Glycine max
  Clone ID: LIB3242-336-C9_FLI.pep
ISFSTTQHNTTLSSLLLQPNYNLFHSLLLYKDLIWDMCSDSKSKLLSSPTLVMEDGLYNNSVLLELSASDDFEAFKREVDEKGLDVNEAGLWYGRRIGSKKMGSETRTPLMIASLFGSAKVLNCILLEKKGGGVDVNRVCGSDRATALHCAVAGGSESSLEIVKLLLDAGADAECLDASGNKPVNLIAPAFDSLSKSRRKAMEMFLRGGGERDDELMSQEIQERKEAISDNKKEYPVDISLPDINNGVYGTDDFRMYNFKVKPCSRAYSHDWTECPFVHPGENARRRDPRKYPYSCVPCPEFRKGTCQKGDSCEYAHGVFESWLHPAQYRTRLCKDETGCARKVCFFAHKPEELRPVYASTGSAMPSPKSYSASGLDMTAMSPLALSSTSLPMPTVSTPPMSPLAASSPKSGSLWQNKINLTPPSLQLPGSRLKAALSARDLEMEMELLGLESPARHHHHHQQQQQQQLIEEIARISSPSFRSKEFNRIGDLNPTNLDDLLLASADPSVLSQLQSGLQMRQSMNNHLRASYPSNVPSSPVRKPSSFGFDSSAAVATAMMNSRSAAFAKRSQSFIDRGAAATHHHLGGMSSPSNPSCRVSSTLSGWSSPTGKLDWGVNGDELNKLRKSASFGFRNSGVTASSSSSPIAQPEFGTEQDVSWVHSLVKDVPSERSEKQQYDHLSKEMLLSPWVEATI

SEQ ID NO: 38897 - protein, 618 aa, Zea mays
  Clone ID: LIB3279-221-H9_FLI.pep
PARGRALSFSCAVHNARHAGLVCIAPAKKDAAVSGLSGREAAAGGRHAERQRVLRVGEPQARQAGVPVPGEPLPDAAAGAGDGRHGAGAGAPRPRRAALAVALAGAGPGPHPLLGVPGRLRRHRVRDVAAQAGVPGGLRLLQAPRQLPRALRHLHGAHAPHQRRRQERALPDQDPGALGARRGHVPPARQPLHPAQPQHGGLARRGAARHLLRHRRPRPPHGAQAQGHRHPRRQLQPLLTDALALRHDHQQVQAPEQHPQLQPVGDGMQRRAHLHRPRAGHAPGSPELERAGGFDRDHHPQLLPGEPARHASSQLPVPDGRGCDPAVEPAARGPARQVPAGARGEDAQGLGRPRVPVRVRGGGRAGLLGHLAVQGADGHRRRRAQVQHHDDRAAGAAHVGAAALLLPPGGAQAREQGVEALHPGLQAGVRALLHPRGRARRHRRAAEEPAAVAAPRGGVPHDAAPLRQHVQQLPLVRARLHRGQGPHAPRRPRLADRLRQRVQVQQRRLEVPPQHQDPHQRALGRLHPPLPRRRPGGRQALTYGLRLRRQRASSAGTTAAAAAVLLCTCTSSLFSSLPISFAINIKRVKKKERSIYTLTVGKYCHPSGQGLGDWNLLE

SEQ ID NO: 38898 - protein, 533 aa, Zea mays
  Clone ID: 700465186_FLI.pep
AHGISVQSFNGDLLYEPWDVYDENGQAFTTFNKYWEKCMNLPIEISQYLAPTRLVAAPGLANVRCCSIDDLGLESSKDVESSNALLSRAWSPGWRNAENMLEEFVSYGLLEYSEHGMKVGGSTTSLLSPYLHFGELSVRMIYQLVKMRQVKWQNEGKSEAEESVRLFLRSIGFREYSRYLCFNYPFTHERSFLGNLKHYPWLLDEGRFKSWRQGMTGYPLVDAGMRELWATGWTHNRIRVIVSSFAVKFLQIPWIWGMKYFWDVLLDADLESDILGWQYISGSLPDGHELSRLDNPEVQGQKYDPDGEYVRTWIPELARMPTEWIHSPWAAPNSILQVAGVELGFNYPKPIVELHMARECLDDAISTMWQLDTAAKLAELDGEVVDDNLNNIRNFDIPKVVLNKKLSPSTSSMEHRVLSTNGKDEKSQPTEVKALYKQIIRDDMMNDSNMDDTCSTANLKVTRKRSSNDSAFNVPSCSSSLVMESRIHHNEPSSVLYSGYFQKTADRDGTSKVEDNDSEDSGTSISRPSKKAA

SEQ ID NO: 38899 - protein, 659 aa, Zea mays
  Clone ID: LIB3136-056-C4_FLI.pep
DWLLSMAGPEKTVVWFRRDLRIEDNPALAAAAKGGSVLPIFIWCPSDYGQYYPGRCSRWWLKQSLTHLGKSLELLGCPLVLIRAEDSTLAALLECVRSISATRVVYNRLYDPISLVLDNKIKNELPAHGISVQSFNGDLLYEPWDVYDENGQAFTTFNKYWEKCMNLPIEISQYLAPTRLVAAPGLANVRCCSIDDLGLESSKDVESSNALLSRAWSPGWRNAENMLEEFVSYGLLEYSEHGMKVGGSTTSLLSPYLHFGELSVRMIYQLVKMRQVKWQNEGKSEAEESVRLFLRSIGFREYSRYLCFNYPFTHERSFLGNLKHYPWLLDEGRFKSWRQGMTGYPLVDAGMRELWATGWTHNRIRVIVSSFAVKFLQIPWIWGMKYFWDVLLDADLESDILGWQYISGSLPDGHELSRLDNPEVQGQKYDPDGEYVRTWIPELARMPTEWIHSPWAAPNSILQVAGVELGFNYPKPIVELHMARECLDDAISTMWQLDTAAKLAELDGEVVDDNLNNIRNFDIPKVVLNKKLSPSTSSMEHRVLSTNGKDEKSQPTEVKALYKQIIRDDMMNDSNMDDTCSTANLKVTRKRSSNDSAFNVPSCSSSLVMESRIHHNEPSSVLYSGYFQKTADRDGTSKVEDNDSEDSGTSISRPSKKAA

SEQ ID NO: 38900 - protein, 365 aa, Zea mays
  Clone ID: LIB3245-350-F10_FLI.pep
FKIWRQGRTGYPLVDAGMRELWATGWLHDRIRVVVASFFVKVLQLPWRWGMKYFWDTLLDADLESDALGWQYITGSLPDGRELDRIDNPQFEGYKFDPHGEYVRRWIPELARLPTEWIHHPWDAPVSVLQAAGIELGSNYPLPIVELDAAKGRLQAALSEMWQLEAASRATMNNGTEEGLGDSSEVLFPQELQMEVDRQPAPAEAAANVHVPVPMPARRRGDQMVPTMTTSSLNRAGTEVSADLVVANSEEEDTRAQVPFHAHLHPRAEAPPAARRTNNGARQHDVFQQPRNHRREALLAPSASEASSSWTGREGAVVPVWSPPAASGHSDAFAADEADVSSRSYLGRHPQSHRLMNWSQLSQSS

SEQ ID NO: 38901 - protein, 274 aa, Zea mays
  Clone ID: LIB3245-514-F6_FLI.pep
YFWDVLLDADLESDILGWQYISGSLPDGHELSRLDNPEVQCQKYDPDGEYVRTWIPELARMPTEWIHSPWAAPNSILQVAGVELGFNYPKPIVELHMARECLDDAISTMWQLDTAAKLAELDGEVVDDNLNNIRNFDIPKVVLNKKLSPSTSSMEHRVLSTNGKDEKSQPTEVKALYKQIIRDDMMNDSNMDDTCSTANLKVTRKRSSSDSAFNVPSCSSSLVMESRIHHNEPSSVLYSGYFQKTADRDGTSKVEDNDSEDSGTSISRPSKKAA

SEQ ID NO: 38902 - protein, 417 aa, Zea mays
  Clone ID: 700097114_FLI.pep
EEDKRRHAHADTMAICSAHTTTSLRSPCTTVSNAGLRQKQVIFVTSNRRSGGGRRHGGARSFQVSCSVDKPVVIGLAADSGCGKSTFMRRLTSVFGGAAEPPKGGNPDSNTLISDTTTVICLDDYHSLDRNGRKEKGVTALDPRANNFDLMYEQVKAIKEGQAVEKPIYNHVTGLLDPPELIAPPKIFVIEGLHPMFDERVRDLLDFSIYLDISDEVKFAWKIQRDMAERGHSLESIKASIEARKPDFDAFIDPQKQYADAVIEVLPTQLIPDDNEGKVLRVKLIMKEGVKNFNPVYLFDEGSTISWVPCGRKLTCSYPGIKFSYGPDTYFGNEVSVLEMDGQFDRLDELIYVESHLSNLSTKFYGEVTQQMLKHADFPGSNNGTGLFQTIIGLKIRDLYEQIVAERAGVPAEAAKV

SEQ ID NO: 38903 - protein, 336 aa, Glycine max
  Clone ID: LIB3138-047-H4_FLI.pep
IGRTLKPHEYIGMVRREVLDAYLRDRAKENGANVINGLFLKMDIPKDNNSPYVLHYSSYDGKTNGAGEKRTLEVDAVIGADGANSRVAKSIDAGDYEYAIAFQERVRIPDDKMVYYENLAEMYVGDDVSPDFYGWVFPKCDHVAVGTGTVTHKGDIKKFQLATRKRAEDKILGGKIIRVEAHPIPEHPRPRRLSGRVALVGDAAGYVTKCSGEGIYFAAKSGRMCAEAIVEGSENGKRMVEEGDLRKYLEKWDKTYWPTYKVLDILQKVFYRSNPAREAFVEMCADEYVQKMTFDSYLYKTVVPGNPLEDLKLAINTIGSLVRANAIRREMKKLNV

SEQ ID NO: 38904 - protein, 264 aa, Glycine max
  Clone ID: LIB3138-059-C12_FLI.pep
EVDAVIGADGANSRVAKSIDAGDYEYAIAFQERVKIPDDKMVYYENLAEMYVGDDVSPDFYGWVFPKCDHVAVGTGTVTHKGDIKKFQLATRKRAEDKILGGKIIRVEAHPIPEHPRPRRLLGRVALVGDAAGYVTKCSGEGIYFAAKSGRMCAEAIVEGSENGKRMVEEGDLRKYLEKWDKTYWPTYKVLDILQKVFYRSNPAREAFVEMCADEYVQKMTFDSYLYKTVVPGNPLEDLKLAINTIGSLVRANAIRREMNKLNV

SEQ ID NO: 38905 - protein, 427 aa, Glycine max
  Clone ID: LIB4200-006-E8_FLI.pep
LCLITALVSLSLSHYLTAIHSSERKKRRKHTQSLKWLCAPSLRCNEETFFFLLRRRKMALGDDAQHHSHSPSFLDSLLCEERETFEEDFDANGDECETENNDPSVIKSQPLPLVLYDNDLFWEDDELVSLIAKEGETHLRSFSDGALEGPRVEAVNWVSKVSGHYGFSALTTVLAVNYFDRFITSLKFQRDKPWMTQLAAVACLSLAAKTEETHVPLLLDLQVEESRFVFEAKTIQRMELLVLSTLKWRMLPVTPISFFEHIVRRLGLKSRLHWEFLWRCERVLLNIIADSRVMSYLPSTLAAATMIHVIKEIESFNATEYIDQLLGLLKISEEQVNKCYRIIQKLLGCHEGIYGLPQKCKRLSELGSPSAVTDASFSCDSSNDSWAVSSSVSLSLEPQLKRRRSQDQQMRLPSVSRVSIDVLNSPH

SEQ ID NO: 38906 - protein, 242 aa, Zea mays
  Clone ID: 700097342_FLI.pep
GFAMAEKGCLKRLQKEYHALCKEPPPQIVARPLPNDILEWHYVLEGSKGTPFEGGYYYGKLKFPPDYPFKPPSISMTTPSGRFAPHKRICLSMSDFHPESWNPMWSVASILTGLLSFMMDDALTTGSIKTSDAEKRRLAKASLAYNCESKNCPHFRKLFPEYVEKYNQQQQLENTAAEPVPQENPAPVPSLAVQQAPVVANRAQPLAEVRRDKNQKKAVPFWMVLVMFSVFGAVMALPLMQL

SEQ ID NO: 38907 - protein, 638 aa, Zea mays
  Clone ID: LIB3061-045-B12_FLI.pep
RKCISLNSVGFDVKREILVPSKMSSSERRYLRKRFRAELDSVRDLLKKPEFAAPVPLNRAPALSSSAAPRAKKPQKSQRGGTNVIRGAKGRFLPTKPRPETSTVLSEAAAFKQCEAILKKLMTQKYSHIFNVPVDIVKLQIPDYFDIVKTPMDLGTVKKKLESGSYTSPSDFAADVRLTFNNAMAYNPRGHAVHDMAIQLNKMFESRWRPIEKKLASAATEKHVEVDRADSKRRKTPPVDRSDVSMECARQTEPETPKMTAEEREAFGNCLASISDELPPHIFELLQQCIDSNADLSGDGEIEIDIHAVSDDLLFELKKHVDKYLQEKEQSQQVKSEPSENEAVNVSGLSHSSTNPCKGGEPIEEDVDICGNASPIMLDKDAQIRNSKCGSPSSSSSDSESSSSDSDSGSDSESESEKVGSPGKLAKGTKKPDQLVEQEKSDVISPADANRPAAIVGLHGEDSESKPAPGGENSEPDTQVSPDRLLRAALLRSRYADVIVKARGILSQGGDKQEELEKLQKEEKERLLAEGTAAMEACRAEAEAEKKRKRNFEREKARQALQEMERTVEINDNLHLKDLELLGTATTEHIVSSVDETSPERSHDGMAGYHPGAVNPLEQLGLFIKVDDEEDDEQCSLH

SEQ ID NO: 38908 - protein, 213 aa, Zea mays
  Clone ID: LIB3060-040-E8_FLI.pep
PSSHIGSMFFGCPKISSNEQTTLRNLARRQEFQNGHAKRSNSVLVVLDVEALGVGGSITLVGAEGSLRVGLAPGEEGSSSLLQVLHLASPGLEGARLEGTAEGERQGPRLLGAELVHGIEVAGGLLLALSTREEDNSRHSSRDGPLEGTDGVLSNHLRGHLLGVGAWSHHVGLQEGTLQEDMVLVERLVAGSKDGLSDVSAAINVMRAINKDL

SEQ ID NO: 38909 - protein, 158 aa, Zea mays
  Clone ID: 700438691_FLI.pep
ANQTTMLKGETEEIGKLIEKTMMQKYGVENVNDHFMAFNTICDATQERQDAMYQLVKEKVDLILVVGGWNSSNTSHLQEIGELSGIPSYWIDSEQRIGPGNRISYKLNHGELVEKNNWLPEGPITIGVTSGASTPDKVVEDALQKVFEIKRQEILQVA

SEQ ID NO: 38910 - protein, 215 aa, Zea mays
  Clone ID: 700801921_FLI.pep
MPIDALLDLLKSKYIQLHDFGSEILPRAVLDHSVQACIFTGYWEDVGTIKSFFDANLALTEQPSKFDFYDPKTPFFTAPRCLPPTQLDKCKMKDAFISDGCLLRECNIEHSVIGVCSRVSSGCELKDSVMMGADTYETEEEASKLLLAGKVPVGIGRNTKIRNCIIDMNARIGKNVVITNSKGIQEADHPEEGYYIRSGIVVILKNATINDGSVI

SEQ ID NO: 38911 - protein, 568 aa, Zea mays
  Clone ID: 700100886_FLI.pep
PHHSLATRAPGLLPATLTTMSSPTSYLLLNPSKPSSFRRLSAPRLSRFHVSCDAPRGGGRREVIPAGASKAKKQIVFFDAAPPVSQEGGGAVKKAGSEKLTQVGSGNAALALLRRATKMTLSVLSNLPLAISEMFAIAALMALGTVIDQGEAPSYYFEKFPEDNPVFGFITWRWILTPGFDHMFSSPVFLGLLALLATSLMACTYTTQLPMVKVARRWSFTHSGERIRKQEFADSLPQASIQDLGVILMGAGYEVFTKGPSLYAFKGLAGRYAPIGVHLAMLFIMAGATLSATGSFKGSVDVPQGLNFVIGDVMKPRGVLSVAPDVFNTEVHVNRFYMEYYDSGEVSQFYSDLSLFNLDGKEVMRKTIKVNDPLRYGGVTIYQTDWGFSALQVKKNGEGPFNLAMAPLKLNGDKKLFGTFLPLEDSDSSNPNVKGISMLARDLQSIVLYDQDGKFVGVRRPSSKLPIEINGNEILIEDAIGSTGLDLKTDPGVPIVYAGFGALMLTTCISYLSHSQIWALQDGSTVVVGGKTNRAKLEFSEEMNRLLDKVPELISADENLLDTKSTAT

SEQ ID NO: 38912 - protein, 192 aa, Zea mays
  Clone ID: LIB189-008-D1_FLI.pep
CNPILFHRTTEANCRSSNHAGTTTADRGLAGDLNGLHFRLLGVLLRHSDCKHAVLHGGRDLLRLGVLGQSEPAQEPPAAPLHAVPGVRLLLLLLVALAADLKDVAVLDLHLDLLLLQPRYVGLEHVRLWSLLPVDPRASEGRGLRAGPRERGEETAAVAGAEGEALKGVPEVEGEGIEHVAAADQRHGQVRF

SEQ ID NO: 38913 - protein, 256 aa, Zea mays
  Clone ID: 700466968_FLI.pep
RHLKIVDLSADFRLRDINEYAEWYGHSHRAPELQGEAVYGLTELKRDDIRNARLVANPGCYPTSIQLPLVPLVKAKLIKLTNIIIDAKSGVSGAGRGAKEANLYTEIAEGIHAYGITSHRHVPEIEQGLTDAAESKVTISFTPHLMCMKRGMQSTVYVELASGVTPRDLYEHLKSTYENEEFVKLLHGSNVPCTSHVVGSNYCFMNVYEDRIPGRAIIISVIDNLVKGASGQALQNLNLMMGLPENMGLQYQPLFP

SEQ ID NO: 38914 - protein, 172 aa, Zea mays
  Clone ID: 701166880_FLI.pep
DRDAYSSRYISEYGGTYNMNPKISDFGIARGNQQEANTNRVAGTYGYMFPEYAINGPFSVMYDTYGLGVIVLEIICGLQITSTHSTSFPGLLAYTWSLWNGGRAMDLVDSYLLESCSTSEALRCIHLGLLSVQDSPHSRPSLSLEILLETGTSRPSPWPNFVLDGMRSATGH

SEQ ID NO: 38915 - protein, 316 aa, Zea mays
  Clone ID: 701168182_FLI.pep
GFGAVYKGILRDGQEIAVKRLSQSSGQGIQELKNELVLVAKLQQKNLVRLVGVCLQEHEKLLVYEYMPNRSIDTILFDPERNKELDWGTRFKIINGIARGLQYLHEDSQLKIIHRDLKASNVLLDSDYTPKISDFGLARLFGGDQTREITSRVVGTYGYMAPEYAMRGHYSIKSDVFSFGVLVLEILTGRRSSGSFNIDQSVDLLSLVWEHWTMGTIAEVMDPSLRGKAPAQQMLKCVHIALLCVQDSPVDRPMMSTVNVMLSSSTSSLQAPLKPVFFIPKSGYYSTVYSESYPTASQTTGAVSPNEVSITELEPR

SEQ ID NO: 38916 - protein, 192 aa, Glycine max
  Clone ID: JC-GMFL02220065G11_FLI.pep
APAPTPLDNTTNEDSQFPVENGKRHLSEEEMKIKTRREIAALGVQLGKMNIAAWASKDEQEKNKSSPRDMSVQEQERIEFEKRAALWEEAEKSKHTARFKREEIKIQAWESQQKAKLEAEMRRIEAKVEQMRAQTHAKMVKKIAMARQRSEEKRAAAEARKNREAERTVAQTEYIRQTGRLPSSNYICCGWL

SEQ ID NO: 38917 - protein, 474 aa, Glycine max
  Clone ID: JC-GMST02400061G07_FLI.pep
DDSSTLKKPRVVWSVELHQQFMAVVNQLGIDKAVPKKILELMNVPGLTRENVASHLQKYRLYLRRLSGVSQQQGNLSNSFMSSQEATFGGTSINGIDLQTLSAAGQFPSQSLAKFQAAGLGRTTAKAGMPMSLSDQKNLFSFENPRLRFGEGSLQHLSNSKPINLLHGILTNMEPKQLANLHQSTQPLGSLNMRVNSPATQNKPLLMQMTQSQPRGQLLSENASSHVTRYPSSLVQPTVPNGISSGVLGNAIAGTSNITTTYNPVQQNSSLLSFPMNQTNEMSASNFHLRSTPGITSIPNKGMFHEEGTSGVKGSGGFVQGYDMFNDLHHQKSHDWDLTNTGMTYDASQHANPLQGNIDVSPSVLVHQSFPSMQQTVQNRDTTSIGKAMFSTGEGMHQSSLQNIGQHHNNLLLDNSVRVKAERIPDPSCQINNLFSDQYGQEDLVSAFLKQQEGVGTAENEFDFDGYSLDNIPV

SEQ ID NO: 38918 - protein, 325 aa, Glycine max
  Clone ID: JC-GMST02400069B11_FLI.pep
IVLFCAIFLNIPELFSLLLLNNFFLSFFLLVLQQQNQHQANGSNSPHELLPPLPQPPQAPHVGVESEQIRSGLMADRAKIPAPEGVLKCPRCESTNTKFCYFNNYSLSQPRHFCKTCRRYWTRGGALRNVPVGGGCRRNKKNKRSRSKSPVSTEKPSLPNNTSAIPELIGRFPQPFMASLQSMNRYGVGINTGVNLREIQAQNASQMEFQIGGLGNGSSVATAGGGGGGGVEQWRFQQFPFLNGFESTSAASNSYPFQSEIVEGLVGDINATSSRITQLPARVKMEYNGGLNLSRSPLNVSENSNHFYSWTDLSGLASSSASHLL

SEQ ID NO: 38919 - protein, 284 aa, Zea mays
  Clone ID: 700102279_FLI.pep
EPTPMEDHDVKESDDGGEGENLPPGSYVVLQLEKEEILAPHTHFCLICGKGFKRDANLRMHMRGHGDEYKTPAALAKPTKDSGADHAPVTRYSCPFVGCKRNKEHKKFQPLKTILCVKNHYKRSHCDKSYTCSRCNTKKFSVIADLKTHEKHCGRDKWLCSCGTTFSRKDKLFGHVALFQGHTPALPMEDVKVSEASEQPQDSEPMNEMARSNVYSFPCSSSDGISNLDMKMADDVRGYFSPLNFDPCFGALDDFTRPGFDISENPFSFLPSGSCSYGQQNGDS

SEQ ID NO: 38920 - protein, 258 aa, Glycine max
  Clone ID: JC-GMLE01810090D02_FLI.pep
IEKKVTLAVKNVSAAAEEEEHMTLISDVENLADAEIPDTAHQISTDSWFQVGFVLTTGINSAYVLGYSGTIMVPLGWAGGVVGLILATAISLYANALIARLHEYGGTRHIRYRDLAGFIYGRKAYSLTWALQYVNLFMINAGYIILAGSALKAAYVLFREDDGMKLPYCIAIAGFVCAMFAICIPHLSALGIWLGFSTVFSLVYIVIAFVLSINDGNRSFCDVSVTSQISIQYASSNQLALLIHFFSCKVNNFHLHVI

SEQ ID NO: 38921 - protein, 505 aa, Zea mays
  Clone ID: UC-ZMFLB73069A06_FLI.pep
SSGSSSKATSTFGLLRTEAVFQPPPPATTMPFHDGADIKPAHLGVPSASLLLNQHQALSAASFMPLPSFPDHQHQPHLPPPPKRHHSMPENLFLLQNQLQPPPPPPQGLRFPPLHTTAPFQLQPSLQPPRGSMKTTPAAQQHQQLLDELAAAAKAAEVGNSIGGREILARLNQQLPPIGKPFLRSASYLKEALLLALTDGHQGSTHLSSPLDVALKLGAYKSFSDLSPVLQFANFTATQALLDEIASTTSSCIHIIDFDLGVGGQWASFLQEFAHRRGTGNAPLPMLKLTAFVSSASHHPLELHLTRENLTQFAVDLGIPFEFTDINLDAFDPAEFIAPSPNEVVAVCIPVGCSARTPPLPMLLQLVKQLAPKIAVAIDHGSDRGDLPFSQHFMNCFQSCMFLLDSLDAAGTNADAASKIERFLIQPRVEDAVLGRRKAENAMAWRAVFTSAGFAPVPLSNLAEAQADCLLKRVQVRGFHVEKCGMGLALYWQSGELVSVSAWRC

SEQ ID NO: 38922 - protein, 122 aa, Zea mays
  Clone ID: UC-ZMFLB73147H04_FLI.pep
GVDFKVKMVTIGGKKLKLAIWDTAGQERFRTLTSSYYRGAQGVIMVYDVTRRETFTNLSDIWAKEIDLYSTNQDCIKMLVGNKVDKVINSKLCLHLLSLVSDRAAPVVFYRPFHFGRKVREL

SEQ ID NO: 38923 - protein, 185 aa, Zea mays
  Clone ID: UC-ZMFLB73117F06_FLI.pep
NENKHAHHILERRAEQVAVSAADIAQKPGPPPQVPTLKATPCLCRNVLFSPCTGCCSTEQSRVPAHVWSHVAPPTGAWLSASEEEDVTQLSAERRRVGEQQQEEDRDPVSTAEASSASAPAAEPRPWSARTSCARRSTDCRYLPCASILSCRCRCTCHHVWMCVVMNGRARLDQQPSTNRRHTIG

SEQ ID NO: 38924 - protein, 178 aa, Zea mays
  Clone ID: UC-ZMFLB73077B05_FLI.pep
NTRTRAASRPILTGQLTETLNSIRVNCCATPPSVGSHLHISGSLSENTEEEDGRWPVRLSASALSTRAARRFSLASACARFSLAAACAEASLLAVFSCARSFILSALASATFICSSAFCRRRFSQACIFISSRRYLAMCLARSAASHVAAGDTAVVVGAPGAVSSRSAAARPGGDPPS

SEQ ID NO: 38925 - protein, 599 aa, Zea mays
  Clone ID: UC-ZMFLB73046H12_FLI.pep
SNTSPDRATPAMAEHSDAAAAVTARLLELAADNDSTALGDLLAVHPSLADEPAPWYSPARGAEPMTPLMVAAAYGSVACIDVLLSPLHLADPNRASPSSLSTALHLAAAGGASAAPAAVSRLLAAGADPTLLDHLHRRPSDLVALPPNSLPLKNHLLSLLGGRKEWPPDPSLPDIKNGAYASDDFRMYSFKVRACSRAYSHDWTECPFVHPGENARRRDPRKYHYSCVPCPEFKKGAGCRRGDMCEYAHGVFESWLHPAQYRTRLCKDGLACARRVCFFAHTPEELRPLYVSSAGSRSAMGMGLPSPGASFTPPLSPSGGGSGVAGAWPQPNVPALCLPGSAGNLQLSRLRTLMSARSMAVDELLASADYDGLVGSPASLRSARGKTLVPSNLDDLFSAEMAGAAASHSPRYADQGGSAFSPTRKAAMLNQFQQQQSLLSPRATVVPEPVSPMSSRLLSALAQREKMQQQTLRSMSSRDLGSGASVLVGSPVTSSWSKWGIPPSTPDWGADAEELGRLKRSSSFELRSGANGDEPDLSWVNTLVKEPTPEKPSINGTAAKESIASLSQAVSHEDIGGEDDTAGVIGGWLEQLQLDEMVV

SEQ ID NO: 38926 - protein, 126 aa, Zea mays
  Clone ID: UC-ZMFLB73134F02_FLI.pep
EPTHARLQHRTVLHASSPSGKCRLLLLVHDRDAAPRSQLVFFSIGGLLPSRPKALLCLLTTTPSPLVPVPVPCKVFWKSTEYTTLHTPHWYNKYICTCLACSAAHAGALLQLQNTIAAAIPRDKIL

SEQ ID NO: 38927 - protein, 331 aa, Zea mays
  Clone ID: UC-ZMFLMO17336E02_FLI.pep
LSGLSLSRVAKTNSLCSYLHLLYWTLIGHCQCSKSFPLSLYLTLLDRFTPASRPALDSSRASAGGLLLRLGRRVRKPPARHGGRRRAAPSPGGVRAREEVDEPAPAAAARALVALAVAAVAGPPRNGGGGGGALLPEHAAQHPALGRRPRHGVGVGIGVGVAAAARREPGARQPVLVHHPLRLAPRRRLPAVEHQRALHAHQHGLALALALHAPVDRHGHRLLLARRLPVPGPRGAVRAPALHVLGLLAREEVALLLAEPCHHHGTTAPQSSNKTNQPQSEMEMGWIPRVPTHSLTHSPGGSRSDGSCARMRTSGMSTAAGSGEASARRRR

SEQ ID NO: 38928 - protein, 118 aa, Zea mays
  Clone ID: UC-ZMFLMO17127B07_FLI.pep
CLLAYMSYYILNIDKLQPNGYKSPILRLDAGIEAQILELELVKPNFSVWMLTEFGTGNPSQFPWYSTTPAPPPLQYQAPHLGIAQNSITPASKQQHWYCRSIPFPSDLVFLDQFNSTT

SEQ ID NO: 38929 - protein, 197 aa, Glycine max
  Clone ID: UC-GMROMINSOY127C11_FLI.pep
VGYLLGLGDRHPSNLMLHRFSGKILHIDFGDCFEASMNREKFPEKAFVHDPLINWRLFNFNEVPQMSMLTSNHVPPVVNSEESAPNRELPHPQRGARERELLQAVNQLGDANEVLNERAVVVMARMSNKLTGRDFSTCSSVSNNSLQHAVDHSSLISGDTREVDHALSVKLQVQKLIIQASSHENLCQNYVGWCPFW

SEQ ID NO: 38930 - protein, 299 aa, Zea mays
  Clone ID: 700102627_FLI.pep
EARASLVELFSSTTPPSPPVVVPARVNLGHLVYPVRVLGEGAAGVPEGAAAAGADADEGDEHDDVEHGDLVPVLAHLLHDAGLARVALVAEDARGVVPAVAVLVLRPDGHAPAVLARRRRLAAAGLYRREVVLEVVHGSPVVDLGARPGPDDAGECGAPVPGVPHVPLQPRGVVGDAVLPVRPTVHLLAAAACGDGEPEHGEAEEEGDEEHHGGEIQPQRPGHVEAGADEAREGHEQHGEADGEERCLKDGGARGRCRALGQPEARADDRDRGQQRRQVQVADRHVAHAVRVHPGRTLL

SEQ ID NO: 38931 - protein, 382 aa, Zea mays
  Clone ID: UC-ZMFLB73230D04_FLI.pep
PLYVSTGSAVPSPRASATAAMEMAAAMGLMPGSPSSVSAVMSPFTPPMSPSGNGMPPSLGWQQPNVPTLHLPGSSLQSSRLRTSLSARDMPADDYSLMPDFDSQLMNDLCYSRLGSSTGNHSARTKSLNPSNLDDLFSAELVSSPRYSNGDQGAMFSPSHKAAILNQFQQQQQALLSPINTGVYSPKAVDNKQLPSHPSLLHASLGMPSPGRMSPRCVESGSPMNSHLAAALAQREKQQQTMRSLSSRDLGPSAARASALGSPLSTSWSKWGSPSGVPDWGVDGEELGKLRRSSSFELRSGGDDPDLSWVHTLVKESPPEKQVTTSESINSVGPSPLMPPSMNNGGEGSGLNTQLDGRDQAAVLGALLEQMQLDQQIGSLAT

SEQ ID NO: 38932 - protein, 384 aa, Glycine max
  Clone ID: 700548142_FLI.pep
LGVCLQGFRKIDTDKWEFFNEAFQRGKKHLLKNIQRRRSSQSQPVGSYIGIGSSTEAGGSEVEIEIERLRKEKTMLMEEVVDLQQEQRRTAHHAGEVNLRLQSAEQRQKQMVSFLAKLIQNPAFLARLRHKKEQKEIDSPRVVRKFVKQHHETGTTTTAETLQEGQIVRYQPDWRNIAMSSETPKLSSVSIEQSPHYLSQGLAGEMSVVGAEDLTAQIDNIVSDDLAAVHRITPSQEMMIGEGSSTFGAEDPLFKGKSVMSPILEVPPEYFPSFPEGLTKEKKDFQDFSALGTEGMIKLEDIWDSGLNVSGAALSSGNELWGNHVNYEEFPQFGVTSGMSDSDIWDIGLGSFGIDTWPTDEPSLGETDGQSGQPNEDRSKNFDP

SEQ ID NO: 38933 - protein, 972 aa, Glycine max
  Clone ID: 700555461_FLI.pep
AIELKCPICWSLLDSAVSLTCNHLFCNSCIFKSMKSASACPVCKIPFTRREVRPAPHMDNLVSIYINMEASSGVNTFVTQNAPVTNLSDGEKECEGDADSGKMKAGGTHEGRPQEKKTRKKKKSKKTVQASMESSGSEFAKPSFPAKKRVHVPQNLLSETPMKNLKIGDSLSEINKEKEGTEKVPVKESERPLQSEKDNPVLSPFFWLREEKDGEMLSQQTDEDQIIDGSTPNPPSFSDLKDSDDEVHSNVDLMDEVQNKSSVNLFDSEMFEWTQRPCSPELFSSPSKMQVMDTYEDDENQEELVASSLELEANLPRVDADNMEFENPKEGNRMADEVPPSVCFPQIRSSDDLNGIKKSTKRRKARDKNKQEQIGEPKNSFDEMYVEVTQEQALDNSSNLGKGSRRGKRVCFNTSPIPTPITACTVPNTLGVQSIGEMKKAKNIDILPCKQENEKHYAQEISGKSQMKISGKQNINQMNEFAGSDSSIFSLRTDNNGKDSNRRQCKSKYSRKTIYCSKELETTKRQKLSSACISKTKNNEEILPIESIHQGPDVRDLNDTSKEKHCPLMDQTVLRKCENLVKNYQCVFCLSSEESEASGPMVHYLDGRPVTSDYEGGSKVTHCHRNCTEWAPNVYFDGDYSINLDAEISRSRRIKCSFCGLKGAALGCYEKSCRRSFHVPCAKWTSQCRWDTQNFVMLCPLHASSMLPCEGSGSQKRSKKCTASEGKAHGPKHDTTSQSRAAYLSYKKIVLCCSALSVQEREVVSEFERVSKATVLKNWDSSVTHVIASTDENGACRRTLKVLLGILEGKWILNIEWIKACMKEMGPIDEECYEINVDIHGIRDGPRLGRLRVLNKQPKLFYGYKFYFMGDFIPSYKGYLQNLVVAAGGIILHRKPVSGDQESTSPDMHTYQTLIIYSLELPDKCKPSKKDTICSQRRHDAEVLASSTGSNVASNTWVLNSIAACKLQYLAQ

SEQ ID NO: 38934 - protein, 203 aa, Glycine max
  Clone ID: 700605704_FLI.pep
ENFLAPSSSRWPKVEVQALIKLRTSMDEKYQENGPKGPLWEEISASMKKLGYNRNAKRCKEKWENINKYFKKVKESNKRRPEDSKTCPYFHQLDALYRQKHRGEESPAAVEAKPESAVAPLMVQPEQQWPPQQQQQDRDITMEDMENEDDEYEEEREGEEELEDDEDEEDEEGGGGGGNYEIVANKTSGGGGASAASVGASTE

SEQ ID NO: 38935 - protein, 346 aa, Glycine max
  Clone ID: 700943384_FLI.pep
LALWQMRKPYMMEKDKMNNNIKSKLRKGLWSPEEDEKLLRYMITKGQGCWSDIARNAGLQRCGKSCRLRWINYLRPDLKRGAFSPQEEELIIHLHSILGNRWSQIAARLPGRTDNEIKNFWNSTLKKRLKMNNNINATSSPNNSYSSSEPRDVNVMGGIMPMNEHDLMTMCMDSSSSTSSSCMQSMHTTNMVLTDQFDPFPLLSNNRYDMTGATDFLDNMAACLTQVGMVDHDHGVVHDGYGTLEPNKTGLESDFSLPPLESRSIDDNSSTPIDHVKSHNNNNHFKNSCFNNTDHHHHIQCSNNVVVEDLFGFGNHGHGESFRMEEWDFEGLIQDIPYFSSLDFQV

SEQ ID NO: 38936 - protein, 402 aa, Glycine max
  Clone ID: 701213550_FLI.pep
KGLWSPEEDEKLLRHITKYGHGCWSSVPKQAGLQRCGKSCRLRWINYLRPDLKRGTFSQEEETLIIELHAVLGNRWSQIAAQLPGRTDNEIKNLWNSCLKKKLRQRGIDPVTHKPLSEVENGEEDKTRSQELSNELNLLNSESFKSDEGSYEQRASSSIAPKAYEMEGSCSSKINTTKNDTNLMSNCSNKDMFLDSYTTSCQPSDLMGNYPLQITDTLPTNSNSCHWFSQTARPFDMNSEFTITSNVMSILPPTTTSFLPSTSFCYKPSLGVPSEDISTASFALNGPNYWEASASNNSNGSNNTSDGSRELTTTSSKNSVLSSWGLTEETKWSEYLQNPMLMLAAPESLCNQIRPATHLVPDNTLGSIIVPDSKDQQQQQQSQNSSIFSKDTQKLTAAFGHI

SEQ ID NO: 38937 - protein, 342 aa, Glycine max
  Clone ID: LIB3170-007-D12_FLI.pep
ELGIFRGTHIKIFCMCLPEGERGMALEAVVYPQPQDPFGHGIKDPSYNYNNLLEGGGGNWGYADFNLEKEDRTCVPFLANQTENYPYGEWNCSPSPPSMLPQLNIASNPQSSETSNTQNNLDSSVSTPARPKRRRTKSRKNKEEIENQRMTHIAVERNRRKQMNEYLSVLRSLMPESYVQRGDQASIIGGAINFVKELEQRLQFLGAQKEKEAKSDVLFSEFFSFPQYSTSASGGCDNSTAMSEQKSEAQSGIADIEVTMVESHANLKIRSKKRPKQLLKIASSLHGMRLTILHLNVTTTGEIVLYSLSVKVEEDCKLGSVDEIAAAVYQILDRIQQETISN

SEQ ID NO: 38938 - protein, 88 aa, Glycine max
  Clone ID: 700979602_FLI.pep
VFPSVLCYGLFSMHTGTLSTEIAPCHILSTFVYFPYFSCKIGFYICLLISYFTYYEFKVLLIHATVLEYDFFSGDHCYWCKVFPSFLV

SEQ ID NO: 38939 - protein, 818 aa, Glycine max
  Clone ID: 700981181_FLI.pep
DEIYAQMTLQPLNSEREVFPISDFGLKHSKHPSEFFCKTLTASDTSTHGGFSVPRRAAEKLFPPLDYTIQPPTQELVVRDLHDNTWTFRHIYRGQPKRHLLTTGWSLFVGSKRLRAGDSVLFIRDEKSQLRVGVRRVNRQQTTLPSSVLSADSMHIGVLAAAAHAAANRSPFTIFYNPRACPSEFVIPLAKYRKSVFGTQVSVGMRFGMMFETEESGKRRYMGTIVGISDVDPLRWPGSKWRNIQVEWDEPGCGDKQNRVSVWEIETPESLFIFPSLTSGLKRPLPSGPLENEWGTLLTRPFIRVPENGTMELSNSIPNLYSEHMMKMLFKPQLINNNGAFLSAMQQESAATRGPLQEMKTTLAAENQMLLKNLHPQSIPDQPNALNMQSLLKNDQPEKFHPLAKIDNHLPSGIVIDKPKLECEVLPDRVIDYPSMEGCNNEKVAVNPVNQQGLATQLPFHNQNQSPLLPQSSPWPMQPLIESSMPHPQMIGMAQADSAMVNGLFPQLDIDEWLAYASSQPFAGQNRPTGPFSDLQEHNSLQPQVVNPPLPSMNNEVWDHYVKNFKFLSQADQLTSICQPGMYGLNGVPSSNNLRDLSAESNNQSEICVNVDASNSVGTTMVDPSTSSTILDEFCTMKDGEFQNPQDCMVGNLSSSQDVQSQITSASLAESHAYPLRDIPDNSGGTSSSHVDFDESSFLQNNSWQQVPAPIRTYTKVQKAGSVGRSIDVTTFKNYEELIRAIECMFGLDGLLNDTKGSGWKLVYVDYESDVLLVGDDPWEEFVGCVRCIRILSPSEVQQMSEEGMKLLNSGALQGMNV

SEQ ID NO: 38940 - protein, 189 aa, Zea mays
  Clone ID: 700103820_FLI.pep
LGRYKMGAAGGCGDYYHHFNLSPSASPAAQRSASTVGCGGFPPPPNDRSFAWQQRLAPRGGRSLGASSAASWPARPPPRGTGTTATRTRFRPVVHSLSVCSSVLVELLCFFLGCAFLLSWSNPSSCGSCSRAERFACLLLSSVDDSDSQCVCCCWWQDFARQKIYWNLPTVGGGATIIFSPMVYDYDST

SEQ ID NO: 38941 - protein, 520 aa, Glycine max
  Clone ID: 700995421_FLI.pep
EENTTVPMNLEIQRDQRQQLPELIDPWNNDEVLALLRIRSSMESWFPELTWEHVSRKLAELGYKRSAEKCKEKFEEESRYFNNINYGKNNNNNNNSSNYRFLSELEQLYHQGGSGDHHLENTTQPPLQKQDKMGHHALELEVEGDSRNVVDALVTKQNEQSDEALAVEKITKDRKRKRPDRFEMFKCFCESIVHKIMAQQEEMHNKLLEDMMKRDDEKFTREEAWKKQEIEKMNKELEMMAREQAIAGDRQANIIQILNKFSATSSPASHTLKKVNNDSNLNIHITQNPNPSQTENPTLSVAQDTLQVIPSTSSTSTPALPQNPSSYSLNIQNNNNNIPVETNSVLNKGNEKDDVGRRWPKDEVLTLINLRCTSVNNNNNEEKEGNNKVPLWERISQGMLELGYKRSAKRCKEKWENINKYFRKTKDVNKKRSLDSRTCPYFHQLSSLYNQGKPVLQSESHLNSPPNQNPEQVTPDQTTQAHESSSQVGSGGGFSVQQQQVDHGGEKTLMQVPSLDFDQF

SEQ ID NO: 38942 - protein, 290 aa, Zea mays
  Clone ID: 700104985_FLI.pep
HPLAYPSSTRDEASPGRMTCSMDLPAKGGFSFDLCRRNSMLEKNGLKLPGFRKTGTTIVGLVFQDGVVLGADTRATEGPIVADKNCEKIHFMAPNIYCCGAGTAADTEAVTDMVSSQLQLHRYATGRESRVVTALTLLKSHLFRYQGHVSAALVLGGVDCTGPHLHTVYPHGSTDTLPFATMGSGSLAAMSVFESKYKEGLTREEGIQLVSEAICAGIFNDLGSGSNVDVCVITKGKTEYLRNHQLPNPRTYVSSKGYSFTKGQTEVLSAKITHLKQKVEVTEGGDAMEE

SEQ ID NO: 38943 - protein, 416 aa, Glycine max
  Clone ID: 701058357_FLI.pep
KLLGGYKQGNGIVCGCCDIEISPSQFEAHAGMAARRQPYRHIYTSNGLTLHDIALSLANGQNLTTGDSDDMCAVCGDGGDLILCNGCPRAFHAACLGLQCVPDSGWQCLNCIDNAGNGRESSIVRPIMIRLTRVDKTPEVEMGGCVVCREHDFSVAKFDERTVIICDQCEKEYHVGCLRDMGLCELEELPKDKWFCCDDCNRIYAALQNSVSAGAEIIPASFSELIIRKHEDKGLCTYGAMNDIQWRILSGKSRYPEHLPLLSRAAAIFRECFDPIVAISGRDLIPVMVYGRNISGQEFGGMYCIVLIVNYVVVSAGLLRIFGRNVAELPLVATSRAHQGKGYFQVLFSCIERLLSSLNVEKLVLPAAGDAESIWTKKLGFRKMSEDQLSKHLREVQLTLFNKTSMLEKTVQLAIE

SEQ ID NO: 38944 - protein, 686 aa, Glycine max
  Clone ID: 701097117_FLI.pep
PANWSTSSSRPTTPVSSFHGLKLSKSSSKSSKQTCSICLTKMKQGSGHAIFTAECSHSFHFQCIASNVKHGNQICPVCRAKWKEIPLSGPSLDPIQGRVSPSPVNWPQNDALMAVVHRVPLPLPHPHRDLNRRHVVPLYQASEPGIFDDDESLNHQHAFSERSTCNKSTEDTDAARAMEIKTFPEVSAAPGSKTYSNFTVLVHLKATAAAAAAAAKRQNLSRNQTNLAQISQTPRAPVDLVTVLDVSGSMAGTKLALLKRAMGFVIQNLGSNDRLSVIAFSSTARRLFPLCRMTDSGRQKALQAVNSLVANGGTNIAEGLRKCAKIMEDRKEKNPVASIILLSDGQDNYTVNGSGTSQPQPNYQFLLPTSISGGDNSGFQIPVHAFGFGADHDASLMHSISETSGGTFSFIETEAVLQDAFAQCIGGLLSVVVQELQVGIECTHPNLNLVSLKAGSYPSHLMADGCKGLIDVGDLYADEERDFLVSVNVPATSGNETSLIKVKCVYKDPFTQETTTLESEEVKIERTENVGQVVMSLEVDRQRSRLQAAEAMAQACSAAEQGDLSGAVLILENCRKMLSETVSAKSHDRLCVALDAELKEMQERMASRHVYEASGRAYILSGLSSHSWQRATARGDSTDRSSLVQAYQTPSMAEMLTRSQAMLLGSPSGQRLLQPLVSYRPQPSPR

SEQ ID NO: 38945 - protein, 248 aa, Glycine max
  Clone ID: 701133623_FLI.pep
EYQNQRAKEGRFCEKLKIKNRPKFVGVRQRASGKWAAEIKDTSKKIRLWLGTYQTAEEAARAYDEAACLLRGSNTRTNFSTQGCGVATNSPISLKLRNLLDRKAMSNQSQSQIQRQSSMISSTFQGADTSASPNVSAINKIMVMENYSACSSEGKSLFLVQNHQVCDNPYGLDMNMINCSTGITPNTSQFDYSWPLAQQRINELPISKDDFGLNAERQLSGYATNECHEEDTYAYDVNYPLSHFFCFT

SEQ ID NO: 38946 - protein, 222 aa, Glycine max
  Clone ID: 701135882_FLI.pep
AELPSSEASSSASTRKHSHSVYRGVRMRAWGKWVSEIREPRKKNRIWLGTFATAEMAARAHDVAALAIKGNSAILNFPELASSLPRPDSNSPRDVQAAAAKAAAMEVNDAPTTPTSSSSASLSQSSSWSSLAVSSSSGEDPSTPEELGEIVELPSLGTSFEIPDPSGELVFFDPWPYSQAWSHGIYDESESYFFGDQISMQDSETESMVLCGFAFEASLWQH

SEQ ID NO: 38947 - protein, 517 aa, Glycine max
  Clone ID: 701142782_FLI.pep
SALWNCPKCRSEYPKSHIPKTYFCFCGKIENPPNDPWILPHSCGEVCGRPLKHSCGHHCLLLCHPGPCPSCPKLVKVRCFCGCLEDVRRCGFKEFSCNKPCSKFLDCGVHRCIELCHPGACPPCRTRGVHACQCAKVKEERECCDRVFQCGNPCEKRLGCGKHVCERGCHSGKCGECPLKGKRTCPCGKRVYEGMPCDAPVQLCGATCDKMLPCGYHRCPERCHRGQCVETCRVVVKKSCRCGSLKKDVPCYQDLACERKCQRMRDCGRHACKRRCCDGDCPPCSEICGRKLRCKNHKCPSPCHRGPCAPCPIMVTISCACGETRFEVPCGTEMDNKPPRCPKPCPITPLCRHASNIKPHKCHYGACHPCRLPCAKEYQCGHTCKLRCHGAKPPPNPEFTLKPKKKKIIQQSESVPGTPCPPCPELVWRSCVGKHIGAERMMVCSDKSQFSCENLCGNPLPCGNHYCTKTCHALENQLQGSQPCEDCYLSCQKRACMSTSLPSAMPSWRLSSMQGAH

SEQ ID NO: 38948 - protein, 435 aa, Glycine max
  Clone ID: 701204524_FLI.pep
SLFFPIFESLSSMDPTSIPPPPATTVPFTVEPSNHVTPADNTNTNHPPYDEMIYTAIGALKEKDGSSKRAIGKYMEQVYKDLPPTHSALLTHHLNRLKSAGLLILVKKSYKLPGSDPLPVLQAQKPRGRPPKLKSQPNTELTWPALALNDNPALQSAKRGPGRPKKIAGPVGVSPGPMVPGRRGRPPGTGRSKLPKRPGRPPKPKSVSAISSGLKRRPGRPPKAESNVNVIPFAAPVAPGLPTVQPIVPTASVPNGSPRPRGRPKKIVAGAGAPALSSVGGAPRGRGRPRGVLPLVRPGRPQKLAVGRPKNPARRPVGRPKGSTAAAITAHKAANDDLRRKLEHFQSKVKESLGTLKPYFNHESPVTAIAAIQELEVLSTLDLKAPLRDETHQQPQPQPQVYEQQYPQPQPLLQQFFQPHTSALNLMKDNLYKCF

SEQ ID NO: 38949 - protein, 510 aa, Glycine max
  Clone ID: LIB3242-696-H2_FLI.pep
AAAAGFDRSVERSMFLELALAAMDELVKIAQTGEPLWMRNVEGGREILNNEEYVRTFTPCIGLRPNGFVSEASRENGMVIINSLALVETLMDSNRWAEMFPCIIARTSTTEVISSGINGTRNGALQLMHAELQVLSPLVPVREVNFLRFCKQHAEGVWAVVDVSIDSIRESSGAPTFVNCRRLPSGCVVQDMPNGYSKVTWVEHAEYDESQVHQLYRPLLSSGMGFGAQRWVATLQRQCECLAILMSSAAPSRDHSAITAGGRRSMMKLAQRMTNNFCAGVCASTVHKWNKLNAGNVDEDVRVMTRKSVDDPGEPPGIVLSAATSVWLPVSPHRLFDFLRDERLRSEWDILSNGGPMQEMAHIAKGQDHGNAVSLLRASAINSNQSSMLILQETCIDAAGSLVVYAPVDIPAMHVVMNGGDSAYVALLPSGFAIVPDGPGSRGPPNGPTSTTNGGDNGVTRVSGSLLTVAFQILVNSLPTAKLTVESVETVNNLISCTVQKIKAALHCES

SEQ ID NO: 38950 - protein, 103 aa, Glycine max
  Clone ID: LIB3107-013-B12_FLI.pep
LRNYTMYQELSSALEKMFSCFTLGQCGSHGAPGREMLSESKLKDLLHGSEYVLTYEDKDGDWMLVGDVPWDMFIDTCKRLKIMKGSDAIGLAPRAMEKSRSRC

SEQ ID NO: 38951 - protein, 244 aa, Zea mays
  Clone ID: LIB3597-059-D4_FLI.pep
RPLARRGRRRRRTRRLRPLAAARAQPPLQQPRDVVGARRVRRAPRSRRQRLHLGQRRRRRLQRERVAQSLPRRVDVSLQPPLPLPLGNGRALPSRAPFAALHVLQLLLKMRVPVVLDIVVRPLRQVGCYGRPPVAKESLEVDDELLLLLGKVAALDSRPEVVCPPQSAALAAPHQPGVGRHGAPVPGAVLLDIGDEHEVLLGGPRAFLHPHLVAARRPPHATAPPPFPLRQLASYSTCLERGGW

SEQ ID NO: 38952 - protein, 187 aa, Zea mays
  Clone ID: LIB3637-255-G2_FLI.pep
SSWLCENPVVVDEVTELCPKIADFGMAKLLGRDYSRVLTTVRGTIGYLAPEWISGLPITHKADVYSFGMILLEILSGRRNSEKIEEGRFTYFPSYVAVKLSEGDDVMWLLDSSLESNADAEQLQRACRVACWCIQDAEDHRPMMGQAVHMLEGAMDAQVPPVPRSLQNYVGVEDSTTAEFYISEGSC

SEQ ID NO: 38953 - protein, 256 aa, Glycine max
  Clone ID: LIB3242-679-A5_FLI.pep
LLLLLLSRRNNNTKTCPTLMEPLTPSLPTTPTTTQSLSTSSEPPPPPPPPPPPSPSRNRLPRTATARSTAAGAAFACRSSAPPASSSSRASSATSPTARPSSGSSARRNPPSSPLPAPAPLRRASPLSPTTSPSSLPLPPSSSANAFALTTTPPPKTTPSRSSPPPRRPPSGPYLPAPTSARSGASPPRPNSCRCRRRIQCFTITINTTSSNSNRPPWERPLPQGSGITSPATSICSPRCPAATGIPAGGTTSLAE

SEQ ID NO: 38954 - protein, 83 aa, Zea mays
  Clone ID: LIB3151-012-D5_FLI.pep
PAAILQHIVSSVGDTAGSSVGAWSRLLQAAHRRQLLRYLRRQQPRDLAALRLLLQDGLEDQAEDRLVPVLRLHLPELLATLLP

SEQ ID NO: 38955 - protein, 356 aa, Zea mays
  Clone ID: 700106663_FLI.pep
PLLSSPAPSLHQRTPRRQQHAQAARQGTNTRGRAWRRGRTWRRAGRRGRSPARCRRRCTRSTRGSGSGCPGSSPSSSSPASPSSSSPCTPTTAQRGATPSASPASSAASPSSRCDRTRSSGPPPPRSPRWGALVWEKVVHRHQGWRLLSSMWLHAGVIHLVANMLCLLFIGMRLEQQFGYVRIGAIYVLSGVGGAVLSSLVVRNRVTVGASGALLGLLGAMLSELLTNWTIYTNKAAAVATLLSVAAVNLVLGVLPHVDNLAHLGGFLAGFLLGFVVLMRPHLGWMERYGLPAGAPCTARKYLAYQWTLLAVAIIILLVGFAAGMAMLFRGANANDSCHWCHYLSCVPTARWNCTN

SEQ ID NO: 38956 - protein, 378 aa, Zea mays
  Clone ID: LIB3068-005-C4_FLI.pep
QRQRRWRCSPPVLGLLATSPSSSAMVLGNVAIVIGSGIVGSVLTGGEFGLPDFRDAISGAFKFLTKSAKPGKDGPSTSSPHTAELFSQVNHLREELQMLSKSNHVSIVTVDGRPGPGAYGITAVVIGGAIGYLFIRWKGWKLSDMMFVTKRGLSDACNVVGKQVDQVSESVNVAKKHLAGRIDRVDCSLDECQEITEATKEEVTIIHGDLSAFQKEMETVHLVVRSLETKLGRLAYTQDRTTRGIYDLCEFTKRLDQSPKADTRQVTSSTSRPAIESSERIVRVASLPLALEPESPRIEAPKVVRSSTVMSASGLSLLAGTTIPPKRDQPGVYSRASSMKEGSSELPSGVRNSAEPSPRRSGASTLFGGLGFLRNYTS

SEQ ID NO: 38957 - protein, 723 aa, Zea mays
  Clone ID: LIB3069-003-E2_FLI.pep
APVKSAAQDPLSQLMSAIEGLKPVQEDSLAHIKSAIGEAIKSIPEPIPDALAKLSHEILDAAPPPLAELMKPFAQLMAPNNNGNGPSDVHAEGSSSSSSAQVPAEAKNEPKVRPSLGLKTVLKEAAGPVPNAGASQVQQPLMYPSVEEMLFPCNSVDKSVCKGKIDAQSKGKSVTSSGIQPAPHSLRTHAPPPPHPCISEWSRAQRSQHRQLKFEDNAKTTNDSRWRIPMYKMPYAPPPPAVPPPGYVPSPHFPYPGRLLSSGHPYGDLAGNMENSAPHSLHRWIQCDGCGAQPIVGPRYKSNVKEDYDLCDSCFQRMGNEMEYTKIDKPILPHRFLRDPHVYRKVHHPRVLMKSRREKLESRFILDVTVLDGTLMTPSTPFTKIWRMHNNGSVVWPRGTQLVWVGGDQFALQTSVPLEIPVDGFPVDKEIDVPVDFVAPTRPGRYISYWRLASPSGQKFGQRVWVHIQVEDPSFVNDNNRNAVINLNLPPESYSSNTTNLIDVNIEPADSALSAHAKRTKEFHFCSTDFPEPSKSVPYTLATTSLSAAAPTNQTGDVPMSSTPAAACLPSVNVHMHEVVTTHTPSPITPVLPTTIHFSAPVSAPAIAPELASGAVGVPPPVSAVVPELSELDVHNEEKLLRELEEMGFRQVDLNKEILRQNNYNLEQSVDDLCGVNEWDPLLAELEEMGFDDTEMNKELLAKNEGSIKRAVMELIAREKKDK

SEQ ID NO: 38958 - protein, 578 aa, Zea mays
  Clone ID: LIB3069-004-E8_FLI.pep
ASGNQRLSLHDCRSLRMAAPPEGNVRLGEGWDEDDVLEPQPLEVIAPDVKSKKRNPAPGVRVVGRRIYDPENGKTCHQCRQKTTDFAAACKQVKKKGPCPVKYCLKCLLNRYGESAEEAAGKEDWICPKCRGICNCSFCRKKKGEMPTGIMAHIAKASGCTSVHDLLKKGSDVVSAAQAILKVNGSDKGTKRSRGTDAAAEVATEKDVNIGIDINTVIADEGDENIGVDLNSLPSVDTKKRQKRQKLKHRTKKDPADATSHGVNTEPLQMDGNLDFLNSKTVRPRGTPVTKIAGAELDDEDTGAAIQFIEFCRAFTEIFQIKKGQPEKILQDLVGGRELRFVSSVVAGFHINLLSVIQEGKGKKPLAYTRDGDAWVIDIGKYISESASISKGFPLNHINQGISGYKNLSPSCKLRVLNFLCDETLSTDKLRNWIDMQNDIAAEPVNAAREKARAAKEMVKELKERLKDNMNKIIVSPNEAAASNSEANKYIISQIKEAQEVKRAAINDMATMEKQGGFWTKPLMVEKGAAYWKLDGYCDNSAILLQEYGGDELMANKDKWFMFTEDEEKIIEKHLATR

SEQ ID NO: 38959 - protein, 315 aa, Zea mays
  Clone ID: 700236111_FLI.pep
TLVLTPIAASAPPQQMEFWGLEVKPGSTVKCEPGYGFVLHLSQAALGESKKSDNALMYVKIDDQKLAIGTLSVDKNPHIQFDLVFDKEFELSHTSKTTSVFFTGYKVEQPFEEDEMDLDSEDEDEERDVPVVKENGKADGKKQKSQEKAVAAPSKSSPDSKKSKDDDDSDEDETDDSDEDETDDSDEGLSSEEGDDDSSDEDDTSDDEEEDTPTPKKPEVGKKRAAESSVLKTPLSDKKAKVATPSSQKTGGKKGAAVHVATPHPAKGKTIVNNDKSVKSPKSAPKSGVPCKSCSKSFISETALQAHSKAKHGGK

SEQ ID NO: 38960 - protein, 192 aa, Zea mays
  Clone ID: LIB3069-054-G5_FLI.pep
ALLAARSSGAVIFLGTFGALAVMTIISVVLGRAFHYVDGIIPFSFGGTDFPVDDIAAACLLVYYGVTTLLDAASGDDEKINEEQEEAELAVSKFSGNGAGVMSAAGTIASTFVLVFVAEWGDKSFFSTIALAAASSPLGVIAGSLAGHAIATLIAVLGGSLLGTFLSEKIIAYIGGSLFLAFAAITIVEIVT

SEQ ID NO: 38961 - protein, 258 aa, Zea mays
  Clone ID: 700167040_FLI.pep
GIPKLSSVTSLGGKHVEFVSVDKCKEEKGGPYTASIPLNQATNPDADVLLAYEMNGEVLNRDHGYPLRVVVPGVIGARSVKWLDSINVKEEECQGFFMQKDYKMFPPTVDWDNINWSTRRPQMDFPVQSAICTLEDVDVIKEGQARIAGYALSGGGRGIERVDVSADGGKTWVEARRYQKDNVAYVSDGPQSDKWAWVLFEATLDVPANPEIVVKAVDSAANVQPEKVEDIWNLRGILNTSWHRIKIQRSLCVERSKL

SEQ ID NO: 38962 - protein, 610 aa, Zea mays
  Clone ID: LIB3354-055-B9_FLI.pep
ERVSMCGILAVLGCADEAKGSSKRSRVLELSRRLKHRGPDWSGLRQVGDCYLSHQRLAIIDPASGDQPLYNEDQSVVVAVNGEIYNHLDLRSRLAGAGHSFRTGSDCEVIAHLYEEHGEEFVDMLDGVFSFVLLDTRHGDRAGSSFFMAARDAIGVTPLYIGWGVDGSVWISSEMKALHDECEHFEIFPPGHLYSSNTGGFSRWYNPPWYDDDDDEEAVVTPSVPYDPLALRKAFEKAVVKRLMTDVPFGVLLSGGLDSSLVATVAVRHLARTEAARRWGTKLHSFCVGLEGSPDLKAAREVAEYLGTLHHEFHFTVQDGIDAIEDVIYHTETYDVTTIRASTPMFLMSRKIKSLGVKMVISGEGSDELFGGYLYFHKAPNKEELHRETCRKVKALHQYDCLRANKATSAWGLEARVPFLDKEFINAAMSIDPEWKMVQPDLGRIEKWVLRKAFDDEEQPFLPKHILYRQKEQFSDGVGYSWIDGLKAHATSNVTDKMLSNAKFIFPHNTPTTKEAYYYRMVFERFFPQKSAILTVPGGPSVACSTAKAIEWDAQWSGNLDPSGRAALGVHLAAYEHQHDPEHVPAAIAAGSGKKPRTIRVAPPGVAIEG

SEQ ID NO: 38963 - protein, 755 aa, Zea mays
  Clone ID: 700236556_FLI.pep
FIEHEDEENPLYGRDNMLEEGVGSFADIDDLAGTFSKLTRIVNGPKQPVVVSHSGSISRQSSNAEWVQESELPYWPTQPVLDTDHGLDKKNWWSQPPHSVNFIDYRLQRTSSSPQQDAQHNPVEPILEAKPSPLHRTSTYPQQEPQYSNTEPIPVPKSSFISCPPSGAASHSSPSQPHHVNMPSPPTAFQLHMSSAQNDLLLPQFHHGGTPPGPPFGRQNHVLNNGSMHGKGPRFMPGLMPHQLQCPNGLMPPQMQPPHQHGMLPIQQSPPQFSQLHARMIGPHHSPPQSMQMFGPQHPSSQVMSRFDANFAMPDLSDPRARSMLQHERLGQRYPHQGYELNNIRIDNGWSRFRSKYMCTEEIENIARMQQAATHINDPYIDDYYHQACLAKKSAGAQLKHHFCPTLIRDPSSRARSKDEPHAYLQVDALGRLPFSSIRRPRPLLDVEQASAPSDNAEKSVSKPLDQEPMLAARITIEDGLCLLLDVDDIDRLLQFSQQQDGGLQLRNRRQGLLEQLAESLQLVDLLAPNKNSPVSPYDDLVFLRIVTLSKGQKLLSHYLELLTSGSELARIACMAVFRHLRSIFGNMPSDISAVETMNRLAKAVSAHIVQMDLSDLSACLAAVVCSSLQPPLRPLGSPAGDWASVIIKYVLDRATVLLTDHHVASNYSMRNRSLWQASFDAFFGLLTQYCMSKFDRVVHTAQLQPAAATVITREMPVELLRASLPHTNEAQRKQLLSFAQRTVPVGTHSSHGSW

SEQ ID NO: 38964 - protein, 378 aa, Zea mays
  Clone ID: LIB3060-009-D6_FLI.pep
TSKTQRSSRKLRQAQKKKKKTRRRDGKKRRQHKPSGWGSRLRVRGLRRRRGGVLRGGRCGALQPLRHRCARCEPAGVAPRARAPFHGDCCIRRVRRRPLRARRHRRGVVVGVGACAGAGKPPERELVGELHHRRQRRGGQGPVRPAVRRRLRCLCHGRRRLPAGRRGARRPSRRCTSVGAARSGRRRMDGHVVARCRRPGRRRGRRGGGGAGGEGAEVPREAREAQVPEDHPLRVPQGLCRGAAQDQGPLCQARRRHLLLLLLGCRHIGQHRRCCQVLALLLRRRQGRLLRGRRGLRGRAKLLESLCLENLGVTLASQRAALLGFWRWRSPSLKQVKQPPFSFVSCRLVIHVSSIRGEIPPSLFLNDGAEFRWVITSW

SEQ ID NO: 38965 - protein, 166 aa, Zea mays
  Clone ID: 700236980_FLI.pep
PWSPMIPQATRPPAFPVLLLSSCPPLPRSSGSAWTTTARPMIEWGPARGIWLSVILTLTTPSSPAVTFPRSPAWRSSSSGAPCSLPTGLKCGPVDMQPLVVSPSACTWNPWSPGLRPEILPVTVVGPSPSCEKKMVPLTSVPARTATAFTIVAVIYERNDEKRLEP

SEQ ID NO: 38966 - protein, 430 aa, Zea mays
  Clone ID: LIB3062-012-B1_FLI.pep
HKGQDVAVKVIPKAKMTTAIAIEDVRREVRILSSLTGHSNLVQFYDAFEDEDNVYIVMELCKGGELLDRILARGGKYSEEDAKVVMVQILSVVSFCHLQGVVHRDLKPENFLFSSKDENSSLKVIDFGLSDFVKPDERLNDIVGSAYYVAPEVLHRSYAPEADMWSIGVIAYILLCGSRPFWARTESGIFRAVLKAEPSFDEAPWPTLTAEAKDFVKRLLNKDYRKRMTAAQALSHPWIRNSQQVKVPLDMIIYKLMRAYISSSSLRKSALRALAKTLTTDQLFYVREQFELLGPNKNGYISLQNLKSALAKNSTDAMKDSRVVDFVNTVCALQYRKLDFEEFAASAISVYQMEALETWEQHARRAYELFDKEGNRPIVIEELASELGLGPSVPLHVVLQDWVRHADGKLSFLGFIKLLHGVSSRSIPKA

SEQ ID NO: 38967 - protein, 274 aa, Zea mays
  Clone ID: 700237327_FLI.pep
TYSEDTFRCSAQDRQVHIRHCNTLKTLEIHVPRSKVRYAKAKRQDSHPHLSNGIEESLPRSTLLKSAVVAEQLCVDTIRNNSALALVLQVVSAAELGEAPLSALNDLLAARELELSATQSFAGMGSIVVLASHGKEDLTNVHPSTGALRLAKGTPHSSLEPISPGTGKHLVDTEDMERVNPDPKVEGILSCRLGHVLVAGNAGSLERLTGDILLLPRDKVHTVGELINTLPLHPDIVDPDLGVRDTTAVPGLRVRLVLDLAIASSRPSAHGDGS

SEQ ID NO: 38968 - protein, 129 aa, Zea mays
  Clone ID: LIB3062-044-G3_FLI.pep
QVLFPNEPVSVMLAQMIGITGPIDMEMLELGQETQKYFTDDYDLFTENEETDQLEYLIPEKSSLRQHIQCPDSEFVDFLSYLLQINPRKRPTADEALQHPWLSFLVLMRSHPVLSSHIKVTLSPDMEPS

SEQ ID NO: 38969 - protein, 338 aa, Zea mays
  Clone ID: LIB3066-008-H2_FLI.pep
IPVMETMFDADSEPKNRKLQEFDTKANRNMGMIDEESDDDDDYQVPEANIEEDVNKSHHDIKRTDEPTEKIDLSCFLSILHRDPEEKSRNCWTVPDSKIFKVRSKNFPQDKSKIPAASYLMELAAIDWFKDTKRMDNVARQKGCVAQVAADRGMHTFVVNIQIPGSTQYSLVMYFVTNTLRKGSLLQRFFDGDDEFRNSRLKLIPSVPKGSWIVRQSVGSTPCLLGKAVDCSYVRGPAYLEVDVDIGSSAVANGVLGIVFGVVTTLVVDMAFLIQANTYEELPEQVIGAARLAHVEPATAVVPDLSNTSNDSSNSNNDNNNNNNNNGSSEDDLSKKTN

SEQ ID NO: 38970 - protein, 314 aa, Zea mays
  Clone ID: LIB3066-024-C6_FLI.pep
EMNIDSWHIIMRMRIPQEGPCDPIAPLDLPHSLHAFHRVSACDSLNLEGYHTFRGGFWNYFSLGMDAQVSYEFHSERKRNPEKFRHQLRNQGTYAKLGFKHSLNHLSSRNISQLAKVKIMKRPGSQWEELKIPRSIQSVICLNLPSFSGGLNPWGTPGTRKAQDRDLTAPYVDDGLIEVVGFRDAWHGLILLAPNGHGTRLAQAHRIRFEFHKGAAEHTFMRIDGEPWKQPLPKEDDTVVVEISNLRQVAMLASDPCRSKSVNEPSSPSCHGHEDDDSNSLEDEDEDEWEDGRKKFGAAATFKIPDEVDIAHLS

SEQ ID NO: 38971 - protein, 93 aa, Zea mays
  Clone ID: LIB3115-013-B1_FLI.pep
VTVSSHGASSRIIVAFNSVDTLTLINPFTIYINRLSECINSCAEVFLTDSTRCFANQILHVNSALNTTPVVAEWAGKDSVKLVHPLLRRWLSS

SEQ ID NO: 38972 - protein, 244 aa, Zea mays; identical to SEQ ID NO: 36891
  Clone ID: LIB3151-002-E3_FLI.pep

SEQ ID NO: 38973 - protein, 244 aa, Zea mays; identical to SEQ ID NO: 36891
  Clone ID: LIB3151-007-F9_FLI.pep

SEQ ID NO: 38974 - protein, 185 aa, Zea mays
  Clone ID: LIB3150-021-D6_FLI.pep
RSHAPAAKTKSASGSPHSPPKIILRTKSAAAEMGAECRYEVAQAAYIKLALHALKHPATAVNGLLVGRLVEPSSSPAVVSVIDAVPLSHHPHHLPLLPTLELALTLVEDHFATQGEGLAVVGYYHANPRCDDTELPPVAKRVGDHIFRYFPRSAVLLVDNKKLEEAVKGKFSDAVIQGLVEPRPP

SEQ ID NO: 38975 - protein, 99 aa, Zea mays
  Clone ID: LIB3182-009-E10_FLI.pep
PAAILQHIVSSVGDTAGSSVGAWSRLLQAAHRRQLLRYLRRQQPRDLAALRLLLQDGLEDQAEDRLVPVLRLHLPELLATLLPQRLALRRAVGRRRRAA

SEQ ID NO: 38976 - protein, 149 aa, Zea mays
  Clone ID: LIB3152-020-D12_FLI.pep
PAAILQHIVSSVGDTAGSSVGAWSRLLQAAHRRQLLRYLRRQQPRDLAALRLLLQDGLEDQAEDRLVPVLRLHLPELLATLLPQRLALRRAVGRRRRAALMPQKLDALAQDRGAANAAGSLQLARAWMRLLARAWVWLGMRLRPGRLSR

SEQ ID NO: 38977 - protein, 198 aa, Zea mays
  Clone ID: LIB3150-015-D12_FLI.pep
RNFPRLVILQSMSNFAGKSCCIFTWSFILFQIFLHLSFIFTLPSSDLLTFLLSDPSHHGIREEHPVFLGENQCCAGGMDFITMIFTLSAIPFDIMPTTIEQCVSVLKPGGLLLFRDYGLYDMTMLRFLPHQRIGFREYMRSDGTFSYFFSLDTVRELFHAAGLVELELEYCCVKSVNRKNGKTMRRVWVHGKFQKPPR

SEQ ID NO: 38978 - protein, 221 aa, Zea mays
  Clone ID: 700237408_FLI.pep
LRHGSRPLHLRRHRRRRSTPPRGCRWRGVRPCRSRCRACPRSPGAEGPWNPLPHHQEGDWVSDGGEGYAVDFVAISLHAVSRDPEAYPYPCIYTQIETEAISDEESDVSDSETNGELELSKVMEMRIIPSDPGQLDELFEAFCNCAELNPDPSAESDEEHGWVHGDEGYEDTVDGSDTEFSDVNPIGQTGEQDINHAVIELQINDQRFEDAVDEESHRNGN

SEQ ID NO: 38979 - protein, 167 aa, Arabidopsis thaliana
  Clone ID: LIB24-109-B3_FLI.pep
QRRRSRINEKMKALQSLIPNSNKTDKASMLDEAIEYLKQLQLQVQMLTMRNGINLHPLCLPGTTLHPLQLSQIRPPEATNDPLLNHTNQFASTSNAPEMINTVASSYALEPSIRSHFGPFPLLTSPVEMSREGGLTHPRLNIGHSNANITGEQALFDGQPDLKDRIT

SEQ ID NO: 38980 - protein, 153 aa, Zea mays
  Clone ID: 700431705_FLI.pep
CHSFVSHHFIHSFHYYLSYCMQCKKICWQSRRSGDDTDKYKWSRKGECSLGSGGVSLHLWVVEVDADHGLPEPRADVGEDGGVAVVGDRLDDGAGAARGVAALEDAGADEDAVAAELHPRAARMTTTAVRASASPSSTSIKEKAAAGLTAAAL

SEQ ID NO: 38981 - protein, 280 aa, Arabidopsis thaliana
  Clone ID: ARABL1-033-G2_FLI.pep
TLGEMGKDIELPGFRFHPTEEELLDFYLKNMVYGKRSSVEVIGFLNIYRHDPWDLPGLSRIGEREWYFFVPRERKHGNGGRPSRTTEKGYWKATGSDRKIISLSEPKRVIGLKKTLVFYRGRAPGGSKTDWVMNEFRMPDNCSLPKDVVLCKIYRKATSLKVLEQRAEMEAKMNQTCPNSPLSSSETISFVGKEENMMTSFRAPQVIAMEEANKIQMHQENAKTEEKQREAETKEPSSSLKLPFGSLPELQLPKPGVEWDQLLSISPWLQNLTPIVNIYW

SEQ ID NO: 38982 - protein, 197 aa, Zea mays
  Clone ID: 700237789_FLI.pep
CMHPMADRSTPAAVRRPLLVVIRAVASFRCWSEGERELDLSAVLLLLDDRVNRRGKAAFLKHGLQGDGCFADEIVVGEVAVHDLEVELRGVVGDGEDEGLVPLGLASCSICDAAFLLLGAAGKDHEGVHVIEEIGVLESLGGDEEDLQLPVHHVYLLAPIDRRQFLGALQLQLQRENGSSAKCPRVRADGTFPSAFA

SEQ ID NO: 38983 - protein, 460 aa, Glycine max
  Clone ID: 700651682_FLI.pep
RRQRMGTLLPDEKSENPNALEQLQHQKDVDAGALFVLKSKGSWMHCGYHLTTSIVAPPLLSLPYAFTFLGWTAGILSLVIGALVTFYSYNLISRVLEHHAQMGMRQLRFRDMARDILGPGWGRYFVGPIQFAVCYGAVVACTLLGGQCMKAIYLLSNPNGTMKLYEFVIIFGCFMLILAQIPSFHSLRHINLVSLVLCLAYSAGATIGSIYIGDSSKGPEKDYSLKGDSVNRLFGIFNAIAIIATTYGNGIIPEIQATLAPPVKGKMLKGLCVCYLVLIVTFFSVSVSGYWAFGNESEGLILSNFVDNGKPLVPKWFIYMTNIFTITQLSAVGVVYLQPTNEVLEQTFGDPKSPEFSKRNVIPRVISRSLAIAISTTIAAMLPFFGDINSLIGAFGFIPLDFILPMVFYNLTFKPSKRSPVFWLNVIIVVAFSALGAIAAVAAVRQIVLDAKNYQLFANV

SEQ ID NO: 38984 - protein, 454 aa, Glycine max
  Clone ID: JC-GMST02400004F11_FLI.pep
STAEEQGISMAEPPKGDEEDGGAAFVLQSKGEWWHAGFHLTTAIVGPTILTLPYAFRGLGWGLGFMCLTVMGIVTFYSYFLMSKVLDHCEKSGRRHIRFRELAADVLGSGWMFYFVIFIQTAINTGVGVGAILLAGECLQIMYSNISPHGPLKLYHFIAMVTVIMIVLSQLPSFHSLRHINLCSLLFALGYTILVVGACIHAGTSENAPPRDYSLEPKKSARAFSAFTSMSILAAIFGNGILPEIQATLAPPATGKMVKGLFMCYSVIFVTFYSAAVSGYWVFGNKSNSNILKSLLPDSGPPLAPTWVLGLAIIFVLLQLFAIGLVYSQVAYEIMEKKSADVRQGMFSKRNLIPRIILRTIYMIFCGVLAAMLPFFGDINGVVGAIGFIPLDFILPMLLYNMEYKPPKSSFTYWINVSIMVIFTGAGMMGAFSSIRKLVLDANQFKLFSSDVVD

SEQ ID NO: 38985 - protein, 439 aa, Glycine max; identical to SEQ ID NO: 38894
  Clone ID: JC-GMST024150F06_FLI.pep

SEQ ID NO: 38986 - protein, 545 aa, Glycine max
  Clone ID: UC-GMROPIC049E02_FLI.pep
GEKMGEAKEIWSAPITPRTASVVGTPVVASPPVSCPPSQLHSPSLTRSPLLHPEDGDAPRRKTSKTPKTPRTPRTPRTPLRISNLTPKFITPLGSPMRKALRFTKLDPQDAWLPITESRNGNKYYAAFHTLCSGIGIQALVLPVAFTILGWTWGIITMTLAFIWQLYTLWLLVNLHESVEQGVRYCRYLQLCGATFGEKLGKILALFPILYLSAGTCTTLIIIGGSTARTFYQVVCGETCTAKPMTTVEWYLVFTCVAVVLSQLPNLNSIAGVSLIGAVTAVGYCTAIWVTSVARGALPDVSYNPVRTGNSVEDAFSVLNALGIIAFAFRGHNLILEIQSTMPSSEKHPSHVPMWKGVKVSYTIIAACLFPMAIGGYWAYGQLIPANGGMLTALYQFHSRDVSRFVLGLTSFFVVVNGLCSFQIYGMPAFDDMESGYTTRMKKPCPWWLRAFIRVFFGFLCFFIGVAVPFLSQMAGLIGGVALPVTFAYPCFMWLKTKKPKKYSAMWWLNWFLGTLGVALSAMLVAASLYVIIDTGVNVSFFNPQ

SEQ ID NO: 38987 - protein, 449 aa, Glycine max
  Clone ID: UC-GMFLMINSOY012G11_FLI.pep
SNTTACGGGKMGHSEENSDVAARQKAIDDWLPVTGSRNAKWWSSAFHNLTAMVGAGVLSLPFAMSNMGWGPGATVLILSWVITLYTLWQMVEMHEMVPGKRFDRYHELGQHAFGDKLGLWIVVPQQVVVEVGTCIVYMVTGGKSLKKVHDTLCPDCKDIKTSYWIVIFASVNIVLAQCPNLNSISAISFVAAAMSLIYSTIAWGASINKGIEANVDYGSRATSSADAVFNFFSALGDVAFAYAGHNVVLEIQATMPSSEDTPSKKPMWRGVILAYIGVAFCYLPVAFIGYYMFGNSVDDNILITLERPAWLIAAANLFVFVHVVGGYQVFAMPVFDMIETYMVTKLNFPPSTALRVTTRTIYVALTMLIGICIPFFGSLLGFLGGFAFAPTSYFLPCIIWLKLKKPKKFGLSWTINWICIILGVMLMIVSPIGALRNIILSAKNYEFFS

SEQ ID NO: 38988 - protein, 251 aa, Zea mays
  Clone ID: UC-ZMROB73057F08_FLI.pep
VALLAILIRDGKSNKQKDYDVHAGSQAEKVFNALGAVAAILVCNTSGLLPEIQSTVREPAVRGMRRALLLQYTAGAAGYYGISVAGYWAYGSAVSEYLPNELGGPRWAAVLINATAFLQSIVSQHLFTVPIHEAMDTRLQRLDEGMFSRYNLTRRVCARGLVFGFNVFVTALFPFMGDFVNLVGSLALVPLTFTFPSMAVLKIKGKSGGRCNRLWHWGIIVLSSALCVATTAAAVRLIFNNARIYHFFADM

SEQ ID NO: 38989 - protein, 287 aa, Zea mays
  Clone ID: 700238075_FLI.pep
IARVHTGSSLCPAPGYGHLSISIPQFGELEVGLFVVIKECLLICSIFLHKRAEDRVAQQGFVTWELKKTLLVATQKFLEVRVVKDQRVRSPGPLKTRPLFVAPSQGVATREGNNVLITQTHLLAKDLPQVVRTLGGIRKTALRWRLRLVLPAGVEGDLRPTGDLDGHNSGKLVEIGIGEGGELLLDGLEQPHRDVQPRVGAVSQFRRALHSTEGTAGPRRHVERPRGVPREAEHEGRAALLGDEGAELAPGLLDGLAVLGAHGWVILRHGCEQRELRIVECDAVRRG

SEQ ID NO: 38990 - protein, 230 aa, Zea mays
  Clone ID: LIB3078-002-F8_FLI.pep
GNGKTMLAKAVASESEATFFNVSASSLTSKWVGEAEKLVRTLFMVAIDRQPSVIFMDEIDSVMSTRLANENDSSRRLKSEFLIQFDGVSSNPDDLVIVIGATNKPQELDDAVLRRLVKRIYVPLPDPNVRRLLLKNQLKGQSFKLSNHDFERLAVETEGYSGSDLRALCEEAAMMPIRELGPQNILTIKANQLRPLRYEDFKNAMTVIRPSLQKSKWDELENWNEEFGSS

SEQ ID NO: 38991 - protein, 482 aa, Zea mays
  Clone ID: 700238346_FLI.pep
TFQSMGSRFPSHQLSNGLYVSGRPEQPKEKSPVICSSAMPYTGGDIKKSGELGKMFDLHRKSGPLGNQTSRNTSFGGAASNSGPVSNAVGRSNYSGSISSAIPNTGGSSRTKTNSGPLNKHGEPTKRSSGPQSGGVTPMARQNSGPLPPVLPTTGLITSGPITSGQLNSSGAQRKVSGPLDSSVSMKMRTTSFAHNPAVTNLNVGDGYSIKGSIPTTIIWLVALLFLVGFVAGGFILAAIHNPILLIVVVVIFGFVAALVTWNICWGTRGVIDFIGRYSDVDLRTAKDGEYVKVTGVVTCGNLPLESSFQRVPRCVYTSTCLYEYRGWDSKAANATHRRFTWGLRSMERHAVDFYISDFQSGLRALVRAGSGARVTPYVDESVAIDVNPDNKDMSPEFLRWLRGRNLSSDDRTMRLKEGYIKEGSTVSVMGVVQRNENVLMIVPPAEPISTGCQWGKCVLPTSLEGLVLRCEDTSGLDVIPV

SEQ ID NO: 38992 - protein, 106 aa, Zea mays
  Clone ID: 700238613_FLI.pep
SYPWSSIDVISSCRGRTCSCHRSCSRGRPRRTPPRPRRTRARPSSPGPRRGRRWPARRCSSPPGQGTSCRTCSLSRSRSLIRSCKTSSTLWCKRSSISSRINETSR

SEQ ID NO: 38993 - protein, 372 aa, Zea mays
  Clone ID: LIB3067-040-C1_FLI.pep
CCLNRPTPFVGLAFKRKWQNKRKEQGKPCDRPNIVTGANVQVCWEKFARYFEVELKEVKLSEGYYVMDPVKAVEMVDENTICVAAILGSTLTGEFEDVKQLNDLLTDKNKETGWDVPIHVDAASGGFIAPFLYPELEWDFRLPLVKSINVSGHKYGLVYPGVGWVIWRSKEDLPEELIFHINYLGTDQPTFTLNFSKGSSQIIAQYYQLIRLGFEGYRNIMQNCQDNAAILREGIAATGRFGVLSKDAGVPLVAFSLRDSSRFSVFDVSENLRRFGWIVPAYTMPADAEHVAVLRVVVREDFSRSLAERLVSDVRKILRELDARATHAVRVATATAEQSGDGVVAKKSVLEIEREVAARWMNAVNKKKTGVC

SEQ ID NO: 38994 - protein, 266 aa, Zea mays
  Clone ID: 700239016_FLI.pep
FTSSKQASKQGSEEGELCMLDPSTGSLLLSSSCCFCWRRRLFGSRLILLFLLLFFLLLLYHRRLRRCLCRRRCRLRRCSWLGLLLLLLHGDFPGGGLRRRLRLGLLLGDKRCDLVQDEGDRRKQGRGAGLGHRLAHHLGSREVNLSQLIEELGDCSRVLLADLDWLLILEQSLDLRRRCFVGLHDLGLQLCLLVLNLLVNLLLVEGLQEACSCSLLAILVKDLVEARQNLGLPHAGHLDLFFRIYTCSNLCRKEGRRWQLMLLQLC

SEQ ID NO: 38995 - protein, 652 aa, Zea mays
  Clone ID: LIB3067-050-E8_FLI.pep
EEEMAGKGDGPAIGIDLGTTYSCVGVWQHDRVEIIANDQGNRTTPSYVAFTDSERLIGDAAKNQVAMNPINTVFDAKRLIGRRFSDASVQSDIKLWPFKVISGPGEKPMIVVQHKGEEKQFAAEEISSMVLIKMREIAEAYLGSTIKNAVVTVPAYFNDSQRQATKDAGVIAGLNVLRIINEPTAAAIAYGLDKKATSVGEKNVLIFDLGGGTFDVSLLTIEEGIFEVKATAGDTHLGGEDFDNRMVNHFVQEFKRKNKKDITGNPRALRRLRTACERAKRTLSSTAQTTIEIDSLYEGIDFYSTITRARFEELNMDLFRKCMEPVEKCLRDAKMDKSTVHDVVLVGGSTRIPRVQQLLQDFFNGKELCKNINPDEAVAYGAAVQAAILSGEGNEKVQDLLLLDVTPLSLGLETAGGVMTVLIPRNTTIPTKKEQVFSTYSDNQPGVLIQVYEGERTRTRDNNLLGKFELSGIPPAPRGVPQITVCFDIDANGILNVSAEDKTTGQKNKITITNDKGRLSKEEIEKMVQDAEKYKSEDEEHKKKVEAKNSLENYSYNMRNTIKDEKIASKLPADDKKKIEDAIDAAISWLDANQLAEADEFEDKMKELESLCNPIIAKMYQGAGEDMGGAGGMDEDAPAGSGGPGPKIEEVD

SEQ ID NO: 38996 - protein, 460 aa, Zea mays
  Clone ID: 700239551_FLI.pep
GFWLRTLCTRRRRRELEMYGPPSRGGGGAGAAGEQPRVYQVWRGSNEFFLQGRFIFGPDVRSLFLTIFLILAPVVVFCIFVARHLINDFPDHWGVSVMVIVIVFTIYDLTLLLLTSGRDPGIVPRNTHPPEPEAIDMHNDAGNGQTPQQLRLPRTKDVIVNGTIVKVKYCDTCMLYRPPRCSHCSICNNCVEHFDHHCPWVGQCIGLRNYRFFYMFVFSTTLLCLYVFGFCFVYIVKIKDAEQSTFWKAMLKTPASIVLIIYCFICVWFVGGLSVFHFYLMSTNQTTYENFRYRYDRRDNPYNRGTVNNFMEIFCTSVAPSKNNFRARVPAEQGLQQARAPARGFMSPNMGKPIGELELGRKPISWDEPRSAADIRDLEVGLGSLLDEKEGRVAHASPDLSREALPELVEGRAGMHSRRSSWGHRSGTSASMDSLAVQMGTADSHWGSISSVHGTNSGAH

SEQ ID NO: 38997 - protein, 172 aa, Zea mays
  Clone ID: 700243371_FLI.pep
SPSPSSDITETGRQSSNQALSPLMRRASWMSLGMMVTLLAWMAQRLVSSKRPTRYASAASCSAATAEDWNRRSVLKSCAISRTSRWKGSFRMSSSVLFWYLRISRRATVPGRNLCGFFTPPVAGADLRAALVASCFRGALPPVDFLAVCFVRAIGESCERAGGAARSKDLKS

SEQ ID NO: 38998 - protein, 221 aa, Zea mays
  Clone ID: LIB3068-041-A8_FLI.pep
SAAPEPASTDPESESSSAPQPIVIVVGWRFVRVGTLLCCVACSAVCTALLSCRRVAHLTDPLPFTQVHPETYALVVSTENITLNAYLGNHRPMLVTNTLFRMGGAAVLLSNRRADRARARYRLVHTVRTHRGGASDESYACVTQEEDAEGNVGVSLSRGLMSVAGDALRSNITALGPLVLPLSEQLRFLAAALLRRVAAVKPYVPDFKLALEHFCIHAGGR

SEQ ID NO: 38999 - protein, 103 aa, Zea mays
  Clone ID: 700243771_FLI.pep
RRELDDQYVNLYGTFYQIYRSNRSNTISQSGLFILIRALASYILEVSRGKVPEIVLARICTPFAKSLCTYTSRRRCFALLIQFCKDQREHISKVSPCRRFDRI

SEQ ID NO: 39000 - protein, 468 aa, Zea mays
  Clone ID: LIB3068-048-G11_FLI.pep
AAESMARSGREADPGEEERKLVLGKYELGRLLGQGTFAKVYYARDLSAGAGTGHSCSVAIKVIDKARLRRTEGMVEQLRREISIMRMVRHPNVVGIREVLASRSRVFVVMEYARGGELFAKVARGRLDEDHARRYFQQLVAAVGFCHRRGVAHRDLKPENLLLDEAGRLKVTDFGLAALPEQLRHDGLLHTQCGTPAYVAPEVLRKRGYDGARADLWSCGVVLYVLLCGFLPFQHDNYVKLYQKIFKADYQVPPWVSGDARRLIARLLVVDPAKRASIAEIMCTPWFRKGFVPPVLSPPVTPKKQQLDEGAALFDNDDDDNSNSNHSGATSPRSCNAFQLISSMSSGFDLSGLFESEQKTATVFTARAPAATVVEKLESVARALGFEVTRGKGWKVRMEAKAEGTNGRLAATAEVLEVAVDVTVVEFVHDAGDALDFNKFCAVDVRPGLTEIVWAWQGDSPAAAVGTA

SEQ ID NO: 39001 - protein, 401 aa, Zea mays
  Clone ID: 700244225_FLI.pep
QVELMDKPIQVRARVDDGGIMWSENIVPNCNWESGETMFYSEFKVLLLKGITSDIEWAGDDHLIYITTESILRPGLQASESKRYLFVKSGSKNTRFIFYLDILKQNKELAVLTPCVYGVDTTPSHCGNHVFMKRRSDELYNSELVACPLDNVAEITSPDHCSSPELQDLLHTRQQMLQQVQMHLQRAQVRMKRQAGKGRMERSFSVGDRVYVKLQPYCQSSAAERVNHKLAFKFFGPLSMVRKVNPVAYEVALPEGSNVHPVFHVSQLKSFVPANVISSSVLPALTPDYQIPEEVMDSRLQRRAGKEVPQLLVRWTSWPPSLAIWEDEHWIKEQFPRAPAWGQAVSEGGGDVNDAGIQDGMGKATQGGAGESPAGGEGDAVPAAQARPADHKAQQEEVHRP

SEQ ID NO: 39002 - protein, 245 aa, Zea mays
  Clone ID: LIB3068-049-H10_FLI.pep
YLTCHYLKSAGVTSGSFSSPLWRSASSLLCARSSVTRTRPVDHIHRSRAMKVKVKAKLLRLHGKSFMLGALTMMMTRLVETGRATAHRGIVPASELLWKASLVVLLVAVHAVAAELLGENALLLCMPEILPVLLWLSVRLDTADDRIKLVLDSNLLPAAPPAVLAMLATGEPLLYWCRKALVSCVVSALLTFYVYFMLCQWPGGQRNRTLTGASLQHAVIHLKSWAKVLLKAVVVLLIFVCFRSN

SEQ ID NO: 39003 - protein, 449 aa, Zea mays
  Clone ID: 700082285_FLI.pep
SRERPAYPLSLSLSPVSTGSANRNSHGLHRRRRGRGGGRGGVHVRDAAGVVVHPAHDAEERHRAGPAGGAAEGGRRRQGGAGARGGGGADARGARRPRRRGGHGGPHAPPARLLRRRPVPDGGPGRPVRAPLLRRARLQVAHPQRGRRVHGRPRAHEPGQGPHGELVLSQGRGAGRRHPVQQGVRDDGVRVPRHGLALQPRVQRGHEEPLGDHHQEAAGLLHGLRGRVDAGGRGRRRGRHAARHHVPPPAHLRGQLRPAARHLRGAAVPRRAPRGRGHVRVRARRRRHPHEVDPPRLERRALRHAAQELLRRAAGKWQGHRRRVRAAGQHGGHPQGAGRLPRRHDHARAQPRRQGAVRARVPRARKGRRLLRVQGHLHLRQRLGHRVHQVNHRRRDEMAWLPHALLAWSSYRTSPSSSSSGYCAATSLLSRMHVLLLNFLSSYHALWLA

SEQ ID NO: 39004 - protein, 228 aa, Zea mays
  Clone ID: LIB3068-049-H6_FLI.pep
VIYRDFKTSNILLDAEYNAKLSDFGLAKDGPVGDKTHVSTRVMGTYGYAAPEYVMTGHLTSKSDVYSFGVVLLEMMSGRRSMDKNRPNGEHNLVEWARPLLGERQRFYKLIDPRLEGNFSVKGAQKAAQLARVCLSRDPKARPLMSQVVEVLKPLQNLKDMASASYFFQTMQAERMAHSSSMNGRSSMNGGFKTQSPFGRHGQPPPVRSLSDGPRASPFRYSPKPNVK

SEQ ID NO: 39005 - protein, 276 aa, Zea mays
  Clone ID: 700087582_FLI.pep
SGRAGGVSTQPDREHRDSSTAADTPPLGAPVLGRRRKKPNAITAASTRKDEAIFNEIQSQLKHNNVTVDVKATSESNVITTITVHELGTPGLKAILCVPFPYQKSAKAELQYLHHHAGVAASVGLNANPVVNLSGVFGTKAIAVGADAAFDTSSGDLTKYNAGLSYTTPDFVAAATLNNKGDNIAASYYHSVSPTTAVGGELSHSFSTNGNTITFGTQHALDPLTTVKARFNNYGMASALIQHEWRPKSLVTISTEVDTKAIEKSSKVGLSLVLKP

SEQ ID NO: 39006 - protein, 230 aa, Zea mays
  Clone ID: LIB3069-008-D4_FLI.pep
LILSQINHRNVVKLLGCCLEVEVPMLVYEYVPNGSLHAYIHGDGDGGGGGGEAKLNLPPGARLRIAAESADALAYMHSSASPPILHRDVKSANILLDGDLAAKVSDFGASRLAPAGEEAVATLVQGTLGYLDPEYLLTSQLTSKSDQGRAWLNSMLRGGRAGAPHGEEGVRPGGGRGRGRGGRPRVLLRHGGAGGTAPGDHGPAGHRGGRSGGAGRGLGAADAVPQHYRR

SEQ ID NO: 39007 - protein, 337 aa, Zea mays
  Clone ID: 700089012_FLI.pep
PPNLLSISNFHAAANMTTSAAASATAALSTPSSVNPHRSSSALRLPASLRRSHPNRFLSSSPSRSPLVPVSAMASPAAAGETSSRKKLIIFDAEDDLAASLAKYTSELSAKFAAERGAFTVVLSGGSLVKALRKLAEPPYLEAVDWSKWHVFWVDERVVPKDHADSNYRLASDQFLSKVPIPADQVHAINDELSSEGAAGDYETRLKQLVKNGVVKMSPVSGFPKFDLMLMGMGPDGHVASLFPGHPVVNENQKWVTFVKDSPKPPPERITFTFPVINSSAHIALVVTGAGKAGAVHKALSEGQSTSDLLPVEMVSLQNGELVWFTDKPAVSMLSSI

SEQ ID NO: 39008 - protein, 184 aa, Zea mays
  Clone ID: LIB3069-033-A5_FLI.pep
EDYVYPATRSQNLIVVSCEPVTTIKFWDLVAGRTMCTLTHHKKSVRAMALHPKEKAFASASADNVKKFNLPKGEFLHNMLSQQKTIINSMAVNEDGVLATGGDNGSLWFWDWKSGHNFQQDQTIVQPGSLESEACIYALSYDVSGSRLVSCEADKTIKMWKEDLTATPETHPINFKPPKDIRRY

SEQ ID NO: 39009 - protein, 171 aa, Zea mays
  Clone ID: 700218910_FLI.pep
IWFIFFSICLGICTILLSFSLNTAGIVFRPCFLSSIVDELPLQRLGGECVDGVDLQIIIILAGSPRRFCGLPLLALFVEALDLALVAPGNPPDIPVDGLLVEVAEGCNVTAVGGIELDVFLADIHLIVVYFRRQLRWENDLVLVLPTAAAPLPHRDWRRLVPNCSTRKEEA

SEQ ID NO: 39010 - protein, 351 aa, Zea mays
  Clone ID: LIB3069-055-D11_FLI.pep
SLTLEGVVYVVDSGFSKQKCYNPISDIESLVVAPISKASARQRAGRAGRVRPGKCFRIYTEEYYLNEMQSEGIPEMQRSNLVSCIIQLKALGIDNILGFDWPASPSPEAMIRALEVLFSLGILDEDAKLTVPIGYQVAEIPLDPMISKMILSANDFGCSDEILTIASFLSVQSVWVSVRGVKKEFDEAKLRFAAAEGDHVTFLNIYKGFHQSGKSSQWCYKNFLNYQALKKVVDIRGQLLRIVKSFGIQLKSCDRDMQAVRKAIIAGSFTNACHLEEYSQNGMYKTIRTSQEVYIHPSSVLFRVNPKWVVYQSLVSTDKHYMRNVIAIEPSWLTEAAPHFYQFRTFNPAPH

SEQ ID NO: 39011 - protein, 409 aa, Zea mays
  Clone ID: 700219610_FLI.pep
RNFSFLHPQPYSPFIRTNEAARARSRRSFPTSKPTPLPAAAMATVMQKIKDIEDEMARTQKNKATAHHLGLLKAKLAKLRRELLTPTSKGGGGAGEGFDVTKSGDARVGLVGFPSVGKSTLLNKLTGTFSEVASYEFTTLTCIPGVIMYKGAKIQLLDLPGIIEGAKDGKGRGRQVISTARTCNVILIVLDAIKPITHKRLIEKELEGFGIRLNKTPPNLTFRRKDKGGINFTSTVTNTHLDLDTVKAICSEYRIHNADVSLRYDATADDLIDVIEGSRIYTPCVYVVNKIDQITLEELEILDKLPHYCPVSAHLEWNLDGLLEKVWEYLDLVRIYTKPKGLNPDYEDPVIVSSKKKTVEDFCDRIHKDMVKQFKYALVWGSSVKHKPQRVGKEHELDDEDVVQIIKKI

SEQ ID NO: 39012 - protein, 209 aa, Zea mays
  Clone ID: LIB3078-032-D1_FLI.pep
RRPHWPEDHHRHLRWLGSPRRGRLLRQGPDQGGPQRGLRREAGCQEHRRRRPRPPRHRPGLLRHRRARAPIGVRGHVRHRRDPRQGDPEDREGELRLQARHDHHQPRPQERRQRALPQDGGLRALWEGRPRLHLGGGEAPQGGEAVFCMRRLLCFGRSFWSGLPALYHAFLWLLRVVILDLPLAYHLYCTVTVLISGTCAGSYCVCLFT

SEQ ID NO: 39013 - protein, 310 aa, Zea mays
  Clone ID: 700219918_FLI.pep
VRNGRRTAGEASPDWYIDRLIGGGGRGGGRQMAACRGFFECLLRLLNFILTVAGLAMVGYGIYLLVEWMKISEDGSSGGLTAEVLVSGRPLLGAVALGDSFLDMLPKAWFIYLFIGVGATVFLVSLFGCIGAGTRNTCCLCFYAFLVILLILAEAGAAAFIFFDHSWKDVIPVDKTHNFDVMYGFLKKNWEIARWVALGVVVFEAVLFLLALVVRAMNKPAEYDSDDEIIAIGRSPTMRQPLIHAQNVPATGVPVPTLDQRSSRNDAWSQRMREKYGLDTSQFTYNPSDPSRYQQNGAPQAEERSRCTIM

SEQ ID NO: 39014 - protein, 182 aa, Zea mays
  Clone ID: LIB3078-051-F1_FLI.pep
VKRSRLASVLHAGGDALHGEDERVFQAGRVLARRVQLDQSGGLVLVGELLGQRRLGRHLEVGVPYPLQRVGLEHVQGGDVGVAQHQPLLQEWIAFKNILVPSDLEEKLLCLHVFVPELLPKGLEFFRHKQLVIQAGNAGVSLGENHLQQVQGDPEEWPLVVHLFEDLEVPDVLVDGELEGGA

SEQ ID NO: 39015 - protein, 210 aa, Zea mays
  Clone ID: LIB3075-055-G1_FLI.pep
HELDRSCEGVDDDGASDIVGPVCPDEPPKDVAHPELVLLRRHRHLELLFLTDLAELKHPRLHLHGDPNRRAPGREVLGRTADVLQPSRHRLRAAQRRHHDGRVVEVLHGGRLLSAISWARELAGAEPLHVCRGDAHGAEECEVVVGAGVVHEARVDGAVGVHVAGAVGEGVGLLAIVVAHGRSRVVLGARRGHDRGAHRGGAPLGARRLE

SEQ ID NO: 39016 - protein, 711 aa, Glycine max
  Clone ID: LIB3242-170-F10_FLI.pep
ACVLVSSLLTWFCFVAGLKDDDLYRELWKLCAGPLVDVPRNGDRVFYFPQGHMEQLQASTDQELNQEIPHFNLPAKIFCRVVNIQLLAEQDTDEVYACIALLPESDQTEPTNPDPNVSEAPKQKFHSFCKILTASDTSTHGGFSVLRKHATECLPELDMTQSTPTQELAAKDLHGFEWKFKHIYRGQPRRHLLTTGWSTFVASKRLVAGDAFVFLRGEHGQLRVGVRRLARQQSPMPSSVISSQSMHLGVLATASHAVMTRTMFLVYYKPRTSQFIVGLNKYLEAVNNKFSLSMRFKMRFEGDDSPERRFSGTIVGVGDVSAGWSNSQWRSLKVQWDEPATIPRPDRVSCWEIEPFVASTALNVTQPAVKGKRSRPADVLSSAASGFWYHGSSNELSQLGAAAEVQSKENQVVPCSLRQKDIINSNPINANNSSISTRVRMEGVWPSSPHLNATPNLFSDPNNNNSNNGVSARSLISGYPNVPSRSSDGPTCDGVEDGKKTENSLDCWLFGVNLTNNCSNVITTPSEREQRGPSSSVVLSGPKESIPAAACETERVQTPNYSLSNKGQKQIISEASPNQWQNKQATVLSMRTRTKVQMQGVAVGRAFDLTTLSGYDDLIDELEKLFEIRGELRSQDKWAVTFTDDENDMMLAGDDPWPEFCNMVKRIFICSREDLKKMKCCKLPASSSEVEEILLSPDSQNRDETQQSHMP

SEQ ID NO: 39017 - protein, 237 aa, Zea mays
  Clone ID: LIB3137-024-A7_FLI.pep
HPQSSSRRSPPQAFHDVRAIQVHRVLDCFDGIFGWEEIIHCNFFVFILFIIFKKAADLLKAMRGEVRDVLVVTEFRVISTDSYDLIIFLTLIDHRHEPNSTSSQETPRDNLFLHQYEDVHGVAILTECAWNETIVMWVNNRGVKDTIHLDQTRYLVQLILNLAASRNLNHTIEHFRSLWSYLQIMPWVSSNIFLGHGRKDTLIESSSSSHDGADRMVPSLARWREREEASGEVAERP

SEQ ID NO: 39018 - protein, 154 aa, Zea mays
  Clone ID: LIB3151-007-A3_FLI.pep
PAAILQHIVSSVGDTAGSSVGAWSRLLQAAHRRQLLRYLRRQQPRDLAALRLLLQDGLEDQAEDRLVPVLRLHLPELLATLLPQRLALRRAVGRRRRAALMPQKLDALAQDRGAANAAGSLQLARAWMRLLARAWVWLGMRLRPGRLSRVVAWW

SEQ ID NO: 39019 - protein, 332 aa, Zea mays
  Clone ID: LIB3150-012-C10_FLI.pep
LRNNDLNQDDPISEVETEANDGDESKLPLQLAIVGRPNVGKSTLLNTLLQEQRVLVGPEAGLTRDSIRAQFQFDSRTVYLVDTAGWMERSGKEKGPASLSVVQSRKNLMRAHIVALVLDAEKIAKSKSSMNHPEIVIARQAIEEGRGLVVIVNKMDLLRDNQTLFNKVMDAVPREIQTVIPQVTGIPAVFVSALEGRGRIAVMRQVIDTYEKWCLRLSTSRLNRWLRKVMSRHSWKDSATQPKVKYFTQVKARPPTFVAFMSGKTQLSDTDIRFLTKSLKEDFDIGGIPIRIIQRSVPRKAYAKRNNTRNTGPRVVRMKTDKRTAVSDPALS

SEQ ID NO: 39020 - protein, 226 aa, Zea mays
  Clone ID: LIB3158-005-B9_FLI.pep
ASLRPLRAGGKPVGLLPFPRRLACATAAGEAPPVEQRDEAEPAPAAASNGAAVKSEAPPPPAPAPVPAFRDARWVNGTWDLAKFDKGSGVDWDAVIDAEARRRRWLEDYPEATNTDEAVVFDTSIIPWWAWMKRFHLPEAEKLNGRAAMVGFFMAYFVDSLTGAGLVDQMGNFFCKTLLFAAVAGVLLVRKNEDVESLKKLVDETTFYDRQWQATWQDDSAGGPNN

SEQ ID NO: 39021 - protein, 136 aa, Zea mays
  Clone ID: LIB3158-010-D7_FLI.pep
QSSAAVSSLEGKRDGRFSRETRRGQTRHSPPQEDARPSGLAGMSRHCRGSLRPALERDGPDDHLVVDGSQGGADEGADPEDPMVAPGMIPVVDDGGAKAPSRVDAGAGDGDGGKVDQEHREPNWQWGKDLFSPKKN

SEQ ID NO: 39022 - protein, 249 aa, Zea mays
  Clone ID: LIB3152-022-G7_FLI.pep
TNKCFSIECMIQLGQRDPGTTMQAINQPKLLHQTMQNINKRISTANGTAGTRGFIRNTVCAMLPVPHPSMDASPRIQQLAGWYSTDTTSSASGVGGEPVGRVGERAVGPALVDLLRLRGVPGGAERDVQRVEVVRPRVRHPRVRRLLLVPLHVLVPSVEERVLEPGVELGGPLRHGRVGRANLAQVVRGATGAEDEDAFLPQGRQRLAEVVVVRAVAVGLHRELAHGDAGVRVHEHQRHPGAVVEPAAV

SEQ ID NO: 39023 - protein, 463 aa, Glycine max
  Clone ID: UC-GMROPIC107E04_FLI.pep
MAEPLSNTELSSSKTLDPTNGHDSTSEPHQTAPEDAQLNREDDVVPTAKRKRDDDVEDRSLHPLWKTSLCSYFRSHNGSCSHGGACRYAHGEEELRPRPDNTWDPTSERAKKALKTESDEKRAVSEEVMMTEAVVDDGDDGCGANHALNICLVHLPRKWSSENLRTFLGEQGIPFKHAKKKKGMMIGFVTFEDEEQLKSSTMELEGKSIGNKTVKVANVLPRSFEKKSNAIVASRQELDEENAGVDVASSGTLDGETNNDNLAKTRNVRDAVTPLAHMAYADQLEQKTSSLMQILKKLTRNARKACPNGVSLPEWILKSREIGGLPCKLEGIIASPIVNGYRNKCEFSVGYSLEGKVTVGFMLGNFREGVTAVEEAVDCPNVSTVACKYATIFQEFLQDSDLPVWNRFKNTGFWRQLTVREGRTNGNVVDAETFSGVAEVMLIVQGDKTPDYLKLMICIPLFF

SEQ ID NO: 39024 - protein, 206 aa, Zea mays
  Clone ID: LIB143-049-H1_FLI.pep
RSSYRSRAAPTEKPATSNYNTRRTSTQEKPTKGERASLGGGELGDGLGALRDGVLGELAGEHEAHGGLDLAGGDGGLLVVARELGGLAGQLLEDVVDEGVHDGHGLGGDADVRVHLLQHLEDVDLVRLHALLALLLATLALAALLAGGLARGDPLLRLGLLPGGRLLGRGLLLRRLLRRGLLLGLGRHRSLVGRGIGNRLQGKCEE

SEQ ID NO: 39025 - protein, 613 aa, Zea mays
  Clone ID: 700220975_FLI.pep
GNPTPGDGDPALLGSCIPHTLESSKDPAAQQPPFSPLRSQSYRRLPRSRRCLHSTMALHAPVHVMKDSLKRESGAKVYQANIQAAKAVADIIRTTLGPRSMLKMLLDAGGGILVTNDGNSILREIDIAHPAAKSMIELSRTQDEEVGDGTTSVIVLAGEMLHVAQAFIDKNYHPTVICRAYTKALDDAIAVLDKIAMPVDVNDRGAMLGLVKSSIGTKFTGQFGDLIADLAIDATTTAGVDLGQGMREVDIKKYIKVEKVPGGQLEDSRVLKGVMINKDVVAPGKMRRKIVNPRIILLDCPVEYKKGENQTNAELMKEEDWQVLLEMEEEYIKNLCAQILKFKPDLVITEKGLSDLAIHYLSKAGVTAIRRLRKTDNNRIAKACGAVIVNRPEELQESDVGTGAGLFEVKKIGDEFFAFIVDCKDPKACTVLLRGASKDVLNEVERNLQDAMSVARNILKNPKLLPGGGATELTVSATLKQKSSSVEGVEKWPYEAAALAFEAIPRTLAQNCGLNVIRIMTQLQGKHANGENAWVGIDGRSGDIVDMKERKIWDSYSVKAQTFKTAIEAACMLLRIDDIVSGIKKKQAPGASAPKQPQIETEGDADNEQMIPE

SEQ ID NO: 39026 - protein, 457 aa, Zea mays
  Clone ID: 700221047_FLI.pep
WKPYSSPSAAVAAQFPHPIPTLRSTDPYMMGEAKENDVYEEELLDYEEDDDKTVDGSAAKPTGEVAKKGYVGIHSSGFRDFLLKPELLRAIQDCGFEHPSEVQHECIPQAILGMDVICQAKSGMGKTAVFVLSSLQQIDPVAGQVAALVLCHTRELAYQICHEFERFSKYLTEVKVAVFYGGVHIRKHKDLLKNECPHIVVGTPGRILALARDKDLSLKNVRHFILDECDKMLESLDMRRDVQEIFKMTPHDKQVMMFSATLSKEIRPVCKKFMQDPMEIYVDDEAKLTLHGLVQHYIKLSEAEKNRKLNDLLDALDFNQVVIFVKSVSRAAELNKLLCECNFPSICIHSGMTQEERLTRYKNFKEGHKRILVATDLVGRGIDIERVNIVINYDMPDSADTYLHRVGRAGRFGTKGLAITFVSSASDSDVLNQVQERFEVDIKELPEQIDTSTYMPS

SEQ ID NO: 39027 - protein, 151 aa, Zea mays
  Clone ID: LIB143-063-G12_FLI.pep
SGAGLQPFSCSHTQTLVAIRPQGLEMKSRARSTAGDSRLSVRKTKAEKDPNKPKRPPSAFFVFMEEFRKDYKEKHPNVKQVSLIGKAGGDKWKSLSDAEKAPYVSKAEKLKAEYTKKIDAYNNKQSGDPTASGDSDKSKSEVNDEDEEGDE

SEQ ID NO: 39028 - protein, 268 aa, Zea mays
  Clone ID: 700224734_FLI.pep
AAAAAAATMAVGKNKRISKGKKGGKKKTVDPFSKKDWYDIKAPSVFSVRNIGKTLVSRTQGTRIASEGLKHRVFEVCLADLQGDEDQAYRKIRLRAEDVQGRNVLTNFWGMNFTTDKLRSLVKKWQTLIEAHVDVKTTDNYMLRLFCIGFTKRRPNQVKRTCYAQASQIRQIRRKMVEIMINQASTCDLKELVSKFIPEVIGKEIEKSTSSIFPLQNVFIRKVKILKAPKFDLGKLMEVHGDYKEDVGVKLERPVEGDEAGQEVAAAE

SEQ ID NO: 39029 - protein, 162 aa, Zea mays
  Clone ID: 700157378_FLI.pep
VLPWLLRTGLDSSSQQKHPVPSASPCSALVTHRQKKNSIMSEVKDSNVPAALDGNPQPMDQTEDNSMPSAQQQEEAIKKKFGGLMPKKPPLISKDHERAYFDSADWALGKQGVAKPKGPLEALRPKLQPTRQQQQQRARRPIYTSSENEDGDGAGAEDMNIN

SEQ ID NO: 39030 - protein, 158 aa, Zea mays
  Clone ID: LIB3079-036-D4_FLI.pep
NSERDPMAPKAEKKPAAKKPAEEEPAAPAEKAPAGKKPKAEKRLPAGKSAGKEGGVDKKGRKKAKKSVETYKIYIFKVLKQVHPDIGISSKAMSIMNSFINDIFEKLAGEAAKLARYNKKPTITSREIQTSVRLVLPGELAKHAVSEGTKAVTKFTSS

SEQ ID NO: 39031 - protein, 284 aa, Zea mays
  Clone ID: LIB3136-025-G3_FLI.pep
KAECLAVRSSFWWPEAARSRNKQDLHMLINRVCILPDDNTDVGSNVVAMAFPNLINLLYCYCPSLAVLGGHAHLNGCQRRVQLLRHRVRPRSELIPLALVHDCRHGSNHHRGPGAEHLVCAHQIVDGNQAFLNLVPAVPGELDDALARDARQDGAPGVRRGDHAALDDEHVARRHLLQVPLVDRVQVQHVREPLALGVHLRPQHRRVVGDGLDPAGAAGHRAVELVMHHQVDGRQALLEVVPNGCGVDEEGVLGGRSQPKDRAAPHEQRPEVQGSLPLRRHPAP

SEQ ID NO: 39032 - protein, 183 aa, Zea mays
  Clone ID: LIB3153-005-H1_FLI.pep
ARHRKHPPPSTSDITTTNSSSATAQALSPLMRRASWMSLGMMVTLLAWMAQRLVSSKSPTRYASAASCSAATAEDWNRRSVLKSCAISRTRRWEGSLRMSSSVLFWYLRISRSATVPGRKRCGFFTPPVAGADLRAALVASCFRGALPPVDLRAVCFVRAIRSGEEEGAVCTPGSGSGGGKGR

SEQ ID NO: 39033 - protein, 328 aa, Zea mays
  Clone ID: LIB3159-017-E7_FLI.pep
LVHSKILLWYTVHIRRRNKTPALSYLTKIRDYEVILVVGDLDPGLLALANPSAAAGGGFGRPVVRRVVRRLVSEKLRHLRQRPAGFGRLLVEEVDVGEPLQLLEPERRLLVQLVAGLVVGELQELVDGPALRQELRRRGHLLHRGGDGGVRWLDGGLGRGVVVGVVGVAGVAAGGSRGEADADAGGQVALVVPGERARDVDGLVAVLAEERPVLHAEDERRFLLADVAARELGGERLEREALVLARELVGGVDLDVAARAQRGLVGAAHHRGSRALARVALDLHGRSTSRSLLPARQHPANNNQGGENEEDNATDDCGGGRSGRQGRG

SEQ ID NO: 39034 - protein, 174 aa, Zea mays
  Clone ID: LIB3279-010-E6_FLI.pep
SIPDGAQGREEARGEEAGGGEGREEAKGGEARAEQGGRREEGKEEGEEERRDVQDLHLQGAQAGAPGHWHLVQGHVHHELLHQRHLREARRRGRQARPLQQEAHHHLPGDPDLGAPRPPRRARQARRIRRDQGGYQVYILLGCRRTLLRSCLILIFRPVLGCFCNNVEFVIIAE

SEQ ID NO: 39035 - protein, 259 aa, Zea mays
  Clone ID: 700085254_FLI.pep
IFTRKISFAFLFLEVGAPLEIVGRLSALADDVETNSDGRQEEQPADPELDQFMEIYCHMLVRYRQELTRPIQEADEFFKSMEAQIDSFSLDDNGYEEGGGSSDEDEQETVDLGGLPVPETGSPSGEGKELKNHLLNKYSGYLSSLWRELSRKKKKGKLPRDARQKLLHWWQLHYRWPYPSELEKAALAESTGLDAKQINNWFINQRKRHWKPAPPTMALGTPDYRMGQHGGGASSSSASAGLRVQGQYFTGGSSYPRGP

SEQ ID NO: 39036 - protein, 175 aa, Zea mays
  Clone ID: 700453322_FLI.pep
SWHPQRVCSVQATKKRCPAAQRKKRAEEDGSYEADRPQVHGRQGPPQAARHQGGEEVGADDRRREEAPQVQARNRGAARDPQVPEEHGAADPQAALPAPGARDRAGLQDRPPVPEPRRAGAPGGRRGLPRRPLRGHQPLRHPRQARHHHAQGHPARPPHPWRARVAIISEDLMNV

SEQ ID NO: 39037 - protein, 209 aa, Glycine max
  Clone ID: UC-GMROPIC108F07_FLI.pep
KQPLPRILSVFNSLDFTTPITMRVSTETEPETKKIKRIRGGGDSSKHPLYRGVRMRNWGKWVSEIREPRKKSRIWLGTFPTPEMAARAHDVAALSIKGPAAILNFPHLANSLPRPASLAPRDVQAAAAKAAHMDPSSLSSLVSAMDLSSASDELSQIIELPSLESTDDGSVDLKKEFVFVDSLDAWMYQPPFGFDTEQDTGFEGLMWNY

SEQ ID NO: 39038 - protein, 172 aa, Glycine max
  Clone ID: UC-GMROPIC056A03_FLI.pep
RTFYQLSTFKQRCCFLYTTIRDKESEVGMASCLMLLTKVSDTETPSRKRVLSGGDFKCKTCNRKFQSFQALGGHRASHKKLKLMASNLSCSTVTQKMHQCPICGIEFAIGQALGGHMRKHRASLNDGLITHDHVVPTSSGTKRLRLCLDLNLAPYENDLNLNLRTPTLNLFV

SEQ ID NO: 39039 - protein, 200 aa, Glycine max
  Clone ID: UC-GMROPIC062G11_FLI.pep
VIINSYIISLSHVFFALAPPLPSTTTIFDSAFSDSSFVVTGRIMEPMDIVGKSKEDASLPKATMTKIIKEMLPPDVRVARDAQDLLIECCVEFINLVSSESNEVCNREDKRTIAPEHVLKALQVLGFGEYVEEVYAAYEQHKLETMQDSLRGGGKWSNGAEMTEEEALAEQQRMFAEARARMNGGAIASKQPDADQSLDS

SEQ ID NO: 39040 - protein, 116 aa, Zea mays
  Clone ID: 700160279_FLI.pep
TTVKYAQILRTECTVRRDRCSRQQWLHSHETSHVYVQCSRMQSMQTDVRSAVPRIAPVTRNLISVGQTDEVSSHEYAPQKPDRPHTRASLALRTTISEACSPTLSVLARRWDGNDC

SEQ ID NO: 39041 - protein, 120 aa, Zea mays
  Clone ID: LIB3059-029-B11_FLI.pep
PRLTSSSSSTTRPSLPTTRARALQLRRLLPRRKRRKMKRSLTSPSRRSMTRMMKRVVRRMKMMTSDGAPRDNGPCFIQQWSGYTRPRGDHKKGAYIHVLELFSFTPHRDVLFLLLSCYNG

SEQ ID NO: 39042 - protein, 97 aa, Zea mays
  Clone ID: 700165357_FLI.pep
RSNLNMLNQTMSEYNNPNIPGTSRNWWCHLHLSPLSRHSYISNLIMKWEALCRHQFQFQRPKEEGLEKMFILYTGKEQKHLSTSYYGQKYIFTFNLE

SEQ ID NO: 39043 - protein, 198 aa, Zea mays
  Clone ID: LIB3069-044-G9_FLI.pep
WLRALATDAAGELDVLGHDGDALSVDGAEVGVLEETDEVGLGGLLERQHGVALESEVCLEVLRDLAHQALEGQLADQQLRALLVLADLAQRHGSGPVPVGLLHAAGRRRRLPRRLQPQHNRRRVSEGNPREQNSGSETGREGQTDGPWWRAACGGPCLPWTCGRSASYEPSSSALFFLCAAGQLAFWLPGRNKLSADA

SEQ ID NO: 39044 - protein, 130 aa, Zea mays
  Clone ID: LIB3150-029-H11_FLI.pep
PVPDYEEAPSLASEAVEGASLALERVDDVHGGHGLAARVLGVGDGVADDVLEKDLEHAAGLLVDEPRDALHATPPSQPPDRRLGDALDVVAEHLPVALRAALAQTLAALAAPRHRRRLSDADQRTGNFSG

SEQ ID NO: 39045 - protein, 140 aa, Zea mays
  Clone ID: LIB3279-008-F2_FLI.pep
TSKSPIPPSSSDHVGAWQGREGSGQRRRQASPQGSPRQHPGHHEAGDPEAGEEGRREAHLGAHLRGDPRRAQDLPRERHPRRRHLHGARPPQDRHRHGRRLRPQAPGSHPLRIRRLRGATAAGGRGKSLGSRSRNREYSG

SEQ ID NO: 39046 - protein, 133 aa, Glycine max
  Clone ID: 700736278_FLI.pep
RSRDGIHPYSLQSTLKRIGVNAIPAIEEVNIFKDDVVIQFLNPKVQASIAANTWVVSGSPQTKKLQDILPSIIHQLGPDNLENLKKLAEQFQKQAPEGAAGSTTAQEENDDDVPELVPGQDFETAAEETKAAS

SEQ ID NO: 39047 - protein, 244 aa, Zea mays; identical to SEQ ID NO: 36891
  Clone ID: LIB3150-023-F6_FLI.pep

SEQ ID NO: 39048 - protein, 60 aa, Zea mays
  Clone ID: LIB3158-018-E4_FLI.pep
CQGLLLHFSRIIPVISIKASAQCADLVLYLWNYRKHAAVIYDWTQETCNWYSYHRLTCPY

SEQ ID NO: 39049 - protein, 205 aa, Zea mays
  Clone ID: LIB3158-018-F1_FLI.pep
YFLQKLLNLKGDDGFRMNDVLVSLWYIMGLWPLVYSMLLLPTGRSSKSKIPVWPFLVLSCIGGAYALIPYFVLWKPPPPPIDEDEIGQWPLKFLESKLTAGLVFALGIGLIIYAGKAGGDDWKEFIRYFRESKFIHATCLDFTLLSAFSPFWVYNDMTARRWKNGSWLLPLALIPFVGPSLYLLLRPSLSSLLEASASASDEFKK

SEQ ID NO: 39050 - protein, 183 aa, Zea mays
  Clone ID: LIB3152-009-A7_FLI.pep
PAAILQHIVSSVGDTAGSSVGAWSRLLQAAHRRQLLRYLRRQQPRDLAALRLLLQDGLEDQAEDRLVPVLRLHLPELLATLLPQRLALRRAVGRRRRAALMPQELDALAQDRGAANAAGSLQLARAWMRLLARAWVWLGMRLRPGRLSRVVAWWRRQMNRRRHMDRRWQVDRRRQVDRRWEMH

SEQ ID NO: 39051 - protein, 251 aa, Zea mays
  Clone ID: LIB3182-014-C1_FLI.pep
LCTSPSPPLGLQTISFIYSRAQKNPIDTMRVLLVALALLALAASATSTHTSGGCGCQPPPPVHLPPPVHLPPPVHLPPPVHLPPPVHLPPPVHLPPPVHVPPPVHLPPPPCHYPTQPPRPQPHPQPHPCPCQQPHPSPCQLQGTCGVGSTPILGQCVEFLRHQCSPTATPYCSPQCQSLRQQCCQQLRQVEPQHRYQAIFGLVLQSILQQQPQSGQVAGLLAAQIAQQLTAMCGLQQPTPCPYAAAGGVPH

SEQ ID NO: 39052 - protein, 309 aa, Zea mays
  Clone ID: LIB3180-045-F7_FLI.pep
MEQVQVVGVTCLGMYHPLLAHKKFDTCIMDEAGQITLPVSLGPLMLATKFVLVGDHYQLPPLVQSSEARENGMGISLFWRLSEAHSQAISALRCQYRMSSGIMELSNSLIYGNRLCCGSLEIANAKLKFSGREPMQLKLKEILNPDRAVIFANTDQIPALEAKEHRTVNNPTEAHIISWIIKELLRRGVAQDAIGIITPYNAQVNIIQQYTDCLVEVHTIDKYQGRDKECIIVSFVRSTANSRASGSSLLGDWHRINVLLTRAKKKLIMVGSRGTLSTIPLLRLLVDKVAEIGGLLDLTNKDAHSFSRT

SEQ ID NO: 39053 - protein, 229 aa, Zea mays
  Clone ID: LIB3150-103-G12_FLI.pep
DKVLTRLECSLLDMALNVFQPSDQFSVLLVFHVGVQKCSKVIIHSNFLQVVLYGTLHFLIQLTELAADVLLHWGRPAAADGKDPPHLHLVRPRGALEGERHSRPRGLGDLNLNTDMHSGRAARVRARAGGRERAVDQRGVHPDLLFLPLGRREHAAQAGPLLARAVLNGEWLRRRWWRWRGGVIEEGDLGAYGTEQAVDEGRAAHVRDIGAIPEEMRVGGWERERAEVG

SEQ ID NO: 39054 - protein, 391 aa, Zea mays
  Clone ID: LIB3137-019-E5_FLI.pep
VPLHSPIMRIGAGANMAACSSVPCSFPAKPDPHRRSPSGILSSHLPRLPATQFRRLRSLSAAASPPASRLRPRASVSTSPAPSKDYEFTDGNGEVELRLDIQKLGIASSKDVFVDVDDTSLLIRAKSDGTLRTLMNVQTLFDGIKSSETIWFIDEDQLVVNLKKVEQELKWPDVDESWESLTSGITQLLTGISVHIVGDSTHINEAVAKEIAEGIGYLPVCTSELLESATEKSIDTWVASEGVDSVAEAESVVLESLSSHVRTVVATLGGKQGAASRFDKWQYLHSGFTVWLSVSDASDEASAREEARRSVSSGSVSYAKADVVVKLGGWDPEYTRAVAQGCLVALKQLTLADKKLAGKKSLYIRLGCRGDWPNIEPPGWDPESDAPPTNI

SEQ ID NO: 39055 - protein, 641 aa, Zea mays
  Clone ID: 700085542_FLI.pep
FWKAFLPVVYNIFNLHGATLMARENDRFLKQIAFHLLRLAVFRNDSIRKRAVVGLQILVRNAFNYFKNTTRLRVMLTITLSELLSDVQVTQMKSDGSLEESGEARRLRKSLEEMADVRSKDLLKDCGLPVTALEAAPDGSSDNMWSWAEVKHLSKCLVQALDAGLEHALLDSVVTVDRYAAAEGFYKLAMAYAPVPDLHIMWLQHLCDAHQEMQSWAEAAQCAVAAAGVIMQALVGRNDAVWSKEHVTSLHKICPIVNTDVSAEASAAEVEGYGASKLTVDSAVKYLQLANKLFTQAELYHFCASIQELIIPVYKSRRAYGQLAKCHTSLTNIYESILEQEASPIPFIDATYYRVGFYGERFGKLNKKEYVFREPRDVRLGDIMEKLSHIYEVKMDGSHTLHIIPDSRQVNADELQPGVCYLQITAVDPVMEDEDLGSRRERIFSLSTGTVRARVFDRFLFDTPFTKNGKTQGGLEDQWKRRTVLQTEGSFPALVNRLPVTKSESLEFSPVENAIGMIETRTAALRNELEEPRSSEGDQLPRLQSLQRILQGSVAVQVNSGVLSVCTAFLSGEPATRLRSQELQQLIAALLEFMAVCKRAIRVHFRLIGEEDQEFHTQLVNGFQSLTAELSHYIPAILSEL

SEQ ID NO: 39056 - protein, 310 aa, Zea mays
  Clone ID: 700150553_FLI.pep
QVEGCKVDLSSAKEYHRKHRVCEPHSKAPKVVVAGLERRFCQQCSRFHGLAEFDQKKKSCRRRLNDHNARRRKPQPEALSFGSSRLSAMFYDTRQHTSLLFGQGPYGQMRSCASSSWDNPGGGFKFAETKGPWLRAGGVDGLHQSSQQVWNNFMPHGVHQDFDGFTAFKGTNAKVLHQGVEASAVASNQNGAPQPDLHRALSLLSNSWAGAGTDQHPTAQLRHHAALSSSLAASSVSVAQASPAGLWQDGGGGATLSHHDYAHAQARFQAIDALGGAGAAAVAAGQELLQLPRPPSPYDGGSSSRYDLMR

SEQ ID NO: 39057 - protein, 351 aa, Zea mays
  Clone ID: 700167617_FLI.pep
LTGQSRQEAKSMAGQLRQRRERRRRRVLAGGGAVAVLALVGDDQHRRVGGVALHMLPGGAAAHRAALVVAAWVGRPLDGFLAVLAPRVLVGGDVRHFGADRRHADRALHTVLPALRAVAAPAVSPVLAAGDVLRVRVVVALALLRRTGGRRLRAAGRAGRRWEHEERRASRAPVRHAPVPGRHRRQERRARAGHAEPGVPAVTGHRLGEVQRQGPRGGSRRRLRGLGGGRSLRLRLRPRRHGATPEPRVPRAVQDGDHLLELGHRHVRELPAVNLLLDLLQLLLLLALRLYRRWGQRPLPGASLGELQDETLHPAQPRRGGLLDGHLLVHPPVPSHQIEGRHLRRRRPTRR

SEQ ID NO: 39058 - protein, 467 aa, Zea mays
  Clone ID: 700264458_FLI.pep
RNYLEPKGNIFLCHPSLLRLTSYHHLFSTAMQHRPAAEAASVDEVGDPPDVGATGSGSWVAGNSALPAEPLEHLGAEGPPGLHPLHGLLVAAEADVKRLQVGHVAGGGGGGGGEGCRRGPRGGGQAVEAARCGRPVGSRGRRVAAPPAGRGRAGRAEAELAERGQDVVDGGPGARPGPAAEGGGGPVRRQRRRLRRGRLGRREECACRRRGHDALGEVALERLATQRGAVVGLGQRAGAPGAGARLLRRGREHPQLVRGVREEADAAAAGRAVLAGLGAVARRVEPALEDAVREVAGVAAPAPALAEVRAGGARVVVPARVAPPRLLPRVREGALGPVVAARAGAPPDLELVHAELVAAVAVHARGHGRRLLVVRLGGAGVVARQVLPQRRQQVRRHLVAADAGVDAAHGDVVGPRRHAHAFAHHHHGDLPWPVARIGLCFVPSLATGLREISWTELISLCCVRKTG

SEQ ID NO: 39059 - protein, 307 aa, Zea mays
  Clone ID: 700217073_FLI.pep
FHSFPPFLFLQASSVVCRQYDEKCRQLRHQESRGESQMSIDKTRAVVKDLHSRILVAIQRIDMISKNIEDLRDKELQPQLEELIGSLTRMWATMLECHRHQHDIIKLVSSTRNMKTSIRSESQFQATLLLQVELNTLCSNFQKWIASHKAYLQSLNSWLLKCVKALQRKRKSSRKKNIKADPITKYAVAPIFKTCESWINLLDDLPTDLEDAIKDLAADINRYVPHQEKQRGGSKLTLSLSRSGRSNGEMGEVHRSYTPMDLQSSLETFLGKLEMFSDVSLQKYMKLKEDIDEAKERYAEAQAAQRI

SEQ ID NO: 39060 - protein, 252 aa, Zea mays
  Clone ID: LIB3608-026-E1_FLI.pep
LAVAISKRIHLMPYRGRGSRPPGWAVDEHGERAPAGPCTARLVGGRGRGGEALAGGAHGERGGRRHARVVVWRHELERAQLRHLPLQPPVLLRQRLAAALQELAVHLRLLQLRPGSAVLEPHLHLTRLQVQLLRQRRLLLGVECVMLLEALLEDGGLVLGQAELLARPTAGVLVVAAASGSRGVVGHLSAAPRRRCALPAEAAGERAVWRRRRAARLLVVLAAATPPGLPGRGPVHVHPPQERHLVAVARGR

SEQ ID NO: 39061 - protein, 233 aa, Zea mays
  Clone ID: LIB3594-029-H3_FLI.pep
AATRRQDGHIVRVAAAEAGCAAADDGGAALSALRSASSFSRRLFSSARRSHQRLRYSQSTSVCFSLVRARRFWNHTSTCRGRRPRRLASCTFCLGLSVLCVLKHSSRTAAWSLESLSFLRPPAPPSAPSSSSLRTPPEPVRSSSPSLSLLAVVVSPLSGDVDARIVIAAPAWCCAYASPRALATSATTELSAAAQGEEEPAVVVEEERLPWEVRVRPRLRPRSRLALAWGIIL

SEQ ID NO: 39062 - protein, 244 aa, Zea mays
  Clone ID: LIB3732-055-F11_FLI.pep
DAAAGRAHCEGGGGRGGLRGGRRRRRGLERPEVGELLLEALVLVGEAVAPALEVLAVHLRLLQLGPRAAVLEPHLHLPRPEAQAVGQLHLLLGVERAVRLEALLEDGGLVLGEPELLAPAGAAVRAVLLVAADASGAGALELPLPLPLGGGGVAAVGRRGRAHRHRGASVVLRVRVTPRPGDVGHDGAERGCPGGGGAGGGGGGGEAALGGEGEAQAEAEVEASAGLGHHPETTVRVRRGLGNG

SEQ ID NO: 39063 - protein, 156 aa, Zea mays
  Clone ID: LIB3912-058-A11_FLI.pep
LAVAISKRIHLMPYRGRGSRPPGWAVDEHGERAPAGPCTARLVGGRGRGGEALAGGAHGERGGRRHARVVVRRHELEHAQLRHLPLQPPVLLRQRLAAALQELAVHLRLLQLRPGSAVLEPHLHLTRLQVQLLRQRRLLLGVECVMLLEALLEDGG

SEQ ID NO: 39064 - protein, 234 aa, Zea mays
  Clone ID: LIB3205-013-E7_FLI.pep
GRGGGIVVAQQQRELLPDGLLRARPGGARRRPRVLPRQRRGRRRLRAQEAAPLQGAVRVPGGQLQGARHAEPEAEARAGEAAQPPAAPGGGVVPEPQSQDEAEADGGGLRVPQAMLRDADGGEPAAAEGAIRAPRAQDGAPLLHAPPGHHPFHVPLLRARRLQLRAGARVIAVPRYWHCGPGTGAEALVVRGSVLVPSEPPAGRPGATATAGAGQLVRRSLLYLRRRERRWIWL

SEQ ID NO: 39065 - protein, 184 aa, Zea mays
  Clone ID: LIB3637-233-C4_FLI.pep
AAPPSLNPHKNCRWAGNVVAAAAATLLPVPAAAACACVLGGEDEQDEEETRLQERHIVRAVRGAAGAGAALSALSSATSLPRRRFSSASCSHQRLRYSQSTSVCFSLVRARRFWNHTSTCRARRPRRLANAAFCFCSAETDTTLVSHPPTHRPPPRSNQPTDRRRGTATSVGSKDEALVTPLPE

SEQ ID NO: 39066 - protein, 155 aa, Zea mays
  Clone ID: LIB3591-001-F8_FLI.pep
SEAEGGAGEAAEPEAASGGGVVPEPQSQVNKAAPLKQHTHAIYTDSSSVANTSLIIILSFRTKLKQTEVDCEFLKRCCETLTEENRRLQREVAELRVLKLVAPHHYARMPPPTTLTMCPSCERLASASASADQAGRAGPCWGPLPVFVDGPARRP

SEQ ID NO: 39067 - protein, 113 aa, Zea mays
  Clone ID: LIB3227-026-F2_FLI.pep
AISKRIHLMPYRGHGSRPPGWAVDEHGERAPAGPCTARLVGGRGRGGEALAGGAHGERGGRRHARVVVRRHELERAQLRHLPLQPPVLLRQRLAAALQELAVHLRLLQLRPGS

SEQ ID NO: 39068 - protein, 198 aa, Zea mays
  Clone ID: LIB3591-097-A11_FLI.pep
LAVAISKRIHLMPYRGRGSRPPGWAVDEHGERAPAGPCTARLVGGRGRGGEALAGGAHGERGGRRHARVVVRRHELEHAQLRHLPLQPPVLLRQRLAAALQELAVHLRLLQLRPGSAVLEPHLHLTRLQVQLLRQRRLLLGVECVMLLEALLEDGGLVLGQAELLARPTAGVLVVAAASGSRGVVGHLSAAPRRSCRC

SEQ ID NO: 39069 - protein, 155 aa, Zea mays
  Clone ID: LIB3245-134-B3_FLI.pep
SDRARGRKEREIPAMQCMLADHQHTRASARRHIACALRTYLARLFWNHTSTWRGRRPSCCAKAAFCRGLRVGCSRKLSSSTADWSLDSRSFFLEPSMPQPPSSSSLPPRRPSSPVTSVVRFAGSSSGISRNLFSDTLYVMHPSDSHTHTRTVFSC

SEQ ID NO: 39070 - protein, 203 aa, Zea mays
  Clone ID: 700167130_FLI.pep
ISRQRRKDDQEKKRGRKKKEEDRIKYTSFSKHLQQHRPAASKERGAAAPHPLPFARRRSKQSKSLGIRVPAPGDALAAPGVGVGGGRDPAVVVGHPGPGARHHVAPQGVVADVPPPRGRLPQQPPVRLRVHLQLRRLHADAVASSPVQDEQQQEEEWRCCPRPWEQDRLGGCRHCVVRDWLTEISLALSFLVQSAMALLSLSA

SEQ ID NO: 39071 - protein, 260 aa, Glycine max
  Clone ID: LIB3051-034-E1_FLI.pep
NTFLCLTSHMCMMEGDENIQASTKGKNVESFTSLEAPRKKSKKIENKRRFSDEQIRSLECIFESESKLEPRKKMQLARDLGLQPRQVAIWFQNRRARWKSKRIEQEYRKLKDEYDNLASRFESLKKEKDSLQLELQKLSDLVVTSQDGGREDKDGKENSIEDGGSGSGYSSWKPEAKKPRFSNDEGLEERIGVYSDDQNENSIIRGVEKSEDKGHQLLRMDDHDHADMPLASLEKWYSGVDPSGILDQSCSSSQWLDFWT

SEQ ID NO: 39072 - protein, 265 aa, Arabidopsis thaliana columbia
  Clone ID: LIB3177-009-E10_FLI.pep
KEEEEEEEEKTMENEREKQVYLAKLSEQTERYDEMVEAMKKVAQLDVELTVEERNLVSVGYKNVIGARRASWRILSSIEQKEESKGNDENVKRLKNYRKRVEDELAKVCNDILSVIDKHLIPSSNAVESTVFFYKMKGDYYRYLAEFSSGAERKEAADQSLEAYKAAVAAAENGLAPTHPVRLGLALNFSVFYYEILNSPESACQLAKQAFDDAIAELDSLNEESYKDSTLIMQLLRDNLTLWTSDLNEEGDERTKGADEPQDEN

SEQ ID NO: 39073 - protein, 453 aa, Zea mays
  Clone ID: LIB3245-432-C10_FLI.pep
ALRMHPVVRGAVTMLSAYGDFNAFPRRLREGCQRTGVKLVDVPNGRKDAADKAILVDMFLFALDNHPPSSIMLISGDVDFAPALHILGQRGYTIVIAIPSSVTVSSALSSAGSFVWDWPSLARGEGVVIPRSLVRRLADYPCYVNSGNMGQFPDNQNEEEAIVYTGTSRNEYGGRPPVNQMYCYNTSQTTREPSKALYTVEDVNCGTSSRPHNLSCRQSESPETDQGLTDEQSWWVRPGDLQGLKGQLIRLFELSGGCVPLVRIPSEYLKLFGRHLYVSEYGAVKLVHLFEKLADSFVVVGKGHKKMICLCNSGDRNLKNYPSTPIILTKKNRGNSALEESTIGACQQLGSSSDELSEDEPIINPDINVACVFNEHLDSFRREIQELLVCYSCPVPLGNFESLYEQRYKKIIDYESLGVTGLEELVEKVKDVVDLHEDQTSKSKFLIANYTTG

SEQ ID NO: 39074 - protein, 188 aa, Zea mays
  Clone ID: LIB3245-454-F3_FLI.pep
DEKRRIKMALDVAKGMNCLHTSVPTIVHRDLKSPNLLVDNNWNVKVCDFGLSRLKHSTFLSSKSTAGTPEWMAPEVLRNEQSNEKCDVYSFGVILWELATLRMPWSGMNPMQVVGAVGFQDRRLDIPKEVDPLVARIIFECWQKDPNLRPSFAQLTSALKTVQRLVTPSHQETQSPHVHQEISVNLTP

SEQ ID NO: 39075 - protein, 119 aa, Zea mays
  Clone ID: 700167949_FLI.pep
GGGSPEAGRRRNDPGSGAARTSAVRVDATADVIAHNTLIFGRRRDLYSRSGGMRQRDKTPPPARCRTTPLILQLVQYKLQLVRWHVCRAPAQRNPGMYAFKRSRPKRTGRYMLQLRTIF

SEQ ID NO: 39076 - protein, 141 aa, Zea mays
  Clone ID: LIB3245-487-F7_FLI.pep
IEGDTEGGADGGNKSSKYINDIVIKPLDRHNLLRPETVESLFVLYRITEDSKYREWGWQIFQAFEKYTKVDSGGYTSLDDVTSLPPSTRDKMETFFLGETLKYLYLLFDENNTLPLDKYVFNTEAHPLPVMRSAEQASHSV

SEQ ID NO: 39077 - protein, 228 aa, Zea mays
  Clone ID: LIB3245-571-F5_FLI.pep
RTASPCPLLLARHRRARLWKQNKPINHGELGVGDGRERRVQAQVPGAQVEAKLPVHHVQDQRADAAGGGGQAGAAGRHLRRLHRLHARERVPLRRLRLRLHHRRELPEEQDLVHLLVPGHLEGQEQDAVRELQGPVQEGAGGHPAGAAGHRPQRDEHGHCQGASSLKRKTRIRSRDRHACPGTTEAVCLASTGGLCMYPCAVFCTAGASVLLLHVNYSRQCSVSTAAR

SEQ ID NO: 39078 - protein, 301 aa, Zea mays
  Clone ID: LIB3245-582-E2_FLI.pep
RMGIHGHPLEIQALFYSALRCAREMIGVTDGSKNLIRAINNRLSALSFHIREYYWVDMKKINEIYRYKTEEYSHDAINKFNIYPEQIPSWLADWIPVKGGYLIGNLQPAHMDFRFFSLGNLWAIVSSLATQRQAEGILNLIEAKWDDIVANMPLKICYPALEYEEWRIITGSDPKNTPWSYHNGGSWPTLLWQFTLACIKMGRRDLARRAVEVAEKRLSDDKWPEYYDTRTGRFIGKQSRLYQTWSIAGYLSSKMLLDCPEMASILVCDEDFELLEGCACSLNKNARTKCSRRAAKSQVLV

SEQ ID NO: 39079 - protein, 252 aa, Zea mays
  Clone ID: LIB3245-584-C1_FLI.pep
GDAEALVLDSEVMVEVIPLEMFCWVFGWLPMVQVVVSAIIHHISQQTASEQCGCGRRSCEERDQVPERETQNCCCSRRKHKPERVHGVLMVAPVKKVMCGVPPVGLGLDVEQEAVQSVFDQRPNKYPKQSHHSYVLNGMTHQNRFHEQAADNRQPYSWHSPPLRASQELQDIISEKAWTLLADDRLVNPFLVPFLKMANLENKGLVEINCELLDNHLPQSARRRQWRALPRERRSPPSPRAARQREGRGGRA

SEQ ID NO: 39080 - protein, 189 aa, Zea mays
  Clone ID: LIB3245-589-A10_FLI.pep
AVEMLLAVEGGGFFSSSATGYSHGLALLLLGRKAEEKPVKVSPWNQYRLVDRETEQVYHLPSAKDQAPGKCAPFVCFGCTANGLEVASPPKATSSNALGTGTSQEEASCSANKTLTTSGSISGSERRGCLKSNSKRDSLEHRIVVSEGEEPRESLEEVQTLRSSMERRKVQWTDTCGKDLFEIREFETR

SEQ ID NO: 39081 - protein, 329 aa, Zea mays
  Clone ID: LIB3245-594-A6_FLI.pep
KRTEVAEDLVLEKTSCPLGVLLIVFESRPDALVQIASLAVRSGNGLLLKGGKEAMRSNTVLHKVITGAIPDNVGQKLIGLVTSRDEIADLLKLDDVIDLVIPRGSNKLVSQIKASTKIPVLGHADGICHVYIDKSADMNMAKRIVMDAKTDYPAACNAMETLLVHKDLIKAPGLDDILLSLKTEGVAIYGGPVAHEVLCIPKADSFHHEYSSMACTIEFVDDVQSAINHIHRYGSAHTDCIITTDDKVAETFLRQVDSAAVFHNASTRFSDGARFGLGAEVGISTGRIHARGPVGVEGLLTTRWIMRGSGQVVNGDKNVAYTHKNLPLQ

SEQ ID NO: 39082 - protein, 296 aa, Zea mays
  Clone ID: LIB3245-594-E11_FLI.pep
QTAMQTPARLSAPSSPLVSSAPPIPVRPQRVAFPSLRRRDLLLLPAALTLPTAPAPLPASARGLFRMPPPRLVNRYFLVRAGESVYEGQGLLRTNPVAKTSVDSGLSPVGLRQTARAALELQRLGACEDDCWIWPSITQRAYQAAEIIAAANGVNRSRIVPEYSFLDARGLGAFEWKSLDTLPEVYASDNISPDLKPPPIRDGTPNESVADVFVRVTQLMSILETQYSGETVVIVSPDSDNLSILQAGLIGLDLRRHSSLFFQPGEVRPVDPSSIPEYKQPPSTVFKCANPPSCKE

SEQ ID NO: 39083 - protein, 275 aa, Zea mays
  Clone ID: LIB3279-059-F3_FLI.pep
QIDSVIYVKIMDPYLASYGVENPIYAVLQLAQTTMRSELGKITLDKTFEERDALNEKIVSAINEAATDWGLKCIRYEIRDINPPAGIRQAMEMQAEAERKKRAQILESEGMKQAQILESEGKKTAQILESEGAMLDLANRAKGAAEAILAKSEATARGMRLVSDAMTTEGSAKAASLKLAEQYIEAFSNLAQKTNTMLLPGDSASPASFVAQAMKTYEQIHSHSQALKSHPQIEELKESGETSPAPSSEASKTPPLIEEADSNQTFSLQRPKNKQ

SEQ ID NO: 39084 - protein, 325 aa, Zea mays
  Clone ID: LIB36-012-B10_FLI.pep
QKGPNSQLALNASAIVSPPVPFRRAAQRAPLAAAAAESHASASIMAGAGGVLVFSAIPFTAVKALANSPLGARLRRRLEDRKAAAAAEADALRAASRGARNNSFWYGGDRPRWLGPVPYDYPEYLTGEYPGDYGFDIAGLGRDPVAFANYFNFEILHCRWAMLAALGVVVPELLDLFGLVHFVEPVWWKVGYAKLQGDNLDYLGIPGFRIAGGQGVVVIAICQALLMVGPEYARYCGIEALEPLGIYLPGDINYPGGPLFDPLGLSKDPVAFEDLKVKEIKNGRLAMVAWFGFYIQAAVTGKGPVQNLVEHLSDPLNNNILSSFH

SEQ ID NO: 39085 - protein, 347 aa, Zea mays
  Clone ID: LIB36-018-H8_FLI.pep
ATISMAAIRQANCLRRDGAGAGARCDAPGTVLMLAFSVVQVVLSQFPGLEHITWLSVVAAAMSFAYSFAGLGLSVGHWVSRGGGGLGGSVAGAAAASSTRKLWNVLLALGNIAFAYTFAEVLIEIQDTLKSPPPENRTMKKAAMYGIGATTIFYISVGCAGYAAFGSNAPGNILAAGGLGPLWLVDIANMCLILHLIGAYQVYAQPVFASVERWAASRWPEAKFMSSAYTVSVSIPLLQRGSVTVAPHKLVLRTAIVGATTAVALAIPFFNAVLGLLGAFSFWPLTVYFPISMHIAQGKIARGTKWWCLLQALSMVCLVISVAVGVGSVTDIVDSLKASSSPFKIVG

SEQ ID NO: 39086 - protein, 390 aa, Zea mays
  Clone ID: LIB84-005-F12_FLI.pep
PSSCILPPWCPSRSPRSPAHSPAASPSSASRRPRRPGPRAARSVRHGGKELVLLVLDRNKYIPGMVASLDNVRGLTLAMSSSAFIGSSFVIKKVGLKKAGDNGVRAASGGFSYLYEPLWWLGMITMILGEVANFAAYAFAPAVLVTPLGALSIIFSAVLAHFILKENLHMFGVVGCILCVVGSVGIVLHAPKERKIDSMKEIWHLATQPGFIVYSCVAVACVLFLIFRVVERSGHRLMLVYIAICSLMGSLTVISVKAVAIALKLSFGGSNQFIYVQTWFFIVVVTICCLVQLNYLNKALDSFNTAVVSPVYYVMFTILTIVANMIMYKDWASQTATQIATQLCGFVTIVAGTFLLHKTRDMGNPPPPPPDQMCLQEAGECAPRSMTSSS

SEQ ID NO: 39087 - protein, 234 aa, Zea mays
  Clone ID: LIB84-008-A8_FLI.pep
QISFETRFNYNAYVNMHPFPIPFLEFSQAEKDLQPWIARDDEQGQKMWRVNQRIVKLIAELMRNHDSPEALVILASASDLLLRATDGMLVDGEACTLPQLELLEVTARAVHLIIEWGDPGLSVADGLSNLLKCRLSTTIRCLSHPSAHVRALSMSVLRDILNHGSVSPNKISRGEQQRNGIQSPSYRCVAAGILNWQADVERCIEWEAHSRRATGLTLAFLSTAAKELGCPLPC

SEQ ID NO: 39088 - protein, 360 aa, Zea mays
  Clone ID: LIB83-006-H11_FLI.pep
KTTSTEHVQPPGQPAAKRRKRSRASNKNSTDEFSQIRKRVRYILNRMNYEQSLIEAYASEGWKNQSLDKIRPEKELERAKSEILRCKLRIREVFQNIDSLLSKGKIDESLFDSEGEISCEDIFCATCGSKNATLGNDIILCDGACDRGFHQNCLNPPLRTEDIPMGDEGWLCPACDCKLDCIDLINELQGSDISIEDPWEKVFPEAAAMTNGSKQDEAFDLPSDDSDDNDFDPNMPEEHVASKEEGSSEEEEDDDGGSDSDDSDFLTCSDDLEPLIDKKKVDDLGLPSEDSEDDDYDPAGPDSDKDVEKKSNSDESDFTSDSDDFCKEIKKSGGHDEVSSPPLPDVRVGDMEKNTAQSNT

SEQ ID NO: 39089 - protein, 110 aa, Zea mays
  Clone ID: LIB84-015-C6_FLI.pep
KDENGDEAPSKKAQMVVQVEAVRVQKELAATEIDGYCEGELIKVTLSGNQQPIRVEITEAAMELGAEKLSGLVNDAYKDAHQRSVQAMKERMADLAQSLGMPAGLGDGLK

SEQ ID NO: 39090 - protein, 405 aa, Zea mays
  Clone ID: 700170783_FLI.pep
AAQEVGRASEKKAMAAESFLFTSESVNEGHPDKLCDQVSDAVLDACLAQDPDSKVACETCTKTNMVMVFGEITTKASVDYEKIVRDTCREIGFTSDDVGLDADRCKVLVNIEQQSPDIAQGVHGHFTKRPEEIGAGDQGHMFGYATDETPELMPLSHVLATKLGARLTEVRKDGTCAWLRPDGKTQVTVEYVNEGGAMVPVRVHTVLISTQHDETVTNDEIAADLKEHVIKPVIPERYLDEKTIFHLNPSGRFVIGGPHGDAGLTGRKIIIDTYGGWGAHGGGAFSGKDPTKVDRSGAYVARQAAKSIVASGLARRCLVQVSYAIGVPEPLSVFVDSYGTGTIPDKEILKIVKENFDFRPGMVTINLDLKKGGNRFIKTAAYGHFGRDDADFTWEVVKPLKKASA

SEQ ID NO: 39091 - protein, 124 aa, Zea mays
  Clone ID: 700171118_FLI.pep
NALFLLVSVRTSRSHLPEDAHHLLSLLLCPLVSSKLSLGKLQSALVLANLQKLGDTLLIRSKASNLSDQAPDHGHPLRCFPLAVGRAQRQLALGDDMALVDAHEEARLRLRRRHEDEHFPYLEK

SEQ ID NO: 39092 - protein, 413 aa, Glycine max
  Clone ID: 700605238_FLI.pep
AFSASSPLSLPCIILFFDPLHTLLAISRVLFFFFFSFTIKLFSITHTHTTVLLTMANFTSFSSSLTHIPPISAPSSSAAFDDSSEDSCSICLEPFSVHDPSTVTCCKHEYHLHCIIEWSQRSKECPICWQSLALKDPASQELLAAVEDEKCMRSRNIANSRAPLGQLNESHDDSCSDDSDFDDQIMKRLVSAARRAHFVQRQERKRSPSAGPSEALGVNSSMHVSEVQTTLTTSSSGGSLPASGVPSTVSIQPPALNTTPESARRPNTSEISFPESFKSKFSAASARYKESISKSTLGLKEKLLAHNVSVKELSKGVQREMNAGIAGVARMIERLDLSSKRSSAPLIAVHSVATSDFPSSGKSVEENGIGGSPSKENGGAVHDVSSDVPPLVTNMQSFRTKTPPFLQSGHGMV

SEQ ID NO: 39093 - protein, 353 aa, Glycine max
  Clone ID: LIB3051-092-C4_FLI.pep
RRWRFTTVTAISRGAPSSSPRLPLSNGSKNEDTLKTLKEKVKEPSVPEPEPEPTTEVLFLCSYDGCGKTFIDAGALRKHSHIHGERQYVCHYDGCGKKFLDSSKLKRHFLIHTGERDFVCPHEGCGKAFSLDFNLRSHMKTHSQENYHICPYPDCGKRYAHEYKLKNHIASHHEKNASVDVTKYTTPPSEKQTKTSKPSGGAYGSASSDRPYACPYDGCEKAYIHEYKLRLHLKREHPGLMADENAEHAQANVDNEMDEASDHDAYVAKRSNGKIQKQSKPKPNLKLPPSKIAKRKLSTPSLTVNKNSWPVKDEPFDEEDSEETEEDRDNVEDGWRYAGGNNEDDDEETEYED

SEQ ID NO: 39094 - protein, 311 aa, Glycine max
  Clone ID: LIB3092-002-D9_FLI.pep
FDPDTCESQAKFGHSGIPSSSSILNLTSNSCNVGTSECLEQSGSTANEGDEGTIFSNREPDIIGTPAKGKKLPQEELSLQQKLSVADVTCTMCKQLLFHPVVLNCGHVYCQICVINIDDEMLRCKVCQSPHPRGLPKVCLELDHFLEEQFPEEYGQRRDAIELQQIKVKPDTPSSCSLDGGKKPENTDWWSDPDSKVHIGVGCDFCGMFPIIGDRYRCIDCKEKMGFDLCGDCYASRSKLPGRFNQQHTSEHKFKLVQPNIIHNIMLRLATAQLGEGSIDLESIGNIEVTSDGAALFGDGEDNHNDSEAAN

SEQ ID NO: 39095 - protein, 275 aa, Glycine max
  Clone ID: LIB3139-069-G7_FLI.pep
EVESHANGKVTGSQGASSRCSEERREGVKRSSNGDVAPGSRHRRSFSLDSSIGNFHIGDESPKLPPSQNRFGQHSPSSSIDGKTSETSMEFGNGEFSSEELKKIKENDKLAEIAMADPKRAKRILANRLSAARSKERKMRYISELELKVQTLQTETTTLSTQFTKLQMDNSELKSENNEYKLRIQALEQQSQLKDALNETLDAEVRRLRRTVAELGGESLLSSRMAQQLAISQQVFQLQHQQHPNQLRHVQLDNSHSQEQTQTQSQCHNGKATAY

SEQ ID NO: 39096 - protein, 280 aa, Glycine max
  Clone ID: LIB3170-045-G6_FLI.pep
LKPLVLSLHSSIFPFNNTTPQTDIMEAGYNPRTVEEVFRDFKGRRAALIKALTTDVEEFYQQCDPEKENLCLYGFPSEQWEVNLPAEEVPPELPEPALGINFARDGMQEKDWLSLVAVHSDAWLLAVAFYFGARFGFDKADRKRLFNMINDLPTIFEVVTGMAKKQGKEKSSVSNHSSTKSKSNSKRGSESKYTKAMQSKDEDDEGGAGLGLGLEDEDEEEHGDTLCGACGESYAADEFWICCDICEKWFHGKCVKITPARAEHIKQYKCPSCSNKRARP

SEQ ID NO: 39097 - protein, 343 aa, Glycine max
  Clone ID: LIB3170-052-C9_FLI.pep
NKRERQEEDMGRPPCCDKEGVKKGPWTPEEDIILVSYIQEHGPGNWRAVPAKTGLSRCSKSCRLRWTNYLRPGIKRGNFTEQEEKMIIHLQDLLGNRWAAIASYLPQRTDNDIKNYWNTHLRKKLKKMQVGCEGGSFGEGFSASRQIPRGQWERRLQTDIQMAKRALSEALSPEKPSCNLSASNSNPSDSSSSFSSTKPTTTQTVCYASSADNIARMLKGWMKNPPKSSRTNSSSVTQNSFNNFAAAGADTASSIGAKGPPSSAELSENNFESLFDFDQSLESSNSDEFSRSLSPEATVLQDESKPDVIGAEIMPFSLLEKWLLDEAGCQEKLVGCGDDAKFF

SEQ ID NO: 39098 - protein, 171 aa, Zea mays
  Clone ID: 700184955_FLI.pep
PLSSLRFASSAPIPPPPPPPSSVPFRRTSSPEMANARSGVAVNDECMLKFGELQSKRLHRFITFKMDDKFKEIVVDQVGDRATSYDDFTNSLPENDCRYAIYDFDFVTAEDVQKSRIFYILWSPSSAKVKSKMLYASSNQKFKSGLNGIQVELQATDASEISLDEIKDRAR

SEQ ID NO: 39099 - protein, 327 aa, Glycine max
  Clone ID: 701042683_FLI.pep
SKVNLWYTFPIEVSSERERMSSGTTYWCYTCRQPIWLEGREGFCPYCDGGFVQELNEMRGVARQHGFSTRMEDVHQMPDIMDAVRAVMEQRGSEPSIRVRDAVDNFMRQRMAGRYTNFDVRRRSDSGSGSGSILIPDETWGVFSSGPYLIFHGQAPGFTNSNGSSRGGPRGVDFGDYFLGPRLEGLIEQHISNDRLGPPPALRSSIDAMPTIKITHEHLESDSHCPVCKERFELGSKARKMPCNHIYHSDCIVPWLVLHNSCPVCRVELPPKEHTSSRGRRIWGGRNGNDSGSDNDISRGRENTQMNNGRRNLLSYLWPFRSSSSST

SEQ ID NO: 39100 - protein, 284 aa, Glycine max
  Clone ID: 700848210_FLI.pep
NCVRVLRNHRSCRKRKKEEKMVADRSKKPKVSEKGENLDEIDGELVLSIEKLQEIQDELEKINEEASDKVLEIEQKYNEIRKPVYDKRNDIIKAIPDFWLTAFLSHPALGDLLNEEDQKIFKYLSSLEVEDFKDVKSGYSITFNFNANPYFEDTKLVKTYTFLEEGTTKVTATPIKWKEGKGIPNGVNHEKKRNKRAPTDVSFFSWFSDTEQKDDIDDIHDEQVAELIKDDLWPNPLTYFNNEEPDEEEGDEDEADDEGKEDESGDDDDDQEEDDDEGEEEDDK

SEQ ID NO: 39101 - protein, 243 aa, Glycine max
  Clone ID: 700960431_FLI.pep
TVVLQIAANRAEIRERYDQIDTTPHSSYLLYILRVNPTTLTLITAQTINKKDEKVIHSHAIIIIQTKPSINNCSDHYIYKLIFKKRNPQKTLDLQHNRLTNPNSRAGKLGNRLGPFRNGVFGQFTREHETHGGLDLPRGDGGLLVVASQTRRFLGELLEDVVDEAVHDAHGLAGNTNVGVNLLEDLEDVDLVGLHALLRALLLLLAPSFLRDLLLRLRLLLRRCLLRRWLLLRRLLLCLCRSH

SEQ ID NO: 39102 - protein, 152 aa, Zea mays
  Clone ID: 700208151_FLI.pep
DDCLTLVSLYVLTNLGFDLDLEALGLGHGGEVAGQLVGAVHRGVDDDDDLHAAARIAERQLPCRLHGCCLLVVVVVLRDRVEVPREPSAPGHRRRQLRWRHLHCDPGDELLSHVCHVCKPKNAGKREEEVEEERERVCALALKGAFGCVLMC

SEQ ID NO: 39103 - protein, 619 aa, Zea mays
  Clone ID: 700208434_FLI.pep
SQMGISSGADFHQQPTPQAVLPPRPHGRAPTLQTSLSLAGSASPEQVGSPPDTQEPLSNSDAGHDSATESASSRETWPGEPGKSGGGDAPPVASAPITALRIADNKEKEVVGNGVAELQAFRSRIPSAGRMTLREVAWDRVDLVAEKMKGMSDELLDETKAELQSILEGTGGQHQIQEFMYLQKLLQGRVDLTLPILLMAHHVQLEILVAIKTGIQAFLHPSVDIPQIRLAEIFLYKRCRNIACQSAVPAEECKCNICSNRNGFCNLCMCVICNKFDFEVNTCRWVGCDICSHWTHTDCAIRDGKIGTGQTIKNGVGHAEMLFRCQACQRTSELFGWVRDVFQQCAPNWDRDALLRELDYVCKIFRLSEDSKGRKLFRKCAELVERLRGGSAESMTPRILLQALQELDIDSSKNFEHQEPGRLITPQEACNRIAEVVQEAVRKMEMVAEEKLRTYKRARLAVEACDRELEEKAREAQELKVERLRKLQQAEELESIIRLKQAESEMFQLKASEAQEEAERLRSVALAKRKSEAAGQDYASMYLKRRLEEAEAEKQYIFEKIKLQENQHATSSSGGGARLGGGAPSAGEPSQAMMLSKIQDLLKNVRSVPSGKPDGQRSK

SEQ ID NO: 39104 - protein, 148 aa, Glycine max
  Clone ID: LIB3028-010-A9_FLI.pep
FSPFTTNTTIKNKKKLPQSMPRLFFLTARLFPGEENQAKTLTTKSVEGPSLPLKRINNVHSRNGLPPSVLRVSNGVTDDILQEDLENTASLLVDQTADTLHATPASQTTNRWLRNSLNVVAEHLTMSFCSSFSQSLSSLSTPRHLAAA

SEQ ID NO: 39105 - protein, 100 aa, Glycine max
  Clone ID: LIB3093-027-E9_FLI.pep
VAASSFSTHHNRVIIAIVTTSAAFFLIFHNTKDCNEIVITAAQFKNLPEYYFSLTLKQAGFRRILKKLPFSIEHNQCYLSITEHRDFVGFLAQPSSPFGK

SEQ ID NO: 39106 - protein, 894 aa, Homo sapiens
  Clone ID: LIB4649-008-H7_FLI.pep
QSTCELAEVSSDSSPLQPGPTRPHPAPALARRPRPAMGPWSRSLSALLLLLQVSSWLCQEPEPCHPGFDAESYTFTVPRRHLERGRVLGRVNFEDCTGRQRTAYFSLDTRFKVGTDGVITVKRPLRFHNPQIHFLVYAWDSTYRKFSTKVTLNTVGHHHRPPPHQASVSGIQAELLTFPNSSPGLRRQKRDWVIPPISCPENEKGPFPKNLVQIKSNKDKEGKVFYSITGQGADTPPVGVFIIERETGWLKVTEPLDRERIATYTLFSHAVSSNGNAVEDPMEILITVTDQNDNKPEFTQEVFKGSVMEGALPGTSVMEVTATDADDDVNTYNAAIAYTILSQDPELPDKNMFTINRNTGVISVVTTGLDRESFPTYTLVVQAADLQGEGLSTTATAVITVTDTNDNPPIFNPTTYKGQVPENEANVVITTLKVTDADAPNTPAWEAVYTILNDDGGQFVVTTNPVNNDGILKTAKGLDFEAKQQYILHVAVTNVVPFEVSLTTSTATVTVDVLDVNEAPIFVPPEKRVEVSEDFGVGQEITSYTAQEPDTFMEQKITYRIWRDTANWLEINPDTGAISTRAELDREDFEHVKNSTYTALIIATDNGSPVATGTGTLLLILSDVNDNAPIPEPRTIFFCERNPKPQVINIIDADLPPNTSPFTAELTHGASANWTIQYNDPTQESIILKPKMALEVGDYKINLKLMDNQNKDQVTTLEVSVCDCEGAAGVCRKAQPVEAGLQIPAILGILGGILALLILILLLLLFLRRRAVVKEPLLPPEDDTRDNVYYYDEEGGGEEDQDFDLSQLHRGLDARPEVTRNDVAPTLMSVPRYLPRPANPDEIGNFIDENLKAADTDPTAPPYDSLLVFDYEGSGSEAASLSSLNSSESDKDQD

SEQ ID NO: 39107 - protein, 924 aa, Homo sapiens
  Clone ID: LIB4654-025-F6_FLI.pep
FRFSWRERPGRARAASTCPRLAGFFPLLRAATAAAPMLPAPAAPRWPPLLLLLLLLPLARGAPARPAAGGQASELVVPTRLPGSAGELALHLSAFGKGFVLRLAPDDSFLAPDFKIERLGGSGRATGGERGLRGCFFSGTVNGEPESLAAVSLCRGLSGSFLLDGEEFTIQPQGAGGSLAQPHRLQRWGPAGARPLPRGPEWEVETGEGQRQERGDHQEDSEEESQEEEAEGASEPPPPLGATSRTKRFVSEARFVETLLVADASMAAFYGADLQNHILTLMSVAARIYKHPSIKNSINLMVVKVLIVEDEKWGPEVSDNGGLTLRNFCNWQRRFNQPSDRHPEHYDTAILLTRQNFCGQEGLCDTLGVADIGTICDPNKSCSVIEDEGLQAAHTLAHELGHVLSMPHDDSKPCTRLFGPMGKHHVMAPLFVHLNQTLPWSPCSAMYLTELLDGGHGDCLLDAPAAALPLPTGLPGRMALYQLDQQCRQIFGPDFRHCPNTSAQDVCAQLWCHTDGAEPLCHTKNGSLPWADGTPCGPGHLCSEGSCLPEEEVERPKPVVDGGWAPWGPWGECSRTCGGGVQFSHRECKDPEPQNGGRYCLGRRAKYQSCHTEECPPDGKSFREQQCEKYNAYNYTDMDGNLLQWVPKYAGVSPRDRCKLFCRARGRSEFKVFEAKVIDGTLCGPETLAICVRGQCVKAGCDHVVDSPRKLDKCGVCGGKGNSCRKVSGSLTPTNYGYNDIVTIPAGATNIDVKQRSHPGVQNDGNYLALKTADGQYLLNGNLAISAIEQDILVKGTILKYSGSIATLERLQSFRPLPEPLTVQLLTVPGEVFPPKVKYTFFVPNDVDFSMQSSKERATTNIIQPLLHAQWVLGDWSECSSTCGAGWQRRTVECRDPSGQASATCNKALKPEDAKPCESQLCPL

SEQ ID NO: 39108 - protein, 142 aa, Zea mays
  Clone ID: 700208712_FLI.pep
DAAMKYKSEGHDMVIIAGSEYGSGSSRDSAAKGPMLLGVKSVIAKSFERIHRSNLVGMGIIPLCFKAGEDADSLGLTGRERYTIHLPTSTAELSPGQDVTVTTHDGRSFTCTLRLDTQLEVTYFNHGGILPYMVRNLAAQMK

SEQ ID NO: 39109 - protein, 703 aa, Zea mays
  Clone ID: LIB3060-009-F6_FLI.pep
YGLCIFLPKMLWNLKKLRVLSLSFHNSNKLPKSVGELKHLRYLDLNRTSVFELPRSLCALWHLQLLQLNGMVERLPNKVCNLSKLRYLRGYKDQIPNIGKLTSLQQIYDFSVQKKQGYELRQLKDLNELGGSLHVQNLENVIGKDEALASKLYLKSRLKELILEWSSENGMDAMNILHLDVLEGLRPPPQLSKLTIEGYRSDTYPGWLLERSYFENLESFELSNCSLLEGLPPDTELVRNCSRLRINIVPNLKELSNLPVGLTDLSIDYCPLLMFITNNELGQHDLRENIIMKADDLASKLALTWEVDSGKVRRVLSKDYSSLKQLMTLMMDDDISKHLQIIESGLEEREDKVWMKENIIKAWLFCHEQRIRFIYGRTMDMPLVLPSRLCELSLSSCSITDEALAICLGGLTSLSNLKLKYNMALTTLPSEKVFEHLTKLDTLVVTGCLCLKSMGGLRAAPSLSFFYCSDCPFLELARGAELMPLNLDGDLHIRGCILAADSFINGLPHLKHLSFDVCRSSPSLSIGHLTSLESLRLNGLPDLYSVEGLSALHLKYLTLQDVANLTVKCISQFRVQESLTVSTSVLLNHMLMAEGFTVPPNLDLSYCKEPSVSFEEPANLSSVKCLGFWYCKTESLPRNLKSLSSLESLSIGCCPNIASLPDMPSSLQRISIVNCPVLKKNCQEPDGESWPKISHLRRTHINC

SEQ ID NO: 39110 - protein, 251 aa, Glycine max
  Clone ID: LIB3242-147-F5_FLI.pep
KHLNAMVFSSIPVFVDPPNWQQQPNNHPQANNNGGDNTQLLPPLPPHQSHVGGSVGSIRPGSMADRARLAKLPPPEAALKCPRCDSTNTKFCYFNNYSLSQPRHFCKTCRRYWTRGGALRNVPVGGGCRRNKKNKRSSRSKSPASSEKQQTLSGSTSAIVPSGGTTHEQIGHQLPQPQNLPFLASLQNLNRYAVGNMGLGLREIHGQNENMGFQIGNSSAGGGMDQWRLHQQVPFFNGFESTSAGFIPFSK

SEQ ID NO: 39111 - protein, 442 aa, Homo sapiens
  Clone ID: LIB4119-070-F10_FLI.pep
PPGEELRMKRRASDRGAGETSARAKALGSGISGNNAKRAGPFILGPRLGNSPVPSIVQCLARKDGTDDFYQLKILTLEERGDQGIESQEERQGKMLLHTEYSLLSLLHTQDGVVHHHGLFQDRTCEIVEDTESSRMVKKMKKRICLVLDCLCAHDFSDKTADLINLQHYVIKEKRLSERETVVIFYDVVRVVEALHQKNIVHRDLKLGNMVLNKRTHRITITNFCLGKHLVSEGDLLKDQRGSPAYISPDVLSGRPYRGKPSDMWALGVVLFTMLYGQFPFYDSIPQELFRKIKAAEYTIPEDGRVSENTVCLIRKLLVLDPQQRLAAADVLEALSAIIASWQSLSSLSGPLQVVPDIDDQMSNADSSQEAKVTEECSQYEFENYMRQQLLLAEEKSSIHDARSWVPKRQFGSAPPVRRLGHDAQPMTSLDTAILAQRYLRK

SEQ ID NO: 39112 - protein, 1350 aa, Homo sapiens
  Clone ID: LIB4117-013-G9_FLI.pep
LETATGGFVLLYEWVLQWQKKMGPFLTSQEKEKIDKCKKQIQGTETEFNSLVKLSHPNVVRYLAMNLKEQDDSIVVDILVEHISGVSLAAHLSHSGPIPVHQLRRYTAQLLSGLDYLHSNSVVHKVLSASNVLVDAEGTVKITDYSISKRLADICKEDVFEQTRVRFSDNALPYKTGKKGDVWRLGLLLLSLSQGQECGEYPVTIPSDLPADFQDFLKKCVCLDDKERWSPQQLLKHSFINPQPKMPLVEQSPEDSGGQDYVETVIPSNRLPSAAFFSETQRQFSRYFIEFEELQLLGKGAFGAVIKVQNKLDGCCYAVKRIPINPASRQFRRIKGEVTLLSRLHHENIVRYYNAWIERHERPAGPGTPPPDSGPLAKDDRAARGQPASDTDGLDSVEAAAPPPILSSSVEWSTSGERSASARFPATGPGSSDDEDDDEDEHGGVFSQSFLPASDSESDIIFDNEDENSKSQNQDEDCNEKNGCHESEPSVTTEAVHYLYIQMEYCEKSTLRDTIDQGLYRDTVRLWRLFREILDGLAYIHEKGMIHRDLKPVNIFLDSDDHVKIGDFGLATDHLAFSADSKQDDQTGDLIKSDPSGHLTGMVGTALYVSPEVQGSTKSAYNQKVDLFSLGIIFFEMSYHPMVTASERIFVLNQLRDPTSPKFPEDFDDGEHAKQKSVISWLLNHDPAKRPTATELLKSELLPPPQMEESELHEVLHHTLTNVDGKAYRTMMAQIFSQRISPAIDYTYDSDILKGNFSIRTAKMQQHVCETIIRIFKRHGAVQLCTPLLLPRNRQIYEHNEAALFMDHSGMLVMLPFDLRIPFARYVARNNILNLKRYCIERVFRPRKLDRFHPKELLECAFDIVTSTTNSFLPTAEIIYTIYEIIQEFPALQERNYSIYLNHTMLLKAILLHCGIPEDKLSQVYIILYDAVTEKLTRREVEAKFCNLSLSSNSLCRLYKFIEQKGDLQDLMPTINSLIKQKTGIAQLVKYGLKDLEEVVGLLKKLGIKLQVLINLGLVYKVQQHNGIIFQFVAFIKRRQRAVPEILAAGGRYDLLIPQFRGPQALGPVPTAIGVSIAIDKISAAVLNMEESVTISSCDLLVVSVGQMSMSRAINLTQKLWTAGITAEIMYDWSQSQEELQEYCRHHEITYVALVSDKEGSHVKVKSFEKERQTEKRVLETELVDHVLQKLRTKVTDERNGREASDNLAVQNLKGSFSNASGLFEIHGATVVPIVSVLAPEKLSASTRRRYETQVQTRLQTSLANLHQKSSEIEILAVDLPKETILQFLSLEWDADEQAFNTTVKQLLSRLPKQRYLKLVCDEIYNIKVEKKVSVLFLYSYRDDYYRILF

SEQ ID NO: 39113 - protein, 589 aa, Homo sapiens
  Clone ID: LIB3063-047-F10_FLI.pep
LEGRFRIPYFMSEDCEHLIRRMLVLDPSKRLTIAQIKEHKWMLIEVPVQRPVLYPQEQENEPSIGEFNEQVLRLMHSLGIDQQKTIESLQNKSYNHFAAIYFLLVERLKSHRSSFPVEQRLDGRQRRPSTIAEQTVAKAQTVGLPVTMHSPNMRLLRSALLPQASNVEAFSFPASGCQAEAAFMEEECVDTPKVNGCLLDPVPPVLVRKGCQSLPSNMMETSIDEGLETEGEAEEDPAHAFEAFQSTRSGQRRHTLSEVTNQLVVMPGAGKIFSMNDSPSLDSVDSEYDMGSVQRDLNFLEDNPSLKDIMLANQPSPRMTSPFISLRPTNPAMQALSSQKREVHNRSPVSFREGRRASDTSLTQGIVAFRQHLQNLARTKGILELNKVQLLYEQIGPEADPNLAPAAPQLQDLASSCPQEEVSQQQESVSTLPASVHPQLSPRQSLETQYLQHRLQKPSLLSKAQNTCQLYCKEPPRSLEQQLQEHRLQQKRLFLQKQSQLQAYFNQMQIAESSYPQPSQQLPLPRQETPPPSQQAPPFSLTQPLSPVLEPSSEQMQYSPFLSQYQEMQLQPLPSTSGTRAAPPLPTQA

SEQ ID NO: 39114 - protein, 212 aa, Zea mays
  Clone ID: 701179040_FLI.pep
MAMSRAVHKANCFHNKGHAADCSTYDTMYMVVFGIVQIFFSQLPNFSDLSWLSIVAAIMSFSYSSIAVGLSLARTISGRSGTTTLTGTEIGVDVDSAQKVWLALQALGNIAFAYSYSMILIEIQDTVKSPPAENKTMKKATLMGVTTTTAFYMLAGCLGYSAFGNAAPGNILTGFGFYEPYWLIDFANVCIVVHLVGAYQVFSQPIFAALET

SEQ ID NO: 39115 - protein, 284 aa, Zea mays
  Clone ID: 701179351_FLI.pep
DMAWLSVVAAAMSFSYAFIGLGLGLARTIANGTIKGSITGVRMRTPMQKVWRVSQAIGDIAFAYPYSLILLEIQDTLKSPPAENKTMKRASMISILVTTFFYLCCGCLGYAAFGSDAPGNLLTGFGLYGPYWLIDFANACIILHLLGGYQVYSQPIFQFAERLLAERFPDSGFVNGGSYTVRFACLRACRVNPLRVCLRTLYVASTTAVAVALPYFNEVLALLGALSFWPLAIYFPVEMYFIQRNVRRWSARWVVLQTFSVVCLLVSAFALVGSIEGLISKKLG

SEQ ID NO: 39116 - protein, 423 aa, Zea mays
  Clone ID: 700210184_FLI.pep
APLNSDPCGAAVRVSVSSIAKPRAPASTRSHEPNQRLLPRVSPPAPMATRYWIVSLPVQSPGAIASSLWSRLQDSISRHSFDTPLYRFNVPDLRVGTLDSLLALSDDLVKSNVFVEGVSHKIRRQIEDLERAGGVESGTLTVDGVPVDTYLTRFVWDEGKYPTMSPLKEIVGSIQSQVAKIEDDMKVRAAEYNNVRSQLSAINRKQSGSLAVRDLSNLVKPEDMITSEHLVTLLAIVPKYSQKDWLSSYETLDTFVVPRSSKKLYEDNEYALYTVTLFAKVVDNFKVRAREKGFQIRDFEYSPEAQESRMQEMEKLLRDQEAMRTTLLQWCYASYSEVFSSWMHFCAVRVFVESILRYGLPPSFLSAVLAPSTKSEKKVRSILDELSGDAHSLYWKSEDDVGVAGLGGETEAHPYVSFTINFV

SEQ ID NO: 39117 - protein, 452 aa, Zea mays
  Clone ID: 700211285_FLI.pep
NNRGGRKEAATARHRRREEDHQQHQATTRTRKEKPRSRSCWIIPFVSSVRSGGGSVGGAKMSDNLMDKVSAFGERLKITGTEVSKKMTAGMSSMSFKMKELFQGQTPADKIVEGATSEDLDGPDWNSNLEICDMINTEKVDSVELIRGIKKRIMLKDARVQYLSLVLLETIVKNCDKAFSEVAAERVLDEMVRLIDDPQTVVNNRNKALMLIEAWGESGDELRYLPVYEETYKSLKSRGVRFPGRDNESLAPIFTPARSVAEADVDASLPQQVFEDVHVHTYTAEETKEAFDVARNSVELLSTVLSSSPEQDALQDDLTTTLVQQCYQSQHTIQMIIETVGDNEAVLFEALSVNDEIQKVLSKYEEMKQPRASEHAEHVPVVIPIAAEHEDLNAVGNEDALVRKPAAARATSGGDDDILDDLDEMIFGKKGGSSSQEGPKKPDPKKDDLISF

SEQ ID NO: 39118 - protein, 226 aa, Zea mays
  Clone ID: 700211353_FLI.pep
FAGARWAVAASAPQARHPLAGLLYLLVHVDEVGVADHGIEHLRDEEAAAGEDGHDEQRRDGVLEQLHYGLQHRIRHPCAHRHHVQRVTPHVVPELLHQGALRPQRQGGAGPRGQGQRHGHPRRDAADERPRRQRAGPAAAAAAVVLIARRRELLTRTAALLRGCRDAFVRCYCEEALCVLSWGVLRGGQSNSDDGGCEAMTAFGREEMQVEGAVEKRELVHLVQPV

SEQ ID NO: 39119 - protein, 529 aa, Glycine max
  Clone ID: JC-GMST024168H05_FLI.pep
NCFRSLVFSFSQAREDMGEVADEGQYFRSEIALLNYSDATFKPPLSSLLIHIDPLIIPNGHTCSASESDPSPTSQHHQQEQHPKDAWLPITESRNGNAYYAAFHILNSNIGFQALMLPVAFATLGWAWGTVCLSLAFVWQLYAIFLLVQLHESVPGIRHSRYLFLAMAAFGKKLGKVAALFPVMYLSGGTCVMIIITGGGTLKQLLKTLCDNDDHVHEQITCNAHALSGAEWFLVFTCVAILIAQLPNLNSMAMVSLVGAVTSVTYCTLFWVLSVKNGRPNNVSYSSSLQSQEHTPVAKINGVLNAIGIIVLAFRGHNVLPEIQGTLPSNFEQTSKRPMRRGVSISYVLISMCMFPLAIAGFWAYGNQINDGGLLTSFPQFHKRQITKFSMGAIYVLVIIHCLTSFQIYAMPVFDNLEIRYTSIKNQRCPRLVRTCIRLFFGGLTFFISVTFPFLPRLSALLGSMTLVPITYAYPCFMWLSLKKPRPRGFVWCFNVALGCVGMLLSALLVAAAIRTLALNGLDANFFKP

SEQ ID NO: 39120 - protein, 215 aa, Zea mays subsp. mexicana
  Clone ID: UC-ZMFLTEOSINTE011A08_FLI.pep
GNTGHPEVTAGREQDDEEGVDDLDHRHDILLPLLRLLGLRRLRQRRAGQPPYRLRLVRSVLAHRLRQRVHHPPPAGRVPGVQPADIPVRGAALGGAVPGQRVRERRLLHRPVRVPAGVPGEPAARVPPDAVRGVHDGGGRGVTLLQRGAGAAWRAQLLAAGHLLPRGDVLHPAERAPVVRPLGRPADLQRRLPARQRLRARRLHRGANQQEARLG

SEQ ID NO: 39121 - protein, 364 aa, Zea mays
  Clone ID: 700211906_FLI.pep
LDKDREVINIMTKSSGALDLARSTGGSLSKDQVKSAVDQYVKYHDLHGGEQESRKSNYADLANKYYDLVTGFYEYGWGDSFHFAGGYPGETSREAIKRHQHFMALQLGLKKGMKVLDVGCGIGGPLIEIARFSSTSITGLTNNDYHVSRGKEHIFSAGLSEQCCSLKGDFMNMPIADNTFDAAYAIQATCYAPEAQGVYSEVYRVLKPGQYFALDEWCLTDRFDPKNTKHLTTKAEIELGDGLPDIRTTRQCVQAMKDAGFEVVFAKDLAQDFPCPWYQTMDPNYFSWTNFQCTRPGRIITRAIVNTLEFLRIAPAGSVGAYNVLTSASDGLLKGGREGIFTASFFVLGRKPLKETEIVNGGNL

SEQ ID NO: 39122 - protein, 63 aa, Zea mays
  Clone ID: LIB3075-028-H8_FLI.pep
RLIILPPLVAGGTRCSVKPASRNVHHFRCWDAKAFTKASETHYTTWNGWSTVCSTRPRHMHHN

SEQ ID NO: 39123 - protein, 369 aa, Zea mays
  Clone ID: 700212728_FLI.pep
PVDMVSVNLGLVHYVLDHIYGTLLHRTKLGTPFFSKGWGGTKLDLLEKMVKQLFPEARCQNWPPTAVQPMWKTVWETNNSCLREGVFRTTCDERLIDALPPESHNARVAFLTPKNVTPEKMSCVVHLAGTGDHTFERRLRLGGPLLKNNIATMVLESPYYGQRRPSMQRGAKLQCVSDLLLLGKATIDEARSLLYWLQNEAGYGKMGICGLSMGGVHAAMVGSLHPTPVATLPFLAPHSAVVPFCEGVYKYATAWDALRKDAAVLTQDVTLLAEDAAQKSGITIEQVRDRLRSVLSLTDVTRFPVPKNPQAVIFVGATDDGYIPRHSVMELQKAWPGSEVRWVTGGHVSSFFLHNDAFRKAIVDALDRL

SEQ ID NO: 39124 - protein, 126 aa, Zea mays
  Clone ID: LIB3079-050-E10_FLI.pep
TPAGATRCASRTGTSATCPRGTWSTACSTSGGRCRRPARPTRTAPTASPATWGSTSSLSATTTGRRNPPSRCRRETRPGTSTFRCDAPTLYLGLLGSDYLLLADVVIVVEEDCTVNLCFLLVLCQI

SEQ ID NO: 39125 - protein, 171 aa, Glycine max
  Clone ID: 700791661_FLI.pep
KNFRGKVADFGLTKLTEVGSSSLPTGRLVGTFGYMPPEYAQYGDVSPKVDVYAFGVVLYELISAKEAIVKTNDSVADSKGLVALFDGVLSQPDPTEELCKLVDPRLGDNYPIDSVRKMAQLAKACTQDNPQLRPSMRSIVVALMTLSSTTDDWDVGSFYENQNLVNLMSGR

SEQ ID NO: 39126 - protein, 152 aa, Zea mays
  Clone ID: LIB3079-032-A6_FLI.pep
MFYTTTCIEHSTSRSSLFQPYRAHRSPSHTGLGLLRVVLLFPLHVLPLLAIQPAAPSEVHEVRHAVAREQPVVIVVAADVQVVDEPARSHPLPARHLHHLHDEGAGQVAHSEGHVQQRHAEAGHALGQLGVQELDLPDDAERLGEPHKRELR

SEQ ID NO: 39127 - protein, 470 aa, Zea mays
  Clone ID: LIB3079-035-D9_FLI.pep
LQAANIINSWVHRDMPPTTHHIYGYLLLGMEHVISMEEILGPFWELLPPPAPEPEPEREQPPVTGIVVGSVIDVAAAGHGHGGGDMMDQQHATEWTFERLLEEEALTTSTPPPVVVVPNSCCSGALNVDRPPVMEEAVMMAPAAVSSAVVGDPMEYNAILRRKLEEDLEAFKMWRAASSVVTSDQRSQGSNNHTGGSSIRNNPVQNKLMNGEDPINNNHAQTAGLGVRLATSSSSRDPSPSDEDMDGEVEILGFKMPTEERVRKRKESNRESARRSRYRKAAHLKELEDQVAQLKAENSCLLRRIAALNQKYNDANVDNRVLRADMETLRAKVKMGEDSLKRVIEMSSSVPSSMPISAPTPSSDAPVPPPPIRDSIVGYFSATAADDDASVGNGFLRLQAHQEPASMVVGGTLSATEMNRVAAATHCAGAMELIQTAMGSMPPTSASGSTPPPQDYELLGPNGAIHMDMY

SEQ ID NO: 39128 - protein, 197 aa, Glycine max
  Clone ID: 700746614_FLI.pep
ESKPPPNLSGGSATMASSLLLAVVFVLDLVAFALAVAAEQRRNTASLNKDSAGRNYCQYDSDIATGLGVGSLFILVASQVIIMVVTRCLCCGRAMRPSGSRSWSICLFITSWVTFIIAASCLLAGSVRNAYHTKYRDLMGERAPSCQTLRKGVFGAGAAFIVLTGITSELYYVSFSKANNNGPPPYARDTGVRMANF

SEQ ID NO: 39129 - protein, 264 aa, Zea mays
  Clone ID: LIB3079-017-C8_FLI.pep
DRNRDIADALKILPANSLSCKKVERRSCISLEEFICNYFLRDTPVIISGTIDHWPARTKWKDIEYLKKIAGDRTVPVEVGKNYVCSEWKQELITFSQFLDRMSSTVCPSNLTYLAQHPLFEQIKELSEDIIVPEYCYAGGGALQSLNAWFGPEGTVTPLHHDPHHNILAQVLGRKYIRLYPAFIAEDLYPHTETMLSNTSQVDLDNIDLKEFPRVENLEFIDCILEEGDLLYIPPKWWHYVRSLSTSFSVSFWWRAAVQPSGGS

SEQ ID NO: 39130 - protein, 91 aa, Zea mays
  Clone ID: 700618858_FLI.pep
SKFTSNHFTNWKNNYHARSWAQKLVLHSQYRNVEPIRPNSLILPCGLCTSRYKPCANHLHQKVSKCLHPCECSDCHHQTRSIFLMVNMEFQ

SEQ ID NO: 39131 - protein, 425 aa, Zea mays
  Clone ID: LIB3079-018-F11_FLI.pep
VPVASAQLPPQGPLQASMCGRARCTLSPAEVARAFGFPTTSANAGGGGDGPAVPTLHLNRFRPSYNVLPGAYLPVGAMRALPGCAHGGGGSDGEGPVIQCMKWGLVPSFTGKAEKPDYFRMFNARSESVKEKVSFRRLIQKNRCLVAVEGFYEWKKNGSKKQPYYIHFQDHRPLVFAALYDAWTNSEGEITHTFTILTTHASTSLNWLHDRMPVILGSKDYVDAWLNDVSVKLEEITAPYEGADLVWYPVTSALGKASFDGPECIKEVHIGATDKPISKFFTKKSTAYDLSGKYENMSRELAHAYKAAKVECDGSVENQGGDGNQHQSREKQTTNCTIKDEPVTLEPQVFETPWSIEHEDTMTLAGATLETQRDLGFKRKIEDTQVEASMKPSQLTRKEKAVKAASDGQASLLSYFARKQGRSMK

SEQ ID NO: 39132 - protein, 110 aa, Glycine max
  Clone ID: 700789220_FLI.pep
EILRLYACPYLKTLPNSICDMMRLKYIDISQCVNLTCFPEKIGRLVSLEKIDMRECSMIRNVPKSAVSLQSLRLVICDEEVSGIWKEVAKPDNVHIQVSEQYFDLDWLKE

SEQ ID NO: 39133 - protein, 319 aa, Zea mays
  Clone ID: LIB3079-016-G6_FLI.pep
QYAYIGLLNSELSSNCTASPALPFQEYPPGITLVPMKSRTLAPFRTTNLVVVRSTNGAGGSTCSDFFASGEALLIDPGCSSQVHAELADLIDSLPKRLLVLVTHYHQDHIEGLSVVQRCNPNAVLLTHQSTMDRIGKGTWQIDYTSVTGGEKICIGDQELQVVFAPGHTDGHMGLLHVNTNTLVVGDHCVGHGSATLDSRNGGNMKDYFETTYKFLELSPHVLIPMHGRINLWPKYMLCGYLRNRRAREASILHSIENGAQTLFDIVSKTYSDVDRKLWIPASFNVRLHVDHLNSLHKLPKDFSLEMFSRSCDDFISRV

SEQ ID NO: 39134 - protein, 180 aa, Glycine max
  Clone ID: 700791933_FLI.pep
AGLIYVRQWNNMQYVSTAAFLLSIYSDFLQSTNQKLNCHGGTVDHEEILNFAKSQADYILGSNPMNMSYLVGYGPNYPKRVHHRGASIVSYKKNKGFIGCTQGYDNWYGSQAPNPNVLVGALVGGPDGKDNFEDRRNNFMQTEACTYNTAPLVGVFAKFLHIENQKLVHDCNSHLVASFK

SEQ ID NO: 39135 - protein, 51 aa, Glycine max
  Clone ID: 700792233_FLI.pep
IHGSRTCLQWLKGKKHNLELPLGMLNLLLVFQRECPHPPLIYDDYHAILIV

SEQ ID NO: 39136 - protein, 59 aa, Zea mays
  Clone ID: LIB3079-018-F10_FLI.pep
ACFTCFDIPGSAAGCPPCLSTSTEDCLPGPICSFEITVFGVRESGASLYLFMSVLLGSF

SEQ ID NO: 39137 - protein, 373 aa, Homo sapiens
  Clone ID: LIB4218-078-C4_FLI.pep
RGLQEPPQWSAAALLLGNSVRAQISVGWRRSGVWKFRGTGAQAHDCSGMDQYCILGRIGEGAHGIVFKAKHVETGEIVALKKVALRRLEDGFPNQALREIKALQEMEDNQYVVQLKAVFPHGGGFVLAFEFMLSDLAEVVRHAQRPLAQAQVKSYLQMLLKGVAFCHANNIVHRDLKPANLLISASGQLKIADFGLARVFSPDGSRLYTHQVATRSVGCIMGELLNGSPLFPGKNDIEQLCYVLRILGTPNPQVWPELTELPDYNKISFKEQVPMPLEEVLPDVSPQALDLLGQFLLYPPHQRIAASKALLHQYFFTAPLPAHPSELPIPQRLGGPAPKAHPGPPHIHDFHVDRPLEESLLNPELIRPFILEG

SEQ ID NO: 39138 - protein, 1041 aa, Homo sapiens
  Clone ID: LIB4119-160-F5_FLI.pep
NEFLKIITPFRRLMLCAENRKEMEDWISSLKSVQTREPYEVAQFNVEHFSGMHNWYACSHARPTFCNVCRESLSGVTSHGLSCEVCKFKAHKRCAVRATNNCKWTTLASIGKDIIEDEDGVAMPHQWLEGNLPVSAKCAVCDKTCGSVLRLQDWKCLWCKTMVHTACKDLYHPICPLGQCKVSIIPPIALNSTDSDGFCRATFSFCVSPLLVFVNSKSGDNQGVKFLRRFKQLLNPAQVFDLMNGGPHLGLRLFQKFDNFRILVCGGDGSVGWVLSEIDKLNLNKQCQLGVLPLGTGNDLARVLGWGGSYDDDTQLPQILEKLERASTKMLDRWSIMTYELKLPPKASLLPGPPEASEEFYMTIYEDSVATHLTKILNSDEHAVVISSAKTLCETVKDFVAKVEKTYDKTLENAVVADAVASKCSVLNEKLEQLLQALHTDSQAAPVLPGLSPLIVEEDAVESSSEESLGESKEQLGDDVTKPSSQKAVKPREIMLRANSLKKAVRQVIEEAGKVMDDPTVHPCEPANQSSDYDSTETDESKEEAKDDGAKESITVKTAPRSPDARASYGHSQTDSVPGPAVAASKENLPVLNTRIICPGLRAGLAASIAGSSIINKMLLANIDPFGATPFIDPDLDSVDGYSEKCVMNNYFGIGLDAKISLEFNNKREEHPEKCRSRTKNLMWYGVLGTRELLQRSYKNLEQRVQLECDGQYIPLPSLQGIAVLNIPSYAGGTNFWGGTKEDDIFAAPSFDDKILEVVAIFDSMQMAVSRVIKLQHHRIAQCRTVKITIFGDEGVPVQVDGEAWVQPPGIIKIVHKNRAQMLTRDRAFESTLKSWEDKQKCDSGKPVLRTHLYIHHAIDLATEEVSQMQLCSQAAEELITRICDAATIHCLLEQELAHAVNACSHALNKANPRCPESLTRDTATEIAINVKALYNETESLLVGRVPLQLESPHEERVSNALHSVEVELQKLTEIPWLYYILHPNEDEEPPMDCTKRNNRSTVFRIVPKFKKEKVQKQKTSSQPGSGDTESGSCEANSPGN

SEQ ID NO: 39139 - protein, 522 aa, Homo sapiens
  Clone ID: LIB4119-017-A4_FLI.pep
ALPGQEYDGPEVDVWSLGVILYTLVSGSLPFDGQNLKELRERVLRGKYRIPFYMSTDCENLLKRFLVLNPIKRGTLEQIMKDRWINAGHEEDELKPFVEPELDISDQKRIDIMVGMGYSQEEIQESLSKMKYDEITATYLLLGRKSSELDASDSSSSSNLSLAKVRPSSDLNNSTGQSPHHKVQRSVSSSQKQRRYSDHAGPAIPSVVAYPKRSQTSTADSDLKEDGISSRKSSGSAVGGKGIAPASPMLGNASNPNKADIPERKKSSTVPSSNTASGGMTRRNTYVCSERTTADRHSVIQNGKENSTIPDQRTPVASTHSISSAATPDRIRFPRGTASRSTFHGQPRERRTATYNGPPASPSLSHEATPLSQTRSRGSTNLFSKLTSKLTRRLPTEYERNGRYEGSSRNVSAEQKDENKEAKPRSLRFTWSMKTTSSMDPGDMMREIRKVLDANNCDYEQRERFLLFCVHGDGHAENLVQWEMEVCKLPRLSLNGVRFKRISGTSIAFKNIASKIANELKL

SEQ ID NO: 39140 - protein, 267 aa, Zea mays
  Clone ID: LIB3069-029-D11_FLI.pep
ARLQPKASICIAMGALPRGLLAGICAVLLAAVVALAHGAEQETASMVVGLAKCADCTRKNMKADAAFNGLQVAVKCKNADGVFETKALGEVDKSGSFSVPLPADLLREDGELKQDCFAQLHSAANKPCPGQEPSWIVRPTTDNDDDDKMKNTFVAVAGKVHYPSKECASAFLFYHLFKKHLLHKKPMLIIPHIHKKPMVPMYRHSPVPEYKPPHPTPTPIYHAAAEHKTQNPETDPEKFKKLLPFIKKNPFFPKFPKFPPGKEENKA

SEQ ID NO: 39141 - protein, 279 aa, Glycine max
  Clone ID: 700855772_FLI.pep
WRGFTLQEFANQLFSNIYDYGKGRQMPAHYGSKKHNYFTVASTIATQISHAVGAAYSLKMDKKDACAVTYFGDGGSSEGDFHAALNFAAVLEAPVIFICRNNGWAISTPISDQFRSDGVVVKGQAYGVRSIRVDGNDALAIYSAIQAARQMAITEERPILIEALTYRVGHHTTSDDSTKYRPANEIEWWRVARDPVVRFRKWIEKHGWWNDMAESELINNLRQQLLHTIQEAEGVEKPPLADSFSDVYDVAPSNLREQEQWLKEIVRKQPQEYPTNISV

SEQ ID NO: 39142 - protein, 534 aa, Zea mays
  Clone ID: LIB3062-011-C7_FLI.pep
TVPICQAELKLLQRSRLFRLHLDRLLVQRGVPPPLLLHEVGVQELGHERPQPVGVLEVAQESQRRVHHEDPHVATTGVLPPLPSGAARGDGIAGDPVLQDDGPLGLVLVREPDVAQETAGEGDVVAVGELLHQQRRHPLALPVEHVERQRGAPVELDARAVQPHQRVPVIGVRVPQFLQGHHQPVADATQPVADGDEPQRVRVVQAPALHLHHALSPLPVLLLLGQPLCFLCSGFLRVEAVLCRAADLADLRGVGVGVAVLRRVRLQGPAASDGGGAERAGEGALGLDVGVVQGRVGGELGEAPRVLQLGGVAVVQRPAAGGHDADDADAARDDGALERREAAGPLDEEAREAGRVLAEHLEEVADDEVGADEGEAERVEVLGAERAGVQRDVPPLLVRRAHPQVRVPGARHAGREREDEEAASPAAAAPAPGQPLAEVGAVDPHARPGEGRGGDLGAPAARAVGHGAHGLALVVVHGEQLLAGLERVGLGEEAERRGPVGRAHHGVLVPGDLERRHDAPGDGGADARLRARGV

SEQ ID NO: 39143 - protein, 242 aa, Zea mays
  Clone ID: LIB3066-016-D2_FLI.pep
RLGRRVWRRSYLLYGSPGTGKSTFAAAMARFLGYDVDLSRTDAAADDLRALLLHTTPRSLVLVEDLDRYLQGGGGDAEARVARVLSFMDGVASCCSEERCHGVHHARGQGLHGRRGGAPDRLDVHIQFTLCDFEAFKALANNYLGLKDHKLYLQVEKGFHRRQVKEMVNEAVDSDIQLWTLRTWRKNYFIFNDRHRGMGMDIDDMSYEELLALGERIGTVNTGLSDDVLSTCLNLSLYMPQL

SEQ ID NO: 39144 - protein, 350 aa, Glycine max
  Clone ID: 700891438_FLI.pep
KFIMDHRLRCFVTIPKIPFLLLLSLILVFSYVNAAFDLATIPFNDGYSPLFGDSNVVRSEDGNGVQLRLDRYTGSGFISSSMYQYGFFSARIKLPSNYTAGICVAFYTSNGDVFEKSHDELDFEFLGNVAGKPWRFQTNLYGNGSTKRGREERYRLWFDPTKEFHRYSILWTAKNVIFYIDEVPIREVLRSEEMGGDYPSKPMSLYATIWDASNWATSGGKYKVNYKYAPFVTEFKDLVLKGCSADPIQEVSGTESCSDQHADLEAQDYAAVTPMRRLAMQRFRQRYMYYSYCYDTLRYPVPQPECVIVPSEKQRFKETGRLKFGGSHRRQSRRRGRTTTPVDDTDQGDM

SEQ ID NO: 39145 - protein, 90 aa, Zea mays
  Clone ID: LIB3069-006-D5_FLI.pep
AQQTTKSFLLKKKAALGRRFLRLEWLHHLPGEVRVVPSKVAVGRRLEVAPVAAFLEVKVDDDHARPEIEVLLDNLEDLLVGDRAGAVRVD

SEQ ID NO: 39146 - protein, 431 aa, Glycine max
  Clone ID: 700755133_FLI.pep
VGFKCEASRETAVVIMNHVNLVEILMDVNQWSTVFSGIVSRAMTLEVLSTGVAGNYNGALQVMTAEVQVPSPLVPTRESYFVRYCKQHGDGTWAVVDVSLDNLRPSPSARCRRRPSGCLIQEMPNGYSKVIWVEHVEVDDRGVHNLYKQLVSSGHAFGAKRWIANLDRQCERLASAMATNIPTVDVGVITNPDGRKSMLKLAERMVISFCAGVSASTAHTWTTLSGTGADDVRVMTRKSVDDPGRPPGIVLSAATSFWLPVSPKRVFEFLRDENSRSEWDILSNGGVVQEMAHIANGRDTGNCVSLLRVNSANSSQSNMLILQESCADSTGSFVIYAPVDIVAMNVVLNGGDPDYVALLPSGFAILPDGTTAHGGGIGDIGHGGSLLTVAFQILVDSVPTAKLSLGSVATVNNLIACTVERIKAALSGEVA

SEQ ID NO: 39147 - protein, 80 aa, Zea mays
  Clone ID: LIB3069-010-G5_FLI.pep
SKGKLKEKVNNAVLFDQATYDKLLSEVPKYKQITPSILSERLRINGSLARRAIKDLMARGLIRLVSVHSSQQIYTRATNT

SEQ ID NO: 39148 - protein, 445 aa, Glycine max
  Clone ID: 700757222_FLI.pep
IILQNLIILIMSSDICGILPRILIVSRRTVRKNKFVDFVGEYHLDLIVSYGGVPVIVPRVSGVHTLLNSFEPIHGVLLCEGEDIEACWYDHNDDHDSDGLDLSQEELEEIRRLHASDTSIDKEKDSIELSLAKLCLERNIPYLGICRGSQVLNVACGGTLYQDIGKELSKKCDQSQRVMHINYDDYDGHRHAVKLVKNTPLCHWFQGEEEEKEEGEEMEILVNSYHHQGVKKLAERFIPMAFASDGLIEGFYDPECYNPQDGKFIMGLQFHPERMRKPDSDEFDYPGCPFAYKEFVKAVIAYQKKLNSLTSVPKPLKLNKEMESKRKIIVRSFSLAKNLYTMGRGNCSSKDSELEIGAEFLESNTALSVQQENRLKQMGATVRNGGSYVERLKLNEVREKMAKNVMGKMSVEQLSDLLSFYRTMDQICSQVLERKLHDVVNDFTS

SEQ ID NO: 39149 - protein, 135 aa, Zea mays
  Clone ID: LIB3069-029-A12_FLI.pep
GHGWSYPCDIWSVGCILVELCSGETLFQTHENLEHLAMMDRVLGPLPRHMLERADQHAEKYVRKGGLNWPQAITTVESVRAVLKLPRLQNLVMQHVDHSAGDFIDLLKRLLAYEPSGRLTAQEALGHVFFTRYRQ

SEQ ID NO: 39150 - protein, 359 aa, Glycine max
  Clone ID: 700786611_FLI.pep
TNARVVFCIHNIAYQGRFAFADFSLLNLPDQFKSSFDFIDGHVKPVVGRKINWLKAGLIESWFVITVSPNYAKELVSGPDKGVELDNIIRKIDDDGRLVGIVNGMDVQEWNPTTDKYIAVKYDVSTVLEAKALLKEALQAEVGLPVDRNIPLIGFIGRLEEQKGSDILAEAIPQFIKQNVQLVALGTGKKQMEKQLEELEISYPDKARGVAKFNVPLAHMIIAGADFILVPSRFEPCGLIQLQAMRYGSVPIVASTGGLVDTVKEGFTGFQMGAFNVECDAVDPADVDAISKTVKRALAVYGTPAFTEIIKNCMAQDLSWKGPAKEWEEVLLSLGVPGSEPGSDGEEIAPQAKENVATP

SEQ ID NO: 39151 - protein, 151 aa, Zea mays
  Clone ID: LIB3075-029-E6_FLI.pep
APRRAAVPEGARHPDTHRLHHLPEARCRCRALPRRHRRHDDPRVHGSAGWAEHTRGAMQASARLRPPTPLARRRRRRRRREYKRLRRAETRVVRRPEPRGVDVVPGEVRAAAAGGARGQEVRCARDVDVVVVLTVLRTGQSLPPPFACIHA

SEQ ID NO: 39152 - protein, 335 aa, Glycine max
  Clone ID: 700756651_FLI.pep
GHMGWFLFCCCFSLLFFHSSGSPRRNLPIIAFEDGYTPLFGDHNLAIHRDGKSVHLSLDERTGSGFVSHDLYLHGYFSASIKLPADYTAGVVVAFYMSNGEMFQNNHDEIDFEFLGNIRGKDWRIQTNVYGNGSTSIGREERYGLWFDPAEDFHQYSILWTDSKIIFYVDNVPIREVKRTESMGGDFPSKPMTMYATIWDASDWATNGGKYRVNYKYAPYVAEFSDLILHGCAVDPIEHVAKCESAQGSEKVPSGVTPVQITKMRNFRLKHMAYSYCYDTVRYKVPPPECVINHQEAERLRKFDPVTFGNGQRHRGKRHHHSSKGSQEEITASSF

SEQ ID NO: 39153 - protein, 320 aa, Arabidopsis thaliana
  Clone ID: LIB24-076-B10_FLI.pep
EKNMGIQETDPLTQLSLPPGFRFYPTDEELMVQYLCRKAAGYDFSLQLIAEIDLYKFDPWVLPNKALFGEKEWYFFSPRDRKYPNGSRPNRVAGSGYWKATGTDKIISTEGQRVGIKKALVFYIGKAPKGTKTNWIMHEYRLIEPSRRNGSTKLDDWVLCRIYKKQSSAQKQVYDNGIANAREFSNNGTSSTTSSSSHFEDVLDSFHQEIDNRNFQFSNPNRISSLRPDLTEQKTGFHGLADTSNFDWASFAGNVEHNNSVPELGMSHVVPNLEYNCGYLKTEEEVESSHGFNNSGELAQKGYGVDSFGYSGQVGGFGFM

SEQ ID NO: 39154 - protein, 359 aa, Zea mays
  Clone ID: 700240687_FLI.pep
APLPLQHPPVSVVSSPLLTSPAMGKIKIGINGFGRIGRLVARVALQSEDVELVAVNDPFITTDYMTYMFKYDTVHGQWKHSDIALKDSKTLLFGEKPVTVFGIRNPEEIPWGEAGAEYVVESTGVFTDKDKAAAHLKGGAKKVVISAPSKDAPMFVVGVNEDKYTSDVNIVSNASCTTNCLAPLAKVIHDNFGIIEGLMTTVHAITATQKTVDGPSAKDWRGGRAASFNIIPSSTGAAKAVGKVLPELNGKLTGMSFRVPTVDVSVVDLTVRIEKGASYEEIKKAIKAASEGPLKGIMGYVEEDLVSTDFTGDSRSSIFDAKAGIALNDHFIKLVSWYDNEWGYSNRVVDLIRHMFKTQ

SEQ ID NO: 39155 - protein, 300 aa, Zea mays
  Clone ID: 700042043_FLI.pep
CTNVLVELEAGEHVVVDGVGEVVEQVLERANAGDEPLDEVTEDGEHGEPAVLDLLELELIHLLLGLAEAERVEEGPAGVGRVAGAGEELLEAEEVLLAHGARVVPVLEAAVLGEAHERHVEDEERVGVGPVVVGARGRDDARLEPRQRGLRGDDAHLAEDLRGDGAHRAQHGVAAVDHLAVGQPLGLDEAPGALRVREAQRVEAIVAGQRAIEVGEGLLGREPQLPVGTLLGWRAGAGPDDEGRLPRRRPRDGRLHGAAQQLPAGEESLGRHRSGTGASSNLSFRQRAYVRALAIVSLPL

SEQ ID NO: 39156 - protein, 215 aa, Glycine max
  Clone ID: 700845003_FLI.pep
IPLTIQSQMGSISISEPIKLCCGNNSSEKAAQNSIPSEPIPIGGNTQLSTTSTKTNSGVESTLLSSMLGSSTISLSSEDSGVSESEDCVTGSNLTMEAAAVAAVWMSRGEHVTGLGSRSAISGKLRIADWPLMVRAATSWARAAISGVENVPSQIRDFLRGSRISDTHLPQFRFRTPWYTGCLLQSLGLLLCFWAWALGPECEEEEVVVCCVIVF

SEQ ID NO: 39157 - protein, 215 aa, Glycine max
  Clone ID: 700833139_FLI.pep
VLLDDYCEAVVGDFGLAKLLDHADSHVTTAVRGTVGHIAPEYLSTGQSSEKTDVFGFGILLLELITGMTALEFGKTVNQKGAMLEWVRKILHEKRVAVLVDKELGDNYDRIEVGEMLQVALLCTQYLTAHRPKMSEVVRMLEGDGLAEKWASSHNYGNQDMNPSHGNNSNTSSRPTSASKHDDDVHDRSSMFGMTMDDDDEQSLESYAMELSGPR

SEQ ID NO: 39158 - protein, 168 aa, Zea mays
  Clone ID: UC-ZMFLB73070G09_FLI.pep
TRAFNITAVKAPAPLCLLGGLGGLLGRLGLLGRRLLSGLLGQEHRVDVGEDAAVGDGDAGQQLAELLVVADGKEHVARDDAGLLVVLGSVAGQLQHLGGQVLEDGGQVDGGARADALRVPALLQVPPDAADGKLQPGLDGPRHRLLPRPAGLAPGRALLRLPAGSGCA

SEQ ID NO: 39159 - protein, 536 aa, Zea mays
  Clone ID: UC-ZMFLMO17306A12_FLI.pep
SEQLHGSASEQQAREQLHGSVSKQQTEVLRSNVSSGDASKCHFGPIVTQKLKEHFEKDPYPCRATKEGLAQELGLTFNQISKWFSATHHYSRDAVAKNQKYPGENTTENNSSTIFDGIQVIEPNFGLIDKPDADTNDMISEKLMVQINLNEGIEEDIPPSQYTTRCEEKLTMTQAAISREAGPPGYGPGENFLQVSSRITSCEQSVIMAPSAIARGVGPPGYTPGEHQGNGAPWNTSYERRPFTSPATSSREVGPPGYGPEENQGSGISCNTSREQILFMSPTTISRELGPPGYLPRENQRSDTSWNTSCESGLFMSPATTSIEHGPPGYGPGENQENDSTSCELRMFTSPTIVSREVGPPGYQQGVFMSPKTISREVCPPGFGSGENQGNDTTWYKQSAFTSPTTISREVGPPGYGQEDQGNGGSWNTSCEQGVFTSPTRGISREVGPPGYGPGESQGNTTSWISTCQQRMLAGIQRTGGSRSMDLEAFPPGYGPGGASGSVISPQARSAENVEFSDEARKKAIQRELRRRQKFR

SEQ ID NO: 39160 - protein, 376 aa, Glycine max
  Clone ID: 700843577_FLI.pep
GCFACYLVGGFSVQEKMVTRIVDLRSDTVTKPTEAMRAAMASAEVDDDVLGYDPTAFRLETEMAKTMGKEAALFVPSGTMGNLVSVLVHCDVRGSEVILGDNCHINIFENGGIATIGGVHPRQVKNNDDGTIDIDLIEAAIRDPMGELFYPTTKLICLENTHANSGGRCLSVEYTDRVGELAKKHGLKLHIDGARIFNASVALGVPVDRLVQAADSVSVCLSKGIGAPVGSVIVGSKNFIAKARRLRKTLGGGMRQIGLLCAAALVALQENVGKLESDHKKARLLADGLKEVKGLRVDAGSVETNMVFIDIEEGTKTRAEKICKYMEERGILVMQESSSRMRVVLHHQISASDVQYALSCFQQALAVKGVQNEMGN

SEQ ID NO: 39161 - protein, 160 aa, Zea mays
  Clone ID: LIB3069-006-F3_FLI.pep
GTIFTQMVEREGTRSLYLGLAPALARAVVYGGLRFGLYEPCKHVCSYAFGSTNFAFKFASGVIAGGLATALTNPMEVLKVRLQMSKSSTSTIREMRKVIAHEGFKALWKGVGPAMTRAGCLTASQMATYDEAKQALMKWTPLEEGFQLHLMYSEFSISLL

SEQ ID NO: 39162 - protein, 295 aa, Zea mays
  Clone ID: 700345531_FLI.pep
AAIPVIPGRKSRVETFAGANRTYTIEAMMGDKKALQAGTSHNLGQNFSRAFGTQFMDENGQIEHVWQTSWAISTRFVGGIIMTHGDDAGLMLPPRIAPIQVIIVPIWKKGDEKAVVVEAVDSVQKILKEAGIRVKVDDSELRTPGWKFNHYEMKGVPVRIEIGPRDVTNKSVVVSRRDVPGKQGKEFGVSMEPSILVNHIKGRLDDIQASLLQKAITFRDSNIVDVSSYGELKEAISEGKWARGPWSASDADELKVKEETSATIRCYPFEQPEGTKKCFMTGNPAEEVAIFAKSY

SEQ ID NO: 39163 - protein, 226 aa, Zea mays
  Clone ID: LIB3075-021-A10_FLI.pep
VDDLDLVIKTLEENGFKDRFYIHCDGALFGLMIPFVKKAPQVTFKKPIGSVSVSGHKFVGCPMPCGVQITRLEHINALSSNVEYLASRDATIMGSRNGHAPIFLWYTLNRKGYRGFQKEVQKCLRNAHYLKDRLKEAGIGAMLNELSSTVVFERPKDEEFVRRWQLACEGNIAHVVVMPSVNIDKLDYFLNELVDKRATWYQDGISQPPCIARDVGVENCLCGLHK

SEQ ID NO: 39164 - protein, 333 aa, Zea mays
  Clone ID: 700344130_FLI.pep
TEHVARFYIAETILAIQSIHKHNYIHRDIKPDNLLLDKNGHMKLSDFGLCKPIDCSKLSTLNEDEPMGDDNMRESMDIDSSLSNTANGRRWRSQHEQLQHWQMNRRKLAFSTVGTPDYIAPEVLLKKGYGMECDWWSLGAIMYEMLVGYPPFYADDPITTCRKIVHWRNHLKFPEDAKLSNEARDLICRLLCDVDHRIGSAGADQIKAHPWFQGVAWDKLYEMEAAFKPQVNDELDTQNFMKFEELENPPAKTGSGPSRKMMLNSKDLSFVGYTYKNFDAVKAIKISDLQRNSSLTRPSIGSIFGPSGMDSPMEPNGRDTHMHTVSSGDPMIP

SEQ ID NO: 39165 - protein, 192 aa, Zea mays
  Clone ID: LIB3069-039-E1_FLI.pep
SEELSAELSVSLQRCLLGGKSGAGAAIDLSSLIVVDGKVCWDLYIDGLVVSSDGNLLDALAVAIKVALSDTGIPKVNVSVSAASDEEPEVDVSDEEFLQFDTSGVPIIITLTKVGRHYIVDATSEEESQMSSAVSVSVNRHGQICGLTKRGGAGLDPSVIFDMISVAKHVSQQFISLLDSEIAAAEAEEEAQ

SEQ ID NO: 39166 - protein, 437 aa, Glycine max
  Clone ID: UC-GMROMINSOY200G09_FLI.pep
TRAVAAQIQQTHPSHPHLSIIRIISSCHCYKRNFIYQLRFRISISRKKKKMVIEEGEMKSQGEVESWLQQEAKKNHHSPLFSSSSYLGRQTSSIYSLTLDEFQHSLCESGKNFGSMNMDEFLSSIWNAEENSQAITNNNVPLSSTLTILRKQPSLPRQPSLSLPAPLCRKTVDEVWSQIQKEQNKNNNISNVLNDNTESAPRQPTFGEMTLEDFLVKAGVVRETTCAPPLPVSHSHQPHYANNNNNVAMAPSFVGRHVGAVSNVVAPGYQQVVGEASGGYGKRDHNGGGYHCFGGGGGGYGVGPTMGMGGPVSPANSSDGIGNDGGQFGLDMGGLRGRKRVVDGPVEKVVERRQRRMIKNRESAARSRARKQAYTVELEAELNQLREENSQLKQALAELERGRKQQCFEEVNVSVKTKAQKAKEKLRALRRNMSCPL

SEQ ID NO: 39167 - protein, 141 aa, Glycine max
  Clone ID: UC-GMROPIC029G06_FLI.pep
ICLHVCVHMLLCRIVATQEEAAAAYDMAAIEYRGLNAVTNFDLSRYINWPRPKTEENHQTIPSNENVNSNAELELGSASDEITEEGVAPSSESNPSRRTFPEDIQTIFENQDSGIYTENDDIIFGDLGSFGAPIFHYELDV

SEQ ID NO: 39168 - protein, 1543 aa, Glycine max
  Clone ID: UC-GMROPIC097G07_FLI.pep
GRKIRAGDCALFKPPRDSPPFIGIIRKLTFDKEESPSLEVNWLYRPADLKLAKGIVLEAAPNEVFYSFHKDETPAASLLHPCKVAFLRKGVELPSGISAFVCRRVYDIENNCLWWLTDKDYLNERQEQVNQLLDKTKLEMHGAVQSGGRSPKPLNGPTSTQSLKSGSDNVQNSSSFGAQGKGKKRERGDQGSDSSKKERLFKVEDGDSGQFRPESMLKSEIAKITDNKGGLVDFEAVDRLVQLMQPDSGDKKIDLAGRMMLVDVIALTDRYECLCGFVQHRGLPVLDEWLQEVHKGKISDGNMPKESDKSIDEFLLALLRALDKLPVNLHALQTCNVGKSVNHLRTHKNYEIQRKARSLVDTWKRRVEAEMNMNDSKSGSNRAMSWPAKPANSESPHVGNRKTGGGSSDNVAKSSSIQPSISKNSQSKLSSGEALSKSSSSPGSTKSMTTSASGNSKDQNSKVLVGAAASDLPLTPIKEERSSSSSQSQNNSVSCSSEHAKAIGSCREDAKSSTAVSTSVGKIPGGVSRTRKSSNGLHGAGVAVGPKEHSSAKNSAKNSPAEKVSPTRVSHEKSADQPLTDQGNNQRLILRLPNTGRSPSRGASGGSFEEPGIMCSKASPPADRNENQDRRVKTKTECLLTHVSNMMNEACDASEALLGVDEGKGPPMFDERCRANEDGDKVEETSKPTSLSSGFVSRSGQTYDLSSMNALVESCVKISEASASASHGDDGMNLLATVAAGEISRSENASPMSSPERKSLPADELSSANDFKLKHSVEAAGCTVSQLDGGAIAEHPLNTVDSLQIKNDLRHPATTSGDGEAISSSCVEKSGDGRSQINSSPTDFLQNAEGPCLRPEIKEDTSETILPDKKETNVDLGGSDSKLKSCTSSIDDDQKVDHMNEGTIENEELLVPKAVASVKSENESGEKQAELSSGVDNENQICSEKATGTGILVQKASPIAENCESLYLKKESPTSGNAVMVSRDENADDMKSVVIEPDERRMEQDLSVSDDVNECAEDTMGRNEAIGQCSGSSVQPDLPTMPRKENDVFKACERKLDANQSEVAGERHAGSAAGSDTAVKLDFDLNEGFPVDDVSQGEIARQEDPITSSAVHVPCLLPFPISSISGGFHASITVASAAKGPVVPPENPLRIKGELGWKGSAATSAFRPAEPRKNAETASTTNDIASVDGTSIKQGRPPLDFDLNVADERCFEDVGLRGSLEAGPLDRSTGGFDLDLNKVDETPEIGTFSLSKLEIPSLPSKPSLSSGLSNGGSVSRDFDLNNGPGLDEVGSEVPARSQQMKSTVPFPTAVHSTRTNNAEFGNYSAWFPPGNSYSAITVPPLLSGRGEQSYVAGAGAQRIMGPTGSAPFGPEIYRGPVLSSSPAVAYPPTTPFPYPGFPFETNFPLSSNSFSGCSTAFMDSSTVGGLCFPTMPSQPVGPGGVVSSTYPRPYVMSLPGGTSNVIPDSRKWASQSLDLNSGPGGMDTERRDDRLPSGLRQMSVPNSQASMEDHLKMFQMAGALKRKEPDGGWEGAERFGYKQTSWQ

SEQ ID NO: 39169 - protein, 350 aa, Zea mays subsp. mexicana
  Clone ID: UC-ZMROTEOSINTE109F10_FLI.pep
QVSSEAGSGATQQHKAAVMASAAATATMGTGKVVCVTGASGYIASWIVRLLLDRGYTVRATVRDTADPKKTLHLTALDGAKDRLHLFKASLLEEGSFDAAVHGCDTVFHTASPFYHNVKDAKAELLDPAVKGTLNVLGSCKKASIKKVVVTSSMAAVAYNGRPRTPEVTVDETWFSDPQICETNQQWYILSKTLAEEAAWKFSRDNGLEIVTINPAMVIGPLLQPTLNTSAEAILKLINGSSSTYPNFCFGWVNVKDVALAHILAYEVPSSNGRYCMVERVVHYSELVNIIRNMYPTLPLPDKCADDKPFVPPYQVSKEKIKSIGIELIPLETSVKETIESLKEKGFASF

SEQ ID NO: 39170 - protein, 172 aa, Zea mays
  Clone ID: 700082311_FLI.pep
RIPRIAFAAFAASHHRETPAAASMAPKAEKKPAAKKPAEEEPAAAKAPAGKKPKAEKRLPAAKSSGKEGGDKKGKKKAKKSVETYKIYIFKVLKQVHPDIGISSKAMSIMNSFINDIFEKLAGEAAKLARYNKKPTITSREIQTSVRLVLPGELAKHAVSEGTKAVTKFTSS

SEQ ID NO: 39171 - protein, 179 aa, Glycine max
  Clone ID: UC-GMROPIC109H12_FLI.pep
QNAPLDVAKYTTPPPEKQTKTSKPSGGAYGSASSDRPYACPYDGCEKAYIHEYKLRLHLKREHPGLMADENAEHAQANVGNEMDEASDHDAYVAKRSNGKIQKQSKPKPNLKLPPSKIAKRKVSTPTLTVNKNSWPVKDEPFDEEDSEETEEDRDNVEDGWRYAGGNNEDDDEETEYED

SEQ ID NO: 39172 - protein, 306 aa, Zea mays
  Clone ID: 700155024_FLI.pep
GRGTCLHLSCLPLAVPLLNLCPPLLAAFPHRAPAPAPRPPASTAAPVAVVAAVSLAAPAAATATTVVVVVVVVVIVAVPGPGRATAAAVWARAAAASAVAPEGAMQVAKQLPPQVPADLLDVHKVAVSAAVAAVLLELAAGGLPEVRHRRELGDDGSARVVAALQRLQGAGRLLLLAELHVHVPDHVVREVVADVEALDLAVLAQLHEDVLVEVLEVLLDPLRVDGVALRVHARGDHVRPLVHVAEQQRRGDGRLVVQAGAPVAVAACADLEVEGAVHAVLLRAKDGRKMLSHGCLITPLPARFVA

SEQ ID NO: 39173 - protein, 526 aa, Zea mays
  Clone ID: 700344141_FLI.pep
ELYSNNISGTIPPELGNLTNLVSLDLYMNNFSGNIPDSLGNLVKLRFLRLNNNSLVGPIPVSLTNISTLQVLDLSNNNLSGQVPSTGSFSLFTPISFANNPNLCGPGTSKPCPGAPPFSPPPPFNPPSPPTQSTGASSTGAIAGGVAAGAALVFAVPAIAFAMWRRRKPEEHFFDVPAEEDPEVHLGQLKKFSLRELQVATDNFSNKNILGRGGFGKVYKGRLADGSLVAVKRLKEERTPGGELQFQTEVEMISMAVHKNLLRLRGFCMTPTERLLVYPYMANGSVASRLRERQPSEPPLSWEPRRRIALGSARGLSYLHDHCDPKIIHRDVKAANILLDEDFEAVVGDFGLAKLMDYKDTHVTTAVRGTIGHIAPEYLSTGKSSEKTDVFGYGIMLLELITGQRAFDLARLANDDDVMLLDWVKGLLKEKKVEMLVDPDLQKAYEEVEVESLIQVALLCTQGSPLDRPKMSEVVRMLEGDGLAERWDEWQKVEVVRQEAESAPLRNDWIVDSTYNLRAVELSGPR

SEQ ID NO: 39174 - protein, 431 aa, Zea mays
  Clone ID: LIB3069-054-A9_FLI.pep
APMMRRTVMGTYVIAKIKKEDGNIYVLLNGMGATPEGNVPFLDLFDINTGSKERIWESDREKYYETVVALMSDKTDGELLLDQLKILTSKESKTENTQYYLQTWPEKNQVKITNFPHPYPQLASLYKEMIRYQRKDGVQLTANLYLPPGYDSSKDGPLPCLVWSYPGEFKSKDAAGQVRGSPNEFPGIGATSPLLWLARGFVILSGPTIPIIGEGDEEANDRYVEQLVTSAEAAVEEVVKRGVAHPDKIAVGGHSYGAFMTANLLAHAPHLFCCGIARSGAYNRTLTPFGFQNEDRTLWEATNTYVEMSPFMSANKIKKPILLIHGEQDNNSGTLTMQSDRFFNALKGHGALSRLVILPFESHGYSARESIMHVLWETDRWLQNYCVNGTSKVDSVSEADSKNKTLSASGGSAAREGLNPEELSSLPRSLL

SEQ ID NO: 39175 - protein, 307 aa, Zea mays
  Clone ID: 700102287_FLI.pep
AAAHEDVRGLDDLAVAVLGEAAHEADVRHLHLGAAVGASGPVHAHRPRHGHALLHLPRHLQRPRLGLDDGLPAELVARARHQAPEQQRRLRREALPLQQRLREQRVQPPVAHVGEHDVLLHREPELARAVLVGEARQLEHVRGLQPAHGHVQAHVRQAFLLLRVHAEVVPPLPLLVDEVLRRGALQHPVGHPLLHLRPEHLHPEFVDEPHHARLLPVAPEPEVPVRLEDGLARGDDVVSGDPGVERQGLGPPLGADEPAHQKVEAELAVLDGRHVGEVVDVRVLVQVVRADHAHVPFPRQVGDGGVP

SEQ ID NO: 39176 - protein, 539 aa, Zea mays
  Clone ID: LIB3245-443-A8_FLI.pep
HALPPRRLRRRLLPRPLPHHRHLHRRPGLGRDDPDDLDGGAGATAGVLLRDRRRRRRGVRAGVGGAAGGAVPGAVPDGAGHGWAKVERVGVRVGPVRRVGRRGEAADDALLQLLLLLHLAGVAAGRHRAGVRPGQPGQALGLRRLRLRHRRGPPRLPGRHTQVPLQEAGRQPPHADRRRRRRRLAQAPPPSPRRPRHALRRRRRQGRRRRGWVLQQEEQAQGAPPPHRPVPLPGPRGDQRGSGGGGEQQQQVAAGDADGRGGGEDGGADAADLGDHDHVLDGVRADDHLLGVAGHHHGPPRRGLVPDPRGLPHRLLRRLHPAHRARLRPPRGARRAPRQRQPARPHPAAADRRRPRALRRRHGGRRAHGGPPPPRRARVLRVRLRRRRAHVRVLAHPAVLPRGGGRGVHVHRPARLLPARVPQGDEDHEHGAVPQHPVAGILRQLRARRRRAQGHGRPPPLDRQRPQQGPPRQLLLAARRRLPRQPTSLPRRRPLVQVQGGPPRRRRQRQRRRDGRRAHAPLIHPCSIDRRGTRRTTLN

SEQ ID NO: 39177 - protein, 315 aa, Zea mays
  Clone ID: 700343886_FLI.pep
VDIPLDKEALDWNTRMKIAAGAAKGLEYLHDKANPPVIYRDFKSSNILLDESFHPKLSDFGLAKLGPVGDKSHVSTRVMGTYGYCAPEYAMTGQLTVKSDVYSFGVVLLELITGRRAIDSTRPHGEQNLVSWARPLFNDRRKLPKMADPRLEGRYPMRGLYQALAVASMCTQSEAASRPLIADVVTALSYLASQPYDPSTAFASRRLGGSKPGENGGRVVSRNDETGTSRSPGKDREDSPRDLPAILLNKDLERERMVAEAKMWGDRERMVAEAKMWGDRERMVAEAKMWGENWRDKRRAENGQGSLDSPPTRNS

SEQ ID NO: 39178 - protein, 301 aa, Zea mays
  Clone ID: LIB3069-015-B7_FLI.pep
SEALRVRDEMVGFGCLPDVVTYNTLLNGLCKQHRLLDAEKLLNEMEERGVTPDLCTFTTLIHGYCRQGNFENALQLFDTLLRQRLRPDVVTYNSLIDGMCRKGDLAKANELWDDMHAREILPNHITYSILIDSHCEKGQVEDAFGFLDEMVKKGNLPNIRTYNSIIKGYCRSGNVKKGQQFLQKMRQDNVFPDLITFNTLIHGYIKEENMHGAFNVFNIMEKEMVRPDAVTYNMIINGFSEQGNMQDAGRVFKGMGDSGIEPDRYTYMSLINGHVTAGNSKQAFQLHDEMIHRGFAPDDKF

SEQ ID NO: 39179 - protein, 440 aa, Zea mays
  Clone ID: 700344637_FLI.pep
WDEPPYKINASGQTARLGFNTIATSATHYNGILEYNAHSLYGFSQAIATHTALQGLQGKRPFILTRSTFVGSGAYAAHWTGDNKGTWENLRYSISTMLNFGIFGMPMVGSDICGFYPSPTEELCNRWIELGAFYPFSRDHANFASPRQELYVWDSVAKSARNALGMRYKLLPYLYTLNYQAHLTGAPVARPVFFSFPDFTPCYGLSTQFLLGPGVMVSPVLEQGATSVSAMFPPGTWYNLFDMSKVVVSRSGAPVKLDAPLNEINVHVYQNTILPMQRGGFVSKDARATPFTLVVAFPFGATQADAEGAVYVDDDERPEMVLAEGQASYVRFHASVRGKAVTVRSEVLMGSYSLHKGLVVEKLSVLGLEGTGKDLAIQVDGTDATAVATSSPYFAAGGNAKLQGEEGVEDSKNGVMVEIGGLALPLGKSFTMTWNMRIEA

SEQ ID NO: 39180 - protein, 269 aa, Zea mays
  Clone ID: LIB3078-006-H9_FLI.pep
GMAATLAGVCKVPLTSVLLLFELTQDYRIVLPLLGAVGLSSWIASPQRFSKRIRSKLDSWEDKSSIPQQANDMLTENKEATSMDAADLSLELYKIESSLCVYDANDSNMFKNLTVGEAMKTNYFSVSMTTPLIEALDLMLAEKQPFVMITENNTSARGLLALKNIQDFCKAAKTTRSQAEVKELLISHVCQAGKCKSWSVTPQMPLTTAEKIMDSHDVDHLPVVSEDANLQDRGLLIGFVDRECIAIARRAMATKEIFSSMYGIRKEER

SEQ ID NO: 39181 - protein, 69 aa, Zea mays
  Clone ID: 700346524_FLI.pep
KSRNSVPSGSQGQTAKPRPFPVPDGIPKTQEELTEEEEALMPESPYTRLLRRMGRYPEWYTPRPDHETD

SEQ ID NO: 39182 - protein, 138 aa, Zea mays
  Clone ID: LIB3079-012-G4_FLI.pep
YYMCIEVYWVRLRCILTCYGFKPAQSHPIHVDYHQNEQALKVFRCFNVWLGLMTYEDGLSCSKAGGEFMGSKHGRKPGTKNSRKTETETHNGGYNQVEEQSTCHRCCIADILLYSPRSRRTAAFLLRLTNVVAIFRAI

SEQ ID NO: 39183 - protein, 137 aa, Zea mays
  Clone ID: 700348590_FLI.pep
VDTSMVEGMETTSQDTVAEETANLDTAAEETVSPDTVEDTSAITLVAATGLDKEGLDVDVEEGMEVAMVVLGTAMTMVVAVALVAEMAMLVGTEEEEAAVMEAATAVVVVQHQEADIMAVVVHNATLGKTSKNNPLC

SEQ ID NO: 39184 - protein, 265 aa, Zea mays
  Clone ID: LIB3075-042-H1_FLI.pep
AKIRPDKHRHLGAGFGKLVAKVLGLGVLALGRCTTLPLVPKVHVLQHQTPARHTAPEQHRHRRRRRALDVLEVNVIESHPGHVLVLAVVVGAVLLIDDNGVLHVPHDHVLEDHVRGVALGRGVLPCLDANAVHGAREGHVADVHPCDVSLAGVATQAADAHAVAWAALHAGHVHVVVALADGDAVVARADVRVHDGYPAAALDVDAIRVGAVGGRADLEPAHPDVLHRQQRHVEELGVHGRDVAHHRVLVVHEQHACWQHFAVLA

SEQ ID NO: 39185 - protein, 93 aa, Zea mays
  Clone ID: 700350012_FLI.pep
QQNATNKLRSGNGLGLALSRRFVALMQGNIWLESEGVGKGCTATFFVKLGLSDANLRRMVPPVQPKHGNADPDVSSIINGDMAILPRCYQSMI

SEQ ID NO: 39186 - protein, 232 aa, Zea mays
  Clone ID: LIB3067-036-F6_FLI.pep
LIVHFSVGIARSGTQVAFGQGNSYYARNFPMPKKDSSAGGASKLPKEYAEPWDYSHDYPVTLPLRKPYSGNPEILDEEEFGESSASRTQDDELSAAEQLGLMDMSSESQFLFFQLPSSLPLPRQPQSGADPNEVRDEKREDMRPSSHNGSKLKEVPEGYMGKMLVYKSGKVKMKIGDTLFDVSFGSNCMFSQEVAAINIREKHCCTVGEISKRAIITPDINYMLGSVDKMEE

SEQ ID NO: 39187 - protein, 836 aa, Homo sapiens
  Clone ID: LIB4676-011-A2_FLI.pep
GPAGPWAQAQLRPPGMDVVDPDIFNRDPRDHYDLLQRLGGGTYGEVFKARDKVSGDLVALKMVKMEPDDDVSTLQKEILILKTCRHANIVAYHGSYLWLQKLWICMEFCGAGSLQDIYQVTGSLSELQISYVCREVLQGLAYLHSQKKIHRDIKGANILINDAGEVRLADFGISAQIGATLARRLSFIGTPYWMAPEVAAVALKGGYNELCDIWSLGITAIELAELQPPLFDVHPLRVLFLMTKSGYQPPRLKEKGKWSAAFHNFIKVTLTKSPKKRPSATKMLSHQLVSQPGLNRGLILDLLDKLKNPGKGPSIGDIEDEEPELPPAIPRRIRSTHRSSSLGIPDADCCRRHMEFRKLRGMETRPPANTARLQPPRDLRSSSPRKQLSESSDDDYDDVDIPTPAEDTPPPLPPKPKFRSPSDEGPGSMGDDGQLSPGVLVRCASGPPPNSPRPGPPPSTSSPHLTAHSEPSLWNPPSRELDKPPLLPPKKEKMKRKGCALLVKLFNGCPLRIHSTAAWTHPSTKDQHLLLGAEEGIFILNRNDQEATLEMLFPSRTTWVYSINNVLMSLSGKTPHLYSHSILGLLERKETRAGNPIAHISPHRLLARKNMVSTKIQDTKGCRACCVAEGASSGGPFLCGALETSVVLLQWYQPMNKFLLVRQVLFPLPTPLSVFALLTGPGSELPAVCIGVSPGRPGKSVLFHTVCFGALSCWLGEMSTEHRGPVQVTQVEEDMVMVLMDGSVKLVTPEGSPVRGLRTPEIPMTEAVEAVAMVGGQLQAFWKHGVQVWALGSDQLLQELRDPTLTFRLLGSPRPVVVETRPVDDPTAPSNLYIQE

SEQ ID NO: 39188 - protein, 645 aa, Homo sapiens
  Clone ID: LIB4219-022-B12_FLI.pep
VCCDRRGTPVVAAAAAAGAPGRGATMAVRQALGRGLQLGRALLLRFTGKPGRAYGLGRPGPAAGCVRGERPGWAAGPGAEPRRVGLGLPNRLRFFRQSVAGLAARLQRQFVVRAWGCAGPCGRAVFLAFGLGLGLIEEKQAESRRAVSACQEIQAIFTQKSKPGPDPLDTRRLQGFRLEEYLIGQSIGKGCSAAVYEATMPTLPQNLEVTKSTGLLPGRGPGTSAPGEGQERAPGAPAFPLAIKMMWNISAGSSSEAILNTMSQELVPASRVALAGEYGAVTYRKSKRGPKQLAPHPNIIRVLRAFTSSVPLLPGALVDYPDVLPSRLHPEGLGHGRTLFLVMKNYPCTLRQYLCVNTPSPRLAAMMLLQLLEGVDHLVQQGIAHRDLKSDNILVELDPDGCPWLVIADFGCCLADESIGLQLPFSSWYVDRGGNGCLMAPEVSTARPGPRAVIDYSKADAWAVGAIAYEIFGLVNPFYGQGKAHLESRSYQEAQLPALPESVPPDVRQLVRALLQREASKRPSARVAANVLHLSLWGEHILALKNLKLDKMVGWLLQQSAATLLANRLTEKCCVETKMKMLFLANLECETLCIHIEDPGQGTGCQWQSLAVTFAPNTRNSFEGGSVACLICHLDEGRHQHGSAR

SEQ ID NO: 39189 - protein, 608 aa, Homo sapiens
  Clone ID: LIB4218-039-G3_FLI.pep
PQVCCDRRGTPVVAAAAAAGAPGRGATMAVRQALGRGLQLGRALLLRFTGKPGRAYGLGRPGPAAGCVRGERPGWAAGPGAEPRRVGLGLPNRLRFFRQSVAGLAARLQRQFVVRAWGCAGPCGRAVFLAFGLGLGLIEEKQAESRRAVSACQEIQAIFTQKSKPGPDPLDTRRLQGFRLEEYLIGQSIGKGCSAAVYEATMPTLPQNLEVTKSTGLLPGRGPGTSAPGEGQERAPGAPAFPLAIKMMWNISAGSSSEAILNTMSQELVPASRVALAGEYGAVTYRKSKRGPKQLAPHPNIIRVLRAFTSSVPLLPGALVDYPDVLPSRLHPEGLGHGRTLFLVMKNYPCTLRQYLCVNTPSPRLAAMMLLQLLEGVDHLVQQGIAHRDLKSDNILVELDPDGCPWLVIADFGCCLADESIGLQLPFSSWYVDRGGNGCLMAPEVSTARPGPRAVIDYSKADAWAVGAIAYEIFGLVNPFYGQGKAHLESRSYQEAQLPALPESVPPDVRQLVRALLQREASKRPSARVAANVLHLSLWGEHILALKNLKLDKMVGWLLQQSAATLLANRLTEKCCVETKMKMLFLANLECETLCQAALLLCSWRAAL

SEQ ID NO: 39190 - protein, 286 aa, Homo sapiens
  Clone ID: LIB4119-182-C9_FLI.pep
GPSQSDVPAPALAPLVGPERLFADALGAAAMASTRSIELEHFEERDKRPRPGSRRGAPSSSGGSSSSGPKGNGLIPSPAHSAHCSFYRTRTLQALSSEKKAKKARFYRNGDRYFKGLVFAISSDRFRSFDALLIELTRSLSDNVNLPQGVRTIYTIDGSRKVTSLDELLEGESYVCASNEPFRKVDYTKNINPNWSVNIKGGTSRALAAASSVKSEVKESKDFIKPKLVTVIRSGVKPRKAVRILLNKKTAHSFEQVLTDITEAIKLDSGVVKRLCTLDGKQVRCF

SEQ ID NO: 39191 - protein, 512 aa, Homo sapiens
  Clone ID: LIB4219-095-F2_FLI.pep
WFPALTATESDGTPLMEQYVPCPVCETAWAQHTDPSEKSEDVQYFDMEDCVLTAIERDFISCPRHPDLPVPLQELVPELFMTDFPARLFLENSKLEHSEDEGSVLGQGGSGTVIYRARYQGQPVAVKRFHIKKFKNFANVPADTMLRHLRATDAMKNFSEFRQEASMLHALQHPCIVALIGISIHPLCFALELAPLSSLNTVLSENARDSSFIPLGHMLTQKIAYQIASGLAYLHKKNIIFCDLKSDNILVWSLDVKEHINIKLSDYGISRQSFHEGALGVEGTPGYQAPEIRPRIVYDEKVDMFSYGMVLYELLSGQRPALGHHQLQIAKKLSKGIRPVLGQPEEVQFRRLQALMMECWDTKPEKRPLALSVVSQMKDPTFATFMYELCCGKQTAFFSSQGQEYTVVFWDGKEESRNYTVVNTEKGLMEVQRMCCPGMKVSCQLQVQRSLWTATEDQKIYIYTLKGMCPLNTPQQALDTPAVVTCFLAVPVIKKVRSGQRQVCRSLMHFHA

SEQ ID NO: 39192 - protein, 517 aa, Zea mays
  Clone ID: 700350123_FLI.pep
RRGLPTINTAAITALVDRWRPETHTFHLPCGEMTVTLRDSQKQLGLSIRGRPVTGQAAPGGWRQRVEAFLGREVPTDTPGSHTSGVSLAWLRQSFGECPAAADDQTVSYYCRAWVLHLFGSVLFPDATGDSASWMFLPCLTDWDMAGGYSWASAVLSFLYRQLCEACRRTAKNASLGGCVYLLQLWMWSHLPVGRPIEFAPRPWFDVVGLRLRPTAAYRWDQVQAPFARHQRAYVEYSNELDALTPSMVSWQPYDQPPSPHIQLSSACTADEDIYLLRCPLICFYAVEYHLPHRVARQFGLRQEFPVEPFSTSIELHKFDRQKQKKITDFEAHHQVYIDEWDQMHDLLYQNDQPHTNYNFREYISWYVSATRCKLKGQWTSADYAELESSDDEDTSYDLVTRHGTHVEAAPILDRVGNSMMQSVVDIEHFSKTTSDSRTLAFLSRLSRRLRCAAARCGCRTSVGVNIQHTLQHHGDTSLGLGAIIVAQGSSRSTRDAFASHKEDEDDIKIPLDKIGP

SEQ ID NO: 39193 - protein, 682 aa, Homo sapiens
  Clone ID: LIB3063-009-H1_FLI.pep
KTKIFAYFGLCDDTLIVLAEEHGCLDIIKELPETVIDLLNKCLTFHPSKRPTPDELMKDKVFSEVSPLYTPFTKPASLFSSSLRCADLTLPEDISQLCKDINNDYLAERSIEEVYYLWCLAGGDLEKELVNKEIIRSKPPICTLPNFLFEDGESFGQGRDRSSLLDDTTVTLSLCQLRNRLKDVGGEAFYPLLEDDQSNLPHSNSNNELSAAATLPLIIREKDTEYQLNRIILFDRLLKAYPYKKNQIWKEARVDIPPLMRGLTWAALLGVEGAIHAKYDAIDKDTPIPTDRQIEVDIPRCHQYDELLSSPEGHAKFRRVLKAWVVSHPDLVYWQGLDSLCAPFLYLNFNNEALAYACMSAFIPKYLYNFFLKDNSHVIQEYLTVFSQMIAFHDPELSNHLNEIGFIPDLYAIPWFLTMFTHVFPLHKIFHLWDTLLLGNSSFPFCIGVAILQQLRDRLLANGFNECILLFSDLPEIDIERCVRESINLFCWTPKSATYRQHAQPPKPSSDSSGGRSSAPYFSAECPDPPKTDLSRESIPLNDLKSEVSPRISAEDLIDLCELTVTGHFKTPSKKTKSSKPKLLVVDIRNSEDFIRGHISGSINIPFSAAFTAEGELTQGPYTAMLQNFKGKVIVIVGHVAKHTAEFAAHLVKMKYPRICILDGGINKIKPTGLLTIPSPQI

SEQ ID NO: 39194 - protein, 238 aa, Zea mays
  Clone ID: LIB83-014-G10_FLI.pep
ADKTASRAAETRSGARRRVTCGVSGFVPAWQRPSPIEHRGMEPGAKSEAKQGEAGSGAGASGSGKVYHERQRLQFCLLHALNNLMQEKECFTRVELDGIAGNLVLNDPDKGQWTPLPFIFKPHHNVITGNYDVNVLITALEARNKKVVWHDRRKGASSVDLNAETLVGLMINVPIRRFRGLWTGRHWVAIRRIDGIWFNLDSDLSEPKQFKDQENVIGFLDSVLSQGGELMVVLQEIS

SEQ ID NO: 39195 - protein, 282 aa, Zea mays
  Clone ID: 700350210_FLI.pep
LQSPPDSRGARRSRKDTPPPPMSRHRVETCDSWRPPRKNHAGAPPLLRAGPRLLAFASLSVRDGGDSAAAVAKAVEEAVVVRSDEVKEAVAGEERKKTKSTERRLPPAAQLVSHPLALLALVPNSAAIFAAGAAAGTVAKTVTAPLDRVKILMQTHSVRVAGESAKKGVGFLEAMADIGKKDGLKGYWKGNLPQVIRIIPYSAVQLFSYEVYKKIFRRKDGELSVFGRLAAGACAGMTSTLVTYPLDVLRLRLAVQSGHSTLSQVTSLVSANFCTFFFWKLA

SEQ ID NO: 39196 - protein, 181 aa, Zea mays
  Clone ID: LIB3079-051-E9_FLI.pep
QFAIICNRSKLNTFTFFFFAALPGTSRSSNLSGGGTGRCGGFTCHGLSLPERSLLASLGNSLQDGVRCHIALHGDLLFHDVYVVGLDAFHLAEDPLDSSNTALTGHANLEHNSLGHSARGEEGRGGSAVVVEISCRRRRRRGRTGERSIWAGREGRSWVRIYRRPVASVNTQGKARPSPLF

SEQ ID NO: 39197 - protein, 499 aa, Zea mays
  Clone ID: 700350418_FLI.pep
VLSSKVYDVAIESPLQLASKLSHRLGVNLWIKREDLQPVFSFKLRGAYNMMAKLSREQLERGVICSSAGNHAQGVALSAQRLGCDAVIVMPVTTPEIKWKSVERLGATVVLEGDSYDEAQSYAKLRCQQEDRTFIPPFDHPDVITGQGTVGMEIVRQLQGPLHAIFVPVGGGGLIAGIAAYVKRVRPEVKIIGVEPSDANAMALSLYHGKRVMLEHVGGFADGVAVKAVGEETFRLCRELVDGIVMVSRDAICASIKDMFEEKRSILEPAGALALAGAEAYCKYYNLKGDTVVAITSGANMNFDRLRLVTELADVGRKREAVLATFLPEEHGSFKKFTELVGRMNITEFKYRYDFNAKDALVLYSVGIYTDNELGAMVDRMESAKLKTVNLTDNDLAKDHLRYFIGGRSEIKDELVYRFIFPERPGALMKFLDAFSPRWNISLFHYRAQGETGANVLVGIQVPPVDFDEFKSHADNLGYEYMSENNNEIYRLLLRDPEV

SEQ ID NO: 39198 - protein, 295 aa, Zea mays
  Clone ID: LIB3079-050-F6_FLI.pep
FDQRAWDTRTMESICRSCKFAVRTCGRVMGMTIGAMLEEIQTLYQQHKQSCFLYLSSEVIKIFGSDPSCAGYLTNLIQILFSHTVQLLRTIQDFTARPDIADDCYLLASRCIRYCPDLFIPTEMFQRLVDCAMAGITIQHREACKSILSFLSDVIDLPNSSDGGQYRKVINTIILHRGATLTRIMIAALTGALPSGRLEEVSYVLLSLSRVFGENMLNWARESINLIPPQALTDAERLRFFNTISDAASGSSLHTITDRFGEISDVCRRNKTVQDLVQSALRPHDLTFTVVPQQM

SEQ ID NO: 39199 - protein, 440 aa, Zea mays
  Clone ID: 700350551_FLI.pep
ASKGKYTIGLGQDCMAFCSEVEDVISMSLTVVNSLLKKYKIDPKLIGRLEVGSETVIDKSKSIKTWLMQIFEESDNTDIEGVDSSNACYGGTAALLNCVNWVESNSWDGRYGLVVCTDSAVYAEGPARPTGGAAAIAMLIGPNAPISFESKYRASHMAHVYDFYKPDLASEYPVVDGKLSQTCYLMALDSCYRQFCNKYEKIAGKQFSISDAEYFVFHSPYNKLVQKSFARLYYNDFMRNCSYVDDDAKEKLQSFSNLTGEESYQSRDLEKASQQVAKHLYGIKVQPTTLLPKQIGNMYTASLYAALASVLYNKHDSLNGQRIVMFSYGSGLTSTMFSLRLNNGQHPFSLSNIGSVLGVTEKLQSRHETLPEKFVETLKLMEHRYGAKDFETSSDTSLLQPGTFYLTKVDSMYRRFYSQKPAEEIGGGKTKCCNGFANGH

SEQ ID NO: 39200 - protein, 173 aa, Zea mays
  Clone ID: LIB3079-017-B11_FLI.pep
YEYANNSVKSTIERYKKANSDSSNSGTVAEVNAQYYQQESSKLRQMIHSLQNANTRNIVGDSIHTMGLRDLKQMEGKLEKAIIKIRARKNELLYAEVDYMQKREMDLQTDNMYLRSKIAESNETGQPAMHMTMGAPPTSEYDHMAPFDSRNFLQVSMPQHYSHQLQPTTLQLG

SEQ ID NO: 39201 - protein, 325 aa, Zea mays
  Clone ID: 700351016_FLI.pep
DEEAVLRRDIYDRPPTMNWGKGRVTLLGDSVHAMQPNLGQGGCMAIEDGYQLAVELENAWQESVKTETPIDIVSSLRRYEKERRLRVAIIHGLARMAAIMATTYRPYLGVGLGPLSFLTKLRIPHPGRVGGRFFIKYGMPTMLSWVLGGNSSKLEGRLLSCRLSDKANDQLYQWFEDDDALEEAMGGEWYLIATSEGNCNSLQPIHLIRDEQRSLFVGSRSDPNDSASSLSLSSPQISERHATITCKNKAFYLTDLGSEHGTWITDNEGRRYRVPPNFPVRFHPSDVIEFGSDKKAMFRVKVLNTLPYESARSGNRQQQQVLQAA

SEQ ID NO: 39202 - protein, 329 aa, Zea mays
  Clone ID: LIB3079-005-H10_FLI.pep
ARRCVEPRRNGNLHLSSRPPAPRRRRRPPPAPRLAGVAEQQLCTGRARQWLADVAFTRLRLRRRPQQAAQAPPWQAAQVPAVQPSVRASDASAVTAVRATVCPADASAVTALRATIRPRPADASALTAVRATIRPRPPDASALTALRATIRPRPADASAVTAVRTPDATAADSALRSTDAALRPTDASAITTTVRATLRPPDASAITTLRATVRSADAAGGADVPDRHAEAERVRGRAERADPPGDRAGGQVQVLPAGAGGGGPGRGAVPLHHHPRAPAQHQHLPPHRAQPAHHLRQARAVGLPVPAALRLMNTTTSQHFYTRRHACMM

SEQ ID NO: 39203 - protein, 255 aa, Zea mays
  Clone ID: 700351139_FLI.pep
GELLHGKKGGHLHWDTRYKIAVEAAKGLSYLHHDCSPPILHRDVKSNNILLDSDFEAHVADFGLAKFLQDSGASQCMSAIAGSYGYIAPEYAYTLKVDEKSDVYSFGVVLLELVTGKKPVGEFGDGVDIVHWVRSTTAGASKEQVVKVMDPRLSSVPVHEVAHVFCVALLCVEEQSVQRPTMREVVQMLGELPKPAAAAAAAGQGDEVPGSGDGDECSAAPSGAPAADESVEAPHGEATKEPSSQSSPTTDLISI

SEQ ID NO: 39204 - protein, 145 aa, Zea mays
  Clone ID: LIB3075-032-A3_FLI.pep
TMPIGSLFVSRLARSSHALPAAAAAAISQAPRPQHIASPIFSGLGAAARDFSSRALWKGAFVDAFLARIKKNRENMNGKKIWSRRSSILPEFVGSTVLIYNGKSHVRCKITEGKVGHKFGEFAFTRRRRPHRTITGKGNQGKGRK

SEQ ID NO: 39205 - protein, 527 aa, Zea mays
  Clone ID: 700352166_FLI.pep
LVRQPKWGHLRDVHKAIKLCEPALIATDPSYTSLGPNVEAAVYKVGSVCAAFLANIDGQSDKTVTFNGKMYRLPAWSVSILPDCKNVVLNTAQINSQTTGSEMRYLESSNVASDGSFVTPELAVSDWSYAIEPVGITKDNALTKAGLMEQINTTADASDFLWYSTSITVKGDEPYLNGSQSNLAVNSLGHVLQVYINGKIAGSAQGSASSSLISWQKPIELVPGKNKIDLLSATVGLSNYGAFFDLVGAGITGPVKLSGLNGALDLSSAEWTYQIGLRGEDLHLYDPSEASPEWVSANAYPINHPLIWYKTKFTPPAGDDPVAIDFTGMGKGEAWVNGQSIGRYWPTNLAPQSGCVNSCNYRGAYSSSKCLKKCGQPSQTLYHVPRSFLQPGSNDLVLFEHFGGDPSKISFVMRQTGSVCAQVSEAHPAQIDSWSSQQPMQRYGPALRLECPKEGQVISSVKFASFGTPSGTCGSYSHGECSSTQALSIVQEACIGVSSCSVPVSSNYFGNPCTGVTKSLAVEAACS

SEQ ID NO: 39206 - protein, 240 aa, Zea mays
  Clone ID: LIB3075-033-B12_FLI.pep
EKSPISSESAITAKQEPLSRSIPIGSIARTLSWDDASQEAPPQCSTKGDSNHEQEQHEFVEKTLASAGFCNEKTQDIFARWHSLDRPLDPAVVEQLLERKVEDAKCRERRSNQRLLIDSVNAALLDIGQSKVWGGAYPCTARHYSNAPGVGTCDDDVLVTDEAWRLVRSWLFDDENDIAGLGDNAGLAADWVVGREIHGKGWAETLRMEVDEMSREICGEVLGELVGEAFSELAGAAGWH

SEQ ID NO: 39207 - protein, 742 aa, Zea mays
  Clone ID: 700352413_FLI.pep
ERGNSLHGEERMGRGGIGGAAAMAMAMETADPARAFVKDVKRIIIKVGTAVVTGMNGRLAMGRLGSLCEQVKQLNFQGYEVILVTSGAVGVGRQRLQYRKLIHSSFADLQNPQMNFDGKACAAVGQSVLMAIYDTLFSQLDVTSSQLLVTDRDFKDPSFGDQLRETVFSLLDLKVVPLFNENDAISTRRQPYEDSSGIFWDNDSLAALLAAELNADLLIMLSDVEGLYSGPPSDPQSKIIHTYVNEKHGKLISFGEKSSVGRGGMQAKVSAAANAASKGVPVVIASGFATDSIITVLKGEKIGTLFHNEANLWACSKEATAREMAVAARDCSRRLQKLSSEERKQILLDIADALEANEDAIRSENDADVEAAQVAGYEKSLVARMTLKPGKITNLARSIRKTADMEDPISHTLKRTEVAKDLVFEKAYCPLGVLLIIFESRPDALVQIASLAIRSGNGLLLKGGKEVMRSNAILHKVITGVIPDTVGKKLIGLVTSKEEIADLLALDDVIDLVIPRGSKSLVSQIKATTKIPVLGHADGICHVYIDKSADMDMAKRIVLDAKIDYPAACNAMETLLVHKDLNKSEGLDDLLVELEKEGVVIYGGPVAHDKLKVPKVDSFRHEYSSMACTVEFVDDVQSAIDHINRYGSAHTDCIITTDRSAAEAFLQQVDSAAVFHNASTRFCDGTRFGLGAEVGISTERIHARGPVGVDGLLTTRCILRGSGQVVNGDKGVVYTHKDLPLQ

SEQ ID NO: 39208 - protein, 243 aa, Glycine max
  Clone ID: LIB3049-008-H10_FLI.pep
KGKMALDHFEETVHQKGNWKSSSEIIADSDRNASGDFDCNICLECVQDPVVTLCGHLYCWPCIYKWLHFQSTSLDDEEQQRPQCPVCKSEVSQSSLVPLYGRGQTTLPSKGKPRQVGTVIPQRPHGPRTLNTRSVSQPISQSYHPYSNPYHPQQHFNSIPSGYTSPMIRTTGSIDNTFGIFGEMIYARVFGNHVSNIHTYANSYNLSGTSNPRMRRHLMQVDKSLSRISCFLLCCLVLCLLLF

SEQ ID NO: 39209 - protein, 286 aa, Zea mays
  Clone ID: 700352293_FLI.pep
AAESKMSDDVVWHCIRHNHCSFMSKITTGIFCRNPYNATGICNRSSCPLANSRYATIRDHEGVFYLYMKTAERAHLPNKLWERVKLPKNYEKAMEVINKHLEFWPKLLVHKIKQRLTKMTQYRIRMRKLQLKVREKVMTMPRKQTQRDLRRMEKAERAAQLERNIENELKERLNKGVYADIYNVPFKAFDEVLDMERDEVVLEEEEEEEGEVYVEGDDMEEMDDMEDFEGLSDGGTDDDDVLDDPVSRKSKGSSSYSKQNVGKRSRKVMTEVEEDEEINTRQRQRA

SEQ ID NO: 39210 - protein, 434 aa, Glycine max
  Clone ID: LIB3049-022-B12_FLI.pep
VAVTRTSSEKYSEFCMPTSDLSKEQCKSCDICRRSEFILNPILVCSGCKVSVHLDCYRSVKETTGPWYCELCEDLSSRSSGAAAINFWEKSVVECALCGGTTGAFRKSSDGQWVHAFCAEWVFESTFKRGQIDAVEGMETLQKGVDICCICHHKHGVCMKCCYGHCQTTFHPSCARRAGLYMNVRPTGGKAQHKAYCEKHSLEQKAKAETQKHGIEELKSIRQIRVELERLRLLCERIVKREKIKRELVISSHDILAFKRDHVARSVLARSHFILPDGSSESATTSLKGNTEGYRSCSEPLQRSDDVTVDSSVSAKRRVRVAISMDTDPKLDDDCSTSQSRYNHKILDRSQFSGKKVPQRAAASRNISDEGGWRSKSRKHSETFGKELVMTSDEASMKNSMLPKGYAYVPADCLSNEKHSNEDVYASEPVEHDR

SEQ ID NO: 39211 - protein, 178 aa, Zea mays
  Clone ID: 700354490_FLI.pep
LKKMALRVIAESLSEEEIAGLKEMFKMIDSDNSGHITLEELKTGLQRVGANLMDSEINALMEAADIDNSGTIDYGEFIAATLHINKVEKEDKLFAAFSYFDKDGSGYITQDELQKACEEFGLGDTRLEDIIGDIDQDNDGRIDYNEFVAMMQKGDNPLGRKGHQSNASFGLGDALKLR

SEQ ID NO: 39212 - protein, 83 aa, Zea mays
  Clone ID: 700354856_FLI.pep
TNPSNPSIELSPEFKKVGSFLGRFKSIPSIVELDSLKVSGDVWFGSGIVLKGKVTITAKPGVKLEIPDGAVIGNKDISGPEDL

SEQ ID NO: 39213 - protein, 74 aa, Glycine max
  Clone ID: LIB3051-030-G5_FLI.pep
CGNAIRTRDISPQLSINFLQFEVKTSIKSSYKLLPEADTSVLQTGQTLFIFNQLLMHSGWYRCLQERTVKDSSS

SEQ ID NO: 39214 - protein, 434 aa, Glycine max
  Clone ID: LIB3093-002-F7_FLI.pep
LTASKVSVDPLPTSGFQRVLQGQELSTLRGNFAESNESDTAEKSGVWPPATDDEKIDVSTSRRYGSDSWMSMGRHEPTYPDLLSGFGAHGDHSSHPSFVDQNGPVANLSRKHLLDREGKHNVLSPWPGVPSSLSLNLLDSNLKGSAQGGDTAYQVRGNLRYSSAFGEYPVLHGHKVEHSHRSFLMPPPPSTQYESPRSRELLSKPISGKPCEVSKLKDSDCKLFGISLLSSRPIASEPSLSQRNVTSESVGHMHTASHHQRAIENDQKSEHSRGSKPADGLLIDDHEKVLQTSQPHLKDVQAKSHSGSARSCTKVHKKGIALGRSVDLTKFSDYGELITELDQLFEFGGELTSPQKDWLIVYTDNEGDMMLVGDDPWQEFVAMVRKIYIYPKEEIQKMSPGTLSSKNEENQSASEGAADAQEIECQLNHSSSDT

SEQ ID NO: 39215 - protein, 250 aa, Glycine max
  Clone ID: LIB3139-041-A5_FLI.pep
NKLLVMKIQCDVCNKQQASLFCTADEAALCDGCDHRVHHANKLASKHQRFSLSHPSAKHFPLCDVCQERRAFVFCQQDRAILCKECDVPVHSANDLTKNHNRFLLTGIKFSALDSPSTPPKPAGGNSLTNQQPQQQTGFTGSSISEYLINTIPGMEFEDFLDSHSLPFACSKNSDDMMLSMFGEGNMVSFSAGGIWVPQAPSSVQMDQQSGYKDTWETSIRSSFGDDSLLVPQMTPPSNVFNNKRSRLLW

SEQ ID NO: 39216 - protein, 191 aa, Glycine max
  Clone ID: LIB3139-045-B6_FLI.pep
NTQLPSSSQSHKEASPPLKLSHRCTVCNKAFPSYQALGGHKASHRKASSESNTTASAVAVSATANDSVSASTVGGGRMHECSICHKSFPTGQALGGHKRCHYDGGNNHSNSNANGNNSSGVTTSDGGAASSSSHAFRGFDLNLPAPLTEFWSPAGFDFGKKKVGVEQEVESPLPVTAKRPRLFSGEDNEEA

SEQ ID NO: 39217 - protein, 237 aa, Glycine max
  Clone ID: LIB3170-004-E7_FLI.pep
AAIISLLLVILFVLLLHLYAKWFLAQAQAQANARRRRRRRRTTVTVSDVLGPARFHHFHSFTIEDSSPLSTKGLDSSTIRTIPLFIYEHNNNNNKKVEEEEEELECVICLSAFKNGEVGRCLPKCGHGFHVECIDMWLSSHSNCPICRTSIVASIVENNSSDDHHGGDHDLVEIVTEGGSAAPSFETREGEHGNSNNGNGGARTSVSVVSENSSSEFFGCSLERMLGKGFPISSNVN

SEQ ID NO: 39218 - protein, 380 aa, Glycine max
  Clone ID: LIB3170-036-H3_FLI.pep
FDDHNTMRDICRNFQRGSCQYGERCRYLHVQQQRKPNVNGFGGQSSSHQQQNTNPFGFGSGSGSQQQQKGNPFGFGKHNSSQLNGGPHSENKPNQYKPFENKWNRQSSKPQQNGVKSENNPKQSEHHICTDPENCKRQIAVDFEQEKPLWILTCYSHCKGAPCDIVGDISYEELRASAYEDANRGMSLQSIVEKERNILKSKLVEFDKLLSEPYKIPISSSLGSQTPQSIGANANPFSTSQSNGPLSVSSFSQLSTPLNMGFERPSAPLTNTPTKPGFFGSGGNSLASNTANLNSNGVFGVQSGPYSTPLDLKMFPGSTQETSTAFSNSGPTSMFQTTPDVQLLSQSQVEKVSVDPSIWLKEKWNPGEIPEEAPPDTFVR

SEQ ID NO: 39219 - protein, 154 aa, Glycine max
  Clone ID: 700984309_FLI.pep
VRCSEQTRVCTEPEPRPGSVQTIPAVPRKPRTGKTRKPNARVWSSMSSLCSSVTAKKQKKKVEAQNGGAQSLRRCSHCQVQKTPQWRTGPLGPKTLCNACGVRFKSGRLFPEYRPACSPTFSDDIHSNSHRKVLEMRRKKEIVESDRIQLIPSC

SEQ ID NO: 39220 - protein, 222 aa, Glycine max
  Clone ID: 700996279_FLI.pep
LTTILFHHSDPLKMTTAEETSNLDLIRQHLLGENIISDSSFFSNLLHHPMKLEAPSSPEFDFTSYISDNTSFFTFLEGYDLMADMKFVDSDNTIPSKEVKKCNISPEPLVSSKEKPKKLEYDKAKRYRGVRRRPWGKFAAEIRDPTRKGTRVWLGTFDSEIDAAKAYDCAAFKMRGQKAILNFPLEAGLSDPKPNSCGRKRRRESHDHELELPQVQVHHGVS

SEQ ID NO: 39221 - protein, 301 aa, Zea mays
  Clone ID: 700357449_FLI.pep
ENSPLKVIDFGLSDFVKPDERLNDIVGSAYYVAPEVLHRSYAYILLCGSRPFWARTESGIFRAVLKAEPSFDEAPWPTLTAEAKDFVKRLLNKDYRKRMTAAQALSHPWIRNSQQVKVPLDMIIYKLMRAYISSSSLRKSALRALAKTLTTDQLFYVREQFELLGPNKNGYISLQNLKSALAKNSTDAMKDSRVVDFVNTVCALQYRKLDFEEFAASAISVYQMEALETWEQHARRAYELFDKEGNRPIVIEELASELGLGPSVPLHVVLQDWVRHADGKLSFLGFIKLLHGVSSRSIPKA

SEQ ID NO: 39222 - protein, 532 aa, Glycine max
  Clone ID: 701009936_FLI.pep
VRRYMGTITGISDLDSVRWPNSHWRSVKVGWDESTAGERQPRVSLWEIEPLTTFPMYPSLFPLRLKRPWHPGTSSLHDGRDEATNGLMWMRGGPVDQGLNSLNFQGAGMLPWMQQRLDPTLLGNDQNQQYQAMLAAGLQNLGSGYLMKQQMMNFQQPYHYLQQSGNSNSPLQLQQQQPIQQSVSSNMLQPQAHVLTENFSQHLLQKPHNNQEVQAQQQQHTYQDSLLIPSDQLHQRQHSGIPSPSYSKPDFLDSSMKFPASVSPGQNMLSSLCPEGSGSLLNLSRSSLSLLTEQLPQQQWTQKYAPVQVNTYGGTVSHAQYSGKDSAMVLPHCNSDAQNSTLFGVNIDSSGLLPITVPGYTTSSADTNSSTMPLADSGFQGSLYGCMDSSELLQSAGHVDPENQSQTFVKVYKSGSVGRSLDISRFSSYHELREELAQMFGIEGKLEDPLRSGWQLVFVDRENDVLLLGDDPWESFVNNVWYIKILSPEDIQKMGEQAVESLALGSGQRLNGTGAESQDIVSGPPSIGSLEY

SEQ ID NO: 39223 - protein, 128 aa, Zea mays
  Clone ID: 700378442_FLI.pep
LSVTVISAEELPPMDIGGKADPFVVLYLKKGETKKKTRVVTDTLNPIWNQTFDFMVEDALHDLLMVEVWDHDTFGKDYIGRCILTLTRVILEGEFQDTFVLQGAKSGKLNLHFKWTPQPIYRDRDRDQ

SEQ ID NO: 39224 - protein, 499 aa, Glycine max
  Clone ID: 700832793_FLI.pep
VDSQIMGTLSGDGDEDDLNAEIAEVRACLANEENELGETPLFTAAEKGHLDVVKELLNYSTAQTVSKKNRSGFDPLHIAASQGHHPIVQVLLDYDSGLSKTIGPSNSTPLITAATRGHTEVVNELLSKDCSLLEIARSNGKNALHLAARQGHVEIVKALLSKDPQLARRTDKKGQTALHMAVKGQSCDVVKLLLEADAAIVMLPDKFGNTALHVATRKKRVEIVNELLHLPDTNVNALTRDHKTALDIAEDLPLSEEASDIKDCLSRYGALRANELNQPRDELRKTVTQIKKDVHTQLEQTKRTNKNVHNISKELRKLHREGINNATNSVTVVAVLFATVAFAAIFTVPGGDHNDGSAVVAAYAAFKIFFVFNAIALFTSLAVVVVQITLVRGETKAEKRVVVVINKLMWLASVCTSVTFIAASYIVVGKKNEWAAILVTLVGGVIISGVIGTMTYYVVRSKRSRSMRKKEKQAARRSGSNSWHHSEFSNSEVDPIYAL

SEQ ID NO: 39225 - protein, 301 aa, Zea mays
  Clone ID: 700382985_FLI.pep
VGEAMTTLPENFKPHRAVKKIFDLRRQMIETGEGIDWAVGEALAFATLIIEGNHVRLSGQDVERGTFSHRHSVIHDQETGEQYCPLDHLVMNQDAELFTVSNSSLSEFAVLGFELGYSMENPNSLVLWEAQFGDFSNGAQVIFDQFLSSGESKWLRQTGLVVCLPHGYDGQGPEHSSARLERFLQMSDDNPYVIPEMDPTLRKQIQQCNWQVVNVTTPANYFHVLRRQIHRDFRKPLIVMSPKNLLRHKDCKSNLSEFDDLAGHPGFDKQGTRFKRLIKDQNNHKDLEEGINRLVLSSSSS

SEQ ID NO: 39226 - protein, 299 aa, Glycine max
  Clone ID: LIB3039-003-D1_FLI.pep
EIAMKKRSSSSSSSSVFEANGVEEPQQPSSCAAAALDELHKEKNENGEETLVPSNPYPNLDDGFYEIETIRRKRLRKGQLQYLIKWRGWPETANTWEPLENLQSVPDLVDAFEDSLKSGKHQKRKRKHVDVLQLTLLKKRSERSTTSYSLRHFPPLTPTNANDYDPKLSELKAPTHTGVQLDNLAIHFQQPIPSRGAKRRKSASSVKRFKRDTDAAALQPISAPINMPDANTACNIVKIIKPIGYSASLSDNMHDVLVTFMAMRSDGTEVMVDNRYLKAYNPLLLINFYEMHPRYTPTP

SEQ ID NO: 39227 - protein, 190 aa, Glycine max
  Clone ID: LIB3039-033-G5_FLI.pep
TLQLTLMATGQVINKPPSLPPYPEMIREAIEALNEENGSNKSSISKYIESTYGGLPQAHKVLLNVHLAKMRESGVLVFWKNNYTKRDPNAPPRRGRGRPPKPKEPLPPGTVLSPPRPRGRPSKDPNDLQKPLKASVVGSGRPRGRPRKMAWPTGGLGEVSQASKAKPVTSNGRPRGRPPKVKAVFTEISV

SEQ ID NO: 39228 - protein, 210 aa, Zea mays
  Clone ID: 700421804_FLI.pep
TRSCRNWHAMAGFCTPAATAAAHAALTPLTSSRKHIAMCLSPRPSGGGGIGGGQRARLASTGAAPQVRALAPATAAEEAAGPSPAPLNVEYLAAEFAGHGVSFEPVGVSCAVKMSLRNGSVAHVLLPSGLVTSYKPAMWHGTVTEVLHTNVAEVPGGRAVIRGGMFVDLRCDGCDGVWLPSASGAWSLRDVRGSPATSIEVELASAAPGN

SEQ ID NO: 39229 - protein, 159 aa, Glycine max
  Clone ID: LIB3039-034-H5_FLI.pep
NLCILFIQDSASAFWKQRPKYFEMARTKQTARKSTGGKAPRKQLATKAARKSAPTTGGVKKPHRYRPGTVALREIRKYQKSTELLIRKLPFQRLVREIAQDFKTDLRFQSHAVLALQEAAEAYLVGLFEDTNLCAIHAKRVTIMPKDIQLARRIRGERA

SEQ ID NO: 39230 - protein, 319 aa, Zea mays
  Clone ID: LIB3279-016-B9_FLI.pep
AGVFTELIQQMQVKGVQVEELYSLDVGSLSQLRPVYGLIFLFKWIPGEKDERPVVRDPNPNLFFAHQVITNACATQAILSVLMNRPEIDIGPELSQLKEFTGAFTPDLKGLAISNSESIRTSHNSFARPEPFISDEQRAATKDDDVYHFISYLPFEGVLYELDGLKEGPVNLGQCDGADDLDWLRMVQPVIQERIERYSQSEIRFNLMAIIKNRKEVYSAELEELEKRREQILQEMNNASSTESLSSSLTEVISAIETVTEKVIMEEEKFKKWKKENIRRKHNYIPFLFNLLKMLAEKQQLKPLVEKAKQQKSASPSTS

SEQ ID NO: 39231 - protein, 89 aa, Zea mays
  Clone ID: 700421516_FLI.pep
CKKRMPNQREQYEDTVHLFIGTGCSPCKITPMPFTFANNSIVILRGLICLFIFKSVPLFCCHVEAFPAHSFVITLSFVIITFRLAQASS

SEQ ID NO: 39232 - protein, 152 aa, Zea mays
  Clone ID: LIB36-021-G7_FLI.pep
LLSAKLLRKCSPMWARLSYKVGTMIEIPRAALVADEIAEQAEFFSFGTNDLTQMTFGYSRDDVGKFIPVYLAQGILQHDPFEVLDQRGVGELVKFATERGRKARPNLKVGICGEHGGEPSSVAFFAKAGLDYVSCSPFRVPIARLAAAQVLV

SEQ ID NO: 39233 - protein, 272 aa, Zea mays
  Clone ID: LIB83-002-E8_FLI.pep
ATGPALSRSAPAMAASTMAISSTAMAGTPIKVGSFGEGRITMRKTVGKPKVAASGSPWYGPDRVKYLGPFSGEPPSYLTGEFPGDYGWDTAGLSADPETFAKNRELEVIHSRWAMLGALGCVFPELLSRNGVKFGEAVWFKAGSQIFSEGGLDYLGNPSLIHAQSILAIWACQVVLMGAVEGYRIAGGPLGEVVDPLYPGGSFDPLGLADDPEAFAELKVKELKNGRLAMFSMFGFFVQAIVTGKGPLENLADHIADPVNAWAYATNFVPGN

SEQ ID NO: 39234 - protein, 194 aa, Zea mays
  Clone ID: LIB3245-432-E12_FLI.pep
WPVAADENNKPVPFDMEGVWHAMEECHRIGLARSVGVSNFSAAKMSRLLAFAAVPPAVNQVEVNVGWRQEKVREACAKNGVVVTAFSPLGAIGTAWGSNAVMESGALEDIAARRGKTIAQVALRWLHEQGVCFVARSFNKERLKQNMELFDWELSVDDKEKIMGIPQRRACRAEFFLSPDGPYKTLEELWDGEI

SEQ ID NO: 39235 - protein, 302 aa, Zea mays
  Clone ID: LIB3158-014-G9_FLI.pep
RETPEGRKAVQALKDVYAHWVPEDRILTTNLWSAELSKLAANAFLAQRISSVNAISALCEATGANVSEVAYAVGKDTRIGPKFLNASVGFGGSCFQKDILNLVYICECNGLPEVANYWKQVIKINDYQKSRFVNRVVASMFNTVAGKKIAVLGFAFKKDTGDTRETPAIDVCKGLLGDKAQISIYDPQVTEDQIQRDLAMNKFDWDHPMHLQPTSPTAIKQVSCVWDAYEATKGAHGVCILTEWDEFKTLDYQKIFDNMQKPAFVFDGRNIVDPEKLREIGFIVYSIGKPLDAWLKDMPAVA

SEQ ID NO: 39236 - protein, 373 aa, Zea mays
  Clone ID: LIB3137-024-C7_FLI.pep
HIHKHKRTLAMASEVVRPSDAELLKAQADIWRLSLSYLTPLSLRCAVELGIPTAIYRHGGAASAAELVTALSLPSTKLPFLRRLLRLLAASGVFTVDKQSTEEERYRISPVSYLLVDGIPHEDHMNHTALVLTCTSTRYIEAGIGLAEWFKRDVVTSPFEELHGATLFHESMGSLDADFHDMASEALDAHDNFGIEIAMREFRDLFEGIQSMTYCCGNFGDDKGARAIVKAFPHIKCTVLAPPKIIATKPADGAKINYVEGDMFSFIPPAQTVVLKLVLHHLTDEECVKLLAQCRKAIPPRKDGGKVIIGDIMIDHSGLMLETHLLMDIGMMTMTKGRQRDEKEWSELFTKAGFSEYKILKEFGARVAFEVYP

SEQ ID NO: 39237 - protein, 593 aa, Zea mays
  Clone ID: LIB3182-005-G10_FLI.pep
PADNKSRQELKKAATSFLSAELPEDCKFYLADTKDDLHKFMWLFKEQHLSSPHWRNQRSYVMSEQVCINPDENTGLCTLLVSGYLRAHNLSVNQLVHVSGAGDFQLGQIDVLKDPCPLSERKSSDVMETEDNGIQIVNTFVPDPSSQEPLLVENVPDPLAGEQTWPTEEDMEEVDINNKQRKLVKRKLPQGTSEYQAAWIVEDTDDEDNDFDDDNQTESGMVIDEQGHSDQGSDGSDIDAVSHFTEKFDGETIGDTEMADEENLTKDQIEAEIKKIKEANADDEEFPDEVETPLDVPAKKRFAKYRGLKSFRTSSWDPKESLPLDYARIFAFDNFTRTQKHVFAKIAELDGGMKNCAQVGSYVRLYVKNVPTDIASKLCHPSRRIPVVVSGLLQHESKMSVLHFSIKKHDSYEAPIKSKEPLIFNVGFRQFTARPLFSSDNINCNKHKMERFLHHGRFSVASVYAPISFPPLPLIVLKNRDGEQPAIAAVGSLKSVDPDRIILKKIVLTGYPQRVSKLKSIVRYMFHNPDDVKWFKPVELWTKHGRRGRIKETVGTHGAMKCLFNSSIQQHDTVCMSLYKRAYPKWPEQLYHV

SEQ ID NO: 39238 - protein, 96 aa, Zea mays
  Clone ID: LIB3150-107-B9_FLI.pep
TNEATTKPFPLPSSVLQRESAAAVKMIIPVRCFTCGKVIGNKWDVYLDLLQADYSEGDALDALELFRYCCRRMLMTHVDLIEKLLNYNTLEKTETS

SEQ ID NO: 39239 - protein, 275 aa, Zea mays
  Clone ID: LIB3151-012-G5_FLI.pep
QDKEGIPPDQQRLIFAGKQLEDGRTLADYNIQKESTLHLVLRLRGGMQIFVKTLTGKTITLEVESSDTIDNVKAKIQDKEGIPPDQQRLIFAGKQLEDGRTLADYNIQKESTLHLVLRLRGGMQIFVKTLTGKTITLEVESSDTIDNVKAKIQDKEGIPPDQQRLIFAGKQLEDGRTLADYNIQKESTLHLVLRLRGGMQIFVKTLTGKTITLEVESSDTIDNVKAKIQDKEGIPPDQQRLIFAGKQLEDGRTLADYNIQKESTLHLVLRLRGGQ

SEQ ID NO: 39240 - protein, 244 aa, Zea mays; identical to SEQ ID NO: 36900
  Clone ID: LIB3152-016-H1_FLI.pep

SEQ ID NO: 39241 - protein, 577 aa, Homo sapiens
  Clone ID: LIB4654-036-D4_FLI.pep
QSRAGQRGFALPTRTKAPSLRALLRAVSPGAPMQRAVPEGFGRRKLGSDMGNAERAPGSRSFGPVPTLLLLAAALLAVSDALGRPSEEDEELVVPELERAPGHGTTRLRLHAFDQQLDLELRPDSSFLAPGFTLQNVGRKSGSETPLPETDLAHCFYSGTVNGDPSSAAALSLCEGVRGAFYLLGEAYFIQPLPAASERLATAAPGEKPPAPLQFHLLRRNRQGDVGGTCGVVDDEPRPTGKAETEDEDEGTEGEDEGPQWSPQDPALQGVGQPTGTGSIRKKRFVSSHRYVETMLVADQSMAEFHGSGLKHYLLTLFSVAARLYKHPSIRNSVSLVVVKILVIHDEQKGPEVTSNAALTLRNFCNWQKQHNPPSDRDAEHYDTAILFTRQDLCGSQTCDTLGMADVGTVCDPSRSCSVIEDDGLQAAFTTAHELGHVFNMPHDDAKQCASLNGVNQDSHMMASMLSNLDHSQPWSPCSAYMITSFLDNGHGECLMDKPQNPYSSQAISLAPRTMPTGSASLHLGRTPNTALMQPAHVAPCGVPAPLVGCWCVKPNTSRGRMAPAVEKGNGVSTASV

SEQ ID NO: 39242 - protein, 272 aa, Allium porrum
  Clone ID: LIB3804-013-A5_FLI.pep
NSARAAVLYPIRASAPKREADPKKRVVITGMGLVSVFGNAVDAYYDKLLEGESGIDFIDRFDASKFPTRFAGQIRDFSSEGYIDGKHDRRLDDCLRYCIVSGKKALESAGIGVGTKELAKIDKLRAGVLVGTCMGGLTVFSDGVQTLMEKGLRKVNPFCIPYVITNMGSAMLAMDIGFMGANYSISTACATSNCCLYAAASHIRRGEADIMIAGGTEAAVIPMELEVLLPAELYLEGMTIQKLRPGLGIKAEMGLSWARVLELWYWRAWSMH

SEQ ID NO: 39243 - protein, 847 aa, Mus musculus
  Clone ID: LIB4187-042-H1_FLI.pep
ETNREAEARRRRPETLRKAEVRRHRPETLREAERGGARAARVSGGRCEKMNLQQVSWIGLISLICSVFGQTDKNRCLKANAKSCGECIQAGPNCGWCTNTTFLQEGMPTSARCDDLEALKKKGCQPSDIENPRGSQTIKKNKNVTNRSKGMAEKLRPEDITQIQPQQLLLKLRSGEPQKFTLKFKRAEDYPIDLYYLMDLSYSMKDDLENVKSLGTDLMNEMRRITSDFRIGFGSFVEKTVMPYISTTPAKLRNPCTSEQNCTSPFSYKNVLSLTDRGEFFNELVGQQRISGNLDSPEGGFDAIMQVAVCGSLIGWRNVTRLLVFSTDAGFHFAGDGKLGGIVLPNDGQCHLENNVYTMSHYYDYPSIAHLVQKLSENNIQTIFAVTEEFQPVYKELKNLIPKSAVGTLSGNSSNVIQLIIDAYNSLSSEVILENSKLPDGVTINYKSYCKNGVNGTGENGRKCSNISIGDEVQFEISITANKCPNKESETIKIKPLGFTEEVEVVLQFICKCNCQSHGIPASPKCHEGNGTFECGACRCNEGRVGRHCECSTDEVNSEDMDAYCRKENSSEICSNNGECVCGQCVCRKRDNTNEIYSGKFCECDNFNCDRSNGLICGGNGVCRCRVCECYPNYTGSACDCSLDTGPCLASNGQICNGRGICECGACKCTDPKFQGPTCETCQTCLGVCAEHKECVQCRAFNKGEKKDTCAQECSHFNLTKVESREKLPQPVQVDPVTHCKEKDIDDCWFYFTYSVNGNNEAIVHVVETPDCPTGPDIIPIVAGVVAGIVLIGLALLLIWKLLMIIHDRREFAKFEKEKMNAKWDTGENPIYKSAVTTVVNPKYEGK

SEQ ID NO: 39244 - protein, 126 aa, Zea mays
  Clone ID: 700421922_FLI.pep
VISSKSDVYSFGMLLLEMTGGRRNADPHAGSSSQAYYPSLVYKQLSQGDANRISEGVDMHELEKKLCIIGLCCIQIKPQDRPTMSEVIEMLEAGVDGIQMPPRPYFCDEEGDSSYSIISELDIIEE

SEQ ID NO: 39245 - protein, 1063 aa, Homo sapiens
  Clone ID: LIB3080-033-H2_FLI.pep
GSGSVAPGQGRAGAMGSRTPESPLHAVQLRWGPRRRPPLLPLLLLLLPPPPRVGGFNLDAEAPAVLSGPPGSFFGFSVEFYRPGTDGVSVLVGAPKANTSQPGVLQGGAVYLCPWGASPTQCTPIEFDSKGSRLLESSLSSSEGEEPVEYKSLQWFGATVRAHGSSILACAPLYSWRTEKEPLSDPVGTCYLSTDNFTRILEYAPCRSDFSWAAGQGYCQGGFSAEFTKTGRVVLGGPGSYFWQGQILSATQEQIAESYYPEYLINLVQGQLQTRQASSIYDDSYLGYSVAVGEFSGDDTEDFVAGVPKGNLTYGYVTILNGSDIRSLYNFSGEQMASYFGYAVAATDVNGDGLDDLLVGAPLLMDRTPDGRPQEVGRVYVYLQHPAGIEPTPTLTLTGHDEFGRFGSSLTPLGDLDQDGYNDVAIGAPFGGETQQGVVFVFPGGPGGLGSKPSQVLQPLWAASHTPDFFGSALRGGRDLDGNGYPDLIVGSFGVDKAVVYRGRPIVSASASLTIFPAMFNPEERSCSLEGNPVACINLSFCLNASGKHVADSIGFTVELQLDWQKQKGGVRRALFLASRQATLTQTLLIQNGAREDCREMKIYLRNESEFRDKLSPIHIALNFSLDPQAPVDSHGLRPALHYQSKSRIEDKAQILLDCGEDNICVPDLQLEVFGEQNHVYLGDKNALNLTFHAQNVGEGGAYEAELRVTAPPEAEYSGLVRHPGNFSSLSCDYFAVNQSRLLVCDLGNPMKAGASLWGGLRFTVPHLRDTKKTIQFDFQILSKNLNNSQSDVVSFRLSVEAQAQVTLNGVSKPEAVLFPVSDWHPRDQPQKEEDLGPAVHHVYELINQGPSSISQGVLELSCPQALEGQQLLYVTRVTGLNCTTNHPINPKGLELDPEGSLHHQQKREAPSRSSASSGPQILKCPEAECFRLRCELGPLHQQESQSLQLHFRVWAKTFLQREHQPFSLQCEAVYKALKMPYRILPRQLPQKERQVATAVQWTKAEGSYGVPLWIIILAILFGLLLLGLLIYILYKLGFFKRSLPYGTAMEKAQLKPPATSDA

SEQ ID NO: 39246 - protein, 848 aa, Homo sapiens
  Clone ID: LIB4119-098-F5_FLI.pep
VKMEAPLRPAADILRRNPQQDYELVQRVGSGTYGDVYKARNVHTGELAAVKIIKLEPGDDFSLIQQEIFMVKECKHCNIVAYFGSYLSREKLWICMEYCGGGSLQDIYHVTGPLSELQIAYVCRETLQGLAYLHTKGKMHRDIKGANILLTDHGDVKLADFGVAAKITATIAKRKSFIGTPYWMAPEVAAVEKNGGYNQLCDIWAVGITAIELGELQPPMFDLHPMRALFLMSKSNFQPPKLKDKTKWSSTFHNFVKIALTKNPKKRPTAERLLTHTFVAQPGLSRALAVELLDKVNNPDNHAHYTEADDDDFEPHAIIRHTIRSTNRNARAERTASEINFDKLQFEPPLRKETEARDEMGLSSDPNFMLQWNPFVDGANTGKSTSKRAIPPPLPPKPRISSYPEDNFPDEEKASTIKHCPDSESRAPQILRRQSSPSCGPVAETSSIGNGDGISKLMSENTEGSAQAPQLPRKKDKRDFPKPAINGLPPTPKVLMGACFSKVFDGCPLKINCATSWIHPDTKDQYIIFGTEDGIYTLNLNELHEATMEQLFPRKCTWLYVINNTLMSLSEGKTFQLYSHNLIALFEHAKKPGLAAHIQTHRFPDRILPRKFALTTKIPDTKGCHKCCIVRNPYTGHKYLCGALQSGIVLLQWYEPMQKFMLIKHFDFPLPSPLNVFEMLVIPEQEYPMVCVAISKGTESNQVVQFETINLNSASSWFTEIGAGSQQLDSIHVTQLERDTVLVCLDKFVKIVNLQGKLKSSKKLASELSFDFRIESVVCLQDSVLAFWKHGMQGKSFKSDEVTQEISDETRVFRLLGSDRVVVLESRPTENPTAHSNLYILAGHENSY

SEQ ID NO: 39247 - protein, 486 aa, Zea mays
  Clone ID: LIB3060-084-H1_FLI.pep
RTAGRRRGGGGGRSHSSDRRACVVCCFRFFLYSFFFLLCLFNSISILRFLIWGRLAMGFGMGNNNNGASSSSSRLDPAAPLLPRHGSSGGREGGGLSSQPKTFANVFIAVVGAGVLGLPYTFSRTGWAVGSLLLFSVAALTFYCMMLLVACRRRLADEHPKIASFGDLGDTVFGAHGRFAVDVMLVLSQFSFCVGYLIFISNTMAHLYPIAASSSSALLSPKALVIWAMLPFQLGLNSIKTLTLLAPLSIFADVVDLGAMGVVLGQDVAAWLAKPVPVVAFGGAGALLYGLGVSVYAFEGIGMVLPLEAEAANKSKFGVTLGLSMAFIAVMYGLFGVMGYVAFGDATRDIITTNLGAGWLSAAVQLGLCINLFFTMPVMMNPVYEVAERLLHGKRYCWWLRWLLVVVVGLAAMYVPNFTDFLALVGSSVCVLLGFVLPASFHLKVFGAEMEWPGVLSDVLLVVIGLALAVFGTYTSLLQIFQSSSA

SEQ ID NO: 39248 - protein, 176 aa, Zea mays
  Clone ID: LIB3607-059-H2_FLI.pep
KHARVDIFINHHGHGLMAKRTQGNKKNLDTVHSLYTLPPFMTWLTTEKALIPQLAEPLADDSLDGADEGEGADDEADDAECLKRDPRPRPRQDPALDAVHLDGEVDGEGPEDDGAQHAQHLVEVGEEEGQPRGARHVRRPETQPLQVEAVAPRRRRAGHLHGVGFVHERAVREPGR

SEQ ID NO: 39249 - protein, 298 aa, Zea mays
  Clone ID: 700422358_FLI.pep
VYHRDLKPQNLLLDSRGNLKLSDFGLSTLSQNGVGLVHTTCGTPNYVAPEVLSSNGYDGSAADIWSCGVILYVLMAGYLPFEENDLPHLYEKITAAQYSCPYWFSPGAKSLIQRILDPNPRTRITIEEIREDPWFKKNYVTIRCGEDENVSLDDVQAIFDNIEDKYVSDEVTHKDGGPLMMNAFEMIALSQGLDLSALFDRQQEFVKRQTRFVSRKPAKTVVATIEVVAESMGLKVHSRNYKVFEVAPSLFMVDVRKVAGDTPEYHRFYENLCSKLCSIIWRPTEVSAKSTPLRTTTC

SEQ ID NO: 39250 - protein, 223 aa, Zea mays
  Clone ID: LIB3957-024-E6_FLI.pep
RVFTTIGSIADLVFAYNTGMLPEIQATIRPPVVKNMEKALWFQFTIGSLPLYAVVFVGYWAYGSSTSGYLLNSVTGPVWVKAVANLSAFFQTVIALHIFASPMYEFLDTKYGSGRGGPFEIHNVAFRVAVRGGYLTVNTLVAAVLPFLGDFMSLTGALSTFPLTFVLANHMYLMVKGPKLGAIQKSWHWLNVLGFTALAVAAAVSAIRLIMRDSSTYHFFADL

SEQ ID NO: 39251 - protein, 235 aa, Glycine max
  Clone ID: 700752407_FLI.pep
QPSASVFLAMNALGIIAFSFRGHNLALEIQSTMPSTFKHPARVPMWKGAKVAYFFIAMCLFPIAIGGFWAYGNQMPPGGILTALYAFHSHDISRGILALAFLLVVFNCLSSFQIYSMPAFDSFEAGYTSRTNRPCSIWVRSGFRVFYGFVSFFIGVALPFLSSLAGLLGGLTLPVTFAYPCFMWVLIKQPPKYSFNWYFNWILGWLGVAFSLAFSIGGIWSIVNDGLKLKFFKPN

SEQ ID NO: 39252 - protein, 60 aa, Glycine max
  Clone ID: 700873890_FLI.pep
LLIFLLNFSAPLRHVACDLQTKEIQHVLVGQLGMLNFDFCFNYSPLVEIPFFKLGLILPH

SEQ ID NO: 39253 - protein, 529 aa, Glycine max; identical to SEQ ID NO: 39119
  Clone ID: 700956128_FLI.pep

SEQ ID NO: 39254 - protein, 322 aa, Glycine max
  Clone ID: 700960580_FLI.pep
KNPCKMNSNWYMISYGVSEIIFSQIPDFHELWWLSIVAAVMSFTYSFIGLGLGIGKVIGNGRIKGSLTGVTIGTVTESQKIWRTFQALGNIAFAYSYSMILIEIQDTIKSPPAESETMSKATLISVLVTTVFYMLCGCFGYASFGDASPGNLLTGFGFYNPFWLIDIANAGIVIHLVGAYQVYCQPLFSFVESNAAERFPNSDFMSREFEVPIPGCKPYKLNLFRLVWRTLFVILSTVIAMLLPFFNDIVGLIGAIGFWPLTVYLPVEMYITQTKIPKWGIKWIGLQMLSVACFVITILAAAGSIAGVIDDLKVYKPFVTSY

SEQ ID NO: 39255 - protein, 91 aa, Zea mays
  Clone ID: 700423860_FLI.pep
GGTKKEKKTKEKKVKESLQGRTLYMCTQSILFIGGLTALSGTLSAQLLGFCSAPGEVPTDVTKLQTAHFTDRAPYWYMSSMRQFPQFTCAT

SEQ ID NO: 39256 - protein, 174 aa, Zea mays
  Clone ID: 700424675_FLI.pep
TSAGLSPQALTILVPAGVGRRGPAVPRSVNRGGREGPVLALVPILPRRQTLALDVPEHLEHLLDRRAHLAVLLQAAEGQLRDHRHHLPGGRVGVVAQAEVDELLQLALLDLADGHAGQVDLAAVPGDVDGRLGRDELHQDHPEAVHVALVRQLVALVVLWINIPWRALRSGGDV

SEQ ID NO: 39257 - protein, 77 aa, Glycine max
  Clone ID: 701015492_FLI.pep
VIAMIFPYFNQILGVLGSIIFWPLTIYFPVEIYLSQSSTVSWTTKWVLLRTFSFFGFLFGLFTLIGCIKGIVTEKIS

SEQ ID NO: 39258 - protein, 265 aa, Glycine max
  Clone ID: 701214263_FLI.pep
LAAAIMSLSYSTIAWVASVDKRVHNHVDVAVEYGYKASTSAGNVFNFFNALGDVAFAYAGHNVVLEIQATIPSSPEKPSKGPMWRGVLIAYLVVALCYFPVALIGYWVFGNSVDDNILITLNKPTWLIVTANMFVVIHVIGSYQLYAMPVFDMIETVMVKQLRFKPTWQLRFVVRNVYVAFTMFVGITFPFFGALLGFFGGFAFAPTTYFLPCIIWLAIYKPKKFSLSWITNWICIIFGLLLMILSPIGGLRSIILNAKNYGFYQ

SEQ ID NO: 39259 - protein, 205 aa, Zea mays
  Clone ID: 700451631_FLI.pep
LEVDLDEEVEVADLVHHARGRVRPHAQLPFNAGADEDVLADGEAEHLVGRRQREAEEADVAGQLLLADEAAVDLIARVGERGGPDGLADGREVRQDGAAVDGVVGAVAGARGDELADAVGVEERLGLVGVDGVELLGAVGAGVDEDAVGAARVVLEELGAVVDVAVHGDPRRLLRRVLAHLGHGELLADVGGVHERRGRAALEAR

SEQ ID NO: 39260 - protein, 94 aa, Zea mays
  Clone ID: 700451901_FLI.pep
KLISSGTRIWLYSGDMDAVCSFISTQYVLDNLGLPIEAAWRPWHVDNEVAGYVIGYKGLVFATVRGAGHMVPYYQPRRALALFSSFLEGELPPR

SEQ ID NO: 39261 - protein, 534 aa, Glycine max
  Clone ID: LIB3051-006-C10_FLI.pep
SAPITPRTASVVGTPVVASPPVSCPPSQLHSPSLTRSPLLHPEDGDAPRRKTSKTPKTPRTPRTPRTPLRISNLTPKFITPLGSPMRKALRFTKLDPQDAWLPITESRNGNKYYAAFHTLCSGIGIQALVLPVAFTILGWTWGIITMTLAFIWQLYTLWLLVNLHESVEQGVRYCRYLQLCGATFGEKLGKILALFPILYLSAGTCTTLIIIGGSTARTFYQVVCGETCTAKPMTTVEWYLVFTCVAVVLSQLPNLNSIAGVSLIGAVTAVGYCTAIWVTSVARGALPDVSYNPVRTGNSVEDAFSVLNALGIIAFAFRGHNLILEIQSTMPSSEKHPSHVPMWKGVKVSYTIIAACLFPMAIGGYWAYGQLIPANGGMLTALYQFHSRDVSRFVLGLTSFFVVVNGLCSFQIYGMPAFDDMESGYTTRMKKPCPWWLRAFIRVFFGFLCFFIGVAVPFLSQMAGLIGGVALPVTFAYPCFMWLKTKKPKKYSAMWWLNWFLGTLGVALSAILVAASLYVIIDTGVNVSFFNPQ

SEQ ID NO: 39262 - protein, 63 aa, Zea mays
  Clone ID: 700451864_FLI.pep
NKTQGLVLDSEPSVVHRPIDGMEPSWFVYKGDEAILLFLRRSAMINAISRDCEALSLGSQCVW

SEQ ID NO: 39263 - protein, 482 aa, Glycine max
  Clone ID: LIB3051-111-E7_FLI.pep
EPPFFSYKLLEHRLLCSPFILQNLWVSNSAAMGSLEVESTNGHTSSPHKKTEKSERERRIDEWLPITSKRNGKWWYSAFHNVTAMVGAGVLGLPYAMSELGWGPGVTILILSWIITLYTLWQMVEMHEMVPGKRFDRYHELGQYAFGEKLGLYIVVPQQLVVEIGVNIVYMVTGGTSLKKFHDTVCSNCKNIKLTFFIMIFASVHFVLSHLPDFNSITGVSLAAAVMSLSYSTIAWVASVHKGVQENVQYGYKAKSTSGTVFNFFNALGTVAFAYAGHNVVLEIQATIPSTPEKPSKVPMWRGVVVAYIVVAICYFPVALIGYWMFGNEVDSDILISLEKPTWLIAMANLFVVIHVIGSYQIYAMPVFDMIETVMVKKLNFEPSRMLRFVVRNVYVAFTMFIAITFPFFDGLLGFFGGFAFAPTTYFLPCIMWLAIHKPKRYSLSWFINWICIVLGLCLMILSPIGGLRTIIIKAKTYEFYS

SEQ ID NO: 39264 - protein, 386 aa, Glycine max
  Clone ID: LIB3107-017-G3_FLI.pep
VHGKRNYTYSDVVRSVLGGRKFQLCGLAQYINLVGVTIGYTITASISMVAVKRSNCFHKHGHHVKCYTSNNPFMILFACIQIVLSQIPNFHKLWWLSIVAAVMSFAYSSIGLGLSVAKVAGGGEPVRTTLTGVQVGVDVTGSEKVWRTFQAIGDIAFAYAYSNVLIEIQDTLKSSPPENKVMKRASLIGILTTTLFYVLCGCLGYAAFGNDAPGNFLTGFGFYEPFWLIDFANICIAVHLVGAYQVFCQPIFGFVENWGKERWPNSQFVNGEHALNFPLCGTFPVNFFRVVWRTTYVIITALIAMMFPFFNDFLGLIGSLSFWPLTVYFPIEMYIKQSKMQRFSFTWTWLKILSWACLIVSIISAAGSIQGLAQDLKKYQPFKAQQ

SEQ ID NO: 39265 - protein, 546 aa, Glycine max
  Clone ID: UC-GMROPIC031E01_FLI.pep
GEKMGEAKEIWSAPITPRTASVVGTPVVASPPVSCPPSQLHSPSLTRSPLLHPEDGDAPRPNKTSKTPKTPRTPRTPRTPLRISNLTPKFLTPLGSPVRKALRFTKLDPQDAWLPITESRNGNKYYAAFHTLCSGIGIQALVLPVAFTFLGWTWGIISMTLAFIWQLYTLWLLVNLHESVEQGVRYCRYLQLCGATFGEKLGKILALFPILYLSAGTCTTLIIIGGSTARTFYQVVCGETCTAKPMTTVEWYLVFTCVAVVLSQLPNLNSIAGVSLIGAVTAVGYCTAIWVTSVARGALKDVSYNPVRTGSSIENAFGVLNALGIIAFAFRGHNLILEIQSTMPSSEKHPSHVPMWKGVKVSYTIIAACLFPMAIGGYWAYGQLIPANGGMLTALYQYHSRDVSRFVLGLTSFFVVVNGLCSFQIYGMPAFDDMESGYTARMKKPCPWWLRAFIRVFFGFLCFFIGVAVPFLSQLAGLIGGVALPVTFAYPCFMWLKTKKPKKLSLMWWLNWFLGTLGVALSAILVAASLYVIVDTGVNVSFFNPQ

SEQ ID NO: 39266 - protein, 538 aa, Glycine max
  Clone ID: UC-GMFLMINSOY069A08_FLI.pep
VPLLSVQAIVLVGVYQGGVIYKMEERPEAELISIPATPRVSTPEILTPGQRSPRAASKEGKSWTPTSFISPRFLSPIGTPMKRVLVNMKGYLEEVGHLTKLNPQDAWLPITESRNGNAHYAAFHNLNAGVGFQALFLPVAFAYLGWSWGILSLTIAYCWQLYTLWILVQLHEAVPGKRYNRYVELAQAAFGERLGVWLALFPTVYLSAGTATALILIGGETMKLFFQIVCGPTCTSNPLTTVEWYLVFTSLSIVLSQLPNLNSIAGLSLIGAVTAITYSTMVWVLSVSQQRPPSISYEPLSLSQPSASVFLAMNALGIIAFSFRGHNLALEIQSTMPSTFKHPARVPMWKGAKVAYFFIAMCLFPIAIGGFWAYGNQMPPGGILTALYAFHSHDISRGILALAFLLVVFNCLSSFQIYSMPAFDSFEAGYTSRTNRPCSIWVRSGFRVFYGFVSFFIGVALPFLSSLAGLLGGLTLPVTFAYPCFMWVLIKQPPKYSFNWYFNWILGWLGVGFSLAFSIGGIWSIVNDGLKFKFFKPN

SEQ ID NO: 39267 - protein, 144 aa, Zea mays
  Clone ID: 700456654_FLI.pep
AFIVEYGKDRDVELGFHVDDSEVTLNVCLGKQFFGGELYFRGIRCENHVNSETQHEEMYDYTHIPGWAVLHHGRHRHGARATSSGLRINLLLWCRSSVFREMKKYQKDFPSWCGECQREKRERQSQCVKATKMAFLRGSGGAAI

SEQ ID NO: 39268 - protein, 250 aa, Zea mays
  Clone ID: 700457437_FLI.pep
VVSVPEKGARRHPRGDNIQIDTKNILFICGGAFVDLEKTISERRHDSSIGFRAQVRSNMRSGGVINAEITSSLLKSVESGDLIAYGLIPEFVGRFPILVGLSSLSEDQLVEVLTEPKNALGRQYTKLFEMNDVKLHFTEEALRLIAKRAISKNTGARGLRSILESILTEAMYEIPETRTGKDKIDAVVVDEESVGSVNQHGIGAKILCGEKALDVYLANHNNKESTGQLQERPNGESEIDTEAPSRVASM

SEQ ID NO: 39269 - protein, 168 aa, Zea mays
  Clone ID: 700624596_FLI.pep
SYLRSRGQPPPRRSHALRARRLSSVSASLPLPSRLTHMASIAGSSALSFARPVKAINTNSLAFSPARKGNTFLRLQPMPMRSVSCAAKKDTTDKVCEIVKKQLALPDHTEVCGESKFSELGADSLDTVEIVMSLEEHFDISVEESSAQTIATVEDAADLIDKLVAGKA

SEQ ID NO: 39270 - protein, 415 aa, Zea mays
  Clone ID: 700799475_FLI.pep
PFRPYAAASHRRQSSVQNSRSSLPLPRSGPRLQQPPHPSPSHRVRALSPPSPSPCDDWVGYRRPTQGAENFADICAGEERPPDQALRRRAGRWMTMAGGGGLNRSSSRGQLPPQELLDDLCSRFLLNVPKEELESFERILFLLEQAHWFYEDNSVEHNPNLKSLSFKDFTSLMFKSCTALRPYIAHLDDIYKDFNNYKFRVPVSGAIILDDTYERCLLVKGWKAGASWSFPRGKRNKDEEDHTCAVREVLEETGCDVSRLLNLDDYIEVSIGQQRVRLYIITGVKRDTVFAPQTKKEISEISWHRIDDLLPASDDAVSRAVNGMKLYMVAPFLTGLKAWIATHPPPLHQKPETSARGTVWRAKGSSSGTTPVENPVAKAGSDVQHAADRPGCSFRNFRFDTASILQAMEASFLRT

SEQ ID NO: 39271 - protein, 225 aa, Zea mays
  Clone ID: 701164258_FLI.pep
QQLNIEACEASPDNSSTLARMDTFFRNACQSSCEGIMLKTLDVDAGYSASKRCDSWLKVKRDYVQGLGDSLDLVPIGAWYGNGRKAGWYSPFLMACYNPETEEFQSVCRVMSGFSDEFYKEMKEFYSGERILPKKPVYYKTDEQPELWFTAEQIWEIRGADLTLSPVHHAAIGLVHPSRGISVRMPRYIRSVPDRSPEDCGTAADIASMFKAQTRKMDVSSEGQE

SEQ ID NO: 39272 - protein, 45 aa, Zea mays
  Clone ID: 701164308_FLI.pep
LIKLSKSTTHSNACKLIDGSPVNQFAPGPPSRLRGGGGSTDGQII

SEQ ID NO: 39273 - protein, 329 aa, Zea mays
  Clone ID: 700445261_FLI.pep
WGKANLKSQGPKEEWEIDLAKLEIRYVIAQGTYGTVYRGTYDGQDVAVKLLDWGEDGFATEAETAALRTSFKTEVAVWHKLSHPNVTKFVGASMGTTDLKIPSNNSNGAARTNLPARACCVVVEYLAGGTLKQYLIKNSRRKLAYKVVVQLALDLARGLSYLHSRKIVHRDVKSENMLLTPQRNLKIADFGVARVEAQNPKDMTGATGTLGYMAPEVLDGKPYNRKCDVYSFGICLWEIYCCDMPYPDLSFADVSSAVVHQNLRPDIPRCCPSAFANVMRKCWDANPDKRPDMDEVVQLLEALDTSKGGGMIPDGQSSGCLCFTKARGP

SEQ ID NO: 39274 - protein, 111 aa, Zea mays
  Clone ID: 700577367_FLI.pep
ALDTFNTAIVSPIYYVMFTTLTILASVIMFKDWSGQSPGSVISEICGLVVVLSGTILLHVTKDYERIPQSRSVYAPLSPSLTTRLNGELLKHVVDERTSDEEKALRRQEMY

SEQ ID NO: 39275 - protein, 297 aa, Zea mays
  Clone ID: 700479650_FLI.pep
ARHHAGAHHRRHRPQPGAGLHPRQDPHPRLRRRRLRHHLLPPSRLHARVHNGDGGDGGVRQGVREAWREAAGHLVRRRGVAQAVDQGRGGVRREAAAAAGDDDEGDVPDPGGPGAGRHPAAEHGGPRREGRGGAEHAVPRAPRRRARQGRQAELPVPGHHGAEHGRGAARCRLAAHRRQAWREGGHARQLEARGVRRHRARRLRRGGQEDVPAGVRDRRPALQEGLPPFHQGLASRRTARTSSSSVSPRRPGCADLLCLLVVSLTSTSIYIGSMYVRTMPCRVVSCSGGNRFVALPR

SEQ ID NO: 39276 - protein, 238 aa, Zea mays
  Clone ID: 700620166_FLI.pep
ELRRPQHQARPPSRVTEMALPNQGTVDYPSFKLVIVGDGGTGKTTFVKRHLTGEFEKKYEPTIGVEVHPLDFTTNCGKIRFYCWDTAGQEKFGGLRDGYYIHGQCAIIMFDVTSRLTYKNVPTWHRDLCRVCENIPIVLCGNKVDVKNRQVKAKQVTFHRKKNLQYYEISAKSNYNFEKPFLYLARKLAGDPNLHFVEAVALKPPEVTIDMAMQQQHEAELAAAAAQPLPDDDDDLIE

SEQ ID NO: 39277 - protein, 374 aa, Zea mays
  Clone ID: 701160780_FLI.pep
TSTSTSTSTLAMASEVVRPSDAELLQAQADIWRLSLSYLTPLSLKCAVVLGIPRAIYRHGGAASAAELITALSLPSAKLPFLRRLLRLLAASGVFTVDRQSTEEERYRISPVSYLLVEGIPHEDHMNHTSFVLTCTSSRYIEPAIGLAEWFRKDTATSPFEELHGATLFHESMGSLDADFHDMASDALDTHDNFGVEMALREFRDLFEGIQSMTYCCGNFGDDKGARAIAKAFPHIKCTVLAPPKIIAAKPADGVKINYVEGDMFSFIPPAQTVVLKLVLHHLTDEECVKLLAQCRKAIPPRKDGGKVIIGDIMIDHSGPMLETQLLMDIGMMTMTKGRQHDEKEWRQLFTKAGFSEYKILKEFGTRVAFEVYP

SEQ ID NO: 39278 - protein, 220 aa, Zea mays
  Clone ID: 700452123_FLI.pep
TLPPRARAMPPVSCSGWGSPRASSCREPPPPEPPSAPAATSALRPCSLDTPPPCRGSSSGYRRTATSACSPRSRSASSTTRWVLPPAAAARCITRTGTIITITSSRRTGRTTARTASPMTSLGSSSVTVQPFALLNLPSSWKERKVYACSHGMLLLLLDCCWSSSDGFLCSFFSRVVSKLNGGLSCCEDLRIRDHPQFFLQSHGVDDRHSLLSDFQVYTS

SEQ ID NO: 39279 - protein, 658 aa, Zea mays
  Clone ID: LIB3079-015-H1_FLI.pep
PKSKSPHPPINLRGFYVHRRRQRQLNPRRRSTMASSLLSSPAKPTITTTTKTTPAPRPARSAHVHVLSAARCLRLRLRASSQHPPPPPTPRSRRPDYVPNRIDDPNYVRIFDTTLRDGEQSPGATMTSAQKLVVARQLARLGVDIIEAGFPASSPDDLDAVRSIAIEVGNPAPGPAGEEDAVHVPVICGLSRCNRKDIDAAWEAVRHARRPRIHTFIATSDIHMQHKLRKTPDQVVAIAREMVAYARSLGCTDVEFSPEDAGRSNREFLYHILGEVIKAGATTLNIPDTVGYNLPYEFGKLIADIKANTPGIEKAIISTHCQNDLGLATANTLAGARAGARQLEVTINGIGERAGNASLEEVVMAIKCRRELLDGLYTGIDSRHITLTSKMVQEHSGLHVQPHKAIVGANAFAHESGIHQDGMLKYKGTYEIISPDDIGLTRANEFGIVLGKLSGRHAVRSKLVELGYEIGDKEFEDFFKRYKEVAEKKKRVTDEDLEALLSDEIFQPKVIWSLADVQATCGTLALSTATVKLVAPDGEEKIACSVGTGPVDAAYKAVDKIIQIPTVLREYSMTSVTEGIDAIATTRVVVTGDVSNNAKHALTGQSFNRSFSGSGASMDIVVSSVRAYLSALNKICSFAGAVKASSDVAETASVPSTE

SEQ ID NO: 39280 - protein, 178 aa, Zea mays
  Clone ID: 700453242_FLI.pep
PGAGAAGLRALPCSVPTPVSPTPARGSATTTCCTRRCGRRVRGHPGARVHGRGGQGVGDRVAVARRRRRTRRHARVRGDLHPEPAAADRDEAGHAAAPGDARRRLRVRALQREPQARAGVGEELRPLLPRRHTGVQRRPARIPPADAGVVDCSTTADSLFCTSRHRVRRIFVCLILTV

SEQ ID NO: 39281 - protein, 181 aa, Zea mays
  Clone ID: LIB3075-041-F9_FLI.pep
RRHKPSVSTARPHPLSGVPTVSMAAVVRGVLRGIKEKGLTNFIRDVRDEGYFKCLLDGNLLQTKIHNIGATLVGVDKFGNKYYEKLHDTQYGRHRWVEYAEKGRYNASQVPAEWHGWLHHITDSTGDKLLNQKTARYLVEHKQNYSGEGEELIYHSKGHALNPGQRDWTRYQPWEPKKEQA

SEQ ID NO: 39282 - protein, 405 aa, Zea mays
  Clone ID: 700208460_FLI.pep
VRRAAASNLGKFAATVEQNHLKTEIMSIFDDLTQDDQDSVRLLAVEGCAALGKLLEPQDCVAHILPVIVNFSQDKSWRVRYMVANQLYELCEAVGPEPTRADLVPAYVRLLRDNEAEVRIAAAGKVTKFCRILNPQLSIQHILPCVKELSSDSSQHVRSALASVIMGMAPVLGKDATMEQLLPIFLSLLKDEFPDVRLNIISKLDQVNQVIGIDFLSQTLLPAIVELAEDRHWRVRLAIIEYIPLLASQLGVGFFDDKLGALCMQWLEDKVFSIRDAAANNLKRLAEEFGPEWAMQHIIPQVLEKINNPHYLYRMTILQAISLLAPVMGAEITCQKLLPVVINSSKDRVPNIKFNVAKVLKSLVPILDQSTVKPCLVELSEDPDVDVRYYANQALQACDQMMVSS

SEQ ID NO: 39283 - protein, 807 aa, Homo sapiens
  Clone ID: LIB4651-049-E11_FLI.pep
CWWPPLLPQLEPEPPPLRPRVAASQGGGMLGKGVVGGGGGTKAPKPSFVSYVRPEEIHTNEKEVTEKEVTLHLLPGEQLLCEASTVLKYVQEDSCQHGVYGRLVCTDFKIAFLGDDESALDNDETQFKNKVIGENDITLHCVDQIYGVFDEKKKTLFGQLKKYPEKLIIHCKDLRVFQFCLRYTKEEEVKRIVSGIIHHTQAPKLLKRLFLFSYATAAQNNTVTDPKNHTVMFDTLKDWCWELERTKGNMKYKAVSVNEGYKVCESVTRWLASKRSSINRRQKEKPHLYLEGDLRQFGLPAYFVVPTPLPEENVQRFQGHGIPIWCWSCHNGSALLKMSALPKEQDDGILQIQKSFLDGIYKTIHRPPYEIVKTEDLSSNFLSLQEIQTAYSKFKQLFLIDNSTEFWDTDIKWFSLLESSSWLDIIRRCLKKAIEITECMEAQNMNVLLLEENASDLCCLISSLVQLMMDPHCRTRIGFQSLIQKEWVMGGHCFLDRCNHLRQNDKEEVPVFLLFLDCVWQLVHQHPPAFEFTETYLTVLSDSLYIPIFSTFFFNSPHQKDTNMGREGQDTQSKPLNLLTVWDWSVQFEPKAQTLLKNPLYVEKPKLDKGQRKGMRFKHQRQLSLPLTQSKSSPKRGFFREETDHLIKNLLGKRISKLINSSDELQDNFREFYDSWHSKSTDYHGLLLPHIEGPEIKVWAQRYLRWIPEAQILGGGQVATLSKLLEMMEEVQSLQEKIDERHHSQQAPQAEAPCLLRNSARLSSLFPFALLQRHSSKPVLPTSGWKALGDEDDLAKREDEFVDLGDV

SEQ ID NO: 39284 - protein, 350 aa, Zea mays
  Clone ID: 700454567_FLI.pep
SCQFTADIIAMNNADFIITSTYQEIAGSKNTVGQYESHTAFTLPGLYRVVHGIDVFDPKFNIVSPGADMSIYFPHTEKAKRLTSLHGSIENLIYDPEQNDEHIGHLDDRSKPILFSMARLDRVKNITGLVEAFAKCAKLRELVNLVVVAGYNDVNKSKDREEIAEIEKMHELIKTHNLFGQFRWISAQTNRARNGELYRYIADTHGAFVQPAFYEAFGLTVVEAMTCGLPTFATLHGGPAEIIEHGVSGFHIDPYHPEQAANLMADFFERCKQDPDHWVKISGAGLQRIYEKYTWKIYSERLMTLAGVYGFWKYVSKLERLETRRYLEMFYILKFRELAKTVPLAIDQPQ

SEQ ID NO: 39285 - protein, 418 aa, Glycine max
  Clone ID: LIB3028-031-F2_FLI.pep
KVFSFFLGIHTKGFLRVQSALRFVFWMMEEAQGSSSSLPPFLTKIYEMVDDPSTNSIVSWSATNRSFIVWNPPEFSRDLLPKYFKHNNFSSFIRQLNTYGFRKIDPEQWEFANDDFVRGQPHLLKNIHRRKPVHSHSLQNIQGQGVSSLTESERQSFKDEIEKLKHEKEQLLRELEMHEQEWKMYEVQLQHSNDRLEKLEKKQENLVSSVSQVLQKPGIALNLLLLTENMDRKRRLPRSGLFSDDASIEDHMETSQVLPRENADGASIFSSSTERLDLLESSMTFWENITHDVGDVFVQSHLNLDFDESTSCADSPAISCVQLEVEDQPKSHGINVSSEPAVVAAPDLDASKEQPVETAPLTTGVNDIFWERFLTENPGSSEMQEAQSEREDSDGRSNAKFWWNIRNVNNPPEQMGHS

SEQ ID NO: 39286 - protein, 260 aa, Glycine max
  Clone ID: LIB3049-050-F6_FLI.pep
ISVLGKQKRRSIAKIDLEMGRGKIEIKLIENPTNRQVTYSKRRNGIFKKAHELSVLCDAKVSLIMFSKNNKMHEYISPGLTTKKIIDQYQKTLGDIDLWHSHYEKMLENLKKLKDINNKLRRQIRHRIGEGLDMDDMSFQQLRTLEEDMVSSIGKIRERKFHVIKTRTDTCRKKVKSLKQMNGNLLLELEKCVIHPQFLLHDEGDEESAAAAAAAAVALANGASTLYAFCHQHHSHLNLFSHHSNGEEQPFKTDHDLRLA

SEQ ID NO: 39287 - protein, 119 aa, Zea mays
  Clone ID: 700455261_FLI.pep
KVWYTLVEKNLDYVHKMDIDLSSISFRSGRQYTPKNPYSHDEPVSVLLTAFCTEASESIAAFVNQLIPTFTRCSSVGILRQYTSFRAACPRGPSKVSPSMKLAVTAASFLPSVIISPRF

SEQ ID NO: 39288 - protein, 355 aa, Glycine max
  Clone ID: LIB3050-027-B7_FLI.pep
RPIALRLVLQTKTLLQNLFSKISHNPFLLSTHSTPNSQKTHSFFCSLIFLIMCGGAIIADFIPRRGGRRLTASELWPNSFGKDGDFDFDYSHIADQQRSTLKMSPPPKASEQVENKPVKRQRKNLYRGIRQRPWGKWAAEIRDPRKGVRVWLGTFNTAEEAARAYDREARKIRGKKAKVNFPNEDDEYSIQARHPIPPLPFTPQTQNPPLYQQQYRCDLNIAPKNLNFEFGYDLNHAGAFPSHVDAVNADSVVVSGDENSGLASGSEGAYSTTEFMGSSQNGNGYLGVTAMEKNEKETEVIEAQEEKNKVQELSEELMAYENYMKFYRIPYYDGQSTAPPNNVQESLVGDLWSFD

SEQ ID NO: 39289 - protein, 122 aa, Zea mays
  Clone ID: 700455294_FLI.pep
RARSSVPGSSLMRRRRASPISTLLADGRCSRLCGCTGRSLMPLRQTTTTTSPSVRTSARPRSCCRYRLHMQGLRLHHEPSVDHIFFFFSFPNPPCFAPPFLFFFLYIISFSCLHGISLACSG

SEQ ID NO: 39290 - protein, 300 aa, Glycine max
  Clone ID: LIB3170-053-D9_FLI.pep
LPEQPQAYMIWKSIQQWTEKSASRAGVILPDLTSGAENVPVCLVNDVDNEKGPAYFTYIPTLKNLRPTAPVESSTGCPCVGGCQSKNFNCPCIQKNGGYLPYSSALLLADLKSVIYECGPSCQCPSNCRNRVSQSGLKFRLEVFRTKNKGWGLRSWDSIRAGTFICEYAGEVIDSARVEELGGDNEDDYIFDSTRIYQQLEVFPGDTEAPKIPSPLYISAKNEGNVSRFMNHSCSPNVLWRPVIRENKNESDLHIAFYAIRHIPPMMELTYDYGTVLPLKVGQRKKKCLCGSVKCKGYFC

SEQ ID NO: 39291 - protein, 396 aa, Glycine max
  Clone ID: LIB3170-088-C1_FLI.pep
GTGNCNCNFNSVSLMIELMNSLPFSFLLWLTFIFLFHLLDMHIIILCCLRWSQIAAQLPGRTDNEIKNLWNSCLKKKLRQKGIDPVTHKPLSEVENGEKAAEVSNELNLLKSESSKSDSASYEQRTSISPKAYAPEMDGSCSSKIEINFVTNNNCYNKDLFLDRFMSSSRQESYTTSCQPSDLMGNFPIQMSYATNDQCLPNDSNSSHWFSQTGRSFDMNTEFPFNAAVTSINPTPTTNLFLPNNSFCYKPSLAVPSDNVSIPYGSHYWEASASNNSNSSTELRSSSPLNIFSSWGLADCGTSTTKEAQIHMMENHNTEEAKWDEYLHNPISMLASSVQNQAPESLCNDIKTSMHLVPDTLGAMLPHNHTKQQEQSQTSSFFSKDIQKLRAAFGHM

SEQ ID NO: 39292 - protein, 145 aa, Zea mays
  Clone ID: 700455537_FLI.pep
ISPKVSHFGVNPKALWRVRSYKVLLQCNASLPLVGADVSEVDDPLRVAPLVVVPGDDLDHVVAHDHGEGGVDGGGDVGAPEVDGHERHVADLEDARELVGRGVAERLVHLLGEGLLGDLHDEVDDGDVRGGHPERDPVELALEVG

SEQ ID NO: 39293 - protein, 736 aa, Glycine max
  Clone ID: LIB3030-012-A8_FLI.pep
LIDSDRNGGDTSDLLEGQRQYNSAIHSIQEKVSEQPSILQGGELRPYQLEGLQWMLSLFNNNLNGILADEMGLGKTIQTISLIAYLMEHKGVTGPHLIVAPKAVLPNWINEFSTWAPSITTILYDGRLDERKAMKEELSGEGKFNVLITHYDLIMRDKAFLKKIHWLYLIVDEGHRLKNHECALARTLDSGYHIQRRLLLTGTPIQNSLQELWSLLNFLLPNIFNSVQNFEDWFNAPFADRVDVSLTDEEQLLIIRRLHQVIRPFILRRKKDEVEKFLPSKSQVILKCDLSAWQKVYYQQVTDVGRVGLDNGSGKSKSLQNLTMQLRKCCNHPYLFVGDYDIHKHKEEIFRASGKFELLDRLLPKLRRAGHRVLLFSQMTRLMDILEIYLRLNDFKFLRLDGSTKTEERGSLLRKFNAPDSAYFMFLLSTRAGGLGLNLQTADTVIIFDSDWNPQMDQQAEDRAHRIGQKKEVRVFVLVSVGSIEEVILERAKQKMGIDAKVIQAGLFNTTSTAQDRREMLQEIMRRGTSSLGTDVPSEREINRLAARSDEEFWLFEKMDEERRQKENYRSRLMEEHELPDWVYSPLNKDDKVKIFDSGSVTGKRKRNEVVYADTLSDLQWMKAVENGQDISKLSVKGKRRDHLPVDNHAQASDDMGTEERLFRSEDTFDVTPASKRLKPEEINSQKHENEDVSVGGLNEHIFSWNTRRKKRSGYLGQGSFSDSRGQNSNGRANWN

SEQ ID NO: 39294 - protein, 130 aa, Zea mays
  Clone ID: 700455559_FLI.pep
QESVQLHSILTVEEAGEILLTDQVKLWMEEGRLLDLVDRNLGGVYNLEELEKVTQIALLCTHMDPEQRPTMSEVVQMLEGEIVPAERWEEWQLAELQRRQQHEMRQQGKLFNFSEESQNIQEAIELSAGR

SEQ ID NO: 39295 - protein, 280 aa, Glycine max
  Clone ID: LIB3040-028-E5_FLI.pep
AEGVSDLYVMGAPKQKWTAEEEQALKAGVVKHGVGKWRTILKDPEFSSVLYLRSNVDLKDKWRNLSVMANGWSSREKSRLSVRRVHQVPRQDENSMAITAVAPSDEEIVDVKPLQVSRDMVHIPGPKRSNLSLDKLIMEAITCLKENGGSNKTAIAAFIEVNRKYRIAPIAAYSDRRRNSSVLYLEGRQKASMKIDRDETNILTRSQIDLELEKIRSMTPQEAAAFAARAVAEAEAAIAEAEEAAKEAEAAEADAEAAQAFADATTKSAKGRKSPKRIHA

SEQ ID NO: 39296 - protein, 135 aa, Zea mays
  Clone ID: 700456281_FLI.pep
PDFLDNVYGVDPSEVHIHVRMVQLHHIPTTEDKITEWMVERFRQKDQLLADFFMKGHFPDEGTEGDLSTPKCLANFLTVVCLTAICLYLTLFSFVWFKVYVVASCAYLSFVTYYSILPPQLIGSPEGDVKAKKVV

SEQ ID NO: 39297 - protein, 386 aa, Glycine max
  Clone ID: LIB3051-019-B12_FLI.pep
VDVSSMFIVRKNGKTSLHNAARYGVHRIVKTLIARDPGIVCIKDKKGQTALHMAVKGQCTSVVEEILLADPSILNERDKKGNTALHMATRKCRSQIVGLLLSYSAVDVNAINKQQETALDLADKLPYGDSALEIKEALAEYGAKHARYVGKEDDAMELKRTVSDIKHEVQSQLIQNETTRRRVSGIAKELKKLHREAVQNTINSVTLVAVLFASIAFLAIFNLPGQYITDEGKEIGKAKIADHVSFQVFCLLNSTSLFISLAVVVVQITLVAWDTRAQKQIVSVVNKLMWAACACTCGAFLAIAFEVVGKKTWMAITITLLGVPVLVGTLASMCYFVFRQHFGIFRSDSQRRIKRASGSKSFSWSYSANISDLDEYNSDIEKIYAL

SEQ ID NO: 39298 - protein, 483 aa, Glycine max
  Clone ID: LIB3106-068-H1_FLI.pep
YSLQGFVFYYLKPNSSFFFYTTPMAPDASDALAVRQKVQLFLNAARTGSIDLLKKLALQLDEGKDLAKSVEAIKDANKRGALHFAAREGQTSVCEYLLTDLKLSVDSQDDDGETALIHAARQGHTATAKYLIDHGADPTVASNLGATALHHSAGIGDAELLKYLLSRGVNPDLESDAGTPLVWAAGHAQPAAVSVLLEHGANPHAETDDGITPLLSAVAAGSLACLELLIQAGAKANISAGGATPLHIAADNGSLELLNCLLKVGADPDVSDEDGVKPIQVAAARGYPKAVEILFPLTSKVDTIPTWTVDGILEYMQSETRKQQDESINAKETNQPKEADFPEQNVPEVAPEAKKRAAEAKSRGDGAFKRNDHHMAIDFYTQAIDLNPIDATLLSNRSLCWIKLGQAEHALADAKACRALRPDWPKACYREGAALRLLQKFDEAANAFYEGVTLDPENKELVNAFREAVEAGRKFYGTAENKS

SEQ ID NO: 39299 - protein, 560 aa, Homo sapiens
  Clone ID: LIB4654-015-F10_FLI.pep
PSPPSPRAGVPYRAASCMLRRQWPRPGSLGRNSGRRMEDMGRGSGGNPDPKDLGGLTAPPHPPPNPSAPKAGSAPLSGDGGFLHYRGLCAPRRMEEGSPTVLESPQHGLPRQHPGMVPWGWGSGSGLGPTVLEEGALQEGSQLHPVVLVEEAIVHELRGEVLGAVRWEQVVGQLPVQPVFQHQKQSEMPARLVLASLQVALHLDDLSGLRVKGLWRRGLGLLDLLRGWGQHTGQPQGSSGCKVHQWVDSIPDILQEFVQLHEGDFRVPPLQRGPAGPGKLRQDRVQVHGLGLLLHHILRHEVLVLDEAVGCQELQRVHLEEHAVEEEAVGRGPAGRVPGQAAKDELPHVGVTQRVPGASNGLLCDPGVPIGLDFQYSHLQRTHPKGEDVHSGPIGHLSILWGEEVQVPKFLSLSADGASEIIWKCIGEDSVPHGADLDEAVVLNEDGVAGQVPVDDWGAAGVQEAERRQDLRAPALPGLAADARLRRSGGRRRGGWACGARPASSPSPCPRPPGTPSPSQSPRLPQPRPVPVAAPARSPYPGVHGLVVLLGLFEELLEAA

SEQ ID NO: 39300 - protein, 253 aa, Zea mays
  Clone ID: LIB3088-013-F1_FLI.pep
LAAWTGVAGPTGLAKDGRRTRFNIISGTSMSCPHISGVAALMKAAHPDWSPAAIKSALMTTAYTVDNTNSSLRDAADGSVANAFSYGAGHVDPQRALSPGLVYDISTHDYAAFLCSLNYSAPHVQVITKASNVSCGPPNKSRPGDLNYPSFSVVFGAQKRKTKPAAALRFRRELTNVGPAASVYDVKVVGPESVAVTVTPARLTFRQAGQKLRYYVTFASRARQGHAKPDFGWISWVNDEHVVRSPVAYTWKM

SEQ ID NO: 39301 - protein, 215 aa, Zea mays
  Clone ID: LIB3137-039-F2_FLI.pep
RSDDGGPLVTNQIYVHSKLMIIDDRMALIGSANINDRSLLGSRDSEIGIIIEDKEVLSSIMDGRPWEAGKFSLSLRLSLWAEHLGLLPGEVSCIMDPVDDSAYKNIWMATAKENTVIYHQVFSCVPNDHIHSRYQFRQSFAHRKEKIGHTTIDLGVALENLETQQQGDLACANPMERLQDVRGHIVCFPLEFMCQEDLRPFFSESEYYTSPQVFH

SEQ ID NO: 39302 - protein, 174 aa, Glycine max
  Clone ID: 701203364_FLI.pep
GDPSGKTGRAFKDEIHKKIEKWQEPPPAKQPKPLPVPDSEPKKKRGGRRLRKMKERYAITDMRKLANRMQFGVPEESSLGDGLGEGYGMLGQAGSGKLRVSVGQSKLAAKVAKKFKEKNYGSSGATSGLTSSLAFTPVQGIELSNPQAHAHQLGSGTQSTYFSETGTFSKIKRT

SEQ ID NO: 39303 - protein, 125 aa, Glycine max
  Clone ID: 701204128_FLI.pep
KEPLRIFYESLSKHDPPEQKEPLRIFYESLSKQIPTSEMAEFWLMEHGLLSPEKAKKAFEKRQRKQKELRTGTPVKLSKPPTKTATSQKQQQVSKNGDIKTKKRIVNESDDDDDDFILSHKRRKW

SEQ ID NO: 39304 - protein, 240 aa, Glycine max
  Clone ID: 701207758_FLI.pep
TYPSRFYKLLIMASASGEAPPPQPTSTEAAPASGSSAPAISAAAPQPGGSSPAPPSRYESQKRRDWNTFLQYLQNHKPPLTLARCSGAHVIEFLKYLDQFGKTKVHITGCPYYGYPNPPAPCACPLKQAWGSLDALIGRLRAAYEENGGRPESNPFGARAVRIYLREVREGQAKARGIPYEKKKRKRTTVVMVSSGGGGSSGAVASPSGGGDTAIGGGAGSSASLTSSATATANDTTTTV

SEQ ID NO: 39305 - protein, 422 aa, Glycine max
  Clone ID: 701209670_FLI.pep
NSSPSSSQLPSSSADFDKFNSLPRFRPLECLQGNPVPAFLSKTFELVDDPSLDPIISWGSTGVSFVVWDPTLFARHVLPRNFKHNNFSSFVRQLNTYGFRKIDTEKWEFFNEAFQRGKRHLLKNIRRRGPPQSHQVGGNIVPYSDADKAGLEFELESLRKERSVLMQEVVELQQQQRTTLQRARQVNQRLQSAELIQKQMVSFLARLFEKPAFLTSLQHAKEQRDLGCPKVRRRFIKQHQGQTEISDFLNEGQIVRYQPDWRNVTTSSEIQEMYPVSLEESPNYLSQALAKEFSEGTENLISDEVMSIADTMGFKSSSFGLDGNLFKGKNVMSSNEGLLAEEFVSFPEDLTKETGFPEFSPLGTEGIIKREDKRNTNFDVSGADSSSGNEQWGNPINYEVPEFVVTSGMTDMWDINYLTHSK

SEQ ID NO: 39306 - protein, 63 aa, Glycine max
  Clone ID: 701210548_FLI.pep
SEVGIYLSLCSHYLLVTAHTSVGVPRPPGNMIWMDTHITSSLMDCRYNINDNFMLLSELIRLN

SEQ ID NO: 39307 - protein, 51 aa, Glycine max
  Clone ID: 701210935_FLI.pep
IINRKKCEWHTQQPYNNIFLCKAQVNITYEAMTTFFSSSENHNIFIPKTTN

SEQ ID NO: 39308 - protein, 282 aa, Glycine max
  Clone ID: 701212327_FLI.pep
EANNTMSSENLIFIFIFIILISISSGNCVDRNRKKHYVLVHGACHGAWSWCKLKPRLESEGHKVTVLDLAASGINMKRIADVDTFSQYSEPLLQLMTTIPSNEKVVLVGHSFGGMNIALAMEKFPEKVAVGVFLTAFAPDTEHRPSYVLEQNTSSEDLDNEFAPSGNKTSVLFGPEYLSKKQYQLSPVEDLELAKTLVRPSSLFIEDLSKQKNFSKHGYGSVPRAYIVCTEDLAIPLEYQLWMIQNAGINDVLMIKGADHAAMFSKPRELFNSLQKIATKYD

SEQ ID NO: 39309 - protein, 316 aa, Zea mays
  Clone ID: 700456677_FLI.pep
PALACGCTVVVKLSELTPLTSLAAADLALQAGIPAGALNVVMGNAPEIGDALLQSTQVRKITFTGSTAVGKKLMAESANTVKKVSLELGGNAPCIVFDDADIDVAVKGSLAAKFRNSGQTCVCANRILVQEGIYEKFASAFIKAVQSLKVGNGLEESTSQGPLINEAAVQKVEKFINDATSKGANVMLGGRRHSLGMSFYEPTVVGNVSNDMLLFREEVFGPVAPLIPFKTEEEAVHMANDTNAGLAAYIFTKSIPRSWRVSESLEYGLVGVNEGIISTEVAPFGGVKQSGLGREGSKYGVDEYLELKYICMGNLG

SEQ ID NO: 39310 - protein, 318 aa, Glycine max
  Clone ID: LIB3029-003-A2_FLI.pep
GGGGGKSGKTMSTNSKENLFIVFLVTLWYSSNIGVILLNKYLLSNYGFKFPIFLTMCHMSACAVLSYVSIVFFKVVPQQMIKSRSQFIKIATLSLVFCASVVGGNISLRYLAVSFNQAVGATTPFFTAVFAYLATLKREAWVTYGALVPVVAGVVIASGGEPGFHLFGFIMCLSATAARAFKSVLQSILLSSEGEKLNSMNLLLYMSPIAVLVLLPAALIMEPNVVDVILTLAKDHKSVWLLLFLNSVTAYAANLTNFLVTKHTSALTLQVLGNAKGAVAVVISILLFRNPVTVLGMGGYTITVMGVAAYGETKRRFR

SEQ ID NO: 39311 - protein, 72 aa, Zea mays
  Clone ID: 700467466_FLI.pep
TASSRSLHTLVKLHGSPLQCSMQNRANQSPRYLLRNYCQLRRPKSSMACLLHPADHRCFHFHAVSKRKSIRR

SEQ ID NO: 39312 - protein, 53 aa, Glycine max
  Clone ID: LIB3051-075-G2_FLI.pep
RWHQLKNCDTCEEVLMCVYLHIPISHGFGHLVECILVKNDAKIHLTGIYKVVK

SEQ ID NO: 39313 - protein, 203 aa, Glycine max
  Clone ID: LIB3242-254-F12_FLI.pep
GSITWTLGVALLEAGKAYSVRFGLRGFYLLQMKMNPLILIPILILSFILLLCALSWVVNWMPRFFRRQYLPFFRHNSASSASGINIPSPFRFQRWSPMNSGDGRTKTPLSPTIAGSQDRPFSLGHGLSDNSGNIQLMESSFHPSASSVSHSYSSNNLGQMQFDSSSIGAFWSPHRSQMHLQSRRSQSREDLNSSLAETHMVKA

SEQ ID NO: 39314 - protein, 191 aa, Zea mays
  Clone ID: LIB3608-032-E5_FLI.pep
GGTIAYRLIPAGRVSLHKMTTATAGGSVADRIMPHLLNIYGSSATARDFEIYAPNATFEDPLMRAHGVKQIKSAFYTLPKVFGESKITEYTVQENPMGPGKTEVVIQNKQHYKVLGKPVDLTSLIRLQLQDGKVVKHEDWWHGKPLKNRDTVGVPLVGRLAEASRRGAMLLTHALMGFGKDPTQPPPPPTL

SEQ ID NO: 39315 - protein, 86 aa, Zea mays
  Clone ID: LIB3957-001-C9_FLI.pep
TSFRECLAEVRQLTNLLLSSQPESFANPATREQSYGALDHKKVAIICDKFKDAPDSLFGSLSGRGTVQSARKKSLDVLKRRLKDFS

SEQ ID NO: 39316 - protein, 346 aa, Glycine max
  Clone ID: LIB4165-016-G3_FLI.pep
NMEESFVFQWSVIRSLLSILQWWAFNVTVIIVNKWIFQKLDFKFPLSVSCVHFICSSIGAYVVIKLLKLKPLITVDPEDRWRRIFPMSFVFCINIVLGNVSLRYIPVSFMQTIKSFTPATTVVLQWLVWRKYFDWRIWASLIPIVGGILLTSVTELSFNMFGFCAALFGCLATSTKTILAESLLHGYKFDSINTVYYMAPFATMILALPAMLLEGNGILEWLNTHPYPWSALIIIFSSGVLAFCLNFSIFYVIHSTTAVTFNVAGNLKVAVAVLVSWLIFRNPISYLNSVGCTVTLVGCTFYGYVRHKLSQQPQVPGTPRTPRTPRTPRSKMELLPLVNDKLEDKV

SEQ ID NO: 39317 - protein, 165 aa, Glycine max
  Clone ID: LIB4202-004-F10_FLI.pep
PLLKKYPANLSVTAYSYFFGAVLMVTTSFFATNESTDWRLTQSETIAVIYAGFIASALNYGLITWCNKILGPAMVALYNPLQPGASALLSRIFLGSPIYMGSIIGGSLIIIGLYAVTWASYRERHAAAGVVSHGSWVSESLVHDKSSFRVNIFSGPPSLSTKPSD

SEQ ID NO: 39318 - protein, 104 aa, Zea mays
  Clone ID: LIB4315-030-E12_FLI.pep
YLLRHIITRSKRSSQLRLLLALLQQLTRPPRPAQHVQHRRRHVRHRDARRLQRPTAHLRRFAAPSRFCHATGHHLPRRGALVGVRAQPGEHIRAPGQLVLLPAR

SEQ ID NO: 39319 - protein, 93 aa, Glycine max
  Clone ID: 701213935_FLI.pep
IDETIKICVQREINTFFFIKHDHIKIQHKKIHSRMKTYNNVPCLDSSILMDPLFVSRNPLWTLRTEIVGCYPRVQQFHNGGKLDAPWCLILIN

SEQ ID NO: 39320 - protein, 1344 aa, Homo sapiens
  Clone ID: LIB4119-113-G5_FLI.pep
RDPRLIQLLEVEAWQLASLLPMEDGGLTAFEEDQRCLSQSLPLPVSAEGPAAQTTAEPSRSFSSAHRHLSRRNGLSRLCQSRTALSEDRWSSYCLSSLAAQNICTSKLHCPAAPEHTDPSEPRGSVSCCSLLRGLSSGWSSPLLPAPVCNPNKAIFTVDAKTTEILVANDKACGLLGYSSQDLIGQKLTQFFLRSDSDVVEALSEEHMEADGHAAVVFGTVVDIISRSGEKIPVSVWMKRMRQERRLCCVVVLEPVERVSTWVAFQSDGTITSCDSLFAHLHGYVSGEDVAGQHITDLIPSVQLPPSGQHIPKNLKIQRSVGRARDGTTFPLSLKLKSQPSSEEATTGEAAPVSGYRASVWVFCTISGLITLLPDGTIHGINHSFALTLFGYGKTELLGKNITFLIPGFYSYMDLAYNSSLQLPDLASCLDVGNESGCGERTLDPWQGQDPAEGGQDPRINVVLAGGHVVPRDEIRKLMESQDIFTGTQTELIAGGQLLSCLSPQPAPGVDNVPEGSLPVHGEQALPKDQQITALGREEPVAIESPGQDLLGESRSEPVDVKPFASCEDSEAPVPAEDGGSDAGMCGLCQKAQLERMGVSGPSGSDLWAGAAVAKPQAKGQLAGGSLLMHCPCYGSEWGLWWRSQDLAPSPSGMAGLSFGTPTLDEPWLGVENDREELQTCLIKEQLSQLSLAGALDVPHAELVPTECQAVTAPVSSCDLGGRDLCGGCTGSSSACYALATDLPGGLEAVEAQEVDVNSFSWNLKELFFSDQTDQTSSNCSCATSELRETPSSLAVGSDPDVGSLQEQGSCVLDDRELLLLTGTCVDLGQGRRFRESCVGHDPTEPLEVCLVSSEHYAASDRESPGHVPSTLDAGPEDTCPSAEEPRLNVQVTSTPVIVMRGAAGLQREIQEGAYSGSCYHRDGLRLSIQFEVRRVELQGPTPLFCCWLVKDLLHSQRDSAARTRLFLASLPGSTHSTAAELTGPSLVEVLRARPWFEEPPKAVELEGLAACEGEYSQKYSTMSPLGSGAFGFVWTAVDKEKNKEVVVKFIKKEKVLEDCWIEDPKLGKVTLEIAILSRVEHANIIKVLDIFENQGFFQLVMEKHGSGLDLFAFIDRHPRLDEPLASYIFRQLVSAVGYLRLKDIIHRDIKDENIVIAEDFTIKLIDFGSAAYLERGKLFYTFCGTIEYCAPEVLMGNPYRGPELEMWSLGVTLYTLVFEENPFCELEETVEAAIHPPYLVSKELMSLVSGLLQPVPERRTTLEKLVTDPWVTQPVNLADYTWEEVFRVNKPESGVLSAASLEMGNRSLSDVAQAQELCGGPVPGEAPNGQGCLHPGDPRLLTS

SEQ ID NO: 39321 - protein, 344 aa, Zea mays
  Clone ID: 700468131_FLI.pep
RWESRQHCNGVRARPCRSPSSPFARCRSMGWALALHGGAGDVPRTLPPESREPRLATLRRCLDIGTAALREGRTALDVVELVVRELEDCPHFNAGRGSVLTSAGTVEMEACVMEGATLHCGAVSGLSTVANAVSLARLVMEKTPHIYLAFDGAEAFAREQGVETKDPSHFITDNNIERLRQAKEANRVQIDYTQPAAGQSQKAQAVVDDNCQTGTVGCVAVDAAGNLATATSTGGLVNKMPGRIGDTPLVGAGTYANALCAVSATGKGEEIIRRTVARDVAALMERGDALPLRDAAARVVAGAARGAVGLVAVSRQGEVCMAHNTTAMFRACATEAGHTEVGIW

SEQ ID NO: 39322 - protein, 372 aa, Zea mays
  Clone ID: LIB3067-023-F3_FLI.pep
LPEIEPDHIVSLFEGNSNLFWAERLGRDHLGGMNDLWVKHCGISHTGSFKDLGMTVLVSQVNRLRRAPLSRPIAGVGCASTGDTSAALSAYCAAAGIPAIVFLPANRISLEQLIQPIANGATVLSLDTDFDGCMRLIREVTAELPIYLANSLNSLRLEGQKTAAIEILQQFDWEVPDWVIVPGGNLGNIYAFYKGFEMCRVLGLVDRVPRLVCAQAANANPLYGYYKSGWTEFQPQVARPTFASAIQIGDPVSVDRAVVALKATDGIVEEATEEELMNAMSLADRTGMFACPHTGVALAALFKLREQRVIGTNDRTVVVSTAHGLKFSQSKIDYHDSKIEDMACKYSNPPVSVKADFGAVMDVLKKRLKGKL

SEQ ID NO: 39323 - protein, 369 aa, Zea mays
  Clone ID: 700468289_FLI.pep
PGVLQHNSTPGAFHPQLNTPGLSELPHALSSSIDSNGSEVSAFLADLNAVSSASALCSTFQNASSFMEPVNLEAFSFQGAQSDSVLNKTTHPDGNISVFDSAALASLHDSKEFISGRLPSFASVQETNVAASGFKTQKQEQNAVCNVPIPTFTALNQIAVAAMPGSLIPQKIPSWINENKSEGPVSHPSDVQIQPNSVGNGVGVKPRVRARRGQATDPHSIAERLRREKISDRMKNLQDLVPNSNKADKASMLDEIIDYVKFLQLQVKVLSMSRLGAPGAVLPLLAESQTEGYRGQLLSAPTNAQGLLDTEESEDTFAFEEEVVKLMETSITSAMQYLQNKGLCLMPVALASAISTQKGVSAASIPPEQ

SEQ ID NO: 39324 - protein, 71 aa, Zea mays
  Clone ID: LIB3069-037-F10_FLI.pep
HRNPTDLITPPPQYFGKTKPYQITPTTVLLVLFFFKMITEGQRRWQAAPQSTRCRTSGCRTASARRRGSQS

SEQ ID NO: 39325 - protein, 243 aa, Zea mays
  Clone ID: 700468671_FLI.pep
PRWKRVLLKIGGTALCGAAHQNVDPKVIMLIAREVQVACHHGVEVAIVVGGRNIFCGDNWVAATGTDRASTYPIGMMASVMNSVLLQASLEKIGVETRVQTALMMQEVAEPYIRRRAIRHLEKGRVVIFGGIGVGIGNPLFTTDTAAALRASEINADVVLKGIVGDDEYGCPPRSNSNASFEHISFRELAARGITKMDMTAVTCCEENNIPVVIFNMLEPGNISRAICGDQIGTLVDQSGRIT

SEQ ID NO: 39326 - protein, 454 aa, Zea mays
  Clone ID: LIB3068-041-F4_FLI.pep
VSVGEVMKSPVFSEDESSENSFWVDLGQSPLGSDHSEQSSKGKLGSPLPASWFSGRKSAKKASPKVPSKLSRSPIHDNHVMSFDAAVRSVSQEPGPEKGDLDEDNSHINIKNTPISEIEEDNKDAKVNKRFVKFSCANDTAEGEGCATSVFGSCTTRENGSTSEIFSESQAETKDSAIRRENEGDFRLLGRREAYNGRFNGGRFFGVEESERVPSMGHNVSFTLDDSKLCRNADAGETSGYGMADDDDDDDDAYSDYDEALDGRKEPEIICKHLDHVNMLGLSKTTLRLRYLINWLVTSLLQLRLPDSGDGEGVPLVYIYGPKIKYDRGAAVAFNIKDCNTGTSLINPETVQKLAEKEGLSLGVGFLSHIRLIDNQKHGAVDVGLSSSWPAANGRREKKNSKNAIIGTEVVTASLGFLTNFEDVYRLWAFAAKFLDSSFLEQERLSSIPEDAER

SEQ ID NO: 39327 - protein, 138 aa, Zea mays
  Clone ID: 700469166_FLI.pep
KIQTLDIYHGPHMSLTHVDPHVSEIVMVWIQIGDLLMVWIQISLFFMSSNNTPVVMVARSVRDWRGNSMVGAAGGGGSVLFTGRRPGGGGGPLPTGEQEGFYFSSIDYINRPAGRPYLARDPYLLKTLNKLLTDNFPR

SEQ ID NO: 39328 - protein, 713 aa, Zea mays
  Clone ID: LIB3069-009-C9_FLI.pep
DTMLKINDRYEFPLQLDLDRDDGKYLSPDADRSVRNLYTLHSVLVHSGGVHGGHYYAFIRPKLSDQWYKFEDERVTKEDMKRALEEQYGGEEELPHTNPGLDTAPLRFTKHSNAYMLVYIRESDKDNIICDLDDEDISEHLKVRLRKEHEEKEYKKKEKAEAHMFTALKVARDFDIKEQIGRHMHFDLVDFDRVNSFRAPKNMSINEVKEELSKEFGIPVECQRFWVWAKRQNCTYRPSRPLTSQEETSTIGVLKDATVAKLPNSEVRLFLEVHFRQENQPIAPWNTKEDILLFFKLYDPEKEDLRYVGNFFVKASGKPSDIVERLNQIAGFLSDEDIELYEEIKFEPVVMCVPIESNASFCSSQIDNGDIICYQKHCLPDSMDRYRYPTVPSFFEYIHNRQIVHFRLLEKPKEEGFSLELSKCSTYDDVVEKVAKQLRMDDPSKIRLTQHNPSSQQPKPHFIKYRSLNYLSDMLHNHNQMCDILYYDILDIPLPELESMRSLKVAFQNAANHEMSFHIMRLPKSNSLLDLIEDLKSKVEISCNDAEFRFFGVYLHKICKVYQPGDKIDSVNDHGPLYIEEVPEDEKNAGPHDRLVHVYHFEYNHHIQYFGEPFFFLIRDGEALSDMKVRIQKRLQVPDEQFLKWKFAHVTFSKPEYLQDSDIVMNRFHKQRPVYGGWEQHLGLEHTATTPKRSYLGNNQNRHSFEKPVRIYN

SEQ ID NO: 39329 - protein, 148 aa, Zea mays
  Clone ID: LIB3088-014-C8_FLI.pep
TLQKIHVTWPIYHIHTLYKLKTTKKNCFLRPHFHMDDCVGVSDDENGSVVVNDFVVGVVVGERVSPGFCSLLLILRSAKSVIMAGLVIWSTLILFSPESIRTTLVMLGRRAIASCVHSRPIFMNLHASSTSRSSPMSISMMSSKRPSS

SEQ ID NO: 39330 - protein, 340 aa, Homo sapiens
  Clone ID: LIB4218-029-A5_FLI.pep
ALLLGNSVRAQISVGWRRSGVWKFRGTGAQAHDCSGMDQYCILGRIGEGAHGIVFKAKHVETGEIVALKKVALRRLEDGFPNQALREIKALQEMEDNQYVVQLKAVFPHGGGFVLAFEFMLSDLAEVVRHAQRPLAQAQVKSYLQMLLKGVAFCHANNIVHRDLKPANLLISASGQLKIADFGLARVFSPDGSRLYTHQVATRWYRAPELLYGARQYDQGVDLWSVGCIMGELLNGSPLFPGKNDIEQLCYVLRILGTPNPQVWPELTELPDYNKISFKEQVPMPLEEVLPDVSPQALDLLGQFLLYPPHQRIAASKVGGEAVVSAPSAPLPITLVLCTW

SEQ ID NO: 39331 - protein, 220 aa, Zea mays
  Clone ID: 700470155_FLI.pep
FFFNTLYDPYRKGADFVRGYPFSLREGVECMLSCGLWLHNADYDPMTHVVKRNQRNTTYVDAVMTVPLGAMLPVSGINVAFNRDVLGPAMFPGLRLRNEGKHRWDTLEDIWNGLCAKVVCDSLGYGVKTGLPYVMRSDAEAGKALESLKEWEGVKVMDDVLPFFQSLKLSRTAVTVDDCVKELAGVVREKLGPKNAIFTKAADAMVEWNNLWKVHGAQNA

SEQ ID NO: 39332 - protein, 314 aa, Zea mays
  Clone ID: 700470673_FLI.pep
LVAIKRSKEGSMQGGLEFKTEIELLSRVHHNNLVGLVGFCFEKGEKMLVYEFIPNGTLSEALYGMKGIQLDWSRRLKIALDSAKGLAYLHDHANPPIIHRDVKSTNILLNEKMTAKVSDFGLSLLVTDSEEGQLCTNVKGTLGYLDPEYYMTQQLTAKSDVYSFGVVLLELIVGKPPIHNNKYIVREVKMALDEDDGTHYGLKDVMDPVLQKIGGLFGFPRFLKLALQCVEEVATARPSMNSIVREIEAIMLDNGLTPGSMSTSSSFSIESRTMKVGPKHPYSSSSMSTSTFDMDSRAFEYSGVFPSSHGSLKP

SEQ ID NO: 39333 - protein, 835 aa, Homo sapiens
  Clone ID: LIB3080-056-E12_FLI.pep
PRPTPGRPRQPAGEAQRESRNSRPEPTAPGPGRRAEKMNLQPIFWIGLISSVCCVFAQTDENRCLKANAKSCGECIQAGPNCGWCTNSTFLQEGMPTSARCDDLEALKKKGCPPDDIENPRGSKDIKKNKNVTNRSKGTAEKLKPEDITQIQPQQLVLRLRSGEPQTFTLKFKRAEDYPIDLYYLMDLSYSMKDDLENVKSLGTDLMNEMRRITSDFRIGFGSFVEKTVMPYISTTPAKLRNPCTSEQNCTSPFSYKNVLSLTNKGEVFNELVGKQRISGNLDSPEGGFDAIMQVAVCGSLIGWRNVTRLLVFSTDAGFHFAGDGKLGGIVLPNDGQCHLENNMYTMSHYYDYPSIAHLVQKLSENNIQTIFAVTEEFQPVYKELKNLIPKSAVGTLSANSSNVIQLIIDAYNSLSSEVILENGKLSEGVTISYKSYCKNGVNGTGENGRKCSNISIGDEVQFEISITSNKCPKKDSDSFKIRPLGFTEEVEVILQYICECECQSEGIPESPKCHEGNGTFECGACRCNEGRVGRHCECSTDEVNSEDMDAYCRKENSSEICSNNGECVCGQCVCRKRDNTNEIYSGKFCECDNFNCDRSNGLICGGNGVCKCRVCECNPNYTGSACDCSLDTSTCEASNGQICNGRGICECGVCKCTDPKFQGQTCEMCQTCLGVCAEHKECVQCRAFNKGEKKDTCTQECSYFNITKVESRDKLPQPVQPDPVSHCKEKDVDDCWFYFTYSVNGNNEVMVHVVENPECPTGPDIIPIVAGVVAGIVLIGLALLLIWKLLMIIHDRREFAKFEKEKMNAKWDTGENPIYKSAVTTVVNPKYEGK

SEQ ID NO: 39334 - protein, 373 aa, Homo sapiens
  Clone ID: LIB4118-109-E6_FLI.pep
RPTAPCPPTPTPTTHNGAIVMLGACFPHLSSGDVMVFGPGGLGQPVLHPVLVLGHHQQPVLGFGSKLVVGPVVGPQACLGVQFALSAVLALPLPLEGGRRRGFGLGGLQPRVAEDLIDVEPLADVGLQHAVDEVLALAGQVLGAREVHTVLLLDTQHLPDVGVVIGHGAADHDVQDHAQAPDVIHLGLVGDALQHLGGCICCRPAEGLAEDDAPIAVPQAALGEAKVRQLDVEVLVEEKVLALEVPVDDVQVVAVLDGGGELSEHLACHVLMQGSLALDELEEVALDAKLHDDVDPSVRGLKDLVSLDDGAVVDSCQDVHLPRKESLHKVSRCFLAVDDLDSHIELEALRVGRFDFCVGTLAKIDAYDVTLLP

SEQ ID NO: 39335 - protein, 202 aa, Homo sapiens
  Clone ID: LIB3547-078-G1_FLI.pep
GMAATALLEAGLARVLFYPTLLYTLFRGKVPGRAHRDWYHRIDPTVLLGALPLRSLTRQLVQDENVRGVITMNEEYETRFLCNSSQEWKRLGVEQLRLSTVDMTGIPTLDNLQKGVQFALKYQSLGQCVYVHCKAGRSRSATMVAAYLIQVHKWSPEEAVRAIAKIRSYIHIRPGQLDVLKEFHKQITARATKDGTFVISKT

SEQ ID NO: 39336 - protein, 172 aa, Zea mays
  Clone ID: LIB3136-024-E7_FLI.pep
HEADDPERVTDAASGAAAGVEDAVGPDLGGLPRLGASGGVAEPQRGPGPGAAEVSHAGVVGEVLAPGPALRDGLLLEEELRGGGKVVELPIGEVEVLVRVVEAALGAGIGGIAPVVGPGLRGVQPRVGHRGIRRRRGRQESNGRGGRVWVAYLLGRAACIQCGIYLRRTPPS

SEQ ID NO: 39337 - protein, 279 aa, Glycine max
  Clone ID: 700554078_FLI.pep
IKSMAAQALVSSSSLTFSAEATRQSLGPRSLQSPFGFSRKASFLVKAAATPPVKQGSDRPLWFASKQSLSYLDGSLPGDYGFDPLGLSDPEGTGGFIEPKWLAYGEIINGRYAMLGAVGAIAPEILGKAGLIPQETALPWFRTGVFPPAGTYNYWADSYTLFVFEMALMGFAEHRRFQDWAKPGSMGKQYFLGLEKGLGGSGEPAYPGGPFFNPLGFGKDEKSLKDLKLKEVKNGRLAMLAILGYFVQALVTGVGPYQNLLDHLADPVHNNILTSLKFH

SEQ ID NO: 39338 - protein, 230 aa, Glycine max
  Clone ID: 700554617_FLI.pep
RKQQFIHKRQRHYYILLYATISSQLLSFHFFYYNFFTPKETAIISPPQFYNYKDKKKKSKMNSSTYHSHTIQSISLLQAAEHDGANEKPDGSDAERGSNNSLDGDEGGRVVGNEHNGGNGSDEGGEGGGGEEGGGEAGGSVEQAEQAELLGFGEDAELLYGRERESQVLCLGEQASFLHVAQNLPLLYLLEHVHLHLLASLVEYPRSKPLLLPLIIVLVHLLFGGHGEDG

SEQ ID NO: 39339 - protein, 192 aa, Zea mays
  Clone ID: LIB4570-007-H6_FLI.pep
KAGARGPPEDPENPYGFLRFPQGYNPELDSLASKVRGDVRRACCVVSGGVYENVLFFPVVQMLKDRYPGVLVDVVASARGKQVYEMCKNVRYANVYDPDDDWPEPAEYTHMLGVLKNRYYDLIISTRLAGIGHALFLFMSSARDKVGYVYPNVNSVGAGLFLNEMFKAPTNNLADGGYHMYKDMLEWIGRPR

SEQ ID NO: 39340 - protein, 187 aa, Allium porrum
  Clone ID: LIB3805-040-G10_FLI.pep
TGPPLVPEKFKFAVSSGFDPDKDLIKAGVANQTTMLKGETEEIGKLVEKTMMRKYGVENINEHFISFNTICDATQERQDAMYKLVEDKVDLILVVGGWNSSNTSHLQEIAELKGIPSYWVDNERRVGPGNKILYRLNHGEVVEKENFLPQGPITVGITSGASTPDKVVELVLTKIFDIKKEEAMQVA

SEQ ID NO: 39341 - protein, 526 aa, Glycine max
  Clone ID: 700554914_FLI.pep
MHSSPLLLEEPIRMASILEPSKPTFFPAMTKIVGTLGPKSRSVDIISHCLDAGMSVARFDFSWGDPEYHQETLENLRVAIKSTKKLCAVMLDTVGPELQIENKTDHPITLEADTLVVLTPDQNKEASSNLLPLNFTGLSKAVKKGDTIFIGKYLFTGSETASVWLEVSEVEGEDVTCLVKNTATLSGSLFTVHVSQIHIDLPTLADKDKEVISTWGVQNNIDFLSLYTRHVEDIRHAREFLSKLGDLKQTHIYAKIENIEGMKHFDEILREADGIILARGNLGIELPPEKVFLFQKAAIYKCNMVGKPVVVTRVVDSMTDNLRPTRAEATDVANAVLDGSDAILLGAETLRGQYPVETISIVGKICAEAEKVHNQDLYFKKAVKYVGEPMSHLESIASSAVRAAIKVKASVIICFTSSGRAARLIAKYRPTMPVISVVIPQLKTNQLRWTFTGAFEARQSLIVRGLFPMLADPRHPAESRSGTNESILKVALDHGKAFGIIKPHDRVVVCQKVADSSVVKILELED

SEQ ID NO: 39342 - protein, 409 aa, Allium porrum
  Clone ID: LIB3805-021-C1_FLI.pep
MISGSGSTLFEELGLYYIGPVDGHNIDDLVTILKEVKSTKTTGPVLIHVVTEKGRGYPYAERAADKYHGVVKFDPATGKQFKKSSQTLSYTNYFADALIAEAEVDKNIVAIHAAMGGGTGLNYFMRRFPERCFDVGIAEQHAVTFAAGLACEGLKPFCAIYSSFLQRAYDQVIHDVDLQKLPVRFAMDRAGLVGADGPTHCGAFDVTYMACLPNMIVMAPSDEAELFHMVATAAAIDDRPSCFRYPRGNGVGVPLPPGNKGIPLEVGKGRILIEGERVALLGYGSAVQSCIAAASLVEKYGLRLTVADARFCKPLDRALIRALAKSHDVLITVEEGSIGGFGSHVAHFLALDGLLDGEVKWRPLVLPDRYIEHGSPVDQMIEAGLTPSHVAATVFSILGQTRKALEIMS

SEQ ID NO: 39343 - protein, 345 aa, Allium porrum
  Clone ID: LIB3804-021-D7_FLI.pep
PGPPSCRLDLASGLGGKIAKKEVQSAVEQYEKYHVYHGGDEETRKSNYSDMVNKYYDLATSFYEFGWGESFHFAPRWIGESLRESIKRHEHFLALQLGLKKGMKVLDVGCGIGGPLREIARFSSTSITGLNNNDYQITRGQELNKATGLGEDCNFVKADFMKMPFEENSFDAIYAIEATCHAPDALGCYKEIYRVLKPGQCFAAYEWCITDHYNPNNEEHQKIKAEIELGNGLPDVRSTTQCLEALKQAGFEVIWDKDLAVDSPVSWYLPLDTSRFSITSFRLTAFGRFITKSMVKTLEYIGLAPAGSDRVSSFLEKAAEGLVEGGRKEIFTPMYFFLVRKPLSQ

SEQ ID NO: 39344 - protein, 465 aa, Allium porrum
  Clone ID: LIB3804-013-C6_FLI.pep
TRETIASSWDELNYQSGFGNHLSSEALPNALPLGQNSPLLCPYGLYAEQISGTSFTAPRKVNQRSWLYRVKPSVTHEPFYARVPSHKFLVSEFDHKTSSANPTQFRWKPVDVPDSPTDFIDGLQTVCGAGSSSLRHGFAIHMYAANKSMDGCAFCSADGDFLLVPQMGKLWITTECGKLQVTPGEIVVIPQGFRFSVDLPDGPSRGYVAEIFGTHFQLPDLGPVGANGLASPRDFLAPTAWFNHDPHPGYVIVQKFSGELFTAKQDFSPFNVVAWHGNYAPYKYDLSKFCPLNTVLVDHADPSINTVLTAPSDKPGVALLDFVIFPPRWLVSEHTFRPPYYHRNCMSEFMGLIYGAYEAKADGFLPGGASLHSCMTPHGPDTKSYEAMIAGGENAEPYRIRDTMAFMFESCLIPRVCPWALESPYRDSDYYQCWIGLKSHFYVDNEKSANVNDAGEVHNGENVNS

SEQ ID NO: 39345 - protein, 385 aa, Agrobacterium tumefaciens
  Clone ID: LIB3425-125-D5_FLI.pep
GRRDHCRQQSSRKAATAPLRRKDWPFLPACRRSSGSDRRCRHHGQGDRQGCRTRQGHAGGLTRRSMGTRKASGAGGGSQRTPRPLRRKGRDSHRGRKIHRRTEKLTSQLFIIQSALERRNQHFDAAVLRTTIRRGIRSNRLRRAEAERRNTALVDAACTEIIGDRGSTTLGERLVMLQAAGGIGVAVDVDQRTVELVQYDGDRIECLVERRNDLVLIRGKGDVGWHVEDDAVTAAGHRNAGSLKLGAKLGFLPVHVVADGAASESTDARTDQRGVAATNRRAADSQTTESTNDSADAGTAGRVRHLLLARIGISGGAGGKIGAAKGDDRDFFDHFSGCSERFRRYDSEIQAVATYALLRRIFLAKTLFDVIDHKRFKIGGDIGTT

SEQ ID NO: 39346 - protein, 160 aa, Zea mays
  Clone ID: LIB4740-026-C4_FLI.pep
PSRPAGPGARNTQKLPRATTVPLLSPPLLLLPFLLQTSKSVCLLPRLADRNKSMHIREEEATPSTVTGIMSTLTSAGQQKLKEPISPGGGSASVAGSAAERNNGGRGKGKTEIKRIENTTNRQVTFCKRRNGLLKKAYELSVLCDAEVALIVFSSRGPRA

SEQ ID NO: 39347 - protein, 111 aa, Glycine max
  Clone ID: 700554929_FLI.pep
HHTWARKQSYPHGQIHGYRMSLWAEHTGTIEECFLQPESLECVRRVKAMGEMNWKQFSAKEATEMKGHLLKYPVEVDRNGKVRPLQDCEEFPDVGGKIVGSFLAMKENLTI

SEQ ID NO: 39348 - protein, 130 aa, Zea mays
  Clone ID: LIB3136-005-H1_FLI.pep
SPCTARSPPPPTEKHPFRSSYSYSEVDLFVLHWALHLALGGQVYSELLPLFSLRRRRRRVLWYGRLTSERAFGLPRRRHLADRRLPRARRPHRAERAEALEVVAERQEAPGRLPRRQDLVHLLQRRQPEM

SEQ ID NO: 39349 - protein, 357 aa, Glycine max
  Clone ID: 700555039_FLI.pep
EGEILQSSNLKNFSLTELTAATRNFRKDSVLGGEGDFGSVFKGWIDNQSLAAAKPGTGVVVAVKRLSLDSFQGQKDWLDEVNYLGQLSHPHLVKLIGYCFEDEDRLLVYEFMPRGSLEYHLFMRGSYFQPLSWGLRLKVALGAAKGLAFLHSAETKVIYRDFKTSNVLLDSNYNAKLADLGLAKDRPTREKSHVSTRVMGTYGYAAPEYQTTGNLSAKSDVFSFGVVLLEMLSGRRAVDKNRPSGQHNLVEWAKPYLANKHKLLRVLDNRLEGQYALDEACKVATLSLRCLATESKLRPTMDEVVTDLEQLQVPHVNQNRSVNASRGRRKSADDFTHGRIATASVSPLSHDIANTRP

SEQ ID NO: 39350 - protein, 239 aa, Arabidopsis thaliana landsberg
  Clone ID: gC-alX01DS00049G02_FLI.pep
ASLCDKSLFKGCFNQLDDLMIQDTVKSPPAEVNTMRKATFVSVAVTTVFYMLCGCVGYAAFGDNAPGNLLAHGGFRNPYWLLDIANLAIVIHLVGAYQVYCQPLFAFVEKEASRRFPESEFVTKEIKIQLFPGKPFNLNLFRLVWRTFFVITTTLISMLMPFFNDVVGLLGAIGFWPLTVYFPVEMYIAQKNVPRWGTKWVCLQVLSVTCLFVSVAAAAGSVIGIVSDLKVYKPFQSEF

SEQ ID NO: 39351 - protein, 135 aa, Zea mays
  Clone ID: GC-ZMLELIB3302112E04_FLI.pep
IVFDAITIISLYFQVWDVTRSQVFVEMREHERRVWSVDFSIMDPTKLVSGSDDGSVKLRDMNQAILFLHLLYVSFLTNDNMVIELVCGCRVASLHCYNTFFCVLCRLGVLALLKQGQMCVLCNFNLILLAPLPSA

SEQ ID NO: 39352 - protein, 311 aa, Zea mays
  Clone ID: GC-ZMLELIB3308285C07_FLI.pep
RPEVAVGEVLPQREHQDAHDDVHEARHEVGEAPRREGRGAALADDVVDERHDELRGAAAHVAPSGGEPVDGADDLAAEHGAHPVLAGDEGGEGEADEEPDGDVARGVVDERHAEHGGRGQHDEEGAAVARAQQVADGAHGEAGEDGARHGGHARVADVGLGEVEVVADDGDQRRGGEGGHEAGEEGDPGEVEGAHVRVGHGEEPDALRLVLRVHRQVELAAIARRLLVLRGEGERRLAPRDSVQRAARGADGRHYIAASAIAELEQQVMYPFPLETIAAVACWNGMTSNMERRRIYRKAAMEEEIQMGVDI

SEQ ID NO: 39353 - protein, 130 aa, Zea mays
  Clone ID: LIB3279-010-H4_FLI.pep
IRYICDTYTVTTTAQDAWISHLTYVCIYIYSYSSLQATHSQRATHLPWALHEHQFQQPNDGGTRPVLLMCSACSAVLAAARFRFSSAAARFSSALCLADASLVISLSCARARIRSTSTSIFLISASIWAF

SEQ ID NO: 39354 - protein, 242 aa, Zea mays
  Clone ID: 700044242_FLI.pep
VSAAEQIFSAGGKRLRPALVFLVSRATAELAALPELTTEHRRLAEIIEMIHTASLIHDDVIDDSGMRRGKETIHQLYGTRVAVLAGDFMFAQSSWFLANLENIEVIKLISQVIKDFASGEIKQASTLFDCDVTLDDYLLKSYYKTASLIAASTRSAAIFSGVGSGVCEQMYEYGRNLGLAFQVVDDILDLTQSAEQLGKPAAGSDLAKGNLTAPVILALREEPRLRGIIESEFCEPGSLAAA

SEQ ID NO: 39355 - protein, 137 aa, Zea mays
  Clone ID: 700046133_FLI.pep
GAPAMSTGGRKMRTACVTGGNGYIASALIKVLLEKGYAVKTTVRNPDDMEKNFPPQGPAGARVLGGLPRRPGRRRQLRRRRRRLRLRLPGRRSGEPPHEEPRGRNDRAGRQGNSERDAVVREGAHGEARGPDLVGGR

SEQ ID NO: 39356 - protein, 155 aa, Zea mays
  Clone ID: 700047402_FLI.pep
TGHAECVKFVKKFNIPLLVTGGGGYTKENVARCWAVETGVLLDTELPNEIPKNEYIEYFAPDYTLKVPNLNMDNLNSKTYLSSIKVQVMESLRYIQHAPGVQMQEVPPDFYIPDFDEDELDPDERVDQHTQDKQIHRDDEYYEGDNDNDHDDGTR

SEQ ID NO: 39357 - protein, 423 aa, Zea mays
  Clone ID: 700047754_FLI.pep
LGLFLESGKSYTLCLVEAWSAESMSRRSNAWGRKVEAIDESDDTCGFCGDGGELLCCDNCPSTYHQACLSAKELPEGSWYCHNCTCQVCGGPFSEKEVSTFSAIFKCFQCGDAYHDTCIEQEKLPLEDQISQTWFCGKYCKEIFIGLRSHVGTDNILDSDLSWSILRCNNDGQKLHSVQKIACLAECNMKLAVALTLLEECFIRMVDPRTGVDMIPHVLYNKGSNFARVDYQGFYTVILEKGDEILCVASIRVHGTKAAELPFIATSVDFRRQGMCRILMSIIEKMLCSFNVKMLVLSAIPELVSTWVSGFGFKPIEDAERKQLHNVNLMLFPGTSLLTKRLDGFIMATKPGEEKDIHEVSGVPNLKRMPNGKANEHFKLHDLDLSGTEFKAEVSVNGPFRTLKHECGSAAWFQSTKLAVGEV

SEQ ID NO: 39358 - protein, 220 aa, Zea mays; identical to SEQ ID NO: 39331
  Clone ID: 700049043_FLI.pep

SEQ ID NO: 39359 - protein, 239 aa, Zea mays
  Clone ID: 700050028_FLI.pep
QCRGGSQRKGLAVDVEHLRARQVRFLHAAEVDDLAGGCAGALQLLVAAAGVGHDGFHGGEQAAVGDPLGLAFHRLDEAVGHGPHRRAGLRRHAELAFAVAVAADKHRLAAARALADARRWTVILPLPVPGPGHVAEEGEVEDGITVARVDHGVELGAGHQRPDDGLVDLVVQDGALLERVHRADGLVVPVLLVAVRVGDLRAQPREVEHQGVAAAAPLHQPLHRHPDVVLGGHPERVLL

SEQ ID NO: 39360 - protein, 255 aa, Zea mays
  Clone ID: 700051980_FLI.pep
HAERYFPLSSSGAGDKGLILCFEDDDDDEAAAANKPWRFRYSYWTSSQSYVLTKGWSRYVKEKQLDAGDVVRFQRMRGFGMPDRLFISHSRRGETTATAATTVPPAAAAVRVVVAPAQSAGADHQQQQQPSPWSPMCYSTSGSYSYPTSSPANSQHAYHRHSADHDHSNNMQHAGESQSDRDNRSCSAASAPPPPSRRLRLFGVNLTAARGRSRRHQRRCTATCTKAPTLTTTGAVHTSMTRRFKIMPAESKQPK

SEQ ID NO: 39361 - protein, 296 aa, Zea mays
  Clone ID: 700071637_FLI.pep
PLFAWIIGYTLGCIASLPLIYWRYVHRNRHLDQEPQQPPTTYPTLTPSQSSEGRNHRTSGIVLHLGCISISCPRLSVLAYHFKTGVDCFFAVWFVVGNVWIFGGRSISSDAQDAPNMYRLCLAFLALSCVGYAIPFIMCAAICCCFPCLISVLRLQEDLGQNRGATQELIDALPTYKFKPKRVKNWGIDHASSSEHLDEGGILGPGTKKERVVSAEDAVCCICLTKYGDDDELRELPCTHFFHVQCVDKWLKINAVCPLCKTEIGGVVRSFFGLPFGRRRVDRIAARGVASSRFSV

SEQ ID NO: 39362 - protein, 487 aa, Zea mays
  Clone ID: 700072933_FLI.pep
SGRGFHPQPSHFPPSSQMAVAVPNAPGRLFLLQSTPFPNPSSSASAARAQSFRVPPLRLSLFRRMAGRSLTVIAGASGGSERDLSASAVSVEALDSIASDSDLETKEPSVSTMLTSFENSFDKYGALSTPLYQTATFKQPSATDYGTYDYTRSGNPTRDVLQSLMAKLEKADQAFCFTSGMAALAAVTHLLQAGQEIVAGEDIYGGSDRLLSQVVPRNGIVVKRVDTTKISDVVSAIGPSTRLVWLESPTNPRQQITDIKTISEIAHSHGALVLVDNSIMSPVLSRPIELGADIVMHSATKFIAGHSDLMAGILAVKGESLAKEVGFLQNAEGSGLAPFDCWLCLRGIKTMALRVEKQQANAQKIAEFLASHPRVKQVNYAGLPDHPGRALHYSQAKGAGSVLSFLTGSLALSKHVVETTKYFSVTVSFGSVKSLISLPCFMSHASIPASVREERGLTDDLVRISVGIEDVEDLIADLDRALRTGPV

SEQ ID NO: 39363 - protein, 43 aa, Zea mays
  Clone ID: 700073177_FLI.pep
ENCSMSFCLLLGNTVLFAIIIDQRDVKYCLHCSRSNKVLFGLA

SEQ ID NO: 39364 - protein, 236 aa, Zea mays
  Clone ID: 700074285_FLI.pep
NNGPISFQLQWFQQIATSVCGQSCKSYLGNSLFVFGEFGGNDYNAMIFGGYSIEQARKYVPKIVNTISRGIDKLIGMGATDIVVPGVLPIGCFPIYLTIYQSSNGSDYDSLGCLNSFNDLSTYHNALLQKRVDVIQSRHRKTARIMYADFYSAVYDMVRNPQSYGFSSVFETCCGSGGGKYNYQNSARCGMAGAAACSSPASHLSWDGIHLTEAAYKHITDAWLRGPYCRPPILHN

SEQ ID NO: 39365 - protein, 305 aa, Zea mays
  Clone ID: 700074853_FLI.pep
KLLLTIPRILELAEELSMPLAAVKYSRGTFIFPGAQPAPHRSFSEEVAALNRYFGGLKSGGNAYVIGDPARPGQKWHVFYATEYPEQPMVNLEMCMTGLDKKKACVFFKTNADGNTTCAKEMTKLSGISEIIPEMEICDFDFEPCGYSMNAIHGSAFSTIHVTPEDGFSYASYEVMGLDATALSYGDLVKRVLRCFGPSEFSVAVTIFGGRGHAGTWGKALGAEVYDCNNMVEQELPGGGLLVYQSFCAAEDAVATSPKSVFHCFDGENVESAPPPMKKDYKLANLLCWEEEADAMEEKAGVLDE

SEQ ID NO: 39366 - protein, 542 aa, Zea mays
  Clone ID: 700074907_FLI.pep
VEFGQLIHDFDIYGDEDNPSPASEDPSIWFEIMRFFTNPRKPMILAIARPYAEKNIATLVKAFGECHPLRELANLTLIMGNREAISKMNKISAAVLTSVLTLIDEYDLYGQVAYPKHHKHSEVPDIYRLAARTKGAFINVAYFEQFGVTLIEAAMHGLPVIATKNGAPVEIHQVLENGLLVDPHDQHAIADALYKMLSEKQFWSRCRENGLKNIHQFSWPEHCKNYLSRILTLGPRHPAFACKEDHKVPVKCRKHIFVIAVDSVNKEDLIQIIRNSVEATRSGTMSDLTGFVLSTSLTIAELQSVIVRTGMLPTDFDAFICNSGSDIYYPSQSSDVPSNSRVTFASDHNYRSHIEYRWGGEGLRKYLVKWVSSVVERRGRTEKQVIFEDSEHSSTYCLAFKVINPSHLPPLKELQKLMRIQSLRCHALYNHGATRLSVIPIHASRSQALRYLSICWGIELPDAVVIVGETGDSDYEELFGGLHKTVILKGGFNTPANRIHTVRRYPLQDVVALDSSNIIAIEGFSTGDIRSAMQQQLGIPTR

SEQ ID NO: 39367 - protein, 408 aa, Glycine max
  Clone ID: 700554838_FLI.pep
LSLSLSLSLSLSDRSEAGGSGVGDVRVRVSERCGMLQALMNLFSLCWKPFGRDADRIDSIGVIGREGKDGLLWFRDFGKYGSGDFSMAVVQANQVLEDQSQIESGPLGTFVGIYDGHGGPDASRYVCDHLFRHFQAISAESRGVVTTETIERAFRQTEEGYMALVSGSWNARPHIASAGTCCLVGVIFQQTLFVANAGDSRVVLGKKVGNTGGMAAIQLSTEHNANLEAVRQELKELHPHDPQIVVLKHGVWRVKGIIQVSRSIGDVYLKHAQFNREPLNAKFRLPEPMNMPILSANPTILSHALQPNDSFLIFASDGLWEHLSNEKAVDIVNSNPHAGSAKRLIKAALHEAARKREMRYSDLRKIDKKVRRHFHDDISVIVLFLNHDLISRGTVLDPTLSIRSALDH

SEQ ID NO: 39368 - protein, 145 aa, Glycine max
  Clone ID: 700554943_FLI.pep
FSMWENYVILVWNVGFLVALLYSVFYVSLDLKAGSLAALLCALCWIGSSFVASQLGLSLAWKVVLVVQIVCWTGQFIGHGVFEKRAPALLDNLIQAFVMGPFFVLLEVLQTLFGYEPYPGFNSTVKAKVEANINEWQESKQKLIS

SEQ ID NO: 39369 - protein, 227 aa, Zea mays
  Clone ID: 700075276_FLI.pep
SGTVLVWIQQNVAWSLGFGISSICLVIAAVAFLVGTPLYRVQLPTGSPLKSIVMVFVASYKKRRVAVPADSTLLFEGNDAESSSIVPNKIEHTDEFRCLDKAAVVVEDQEMKDSHRPWLLCTVTQVEEVKILIRMLPIWFTCVFYSAAMSQTATTFVQQGNAMNTKIGSFSVPAASMNSAEVIFMLVWVVFQDSVVIPIARRYTGNPMGLTLLQRMGVGRLLAIPSL

SEQ ID NO: 39370 - protein, 362 aa, Zea mays
  Clone ID: 700075829_FLI.pep
QHPQLQPVGDGMQRRAHLHRPRAGHAPGSPELERAGGFDRDHHPQLLPGEPARHASSQLPVPDGRGCDPAVEPAARGPARQVPAGARGEDAQGLGRPRVPVRVRGGGRAGLLGHLAVQGADGHRRRRAQVQHHDDRAAGAAHVGAAALLLPPGGAQAREQGVEALHPGLQAGVRALLHPRGRARRHRRAAEEPAAVAAPRGGVPHDAAPLRQHVQQLPLVRARLHRGQGPHAPRRPRLADRLRQRVQVQQRRLEVPPQHQDPHQRALGRLHPPLPRRRPGGRQALTYGLRLRLRQRASSAGTAAAAAVLLCTCTSSLFSSLPISFAINIKKVKKERKIHIHSDCWKYCHPSGKGLGDCNLLE

SEQ ID NO: 39371 - protein, 310 aa, Zea mays
  Clone ID: 700077036_FLI.pep
LDVDRIGSHRRCLARRPGDGNGARDLVLTVAPHDGPERVLLGHASLLRREGDRVLLRLLRRAELQRRRLHRDAHAGRAGDAGRVRGPGVAPDVSYDAALRDLVVAGAEHHREGRVVEVAHRARARRTVGHRAVTRQDGDLPGRVAERAEEGDVVVSAGVVHQAWVEGAVGVHVAGPAHERRGRPAGGHVPDDVPGAVDVERGGHQRGLDRGGAPARARLPEHRGDAAHVRARHGRAGYDVELHSPRVAVELRGRVLAGPRGQDVHPGGGHVRLQDLRCEEVWAAAGKGCHSRGRRRPADDGAEKHDGRNG

SEQ ID NO: 39372 - protein, 480 aa, Zea mays
  Clone ID: 700077370_FLI.pep
EIPHRRQTLMYTATWPKEVRRIADDLLVHPVQVTIGSVDSLVANSSITQHVEIITPSEKQRRLEQILRSQDSGSKILIFCTTKRMCDQLARTLTRQFGASAIHGDKSQSEREKVLNQFRSGRSPILVATDVAARGLDIKDIRVVINYDFPTGVEDYVHRIGRTGRAGATGVAYTFFCDQDSKYAADLIKILEGANQRVPRDLEDMASRGGGRGRKRNHWASRPDRGGSRSELDSRYSSRDGLASSGKSESGRGSRGRDDNGSRGRYDPGETDGRSRRSTRGRSRSRSKSDSRSRSPSPKKSRRHEGRRSRTKSRSRSRSRRNHGASHSKSRSPVASRRYEKTASGSARPNSGHAEHKSPPRSHSRDDHVNHSDHKDDHKDDHMEDGKMERVDLDRSPSPHDDKSAPYSPVYNGKASGSMSPNGQPEAGAKFVEPSGKPEPASPVRCSKGRDDDEEGIIDEDGEIGEDDPRANAAVQNGNN

SEQ ID NO: 39373 - protein, 151 aa, Zea mays
  Clone ID: 700082115_FLI.pep
RERIAERMRALQELVPNTNKTDRAAMLDEILDYVKFLRLQVKVLSMSRLGGAGAVAQLVADIPLSVKGEAGDGGGAPQQQQQQHVWEKWSTDGTEKQVAKLMEEDIGAAMQFLQSKALCMMPVSLAMAIYDTQHPLDGHGHSLKPEPNASS

SEQ ID NO: 39374 - protein, 122 aa, Zea mays
  Clone ID: 700083139_FLI.pep
QREAGTTMDVVAAQTKAIAEKISDWTNIVLAYEPVWAIGTGKVATPAQAQEVHDGLRKWLHSNVSPAVAELTRIIYGGSVNGANCKELAAQPDVDGFLVGGASLKPEFVDIIKSATVKSSSA

SEQ ID NO: 39375 - protein, 447 aa, Zea mays
  Clone ID: 700083171_FLI.pep
LGNKIPEFNELVHQNRWREALDRLLETNNFPEFTGRVCPAPCEGSCVLGIIENPVSIKSIECAIIDKGFEEGWMIPRPPLQRTGRKVAIVGSGPSGLAAADQLNKMGHFVTVFERADRIGGLMMYGVPNMKTDKIGVVQRRVNLMAEEGVTFVVNANVGSDPLYSIERLRSENDAVILACGATKPRDLTIPGRELSGVHFAMEFLHANTKSLLDSNLEDGKYISARGKKVVVIGGGDTGTDCIGTSIRHGCTSLVNLELLSKPPSTRAADNPWPQWPRIFRVDYGHQEAATKFGKDPRTYEVLTKRFIGDGNGKVKALEVVRVKWEKVDGRFQLKEMEGSEEIIEADLVLLAMGFLGPEATIAEKLGLEKDNRSNFKAQFGDFATSVDGVFAAGDCRRGQSLVVWAITEGRQAAAAVDKYLSRYDQNAAATGDSTPSGTGLVQPVAA

SEQ ID NO: 39376 - protein, 437 aa, Zea mays
  Clone ID: 700083225_FLI.pep
NTQKRGALLVGWILFSLAASPVKFQTHMGSIGRGTANCATVPQPPPSTGKLITILSIDGGGIRGLIPATIIAYLEAKLQELDGPDARIADYFDVIAGTSTGALLASMLAAPDENNRPLFAAKDLTTFYLENGPKIFPQKKAGLLTPLRNLLGLVRGPKYDGVFLHDKIKSLTHDVRVADTVTNVIVPAFDVKSLQPIIFSTYEAKTDTLKNAHLSDICISTSAAPTYFPAHFFKTEATDGRPPREYHLVDGGVAANNPTMVAMSMLTKEVHRRNPNFNAGSPTEYTNYLIISVGTGSAKQAEKYTAEQCAKWGLIQWLYNGGFTPIIDIFSHASSDMVDIHASILFQALHCEKKYLRIQDDTLTGNASSVDIATKENMESLISIGQELLNKPVARVNIDTGLYESCEGEGTNAQSLADFAKQLSDERKLRKSNLNSN

SEQ ID NO: 39377 - protein, 222 aa, Zea mays
  Clone ID: 700083928_FLI.pep
RPASVKMLICDSCEAGFHLSCCIPCIKELPTDEWYCAPCLCKKPKSLYGKLSEGRINPSRNTNTRPHGMSHIEYMLKDAEPYVTGVRLGRDFQAEVPEWSGPSSSSDVYFDEPCAIDSAELTTFNLCKMSNQSHSSIGNWIQCRETLNPGDSDKQVVCGKWRRAPLYVVQSDNWDCFCCLLWDPVHADCAVPQELKTSEVLKQLKFVNMLKNQLVDQNQKPA

SEQ ID NO: 39378 - protein, 502 aa, Zea mays
  Clone ID: 700084087_FLI.pep
IPDLSGSSNLSIIHLENNQLTGNVPSYFGSLPKLSELYLENNRLSGPIPKALLSRSIIFNYSGNVYLGTAGKQKKKHVIIIISALLGASLLLAAALCCYMLTRKAMNSSSSPQAQEKALPAEQNKLQKYPSTQQLQSIATETAHPYSLCELEEATNKFASRIGSGGFGIVYYGKLSDGKEIAVKVPSNDSYQGKKQFSNEVVLLSRIHHRNLVAFLGYCHEDGRNILVYEFMHNGTLKEQLHRRDKHISWIKRLEIAEDAAKGIEYLHTGCTPSIIHRDIKTSNILLDKHMRAKVSDFGLSKLLAAEGKDSHASTNVRGTMGYLDPQYYVSQQLTEKSDMYSFGIILLELISGCPPISTIAFGDNFRNIGPWAKFYYESGDIEAIIDPSISTAAEYQDVQSVWKIAEAAVRCIDAEPRKRPCMPEVVKEIQDALALERAAAETTTSDRALACPFSPAAASVRSGGTMRSHDMVMDNLLLLDDDDDSTFSGSTVTKLKYPELR

SEQ ID NO: 39379 - protein, 126 aa, Zea mays
  Clone ID: 700085002_FLI.pep
APIFVRQSNFKLPADPSTPIIMIGPGTGLAPFRGFLQERLALKQSGAELGTSILFFGCRNRNMDYIYEDELQTFLEAGALSELIAAFSQEGPTKEYVQHKMVEKVSIKLCIPNKFVAKGVHNYSLR

SEQ ID NO: 39380 - protein, 537 aa, Zea mays
  Clone ID: 700085094_FLI.pep
FGVGFYSAYLVAERVVVTTKHNDDEQYVWESQAGGSFTVTRDTSGEQLGRGTKMTLYLKDDQLEYLEERRLKDLIKKHSEFISYPISLWIEKTTEKEISDDEDEEDKKDEEGKVEDVDEKEEKEKKKKKIKEVSHEWQLVNKQKPIWMRKPEEITKEEYAAFYKSLTNDWEEHLAVKHFSVEGQLEFKAVLFVPKRAPFDLFDTRKKLNNIKLYVRRVFIMDNCEELIPEWLSFVKGIVDSEDLPLNISRETLQQNKILKVIRKNLVKKCIELFFEIAENKEDYNKFYEAFSKNLKLGIHEDSTNRNKIAELLRYHSTKSGDELTSLKDYVTRMKEGQNDIYYITGESKKAVENSPFLEKLKKKGYEVLYMVDAIDEYAIGQLKEFEGKKLVSATKEGLKLDESEDEKKRKEELKEKFEGLCKVIKEVLGDKVEKVVVSDRVVDSPCCLVTGEYGWTANMERIMKAQALRDSSMSGYMSSKKTMEINPDNAIMEELRKRAEADKNDKSVKDLVMLLFETALLTSGFSLDDPNTFGGR

SEQ ID NO: 39381 - protein, 553 aa, Zea mays
  Clone ID: 700085188_FLI.pep
TLTASDTSTHGGFSVLRRHAEECLPQLDMTQNPPWQELVAKDLHGNEWHFRHIFRGQPRRHLLTTGWSVFVSSKRLVAGDAFIFLRGENGELRVGVRRLMRQLNNMPSSVISSHSMHLGVLATASHAISTGTLFSVFYKPRTSRSEFVVSVNKYLEAKNHKMSVGMRFKMRFEGDESPERRFSGTIIGMGCMPANSTSPWANSEWRSLKVQWDEPSAILRPDRVSPWEVEPLDRTNPQPPQPPLRNKRARPPASPSIAPELAPVFGFWKSPAEPAQAFSFSGLQRTQELYHSSPSSMFSSSLNVGFNPKYEGPTPNTNHLYWTMRETRTESYSASINKAPTEKKQESTTSGCRLFGIEIGSSAVSPVVTVASVGHDPPPPALSVDAESDQLSQPSHANKAMDAPAASSDRSPNETESRQARSCTKVIMQGVAVGRAVDLTRLDGYDDLRRKLEEMFDIPGELCASIKKWKVIYTDDEDDMMLVGDDPWSEFCRMVKRIYIYSYEEAKSLTPKAKLPAIGGDTGVKPDPSKLPPESDVPQSDSDNSAPVAADKD

SEQ ID NO: 39382 - protein, 231 aa, Zea mays
  Clone ID: 700085722_FLI.pep
RGPRGLQGGARPGGERRRVRRWRWRCAAAGPGVQEEEGRGDAVQEPDGRAPPPQAPQRPPLHATLRRAQDQQDGPDVDPGRHDRLHEGAAGEDQAAAGRDRAAAGGGARHAQRLPGAQPQRDGGQEHPQVRRGAEGGRRHPGGDLLRRQAGAAAVHGEHAGHARARHPAVRRQLLQRLRHARLLLRDAEGNDQRRRDKAGAVQERWLWRRLLVEGHVIMAWEEEEEEAAIN

SEQ ID NO: 39383 - protein, 399 aa, Zea mays
  Clone ID: 700086369_FLI.pep
GTEVAYYVDGQRKVDGYIKDQRIYCNHCNKVVSPSAFEAHAGEGSRRKPYDNIFTSNGVSLHELAMKISKDMELSERETDDLCRECGQGGDIFPCKICPRSFHPACVGLSKVPSEWYCDNCRNLVQKEKALAENKNAKAAGRQAGVDSIEQIMKRAIRIVPISDDLGGCALCKQKDFNNAVFDERTVILCDQCEKEYHVGCLKNQWQVELKELPEGEWFCCSSCSETRSSLDKIISDGAQLLVEPDLEIIKKKHVTRGLCMDTSKDLKWQLLSGKRTTEDGSILLSAAVPIFHQSFDPIREALTGRDLIPEMVNGRGPKEGMPGQDYSGMYCALLTVGSTVVSAALLRVMGGDVAELPLVATSQDVQGLGYFQALFSCIERMLVSLKIKHFVLPAAHEA

SEQ ID NO: 39384 - protein, 496 aa, Zea mays
  Clone ID: 700086788_FLI.pep
TSSKPPRPIERSVPSRADAETLAPLTPWPPCRSLRRRSSPPSPAAPWLLPPSSASRQTSYASSAPRHDATAATSASRRSSPPRGPTASLLAASAAADVSAIPNAKVAQPSAVVLAERNLLGSDASLAVHAGERLGRRIATDAITTPVVNTSAYWFNNSQELIDFKEGRHASFEYGRYGNPTTEALEKKMSALEKAESTVFVASGMYAAVAMLSALVPAGGHIVTTTDCYRKTRIYMENELPKRGISMTVIRPADMDALQNALDNNNVSLFFTETPTNPFLRCIDIEHVSNMCHSKGALLCIDSTFASPINQKALTLGADLVIHSATKYIAGHNDVIGGCVSGRDELVSKVRIYHHVVGGVLNPNAAYLILRGMKTLHLRVQCQNDTALRMAQFLEEHPKIARVYYPGLPSHPEHHIAKSQMTGFGGVVSFEVAGDFDATRKFIDSVKIPYHAPSFGGCESIIDQPAIMSYWDSKEQRDIYGIKDNLIRFSIGVEDF

SEQ ID NO: 39385 - protein, 361 aa, Zea mays
  Clone ID: 700089087_FLI.pep
PLGPRRRDRAGDHVVVAGPDEPPEPVGARRHPAHREAHRVALLLAGPAEAHVDGSTVTVTGVPAAAALAAPCTSRAADVGYRAGVLRRAAGGRERHGEGRVVERGHRVGAVGAAPLGRVLPGERRDLRRLVVVGAEEVDVVRRGDVVHQPRVDGLGGVDVAGAHVQRRGRPPRGHVQDAVAAGVLVVRRRHQRRPDGCRAPLRVRRAEQRGEPAHVRARHGRAGDDVEADAAAVAGEPRRADGPRPRRQDVHAGRDDVRLQDARRHSVGATGGECRDDGRRLDADLRPGEHDGGRRLRIRHGVVPHGVAGLLPHAGARENVRVGDELLAVGGGVGENHAGAAGVFDDEALLDPGIGAAVAK

SEQ ID NO: 39386 - protein, 118 aa, Zea mays
  Clone ID: 700089369_FLI.pep
QLVLQVLELRVLGHRRLEQVPLSQMQQVFKQQQLHIKEVELLLAFKGHLGFRLARQLPRQALQRQRLPQLPLLLVIRLGHLGRARCLVLRSEALVFRVDIDRTRYINSQHCFMNHLWY

SEQ ID NO: 39387 - protein, 551 aa, Zea mays
  Clone ID: 700089702_FLI.pep
PHGQRREGERGDRHLGPAVPAAASCGGALERRRRVRVHEIVEPDLARVCRRHGRRGRRLRHLAGIPAVKVPRHLPHGGPRRRRRVRAPQPHLHGRGGLREVVRAGEPGVHHLLHLPRRVPLPRPLGQHQLLGRRAGLYGMPPGHHLQHQGTEREHVGSRRGLPRPRQLGSQVPQGAHHARRARVGPALVELGETEVAEPRRHVGVEEHVAGLDVAVEDDALPSLVQVQQRRRDVAEDAVADRPGQARRFEVVAEEVAVQAAVGHVVVDEEKVAAAAAPALELDQVAVAEPADRRDLRHELAEALPGLVVHALHGHGLAGFPEHAAVHLAETAGSEHLALAEPARRAAEFGVLEPMRAVVQLPRLDDVAVLVPVRTVRAGAGEHDERHERRERDGEDERGPVLGALELGQRRQGREIQRRRGAGAEAKAPTPEVVRAREDSRGRREADVHLLAEDPREVDAEGDERRGGLPQRAVGDGDVKQPGGAVVVDPGGGVPGLEVQRVGLGGRVGDEAVEVDADVVAVDVVELEVLHGVELDGEEVVGGVADVGGAE

SEQ ID NO: 39388 - protein, 387 aa, Zea mays
  Clone ID: 700089781_FLI.pep
LSYRSMAFKGLPRDSRGSLEVFNPDAPVSDRATTSPFLLPPAVASHPSLLAAGDGGDADVGRATQRAAEWGLVLQTDEHTGRPQGVVARPSGSNRTSESGNSIDERAAAAGAGRALPRVSEELRAALSAFQQTFVVSDATRPDHPILYASAGFFNMTGYSSNEVVGRNCRFLQGSGTDPVEISKIRQALAAGSNYCGRILNYKKDGTPFWNLLTVAPIKDEDGRVLKFIGMQVEVSKYTEGNKDTALRPNGLPESLIKYDARQKDHARSSVSELLLALKDPRSLSESRNNTLKRKSQESAGSALVPGKRSSETGSRRNSHSGIRNSLQKISEVPEGGNKTRKSGLRSFMGLIGMGHGNVEKNILKPREDPLLDSDDERPDSFDDDFR

SEQ ID NO: 39389 - protein, 551 aa, Zea mays
  Clone ID: 700090136_FLI.pep
QRVFNIYINNQTAVKGADVNAWAAVSGATTLIGTPVYQDYVVSTSGLGAMDLWVALHPNPDSKPQIYDAILNGMEVFKLQLTNGSLAGLNPVPSVALVPDGTTKKKSSVGPIVGGVVGGLVVLALGYCCFVICKRRRNAGKDAGMSDGHSGWLPLSLYGNSHTSSSAKSHTTGSYASSLPSNLCRHFSFAEIKAATNNFDESLILGVGGFGKVYRGEVDGGTTKVAIKRGNPLSEQGVHEFQTEIEMLSKLRHRHLVSLIGYCEEKNEMILVYDYMAHGTLREHLYKTQKPPLTWRQRLDICIGAARGLHYLHTGAKHTIIHRDVKTTNILLDEKWVAKVSDFGLSKTGPSMDHTHVSTVVKGSFGYLDPEYFRRQQLTEKSDVYSFGVVLFEVLCARPALNPTLAKEEVSLAEWALHCQKKGILDQIVDPYLKGKIAPQCFKKFAETAEKCVSDQGIDRPSMGDVLWNLEFALQMQEGAEESGSLGCGMSDEGAPLMVGKKDPNDPSIESSTTTTTTTSISMGDQSVASIDSDGLTPSAVFSQIMNPKGR

SEQ ID NO: 39390 - protein, 279 aa, Zea mays
  Clone ID: 700090183_FLI.pep
EIAFCAITADEQVKGYGTRLMNHLKQHARDADGLTHFLTYADNNAVGYFVKQGFTKEITLDKERWQGYIKDYDGGILMECKIDPKLPYVDVATMIRRQRQAIDEKIRELSNCHIVYSGIDFQKKEAGIPRRLIKPEDIPGLREAGWTPDQLGHSKSRSSFSPDYNTYRQQLTTLMQTALKNLNEHPDAWPFKEPVDSRDVPDYYDIIKDPIDLRTMLRRVDSEQYYVTLEMFVADMKRMFSNARTYNSPDTIYYKCATRLENFFSGRITVLLAQLSTKS

SEQ ID NO: 39391 - protein, 295 aa, Zea mays
  Clone ID: 700093042_FLI.pep
ARPEASHLHAAAAGSRQASLVRQAPHRHPMALLLLRGCAAPPAVHAAPAGSRLLPPALPRRRLVAVASSASSAPSGEVASSSQDGRGYGIVGGPNGHAIAPATDTKSTAVETTVERVIFDFRFLALLAVAGSLAGSVLCFLNGCVFIKEAYQVYWSSCVKGVHTGQMVLKVVEAIDVYLAGTVMLIFGMGLYGLFISNAPAGVPPESDRALSGSSLFGMFALKERPKWMNITSLDELKTKVGHVIVMILLVKMFEKSKMVTIATGLDLLSYSICIFLSSASLYILHNLHKGDHEE

SEQ ID NO: 39392 - protein, 67 aa, Zea mays
  Clone ID: 700093477_FLI.pep
PSRERYFCLPIVGRPQWPLVADHLCCLSMLRINVNGAPGRWIHAGFGHVVFLCLTYLLPSCNEFTKF

SEQ ID NO: 39393 - protein, 441 aa, Zea mays
  Clone ID: 700093810_FLI.pep
MGRTSIIQTRDTTNTNSARRQTTYTVHVPTGWARTRRLQEHRQQKNFLPPHHARTSYCVTNRQVLYLSTMFRCLSSCLDPVIDTDRRSGRVERTTCTHTRARAIVGRARNNRALLHGALGGEALLVALGVGAVVVDHVLALHPAHPLLQGEVQLLVVPVPGAGGGGGGAGALGADGGAAAGPAARDGDASVGLEPAVGGGEGGVGPVRLDAPALRRPVVRVPQAGVEPHRLALGERHPLALQVAEVPDGHVVHHEDDVLGVPEDGVGVEVGGGVEPEAELLLPLPLPPREHVGVQRVGLAGHVAQELEVDLVVRAALRRQVVGGDGAGGVARHQPQLHVDLAEQVLVPGLEPGAGRAVQRQRQQPPVVKDLAPPVAPRDVQLLVQAARREGAGHQHAQAQQQQGHPTRRRRHDRCNQPPRETDTYRHSTLMIEQVATRCST

SEQ ID NO: 39394 - protein, 264 aa, Zea mays
  Clone ID: 700094395_FLI.pep
AGEGDQGRPGSREAHLQPCHWPPRPSGAYRATKIFVIEGLHPMFDERVRDLLDFSIYLDISDEVKFAWKIQRDMAERGHSLESIKASIEARKPDFDAFIDPQKQYADAVIEVLPTQLIPDDNEGKVLRVKLIMKEGVKNFNPVYLFDEGSTISWVPCGRKLTCSYPGIKFSYGPDTYFGNEVSVLEMDGQFDRLDELIYVESHLSNLSTKFYGEVTQQMLKHADFPGSNNGTGLFQTIIGLKIRDLYEQIVAERAGVPAEAAKV

SEQ ID NO: 39395 - protein, 380 aa, Zea mays
  Clone ID: 700094666_FLI.pep
SQVRAGEVEVEEEQRNPFQECLMAGGKEAHGWAARDVSGHLSPYHFSRRVQRDDDVTIKVLFCGLCHTDLHVIKNEFGNAKYPVVPGHEIVGVVTDVGSGVTSFKPGDTVGVGYFVDSCRSCDSCSKGYESYCPQLVETSNGVSLDDDDGGATTKGGFSDALVVHQRYVVRVPASLPPAGAAPLLCAGVTVFSPMVQYGLNAPGKHLGVVGLGGLGHLAVRFGKAFGMKVTVISTSLGKRDEALGRLGADAFLVSRDPEQMRAAAGTLDGVIDTVSADHPVVPLLDLLKPMGQMVVVGLPTKPLQVPAFSLVAGGKRVAGSAGGGVGECQAMLDFAGEHGITADVEVVGMDYVNTAIQRLERNDVRYRFVVDVAGSKIGG

SEQ ID NO: 39396 - protein, 57 aa, Zea mays
  Clone ID: 700094901_FLI.pep
LLKTCMVRYCRHNTVTFLHKTHQPSPAQKANTAASSPSTPSPRAPKPSPSSLAPRRA

SEQ ID NO: 39397 - protein, 499 aa, Zea mays
  Clone ID: 700095474_FLI.pep
GSEAVAAAGRAPISSRGSGPDYPNPFPHQIRHGGAARSLPTMALTTASTVSSPSRIIRRFSSSQDSRPPSSLLHLAPRRGTGNSPRACSWHRLVVRRMGWAARALLGGLSDAGASESDEEEEHALRVGQREGEIDDAVELSATAVGPERWDVLGLGQAMVDFSGMVDDEFLDRLGIEKGTRKVINHEERGRVLRAMDGCSYKAAAGGSLSNSLVALARLGSSQSAGYPELNIVMGGSVGSDPLGSFYRAKLRRANVHFLSKPVKDGTTGTVIVLTTPDAQRTMLAYQGTSSTLSYDSDLASLVSKSNVLIVEGYLFELPHTIEAIKQACEDAHKNGAIIAVTASDVSCIKRCYNDFRDIVRNYADILFANANEARALCELPSTDSPMSATRYLSHSVPLVSVTDGMHGSYIGVKGEAIYIPPPQCVAVDTCGAGDAYASGILYGVLRGASDLKGIGLLASRVAAVVVGQQGTRLRVQDADRLAGSFEHHLDSLEFCSDV

SEQ ID NO: 39398 - protein, 279 aa, Zea mays
  Clone ID: 700096638_FLI.pep
ERGAQMATPSSSLCSSFASLRTASIGHPRGIASSTPRKAFHVRASARVDKFSKSDIIVSPSILSANFAKLGDQVKAVEVAGCDWIHVDVMDGRFVPNITIGPLVVDALRPVTDLPLDVHLMIVEPEQRVPDFIKAGADIVSVHCEQTSTIHLHRTVNQIKSLGAKAGVVLNPATPLTAIDYVLDVVDLVLIMSVNPGFGGQSFIESQVKKIAELRRLCAEKGVNPWIEVDGGVGPKNAYKVIEAGANAIVAGSAVFGAPDYAEAIKGIKTSQRPLAVAA

SEQ ID NO: 39399 - protein, 815 aa, Zea mays
  Clone ID: 700096660_FLI.pep
GFPPPPDPSQMPPATAMAPPSQPPSNSGDPLYPELWRACAGPLVTVPRVGDLVFYFPQGHIEQVEASMNQVAGNQMRLYDLPPKLLCRVLNVELKAETDTDEVYAQIMLMPEPEQTDVPAEKPSSAPAASPRPAVRSFCKTLTASDTSTHGGFSVLRRHADECLPPLDMTQSPPTQELVAKDLHGMEWRFRHIFRGQPRRHLLQSGWSVFVSSKRLVAGDAFIFLRGENGELRVGVRRAMRQLSNVPSSVISSQSMHLGVLATAWHAINTKSMFTVYYKPRTSPSEFIIPYDQYMESVKNNYSIGMRFRMRFEGEEAPEQRFTGTIVGCENLDPLWPDSSWRYLKVRWDEPSTIPRPDRVSPWKIEPASSPPVNPLVHSSRAKRPRQNVPPPSLESSVLTKEGATKVEIDSAQTQHQNSVLQGQEQMTLRNNLTESADSDSTVQKPMMWSPSLNGKAHTHFQQRPAMDNWMPLGRRENDFKDTRSAFKDARTASQSFGDTQGFFVQAYDDNHHRLSFKNQGSTHRFADPYFYMPQQSSVTVESSTRTQTANNDLCFWGDQNAMYGNPSDQQQGFNFGQNPSSWLNQPFPQVEQPRVVRPHATVAPFDLEKTREGSGFKIFGFQVDTTSPSPVQLSSPLPAIQEHVLQTRPSAPVNELQPVQIECLPEGSVSTAGTATENIQQAPQSSKDIQSKSQGASTRSCTKVHKQGVALGRSVDLSKFTDYGELQAELDKMFDFEGELVSGSQNWQIVYTDDEGDMMLVGDDPWEEFCSIVRKIYIYTKEEVQKMNSKSAAPRKEESPAAGGGGGCAAATNE

SEQ ID NO: 39400 - protein, 326 aa, Zea mays
  Clone ID: 700096765_FLI.pep
LATARAVLEHDERIGHVVLHLLQVGRDGELDHRRWSAGKGQRVVPTFRNVLPQDGLRDEPNAVLPPLLRALYLVDDVPHLEPVRVLGRPPVELVAEEDVVLRPVGVHEVHLRVVLRLLAQHRLDDLVHGRDPTSAADHGEAARMALLAVDDEAAAAGVLHVAKRALDVDVGADGKRVEVLGHEAAVGELGVLVLEVDLDEEVEVADLVHHARGRVRPHTQLPFNTGADEDVLADGEAEHLVGRRQREAEEADVAGQLLLADEAAVDLFARVGERGSPDGLADGREVRQDGAAVDGVVGAVAGARGDELADAVGVEERLGLVGVDGV

SEQ ID NO: 39401 - protein, 694 aa, Zea mays
  Clone ID: 700097217_FLI.pep
PTAMDAAQRRVGTHLQRPPPPAGGYGLTVNPTAAEYVHAQGYSVLLPEKLQTGRWNVYRSARSPLRLISRYPDTPDIGTLHDNFTYAVETFTDCKYLGTRIRADGTIGDYKWMTYGEASTSRTAVGSGLIYHGVREGACIGLYFVNRPEWIIVDHACSAYSYVSVPLYDTLGPDAVQFIVNHAAVEVIFCVPQTLSTLLSFIVQMPCVRLIVVVGGDDANLPSTPVTTGVQIITYSRLLIQGKASPQPFCLPKPEDVATICYTSGTTGTPKGAVLSHGNLIANVAGSSLNIKFYPSDVYISYLPLAHIYERVNQIAALHCGVAIGFYQGDNLKLMDDLAALRPTIFASVPRLYNRIYTAITNAVKESGGLKEKLFHTAYNAKRQAILKGKNPSPVWDKLVFNKIKARLGGRVRLMSSGASPLSADVMEFLRICFGGEVLEGYGMTETSCIISAMDFGDRSIGHVGSPTASCEVKLVDVPEMNYTSDDQPYPRGEICVRGPIIFQGYYKDEVQTKEVIDEDGWLHTGDIGQWLPGGRLKIIDRKKNIFKLAQGEYIAPEKIENVYAKCKFIAQCFIYGDSFNSSLVGIVAVEPEVMKAWAASEGIQCEDLRQLCADPRARAAVLADMDSVGKEAQLRGFEFAKAVRLVAEPFTVENGLLTPTFKVKRQQAKTYFAKEISDMYAELREAEAPRSKL

SEQ ID NO: 39402 - protein, 85 aa, Zea mays
  Clone ID: 700097261_FLI.pep
HLRQPVEVKRCIVIALCNSSPSTGLWDSPRNDSLSVKFTRFGEVVRIYRPNVSIGFQLLVNSRVETNIQVLHSIINIEVHICFLF

SEQ ID NO: 39403 - protein, 480 aa, Zea mays
  Clone ID: 700097375_FLI.pep
HTSLWANNLYIILYGKNPRARAVRSVVERTVASCFVHLALVGLGVVLAEVLQRVAAAGRRRAGPLGRHQVRQINHALAVPPLVVVPGDDLDHVVAHDHAERRVDGAGHVGAPEVDGHERHVADIQDALQRAGGGLAERRVHVVGRDASLHGVDHQVHHGHVRGRHPQRDAVQLPLQLRQHQRHGLGGARARRHDVQRRRAGPPEVAVGRVQQPLVAGVRVRRRHGPLDNSELLVQDLDEWREAVGRAGRVADDVRDAVVVVALVDADDIGRDVGALGGSRDDHLLRAGLDVLAGAGAVDEDSGALDDDVNAELTPWELERVPAGDDRDGLAVDADGSVVHDLDVGLEGAEHRVVLEEVGRVPDASAVVHDDDVDRRVLAAVPAPEEVPADAAEAVDRHLQLRLCGRPHGVLPGGLGDELRAKDVGEGRLPRGSAHGARPRPEPGEVGEVQPLHAVPGRRRREAARAAWVAIAQRRCRVGS

SEQ ID NO: 39404 - protein, 147 aa, Zea mays
  Clone ID: 700098056_FLI.pep
RGALGGPRRRDARQDMLPGHRGARVADSHGLRPQEHKMELPQRGILASAAVAAHRGMHQDREAEDRSARDRPSRGEAREGRLARVLRRQAGSLHRQAGEEAPDVVHRGVPSGQDDGGGSVPPRHDLPGGGEADQAGAQEVGLLDRVR

SEQ ID NO: 39405 - protein, 498 aa, Zea mays
  Clone ID: 700099019_FLI.pep
DMVGNNTVASLFYYSLLIICAAAWHADASQADRLREFIRSRRNSPSEADKGTFEVANMGHSVASSLLSTSYSDSEQSALKAADKITALPGQPDGGVDFDQYAGYVTVDEKNGRALFYYLVEAPQDASAKPLLLWLNGGPGCSSLGYGAMQELGPFRVNSDNKTLSRNKAAWNNVANVIFLESPAGVGFSYSNTSSDYGLSGDRRTAADAYLFLANWLERFPEYKSRPFYISGESYAGHYVPELAATILTQNSYNSKTAINLRGILVGNPLLDSYMNLKGAVAYYWSHGLMSDEVFDNITRHCKYDSSDGVACSGALEAVDPGQIDPYNVYAPICVDAANGAYYPTGYLPGYDPCSDYYTYSYLNDPAVQNAFHARTTSWSACANLNWTDAPISMVPTVAWLIEKKLPVWIFSGDFDSVCPLPATRFSIHDLNLHVTTPWRPWTVNMEVGGYVQQYQGGFTFASVRGAGHMVPSSQADRALVLLDSFLKGVLPPYVQEQ

SEQ ID NO: 39406 - protein, 74 aa, Zea mays
  Clone ID: 700100660_FLI.pep
NPMETFGRYIRTTSPKRVNFTESESFRGESQSPVEGEELQSAITMQRFTSTGWRRCQRGRRPSASSPTRCRTRR

SEQ ID NO: 39407 - protein, 217 aa, Zea mays
  Clone ID: 700101110_FLI.pep
ASGASGRRRSATRSPARGSGLAPSTPLARPPRPTCPPPGASPTRSGAAAGCPWPRPQQTLRQAAAPRRLPPRRPPRPLHSRTRRRRPCLNRARKRGTRSPQRRRPPGRRPTQRSCRRTQSSTRTFCAACSCPTSTRWTSAPGWTLWISPMRTSAWTTNMTSCSGTSGTRRWRSTSTSTTSTTSSRRCPAATSAAAWTTSCKPLISACELKGSVPLIC

SEQ ID NO: 39408 - protein, 144 aa, Zea mays
  Clone ID: 700101218_FLI.pep
IKDPQKVKTVDEMRERLRMRGLRCHIMYCRNSTRLQVVPLLASRSQALRYLSVRWGVSVGNMYLITGEHGDTDLEEMLSGLHKTVIVRGVTEKGSEALVRSPGSYKRDDVVPSETPLAAYTTGELKADEIMRALKQVSKTSSGM

SEQ ID NO: 39409 - protein, 348 aa, Zea mays
  Clone ID: 700101589_FLI.pep
TVAMSTGRTEEAAGSAETACVTGAGGYIASWLVKLLLSRGYTVHGTVRDLSDNKTAHLKRLENASENLKLFKADVLDYDAMAGAVAGCQGVFHVATPVPSGKITDPEREMLGPAVTGTINALKAASAANARRVVVVSSMVAVEINPKDWPRDKIKDENCWSDKEFCRNEENWYSVAKISSEEAALEYAKQTGLDVVTVNPAVVFGPLLQPTLNTSCQFLVYFLKGGPDRMRDKLWHIVDVRDTADALLLVYETPQASGRHICAPHFISARDLLELLKTMYPDDYPFISKESIYDMEHPAPMTSDKLKKLGWKVRPLKETIAETVEFCQHAGFLEDVEGFRFPPLYNII

SEQ ID NO: 39410 - protein, 472 aa, Zea mays
  Clone ID: 700101596_FLI.pep
HTSLWANNLYIILYGKNPRARAVRFVVERTLASCFVHLALVGLGVVLAEVLQRVAAAGRRGAGPLGRHQVRQINHALAVPPLVVVPGDDLDHVVAHDHAERRVDGAGHVGAPEVDGHERHVADIQDALQRAGGGLAERRVHVVGRDASLHGVDHQVHHGHVRGRHPQRDAVQLPLELRQHQRHGLGGARARRHDVQRRRAGPPEVAVGRVQQPLVAGVRVRRRHGPLHDSELLVQDLDEWREAVGRAGRVADDVGDAVVVVALVDADDIGRDVGALGGSRDDHLLRAGLDVLAGAGAVDEDSGALDDDVNAELTPWELERVPAGDDRDGLAVDADGRVVHDLDVGLEGAEHRVVLEEVGRVPDASAVVHDDDVDRRVLAAVPAPEEVPADAAEAVDRHLQLRLGGRPHGVLPGGLGDELRAKDVGEGRLPRGSAHGARPRPEPGEVGEVQPLHAVPGRRRRPAVQPGAGGDA

SEQ ID NO: 39411 - protein, 229 aa, Zea mays
  Clone ID: 700101811_FLI.pep
HGVAMNALVVTALVDMYCKCGSVDDARQVFDAARSQGLAKLSSWNSMMQGLAVHGQWREAVALFSELKSYGLSPDNVTFIAVLTAYGHSGMPDEAQAAFASMSSEHGVEPGIEHYGCLVDALARAGRLREAEDAIRAMPMAPDAAIWGALLSGCRLHGDAELGARAAREAVRCDPRDSGAYVLAASVLARGGDPGRGAGIRGRMREAGVGKVPGSSMIEVNGVVHEFVS

SEQ ID NO: 39412 - protein, 377 aa, Zea mays
  Clone ID: 700102195_FLI.pep
QTPPPRFDLLLQLKSVRFCSSFQMAAAAEHGNCDAWAARDPSGVLSPYKFNRRAVQSSDVSLKIIYCGVCYGDVMWIQNKHNDSVYPLVPGHEIAGVVTEVGADVKAFKVGDHAGVGTYVNSCRHCENCNSSLENYCPETVFTYNTTDADGTITKGGYSTHIVVHERYCFKIPDGYPLAQAAPLLCAGITVYTPMARHNMKQPGKSLGVIGLGGLGHMAVKFGKAFGLKVTVFSTSESKREEAINLLGADNFVISSDTQQMEALKNSLHFIVDTASGDHPFDPYLSLLKVGGVMTIVCFPSEIKMHPASLNRGGRTLSGSIVGGTKDIQEMVNFCAENKIYPEIEIIKMDYINEALARLVNRDVKYRFVIDIKNSFE

SEQ ID NO: 39413 - protein, 394 aa, Zea mays
  Clone ID: 700103191_FLI.pep
AAVSASERAHRQLILSPLSLTHTHPSSHPCDGRSEGLPTMVSAVLRTILVTGGAGYIGSHTVLQLLQQGFRVVVVDNLDNASEAALARVAELAGHDGANLVFHKVDLRDRHALVDIFSSHRFEAVIHFAGLKAVGESVHKPLLYYDNNLVGTITLLEVMAANGCKKLVFSSSATVYGWPKEVPCTEEFPLCATNPYGRTKLVIEDICRDVHRSDPDWKIILLRYFNPVGAHPSGYIGEDPCGVPNNLMPYVQQVAVGRLPHLTVYGTDYSTKDGTGVRDYIHVVDLADGHIAALRKLYEDSDKIGCEVYNLGTGKGTSVLEMVAVFEKASGKKIPLVFAGRRPGDAEIVYAATAKAEKELKWKAKYGIEEMCRDLWNWASKNPYGYAGSRDNSK

SEQ ID NO: 39414 - protein, 322 aa, Zea mays
  Clone ID: 700104736_FLI.pep
DGGRGGEDGGEAAAHLVHVHPLLDGLLPDDHLLGGAGHAHGPPPPPGLRRRRRRLRRPGRLLLRLPIPLHPALHLAQRAPPRAAGRPPHGPPAGAHLAAARRGRARALRRRHGRLRARREEAARRGQRAGPRRRQRLLARPAVLPRRRRRGLRLRGPAGVLHPRGARADEVHEHRPLPRHALHGLLPQQLPRLRRRRRHRGRVDPEQPRPRQARPLLLDAGPARRRQLRRLRRLRQAAPVQGHQLAGVGGARRHRAQGDGRLRRSHGGRGRSGRVGRACQAHTSSVGGLCCLILPLGSVYVYGEVFFLLPVSSLLLLRPALL

SEQ ID NO: 39415 - protein, 260 aa, Zea mays
  Clone ID: 700104832_FLI.pep
VKRKRKNQFRGIRRRPWGKWAAEIRDPRKGVRVWLGTFNSPEEAARAYDAEARRIRGKKAKVNFPDEVPTAVSQKRRAAGPASLKAPKMDVEEEKPIIKLAVNNMTNSNAYHYPAVVGHNIIPEPFMQTQNMPFAPLVNYAALVNLSSDQGSNSFGCSDFSLENDSRTPDITSVPAPVATLAAVGESVFVQNTAGHAVASPATGNTGVDLAELEPYMNFLMDGGSDDSISTLLSCDGSQDVVSNMDLWSFEDMPMSAGFY

SEQ ID NO: 39416 - protein, 232 aa, Zea mays
  Clone ID: 700105307_FLI.pep
QFGLPLSSLIPGDPAAQVLPAMKNLESALRSAGVAGVPVTTAVATSVLGASYPPSQGAFSEAATTVMAPLVSYLSSRGAPLLVNVYPYFAYSGSGGQVALGYALLSGAGAGAASTVTDGGAVYTNMFDAIVDATHAAVEKAGVQGLELVVSETGWPSAGGEGASVENAAAYNNNVVRHVDGGTPRRPGKALETYLFAMFNENGKAEGVEQHFGLFQPDMSEVYHVDFTAGSP

SEQ ID NO: 39417 - protein, 313 aa, Zea mays
  Clone ID: 700105312_FLI.pep
KTLPATMACTHVGRWQGTATQKKKEQRHTRTHTYGSINTTKNQQRRAIDGTIWTDTCTGFIFFHVFPPLPPLLLGVLLLDVDGQRLAVPLLEALEHGVHELALADADEHLVALLAGGLEPLAGQEHAAELLAHEAVQRERPAVRDPVRHGGGALGDRHAGGLHLLGQHRAELLLEPGDLGEHGGLPLRVAAAEGVVHQHGAQLLHQRQAGAGRVLRVREHGLAVDGADQLLLAEAGAGELARGVHGQHLLGHLGHGVLHRRLDVLLEVAQVHGLAQRHDVGGRHELQDVDRLGGLPGRDEAQGVHVLVVLLRA

SEQ ID NO: 39418 - protein, 233 aa, Glycine max
  Clone ID: 700555327_FLI.pep
EESYIKTLVLNGKTYDLYVHSYLHFGKEASRAEMLKVTGDSANPCILAGYNGTYTYSGVKYKALASTSGSNFDKCREVALKALKVNEPCPHQNCTFGGIWNGGGGSGQKVLYVTTSFYYLVIQAGIADASKTSSKVYPAEFKAAAKRACQVKFEDAQSTYPLMMEDALPYICMDITYQYTLLVDGFGLDPWKEIIVANEIEYQGALVEGAWPLGSAIEAISSLPKFNKLMYFI

SEQ ID NO: 39419 - protein, 168 aa, Zea mays
  Clone ID: 700106448_FLI.pep
EDGRVLKFIGMQVEVSKYTEGNKDTALRPNGLPESLIKYDARQKDHARSSVSELLLALKDPRSLSESRNNTLKRKSQESAGSALVPGKRSSETGSRRNSHSGIRNSLQKISEVPEGGNKTRKSGLRSFMGLIGMGHGNVEKNILKPREDPLLDSDDERPDSFDDDFRK

SEQ ID NO: 39420 - protein, 120 aa, Zea mays
  Clone ID: 700106944_FLI.pep
GKMDAEAARRKQVAPPQEKRKRGRLELRRIQDRTSRQVRFSKRRSGLFKKAHELSVLCDAEVAMVVFSPAGRLYHYASLGTSIEKTFCRYWDLANTDIDLNIEARDSRDNYNTQVKHINS

SEQ ID NO: 39421 - protein, 620 aa, Zea mays
  Clone ID: 700149672_FLI.pep
FVEFYGVGVGELSLPARATIANMSPEYGATMGLFPVDQVALDYLKLTGRSDETVSMIEAYLRANKMFVDKHEPETERVFSSYLELDLSEVEPCVSGPKRPHDRVPLKEMKSDWHACLDNEVGFKGYAVPKEQQGKVVKFDFHGRPAEIKHGSVVLAAICSSTNTSNPSVMIGAGLVAKKACELGLEVKPWVKTSLTPGSVVATEYLKHSGLQDYLNQQGFHVAAHGCATCVGNSGDLDGSVSAAITENDIVAAAVLSANRNFEGRVNPLTRANYLASPPLVVAYALAGTVDIGFEEEPIGVGKGGKEIFLRDIWPSNQEIDEVVESSVQTHLFKKVYDSIMERNPRWNQLPVPKEALYPWDDRSTYIRKPTYLEGMSMTPPGPPTVTEAYCLLNLGDSITTDHISYSGKIPEGTPAAKYLLEYGVEPKNFSSYGGRRGNNEVVMRGAFANMRIVNKLLNGEAGPWTIHVPTGEKLYVYDAAMKYKSEGHDMVIIAGSEYGSGSSRDSAAKGPMLLGVKSVIAKSFERIHRSNLVGMGIIPLCFQAGEDADSLGLTGRERYTIHLPTSTAEISPGQDVTVTTHDGRSFTCTLRLDTQLEVTYFNHGGILPYMVRNLAAQMK

SEQ ID NO: 39422 - protein, 376 aa, Zea mays
  Clone ID: 700149766_FLI.pep
ETQMGDGAPPPGALYSFGTPWPELNQGLTYTDTFRCADADAATTLIEFYSTNHKSSAPLPGWIKRIRNGQITVDGEVVTDPDMTLEPFAPYLLEVLYEDDDMVALNKPSGLQVLPKGLFQQRTVLAQLQLKDWKMASSCRFKRKDVQSHPVPVHRLGRGTSGLLLCAKTKVAKVRLASYFAEGAINAAKKRDKSEFSEERKISKFYRALVTGILDDDEVVVTQPIGLVHYPGVAEGLYAACSSGKPAMSKVCVLERLAHQNHTLVQVEIHSGRPHQIRIHLAYIGHPLVDDPLYGIGGHPNFVEPESTGTDSSFASDGGYERPLQPVPGDCGYHLHAHWLVLCHPTTNKMVKITAPLPQILQTREERRAAAEQTGG

SEQ ID NO: 39423 - protein, 604 aa, Zea mays
  Clone ID: 700150816_FLI.pep
HRLRRHLPPPHQGRARAPGRAAQASQRRNLRHRQRRAHAAVGGHPRGDAGAHQHPPPGLLRHPLRDPRGHHEAAQHRCQPLPAAPGHHHRVGRPGPALLHRRPHHGPPQRAGRHRRRKEGGRRRGVQDRRHRGRLLQAQPQGGPRHRQRHVRGLRARGHRDVRRQRPGRPVGGPVRRLLRGHERQARVHGPPDPQAEAPPGVHRGRGHHGAHPGWQLLHEAGQEGERAGPAAEAQAGQVRAPHVAAVAGPPDRGHPRRHQVHRARGQLRERQPGHRRPPRQGAARRQLPGHPHRRVHGQRPPRHRQHRQAHVRAVLRARQRVLQQRAHLQPGRQPQPQPGLRLQGHRDRHGLLLLRAPVPGQPHHQPRAERGAAQPGRELPGPRLGQEDRRGDRHPEAHVVHLHRGAVPGRGPAPPRGEHQGVGEEHRDPGGQEGADHEPLGRALQRPLQREGADQRHRPRGRVHVRGGRGQRQPAADAEAARRAGGPRPQQRRRGAGALRVLKITRFEEELRAVLPQEVEAARVAVAEGTAPVANRIADSRSFPLYRFVREELGCVFLTGERLKSPGEECNKVFVGISQGKLVDPMLECLKEWDGKPLPINIK

SEQ ID NO: 39424 - protein, 338 aa, Zea mays
  Clone ID: 700150887_FLI.pep
QYYLKTGTCKFGATCKFHHPREKAAMATRVQLNELGYPLRLNEKECAYYLRTGQCKFGSTCKFHHPQPSTMMVAVRGSVYSPGQSATSPGHHAYQGAVTSWPLSRSASFIASPRWPGHSSYAQVIVPPGLVQVPGWSPYAAQIGSSSSDDQQRTPGAAQYYTGSRQSGTPGIGDRGMFSSYQAGSVPVGLYAVQTENVFPERPDQPECQFYMKTGDCKFGSVCKFHHPRERIIPTPNCALSPLGLPLRPGEPICSFYNRYGMCKFGPNCKFHHPMGNPMYGHASSPTSEAQTSRRMLAHVPSHPEVSPDSGSGRSRRIVHSDSQQIPSVERITEREAS

SEQ ID NO: 39425 - protein, 341 aa, Zea mays
  Clone ID: 700151433_FLI.pep
AAVAATWGPMTDGARVETAPRLAQWRVDPLPCYTYRKSLPFLIGLWNWCISVERNNKQTCVKLFAENTSSLKNGSSAPIASFIAKLIVSLPPNQQTIVHPGIFDKQLKYDGFVWTIDSTVTGRFVIEIEFLDLKVADPSGGEPASIWASRQVKQCSDSTALSSLARMLHEDVLTDITINAADGSVGAHRAVLATRSPVFRSMFSHDLREKELSTVDITDMSLDACRAFLSYIYGDVRGGEEFLANRLALLRAADKYDIGDLREACHESLLEDIDARNVLERLQTAHLYRLPRLKGGCLRFLVDFRKVYEMHDDDLNAFLQTADRELVAEVFHGVLAAWSGR

SEQ ID NO: 39426 - protein, 608 aa, Zea mays
  Clone ID: 700151670_FLI.pep
QAAAGDARREPQSEQATMCSILAVLGVAEVSLAKRSRIIELSRRLRHRGPDWSGLHCHEDCYLAHQRLAIIDPTSGDQPLYNEDKTVVVTVNGEIYNHEELKAKLKTHEFQTGSDCEVIAHLYEEYGEEFVDMLDGMFSFVLLDTRDKSFIAARDAIGICPLYMGWGLDGSVWFSSEMKALSDDCERFITFPPGHLYSSKTGGLRRWYNPPWFSETVPSTPYNALFLREMFEKAVIKRLMTDVPFGVLLSGGLDSSLVASVASRHLNETKVDRQWGNKLHTFCIGLKGSPDLKAAREVADYLSTVHHEFHFTVQEGIDALEEVIYHIETYDVTTIRASTPMFLMSRKIKSLGVKMVISGEGSDEIFGGYLYFHKAPNKKEFHEETCRKIKALHLYDCLRANKATSAWGVEARVPFLDKSFISVAMDIDPEWKMIKRDLGRIEKWVIRNAFDDEERPYLPKHILYRQKEQFSDGVGYSWIDGLKDHASQHVSDSMMMNAGFVYPENTPTTKEGYYYRMIFEKFFPKPAARSTVPGGPSVACSTAKAVEWDASWSKNLDPSGRAALGVHDAAYEDTAGKTPASADPVSDKGLRPAIGESLGTPVASATAV

SEQ ID NO: 39427 - protein, 372 aa, Zea mays
  Clone ID: 700151920_FLI.pep
GEFGERPVRKESTQSSVHMAAESENGNCKAWAARDPSGVLSPHSFNRRAVQSGDVSLKIIYCGVCYADVAWTRNKLNDSKYPLVPGHEIAGVVTQVGADVKGFKVGDHVGVGTYVNSCRDCENCNISLDNHCPKAVYTFNGIDTDGTVTKGGYSTHIVVHERYCFKIPDGYPLAKAAPLLCAGITVYTPMMRHNMNQPGKSLGVIGLGGLGHMAVKFGKAFGLKVTVFSTSESKRDEAINLLGADNFVISSDTQQMESLKNSLHFIIDTASGDHPFDPYFSLLKVGGVMTLVGFPSEIKMHPASLILGARTLSGSVVGGIKDIQEMVNFCAANNIYPEIEIIKIDYINEALARLVNRDVKYRFVIDIENSFK

SEQ ID NO: 39428 - protein, 425 aa, Zea mays
  Clone ID: 700152248_FLI.pep
SSSTSKQNGEGKIVAQPLGPAMQRPAPYAEQTDTTRPRGASGLPDDGGLGDHGGDHVGVHVGRRPAVLEVALAVLLRLAAHAHRRATVGDSPAEGVDVGGLVPAGEPALVALAVGRDVLLVPQLQLLDGRLDHLVPALLPHGLGAVVGVGARAVPVARDRLRVERHHHAGDLGDPLKNVASNPHLIARRDADGRSDLELPLPRHDLPVDATDVDACVQAGLVVGVDYVTPERFLRADSTVVRTLRAREAANRPPEGPVGVLLKEGVLLLDTIPGLLGSDLRAAEDLGGAVPLVGGNWLASWGVAIAHDKDVVAPPEWVLEDGLRVQDDLAVLAGGLAGAGAVVVPLGQLAGIGYRAREGPGFAPEIHARSTDPYVLGDDLLCGVREVEVDEVGEAGHGRRLRCDCDRRGARAGNPRRNEGRMWCG

SEQ ID NO: 39429 - protein, 378 aa, Zea mays
  Clone ID: 700152375_FLI.pep
TEKPSKVDQATVSMEQGGKMAHGWAARDASGLLSPYSFSRRVQGDDDVTIKVLFCGICHTDLHIIKNEWGNAMYPVVPGHEVVGVVTDVGHGVSKFKAGDTVGVGYFVDSCRSCESCSTGHENYCPDLVLSSNGVDHHHHDGGASASATTKGGFSDVLVVSQDFVVRVPESLPPDGAAPLLCAGVTVYSPMVQYALNGPGKHLGVVGLGGLGHLAVKFGKAFGMTVTVISSSPAKREEALGRLGADAFLVSHDASQMKAAAATMDGIIDTVSAGHQIVPLLALLKPMGQMVVVGAPSTPLELPAYAIITGGKRVAGNGVGSVADCQAMLDFAAEHGVTADTEVVPMDYVNTAIERLEKNDVRYRFVVDVAGSQMDTVA

SEQ ID NO: 39430 - protein, 345 aa, Zea mays
  Clone ID: 700152704_FLI.pep
EPSGHLWSGHDAGSEPCHADAAPGPAARKSIWSRGQCCGAWFHQNSRKKRPRRSRDGPTSVAAVIQRWAERNKHLEYEESEEAKRPRKAPAKGSKKGCMKGKGGPDNTQCGYRGVRQRTWGKWVAEIREPNRVDRLWLGTFPTAEDAARAYDEAARAMYGDLARTNFPGQDATTSAQAALSSTSAQAAPTAVEALQTGTSCESTTTSNHSDIASTSHKLEADISSYLKEKCPAGSCGIQDGTPIVADKEVFGPLEPITNLPDGGDGFDIGEMLRMMESDPHNAGGADAGMGQPWYLDELDSSVLESMLQPEPEPEPEPFLMSEEPDMFLAGFESAGFVEGLERLN

SEQ ID NO: 39431 - protein, 160 aa, Zea mays
  Clone ID: 700153072_FLI.pep
ASFSIGMFCMPASSIIPLHNHPGMTVLGKVLYGAAHVRSYRWIESAGSSINLSKARPAKVVRDGEMSAPCGAMVLRPEEGGDVHALRAITPCAVLHILTPPYSSQDGRHCSYFRRRPRSHPSGVLLNRTGGSEFVWLEEYQPRHNFIIRRDLYTGPALKL

SEQ ID NO: 39432 - protein, 168 aa, Zea mays
  Clone ID: 700155593_FLI.pep
AMPLTIRHNITAQQQAERHSRIPKTKWQHSESTSAANGASSFPPRIHNPSIDSSKLPEQCIPPPSEEQKYPSLSSTLVWPVKHHPHCCLFFWTSRCLHLRPIGTRSTLDFLQDRLLITSASLALTSARYTACRTIYLSGQTRTAGPCSRCDKPRRSHRTVLFSHHPCP

SEQ ID NO: 39433 - protein, 622 aa, Zea mays
  Clone ID: 700155866_FLI.pep
RSPAMDSDYGVPRELSEVQKKRTLYQPELPPCLQGTTVRVEYGDAAIAADPAGAHVISHAFPHTYGQPIAHFLRKTAVVPDAKVISEHQAVRVGIVFCGRQSPGGHNVVWGLYEAIKAHNQNSKLIGFLGGSDGLLAQRTLEITDKVIASYKNQGGYDMLGRTKDQIRTTEQVNGAMASCQALKLDALVIIGGVTSNTDAAQLAETFAEAKCATKVVGVPVTLNGDLKNQFVETTVGFDTICKVNAQLISNVCTDALSAEKYYYFIRLMGRKASHVALECALQSHPNMVILGEEVAASKLTIFDITKQICDAVQARAEKDKNHGVILIPEGLVESIPELYALLQEIHGLHGKGVSVENISSQLSPWASALFEFLPPFIRKQLLLHPESDDSAQLSQIETEKLLAQLVETEMNRRLKEGTYKGKKFNAICHFFGYQARGALPSKFDCDYAYVLGHVCYHIIAAGLNSYMATVTNLKNPVNKWRCGATPISSMMTVKRWSRGPSATQIGKPAVHMASVDLKGKAYDVLRQNSSSFLLEDVYRNPGPLQFEGPGADSKPISLCVEDQDYMGRIKKLQEYLEKVKRIVKPGCSQDVLKAALSAMSSVTETLNIMTSSSTGQTPLSH

SEQ ID NO: 39434 - protein, 327 aa, Zea mays
  Clone ID: 700156315_FLI.pep
LDRTVCPRGVSRSTATPLWAAKLTDGWMPRVCGIVGSCVCVCVCRAYDRAAIKCNGKDAVTNFDPSIYAEELEPAGSSIPRPRSPPRSRPLVAVRRFRYRLQPIQASSDGPLFRRAASTGGGGDDHNHNLDLSLGSSAGNKRGSLDDGGGGGGGGDDETSDQRVPMAFDVDWQTAAPRSTKAKLDASSKQPQTQMLPPPPPAVLRVAHQLPLPFGPRHPQSQFLSNGGDSGTSGGLSLAIGGAGGGHWPPQLQHLQQQRLHGAWANGGGTSWPPPPHPHPHPHPPPPSTAATAAAASSRFPPYVVTTTQGPAGWAQKNGFHSLARPT

SEQ ID NO: 39435 - protein, 101 aa, Zea mays
  Clone ID: 700158927_FLI.pep
GLSTDSCRLTLNGHTNEKNFVGLSVHDGYITCGSETNEVFSYYKTFPMPITSHRFGSIDPITGQVTNEDNQQFVSSVCWRGKSNMVVAANSSGSIKVLELV

SEQ ID NO: 39436 - protein, 254 aa, Zea mays
  Clone ID: 700159730_FLI.pep
NFKRVEITEDAKPDWTDKETLHLLEAVLHYGEDWKKVSEHVSSRSEKDCIARFIRLPFGEQFMGHKEDRMRFENTDEPGANVSKRLRLTPLADASNPIMAQVAFLSAIVGSDVASAAAQAAISAQSRVDLNDGEIETSINSIKQEESSHTNGLSANVLLKEAAANARAQLEKERNSIEQSLSNIVDVQMKEIQDKICRFEQKEMLMEKERQQLHFLRDLLFTDQLAVMQHQQRSPAVATECKGDEKPKPVASMS

SEQ ID NO: 39437 - protein, 253 aa, Zea mays
  Clone ID: 700160966_FLI.pep
LSNRALLPSSANSPTPTTMTLTALGLGLALLAAASPCLGLGSSGSGSGGASVPSVVTEAFFDGIRSHARDGCEGKNFYTRSAFVSAAGAFPGFAHGGTEAEGKREIAAFFAHVTFETGYFCYINQINGRGQVSCDSGVKQWPCAPGKQYYGRGPLQISWNFNYGPAGQSIGFDALGDPDRVAQDPVISFETALWLWMSSAHQVVPQGFGATIRALHGALECNGNSPATVNARVGYYKEYCKQFGVSPGNNVTC

SEQ ID NO: 39438 - protein, 209 aa, Zea mays
  Clone ID: 700161508_FLI.pep
RYQYPAAAHHHHQPTNPQFPYRQPSATQPRLRKQSVSLEERRRRPWRPPSRGRPPSAPPATRRCTLWTSSPPTTASTTRPASAATTARAPSSSPTTTPSRECSTAGLTSTSCSRGQGAWTRASKELRRLSSQKETLGMRMLLKSQAPLLAPERNVLDAARQSIQLRGSLLITLCTTRAASSAAMEGAPSALLTTLRTRGSCTASTTTSS

SEQ ID NO: 39439 - protein, 101 aa, Zea mays; identical to SEQ ID NO: 39435
  Clone ID: 700161808_FLI.pep

SEQ ID NO: 39440 - protein, 103 aa, Zea mays
  Clone ID: 700162090_FLI.pep
GKNNPELAKEMEKQFVDLLNEELKLQQVVAEEHSHHMNATLVEAKRQATQYQREAEKCNAATETCEEAREQSEVAISKEKKLTAMWEQRARQLGWHDSRATSM

SEQ ID NO: 39441 - protein, 268 aa, Zea mays
  Clone ID: 700163016_FLI.pep
ELKSIIRMLPICAAGIILVTSASHNHSFAIQQARTMDRDITPHFKIPPASMLIFTNFGMLLTLAFYDRVLVRVLRRFTGRPNGITHLQRTGVGLTIAMLSNVVAAVVERRRKSVAAASGLLDAPKATLPMSVFWLVPQYAIHGIANAFMDVGRMEFLYDQAPESMRSSATALYWLTFSIGSYLGTLLVTIVHDKTKRTGQWLPDNLNRGKLDNYYWLVVALEVVNLVYFFICVKYYTFKPLEMVSGEEVELYHHGNGTDDAKKQGVEA

SEQ ID NO: 39442 - protein, 108 aa, Zea mays
  Clone ID: 700164124_FLI.pep
TNKDRIDLSLYILTISIYVIICAVYGQVKSSGAQASTREPIQGMMKICAVTIHNHVRHQLQLGVHSPSTASGPHCSQALQAATHAHTPLTSASSGGALQLAALLAVSD

SEQ ID NO: 39443 - protein, 111 aa, Zea mays
  Clone ID: 700164808_FLI.pep
WMRLQLGTRGSLSWPRRPNITYVDVREQYIYGRLGGRDPLAHGTEQDAELDILIIPYTPTETTEWNQVVPAFLLLKNCEMDHGRVLFGNNDATSTDKKGGHAVSRNLSYTI

SEQ ID NO: 39444 - protein, 424 aa, Zea mays
  Clone ID: 700164821_FLI.pep
LELRLLLRSLRSSESCLAKSASDCAFVPSPSQDSYSPVSMFTLATGFLSSSWPIDIRDSMFSLVAMSTDDAFPVKVSSCIVQLDAKVLLLAVQGLKEDRRMDVNHVGTGMREDVDDRREAAVVEPLDEAPLRALLRGVLLRLLGRPGADGDDEVVGVLGGAAGVEVGVAAVHLLGEHGHGDHGGVVGRDAAVHEVVLAGGPAVGGLGLEEVRREVGGRRRRADADVGEVRVLEGVGLGLVRREDDGLQVLDVERRHDDVGHRVRHPDVVRQALDLVVQEHAVVLGAPHQAQQVPQRRQQPSLFLWEDLWAVLEVERGEVLGGEQRPIVLVRRRQHRREQGAGARPGNHIEVVGDPSVRAVQLLELGLEVRNDGRRDKAADAAAIDAQDRDELPCRRRRLRHGGAVGRASANAPHVCLKLNWTSC

SEQ ID NO: 39445 - protein, 97 aa, Zea mays
  Clone ID: 700165467_FLI.pep
VHSVDEVYAGSKAWAPNNGILISGCQTNQTSADATTPQGVSFGALSNAIQTILADKHGKVTNKDLVMKARELLSKQGYTQQPGLYCSDEHVHVAFIC

SEQ ID NO: 39446 - protein, 588 aa, Zea mays
  Clone ID: 700165712_FLI.pep
HSMLSSLHFLGRTCINISLSVFIVFCQALSVLILYVRCTAIDPADSGILISMDDILIYKSEAHVDTQDEAGKPGLRNDEDIRKHKSCFGRVCFCCAIFTTGDCRGGDEANHQEDYGEEALFCTLCNAEVRKHSKHCRSCDKCVDGFDHHCRWLNNCVGRKNYITFLCLMAVSLAWLAAECGVGIAVFVRCFTDKTVIEDQIGEKLGYGLSRAPFATIVALATALSMLASVPLGELFFFHMILIRKGITTYEYVVAMRAQSEPPGPSVNDDQQSLASSPMSSAPTAFSGSSFARHYKGAWCTPPRIFIDQDEIIPHLEPGRVPSTVDPDTTDPMERTKTHPKRPVRISAWKLAKLDSNEAMKAAAKARASSSVLKPINTRNQYEADSDSLSSRNSVISADTGHHRYPRSCGNSQYKPSYPPSRASADDIELYPQTPSSFQSNSRTSTPIAEHHPSKHFNPIYQTSANRSPFSAKASVSEAPVSEITNAGRSYPPPQADRSSRSSVYWDQEAGRFVSAQANQGSSSRPAYPDLLYTGQNIFFGGPLIADPAARSFRDPGGSSQRSAGPRSHQLPVFVPSDPQKDQLSRLP

SEQ ID NO: 39447 - protein, 434 aa, Zea mays
  Clone ID: 700166284_FLI.pep
KRGALLVGWILFSLAASPVKFQTHMGSIGRGTANCATVPQPPPSTGKLITILSIDGGGIRGLIPATIIAYLEAKLQELDGPDARIADYFDVIAGTSTGALLASMLAAPDENNRPLFAAKDLTTFYLENGPKIFPQKKAGLLTPLRNLLGLVRGPKYDGVFLHDKIKSLTHDVRVADTVTNVIVPAFDVKSLQPIIFSTYEAKTDTLKNAHLSDICISTSAAPTYFPAHFFKTEATDGRPPREYHLVDGGVAANNPTMVAMSMLTKEVHRRNPNFNAGSPTEYTNYLIISVGTGSAKQAEKYTAEQCAKWGLIQWLYNGGFTPIIDIFSHASSDMVDIHASILFQALHCEKKYLRIQDDTLTGNASSVDIATKENMESLISIGQELLNKPVARVNIDTGLYESCEGEGTNAQSLADFAKQLSDERKLRKSNLNSN

SEQ ID NO: 39448 - protein, 375 aa, Zea mays
  Clone ID: 700167768_FLI.pep
RPADLGAPALAQGKVVSAPSSPAVVSPAAGKKSRRGPRSRSSQYRGVTFYRRTGRWESHIWDCGKQVYLGGFDTAHAAARAYDRAAIKFRGLDADINFQLKDYEDDLKQMRNWTKEEFVHILRRQSTGFARGSSKYRGVTLHKCGRWEARMGQLLGKKYIYLGLFDSEIEAARAYDRAAIRFNGPDAVTNFDSVSYDGDVPLPPAVEKDVVDGDILDLNLRISQPNVHDLRSDGTLTGFGLSCNSPEASSSIVSQPMGPQWPVHPHSRSMRPQHPHLYASPCPGFFVNLREAPMQEEENRSEPACPQPFPSWSWAWQTQGSRAPVLPATTAASSGFSTAAATGVDAATAGHSVPPPSGSLRQFSGYHQLRFPPTA

SEQ ID NO: 39449 - protein, 80 aa, Zea mays
  Clone ID: 700168244_FLI.pep
NRKVNVTICRSYIPLRVVQLCTKTVRTRVESIADMPGTKDKGCTGTSLTGAFIHRMVPYCAKVSHFCHCHLHNPHNFTLQ

SEQ ID NO: 39450 - protein, 436 aa, Zea mays
  Clone ID: 700168322_FLI.pep
TQKRGALLVGWILFSLAASPVKFQTHMGSIGRGTANCATVPQPPPSTGKLITILSIDGGGIRGLIPATIIAYLEAKLQELDGPDARIADYFDVIAGTSTGALLASMLAAPDENNRPLFAAKDLTTFYLENGPKIFPQKKAGLLTPLRNLLGLVRGPKYDGVFLHDKIKSLTHDVRVADTVTNVIVPAFDVKYLQPIIFSTYEAKTDALKNAHLSDICISTSAAPTYFPAHFFKTEATDGRPPREYHLVDGGVAANNPTMVAMSMLTKEVHRRNPNFNAGSPTEYTNYLIISVGTGSAKQAEKYTAEQCAKWGLIQWLYNGGFTPIIDIFSHASSDMVDIHASILFQALHCEKKYLRIQDDTLTGNASSVDIATKENMESLISIGQELLKKPVARVNIDTGLYESCDGEGTNAQSLADFAKQLSDERKLRKSNLNSN

SEQ ID NO: 39451 - protein, 172 aa, Zea mays
  Clone ID: 700169430_FLI.pep
GRGGLPLLGGGELEGSLDLDEAALGGEAAQLHCQHLAVIGREHVPVLLPHVLGDRVRARPDLPAVLRQDRLLDHLEIGRVVQPGGLGLPAPRLPRLLLLLGGGVGLLPLVTLLVGLLPLLRLLHHLLRRFRRRLLGDGDDRSNFLSYGCHDQKSVITLRQCASDASGCSYSV

SEQ ID NO: 39452 - protein, 115 aa, Zea mays
  Clone ID: 700169578_FLI.pep
MKTRSQTSPKPLKTVAMAPRPSSTKRKPRPKPAGKGDPRAPKKPPTAFFYFMEDFRKIYKQEKPSVKSMQEIGKACGEKWNTMTFEEKVKYYDIATEKRAEFEKAMIEYNKKKES

SEQ ID NO: 39453 - protein, 189 aa, Zea mays
  Clone ID: 700169890_FLI.pep
LDYHFKYEQEAGSSVYSFFGFNGTAGVWRISAIDDAGGWKDRTTVEDMDLAVRAMLQGWKFLYVGDIKVKSELPSTFKAYRFQQHRWSCGPANLFKKMMVEILENKRVSLWSKIHLWYDFFFVGKVAAHTVTFIYYCFAIPVSVLFPEIQIPLWGVVYVPTVITLLKALGTPSFSPLQFLSPGDPLGPV

SEQ ID NO: 39454 - protein, 372 aa, Zea mays; identical to SEQ ID NO: 38470
  Clone ID: 700171140_FLI.pep

SEQ ID NO: 39455 - protein, 169 aa, Zea mays
  Clone ID: 700171417_FLI.pep
SEDFIASFPPPMTTIRAAAHKEQGHPLLPSCCGLEENSLSMPTEIAADSLGSGKSWIRSYILQDLCSLPSSMVHLVPIDTVIVRDLLMLAVATCKEQGAPVPVLLGVQNVVALATKLHGAHGCSSSVFLKPRVQGSKMLPPWWSSGCWLPLPSRRAQRCRRGRAPLTIH

SEQ ID NO: 39456 - protein, 190 aa, Zea mays
  Clone ID: 700193586_FLI.pep
VQQHEQSHEQHQGQSHEQQHQQQFQGHDKQQQPQQPQQYQQGQEKSQQQQCHCQEQQQTTRCSYNYYSSSSNLKNCHEFLRQQCSPLVMPFLQSRLIQPSSCQVLQQQCCHDLRQIEPQYIHQAIYNMVQSIIQEEQQQQPCELCGSQQATQSAVAILTAAQYLPSMCGLYHSYYQNNPCSSNDISGVCN

SEQ ID NO: 39457 - protein, 135 aa, Zea mays
  Clone ID: 700196479_FLI.pep
LVSGSITLLLQYIVSSVVDTAGSCVARAGTWLLQLQAAHRRQLLRYLGRHQRRELALRLLLQEGLQDHTVCRLVPVQRLHLPDLVAALLLQRLALWRAVGRRRRAALVPQELDALAQERAADAADAAGSELLARA

SEQ ID NO: 39458 - protein, 92 aa, Zea mays
  Clone ID: 700196549_FLI.pep
LLQLLCHPLSSEAILASPSFTDVLDQRGVGELVKLATERGRKARPNLKVGICGEHGGEPSSVAFFAKTGLDYVSCSPFRVPIARLAAAQVLV

SEQ ID NO: 39459 - protein, 424 aa, Zea mays
  Clone ID: 700201122_FLI.pep
VQAEVIELTALRYNSLRISMGCFSTFCKKRRATRQPSSHHNEDVPGCSNITKYTYKELVRATNNFNPLNKIGEGGFGSVYKGQLRNGTVIAVKVLSSESRQGVREFLNELVAISDISHDNLVKLYGYCAEGDQRILVYNHLENNSLAQTLLGSSHSNIQFDWKTRVNICLGIARGLAYLHHGVSPHIVHRDIKASNILLDRDLTPKISDFGLAKLLPPNATHVSTRVAGTLGYLAPEYAIRGQVTRKSDVYSFGVLLLEIVCGRSNSDTRLAYGDQILLEKFPEITNGALLLQTWMHYEQGSLERIIDRSLGGGDLDVAQACRFLKVGLLCTQDVTRHRPDMPRVVAMLTGEWDVEPETVSKPAIISDFMDLKVRSTRKASDNVATPPTSSSTFLSSLMAHSSPLLSNESTQASMAFTGVSDRE

SEQ ID NO: 39460 - protein, 237 aa, Zea mays
  Clone ID: 700201283_FLI.pep
AAALRGPVLGVPQRAVEAHPLRRRVRHAPVRVVLELPDRRPVHQHEDVLLRPLDGVGVEVGGGVEPEVELLLPAAVAAGVHVGVQRVRLPAGVAQELEVDLVVDIPRPLRDEVEGGDRAGGVVGDELDLHVGAREEVRVLGAEPGAGGAVERQRQHLAIGRDAPAAVAPRHLQPVVHPARRRAGGAEPQEQRQQRACPRAKRARHCSSLARTGSAFFFSKKVYMYLRQECVVYSCVR

SEQ ID NO: 39461 - protein, 379 aa, Glycine max
  Clone ID: 700555716_FLI.pep
VCFCWRRRFKLALAEAPSEIKTLFNEYSENELMTPSHLKRFLVDVQRQEKATEEDAQAIIDSFRHFHRRGAGLNLETFFKYLFSDDNPPLLPSHGVHHDMTLPLSHYFIYTGHNSYLTGNQLSSDCSDVPIINALKKGVRVIELDIWPNASKDSIDVLHGRFTQRNILRVYPKGTRIDSSNYNPLIGWMHGAQMVAFNMQGYGRSLWLMHGMFRANGGCGYVKKPNFLLETGPDDEVFNPKAKLPVKTTLKVTVYMGEGWYYDFKHTHFDQYSPPDFYTRVGIAGVPNDTIMKRTKAIEDNWLPTWNEAFEFPLTVPELALLRVEVHEYDMSEKDDFGGQTCLPIWELRSGIRAIPLHSQKGDKYNTVKLLMRFEFINN

SEQ ID NO: 39462 - protein, 83 aa, Zea mays
  Clone ID: 700201723_FLI.pep
PYAVTFSASRASRLPLRPRRSALPAGGSSLQDSNTGCTSHRLSSPVQSHFATSSAVPGAVCWRQLGGGGGEHRGPVWFVHLVS

SEQ ID NO: 39463 - protein, 897 aa, Zea mays
  Clone ID: 700202892_FLI.pep
FKPPQSSSIHMDWGRTEQALTGKNKEAWSEGKIRGTVRLVKKEVLDVGDFNASLLDGVHRILGWDDGVAFQLVSATAADPSNGGRGKVGKAAHLEEAVVSLKSTADGETVYRVSFEWDESQGIPGAVLVRNLQHAEFFLKTLTLEGVPGKGTVVFVANSWVYPHKLYSQERIFFANDIYLPSKMPAALVPYRQDELKILRGDDNPGPYQEHDRVYRYDYYNDLGDPDKGEEHARPVLGGSQEHPYPRRCRTGRHPTKKDPNSESRLFLLNLNIYVPRDERFGHLKMSDFLGYSLKAIIEAVLPTLGTFVDDTPKEFDSFEDILGLYELGPEAPNNPLIAEIRKKIPSEFLRSILPNGSHDHPLKMPLPNVIKSDVLKKAPEFKFGWRTDEEFARETLAGVNPVIIKRLTEFPAKSTLDPRQYGDHTSKITEAHIRHNMGGLSVQNALRNKRLFILDHHDHFMPYLDEINELEGNFIYASRTLLFLKDDGTLKPLAIELSLPHPDGQQRGAVSKVYTPAHTGVEGHVWQLAKAYACVNDSAWHQLISHWLNTHAVIEPFVIATNRQLSVVHPVHKLLSPHYRDTLNINALARQTLINAAASSSAPCSLQKYALGMSADVYKTWNFNDQSLPADLVKRGVAVPDQSSPYGVRLLIKDYPYAVDGLVIWWAIERWVKEYLDIYYPNDGELQRDVELQAWWKEVREEAHGDLKDRDWWPRMDTVQQLARACTTIIWVASALHAAVNFGQYPYAGYLPNRPTVSRRPMPEPGSHDYKKLGAGQKEADMVFIRTITSQFQTILGISLIEILSKHSSDEVYLGQRDEPERWTSDAKALDAFKRFGSRLVQIENRIKTMNDSPDLKNRKGPVEMPYMLLYPNTSDVTGEKAEGLTAMGIPNSISI

SEQ ID NO: 39464 - protein, 165 aa, Zea mays
  Clone ID: 700202992_FLI.pep
IRTLACWQIPSKLVLENVQEFSTSCTPTHTAVGRSVLRVGSCNEGGSEARPVLGELHLHQPRRLLPEQLHQRGLQALPELGVVLEQAAVDGDDRPALVAWRRSTDLPEDPDDPRRGQPGRPPGDDVADLDHHLPRVQGRVPDPEVVGQLLRHDSQVRRAVMVHRG

SEQ ID NO: 39465 - protein, 210 aa, Glycine max
  Clone ID: 700555521_FLI.pep
DAKRWKIEGENEGMSAPGSRTVREPRVVVQTTSDIDILDDGYRWRKYGQKVVKGNPNPRSYYKCTHPGCPVRKHVERASHDLRAVITTYEGKHNHDVPAARGSGSHSVNRPMPNNASNPTNTAATAISPLQVIQHSDNSHQNQRSQAPPEGQSPFTLEMLQSPGSFGFSGFGNPMQSYMNQQQQQLSDNVFSSRAKEEPRDDMFLESLLC

SEQ ID NO: 39466 - protein, 324 aa, Zea mays
  Clone ID: 700203222_FLI.pep
SRLHRRQLSSEEQIIVVCRAESTVDVSHIEQVKVATPRDAGGGGRGAVVVILVRRRQPAGAVCAAHLVPEGGGAAVGRRHVARGRRGGGPVRGQRVALRRPVREHEAPSRLVLEWLLGEGRRRWGRQRCTAAADVGVVLLVVRRRGAAAAAVVLDVVALVHGHGHGHGHGHGRQVGGGAHGGELGRALGAGVGRRALGLLHHPLLEVRVPVVLHLVVGPPRQMHRNLRPLVAQLGLEIDDDVLLLLGEHSTLQSRAQVVDPAQAAALAVSLETSLCRDSTPAAEAMLEDVVPEPLVLLRRPQPLAVVHLGLVTGPAPHCVLSPP

SEQ ID NO: 39467 - protein, 329 aa, Zea mays
  Clone ID: 700203377_FLI.pep
VVAGELRRGPWTVEEDLLLVNYVAAHGEGRWNSLARSAGLRRTGKSCRLRWLNYLRPDLRRGNITPQEQLLILELHSRWGNRWSKIAQHLPGRTDNEIKNYWRTRVQKHAKQLKCDVNSQQFKDVMRYLWMPRLVERIQNAAAAGTPQQHKAGAADTPLSSPSSWQPGGGGGLYASPDLPATDACCWPPADCYPAAAAAVGDGDHHHQLLMNNPAAVPELSASTTTAGSASPSSDSGAGAQPCWLAPVGGAEWFTTTCDATSSTAAVLLAGHQHQQQQQWSCLLGEATWASSSELPDLGCVADFEIGSFDVESIWSTDDSLWFTQAQGV

SEQ ID NO: 39468 - protein, 409 aa, Zea mays
  Clone ID: 700203435_FLI.pep
HGLLLQRRLLNFVDKTLVEDVIPILEVASHSGLTQVIDKCIQRIARSDLDDISLDKELPPEAVDEIKNLRKKSQTADGDTFISDPVHEKRVRRIHRALDSDDVELVKLLLNESDITLDDANALHYAASYCDPKVVSELLDLAMANLNLKNSRGYTALHLAAMRREPAIIMCLLNKGANVSQLTADGRSAIGICRRLTRAKDYNTKMEQGQESNKDRLCIDILEREMMRNPMAVEDAVTSPLLADDLHMKLLYLENRVAFARLFFPAEAKVAMQIAQADTTEEFGGIVAVAASTSGKLREVDLNETPVTQNKRLRSRVDALMKTVELGRRYFPNCSQVLDKFLEDDLPEGLDQFYLQRGTADEQKVKRMRFCELKEDVLKAFSKDKAEGSVFSGLSSSSSCSPPQKYAQR

SEQ ID NO: 39469 - protein, 601 aa, Zea mays
  Clone ID: 700203463_FLI.pep
GATSHRRTKEGGALQRELIRFLNAGAFGTGADGHVLPAETTRAAMLVRINTLLQGYSGIRFEILEAIVKLLNANVTPCLPLRGTVTASGDLVPLSYIAGLVTGRENSVAVAPDGSKVNAAEAFKIAGIQGGFFELQPKEGLAMVNGTAVGSGLASTVLFEANILAILAEVLSAVFCEVMNGKPEYTDHLTHKLKHHPGQIEAAAIMEHILEGSSYMKLAKKLGELDPLMKPKQDRYALRTSPQWLGPQIEVIRAATKSIEREINSVNDNPLIDVARSKALHGGNFQGTPIGVSMDNTRLAIAAIGKLMFAQFSELVNDYYNNGLPSNLSGGRNPSLDYGFKGAEIAMASYCSELQFLGNPVTNHVQSAEQHNQDVNSLGLISSRKTAEAIEILKLMSSTFLIALCQAVDLRHIEENVKSAVKSCVMTVAKKTLSTNSTGGLHVARFCEKDLLQEIEREAVFAYADDPCSANYPLMKKLRNVLVERALANGAAEFNAETSVFAKVAQFEEDLRAALPKAVEAARAAVENGTAGIPNRIAECRSYPLYRFVREELGAVYLTGEKTRSPGEELNKVLVAINQGKHIDPLLECLKEWNGEPLPIC

SEQ ID NO: 39470 - protein, 71 aa, Zea mays
  Clone ID: 700204331_FLI.pep
RITGFSFSRWRRLCSVKTKLKRRNGTAEPPNRAVLQGLKILCMHFVGAFCPCGDRVIHFYSDHVLLHYMSH

SEQ ID NO: 39471 - protein, 98 aa, Zea mays
  Clone ID: 700204437_FLI.pep
LWLDMVMGSLLVAFMLDISVGTCRSSLWKDMELMLTSTFHGWEIRRNPCRNLFKRTIPVIRILLLCWYASIVLKASHLFSCSCPYLLSLLFIHHLNGL

SEQ ID NO: 39472 - protein, 180 aa, Zea mays
  Clone ID: 700205411_FLI.pep
AVAALPTRAFAARPRGSAASDAESQCVICLEEYEERDVLRVLPHCGHDFHMACIHVWLEQNSTCPVCRISLLDNPNSEHNAPPPPPPPLPGVAVTMSSPGSPEPPGSDPCRCLFAGAGHSSRASSEAPPRHEPDQENQVASGPSVDGGANSNGMPLSEVNPTPPESNSQTVRKQQPGPCK

SEQ ID NO: 39473 - protein, 70 aa, Zea mays
  Clone ID: 700205474_FLI.pep
ECGEEGPNWSQGDEGCCQEEMIYLSGAVLACWLPRGSLKYLVLLTSLQLSREQVIYDGNVCLVMKYYYFR

SEQ ID NO: 39474 - protein, 188 aa, Zea mays
  Clone ID: 700207685_FLI.pep
DVYKLAENIKSKGGKITREPGPVKGGSTVIAFAQDPDGYMFELIQRADTPEPLCQVMLRVGDLERSIKFYEKALGMKLLRKKDVPDYKYTIAMLGYADEDKTTVLELTYNYGVTEYSKGNAYAQVAIGTNDVYKSAEAVDLATKELGGKILRQPGPLPGINTKIASFVDPDGWKVVLVDNTDFLKELH

SEQ ID NO: 39475 - protein, 164 aa, Zea mays
  Clone ID: 700207896_FLI.pep
WLRALATDAAGELDVLGHDGDALSVDGAEVGVLEETDEVGLGGLLERQHGVALEPEVCLEVLRDLAHQALEGQLADQQLRALLVLADLAQRHGSGPVPVGLLHAAGRRRRLPRRLGGELLAGGLASRGLAGGLLRTSILLCSLLPLRGGATCFLVAWTEQALCG

SEQ ID NO: 39476 - protein, 567 aa, Zea mays
  Clone ID: 700208355_FLI.pep
KLRALVKRGANCYGRYMPRMVIIPPGVEFGQLIHDFDMYGDEDNQSPASDPSIWFEIMRFFTNPRKPMILAIARPYSEKNIATLVKAFGECHPLRELANLTLIMGNREAISKMNKISAAVLTSVLTLIDEYDLYGQVAYPKLHKHSEVPDIYRLAARTKGAFVNVAYFEQFGVTLIEAAMHGLPVIATKNGAPVEIYQVLENGLLVDPHDQHAIADALYKMLSEKQFWSRCRENGLKNIHQFSWPEHCKNYLSRISSLGPRHPAFACKEDHKVPVKCRKHISIIAVDSVNKEDLIQIIRNSVEATRTGTMSGSTGFVLSTSLTIAELQSVIVRTGMLPTDFDAFICNSGSDIYYPLQSSDVPSNSRVTFALDHNYRSHIEYRWGGEGLRKYLVKWASSVVERRGRTEKQVIFEDSEHSSTYCLAFRVVNPNHLPPLKELQKLMRIQSLRCHALYNHGATRLSVIPMHASRSQALRYLSIRWGIELPNAVVIVGETGDSDYEELFGGLHKTVILKGGFNTPANRIHTVRRYPLQDVVALDSSNIIGIEGFSTGDIRSAMQQQLGIPTQ

SEQ ID NO: 39477 - protein, 654 aa, Zea mays
  Clone ID: 700208656_FLI.pep
GGGSVESPALPIRSGPAGFLTLVFFFASSLIRCNLAVAVRSNRTLPRSPRTLESRCRCRGSTMAFWWPLLVLAAAYALCRLLLFLIPPTVPSIDVDASDVLAKEDSFIYIPRRGKSTQTDKVQCYEPATMKYLGYFPVVTPDEVKEHVAQSRKAQRIWAKSSFKQRRQFLRIVLKYILEHQDLICEVSSRDTGKTMVDASLGEIMTTCEKITWLLDEGEKWLKPEYRSTGRSMLHKRAKVEFYPLGVIGAIVSWNYPFHNVFNPVLAAVFSGNAAVIKVSEHATWSGCFYFRIIQAALSAVGAPENLVHIITGFAETGQALVSSVDKIIFVGSPGVGKMIMKRASETLIPVTLELGGKDSFIVCEDVDLPSVVQVATRAALQSSGQNCAGAERFMFTMTSILLWFTDSENSKSISVGPPLSGRYDMGAICMIEHSEKLQNLVNDALDRGAEIAVRGSFGNLGEDAVDQFFPPTVLVNVDHTMKIMQEETFGPIIPIMKFSSDEEAIKLANDSKYGLGCAVFSGNQKRAIRIASQLHCGVAAINDFASSYMCQSLPFGGVKDSGFGRFAGVEGLRACCLVKSVVEDRLWPYIRTVIPKPIQYPVSEHGFEFQQLLVETLYGYSVWDRLRSLVNLIKMVTEQNSAPASNATTKKRR

SEQ ID NO: 39478 - protein, 499 aa, Zea mays
  Clone ID: 700208773_FLI.pep
SNSSPAPSLSYTDLVPIPQPQATTDPARSAFRRMVTNQDAEAASAAAPGPGATVDPMRLASRWRSQTEWDRAVPELEAEPEPSELNTVNSSGLFSVVSTDKLSVKYLGSHHHGHDVGVVQADRPAPTRRAVYYFEMAVRNAGYKGQTSIGFTSESFKMRRQPGWESNSCGYHGDDGHLYRGLGKGEPFGPKFTSGDIIGAGINYLSQEFFFTKNGAPVGAIPKEIKGPLYPTIAVHSQGEELTVNFGKEPFCFDIEGYILEEKMKQQSVSDKLNLETDISHWIVRSYLLHYGYQDTLNAFDMANATDPPTNRQNGHAEPPETYGLSHRKLLRQLIMSGDIDSTFKRLGEWYPQVIKDEKSVICLLLHSQRFIEYIRAEQLEDAVHYGRANLASFLTHEAFEWLLKDSVALLAYEKPAESCLGYLMGSPQREFVADAVNAAVLSTNPTMKDPESCLYSCLERLLRQLTVCSLERRAFNNDQGDAFLLHKEMQNYERSRRS

SEQ ID NO: 39479 - protein, 516 aa, Zea mays
  Clone ID: 700209610_FLI.pep
VVGVAVGGLVLLLLASFICLCCLRKKRRRAPPPPQHYGYPPPPPPYKEDPYGGTYQSWQQNAPPAPPPEHVVKMHPSPPPAYANRPPQPPAPPPPAMLNSSGGSGSNYSGGEILPPPSPGAVLGFSKSTFTYEELLRATDGFSDANLLGQGGFGYVHRGLLPNGKEIAVKQLKLGSGQGEREFQAEVEIISRVHHKHLVSLVGYCISGGKRLLVYEFVPNNTLEFHLHAKDRPTMEWPARLKISLGAAKGLAYLHEDCHPKIIHRDIKASNILLDFQFEAKVADFGLAKFTTDNNTHVSTRVMGTFGYLAPEYASSGKLTEKSDVFSFGVMLLELITGRRPVDTTQTYMDDSLVDWARPLLMRALEDGEYDALVDPRLGKDFNPNEMARMIACAAACVRHSARRRPRMSQVVRALEGNVSLEDLNEGVRPGHSRFFGSYSSSDYDSGQYNEDMKKFKKMAFNNNYTSSQYSAPTSEYGQIPSASSSEGHQTQEMESGAMKKGGYSGGYSSGYSGAS

SEQ ID NO: 39480 - protein, 133 aa, Zea mays
  Clone ID: 700210071_FLI.pep
PWPMSSNPSTHSYWARLPLSTHSSSDWPRINSGPPRCPHVRCCHRFLQAFGPGGAGELVELAARGEDDEPDLSIAEHGELEGLLEQPVAALREGHLPARRVLYPLQLRLPPHHRRGRSLHGFPKRKRPQSRKR

SEQ ID NO: 39481 - protein, 543 aa, Zea mays
  Clone ID: 700210903_FLI.pep
KKAGAMNALVRVSAVLTNGQYMLNLDCDHYINNSKALREAMCFLMDPNLGRNVCYVQFPQRFDGIDRNDRYANRNTVFFDINLRGLDGIQGPVYVGTGCVFNRTALYGYEPPVKKKKPGFFSSLCGGRKKTSKSKKSSEKKKSHRHADSSVPVFNLEDIEEGIEGSQFDDEKSLIMSQMSLEKRFGQSSVFVASTLMEYGGVPQSATPESLLKEAIHVISCGYEDKTDWGTEIGWIYGSVTEDILTGFKMHARGWRSIYCMPKRPAFKGSAPINLSDRLNQVLRWALGSIEILFSRHCPIWYGYGGRLKFLERFAYINTTIYPLTSIPLLLYCILPAVCLLTGKFIIPKISNLESVWFISLFISIFATGILEMRWSGVGIDEWWRNEQFWVIGGISAHLFAVFQGLLKVLAGIDTSFTVTSKATDEEGDFAELYMFKWTTLLIPPTTILIINLVGVVAGISYAINSGYQSWGPLFGKLFFAFWVIVHLYPFLKGLMGKQNRTPTIVVVWAILLASIFSLMWVRIDPFTTRVTGPDIAKCGINC

SEQ ID NO: 39482 - protein, 437 aa, Zea mays
  Clone ID: 700211188_FLI.pep
EIVEVVADQVAVALSHAALLEESQLMREKLAEQHRDLLQAKDEAMRAGDARNSFQTAMYDGMRRPMHSILGLVSMMQQESMNPEQRLVMDAIAKTSSVASTLMNDVMQTSTMNCEHLSLVRRPFNLHSFIKEVVGVVRCLTGCKGVEFEFQVENSLPERIIGDEKRVFHIVLHMVGTLTDRCNAGCISLYVNVHNEVEDRHNHDWMLRRANFSGGYVCVKFEIRIRKSKGYLLSSSSSQISQGSKPNNSEMGLSFNMCKKIVQMMNGNIWSVSDSKSIGETIMLVLQFQLEPVTPVSGASSDLYRSSAIPNFNGLRVLLADSDCTNRAVTHRLLEKLGCRVLSVASGVQCISSFAAESSFQLVVLDLDMQTMDGFEVARAIRKFSSNSWLPLIIALAARIDDNIRDRCQRSGVNGLIQKPVTLAALGDELYRVLQNN

SEQ ID NO: 39483 - protein, 963 aa, Zea mays
  Clone ID: 700212293_FLI.pep
ESMLRAQMSYGRGGDAHPGFSPVPNVPLLTNGQMVDDIPPEQHALVPSYMSGGGGGGKRIHPLPFADPNLPVQPRSMDPSKDLAAYGYGSVAWKERMEGWKQKQERLQHVRSEGGGDWDGDDADLPLMDEARQPLSRKVPISSSRINPYRMIIVIRLVVLGFFFHYRVMHPAKDAFALWLISVICEIWFAMSWILDQFPKWLPIERETYLDRLSLRFDKEGQPSQLAPIDFFVSTVDPTKEPPLVTANTVLSILSVDYPVEKVSCYVSDDGAAMLTFEALSETSEFAKKWVPFSKKFNIEPRAPEWYFQQKIDYLKDKVAASFVRERRAMKREYEEFKVRINALVAKAQKVPEEGWTMQDGSPWPGNNVRDHPGMIQVFLGQSGGRDVEGNELPRLVYVSREKRPGYNHHKKAGAMNALVRVSAVLSNAAYLLNLDCDHYINNSKAIKEAMCFMMDPLVGKKVCYVQFPQRFDGIDKNDRYANRNVVFFDINMKGLDGIQGPIYVGTGCVFRRQALYGYDAPKTKKPPSRTCNCWPKWCLSCCCSRNKNKKKTTKPKTEKKKRLFFKKAENPSPAYALGEIDEGAPGADIEKAGIVNQQKLEKKFGQSSVFVASTLLENGGTLKSASPASLLKEAIHVISCGYEDKTDWGKEIGWIYGSITEDILTGFKMHCHGWRSIYCIPKRPAFKGSAPLNLSDRLHQVLRWALGSVEIFFSKHCPLWYGYGGGLKFLERFSYINSIVYPWTSIPLLAYCTLPAICLLTGKFITPELTNVASIWFMALFICISVTGILEMRWSGVAIDDWWRNEQFWVIGGVSAHLFAVFQGLLKVFAGIDTSFTVTSKAGDDEEFSELYTFKWTTLLIPPTTLLLLNFIGVVAGISNAINNGYESWGPLFGKLFFAFWVIVHLYPFLKGLVGRQNRTPTIVIVWSILLASIFSLLWVRVDPFLAKSNGPLLEECGLDCN

SEQ ID NO: 39484 - protein, 219 aa, Zea mays
  Clone ID: 700213026_FLI.pep
PLHCWMKHGPLSRGAPSLVIIFILLTTLFIILVIDLRLGLVRLLFIFLLFLLGRSLLSCSALALVVGSDGLVVLELELVSLGYIGSLVRLAQGFPPVASSFPHRSDRLVLRVLLLELLAKFLHEHEESAGSPLRLVGVLAGLPFPALGGLLRPLALHRQLGIGLGGALGFGPLHGGFERRHGAQRSDPRLAEGIPVAGGRIGVESRAKLPLAARGEREG

SEQ ID NO: 39485 - protein, 213 aa, Zea mays
  Clone ID: 700213140_FLI.pep
GWCSGSGRAPRPPSPSPRSARSWPRASSRRSSACPHPSAPSSRRSRSASRSPRSTTTRSSTSPSTVPTRFDPDLNLVKGRGGALLREKMVEAASDKFIVIVDETKLVDGLGGSGLAMPVEVVQFCWKYNLVRLQELFKEEGVEAKLRFEGDKPYVTDNSNYIVDLYFKTPIKDALAAGQEIAALEGVVDHGLFLNMASSVIIAGTDGVSVKTK

SEQ ID NO: 39486 - protein, 328 aa, Zea mays
  Clone ID: 700214015_FLI.pep
GSGVAMAAAARQRGTVKWFNDTKGFGFISPEDGSEDLFVHQSSIKSEGFRSLAEGEEVEFSVSEGDDGRTKAVDVTGPDGSFVRGGGGGGGGGGGGYGSRGGGGSGGGGRSYGGSWGGGRRSAPDAAFGSVLSGTAGDAAPSDQWFVDALNAPAPHPIERVRSESSSIVSDVPDYLFSLDSPSDDPSPGPSAARAKSDPAETPHHHGDDVPPSARQIPHVAGGASSWPAPPPPYMAQPMYYFPVPPPVHYLDQSAQSGYMPRPIYHIVGGGGSEAPGGDLHAAGGVYGVSHHMQGFPPMMYAPPRAVIYNYKSEGMPSLPPEGGAHSS

SEQ ID NO: 39487 - protein, 190 aa, Zea mays
  Clone ID: 700214317_FLI.pep
KRIVRKYVSTFGLCVVTAWDARGKPRSQVLPKNLAGGILRDRIREENSVDPLVEHDLLCNKLLDLVLTDLRAFTAYNECHRDFAGDFIFHRDNSGILDFRMCDEKGFKLRRRYLEALVFDYLLQPVNDEDLVVIVHITNVPGVQPSVLINGVLCRLWIIQITFHDLFAADAYLAWLVPSQRRAGVWVDDL

SEQ ID NO: 39488 - protein, 716 aa, Zea mays
  Clone ID: 700214676_FLI.pep
LSETAEFARRWVPFCKKFAVEPRAPEFYFSQKIDYLKDKVQPTFVKERRAMKREYEEFKVRINALVAKAQKKPEEGWVMQDGTPWPGNNTRDHPGMIQVYLGSQGALDVEGHELPRLVYVSREKRPGYNHHKKAGAMNALVRVSAVLTNAPFILNLDCDHYVNNSKAVREAMCFLMDPQLGKKLCYVQFPQRFDGIDRHDRYANRNVVFFDINMKGLDGIQGPVYVGTGCVFNRQALYGYDPPRPEKRPKMTCDCWPSWCCCCCCFGGGKRGKARKDKKGDGGEEPRRGLLGFYRKRSKKDKLGGGSVAGSKKGGGLYKKHQRAFELEEIEEGLEGYDELERSSLMSQKSFEKRFGQSPVFIASTLVEDGGLPQGAAADPAALIKEAIHVISCGYEEKTEWGKEIGWIYGSVTEDILTGFKMHCRGWKSVYCTPTRPAFKGSAPINLSDRLHQVLRWALGSVEIFMSRHCPLWYAYGGRLKWLERFAYTNTIVYPFTSIPLLAYCTIPAVCLLTGKFIIPTLNNLASIWFIALFLSIIATSVLELRWSGVSIEDWWRNEQFWVIGGVSAHLFAVFQGFLKVLGGVDTSFTVTSKAAGDEADAFGDLYLFKWTTLLVPPTTLIIINMVGIVAGVSDAVNNGYGSWGPLFGKLFFSFWVIVHLYPFLKGLMGRQNRTPTIVVLWSILLASIFSLVWVRIDPFIPKAKGPILKPCGVEC

SEQ ID NO: 39489 - protein, 173 aa, Zea mays
  Clone ID: 700214944_FLI.pep
IPESPANHIQSTPSPSTPTTPSPDPMAPKAEKKPAEKKPAAEEKAEKTTAGKKPKSEKRLPASKSSGKEGGEKKGKKKAKKSVETYKIYIFKVLKQVHPDIGISSKAMSIMNSFINDIFEKLAGEAAKLARYNKKPTITSREIQTSVRLVLPGELAKHAVSEGTKAVTKFTSN

SEQ ID NO: 39490 - protein, 176 aa, Zea mays; identical to SEQ ID NO: 37650
  Clone ID: 700214976_FLI.pep

SEQ ID NO: 39491 - protein, 371 aa, Zea mays
  Clone ID: 700215623_FLI.pep
DHTRTRTLSTALLRYAPSRPDRTGPTFLHLSARRRPTRMGAGTNNGLSNGAAAGQRADDGTTVFRGTAYSPLRTTVALALWLGAIHFNAFLVLASLFLFPRRVAALVLATQLFFMFLPLSDKSRLGRKIARFISKYVIGYFPVTLHLEDYGAFDPNRAYVFGYEPHSVLPIAVGILGDLVGFMPLPKMKILASSAVFYTPFLRQIWTWLGLAPASRKSFYSYLGAGYSCIIVPGGVQEILHMDHDSEVAFLKPRKGFVKIAIEMGCPVVPVFAFGQSYVYKWWRPGGKLIVKIARAIKFSPIIFWGKLGTPIPFATPMHVIVGRPIEVVKNPQPTIDEINQVHGQFVVAMQDLFEKYKSRTGYPDLQLRVL

SEQ ID NO: 39492 - protein, 177 aa, Zea mays
  Clone ID: 700216496_FLI.pep
GHGCAHRDSTSTTRANRRPASVAGNKKPGRTRAGSHGSEVRARGAAERAEARPSLLLVNGHQDELEQGGHLGTGKEGRAAGAPDGQPWERELGCGAALGGELEVVLRETSGSWPADNTQVELHGEEIHSREPSARGRRPSGRKIQAGGRTGLEKRERRRLERKRKEAAAESSPLTRP

SEQ ID NO: 39493 - protein, 649 aa, Zea mays
  Clone ID: 700219207_FLI.pep
TNSRFTIFYNPRASPCEFVIPMAKYVKAVYHTRISVGMRFRMLFETEESSVRRYMGTITGISDLDPVRWPNSHWRSVKVGWDESTAGEKQPRVSLWEIEPLTTFPMYPSPFALGLKRPWPAGLPSLYGGRGDGLTSSLMWLRDRANPGFQSLNFSGLGMSPWMQPRLDNSLLGLQSDMYQTIAAAAAFQSTTKQVPPSAMQFQQPQNIADRSALLSSQILQQVQPRFQQIYPQNLNENKIQGHTQPEYLQVQQQLQRCQSFNEQKPPMHPQQQQQEPQKQQCVQTPQDQQMQEQKHLHNFHSLPDALSAFSQLSPATHSPPSALQTVPAFSHQQNFPDTNISSLSPSTGPSMHGMLGRLPSEAASSLPCVAMNAPVSVSDPWSSKRVAVESVNPCRPHVSPHIEHLDMATCNMPQSSALAPLPGRECLVDEDGCSDPQNHLLFGVHIDSHSLLMQGGIPALQNDNSSGTIPYSTSNFLSPSDNDFPLNQPLRSAGCLDESDYLPCAENAEQANQQFATFVKVYKSGTVGRLLDITRFSSYDELRSEVGRLFGLEGQLEDPLRSGWQLVFVDREDDVLLVGDDPWQEFVNSVSCIKILSPEEVQRMGKPGIQLLSSAPSRRLGNGCDSYASMQEPRGLDAGMAPVGSVEF

SEQ ID NO: 39494 - protein, 159 aa, Zea mays
  Clone ID: 700219745_FLI.pep
RPLAVGDAASTSSARRRRCDDGGRVRRPGRGGGGGGRRRVVGRISRGWEVVDVVKEVRQHLLLVGKERRRLVPDNRRSCCHHDRVGLLPLLLGRPARVLLLLSRRRSCWLWVEGLVGGRVDAHLPQLLLDVRVPVVLDLVVRASRQVRRDLGPPVAQLR

SEQ ID NO: 39495 - protein, 227 aa, Zea mays
  Clone ID: 700219926_FLI.pep
ENDPTVTTCLLCWTVTLSKTAASAEQPKRAPKLNERILSSLSRRSVAAHPWHDLEIGPDAPAVFNVVVEITKGSKVKYELDKKTGLIKVDRVLYSSVVYPHNYGFVPRTLCEDNDPMDVLVLMQEPVVPGSFLRARAIGLMPMIDQGEKDDKIIAVCADDPEYRHYNDISELSPHRLQEIKRFFEDYKKNENKEVAVDAFLPATTAREAIQYSMDLYAQYILQSLRQ

SEQ ID NO: 39496 - protein, 569 aa, Zea mays
  Clone ID: 700220262_FLI.pep
PSPHSPPSLPPTLHHPRRRLLLRPGPSDPDRAPAMALAFDEFGRPFIILREQEKKTRLRGLDAQKANIASAKAVARILRTSLGPKGMDKMLQSPDGDVIITNDGATILEQMDVDNQIAKLMVELSRSQDYEIGDGTTGVVVMAGALLEQAEKLLERGIHPIRVAEGYEMASKVAFDHLEHISEKFEFSADNIEPLVQTCMTTLSSKIVNRCKRALAEIAVKAVLAVADLERKDVNLDLIKVEGKVGGKLEDTELVYGIIVDKDMSHPQMPKRIEDAKIAILTCPFEPPKPKTKHKVDIDTVEKFQTLREQEQKYFDEMVQKCKDAGATLVICQWGFDDEANHLLMHRNLPAVRWVGGVELELIAIATGGRIVPRFQELSPEKLGKAGLVREKSFGTTKDRMLYIEKCANSRAVTIFIRGGNKMMIEETKRSLHDALCVARNLIRNNSIVYGGGSAEISCSIAVETAADRHPGVEQYAIRSFADALDAVPLALAENSGLSPIDTLTAVKAQQVKESNPHCGIDCNDVGTTDMKEQNVFETLIGKQQQILLATQVVKMILKIDDVISPSEY

SEQ ID NO: 39497 - protein, 323 aa, Zea mays
  Clone ID: 700220754_FLI.pep
GRLLQPHGAHLGLELLPHLAPPHLALHLQLLLHALQPPRRLPPVRRPRAPPLLQLAAALGELRQRLPVHDRHARGRGAAVLRRAREPVRRLVGRGAIRHPWRGRGRARRHRGGREAERHGRRRRSGRRVRDGGGGGGGRPGVGRQPGRQHGRGHEQRRRRSGSLLWPLSDELLREVLEQPLVPAPLVGARLRRRAAAVPQLPLLLLLEHLPPLAEALGRAPGHLGGDLLPLVAVLGLQADHQALLLLGERALLDPGAEVVLPALQARLGVAVEGHVHALRHQVPLAGAVLPDVGAQDGVFLRPPALSLLHLQRPSPIPHHHTS

SEQ ID NO: 39498 - protein, 612 aa, Zea mays
  Clone ID: 700220943_FLI.pep
RAVLRGVIKRIGILCSCSSCKGRKVVSPYYFEVHAGSTKKHPSDYIFLENGNNLHDVLRACTNATLDMLEPAIRKAIGPAPQERISRCKSCKSSFSTLRSGKFALFCDSCLESKGAKNNISSSKVGRSQTSSAKVYKSASPGAKSSSVGRLTRKDKGMHKVVFMSGILPEGTDVGYYVGGKRLLDGYIKELGIYCHCCSTVVSPSQFEGHAGRAARRKPYHNIYMSNGVSLHELSISLLKGQKMSNRQSDDLCSICSDGGQLLLCDTCPRAFHRECVGLSSATKGTWCCRYCENRQQRESCLAYNNNAIAAGRVEGVDALEQIFTRSIRIATTLETGFGGCALCKLHDFSKKKFSTRTVLLCDQCGREYHVGCLKEHNMADLTALPEGAWYCSTDCVRINQTLQDLLNSGGEPVLAMDLDVIKKKREVKGFNDDDADLDVRWRVLKDKSSDDSKLVLSKAVAIFHETFDPIIQVSTGRDLIPAMVYGRSARDQDYTGMYCTVLTVNNIVVSAGLFRIMGSEIAELPLVATSRDRQGLGYFQALFSCIERLLSSLEVKHFVLPAAEEAESIWTERFGFAKISQDELREYLKGGRTTVFQGTSNLHKLVAKLEC

SEQ ID NO: 39499 - protein, 533 aa, Zea mays
  Clone ID: 700221196_FLI.pep
VDMIEGKCEVRKKNDLASSDLPVMFEHVFFCELIYDRASGALKQLPPNVRFMSMVQRTSALKKNKGKQICEPDQIDSGKWLDVPKENRLATLDIFAGCGGLSEGLQQAGVSFTKWAIEYEEPAGEAFNKNHPEAVVFVDNCNVILKAIMDKCGDTDDCVSTSEAAEQAAKLPEVNINNLPVPGEVEFINGGPPCQGFSGMNRFNQSPWSKVQCEMILAFLSFAEYFRPRFFLLENVRNFVSFNKGQTFRLAVASLLEMGYQVRFGILEAGAFGVAQSRKRAFIWAAAPGEMLPDWPEPMHVFASPELKITLPDGQYYAAARSTAGGAPFRAITVRDTIGDLPKVGNGASKLTLEYGGVPVSWFQKKIRGSMMVLNDHISKEMNELNLIRCQHIPKRPGCDWHDLPDEKVKLSNGQMADLIPWCLPNTAKRHNQWKGLYGRLDWEGNFPTSVTDPQPMGKVGMCFHPDQDRIITVRECARSQGFPDSYEFAGNIQNKHRQIGNAVPPPLAYALGRKLKEAVDKRQEASAGVPAP

SEQ ID NO: 39500 - protein, 406 aa, Zea mays
  Clone ID: 700222934_FLI.pep
PFTIVSPLVRPPRRRRRPPPPLPLPLRTLCESSLSGLCGAGMALRRLLQGSVLPRIIGRDLAPAVAPFSTESGETIRATLFPGDGIGPEIAESVKQVFNVAGVPIEWEEHYVGTEVDPRTESFLTWESLESVRRNKVGLKGPMATPIGKGHRSLNLTLRKELGLYANVRPCNSLPGYKTRYDDVNLVTIRENTEGEYSGLEHQVVRGVVESLKIITRQASLRVAEYAFHYAKANGRERVSAIHKANIMRKTDGLFLKCCREVSEKYPEIQYEEVIIDNCCMTLVKNPGLFDVLVMPNLYGDIISDLCAGLIGGLGLTPSCNIGEGGICLAEAVHGSAPDIAGKNLANPTALMLSAVMLLRHMQFNDKADRIHNAILQTIAEGKYRTADLGGKASTSEFTNAVSDHI

SEQ ID NO: 39501 - protein, 134 aa, Zea mays
  Clone ID: 700224008_FLI.pep
PGCSSPSAGSGATSRRAGTRSAWAPAPPSISPPCLSTSPPRCWSWPATRRRTTRRRASSRATCSWRSATTLSSASCWLASPSRTAVSSPTSTRFSCPRRWRRRRLAAAARRASPLRRPPSPQRRQPSPRRRLRN

SEQ ID NO: 39502 - protein, 247 aa, Zea mays
  Clone ID: 700224641_FLI.pep
WRGMYECHQVQTHIVQQLEYLNNARNTNPTSNGHRQAALQLEIEVDRCYSAFCSLVKSQRDYVYSLTGWLRLSLFCHHDPLTKAQNSDIYGLCEEWQLAIDRIPDKVASEGIKTLLTVIHAVVIQQAEEHKQKKRAESAFKEFEKKAEELRALESKYVGAEGYREMSRKSSVADKRAKVEALRSRADEEKIKYEKSIGVTRAMTLNNLQTGFPNVFQAMTGFASVCMEAFESVYNFKRSSDPKRLLT

SEQ ID NO: 39503 - protein, 126 aa, Zea mays
  Clone ID: 700235793_FLI.pep
SRSTAPRRAPPSCRPSTPTRTRGWWRCARRLSGAATRRATFSSSSAAGIDVPARRRRTVGRSRPPYSYICMHAWLLHQSSSPIMVIITASPVTAMDRLPPIITCIGLCQHPSNPNPSPGVPALLVH

SEQ ID NO: 39504 - protein, 205 aa, Zea mays
  Clone ID: 700235805_FLI.pep
FIYRVQTGICGSLQRQWQCRGGSQRKGLAVDVEHLRARQVRFLHAAEVDDLAGGCAGALQLLVAAAGVGHDGFHGGEQAAVGDPLGLAFHRLDEAVGHGPHRRAGLRRHAELAFAVAVAADKHRLAAARALADARRWTVILPLPVPGPGHVAEEGEVEDGIAVARVDDGVELGAGHQRPDDGLVDLVVQDGALLERVHRADGLVV

SEQ ID NO: 39505 - protein, 244 aa, Zea mays
  Clone ID: 700236373_FLI.pep
GEIEELPYALKKVEPGDRLEVSQENGTELSEKASFYKGVFYNYLSIGMDAQVAYGFHHLRDEKPYLAQGPVANKLIYAGYSCTQGWFCTPCTASPQLRGLKNILRLSIKKANCSEWEQVKMPSSVRSLVVLNLYNYGSGRHPWGDLRPEYLEKKGFVEAHSDDGLLEIFGLKEGWHASFVMAELIKAKHIAQAAAIKFEMRGGEWNRAYVQMDGEPWKQPLLQEHSTIVEINKVPYHSLMINGE

SEQ ID NO: 39506 - protein, 444 aa, Zea mays
  Clone ID: 700236766_FLI.pep
KGTEETRSAQNTGDLGLISSSSSPVTSAQRPLPSSSVGSNSRESKKRDTALHPLIFKEAGLPDNTLLTYKLKNGEALLQGYKQGAGIVCNCCNQEVSPSEFEKHAGMGKRRQPYQNIYTSQGLTLHDVALQLHHLNLNLNSNGFSNASVSSFSDYPNLTSSGCGKEPSVSGPIVPLKRTLQERVVQTESCYFCGYGHTELGKIDPNMIVFCNQCERPCHVKCYNSRVVKKKVPLEILKDYLCFHFLCCQECQSLRVRLEGMEKCEEIAFLGRIRSNICWRLLSSADASRDVKLYLSQVIDIFKDAFVESTDAHSDISEMVYGKNREGEKDFRGMYCVVLTASTHVVSAAILKVRMEQAAELVLIATRSECRKKGYFRLLLESIETNLRACNVSLLMAPVDPEMAQIWSDKLGFTILSADEKKSMLESHPLVMFKNLVLVQKPLV

SEQ ID NO: 39507 - protein, 382 aa, Zea mays
  Clone ID: 700238067_FLI.pep
AGQTAYLINNVNDFSDGFYKFVPRPVYWPMFIIATLAAIVASQSLISATFSVIKQSVVLDYFPRVKVVHTSQHKEGEVYSPETNYILMVLCVSVVLGFGAGNAIGNAFGVVVIMVMLITTVMLTLVMIIIWRTPPVLVALYFVPFVIMEGSYVSAVFTKIPEGGWLPFAVSIILALVMFGWYYGRQRKTEYEIANKVTVERLGELLAKPEVQRVPGLCFFYSNIQDGLTPIVGHYIKNMSSLHAVTVFVTLRYLLVAKVDERERVLVERLGPDGVYGCTVQYGYADSLSGGDLTAQVTGSLRRHFGTSEAGAEEAARLEAARTNGVVHVRGKMRFYVGEDAGWFDKVMLGFYEFLHGICRSALPALGTPLQQRVEIGMLYKV

SEQ ID NO: 39508 - protein, 264 aa, Zea mays
  Clone ID: 700238683_FLI.pep
KTFYDPVLRRRVLWGWVGETDSERADVLKGWASVQSIPRTVLLDTKTGSNLLQWPVVEVENLRMSGKSYDGVALDRGSVVPLDVGKATQLDIEAVFEVDAEGVGVAEEADVTFNCSTSAGAASRGLLGPFGLLVLADEDLSERTAVYFYLVKATDGSLKTFFCQDELRSSKANDLVKRVYGSLVPVLDGENLSVRILVDHSIVESFAQGGRTCITSRVYPTRAINDSARVFLFNNATGVHVKAKSVKIWQLNSAYIRPYPASSL

SEQ ID NO: 39509 - protein, 380 aa, Zea mays
  Clone ID: 700239390_FLI.pep
ISPAASRGFLTSFPEVFINVGILLGYLSNFAFARLPLRFGWRVMLGIGAAPAGLLALMVLWMPESPRWLVMKGRLADARAVLEKTSASPEEAAERLADIKVAAGIPKGLDGDVVAVPKERSGGEMQVWRELILSPTPAIRRILLSAVGLHFFQQASGSDSVVLYSPSVFKSAGITDDNKLLDLGVTCAVGVAKTLFIPVATFLLDRAGRRPLLLTSTGGMIVSLVGLGTGLTVVGHHPDAKIPSAVALCIASTLAYVAFFSIGLGPVTGVYNSEIFPLQVRALGFAVGVACNRVTSAVISMTFLSLSKGITIGGSFFLYSGIAAVGWVFFFTCLPETRGRTLEEMGKLFGMPEPDTDMAEAYNAAAKEKAVEMPAVLGND

SEQ ID NO: 39510 - protein, 303 aa, Zea mays
  Clone ID: 700240251_FLI.pep
ARSRRGRRHQTSRWWSDPIRSGWLDGRGHTSRGTVAGDVAGLAAVVAGAVASTPAAAEPPSATAATAWAVPGHVAGLAAVVAAATTTAAATAVAAAAAGAVPGHVARLAALEAATAAAASSSSVAASPVAASAVASAVGARAVPGHVAGLAALVARARTAPAAGSPAAAPATTVAATAAARSATAAGAVAAAAAASSASAAPDEGSVGAGHVDGLSAAVVTLRDGKLHLLALRERAEALRLDRRLVHEEILAAVLGGDEPEALGVVEPLHRPPLPRRRRHRNPRTLALRMLGLDFFPPLPVSR

SEQ ID NO: 39511 - protein, 153 aa, Zea mays
  Clone ID: 700240304_FLI.pep
LSTSSQARQRELRKRHRQPLQTREEMRSTTEPVQSAALALEGVHNIHGGDGLAASVLGVGDRVADDILEEDLEHAAGLLVDKPGDTLHAAPPRQPPDCRLRDTLDVVAENLTVAFRTTLAQPLAALAAPRHRRRVGRRQWCATRRLWDLNTPR

SEQ ID NO: 39512 - protein, 440 aa, Zea mays
  Clone ID: 700240895_FLI.pep
LVGAKFFGLGYEAAHGGGAVDETDSRSPLDTNGHGTHTSSTAAGSAVPNAAFFDYAKGTAIGMAPRARIAAYKACWARGCTSSDILMAFDEAIKDGVNVLSVSLGAVGQAPPFYSDSTAVGAFSAVRRGIVVSASAGNSGPGEFTAVNVAPWILTVGASTVNRRFSANVVLGSGDTFAGTSLYAGTPLGPSKIPLVYGGDVGSSVCEAGKLIASKVAGKIVVCDPGVNGRAAKGEAVKLAGGAGAILVSAKAFGEQPITTPHPPSDGRDVRRCREDQEVHQNQRVPRCDHRVSRHRRRRDAVFPENGILFQPRPKPPRTGDPEAGRDRPRGGHPGRVDRRELALGARQRHEASEVQHHIRHVHVVPSRERHRRDAPAGAPGLEPRRDQVRADDHRVQRRQRRGRHQGHVHRRGVHAVRARGRPRGPQPRPQPRPGVRRRH

SEQ ID NO: 39513 - protein, 273 aa, Zea mays
  Clone ID: 700240967_FLI.pep
RDGLSTMTTAGYDAPAARLAKRKRKNQYRGIRQRPWGKWAAEIRDPQKGVRVWLGTFNSPEEAARAYDAEARRIRGKKAKVNFPDAPAVGQKCRSSSASAKALKSCVEQKPIVKTDMNILANTNAPFYQSVNYASNNPFVPAMNSTVSFEDPIMNLHSDQGSNSLGCSDLGWENDTKTPDITSIAPIPTIAEGDESVFVNSNSNSSMVPPVLENNAVDLTDGLTDLESYMRFLMDGGASDSIDSLLNLDGSQDLGSNMDLWTFDDMPIACDFF

SEQ ID NO: 39514 - protein, 187 aa, Zea mays
  Clone ID: 700240986_FLI.pep
GIHIPAIFVSKMAGETLKKFARGEDEECCINSSMDETAGTVLVMSFVSLVVIMSVLASFLFARNCRLLRHGVDNHPPYVKKQVVEKFPCSAYSAPCSSEDNFQEACAICLEDYNNGDMLRHLPCKHGKSLRYFSTCYLKLLLLIGSYQRYGGAQPYNCYFFFLSDRYKFTNTIIYIYIYIYIYIYIY

SEQ ID NO: 39515 - protein, 351 aa, Zea mays
  Clone ID: 700241453_FLI.pep
LIVELHAVLGNRWSQIATRLPGRTDNEIKNLWNSSIKKKLRQKGIDPNTHKPLLVEVERSKAAPTTSTERTSESNDVDPSSGAALGNSSHLLLSETAQSPQLPALGKHRRETTSLAHLRVPPKELFLDQLASGHENLTGCRTAGPVPNFPFQQLMCYNNEFGNKNGASNNSLWFNHNETSGSTISTVMPPVSPSTLSTSTGLNRSPDNPHSGGTAIQSTQFYWDAANPSSCSSRGSSGSNGLGFELQSTSSLLESSVFPWTELTPDKNSQVQLGEELKWPDLLHGTFTDTHATMQNLSQSLYEDVIKAESQFNIEGLCAAWSQNLQPQQHLQVSDLYDKDLQRMSLSFENI

SEQ ID NO: 39516 - protein, 130 aa, Zea mays
  Clone ID: 700242128_FLI.pep
LEGDSRGARVQGRRTGAEEGGGQGGGRGRQRPSDQRRAQQGAGGEDGTCAGISRPRVRSSRTPKAAVPPAPPLAGDHRPPATPGMPPARFVHLILLATLSLLLAQTLASSSPAPASNATAGEPGDPCAAA

SEQ ID NO: 39517 - protein, 81 aa, Zea mays
  Clone ID: 700242539_FLI.pep
DMGRYRKYNFESIRDLLRYIRNKSGHYRELSDDLKGILGSLPEGFDRYFASRFPKLLIEVYKVLWVHCKDEEAFSKYFKGS

SEQ ID NO: 39518 - protein, 266 aa, Zea mays
  Clone ID: 700243481_FLI.pep
YKSVWFIIPSREFIYRVQTGICGSLQRQWQCRGGSQRKGLAVDVEHFRARQVRFLHAAEVDDLAGGCAGALQLLVAAAGVGHDGFHGGEQAAVGDPLGLAFHRLDEAVGHGPHRRAGLRRHAELAFAVAVAADKHRLAAARALADARRWTVILPLPVPGPGHVAEEGEVEDGIAVARVDDGVELGAGHQRPDDGLVDLVVQDGALLERVHRADGLVVPVLLVAVRVGDLRAQPREVEHQGVAAAAPLHQPLHRHPDVVLGGHPERV

SEQ ID NO: 39519 - protein, 391 aa, Zea mays
  Clone ID: 700243659_FLI.pep
PSSWLVITTSKSQVRAGEVEVEEEQRNPFQECLMAGGKEAHGWAARDVSGHLSPYHFSRRVQRDDDVTIKVLFCGLCHTDLHVIKNEFGNAKYPVVPGHEIVGVVTDVGSGVTSFKPGDTVGVGYFVDSCRSCDSCSKGYESYCPQLVETSNGVSLDDDDGGATTKGGFSDALVVHQRYVVRVPASLPPAGAAPLLCAGVTVFSPMVQYGLNAPGKHLGVVGLGGLGHLAVRFGKAFGMKVTVISTSLGKRDEALGRLGADAFLVSRDPEQMRAAAGTLDGVIDTVSADHPVVPLLDLLKPMGQMVVVGLPTKPLQVPAFSLVAGGKRVAGSAGGGVGECQAMLDFAGEHGITADVEVVGMDYVNTAIQRLERNDVRYRFVVDVAGSKIGG

SEQ ID NO: 39520 - protein, 245 aa, Zea mays
  Clone ID: 700257310_FLI.pep
QRTTCSRTHTHTSTFVPSAAYASPHTGNKVLLNIRSLRTVSLCLLRGLGGLLGRLCLLAPATGRLLRRLLGQQNRVDIGEHTSVSDGHAAQQLPELLVVPDRQKHVARNNASLLVVPGSITGELQNLVKQGSKTNRDARINTPSPNQYKQRTGLKLQYLSGEVFEDSGEVDGGAGADTLRVAALLQVAPDAADGELEPSLHGPRHRLLPWPADLAPGRSLLSLPRCSGAGGVHGRISASSGLSGT

SEQ ID NO: 39521 - protein, 219 aa, Zea mays
  Clone ID: 700257966_FLI.pep
QRATCSRAHTHTSTFDPSTAYASPHTGIKVLLNIRSLQTVSLCLLGGLGGLLGRLCLLAPHTGRLLRRLLGQQNRVDIGEHTAVSDSHAAQQLPKLLVVPDRQKHVARNNASLLVVPGSITGELQNLSGEVFEDSGEVDGGAGADTLRVAALLQVAPDAADGELEPGLHGPRHRLLPWPADLAPGRSLLPLTPCSGAGGVHGRISASIGLSGTRRKCSG

SEQ ID NO: 39522 - protein, 576 aa, Zea mays
  Clone ID: 700257969_FLI.pep
SMQVPVGFLGKLWSFVSFVPFFVLLLLLGSIKAAIVGPVTASIVFFGSSAVIIGLWPAHFIWTYYCVLKTERIGLQLKILTGLLLPLPLLLLPVLASIGSLLGGTGYGVFVPLMATFEAVGEGVTDKLTHCFTDGTVSAMAGACTVVRDVTDFCFHSYFSFMDDLIDKMGDNEEAPLDIKLSYLPRSMVVAFIAVPVDVLLISAVALWKSPCMLFKGWQRLCEDLVGREGPFLETVCVPFAGLAIVLWPLAVIGGLLASFFSSFFFGFRAGLVAYQEASFQMGLAYMISAVAIFDEYTNDLLYLREGSCLPRPKYRRADIMRECETEPAERQQTGHHKHRRTLPRSKTFMQTVQRLRPIQIWDWFFRSCELNGRILVSEGLITAQDMEQYITNNGKCKKLGTKLPCWCIFQCLLRSANSDSDGLVISDHVQVTTLNWPKDRVLDWLLGPLLLIKDQLRKLEVTEDEEMCLRKLIMTSKNEKPSDWDDSGFPSDDNIKRGQLQSIIRRLQGIVAYMSRVPSFRRRFINLVKAMYLEAIEAGAIDGSRKVKADVADRCAEDIAGSCSSTDTRANIHMV

SEQ ID NO: 39523 - protein, 417 aa, Zea mays
  Clone ID: 700258417_FLI.pep
NVGFSLTRGLLKHFWCTNLLLSVIGFTTSFLGGCVLLMDLKTGLNSPVIADHLPTLALPAAVMTFTTPTSFPSPGLCLNTTKKIPLPGKIEEVRAAGWLDLMKASSPTRKRQIKDVICDAQSDLDLQYCNWTVNYPSALISFEAISDLAGSKRLALFLDYDGTLSPIVDNPENALMSDEMRAAVRHAASLFPTAIISGRSRDKVFDFVKLNELYYAGSHGMDIMGPVRKTTDSNGVECIRSTDVHGKEVNLFQPASEFLPMITEVYEKLGESVKDIDGARMEDNKFCVSVHYRNVAEDDYKKVFHRVTAVLEGYPCLRLTHGRKVLRSVLLLIGQSKAVEFLLESLGLSESEDVLPIYVGDDRTDEDAFKVLKASNRGFGILVSSIPKESDAFYSLRDPAEVMEFLRMLAAWKEQST

SEQ ID NO: 39524 - protein, 387 aa, Zea mays
  Clone ID: 700258957_FLI.pep
AEQYNEGSSSVDFDVPLLALLELLLVVQPVDPVLGCEVEHDVVDALLHALEPAHVDVGVVLLEQLPQLLLVLRHARLDVHLLPGRVRLLPAHREVQPEVVRRHLLHLLQLLLVQQGVAGRDAQEQPRQPGVLVVLVLLEEHLPQEGAERSDAGTRCEHDDCCVGVFGHEHLLAHWPCDLHLSAWLQVTEEVRADSFDDLPLIVGVDQPLHAQRHRLGVAEISEGAAGDGVEPELVRLAVLVLAIRDDADGLALSVGDLAFCAEDHVPRLPGRLVAGDPGVEQAPPDVRLLGLVLVGDEPLLLLLGHLLQLLDRLRLRGLGGGHLHAQPHRARAAVPPRELEVAAWRRRGRGRGRLGLGGGRGGGGGGQRDGRRGHGSHGCGWGRMER

SEQ ID NO: 39525 - protein, 469 aa, Zea mays
  Clone ID: 700260028_FLI.pep
AKVRGISGGEKKRLSLACELIASPSVIFADEPTTGLDAFQAEKVMETLRQLAQDGHTVICSIHQPRGSVYGKFDDIVLLSDGETVYMGPAKEEPLTYFSSLGYQCPDHMNPAEFLADLISIDYGSTESVQSSQKRIEDLIEAFSNKSVVTEGNNLIAIPEDPELSAKLVRKTTVKKRHGWWRQFRLLFKRAWMQAFRDGPANKVRSRMSVASAVIFGSVFWRMGKSQTSIQDRMGLLQVAAINTAMAALTKTVGVFPKERSIVDRERAKGSYALGPYLSSKLLAEIPIGAAFPLIFGSILYPMAKLHPTFSRFAKFCGIVTVESFAASAMGLTVGAMAPTTEAAMALGPSLMTVFIVFGGYYVNPDNTPVIFRWIPRISLIRWAFQRLCINEFKGLQFEQQHSYDIQTGEQALERFSLGGIRIADTLVAQGRILMFWYWSTYLLLKKNRPKYQQLLPPLEEDKNKQQVE

SEQ ID NO: 39526 - protein, 377 aa, Zea mays
  Clone ID: 700261217_FLI.pep
PFWWMLMQVLENGLLVDPHDQHAIADALYKMLSEKQFWSRCRENGLKNIHQFSWPEHCKNYLSRISSLGPRHPAFACKEDHKVPVKCRKHISIIAVDSVNKEDLIQIIRNSVEATRTGTMSGSTGFVLSTSLTIAELQSVIVRTGMLPTDFDAFICNSGSDIYYPLQSSDVPSNSRVTFALDHNYRSHIEYRWGGEGLRKYLVKWASSVVERRGRTEKQVIFEDSEHSSTYCLAFRVVNPNHLPPLKELQKLMRIQSLRCHALYNHGATRLSVIPMHASRSQALRYLSIRWGIELPNAVVIVGETGDSDYEELFGGLHKTVILKGGFNTPANRIHTVRRYPLQDVVALDSSNIIGIEGFSTGDIRSAMQQQLGIPTQ

SEQ ID NO: 39527 - protein, 490 aa, Zea mays
  Clone ID: 700262031_FLI.pep
WGLGKLIAFYDDNHISIDGDTEIAFTEDVSTRFEALGWHTIWVKNGNTGYDDIRAAIKEAKAVTDKPTLIKVTTTIGFGSPNKANSYSVHGSALGAKEVEATRQNLGWPYDTFFVPEDVKSHWSRHTPEGAALEADWNAMFAEYEKKYADDAATLKSIITGELPTGWVDALPKYTPESPGDATRNLSQQCLNALANVVPGLIGGSADLASSNMTLLKMFGDFQKDTAEERNVRFGVREHGMGAICNGIALHSPGFVPYCATFFVFTDYMRGAMRISALSEAGVIYVMTHDSIGLGEDGPTHQPIEHLVSFRAMPNILMLRPADGNETAGAYKVAVLNRKRPSILALSRQKLPHLPGTSIEGVEKGGYTISDNSTGNKPDLIVMGTGSELEIAAKAADELRKEGKTVRVVSFVSWELFDEQSDEYKESVLPAAVTARISIEAGSTLGWQKYVGAQGKAIGIDKFGASAPAGTIYKEYGITVESIIAAAKSF

SEQ ID NO: 39528 - protein, 322 aa, Zea mays
  Clone ID: 700262568_FLI.pep
HCYLVLTGTHGHSLCSLGLGHDHTTAKQLPYLAIDDDASVDVEDLARHVGRILVAGEEDEAGRDLGRLRGALHGHLGPELLHLLLAEGRRDERRPDGARRDAVDADAPVGQLQRERAREGHDGALGGRVVQQRLVALVRVDGGGVDDAGAGLHARHRVLGHQEVGEDVGAEHALQVRLRHVPDALPLVLLRRVVHHHVDAPAVRRRHPLHHLPAVGLVPEVGGQGHRLARARLGPDVAQRTQRLLRVLLLLPPHEGEGHRRALLREAQAHGAPDAGVAAGHERHLVLELVGGLVVLDDGLGPGVHRVLLPRLGLLLLSRELL

SEQ ID NO: 39529 - protein, 228 aa, Zea mays
  Clone ID: 700263249_FLI.pep
RTYKSITRTWSNTKTIKNKKKTYYIEGNSARERTTTLKLSNLTATRAFLFQTTCAHVHVRTAYPLQLTSRYRYCRRTARIDLLGRYVHKNASATTTLASLIRRSHLDVLARRRVRVAGGRVRGVDGRASAVVAVRAGEGHARAVVASGGVRSVVGLLLVLVGVGLVLLGAGRLLGHLLLAVRGRRRLARLALHLCRPLLHLLLRRAHHVLRLHLRCLHPVLVWLPSLS

SEQ ID NO: 39530 - protein, 369 aa, Zea mays
  Clone ID: 700263624_FLI.pep
MDRLTVMAPPLLVLLLLLLSRCSAAAPRRGGGWWEEGEGEWRPSEEEEKGKDKGRGLFLLHRVEKVVESEGGQVRVVPASRGPPASFAACREGLMHIGFITMEPKTLFVPQYLDSSITLFVQRGEAKVGYIHKDELVERKLKMGDVLHIDAGSTFYMVNPGKGQRLQIICSVDASDSLGFGPPYQAFFLGGAGDPASVIAGFGPKTLTRAFNVRYMPPTTSWRVSCCHEPAAPSCTTPRTRSQRAVPPKRSAGRSTGTTVCWTGERDARALARGCRVAGETEATSAAAAMARVWRRRGGRSWLTGSSEGRLAAASPRRRTGRPRRRAARRSRTTYTTASPGSGTRTAGPSPSTSTSTSPSSTPTSASTS

SEQ ID NO: 39531 - protein, 136 aa, Zea mays
  Clone ID: 700263789_FLI.pep
ISFPLLLNLSPFTGGASSAGPLAMNAQRDGQQALHLYRQLNMQANADVSSSSSSPPQLSRSKLYGLAAVVEHYGKCGGGHYAVYRRVASNPDPDDPGKPVAGLGKRWFYISDGYVSEVPEEDVLRAEATLLFYERL

SEQ ID NO: 39532 - protein, 584 aa, Zea mays
  Clone ID: 700264357_FLI.pep
PNTPEHITVTDTMVSARIVVLLATLLCAAAAVASSWEDDNHHHHGGHKSGQCVRRCEDRPWHQRPRCLEQCREEEREKRQERSRHEADDRSGEGSSEDEREQEKEKQKDRRPYVFDRRSFRRVVRSEQGSLRVLRPFDEVSRLLRGIRDYRVAVLEANPRSFVVPSHTDAHCICYVAEGEGVVTTIENGERRSYTIKQGHVFVAPAGAVTYLANTDGRKKLVIAKILHTISVPGEFQFFFGPGGRNPESFLSSFSKSIQRAAYKTSSDRLERLFGRHGQDKGIIVRATEEQTRELRRHASEGGHGPHWPLPPFGESRGPYSLLDQRPSIANQHGQLYEADARSFHDLAEHDVSVSFANITAGSMSAPLFNTRSFKIAYVPNGKGYAEIVCPHRQSQGGESERERDKGRRSEEEEEESSEEQEEAGQGYHTIRARLSPGTAFVVPAGHPFVAVASRDSNLQIVCFEVHADRNEKVFLAGADNVLQKLDRVAKALSFASKAEEVDEVLGSRREKGFLPGPKESGGHEEREQEEEEEREERHGGRGERERHGREEREKEEEEREGRHGRGRREEVAETLMRMVTARM

SEQ ID NO: 39533 - protein, 405 aa, Zea mays
  Clone ID: 700265205_FLI.pep
PVLPSSPIAPGSPLRHGDRNMRFPPGMRNFGNSFGSWNSGMSGKMDANLMPSLLEEFKSNKSKSYELSEIAGHVVEFSADQYGSRFIQQKLETASTEEKDMVFSEIMPQALTLMTDVFGNYVVQKFFEHGSTAQIKELAGQLIGRVLALSLQMYGCRVIQKAIEVVDLDLQTKMVAELEGHVMRCVRDQNGNHVIQKCIECIPQHAIEFIVSTFYGQVVMLSTHPYGCRVIQRVLEHCDDPKTQQIMMDEILQSVCLLAQDQYGNYVVQHVLEHGKPHERSAIIEKLIGQVVQMSQQKFASNVIEKCLAFGNPVERQVLIGEMLGSTSESEPLEVMMKDQFANYVVQKVLETCDDQQREMILTRIKTHLNTLKKYTYGKHIVARVEKLVAAGEKRLGLQPACTAA

SEQ ID NO: 39534 - protein, 359 aa, Zea mays
  Clone ID: 700267313_FLI.pep
IDHKKYDEAKACASVSIARLKNLNRRTVDVLASRLYFYYSYVYELTNSLAEIRGNLLALHRMATLHRDELGQETLLNLLLRNYLHYNLYDQAEKLRSKAPRFEAHSNQQFCRYLFYLGKIRTIQLEYTDAKESLLQAARKAPITACGFRIQCNKWAIIVRLLLGEIPERTVFMQKGMKKALIPYFELTNAVRVGDLELFRAVADKFASTFSADRTRNLIVRLRHNVIRTGLRNISISYSRISLADIAKKLRLDSENPIADAESIVAKAIRDGAIDATIDHANGWMVSKETGDVYSTNEPQIAFNSRIAFCLNMHNEAVKAMRFPPNSHKEKESAEKRRERLQQEEELAKHMAEDDDDDF

SEQ ID NO: 39535 - protein, 418 aa, Zea mays
  Clone ID: 700267568_FLI.pep
QTKQQGKTSSAAVAGRPSPTRLDRPFPPPLQEHDRWTDTMGRNSYELVLGRHDSRPTGSRHDAVQLQVLAERGLPHCPEDVGERHDPTQEPFLVDHPQPVHVPRCRRLDRLAEGALLGARHQRRLLLLALLFVSGGGSRGGVGVPGDRGASVRGVGAGDHKPGAGAVLSHLPLELHHADPQPSLQPRHRAVPQVRRRERLDRPLPAPVLKGLCTATDGVHDGHGGQRRRPHRLDGVDHLGNARDGEHGVIHGAELAHGAQQHAPELRAVRPEEPHHVHLGEHPVPRRRLHQLQRHHVVRRALQRHQRAVHTLAERLHAVQHAGARVERPQSEALEGVSDDGGHRHGHPAVEIDRLVVVAGLGDVGKDVEHVHHADVVLADSRIIEPPAPIQWPGGAATATAETRAARSALAVCASVAV

SEQ ID NO: 39536 - protein, 297 aa, Zea mays
  Clone ID: 700268092_FLI.pep
HALDKGEAVNFLKGAVVTADRIVTVSKGYSWEVTTAEGGQGLNELLSSRKSVLNGIVNGIDINDWNPATDKCIPCHYSVDDLSGKAKCKGALQKELGLPIRPDVPLIGFIGRLDYQKGIDLIQLIIPDLMREDVQFVMLGSGDPELEDWMRSTESIFKDKFRGWVGFSVPVSHRITAGCDILLMPSRFEPCGLNQLYAMQYGTVPVVHATGGLRDTVENFNPFGENGEQGTGWAFAPLTTENMLWTLRTAISTYREHKSSWEGLMKRGMSKDFTWDHAAEQYEQIFQWAFIDRPYVM

SEQ ID NO: 39537 - protein, 286 aa, Zea mays
  Clone ID: 700281859_FLI.pep
LDRTVCPRGVSRSTATPLWAAKLTDGWMPRVCGIVGSCVCVCVCRAYDRAAIKCNGKDAVTNFDPSIYAEELEPAASTGGGGDDHNHNLDLSLGSSAGNKRGSLDDGGGGGGGGDDETSDQRVPMAFDVDWQTAAPRSTKAKLDASSKQPQTQMLPPPPPAVLRVAHQLPLPFGPRHPQSQFLSNGGDPGTSGGLSLAIGGAGGGHWPPQLQHLQQQRLHGAWANGGGTSWPPPPHPHPHPHPPPPSTAATAAAASSRFPPYVVTTTQGPAGWAQKNGFHSLARPT

SEQ ID NO: 39538 - protein, 292 aa, Zea mays
  Clone ID: 700282564_FLI.pep
PSSSAPDFQHLRSGCALPCFPATCSSASERGTAADLAAQAEGSAGAGKSAPNMGRGRVELKRIENKINRQVTFAKRRNGLLKKAYELSVLCDAEVALIIFSNRGKLYEFSSTQSMPKTLEKYQKCSFAGPETALQNRENEQLKSSRNEYLKLKARVDNLQRTQRNLLGEDLESLGIKELEHLEKQLDSSLKHIRSTRTQHMVDQLTELQKKEQMFCEANKCLRRRLEESNQVIWQHAWEQSERHSEVQPQQLNGNNFFHPLDGAGEPTLQIGYPSEALTSSCMTTFLPPWLP

SEQ ID NO: 39539 - protein, 284 aa, Zea mays
  Clone ID: 700332259_FLI.pep
LMNVKDLTLAHVKSHLQMYRTVKGTTADRSCAAGHVQMRDMGFLHRGCELNGFEAFSNGTSNATANNRMQAAAGSPAGKHAEVAWFLRPPLAHQSSGGGGGGGGAVPLPLPLPCPYLMSAHHNRYLLSQNQGWRTRGAHQQDAAAPPPLVLGQQDSARRLHPGFPDTAISSSRPSSWSAGVASRWSSTAAAAPSPSSGRSSISSGTEQPAACSWTMMTTNKQKQQQQPPSTSSSSRVVAVPNLEMSLGRQGWQHDLQDHHPQQQQQQRSGESTAPKELTLLKCL

SEQ ID NO: 39540 - protein, 471 aa, Zea mays
  Clone ID: 700333239_FLI.pep
PESRSQPPPTFPRVSPIRSFFPRGESKMREILHIQGGQCGNQIGSKFWEVVCDEHGIDPTGRYMGTSDVQLERVNVYYNEASCGRFVPRAVLMDLEPGTMDAVRTGPYGQIFRPDNFVFGQSGAGNNWAKGHYTEGAELIDSVLDVVRKEAENCDCLQGFQVCHSLGGGTGSGMGTLLISKIREEYPDRMMMTFSVFPSPKVSDTVVEPYNATLSVHQLVENADECMVLDNEALYDICFRTLKLTTPSFGDLNHLISATMSGVTCCLRFPGQLNSDLRKLAVNLIPFPRLHFFMVGFAPLTSRGSQQYRSLTVPELTQQMWDSKNMMCAADPRHGRYLTASAMFRGKMSTKEVDEQMINVQNKNSSYFVEWIPNNVKSSVCDIPPRGLSMSSTFVGNSTSIQDMFRRVSEQFTAMFRRKAFLHWYTGEGMDEMEFTEAESNMNDLVSEYQQYQDATADEEADYEEEEAAAE

SEQ ID NO: 39541 - protein, 369 aa, Glycine max
  Clone ID: 700555621_FLI.pep
EREMGLRSKLRMSASVVQQGMKEIRRSVTYMPRPGDGAPRGVTLIPGDGIGPLVTHAVEQVMEAMHAPIYFEKYDVHGDMRRVPEEVLDSIRKNKVCLKGGLRTPVGGGVSSLNVQLRKDLDLYASLVNCFNLPGLPTRHHNVDIVVIRENTEGEYSGLEHEVVPGVVESLKVMSKFCSERIAKYAFEYAYLNNRKQVTAVHKANIMKLADGLFLESCRHVATKYPGIKYNEIIVDNCCMQLVSKPEQFDVMVTPNLYGNLVANTAAGIAGGTGVMPGGNVGADHAVFEQGASAGNVGKEKMVEQKKANPVALLLSSAMMLRHLQFPSFADRLETAVKRVISEGNCRTKDLGGDSTTQQVVDAVIANLD

SEQ ID NO: 39542 - protein, 181 aa, Zea mays
  Clone ID: 700333417_FLI.pep
KRTNSIRLQIALLHPSAATGAGREIRLRALAADAAGELDVFGHDGDALGVDGAEVGVLEQADEVGLGGFLEGQDGVALEPQIRLEVLSDLTDQALEGQLPDQQLRALLVLADLAQSHRPGPVPVGLLHAAGRRRRLPRRLGGELLARGLASGGLAGGLLRTSHLLLSLAARFLPCLDGTNL

SEQ ID NO: 39543 - protein, 106 aa, Zea mays
  Clone ID: 700334082_FLI.pep
DIKENPVLIYMKGFPESPMCGFSALAVKVFQQYGVPVCGRDILGDLKLKECVKAHTNWPTFPQIFIKGEFVGGSDIILSLHQKGELKDLLGDIAQRDEQKVHAHDS

SEQ ID NO: 39544 - protein, 222 aa, Zea mays
  Clone ID: 700334889_FLI.pep
PSVMSEHLFLSTHSDRLLNHSSASADTQEEAAKAYDLAAIEYRGVNAVTNFDISCYLDHPLFLAQLQQEPQVVPALNQEPQPDQSETGTTEQEPESSEAKTPDGSAEPDENAVPDDTAEPLTTVDDSIEEGLWSPCMDYELDTMSRPNFGSSINLSEWFADADFDCNIGCLFDGCSAADEGSKDGVGLADFSLFEAGDVQLKDVLSDMEEGIQPPAMISVCN

SEQ ID NO: 39545 - protein, 308 aa, Zea mays
  Clone ID: 700335205_FLI.pep
NVALDLARREAEMAIRARNDFLAVMNHEMRTPMNAIIALSSLLLETELTPEQRLMVETVLKSSNLLATLINDVLDLSKLEDGSLELEIKAFNLHAVFKEVMGFIKPIASIKRLSVSVMLAPDLPLCAIGDEKRLMQTILNISGNAVKFTKEGHITLVASIVKADSLREFRTPEFHPTASDEHFYLKVQVKDTGCGVSPQDLPHVFTKFAHPQSGGNRGFNGSGLGLAICKRFVSLMGGHIWIDSEGTGRGCTATFVIKLGVCDNTNTYQQQLVPLVWPSSADSNLSAPKVLPDGRGSVSLKSRYQRSV

SEQ ID NO: 39546 - protein, 645 aa, Zea mays
  Clone ID: 700336827_FLI.pep
VVETRKGRSCLAEKMENLRRFLNPLVLNLQKMELELTCPVCLKLLTSPTTLPCYHTSCSKCALTPTSKGYSCAICKSGYCSQDLRPASHLESIVSIHRSLSSTVSTMIEQQDSQINIHVAKAASHGTPESGNRSGVEEKSDQMKSYNPVASKLVYNQPTGPAFGNIDSVQAKDPAFENNAGAAAVAPMAFVRKGHSGSQSSDGPGDLDCDSNDLEGELMTSLSPLQTALKREANAMDDHTRELKKQKSNDQVQRQTNMASAWKCEFCHSSQVTECTGPLSHYLNGEPVEADQAWKSSVQHVHEKCIEWAPQAFFTGDTANNLGPELARASKIKCSVCGLKGAALGCLVKSCRKSFHVPCAYNIKGCKWDQENFVMLCPTHSSKKLPCERLKPKKKAKLQQPSSDIDGPISPSPMQRAELWTASPFLTSEWVICGSALVGHEKEILDQFECHTGITVTNTWSSDVTHVIANTDERGACARTLKVLMAILAGKWVLNVNWLKACMEAREPVPEEPYEIRCDVHGSVDGPRSGRLRAMQQAPGLFAGLTFYFSGHFMPGYRANLEDLIAAAGGSVLEKAELSSTSLILYSMEAPPPHNNLDALETINKRLAEAQELATTAGCKAIPHTWLLDCIASCAVELNVSCSTA

SEQ ID NO: 39547 - protein, 225 aa, Zea mays
  Clone ID: 700336954_FLI.pep
RKRRPRRRRGSPAVEVERADAQVSGLHQGPPGRHRSCQCDSRVSEFLRDYDGSVIQMRVAYSAVAHFLLQWTDCKLAGALGLLKVMLYKVCADGSSALPDWDMEASIREFYGVIFPLLLQLPSGITELDDRKQRKLCLKKFRSRDEQLWEVDTERELECGICLEEMTPTLLRSLKPQDMSVIKQVQVSRKWEFHGNTDIGSILHIDMILADKERCLRCVVKSRRR

SEQ ID NO: 39548 - protein, 99 aa, Zea mays
  Clone ID: 700337519_FLI.pep
ANKRLDKKNKIPSIGINLPGSTQLMDYALHMRLTTASKHSSHPHLMQGVLEMFVANPVMETEIKCIETLEVVNHGMLPLNSNCCRKQPSLSVLSISQAG

SEQ ID NO: 39549 - protein, 77 aa, Zea mays
  Clone ID: 700342723_FLI.pep
RCKFISTVFCSMMRWLSGGYSFESADVGPHNSSKRNSVRIINMNSSSLRYEVVDQDWLPGILCRTNCILIVTFFGWG

SEQ ID NO: 39550 - protein, 154 aa, Zea mays
  Clone ID: 700342991_FLI.pep
GIPPDAMEPDSATYKKICSLAAEFKSGKLPSEDEVAKWSGQEWELYLENLPADVEASQVTALDERYKLSESRDYEVKVAFLQLAIPTGCKCYFNEVEKCLKQVGRMKYLRPLYSSLAKCSSEEKMLAQRIFSEAQEFYHPIARSVAEAILSKHS

SEQ ID NO: 39551 - protein, 129 aa, Zea mays
  Clone ID: 700343081_FLI.pep
DKKEAEAVTVATEPKGRKRGKKEAEAVAPAAEEEDGVDVAAGAKRVIVEACTQCRQFKIRAQKVKEDLESYVSGVSVIINPQKPRRGCLEIREEGGEVFISLLNMPRPFTPMKKLDMDKVIKDIAKKIS

SEQ ID NO: 39552 - protein, 180 aa, Zea mays
  Clone ID: 700343308_FLI.pep
TNSDLYCVIATKKMVQMTVSKVSKGRHAAQHPTTLQLWVHRSGRRQPGTLAREQIKLRVPSVTSLESVPKLEYRVRVRNADVYGEHSSRMSLRNPQATCMCCGVFAGPASSSAYGGDVCRRTGVQELPEPGTAVLRVPADARRVGAVDHGKEVLRGGTGRGRGCGCFARRRFCGVLQLHH

SEQ ID NO: 39553 - protein, 187 aa, Zea mays
  Clone ID: 700343350_FLI.pep
HWPKSTRKRNRAVAPCGGDLRGSKLGNGLGALGDGVLGELARKDEAHRSLDLPGGYGGLLVVAGELGGLGSQLLEDVVDEGVHDGHGLGRDTNVRVHLLEHLEDVDLVRLDALLGLLLPLLLAALLARHALLRPGLLLGLLLRRLLLRGLLLGLGRHREFDQMERRTRDGKRRIGNLLIGGDERWWL

SEQ ID NO: 39554 - protein, 180 aa, Zea mays
  Clone ID: 700343661_FLI.pep
LSTADHQKLLTEKKAALGRRFLRLEWLHHLPGEVRVVPSKVAVGRRLEVAPVAAFLEVKVDDDHARPEIEVLLDNLEDLLVGDRAGAVRVDEHGERLGHADGVRHLDDGAASKAAGDDALGSLPCDIGSAAVNLGWVLAGESATTMGSPATVGVNDGLTGRKIIIDTYGGRRKRHHHGLP

SEQ ID NO: 39555 - protein, 142 aa, Zea mays
  Clone ID: 700343717_FLI.pep
SFSSLRMRLDAPTSCSAGPAGEDMFHWQATIMGPPDSPYAGGVFLVNIHFPPDYPFKPPKVSFKTKVFHPNINSNGSICLDILKEQWSPALTISKVLLSICSLLTDPNPDDPLVPEIAHMYKTDRPKYESTARSWTQKYAMG

SEQ ID NO: 39556 - protein, 568 aa, Zea mays
  Clone ID: 700343968_FLI.pep
FTVYYKPRTSPAEFVVPCDRYMESLKRNYPIGMRFKMRFEGEEAPEQRFTGTIVGNVDPDQAGWAESKWRYLKVRWDEASSIPRPERVSPWQIEPAVSPPPINPLPVHRPKRPRSNAVASLPESSAPTKEAAPKVTLETQQHALQRPLQTQDNVAPKSVFGDNSELDSAHKSSLRPSGFDLDKSTIGMQRKLGSDIWMRMNRPDGYSEMLSGYQPPNEGARNSQGFCSLPDQIAAGRPNFWHTVNAHYQDQQGNHNLFPGSWSMMPSSTGFGMNRQSYPMIQEVGGMSQSCTNTKFGNGVYAALPGRGIDRYPSGWFGHTTPGGRVDDAQPRVIKPQPLVLAHGEALKMKGNSCKLFGIHLDSPAKSEPLKSPPSVATPAAEKWMADGIDTDKSSEPHKTPKQLGATQTQVDPVPERCPQASRGTQCKSQGGSTRSCKKVHKQGMALGRSVDLTKFNGYTELVAELDEMFDFNGELKGCSKEWMVVYTDYEGDMMLVGDDPWNEFCSMVHKIFVYTREEVQRMNPGALNSRPEDSGLANSTERGSASTAAAREAPGYQSASSLNSDNC

SEQ ID NO: 39557 - protein, 223 aa, Zea mays
  Clone ID: 700343992_FLI.pep
QRATCSRTHTHTSTFVPSTAYASPHTGNKVLLNIRSHRTVSLCLLGGLSGLLGRLCLLAPATGRLLRRLLGQQNRVDIGEHTAVSDGHAAQQLPKLLVVPDRQKHVARNNASLLVVPGSITSELQNLSGEVFEDSGEVDGGAGADTAARSGPSSSSARCGRRGTGARPSRTSTPTSSLARRPCARPLPSSPYPLLRCRWSPWPYLGFDWLVGDEEKVLRSWIE

SEQ ID NO: 39558 - protein, 171 aa, Zea mays
  Clone ID: 700344851_FLI.pep
ESPANHIQSTPSPSTPTTPSPDPMAPKAEKKPAEKKPAAEEKAEKTTAGKKPKSEKRLPASKSSGKEGGEKKGKKKAKKSVETYKIYIFKVLKQVHPDIGISSKAMSIMNSFINDIFEKLAGEAAKLARYNKKPTITSREIQTSVRLVLPGELAKHAVSEGTKAVTKFTSN

SEQ ID NO: 39559 - protein, 178 aa, Zea mays
  Clone ID: 700345641_FLI.pep
RPRSLGRGELGDGLGALGDGVLGELPGKDEAHGGLDLTGGDGRLLVIARELGGLSSELLEDIVNEGVHDGHGLGGDANVRVHLLQHLEDVDLVGLHALLALLLAPLALAAFLGSGLASGDPLLRLRLLPGGRLLGRGLLLRRLLRRGFLLGLGRHRCGASWGFGCEGGIGWEEMRGDV

SEQ ID NO: 39560 - protein, 419 aa, Zea mays
  Clone ID: 700345843_FLI.pep
IQSFIDRVADRLPSWKADLMTRAGRKIMVQHVLSSMIIYLAMAIDFPQWALEAIDKIRKGFLWKGRKEVRGGHCLVAWGRVCRPLHLGGLGISSLKELCWALRMRWLWLHKTDPEKPWANLPIQVPKKAEAFFSTVLVSKVGNGAHTLFWTNKWILGQNVCSLAPRLFAIIPKRIANRRTVLEALANRKWISDIKGALSVGVLVDYLNLWELLSEIVLQPEVEDKHIFSIAADGKYSAKSAYEGLFAGSTSFGLYHLIWKTWAPLKCRFFLWLVANKRCWTADRLAKRGLDHPARCLFCDQEAETIDHILVSCVFTRVFWFTLLKPFGFQRLAPQPGHSSFMAWWEQISGLASGIRGKGLNSLVALGAWITWKHRNSCVFDGCTPSLDLSINLAREERQSWEMAGAKGLSYLAALIPGD

SEQ ID NO: 39561 - protein, 176 aa, Zea mays; identical to SEQ ID NO: 37650
  Clone ID: 700346422_FLI.pep

SEQ ID NO: 39562 - protein, 157 aa, Zea mays
  Clone ID: 700346708_FLI.pep
PLHCWMKHGPLSRGAPSLVIIFILLTTLFIILVIDLRLGLVRLLFIFLLFLLGRSLLSCSALALVVGSDGLVVLELELVSLGYIGSLVRLAQGFPPVASSFPHRSDRLVLRVLLLELLAKFLHEHEESAGSPLRLVGVLAGLPFPALGGLLRPLALH

SEQ ID NO: 39563 - protein, 322 aa, Zea mays
  Clone ID: 700347284_FLI.pep
RPHPQIVDGLFFTYCMCQQVIRRLAQNREAARKSRLRKKAYIQQLESCKLKLSQMEQDMQRARTQGLFLGGDPGASTSSGAAMFDVEYARWLDNHSRRLAELNGALHAHLADGDLRAIVDDALTHHDELFQLKAMAAKSDVFHLITGVWTTPAERCFLWMGGFRPSDLLKTLLPQLDPLTEQQVVGICSLQQSSQQAEEALSQGLEQLHQSLADTMAGGSLTDDANMSFMSQMALALGKLANLEGFVIQAVNLRQQTLHQMHRILTVRQAARCLLAIGEYHNRLRALSSLWASRPREILVTDEGNCEISIAAQPSQNQFSTF

SEQ ID NO: 39564 - protein, 143 aa, Zea mays
  Clone ID: 700348078_FLI.pep
RQHRLTRPRTQHDRHRHHVIRHRERGDLTAETVEGAALALESVDNVHGGHSLAAGVLGVGDGVADDVLEEDLEHAAGLLVDEPGDALDAAPPRQLADRRLGDALDVVTQHLAVALGAALAQTLPALAAARHRREFRRCDFEFG

SEQ ID NO: 39565 - protein, 367 aa, Zea mays
  Clone ID: 700348314_FLI.pep
AIPRRSGEVAMEYRRVKDQEIYDDLSQKDVESLSGRTLSSANTTAIGPASAGGAKANSSWKLKSVVTLALTLLTSSQAILIVWSKRAGKYEYSVTTANFSVEALKCLLSLAALFRTWNCHGVTDDNRLTTSFDEVGVYPIPAVLYMVKNLLQYYIFVYVDAPAYQILKNLNIISTGVLYRIILKKKLSEIQWAAFVLLCAGCTTAQLNPSSDHVLQTPIQGWMMAIVMALLSGFAGVYTEAIIKKRPSRNINVQNFWLYIFGVIFNLVAICVQDYDAVMNKGFFHGYSFITVLMILNHALSGIAVSMVMKYADNIVKVYSTSVAMLLTAVVSVFLFNFHLSLAFFLGSTVVPVSVYLHSIGKLQPQK

SEQ ID NO: 39566 - protein, 572 aa, Zea mays
  Clone ID: 700349204_FLI.pep
TTLPCLQVGNQQRPNYLPMEVCKIVEGQRYSKRLNEKQITALLKVTCQRPQERELDILQTVHHNAYYEDPYAQEFGIRIDERLAAVEARVLPPPRLKYHDSGREKDVLPRVGQWNMMNKKMVNGGRVSNWACINFSRNVQDSAARGFCHELAIMCQISGMDFSLEPVLPPVTARPEHVERALKARYQDAMNILRPQGRELDLLIVILPDINGSLYGDLKRICETDLGLVSQCCLTKHVFKMSKQYLANVALKINVKVGGRNTVLVDALTRRIPLVSDRPTIIFGADVTHPHPGEDSSPSIAAVVASQDWPEVTKYAGLVSAQAHRQELIQDLFKVWQDPQRRTVTGGMIKELLISFKRATGQKPQRIIFYRDGVSEGQFYQVLLYELDAIRKACASLEPNYQPPVTFVVVQKRHHTRLFANNHNDQRTVDRSGNILPGTVVDSKICHPTEFDFYLCSHAGIQGTSRPAHYHVLWDENKFTADELQTLTNNLCYTYARCTRSVSIVPPAYYAHLAAFRARFYMEPDTSDSGSMASGARGPPPGAARSMRGAGSVAVRPLPALKENVKRVMFYC

SEQ ID NO: 39567 - protein, 143 aa, Zea mays
  Clone ID: 700349642_FLI.pep
RQHRLTRPRTQHDRHRHHVIRHRERGDLTAETVEGAALALESVDNVHGGHSLAAGVLGVGDGVADDVLEEDLEHAAGLLVDEPGDALDAAPPRQPADRRLGDALDVVTQHLAVALGAALAQTLPALAAARHRREFRRCDFEFG

SEQ ID NO: 39568 - protein, 283 aa, Zea mays
  Clone ID: 700349716_FLI.pep
HLRSGCALPCFPATCSSASERGTAADLAAQAEGSAGAGKSAPNMGRGRVELKRIENKINRQVTFAKRRNGLLKKAYELSVLCDAEVALIIFSNRGKLYEFSSTQSMPKTLEKYQKCSFAGPETALQNRENEQLKSSRNEYLKLKARVDNLQRTQRNLLGEDLESLGIKELEHLEKQLDSSLKHIRSTRTQHMVDQLTELQKKEQMFCEANKCLRRRLEESNQVIWQHAWEQSERHSEVQPQQLNGNNFFHPLDGAGEPTLQIGYPSEALTSSCMTTFLPPWLP

SEQ ID NO: 39569 - protein, 122 aa, Zea mays
  Clone ID: 700350370_FLI.pep
PKIKLMHSRDSPCRTRDYVLKLRPRVCCVVCEAWNFINRCHAHGFLFLSRSCAKPSPFLGFSGQLDAGSRNQKLCSALISSAPGFNIRAGAKTRPKSFFICQKFLSPNPRARGAWAELLGDP

SEQ ID NO: 39570 - protein, 784 aa, Zea mays
  Clone ID: 700350520_FLI.pep
QIKVWFQNRRCREKQRKEASRLQTVNRKLTAMNKLLMEENDRLQKQVSRLVYENGYMRQQLHNPSAATTDTSCESVVTSGQHHQQQNTAAPRPQRDANNPAGLLAIAEETLAEFLSKATGTAVDWVQMVGMKPGPDSIGIIAVSHNCSGVAARACGLVSLEPTKVAEILKDRPSWYRDCRCVDILHVIPTGNGGTIELIYMQTYAPTTLAAPRDFWTLRYTSGLEDGSLVICERSLTQSTGGPSGPNTPNFVRAEVLPSGYLIRPCEGGGSMIHIVDHVDLDAWSVPEVLRPLYESPKILAQKTTIAALRHIRQIAHESSGEMPYGGGRQPAVLRTFSQRLSRGFNDAVNGFPDDGWSLMSSDGAEDVTIAINSSPNKLIGPHVNSSQLFTAIGGGILCAKASMLLQNVPPALLVRFLREHRSEWADPGVDAYSAAALRASPYAVPGLRASGFMGSQVILPLAHTLEHEEFLEVIRLEGHSLCHDEVVLSRDMYLLQLCSGVDENAAGACAQLVFAPIDESFADDAPLLPSGFRVIPLDAKTDPPSGTRTLDLASTLEVGSGGTTRASSDASSTCNTRSVLTIAFQFSYENHLRESVAAMARQYVRTVVASVQRVAMAIAPSRIGGQLEMKQTPGSPEAHTLARWIGRSYRFHTGAELLRTDTQCTDASLKALWQHSDSIMCCSLKAAPVFTFANQAGLDMLETTLIALQDISLEKILDDDGRKALCTEYPKIMQQGFAYLPGGVCVSSMGRPVSYEQAVAWKVLSDDDTPHCLAFMFVNWSFV

SEQ ID NO: 39571 - protein, 654 aa, Zea mays
  Clone ID: 700351026_FLI.pep
MKPGPDSIGIIAVSHNCSGVAARACGLVSLEPTKVAEILKDRPSWYRDCRCVDILHVIPTGNGGTIELIYMQTYAPTTLAAPRDFWTLRYTSGLEDGSLVICERSLTQSTGGPSGPNTPNFVRAEVLPSGYLIRPCEGGGSMIHIVDHVDLDAWSVPEVLRPLYESPKILAQKTTIAALRHIRQIAHESSGEMPYGGGRQPAVLRTFSQRLSRGFNDAVNGFPDDGWSLMSSDGAEDVTIAINSSPNKLIGPHVNSSQLFTAIGGGILCAKASMLLQNVPPALLVRFLREHRSEWADPGVDAYSAAALRASPYAVPGLRASGFMGSQVILPLAHTLEHEEFLEVIRLEGHSLCHDEVVLSRDMYLLQLCSGVDENAAGACAQLVFAPIDESFADDAPLLPSGFRVIPLDAKTDPPSGTRTLDLASTLEVGSGGTTRASSDASSTCNTRSVLTIAFQFSYENHLRESVAAMARQYVRTVVASVQRVAMAIAPSRIGGQLEMKQTPGSPEAHTLARWIGRSYRFHTGAELLRTDTQCTDASLKALWQHSDSIMCCSLKAAPVFTFANQAGLDMLETTLIALQDISLEKILDDDGRKALCTEYPKIMQQGFAYLPGGVCVSSMGRPVSYEQAVAWKVLSDDDTPHCLAFMFVNWSFV

SEQ ID NO: 39572 - protein, 380 aa, Zea mays
  Clone ID: 700352824_FLI.pep
IYIPVMNWFLMVMCIIIVATFRSTNDIANAYGIAEVGVMMVSTALVTLVMLLIWQTNLFLVLCFPILFGAVEFVYLTAVLSKIQEGGWLPLAFSSLFLCIMYTWNYGSVLKYQSEMRGKISLDFILDLGATLGTVRVPGIGLVYNELVQGIPSIFGQLLVTLPAMHSTIVFVCIKYVPVPYVPLEERFLFRRVGQKDYHMFRSVARYGYKDVRKEDHGFFEQLLVESLEKFLRREAQEIALEASTMEAERDDISVVSEVPQTPAGDGDLQTPLLSDQRSGDNNRMAATDGSDPVLPSSSMSLEEDPGLEYELSALREAMASGFTYLLAHGDVRARKESVFTKKFVINYFYAFLRRNCRAGTATLKVPHSNIMRVGMTYMV

SEQ ID NO: 39573 - protein, 103 aa, Zea mays
  Clone ID: 700354259_FLI.pep
PCWLLCSTNHGSTKSDSFRAAELGADELGGGDHVGQGRLHLRVLACLETAVRVHPEDVGVEHGEHLVDAVRDLLGGGDPGRVDVVDTWTDSSSVLHTLAEHGQ

SEQ ID NO: 39574 - protein, 219 aa, Zea mays
  Clone ID: 700378020_FLI.pep
LLKQRAATNARRLAKADSFFFASGKEKEERKKWQGKRHDTPSAPSRSSIDQVCGRRHASLAGGLSLHGQRHGARHGAVLERVQHLQVPPGLAPLQVGHVLPEPVHAGEGHQPLRVQLPGVLLLDTLEPALGDLAPVARLRLALVEEVHEQGRRLVALVRVDVVARHAVHDDLGRTAVGGGERGQAAGHGLNHRQPESLVESRLHEGALGVADVAVQLAV

SEQ ID NO: 39575 - protein, 34 aa, Zea mays
  Clone ID: 700378914_FLI.pep
NDVKLAKVMLFAADTILPLQELSYDYGYRLDSVV

SEQ ID NO: 39576 - protein, 180 aa, Zea mays
  Clone ID: 700380212_FLI.pep
VQSKPALTTFLQTNTACAAYRTAVLQYLAFFRPHKQLANCSNTRTAATAKRGAAGLAAEAVEGAALALKRVDDVHGGDGLTARVLGVGDGVADDVLQEDLEHAAGLLVDEPRDALHAAPPRQPPDRRLRDPLDVVAQHLPVTLRAALAQALAALAAPRHLRRGDERIGEFLLVGWCGEPV

SEQ ID NO: 39577 - protein, 168 aa, Zea mays
  Clone ID: 700380613_FLI.pep
SLGRGELGDGLGALGDGVLGELPGKDEAHGGLDLTGGDGRLLVIARELGGLSSELLEDIVNEGVHDGHGLGGDANVRVHLLQHLEDVDLVGLHALLALLLAPLALAAFLGSGLASGDPLLRLRLLPGGRLLGRGLLLRRLLRRGFLLGLGRHRCGASWGFGCEGGIGW

SEQ ID NO: 39578 - protein, 403 aa, Zea mays
  Clone ID: 700381143_FLI.pep
SLPQTGHPLRNLPKTQCENQREADDLDTLPLRLRDDGADVADADDEKRDRLEEEVDEEMVPPVRKIVPAAGEEEGCHPELRDVQPLPYPHELLPEPRFVSRFHLHGAAELRRHHPLVGPAGLQQADQRGLCSVQGHDVLEGDPEEKQVERPGSADRVEEGDGRGDVDAAPLGYADLGDEDGCRDDDAVEREGDDVRDDLAYQEEVVDDVDLLPDRHFLVRHNLHEHLPEQVRRAARPPVLLEPEGLEGTRQLAFHLDVTEVDELPALEAGPDGQIHVLHRGPVLPPPSLVHRGDAPHAGGAVESKEGADGGAHFLLHGEVVVQGHLLHPRHQALVRVHESPARLDEGDLRVVDEVGDGALEVVRVGLEVGVEDGHVLAVAHVRVPHPRPQRAGLVPLAVLPDL

SEQ ID NO: 39579 - protein, 346 aa, Zea mays
  Clone ID: 700381330_FLI.pep
IQTVDIDTELPVYCPLEVTVAETDYYDETNYCEVTPCLLPERSVLKSIRVCGPRYWPQVIKLAPEDKPWWRSGDKTNPFNGGVLYIKRKVGSCSYSDDPIGCQSLISRAMHEVCDAPSASCSNQPNSTNGSYFRVDQLVSTFSANPSLIAFAKLCSVSWKSRCNSNFQEFCSQVLYECMSKDRPSLLQAYISFYTTIELMWEHLKTGNFPFYNSLFLPNLKVALAYNEALVDSRITNGGIIHSTFLESLMKRVGDIFAELPNLKDNLHRYLSTGTWPDTQNDVVVLSWYLQWYNIPPAHVVASAVEKVRPRVPAGVSMLPLLRILLPTTHLVGLMEIEKVQIVMEC

SEQ ID NO: 39580 - protein, 451 aa, Zea mays
  Clone ID: 700381538_FLI.pep
HKSGNIDDGSNGDVAADHYHRYKDDIEMMHSIGLSSYRFSLSWSRILPKGRFGGVNQAGVKFYNSLINGLLEKGIQPFVTINHYDIPEELQERYNSWLNPEIQEDFTYFVELCFKMFGDRVKHWVTFNEPNLIVKLAYSIGAFPPNRCSEPYGKCDSGNSSTEPYIAAHNMILAHAKTVNIYRKNYKSKQGGFVGISLHLRWYEPLRNITEDHLAVSRALSFDAPWILDPLFFGDYPHQMRQILGPNLPKFTEGEKKLLKNQIDFIGVNHYQTFYVKDCIYSLCDMDAYPSEALVSISTERNGIPIGKPTPVANTYVVPSSMEKLVMYLKQRYKSIPLYITENGYAQIANISTTAEEIINDIERSTYIRDYLTYLSFAIRKGADVRGYFVWSLMDNFEWISGYTVKYGLCHVNFKSLKRTPKLSAKWYSKFIKGYEQIEMASEELPKHMVS

SEQ ID NO: 39581 - protein, 190 aa, Zea mays
  Clone ID: 700382572_FLI.pep
AELLLPLDLFGSGERSMGRGKIKIKRIENSTNRQVTFSKRRAGLVKKAREIGVLCDAEVGVVIFSSGGKLYDYCSPRTSLSRILEKYQTNSGKILWGEKHKNLSAEIDRVKKENDNMQIQLRHLKGEDLNSLQHRELIAIEEGLQNGQTNMREKQMDYWRMHKTNGKMLEDEHKILTFRMHQQAVDLSGR

SEQ ID NO: 39582 - protein, 103 aa, Zea mays
  Clone ID: 700421605_FLI.pep
ERLWHSSQEFLHLVHFLHAPNVQRHSLVDLCRCDVKNSLVAVRALATGLLDDEAHGGALVEKPQLAVLALLVPGVPVDPSVEKSAVEVADEAAYVPRGVGLPR

SEQ ID NO: 39583 - protein, 74 aa, Zea mays
  Clone ID: 700422960_FLI.pep
MNESHIGEEGSSVAMRACDAFVPLGTKRLDCSMQASYNTDHWLLEALLETHKQTKVFFFSKSMMASPPFLCLAF

SEQ ID NO: 39584 - protein, 231 aa, Zea mays
  Clone ID: 700423777_FLI.pep
QLVNQQPMQAQVPRQIDFSAGSSSKPGVLVTRAGVLDGESAEVDGLCKEEGPPPVMEDRRPRKRGRKPANGREEPLNHVEAERQRREKLNQRFYALRAVVPNISKMDKASLLGDAITYITDLQKKLKEMETERERLLESGMVDPRERAPRPEVDIQVVQDEVLVRVMSPMENHPVKKVFQAFEEAEVRVGESKVTSNNNGTAVHSFIIKCPGTEQQTREKVIAAMSRAMSS

SEQ ID NO: 39585 - protein, 118 aa, Zea mays
  Clone ID: 700425120_FLI.pep
KYDTHKSFILKYNPGSALNTRRIKRNHLHQVISITCGDGGAVLPPSITACRPRLLLLELLHELGVHVLGGLPRGLLNVDPFDKVLPAVLPFRRRCRRLPLVEHGLGHGVLQPGLEVAH

SEQ ID NO: 39586 - protein, 454 aa, Zea mays
  Clone ID: 700426832_FLI.pep
QGPVYVGTGCVFNRTALYGYEPPIKQKKGGFLSSLCGGRKKASKSKKGSDKKKSQKHVDSSVPVFNLEDIEEGVEGAGFDDEKSLLMSQMSLEKRFGQSAAFVASTLMEYGGVPQSATPESLLKEAIHVISCGYEDKTEWGTEIGWIYGSVTEDILTGFKMHARGWRSIYCMPKRPAFKGSAPINLSDRLNQVLRWALGSVEILFSRHCPLWYGYGGRLKFLERFAYINTTIYPLTSIPLLIYCILPAICLLTGKFIIPEISNFASIWFISLFISIFATGILEMRWSGVGIDEWWRNEQFWVIGGISAHLFAVFQGLLKVLAGIDTNFTVTSKASDEDGDFAELYMFKWTTLLIPPTTILIINLVGVVAGISYAINSGYQSWGPLFGKLFFAFWVIVHLYPFLKGLMGRQNRTPTIVVVWAILLASIFSLLWVRIDPFTTRVTGPDTQTCGINC

SEQ ID NO: 39587 - protein, 72 aa, Zea mays
  Clone ID: 700427394_FLI.pep
KRGEEMWSGDGLPHVRPYYSSKPTSQARQQAHLERLDALDRLGHGLAPQEVLEQLEALRRTVEGDLVPRASD

SEQ ID NO: 39588 - protein, 70 aa, Zea mays
  Clone ID: 700427416_FLI.pep
SKQKYNKLRWRRRVVRHDRSVCFTEGNLSTRNIDLHSLLATKQTSLKSYVGSTLVVLPPHHHNININIVF

SEQ ID NO: 39589 - protein, 140 aa, Zea mays
  Clone ID: 700427931_FLI.pep
ILGHGKAVSYVRFLDPYTLVSASTDNTLKIWDLNQTNCSGLSTDSCSLTLNGHTNEKNFVGLSVHDGYITCGSETNEVFSYYKTFPMPITSHRFGSIDPITGQVTNEDNQQFVSSVCWRGKSNMVVAANSSGSIKVLELV

SEQ ID NO: 39590 - protein, 127 aa, Zea mays
  Clone ID: 700428488_FLI.pep
SMGKLETTRTGVGVERIRILLRPPAAPGCCCCSSFSSSYIGSDWDGGYGATVLLMMNMYPHAYMHVQRAMGYPPACRPAVWLWQHGRHERPASSLPIAAYADEMEKIRTHRYRHSSQAQATTTTSSS

SEQ ID NO: 39591 - protein, 99 aa, Zea mays
  Clone ID: 700430159_FLI.pep
QKCYQPASTASSEHRRMMACGCRESPKKFAHDPCASEVDLVLQKVIWRVQQNSVAHSLHRIPFSLFIWSYEPYVQMLLQQEAGKRYLHRNAPLQVLLNP

SEQ ID NO: 39592 - protein, 161 aa, Zea mays
  Clone ID: 700430776_FLI.pep
QQSQRKVVLMSTVTLPTLSRCLVELEGLHHLPGEVGVVTAEVAVGGGLDEPVAALLQVEVDADHPGPEVEVLLHDLEDLLVGDRAGAVRVDEHGQGLRHADGVRHLHEAAAGEAAGHDALGGLPGHVGAAAVHLGGVLAGEGATAVGSPAAVRVDDDLAAG

SEQ ID NO: 39593 - protein, 120 aa, Zea mays
  Clone ID: 700431150_FLI.pep
NKPNSFTTCEAHATPTAIRHSCPAEESLVGPRVHCPAVPRPLRVKGQRPILPRCSGKTLHQSLPSTAGISTAFSLAAALCASAMSVSGMPNSLPISSSVRPRVSGRHVKKKTHPTAAMPE

SEQ ID NO: 39594 - protein, 206 aa, Zea mays
  Clone ID: 700432474_FLI.pep
AVAARYAQHQHGLKRVMIIDFDVHHGNGTSDSFYDDPDIFFLSTHQLGSYPGTGKINEVGQGDGEGTTLNLPLPGGAGDYAMRCAFDEVIAPSAHRFKPDIILVSAGYDAHALDPLAGLQFTTGTFYMLASSIKQVTKELCGGRCVFFLEGGYNLQSLSSSVADTFRAFLDEPSLAAQFDDPAILFEEPTRKIKEAIEKAKSIHSL

SEQ ID NO: 39595 - protein, 118 aa, Zea mays
  Clone ID: 700433005_FLI.pep
PAKKSRRGPRSRSSQYRGVTFYRRTGRWESHIWDCGKQVYLGGFDTAHAAARAYDRAAIKFRGVDADINFNLSDYDDDMKQMKSLSKEEFVHALRRQSTGFSRGSSKYRGVTLHKCGR

SEQ ID NO: 39596 - protein, 250 aa, Zea mays
  Clone ID: 700433170_FLI.pep
VGGGCRRNKRSSKSSSSSAGSSSSKMSPSGRLLGGPSATPSTTPGTTGAIITPGLSSFSHHLPFLGSMHPSGPNLGLAFSAGLPLVGMQHLDTVDQFPVASGGGTTIGASLEQWRVRQQQQQFPFMTGGILDLSQPPTYQFGLEANRGGSGSAAVAFNSGQTTTTSATTGRQEGSSKKMGDSKGEDMSLQKQYMVPLRHGSGSHGVWDGSAGGTGSNGGGTGNGGSSWPMNMIPGFHSSSTSGCNDSGLS

SEQ ID NO: 39597 - protein, 120 aa, Zea mays
  Clone ID: 700433423_FLI.pep
KPLIDRKVRDQPVGVERIRILLRPPAAPGCCCCSSFSSYIGSDWDGGYRATVLLMMNMYPHAYMHVQRAMGYPPACRPAVWLWQHGRHERPASSLPIAAYADEMEKIRTHRYRHSSQAQA

SEQ ID NO: 39598 - protein, 577 aa, Zea mays
  Clone ID: 700438417_FLI.pep
LALSRPDPKKNITTLVKAFGECRPLRELANLTLIMGNRDDIDDMSAGNASVLTTVLKLIDKYDLYGSVAFPKHHNQADVPEIYRLAAKMKGVFINPALVEPFGLTLIEAAAHGLPIVATKNGGPVDITNALNNGLLVDPHDQNAIADALLKLVADKNLWQECRRNGLRNIHLYSWPEHCRTYLTRVAGCRLRNPRWLKDTPADAGADEEEFLEDSMDAQDLSLRLSIDGEKSSLNTNDPLWFDPQDQVQKIMNNIKQSSALPPSMSSVAAEGTGSTMNKYPLLRRRRRLFVIAVDCYQDDGRASKKMLQVIQEFSEQSDRTSQMFKISGFTLSTAMPLSETLQLLQLGKIPATDFDALICGSGSEVYYPGTANCMDAEGKLRPDQDYLMHISHRWSHDGARQTIAKLMGAQDGSGDAVEQDVASSNAHCVAFLIKDPQKVKTVDEMRERLRMRGLRCHIMYCRNSTRLQVVPLLASRSQALRYLSVRWGVSVGNMYLITGEHGDTDLEEMLSGLHKTVIVRGVTEKGSEALVRSPGSYKRDDVVPSETPLAAYTTGELKADEIMRALKQVSKTSSGM

SEQ ID NO: 39599 - protein, 385 aa, Zea mays
  Clone ID: 700438504_FLI.pep
DTLTMSCFSHFFKRKRGPQQQDDPSDNYFTGSENITRFSYRELVRATSNFDQGNKIGEGGYGPVYKGTLKDGTVIAVKVLSLHSRQGAKEFLNELLAISDVTHENLVKLYGCCVEGNHRILVYNYLENNSLAHTLLDSRHSNIQFNWRTRVNICIGVAQGLAFLHGSVSPHIVHRDIKASNILLDKDMTPKISDFGLAKLLPPDVSHVSTRVAGTLGYLAPEYAIRGHVTRKADVYSYGVLLIEIVSGRCNTDTKLPYDDQILLEKTWRYYGRGNLEKIIDSSLGDDLDVDEACRFLKIGLLCTQDGTKRRPGMSAVVAMLRGEADVDTETISKPDVIRDFGDLKLRSRATSSTLLTSIMARSSPLSSEETTRTSITFTEISERD

SEQ ID NO: 39600 - protein, 166 aa, Zea mays
  Clone ID: 700442376_FLI.pep
WLRALATDAAGELDVLGHDGDALSVDGTEVGVLEETDEVGLGGLLERQHGVALEPEVCLEVLRDLAHQALEGQLADQQLRALLVLADLAQRHGSGPVPVGLLHAAGRRRRLPRRLGGELLAGGLASRGLAGGLLRTSHPPLLSSSSARRGNLLFGCLDGTSSLRMP

SEQ ID NO: 39601 - protein, 136 aa, Zea mays
  Clone ID: 700442486_FLI.pep
IGYKVGTMIEIPRAALVADEIAEQAEFFSFGTNDLTQMTFGYSRDDVGKFIPVYLAQGILQHDPFEVLDQRGVGELVKLATERGRKARPNLKVGICGEHGGEPSSVAFFAKAGLDYVSCSPFRVPIARLAAAQVLV

SEQ ID NO: 39602 - protein, 465 aa, Zea mays
  Clone ID: 700442740_FLI.pep
SDNEDIDRAIALSLAEEDQNKGKSVAIDTDYNLEEDEQLARALQESLNAESPPRQNVPIEDVPVPQWNIPVERVPPRQYVPANEPTPHVYPRGGSRICAGCQNPIGHGRFLSCMDSVWHPQCFRCFACNKPISEYEFAMHDDQPYHKSCYKEFFHPKCDVCNNFIPTNRDGLIEYRAHPFWMQKYCPSHEDDGTPRCCSCERMEPREIKYITLDDGRKLCLECLNSAVMDSPECQHLYMDIQEFFEGLNMKVEQQIPLLLVERQALNEALEAEKNGHHLPETRGLCLSEEQVVRTILKRPQIGPGNRILDMIIGPYKLSRRCEVTAILILYGLPRLQTGSILAHEMMHAYLRLKGFRNLSIEVEEGICQVLSHLWLESEIIAGSSSNVASSSEASSSSSSSAPTSSKKGAKTEFEKKLGAFIKHQIETDSSEAYGGGFRAGYPAVERYGLKRTLDHMKLTGSFPY

SEQ ID NO: 39603 - protein, 121 aa, Zea mays
  Clone ID: 700443507_FLI.pep
RRPQGRRRRAQDQLLRSQRVRVRRTFWPAGPWARDQKRCVGVCVLLVCFNFTKFVSRWIAWSRPVCFKDPPALAVSVAACVGFGTYGLYLLLDVVYYLGLLNYYEQLRIVIQLGYLDIVMY

SEQ ID NO: 39604 - protein, 271 aa, Zea mays
  Clone ID: 700443890_FLI.pep
RVSEELRAALSAFQQTFVVSDATRPDHPILYASAGFFNMTGYSSNEVVGRNCRFLQGSGTDPVEISKIRQALAAGSNYCGRILNYKKDGTPFWNLLTVAPIKDEDGRVLKFIGMQVEVSKYTEGNKDTALRPNGLPESLIKYDARQKDHARSSVSELLLALKDPRSLSESRNNTLKRKSQESAGSALVPGKRSSETGSRRNSHSGIRNSLQKISEVPEGGNKTRKSGLRSFMGLIGMGHGNVEKNILKPREDPLLDSDDERPDSFDDDFRK

SEQ ID NO: 39605 - protein, 108 aa, Zea mays
  Clone ID: 700447718_FLI.pep
HRLQRQLIQKQQQQHMQKLLPQRLQYQEQLHLQQQMTQQIQQQQQSLYQQHQQMQHQQQLWQQIQQQKHQLQHMDPQQQQLLSQMVGTELGSDDDTREDWVTGAGPHA

SEQ ID NO: 39606 - protein, 383 aa, Zea mays
  Clone ID: 700448273_FLI.pep
DKMKEVIRYMNRNKLGKEIREQIKGHLRLQYESSYTEASVLQDIPISIRAKISQTLYKPYIESIPLFKGCSAEFIQQIVIRLQEEFFLPGEVILEQGSAVDQLYFVCHGALEGVGIGEDGQEETLLMLEPESSFGEISILCNIPQPYTVRVCELCRLLRLDKQSFTNILEIYFVDGRRILSNLSESEYGGRVKQLESDITFHIGKQEAELTLRVNSAAFYGDLHQLKSLIRAGADPKNTDYDGRSPLHLAASRGYEDVVQFLINEGVDIDLTDQFGNTPLLEAVKQGHERVAALLFAKGAKLSLKNAGSHLCTAVAKGDSDFIRRALAYGADPNCRDYDHRTPLHIAAAEGLYLIAKMLVEAGASVFTTDRWGTTPLDEARKC

SEQ ID NO: 39607 - protein, 432 aa, Zea mays
  Clone ID: 700448312_FLI.pep
TSPTGLGVLIFFLEQTTAKEEARKCCVSGCSGIRVNDAEKLVTIGGHVLREGEWLSLNGSTGEVILGKQPLSPPALSGDLGTFMAWVDDVRKLKVLANADTPDDALTARNNGAQGIGLCRTEHMFFASDERIKAVRQMIMAPTLELRQQALDRLLPYQRSDFEGIFRAMDGLPVTIRLLDPPLHEFLPEGNIEDIVSELCAETGANQEDALARIEKLSEVNPMLGFRGCRLGISYPELTEMQARAIFEAAIAMTNQGVQVFPEIMVPLVGTPQELGHQVTLIRQVAEKVFANVGKTIGYKVGTMIEIPRAALVADEIAEQAEFFSFGTNDLTQMTFGYSRDDVGKFIPVYLAQGILQHDPFEVLDQRGVGELVKLATERGRKARPNLKVGICGEHGGEPSSVAFFAKAGLDYVSCSPFRVPIARLAAAQVLV

SEQ ID NO: 39608 - protein, 213 aa, Zea mays
  Clone ID: 700452911_FLI.pep
VGHFGYEEEIDQLKRDKQLLMAEVVKLRQEHQNTRSDLQAMEEKLQDTEQKQQQMMAFMARVMQNPDFMRQLISQREMRKELEDAISKKRRRRIDQGHEAGSMGTGSSLEQGPQGVFEPQEPVESVANGLPSDLESSSVEAKGFEVRQGVSSGGSEHLNGRPSGELNDDFWEDLLHEGGLGADAGNAVGQDDMNMDMDPDVSLPQLKQHGPRH

SEQ ID NO: 39609 - protein, 198 aa, Zea mays
  Clone ID: 700453377_FLI.pep
QHQIVYQQAQQFHQQLQQQQQQQLQQFWVERMTEIEATADFRNHNLPLARIKKIMKADEDVRMISAEAPVVFAKACEIFILELTLRSWMHTEENKRRTLQKNDIAAAITRTDIYDFLVDIVPRDEMKDDGIGLPRPGLPPMGAPADAYPYYYMPQQQVPGPGMVYGAQQGHPVTYLWQDPQEQQEQAPEEQQSLHERD

SEQ ID NO: 39610 - protein, 162 aa, Zea mays
  Clone ID: 700453730_FLI.pep
FKDDDLLDHRPYRNDRRVPERHRALKRSSPAPVVGYASSAKRRRGGEVELSNILEKVVDHLRGLSGSLLFLKPVTKKEASDYLDIIRYPMDLGTIRDKVRKMVYRNRDEFRHDVAQIQLNAHIYNDTRYPHIPPLADELMEVCDHLLYENADLLTEAEDAIE

SEQ ID NO: 39611 - protein, 410 aa, Zea mays
  Clone ID: 700454968_FLI.pep
GRDQSAHRTMSAAETAVSPTTTPQPQLQSDPNAAADAASSNSLWVADETQTLTEVLLQPQPNHLSPPPSGEGDDGITASGAPVGGDAAASASAAAAANATIEERVRGPWSPEEDAVLSNLVEKFGARNWTLIARGIPGRSGKSCRLRWCNQLDPQVKRKPFTEEEDRIIMAAHAVHGNKWASIAKLLDGRTDNAIKNHWNSTLRRRYCNDGQCKHGGSVERSIPKVSREVSEEPWPLNDLNSFTAMDVKDDPVQTAPDTSPRARHITDHCSITQVVDPPYLSRPAAKIGAFRPYYLGHTEPTQQEMPGAVVMFDSTHKVSTPESEVFKFVDPICFAAEVPDKCGYGCYGAHEQHRKNSLLGPEFSEFEGHPPVLNISFASLVSEISSIAWMRSGMQSSDSSNLMQSIPPT

SEQ ID NO: 39612 - protein, 178 aa, Zea mays
  Clone ID: 700455636_FLI.pep
QLPSTLYCTLLLSKKQRTRAETKFLQARNPVANPGHGSGMSSAAGRAPAPTPMGSADRCKIDGIVAAEKATRSCVECRATTTPMWRSGPTGPRSLCNACGIRYRKKRRQELGLDRKLQQQQNNGEAKTDEAKDSSSNSSSGSSNLQVVQKRRLLMGVEEAALLLMTLSSSPTSTLLHG

SEQ ID NO: 39613 - protein, 154 aa, Zea mays
  Clone ID: 700456043_FLI.pep
SSHISCPPPTRPALRQYASLLSLECRGTISGAYGTTTQKQCILLSLQVSNSRHFKARQGWSGVAPAGLVRSRDDRFRRWYPIICRRIARAADRAGRWVAVSHHTEGAAIGSLHFDKACPSRVMLLVDAYEAIVVSRLHVILPAIHVPSPSVQHQ

SEQ ID NO: 39614 - protein, 170 aa, Zea mays
  Clone ID: 700457875_FLI.pep
PLHCWMKHGPLSRGAPSLVIIFILLTTLFIILVIDLRLGLVRLLFIFLLFLLGRSLLSCSALALVVGSDGLVVLELELVSLGYIGSLVRLAQGFPPVASSFPHRSDRLVLRVLLLELLAKFLHEHEESAGSPLRLVGVLAGLPFPALGGLLRPLALHRQLGIGLGGALGF

SEQ ID NO: 39615 - protein, 382 aa, Zea mays
  Clone ID: 700458127_FLI.pep
TRDTLTSSVTRSQMPFLTLALLRTLTARLLVRPALRPTWSWSLVRSPPRPMLTTKKIVRETCRNIGFVSNDVGLDADHCKVLVNIEQQSPDIAQGVHGHFTKRPEEIGAGDQGHMFGYATDETPELMPLSHVLATKLGARLTEVRKNGTCPWLRPDGKTQVTVEYRNEGGAMVPIRVHTVLISTQHDETVTNDEIAADLKEHVIKPVIPEQYLDEKTIFHLNPSGRFVIGGPHGDAGLTGRKIIIDTYGGWGAHGGGAFSGKDPTKVDRSGAYVARQAAKSIVASGLARRAIVQVSYAIGVPEPLSVFVDTYGTGAIPDKEILKIVKENFDFRPGMIIINLDLKKGGNGRYLKTAAYGHFGRDDPDFTWEVVKPLKSEKPSA

SEQ ID NO: 39616 - protein, 149 aa, Zea mays
  Clone ID: 700458374_FLI.pep
EKKEEEIDVETKGPRNGYAWTKNRRCHLPRPYCMRACIFHSSAQLLLDLIPSHCKLHACISISSIGRPAGRSRVLFIPVVLPTVRPCTARFTAAARGCRWWSGMPRVTTKPRSVRPCTRSGKLSLALVPLNRSAASWSWTTAWTAPPTC

SEQ ID NO: 39617 - protein, 127 aa, Zea mays
  Clone ID: 700458567_FLI.pep
SVSPICNTEDSVDGIHGDLILGGGTEDTPACAAVVWAVEESVLLALSQAVLNHQSALGLPMMPFLFFLRDGVGRLRHCGWRRLDCRYADGWRDTKRQRGGAACLRRGRGGEGEGASRPEDGGRVRIA

SEQ ID NO: 39618 - protein, 308 aa, Zea mays
  Clone ID: 700458624_FLI.pep
IMAEHLASIFGTEKDRVNCPFYFKIGACRHGDRCSRLHNRPTISPTLVLANMYQRPDMITPGVDAQGQPIDPEKMQEHFEDFYEDIYEELGKFGEIENLNVCDNLADHMIGNVYVQFREEEQAAAAYNALQGRFYSGRPIIVEYSPVTDFREATCRQFEENSCNRGGYCNFMHVKQIGRDLRRKLYGRSASRRYHGRSRSRSPPPQRRGHRDRDDYHHRDRDDYRGGGGGGRGRGSRYDRYDDGAGRGGRHGRYDDGAGRGGRHDRYDDGGRRRHGSPSRRARSPVRESSEERRAKIEQWNREREGKQ

SEQ ID NO: 39619 - protein, 404 aa, Zea mays
  Clone ID: 700464627_FLI.pep
VNQLGIDKAVPKKILDLMNVENITRENVASHLQKYRLYLKRLSADASRQANLTAAFGGRNPAYVNMGLDAFRQYNAYGRYRPVPTTNHSQPNNLLARMNSPAFGMHGLLPSQPLQIGHNQNNLSTSLGNVGGMNNGNLIRGAHMPLQDTSKCFPTGPSGNSFANISNSTQLVTTNNLPLQSLEPSNQQHLGRLHSSADPFNSFVGEPPQFADLGRCNTTWPTAVSSSNVQEIGQKDRIVNRPKLEPLSSFTEASSQIPLLGSEMQSHQVASLASNGLPMPFTQEAVPFAYGSSTNSREMLNNNLALSNSGVNSTLPNLRIDGSVVPGQTLGGSNSGGCVVPPLQDGRIDHQAVSSHLNYNNELMGTGRLQRGLSGGLDDIVVDMFRPDRADDGVSFIDGDWELV

SEQ ID NO: 39620 - protein, 211 aa, Zea mays
  Clone ID: 700466091_FLI.pep
CTCPRCVKGFDEDALLEGFRCKNQACDGFLLPNSGKKAYTCQKCGASRDVEEIKNMRSEILQLSDKASSFLSSGNKAEAGSIYKIIEQLERNLYHAFSTTLLHTCETLLKIYLELQDWWTALTYCRLTIPVYERVYPPFHPMIGLQFYTCGKLEWLLEFTEDALKSLTRAADILKVTHGVKSQFMKELFGKLEEARAEVSFRLSSRHGHDE

SEQ ID NO: 39621 - protein, 512 aa, Zea mays
  Clone ID: 700466493_FLI.pep
GKMFIESFRVESPHVRYGPTEIESEYRYDTTELVHEAKDGASRWVVRPKSVKYNFRTSTAVPKLGVMLVGWGGNNGSTLTAGVIANREGISWATKDKVQQANYYGSLTQASTIRVGSYNGEEIYAPFKSLLPMVNPDDLVFGGWDISSMNLADAMTRAKVLDIDLQKQLRPYMESMVPLPGVYDPDFIAANQGSRANNVIKGTKKEQVEQIIKDIREFKEKNKVDKVVVLWTANTERYSNVCAGLNDTMENLLASVDKNEAEISPSTLYAIACVTEGVPFINGSPQNTFVPGLIDLAIKNNCLIGGDDFKSGQTKMKSVLVDFLVGAGIKPTSIVSYNHLGNNDGMNLSAPQTFRSKEISKSNVVDDMVSSNAILYGPGEHPDHVVVIKYVPYVGDSKRAMDEYTSEIFMGGKSTIVLHNTCEDSLLAAPIILDLVLLAELSTRIQLKPEGTDKFHSFHPVATILSYLTKAPLVPPGTPVVNALAKQRAMLENIMRACVGLAPENNMILEYK

SEQ ID NO: 39622 - protein, 416 aa, Zea mays
  Clone ID: 700467256_FLI.pep
AFYKSLTNDWEEHLAVKHFSVEGQLEFKAVLFVPKRAPFDLFDTKKKQNNIKLYVRRVFIMDNCEELIPEWLSFVKGIVDSEDLPLNISRETLQQNKILKVIRKNLVKKCVELFFEIAENKEDYNKFYEAFSKNLKLGIHEDSQNRTKIAELLRYHSTKSGDELTSLKDYVTRMKEGQNDIYYITGESKKAVENSPFLEKLKKRGYEVLYMVDAIDEYAVGQLKEFEGKKLVSATKEGLKLDETEDEKKRKEELKEKFEGLCKVIKEVLGDKVEKVVVSDRVVDSPCCLVTGEYGWTANMERIMKAQALRDSSMAGYMSSKKTMEINPENPIMDELRKRAEADKNDKSVKDLVMLLFETALLTSGFSLDDPNTFGNRIHRMLKLGLSIDEDEPVEAEAEMPQLEDDAGESKMEEVD

SEQ ID NO: 39623 - protein, 717 aa, Zea mays
  Clone ID: 700468778_FLI.pep
EIRDVCIGPWLLCGDFNLIFKPEDKNNSNINRTLMGNFRSLINSMELKEIPLIGRKFTWSNQRQDPTLVKLDHVFCTSSWEDFFPDCLLYSNASVCSDHCPLTLKFREDCRGKRRFHFEGFWPKLPGFNEVVADSWNQPMLATCPLERLSLKLRRLAKQLQSWGHREVGNVSNQLGLAREVMHRLESAQDFRVLSEDEFWLIGKLKQHCFVYASMERTIARLRSRIKYLKEGDANTKFFHMQARFRKKRNFISYLEDEGRVVSNHEDMQEVLDGFFSGLLGADFLRQSTINLSSCHREAVDLSDLECPFSEKEVLDTIACLPSDKAPGPDGFTGRFYKSCWSIIKVDLLAALSIIHQGNFQRLGQLNSSYIILIPKKMDASSAGDFRPISLIHSVAKLVTKLLANRLGPRLHELVEANQSAFIRGRSIHDNFMLVQQSIKSLHKRKVDSLFLKLDISKAFDSVSWAFLLEVLSHLGFGPIWRNLISNLLATASTQVLLNGSPGIHIKHRRGLRQGDPLSPMLFVLIMDVLSSLFRAAECRGLLHSLERAGVRNRLSIYADDVVLFVKPIEEDLKCVRLILNCFGSASGLVTNLNKSYAIPIRCEEHVVQEGCNVLRCSLASFPCSYLGLPISDRKLKRNDLKMWIDKIADRLPNWKARLLNLAGRTTLVRFVLSAIPIYLLIAIKIPKWVIKSIDKIRRGFLWKGRKEVNGGSCAVP

SEQ ID NO: 39624 - protein, 338 aa, Zea mays
  Clone ID: 700471253_FLI.pep
SLSGHTAPTDDDNSRQRLGQPATAARSRLTTNRLVHLLDLGARAAAASGGVLVHAASAAHVFTRALVHLGDDGVAEALQLLHLVLELVRLGELVGVQPADGRVDGVLDLLLVIGRQLGRNLLVLDRVAHVVGVVLQRVLGLHLLLVLLILRLVLLSVLNHLLDLLLGETALVVGDCDLVLLPRCLVLGRHVQDAVGVDVKAHGDLWHTTGCRGDAGELELAQQVVVACPGPLTLVDLDQDTGLVVRVGGEYLLLLGGDGGVPRDQHCHNSSSSLQTQGQRGDVQQKQVLHLLIALTAQDGSLDSSTIGDSLIGVDVLAQLLAVEEVLEQLLHPGDPSG

SEQ ID NO: 39625 - protein, 513 aa, Zea mays
  Clone ID: 700472125_FLI.pep
IEDLAQLIYDLHQINPKAKVSVKLVSEAGIGTVASGVSKANADIIQISGHDGGTGASPISSIKHAGGPWELGLTETNQTLIQNGLRERVVLRVDGGFRSGQDVLIAAAMGADEYGFGSVAMIATGCVMARICHTNNCPVGVASQREELRARFPGVPGDLVNYFLFVAEEVRAALAQLGYEKLDDIIGRTDLLKPKHISLVKTQHIDLGYLLSNAGLPEWSSSQIRSQDVHTNGPVLDETILADPEIADAIENEKEVSKAFQIYNVDRAVCGRVAGVIAKKYGDTGFAGQLNITFNGSAGQSFGCFLTPGMNIRLVGEANDYVGKGMAGGELVVVPVDKTGFVPEDATIVGNTCLYGATGGQVFVRGKAGERFAVRNSLCQAVVEGTGDHCCEYMTGGCVVVLGKAGRNVAAGMTGGLAYILDEDDTLVPKVNKEIVKMQRVNAPAGQMQLKGLIEAYVEKTGSEKGIAILREWEAYLPLFWQLVPPSEEDSPEACAEFERVLAKQATTQLSAK

SEQ ID NO: 39626 - protein, 232 aa, Zea mays
  Clone ID: 700475602_FLI.pep
ERGRRERMERQRERLRQIERVSARGRERTESLILINSNNEAIILQGTFGSDDNQEDSSNTSSGVSLGDYFLGPALDTLLQRLAESDLSRSGTPPAKKEAVAALPTVNIEEALGCSVCLEDFEMGGEAKQMPCQHKFHSHCILPWLELHSSCPICRFQLPTEETKNNPCESASTAGTVNGGGDNAAASGSDTESTNHNEDDHSDSPIFSALSTLFSDPFSSDDDESVPHSYEN

SEQ ID NO: 39627 - protein, 170 aa, Zea mays
  Clone ID: 700548595_FLI.pep
TSVVERKGRTERQIIFEDPEHSSAYCLAFRVVNPNHLPPLKELRKLMRIQSLRCNALYNHSATRLSVVPIHASRSQALRYLCIRLGIEVPNVAVLVGESGDSDYEELLGGLHRTVILKGEFNIAANRIHTVRRYPLQDVVALDSSNIIGVDGYTTDDLRSALQQMGILAR

SEQ ID NO: 39628 - protein, 118 aa, Zea mays
  Clone ID: 700549778_FLI.pep
QEQRLIGRRVGLAILFGRETVKVDVLLRCQLSKLTRSPLPDRTSFNHGTAGAWRWCPIHRCRNGRMAAPRSSRGDFADVSTAQRAHPVYFFQPLVNALQVELVLARKGSYLVSVLIFG

SEQ ID NO: 39629 - protein, 223 aa, Zea mays
  Clone ID: 700549806_FLI.pep
LQETHLEERDVDLFKNLVHEYDYTCWSCSVARLGYSGTAVISRVQPISVQYGLGIPEHDQEGRLITLEFDDFYLVNAYVPNSGRGLRRLNYRINDWDPCFSDFIKKLECSKPVIVAGDLNCARQSIDIHNPQAKTEAAGFTIEERESFEVNFSRKGLVDTFRKQHPNAVAYTFWGENQRITNKGWRLDYFLASESIADKVHDSYTLPDVSLSDHSPIGLVLKL

SEQ ID NO: 39630 - protein, 400 aa, Zea mays
  Clone ID: 700549916_FLI.pep
SESSQSDGGGTDEFMLVKLAEIRKEVQCPICLGIIRKTRTVMECLHRFCRDCIDKSMRLGNNECPACRTHCASRRSLRDDPNYDALIAALYPDIDKYEEEEFAFSEQERIRNKKIQETIEETFRRQSDAIGKKRSMAKATATAFARKYRRTRGRVRTIPPDIAPTGSSEEESGEGNSKETIREQSSADDHSPDLRQKRCRKRSGPQGSPAGTIGSIDYSFEENDELVGGKEILATSPLQGEMLAWGKNGARSQNRHGSVGSNGRTGRSGRIAKLVDYLHTADEMDKEFQLFLLLLPVDGQTIPNLEKPYLSCRPTLSIKHLAQFVALQLSCEVEELEMYIRMDRHRVSVGSRPSSTGEAKSRPFDDLERLNEEKLVSELHPSFVSSNGDMELRYALRTRE

SEQ ID NO: 39631 - protein, 378 aa, Zea mays
  Clone ID: 700550438_FLI.pep
DKLKAERERGITIDIALWKFETTKYYCTVIDAPGHRDFIKNMITGTSQADCAVLIIDSTTGGFEAGISKDGQTREHALLAFTLGVKQMICCCNKMDATTPKYSKARYEEIVKEVSSYLKKVGYNPDKIAFVPISGFEGDNMIERSTNLDWYKGPTLLEALDQITEPKRPSDKPLRLPLQDVYKIGGIGTVPVGRVETGVIKPGMVVTFGPTGLTTEVKSVEMHHEALQEALPGDNVGFNVKNVAVKDLKRGFVASNSKDDPAKEAASFTSQVIIMNHPGQIGNGYAPVLDCHTSHIAVKFAELITKIDRRSGKELEKEPKFLKNGDAGMVKMIPTKPMVVETFSAYPPLGRFAVRDMRQTVAVGVIKSVEKKDPTGAK

SEQ ID NO: 39632 - protein, 211 aa, Zea mays
  Clone ID: 700550793_FLI.pep
QYYDWIKIHERGESIGGIEGGISPATRQADYFLAFLATPFLAGAAAAAAFFGVATFLGAAAAFPFLAGAAAFLAALAGEALAEVLATLGGRPRGLGDAAAGATGLALALALGLGDAALGFAAVLAFAFGEGLGLGAALGALGLAALGLASVAGSLKEFFTLVSLPAAASFFSCTVSCLRKLVGSLPPCFPSTYLLMATELDPFLSLRAAIA

SEQ ID NO: 39633 - protein, 664 aa, Zea mays
  Clone ID: 700550878_FLI.pep
QELVAKDLHGVEWRFRHIFRGQPRRHLLQSGWSVFVSAKRLVAGDAFIFLRGDSGELRVGVRRAMRQQANVPSSVISSHSMHLGVLATAWHAVNTGTMFTVYYKPRTSPAEFVVPCDRYMESLKRNYPIGMRFKMRFEGEEAPEQRFTGTIVGNVDPDQAGWAESKWRYLKVRWDEASSIPRPERVSPWQIEPAVSPPPINPLPVHRPKRPRSNAVASLPESSAPTKEAAPKVTLETQQHALQRPLQTQDNVAPKSVFGDNSELDSAHKSSLRPSGFDLDKSTIGMQRKLGSDIWMRMNRPDGYSEMLSGYQPPNEGARNSQGFCSLPDQIAAGRPNFWHTVNAHYQDQQGNHNLFPGSWSMMPSSTGFGMNRQSYPMIQEVGGMSQSCTNTKFGNGVYAALPGRGIDRYPSGWFGHTTPGGRVDDAQPRVIKPQPLVLAHGEALKMKGNSCKLFGIHLDSPAKSEPLKSPPSVATPAAEKWMADGIDADKSPEPHKTPKQLGATQVDPVPERCPQASRGTQCKSQGGSTRSCKKVHKQGMALGRSVDLTKFNGYTELVAELDEMFDFNGELKGCSKEWMVVYTDYEGDMMLVGDDPWNEFCSMVHKIFVYTREEVQRMNPGALNSRPEDSGLANSTERGSASTAAAREAPGYQSASSLNSDNC

SEQ ID NO: 39634 - protein, 108 aa, Zea mays
  Clone ID: 700551855_FLI.pep
KTLKQIRSRKTQVLLDELCDLKRKEQMLQDANRVLKRKLHEFEAEAASPPQLAWQGGGGMLSHDPPQPEHFFVALESNAPLQPTYHTMDMNQQPEPAPGGCYPPAWMA

SEQ ID NO: 39635 - protein, 385 aa, Zea mays
  Clone ID: 700552169_FLI.pep
TALPLRRSSLSGAEQQWRKTRLISLMDDVCRRYKQYYQQLQSVISSFETVAGLSNAAPFAFMALRTMSKHFKCLKGMVMSQLRNTSKVIANHGIIAKDDMANFALMGGGAGLLRGNSVNAFSQPHNIWRPQRGLPERAVSVLRSWLFEHFLHPYPTDSDKQMLAKQTGLTRNQVSNWFINARVRLWKPMVEEIHNLEMRQLHKTTSVDQNQLGMQQQNHHSSDGSGRPSSDPSNSQRGQSSGMTRNLSSRAPRHIQDDELSQMPHDMAGQVSFAYSGLPPAHHGLALSHHHHPQQAQAEAVGVGGVAASSGGGVSLTLGLHQNNNNNNRAYIAEPLPAALPLSLPHRFGLEDVSDAYVMGPFGGQDRHFSKGIGGGHNLLHDFVG

SEQ ID NO: 39636 - protein, 351 aa, Zea mays
  Clone ID: 700553255_FLI.pep
NDTKEGPNLQVAGPGGEITAGYLLKKSAKNNEWSKRWFVLNEKSGKLGYTKKQEERHFRGVIVLEECNLEEIEEEEISKSSKDSKKANGQEKGPSLVFKITNRVSYKTVLKAHSAVILKAESMADKIEWIKKIKGVIQSRGGSVKGPTEDGPMRQSRSDGSLDTMARRPADPEEELRWMSQEVRGYVEAVLNSLAANVPKAIVLCQVEKSKEDMLNKLYNSISAQSNAKIEELLQEDHNAKRRREKYQKQSSLLSKLTRQLSIHDNRAASYGNDSSGAEGSPRSPGHSGEDWKSAFDSATNGSVDRSSSQHETRSKSADSRGRRHENGDANSGSRRTPNRLPPAPPNGGRY

SEQ ID NO: 39637 - protein, 250 aa, Zea mays
  Clone ID: 700553362_FLI.pep
NAVCKSPLVLLLKCSNQVINYVLPVTINCFKLLAQLYSKLCPNTSFFMVIFDIHIYYQHTLHQPRLAVIHIFNNQVKDPLLKGHYHIKHPVAGIVLPPLRRQLHRGVPLQHRQQPIPLVPGWFATEIHESRAFQVIVQGARQGNVSTQRNGKATPQASLQTQFGKCANNFSPGDRDIASNDPKLQKTIMVVICFHQMHAKFRQNSIHNPKHWSTSSPPNQQRWGWEKKEHQEAIGGSLGGEREDDSRCSY

SEQ ID NO: 39638 - protein, 304 aa, Glycine max
  Clone ID: 700556206_FLI.pep
SETKKRATTVKSVESKGQAEKCAKRKRKNQYRGIRQRPWGKWAAEIRDPRKGVRVWLGTFSTAEEAARAYDAEARRIRGKKAKVNFPDEPSGAASSKRLKANPEAQPMKKNLNSVKPKINQMFNFGDNLEGYYSPIDQVEQKPLVNQYVNRAPFAGNGVQVSPVTPSADVTAYFSSEHSSSSFDYSDLGWGEQVPKTPEISSMLSAAPLDGESQFVQGAADQNQKKNNLLDMASVQDDSAKTLSEELADIESQLKFFETPSFLDEAWADAALASLLSEDASQDAAGNPMNLWSFDDLPSMAGVF

SEQ ID NO: 39639 - protein, 209 aa, Glycine max
  Clone ID: 700556244_FLI.pep
FSVYGKNPEKFRCLLNSYMSSVRKMACEILELMAEGLKIQQKDVFSKLLMDKQSDSIFRVNHYAACPEMTLNDQNLIGFGEHTDPQIISLLRSNNTSGLQIYLRDGNWISVPPDDKSFFINVGDSLQVMTNGRFRSVRHRVLANGFKSRLSMIYFGGPPLSEKIAPLSSLMKGKESLYKEFTWFEYKKSIYGSRLSKNRLEHFERIAAS

SEQ ID NO: 39640 - protein, 355 aa, Glycine max
  Clone ID: 700558953_FLI.pep
IILHCSQLSMAPQTISILNLLPEPDVFIHTSHGTRIPAHAPILASMSPVLENLIDRPRKHRSSERIIQIHGVPCDAVTAFVRFLYSSRCTEEEIDQYGMHLLALSHVYMVQQLKQRCIKGLTHRLTTESVVDVLQLARLCDAPDLHLRCMKLLAKNFKAVEATEGWKFLVKHDPWLELDILRFIDEHETRKKKSRRYRMEQGIYAELSEAMECLEHICYEGCTHVGPYDAEVKRERTPCGRFATCQGLQVLIRHFATCEKKVRGGCVRCKRMWQLFRLHSYVCHDTDSSCKVPFCRQFQLRMQQEKRKDDAKWKLLARKVASAKVMSSLSLPKRKRDEETRVTMDNPGIRSFKLL

SEQ ID NO: 39641 - protein, 421 aa, Glycine max
  Clone ID: 700559627_FLI.pep
THKIRELETAMLGPNADMLDIYGTVNPEPDSFLLEAEKWKKMMEISSRGDLKEMLYMCAKAMAVNDMETTDWLVSELRKMVSISGNPIQRLGAYILESFVARIGASGSTIYKSLKCSEPTGNELLSYMNVLYEICPYFKFGYMSANGAIAEALREESEVHIVDFQIGQGTQWVSLIQALARRPVGPPKIRISGVDDSYSAYARRGGLDIVGKRLSALAQSCHVPFEFNAVRVPATEVQLEDLELRPYEAVAVNFAISLHHVPDESVNSHNHRDRLLRLAKQLSPKVVTLVEQEFSTNNAPFLQRFVETMNYYLAVFESIDTVLPREHKERINVEQHCLAREVVNLIACEGEERVERHELLNKWRMRFTKAGFTPYPLSSVINSSIKDLLQSYHGHYTLEERDGALFLGWMNQVLVASCAWR

SEQ ID NO: 39642 - protein, 180 aa, Glycine max
  Clone ID: 700559919_FLI.pep
EVPPLPKNRKAACGQHKEEILSQLRELAKSEPLDLEPYVSSGNLSSGFEREPEADIFPSHEWHRESSEPMYQVVPPDPLMRTYTEEIPFKHSTSAVGETQTYGDNGGKPSISLKSETLSTTPKAAACELTSQERDSALLRYKQKKKTRRFDKHIRYESRKVRAESRVRVKGRFAKMEHEH

SEQ ID NO: 39643 - protein, 111 aa, Glycine max
  Clone ID: 700560620_FLI.pep
ASTSCADSPAISCVQLEVEDQPKSPGINMNSEPSVVAVPDLDASKEQPVGKAPVTTGVNDIFWERFLTENPGSSEMQEAQSERKDSDGRSNAKFWWNIRNVNNPPEQMGHS

SEQ ID NO: 39644 - protein, 197 aa, Glycine max
  Clone ID: 700560840_FLI.pep
FGTPQVASEATLTGKKPRKNCSWGIIWQKKNNEDTDNDFWLRNILLKGGSNMPQLKPVCHLCRKPYMSDLTYICCETCRNWYHAEAVELEESKISSVLGFKCCKCRRIKSPVCPYSDLKPKRQEGKKSRTRTKKKEHSGADSDSGAIYYDMRDCEVATPVFHVEDDPSHVFPVEGDPTHVFPVEMILFFSLFRVLSC

SEQ ID NO: 39645 - protein, 205 aa, Glycine max
  Clone ID: 700561141_FLI.pep
GMASAGDVFRQGLPEVCAAGKLHVLAVDDSHVDRKVIERLLKISSCKVTVVESGSRALQYLGLDGEKSSIGLDSVKVNLIMTDYSMPGMTGYELLKKIKESSVFREVPVVVMSSENILTRIDSCLEEGAEEFLLKPVKLSDVKRVTDFIMRGEGMKGVKISKKRSRSDDCIPSLSTAFSSVSHPCDISSPPSPCVLQPKKSRLSI

SEQ ID NO: 39646 - protein, 483 aa, Glycine max
  Clone ID: 700561223_FLI.pep
STVSIHRSTHSFCCFFSNMGRETMCLSTPPPTTATTTVNPVPPPPPAPPTSLAPGFRFHPTDEELVIYYLKRKVSGKSFRFDAISEVDIYRSEPWDLADKSRLKTRDQEWYFFSALDKKYGNGGRMNRATSKGYWKATGNDRPVRHDQRTVGLKKTLVFHSGRAPDGKRTNWVMHEYRLVEEELERAGTGSSQPQDAYVLCRVFHKNNIGPPNGQRYAPFIEEEWDDASGMVPGADHVDNRSFAHQPRVEGNGGVLCAEGRNGVVQDTQSFNKAPFDVNKLPIETQNLLAVCKRESMAEYPSPEKDDNNCKHMDDYPSPQTDNPKPFSQIYKRRRHNLNSNNSNVSGDSVRTSQDPCSSTITTAATALPTATVAGTATNTAPKKHFLSALVEFSLLESLESKDNLASIKAPDFDTENLESSMPPSCAKFIKQMQSEMQKLSVEKETIRFEMMSAQAMINILQSRIDVLSKENEDLKRMVAQNP

SEQ ID NO: 39647 - protein, 413 aa, Glycine max
  Clone ID: 700562177_FLI.pep
EKQENTGLDGSKDSDGKSTSQSMQMSSGPNGSTANASSELSSAERQNLLDKKTKLLSMLDEVDKRYRQYCHQMQIVVSSFDMVAGCGAAEPYTTLALRTISRHFRCLRDAISGQIQVTQRSLGEQGIPRLRYVDQQLRQQKALQQLGVMRQAWRPQRGLPESSVSILRAWLFEHFLHPYPKDSEKIMLARQTGLTRNQVANWFINARVRLWKPMVEEMYKEEFGDSEMNCNLSSENNTVKCKKDDLVQESDNINNNNKWEETQDNLVTVDSVQVQPQAELDRGVNVENVVMDSGTGKLQGDQNQQRLGMNNNNNFYSISTNQNDGGLMGCSTHATYDLSELGNFTVGSHVSLALELRNCESDGFAMSDDAIRKRRNQALASSPETDLLDYHFTDSGKQQHRFGNPHLLHEFVV

SEQ ID NO: 39648 - protein, 285 aa, Glycine max
  Clone ID: 700562769_FLI.pep
IFYSSLKIYRAMSFVFRGTRADIENGFPGFIPERRALRVHATRPSNSNSLTFLVTVLLLFMILNSHQMSPNFLLWLVLGVFLMATMLRMYATCQQLQAQAQAHAAAASGILGHTELRLHMPPSIALASRGRLQGLRLQLALLDREFDDLDYETLRALDSDNVSTAPSMTEEEINALPVHKYKVSGPQCGGSSMQQASSSTPAEKKQDNSNAVGSMKASDDDLTCSVCLEQVNVGDVLRSLPCLHQFHANCIDPWLRQQGTCPVCKFRAGSGWSDNGHNDIIADMV

SEQ ID NO: 39649 - protein, 458 aa, Glycine max
  Clone ID: 700562909_FLI.pep
SNSALTQLESRIFGIMDNSYDSSSSLSFVSSHLSHGSSNHNVSSTTSNEHGENIEILSLNKLSGSLEKLLIEVEYDYSDAEILIEDIPVGIHRCILASRSPFFHELFKKGTDGSGKEGKPRYLMSDLMPYGTVRYQAFQVFLYYLYTGRLKASPTEETTCVDETCIHVACRPAINHALELMYASATFQMKELVLLFQRHLLNFVEKALVEDVIPILMAAFNCQLDQLLSRCIQRVARSDFDNTSLEKELPHEVLTEIKSLRLSFQPESTPNAMEAESLNEKSIRRIHKALDSDDVELLKLLLNESSVTLDDAYALHYACAYSDSKVIQEVLSLGMADILRRNSRGYTVLHVAARRKDPSILVALLNKGARASDTTPDGQTALAICQRLTRCKDYHEKTVQCKESNKDRLCVDVLEREMRRNSMTVNMSVSSQLTADDLHMRLDYLEDRVAFARLLFPA

SEQ ID NO: 39650 - protein, 525 aa, Glycine max
  Clone ID: 700563001_FLI.pep
SLSVTSFDLKRSTSSANMEASAGMVAGSHKRNELVRIRHDSSDSGSKPMKNLNGQICQICGDTVGLTATGDVFVACNECAFPVCRPCYEYERKDGNQSCPQCKTRYKRHRGSPRVEGDEDEDDSDDIENEFNYAQGKAKARRQWEDDPDLSSSSRRESQQPIPLLTNGQTMSGEIPCATPDTQSVRTTSGPLGPSEKVHSLPYVDPRQPVPVRIVDPSKDLNSYGLGNVDWKERVEGWKLKQEKNMVQMTGRYAEGKGGDVEGTGSNGEELQMVDDARQPMSRVVPIPSSQLTPYRVVIILRLIILGFFLQYRVTHPVKDAYPLWLTSVICEIWFALSWLLDQFPKWSPINRETYLERLALRYDREGEPSQLDPVDVFVSTVDPLKEPPLVTANTVLSILSVDYPVDKVSCYVSDDGSAMLTFEALSETAEFAKKWVPFCKKHNIEPRAPEFYFAQKIDYLKDKIQPSFVKERRAMKREYEEFKVRINALVAKAQKMPEEGWTMQDGTPWPGNNPRDHPGMIQVF

SEQ ID NO: 39651 - protein, 248 aa, Glycine max
  Clone ID: 700564011_FLI.pep
KTHTYTNNTKMKYSEISHFSHPQHKLRFEYSEFPFKCDGCKEVGIGSRYKCSICDFDLHMHCAMITSPTLLHPFYTKCNFQFMSKPPGDTPRYCNACEKDVRGFLYHCKACGFDLHPCCAKLPMVLDDGEVKLYLYRKVSSPCHRCGRKGRSWSYRSKCKNYNLHVACVRDMLVENWHEVYVKGRSVNSNIPSLRNTLYTPHNSRRSKGKVKKCCEIAGLAVQVVISAVLGDPTALIAGLVGSFMSRA

SEQ ID NO: 39652 - protein, 249 aa, Glycine max
  Clone ID: 700564406_FLI.pep
QTPPTTNKHTSQLCFFSLSMSSSSFSPATLTTEQELSVIVAALTNVVAGSTSASSSFSLPEFRLPQTSDPLAAACLMPPPPPPSMDTCRECNIAGCLGCNFFPEEKKKQKRAKKKYRGVRQRPWGKWAAEIRDPRRAARVWLGTFGTAEDAARAYDKAAIEFRGPRAKLNFPLVDESLTLQQSEPERVQTEEEQIKTENLNQGMEMDSFGNKDTEFWDRINEADFHQLMMMMDFAGDSSDSATGNALSS

SEQ ID NO: 39653 - protein, 187 aa, Glycine max
  Clone ID: 700565054_FLI.pep
FHHSSLSTRHADSLLPSLYPNFDSFDQTRNTHLTKTLRNPSMTLGLGGSSVVVPRNFRLLEELERGEKGIGDGTVSYGMDDGDDIYMRSWTGTIIGPHNTVHEGRIYQLKLFCDKDYPEKPPSVRFHSRVNMTCVNHETGVVEPKKFGLLANWQREYTMEDILTQLKKEMAAPHNRKLVQPPEGTYF

SEQ ID NO: 39654 - protein, 645 aa, Glycine max
  Clone ID: 700565874_FLI.pep
APLSRSKSNCSKGTCAICLNSMKAGQGHAIFTAECSHSFHFQCITSNVKHGNRICPVCRAKWKEVPFQSRSSKVSHGINRVNSPRNDSWTTLLGRVPTQQASTAPQLASPNNVAEPAIYDDDDEVLDQQTSVTEDMDEAVHNLVNTMEIRTYPEVSAIAKSASHDNFAVLIHLKAPPHSGRLSNNTESSAQNSRAPIDLVTVLDVSGSMSGTKIALLKRAMGFVIQNLSSSDRLSVITFSCTARRIFPLRRMTDAGKQEALQAVNSLVPNGVTNIVEGLRKGAKVFVDRKWKNPVGSIILLSDGQDSSINSSRINVVNDYRSLVPCSIHRNNGMGLHIPVHAFGFGVDHDATAMHSISEISGGTFSFIEDEDVIQDAFAQCIGGLLSVVVQQLHVEVQCVHRCLQLGSVKAGSYQTSLIDSGKMASIKVGDLYAEEEKDFLVTVNVPVDKSSDEMSLMIVRGIYRDPITKEMVGLGVNSEVKIQRPNVARDVVMSIEVDKQRNRLRATEAMAEARVKAERGDLSAAVSVLERCQQALSETISAKAGDELCISLAAEMKEMQDRMVNQRVYEQSGRAYVLSGLCAHSWQRATARGDSTDSTSFVNAYRTPSMVDMVSRSQTMLLRPPQSANAVKPARSYSDRQRRK

SEQ ID NO: 39655 - protein, 214 aa, Zea mays
  Clone ID: 700569707_FLI.pep
KTLLFYYNGSAGTGASVRSAPVSEYYGWEKLPNMLVARQDGSPCASLNSVSLHAGEFTSSRRPFQNTLMETSPPNGNWRLFYSLQCLAQNPFFLVESVSETDRGGRDPMEKCLLKNGRLNGTFMLELVPNLGSLLPFFWCLLLFPSGLISAATFFGILFLTLDSSFPNSFTVHFSPCVHTGHGGSYLSASIVMLSRQSAWYTCPHNRTATTASS

SEQ ID NO: 39656 - protein, 431 aa, Zea mays
  Clone ID: 700570744_FLI.pep
SLFLLKKELYLWGLGRTQSYFLFHSSAEVMAHLLGLAICGGRGRRVQLIPGLDPGDHGVTELDKVGVNRAQLLLHLSREVDVALLDGVAVLGDGHVLEEGDDVLLPEDALVFLLQVNEGVASLAVPDVWQASLDSQAQVVADDLHTPSCPHVVVATDGLAITHETKVHSRANEIPVEGKVHATHGEQGSLGDCHDSINIPLIPLLGLDQLCGSIIVRDVQPQAVGDGGVSTLPEAEGVSTHKVSTLTVGVVQGVEEERGGWAEEVLDVLLKSIDILARWVLGNEAVVVDGVDVLLLGDHVAEAAAGGVLEGDAGGLGPEDAVDVVAVVELVVEALGHLDGLGRVAVLHDDEVVGLEEGPPHLQEVEVADRRDHDVELVLEQRRGGGRRPRDRHRARHCRSRWWWRSHSRPPDLDLSAPPLSAAGPGGGGEQ

SEQ ID NO: 39657 - protein, 449 aa, Zea mays
  Clone ID: 700572550_FLI.pep
FEGCSSDMMSSAGCAHFYCHECWEGYISAAIGDGPGCLSLRCPDPSCSAMVLQGMINELAKDEDRKKYARFLLRAYVEGSKKTKWCPAPDCTCAVEFLGDENYDVSCNCMFSFCWNCTEEAHRPVNCETVSKWILKNSAESENMNWILANSKPCPKCKRPIEKNQGCMHMTCTPPCKFEFCWLCLGAWSDHGERTGGFYACNRYESAKKEGVYDETDARRERAKNSLERYMHYYERWASNQTSRQKAQADLLKAEKDQIANLTDIFGIPETQLKFIIEAWSQIIECRRVLKWTYAYGYYLDDKIKSEFFEYLQGEAESGLERLHQCAEKDLQNFLPSVKSDSTETTTPTVAEFGEFRVKLAGLTSVTRNYFENLVQALEAGLEDVRATGQAAGTSSTATSSKKGGTKSKKKQHTAPSSDHTDDGWPCERCTFLNPPTVDACSVCEKSRY

SEQ ID NO: 39658 - protein, 291 aa, Glycine max
  Clone ID: 700556256_FLI.pep
SMAATLTAVRIPTFHQRHLKQHFTAPSSSSLRLLNLAKMEGSEISEQVVGEDLGAKKKVFVAGATGSTGKRIVEQLLAKGFAVKAGVRDIDKAKTTLSSANPSLQIVKADVTEGSDKLAEAIGDDSEAVVCATGFRPGWDLLAPWKVDNFGTVNLVEACRKRNVNRFILISSILVNGAAMGQLLNPAYIFLNVFGLTLVAKLQAEKYIRKSGINYTIIRPGGLRNDPPTGNVVMEPEDTLYEGSISRDLVAEVAVEALAYPEAFYKVVEIVSRPDAPKRPYHDLFGSIRQQ

SEQ ID NO: 39659 - protein, 548 aa, Zea mays
  Clone ID: 700572778_FLI.pep
FVTLGQRVLANPLKVRMHYGHPDVFDRIFHITRGGISKASRSINISEDIYAGFNSTLRQGCITHHEYIQVGKGRDVGLNQIALFEGKVAGGNGEQVLSRDIYRLGQLFDFFRMLSFYVTTVGFYFCTMLTVLTVYIFLYGKMYLALSGVGESIQNRADILQNAALNAALNTQFLFQIGVFTAVPMILGFILESGVLTAFVQFITMQFQMCSVFFTFSLGTRTHYFGRAILHGGAKYRATGRGFVVRHIKFAENYRIYSRSHFVKGMEVALLLVIFLAYGFNNGGAVGYILLSISSWIMALSWLFAPYLFNPSGFEWQKIVEDFRDWTNWLFYRGGIGVKGEESWEAWWEEELQHIYSIRGRILETILSLRFFIFQFGVVYHMNASGGSTALLVYWISWAVLGGLFILLLVFGLNPKAMVHFQLFLRLVKSVALLMVLAALVLAILFTKLSVRDVFASILAFVPTGWGIISIAMAWKPVVKKLGLWKTVRALARLYDAGMGMVIFIPIAICSWFPFISTFQTRLLFNQAFSRGLEISLILAGNNPNAGI

SEQ ID NO: 39660 - protein, 223 aa, Zea mays
  Clone ID: 700574093_FLI.pep
CRCASVCTPFSRSRTVLYWLAHHLHLADTAEGDSSHARPWPRPRLISITFRRMGRAGTCPAPGPTESSGGRAHGHATTKDAAAPSELPLPGTAEWSLHLTPTTRRPCSCRRHPPSSNSSGPRPPSRSLPRRRHGVPRPEDRRCSHCSRRSAPCRRGWSGASSSRPCCSAGGRTSARGWRPASGSSSARSSWRCLASRPCPASPGRQGTACAPPRSMELLAASS

SEQ ID NO: 39661 - protein, 165 aa, Zea mays
  Clone ID: 700574789_FLI.pep
LSHDAPQLYWLSIVFLAFDVFFVVFCVALACVIGIAVCCCLPCIIAILYAVTDQEGASEDDINNLSKFKFQTMSDADKLAAGIAAPVGGVMTECGTNPPVEHILSAEDAECCICLCPYEDGVELRELPCNHHFHCSCIDKWLHINATCPLCKFDIIKSNRDIEEV

SEQ ID NO: 39662 - protein, 256 aa, Zea mays
  Clone ID: 700575127_FLI.pep
LGYPNSQASDASQLISQASFDGDIDGASLVTNSNVIEDDDFQGKPTNSGTSKELSDDDGDLEENTDPANAKKMRRMVSNRESARRSRKRKQAHLTDLESQVSRLTSENASLLKRLADMTQKYKDASVDNKNLTVDVETMRRKVNIAEEAVRRLTGITLMLPTAFEKPTSSAPLSSCPSDAASASASAAIEDSVKHFLQAPLENSGIIPNAAVFQTKPASLHRVASLENLQKRIVGDAMYSETASTTFSDPEALADR

SEQ ID NO: 39663 - protein, 80 aa, Zea mays
  Clone ID: 700575784_FLI.pep
GTTTRRARDSIAPASSSPRTAAQSAASETSSRPTPPPRRSMSKSTTKMDRSTITYTSLYVRICLVITARAHIQYTCAPLT

SEQ ID NO: 39664 - protein, 192 aa, Zea mays
  Clone ID: 700577328_FLI.pep
NYNLGLNRTGKSCRLRWVNYLHPGLKHGRMSPQEERIIIELHARWGNRWSRIARRLPGRTDNEIKNYWRTHMRKKAQERKMGMPSPSSSSSSLTYQTCLLDTIPVIGMGSGDTHNGSCVTSTLENTQSVMDGYPMDQIWKEIEAPHAPNLLSIAEGKEKTCSSIPCHLPSPVMWDYKCPEIFWKMGDQEIMM

SEQ ID NO: 39665 - protein, 105 aa, Zea mays
  Clone ID: 700577343_FLI.pep
QSQSTLTRSVRKENTMNTIHFQPLPASRAFLLNLDGLFDARVAEDMATSRCGWLLHLIPTYWAGKRWFLGNLLSRLFAGLYAIWLQAGPCSPIGREVIYCHNPLA

SEQ ID NO: 39666 - protein, 134 aa, Zea mays
  Clone ID: 700577710_FLI.pep
NCCCCFVRRFMMDQLVFYESRAAAADPHRDMRLDIDNMSYEDLLALGESMGNVNTGLADEKISKCVKEVVCCSSDQTQTDQDDQDDGSCVICLEGYRDKDMLGILKCRHDFHAGCIKKWLQTKNSCPVCKAAAA

SEQ ID NO: 39667 - protein, 225 aa, Zea mays
  Clone ID: 700578174_FLI.pep
IYLGLFDSEVEAARAYDKAAIKCNGREAVTNFEPSTYDGELLLTAEASAEVADDVDLNLSISQPASSQSPKRDKNCLGPQLHHHHGRPFDGSAVLKKTKIDAPSELSSAGRPHRSFLPHLVAAEHLPPRSHPFFITHHESDASRRDPSWAAAAAWKVTAAAPPPPTTTLLPLPLPSTSSAAASSGFSNTATTAAAAPSAASSRRFDPPPPSSSSSSSHHHHHHRR

SEQ ID NO: 39668 - protein, 228 aa, Zea mays
  Clone ID: 700579822_FLI.pep
GNLVLTFWRLASSQSLRTSGVFLLLTPSNRRRYTVSTSTRRQTLPVILNFTSQAPTMAVTASSINSAIRMVPHPDTGYFLRFFSCRWIVQFCTIQRQLKRNGGSTVLDIRVGQDIVLARRVVELAARTEPARARPHVEGTGVSILSPWKASKSKCHRLLCILVFFGMRCRPVNRVVKLAILSILARSCLHVKITNNFSRSLRIDHWHRLNRHVSCMEIKGLQKICSRI

SEQ ID NO: 39669 - protein, 103 aa, Zea mays
  Clone ID: 700580914_FLI.pep
TLDTVSLSAPTEDTSNMSASRSSSPNSMSQWSQKENKMFEEALAYYGEGTPNRWDKVSSAMGGIKSAEEVRCHYENLDYDVKMIESGNVPYPKYKTQGFWTRG

SEQ ID NO: 39670 - protein, 221 aa, Zea mays
  Clone ID: 700581559_FLI.pep
TRCVVYCVSFFPLLLHVHTVLLLVQVSKGQYHCDGCGICRTGGVENFFHCDKCGCCYSNVLKDSHHCVERAMHHNCPVCFEYLFDSTKDISVLQCGHTIHLECMNEMRAHHHFSCPVCSRSACDMSATWRNSTRRSRPRRCLTSTRSTWCGSCATTAARPRACGSTCWGTSAPRAARTTPGRRGLRAPGSEANQRPCHKMPGRCRPTIICLQDVAALKVKG

SEQ ID NO: 39671 - protein, 164 aa, Zea mays
  Clone ID: 700581760_FLI.pep
LGVPWVILGHSERRALLGESNEFVGDKVAFALSQGLKVIACVGETLEEREAGSTMDVVAAQTKAIAEKIKDWSNVVLAYEPVWAIGTGKVATPAQAQEVHASLRDWVKINVSPEVSESTRIIYGGSVTAANCKELAAQPDVDGFLVGGASLKPEFIDIINAAAV

SEQ ID NO: 39672 - protein, 144 aa, Zea mays
  Clone ID: 700582355_FLI.pep
EAEAEARHHKGGATVTVMTTTTVTVMTTVVAAVVEGEEVAGMTGTMTEPAEVAGMPGMMMEQAEAADMTGMMMEEGAGMVAPQGVQGAQSGKAARSEGPRLSSGTVNGRENSELSVATVRRTCCLARLSSLYSKYACVDDILPV

SEQ ID NO: 39673 - protein, 151 aa, Glycine max
  Clone ID: 700605109_FLI.pep
VPKWTLAERSRRAPEKKGRRHKKKPVSRSVKAGLQFPVGRIGRYLKKGRYAQRVGTGAPVYLAAVLEYLAAEVLELAGNAARDNKKNRIIPRHVLLAVRNDEELGKLLAGVTIAHGGVLPNINPVLLPKKTERAAKEPKSPSKATKSPKKA

SEQ ID NO: 39674 - protein, 86 aa, Glycine max
  Clone ID: 700605511_FLI.pep
NIPRSGLIWNCESGAMLSSLTQSPSSSAPNCSSRMASSSRSRTKAWLTEPSSSLACICLPPNHLPFINSMHFWASFLSLNLTKTTP

SEQ ID NO: 39675 - protein, 404 aa, Glycine max
  Clone ID: 700605581_FLI.pep
QLQEIDHTRGKNAVMVLSSEDEEEEEEEDSDCEESDCDEASESDDGDVDDSSLSNKVVALLREGKDIESLKLNECKAYLRNHGLRIAGNRDVCVARIKEHWRLKHGSGYTLYPRSSFTINCTGDVCMGDVVLFRQKVYEKFDKVTRHGKTLGNRTVAGRVVKESYGAAKQQHTFTVEVLWSSGVRKLPPLSPLLVKGRNLYKQKTYRQRWKNEADRIEVLREKHGRGAAARSIRSLKRKNKSCYANESKGSKRQHEIHTKKQSKIGRSNVVDKVRHQDGSKRANNFQPREVTSSSQATQKEKASSRASRYTRGRHNSAEFDRYQVPVYPLHNYPQYTPSRNEPSEFFYHIRDLIPNMTEFPPSRPRVGEFASRSQLPVSNDICHARTNLYDFEMRNYGWRKYDI

SEQ ID NO: 39676 - protein, 197 aa, Glycine max
  Clone ID: 700606076_FLI.pep
EASMCGGAIIADFIPRQRPRTLTASELWPKRSEPQPQPPPPPVKRQRKNLYRGIRQRPWGKWAAEIRDPRKGVRVWLGTFNTAEEAARAYDKEARKIRGKKAKVNFPNEDDPLPQYGSCKSLNLEFGYDLNQTGLFPSSNADENCGSHVAYSVTEANNKVEKLSEELMAYENLMRFYQIPENVVGDLWAFPDTSPPL

SEQ ID NO: 39677 - protein, 254 aa, Zea mays
  Clone ID: 700610879_FLI.pep
QFRGIRRRPWGKWAAEIRDPRKGVRVWLGTFNSPEEAARAYDAEARRIRGKKAKVNFPDEVPTAVSQKRRAAGLASLKAPKMDVEEEKPIIKLAVNNMTNSNAYHYPAVVGHHNIIPEPFMQTQNMPFAPLVNYAALVNLSSDQGSNSFGCSDFSLENDSRTPDITSVPAPVATLAAVGESAFVQNTAGHAVAPPATGNTGVDLAELEPYMDFLMDGGSDDSISTLLSCDGSQDVVSNMDLWSFDDMPMSAGFY

SEQ ID NO: 39678 - protein, 287 aa, Zea mays
  Clone ID: 700613032_FLI.pep
ARSMLHEVMEQQTVSIAKAGIIASLNARTSVLACANPTESRYNPRLSVIDNIHLAPTLLSRFDLIYLILDKADEQTDRRLAKHIVSLHFENPNLEELEVLDLQTLVSYISYARKYIQPQLSDEAAEELTRGYVEMRKRGNSPGSRKKVITATARQIESLIRLSEALARMRFSEVVEVRDVVEAFRLLEVAMQQSATDHATGTIDMDLIMTGISASERQRRENLVAATRNLIAEKMQLGGPSMRMIELLEELRKQSSMEIHMHELRGALGTLMTEGAVVIHGDNVRRV

SEQ ID NO: 39679 - protein, 434 aa, Zea mays
  Clone ID: 700613077_FLI.pep
LPIYEPGLDDVVKQCRGRNLFFSTDVEKHVAEADIIFVSVNTPTKTRGLGAGKAADLTYWESAARMIADVSKSDKIVVEKSTVPVKTAEAIEKILTHNSKGINYQILSNPEFLAEGTAIEDLFKPDRVLIGGRETPEGRKAVQALKDVYAHWVPEDRILTTNLWSAELSKLAANAFLAQRISSVNAISALCEATGANVSEVAYAVGKDTRIGPKFLNASVGFGGSCFQKDILNLVYICECNGLPEVANYWKQVIKINDYQKSRFVNRVVASMFNTVAGKKIAVLGFAFKKDTGDTRETPAIDVCKGLLGDKAQISIYDPQVTEDQIQRDLAMNKFDWDHPMHLQPTSPTAIKQVSCVWDAYEATKGAHGVCILTEWDEFKTLDYQKIFDNMQKPAFVFDGRNIVDPEKLREIGFIVYSIGKPLDAWLKDMPAVA

SEQ ID NO: 39680 - protein, 298 aa, Zea mays
  Clone ID: 700613433_FLI.pep
GELRVGVRRLMRQLNNMPSSVISSHNMHLGVLATASHAISTGTLFSVFYKPRTSRSEFVVSVNKYLEAKNHKVSVGMRFKMRFEGDESPERRLSGTIIGLGSMPANSTSPWANSDWRSLRVQWDEPSAILRPDRVSPWELEPLDATNPQPPQPHLRNKRARPPALLSIAPELPQVFGFLKSPAEPAQAFSFSRPQQTQELYHSNPSSIFSSSLNVGFSSKNDRSTPINSHLYWTMRQTRTESYSASINKAPTEKKQESATSGCRLFGIEIGSAVSPVATVASVGQDQPPALSVDVESD

SEQ ID NO: 39681 - protein, 53 aa, Zea mays
  Clone ID: 700614231_FLI.pep
GGRGEGGVEVGRIKGFLLAAHCRFFGYARIALDRRGGAAERREKLGGGRRGRE

SEQ ID NO: 39682 - protein, 647 aa, Zea mays
  Clone ID: 700614946_FLI.pep
GKTRAKQYYSNDRDRTKNLGVLLHGDGSFSGQGVVYETLHLSALENYTTGGTIHIVVNNQVAFTTDPRSGRSSQYCTDVAKALDAPIFHVNGDDLEAVVHVCELAAEWRQTFHSDVVVDIVCYRRFGHNEIDEPSFTQPKMYKVIRNHPSALEIYQRKLLESGKISKEDIDRLNKKVSTILNEEFQNSKDYVPNKRDWLSAYWTGFKSPEQISRIRNTGVKPEILKRVGEAMTTLPENFKPHRAVKKIFDLRRQMIETGEGIDWAVGEALAFATLIIEGNHVRLSGQDVERGTFSHRHSVIHDQETGEQYCPLDHLVMNQDAELFTVSNSSLSEFAVLGFELGYSMENPNSLVLWEAQFGDFSNGAQVIFDQFLSSGESKWLRQTGLVVCLPHGYDGQGPEHSSARLERFLQMSDDNPYVIPEMDPTLRKQIQQCNWQVVNVTTPANYFHVLRRQIHRDFRKPLIVMSPKNLLRHKDCKSNLSEFDDLAGHPGFDKQGTRFKRLIKDQNNHKDLEEGINRLVLCSGKVYYELDEERRKSERTDVAICRVEQLCPFPYDLIQRELKRYPNAEIVWCQEEPMNMGAYSYINPRLLTAMKVLGRGGIEDIKYVGRAPSAATATGFYSVHVQEQTELVQKALQRDPLNYPF

SEQ ID NO: 39683 - protein, 143 aa, Zea mays
  Clone ID: 700615616_FLI.pep
QCGNRVIQRGITCKLQVFFTREGKGWGVRTVEDLPRGAFVCEYVGEILTSAELHERAIENARNGKHMHQVLLDAGWGSGVVLRDEDACSLDGSFYGNVGRFINHRYVGYLLVFFCCKYLAIVCVLQSFVCYSAMFLVTNICYD

SEQ ID NO: 39684 - protein, 209 aa, Zea mays
  unsure (1)..(209): unsure at all Xaa locations
  Clone ID: 700615675_FLI.pep
QGPXSAVRSTMSSIFSFIPVFFFHLTDWRCQQNHLFSSSSIPAGSSNRNFPIGTSNLFGKHSICFSIRLQKNQHSNRGPSCKDNSWNLGFGFLVHDISLELEKAHPFPEHVNALDENPREAQPPVGEDALLRLQVPQPLLEQRRLHRVPEVSLGEPRRAHDEDRGPGAGHIDGSAGQGRGRAVRRGHAYAAAAGSCSCGSGRGRERKKR

SEQ ID NO: 39685 - protein, 80 aa, Zea mays
  Clone ID: 700617311_FLI.pep
SPRAYATTSSARGLASMGIHVDTSIRSQMVPIQQSDFIANQPNFVGYQGVDINSSSERIVMYDKLDAYHILTSVSCHAMM

SEQ ID NO: 39686 - protein, 79 aa, Zea mays
  Clone ID: 700620948_FLI.pep
RGRGGDCGWRLLRHPAAGVLPWRSFLELPLTVVNLKRQMDSALHDASVFRLIMDLLKVVLNKCQEIRPLSYLGLYLRGS

SEQ ID NO: 39687 - protein, 164 aa, Zea mays
  Clone ID: 700621924_FLI.pep
LSVQNNPSRVWNQQLECRSRSCIIIPDSQIALRMSTAAWYSARVRIFGESMETTSSARNPSWSRHNSSLPWQTSSGRTSVLCRPGSSRSRSVSPLSPTSTDTLDRSMPHCIDRYLSARGRDAESGMTLRRVHARVYTRLHRNPRMRSDCRIESTFFTLDAPAAA

SEQ ID NO: 39688 - protein, 177 aa, Zea mays
  Clone ID: 700622288_FLI.pep
GLRKTLIRWAAEKNKESGQKIFIEDEECSSTYCISFKVSNTAAAPPVKEIRRTMRIQALRCHVLYSHDGSKLNVIPVLASRSQALRYLYIRWGVELSNITVIVGECGDTDYEGLLGGVHKTIILKGSFNTAPNQVHANRSYSSQDVVSFDKQGIASIEGYGPDNLKSALRQFGILKD

SEQ ID NO: 39689 - protein, 202 aa, Zea mays
  Clone ID: 700623908_FLI.pep
SYAHVWSPTRVLGRRLTALHYSGHTCQTRSGTSYDYPTTTTTLHSCSYVLHAKRGHASDLGLGPELGLVDLDALPGGALAAGLLHGAQAALPPHLAVPFVAQLLFAGLPALAAHLAVPLMAQLLTPGLPAVTAPFGEVLLRLEGLAAGAAGDDGLPLLGHARQLLPAFLTGRHRRPQTNEQNWRARCGSLLDVHRDYYCSLV

SEQ ID NO: 39690 - protein, 355 aa, Glycine max
  Clone ID: 700649555_FLI.pep
ATSNMCTMKPTLRFILVLLTLLLVLRFNVASEVEDELEELLAVDEEVEQEAEKGGEKLSEAEVLSKAQRIVIELNNDNTERVVNGNEFVLVLGYAPWCPRSAELMPHFAEAATSLKELGSPLVLAKLDADRYSKPASFLGVKGFPTLLLFVNGTSQPYSGGFAADDIVIWAQKKTSTPVIRIGSVTEAEKFLRKYQTFLIGRFDKFEGPDYEEFVSAAQSDNEIQFVETNQVELAQVLYPDIKPTDQFLGIVKSEPERYTAYDGAFTMNKILEFVDYNKFPLVTKLTEMNSIRVYSSPIKLQVLVFANIDDFKNLLETLQDVAKTFKSKIMFIYVDINDENLAKPFLTLFGLEES

SEQ ID NO: 39691 - protein, 373 aa, Glycine max
  Clone ID: 700649584_FLI.pep
QQHQNQKGNMGRAPCCDKANVKKGPWSPEEDAKLKSYIEKHGTGGNWIALPQKIGLKRCGKSCRLRWLNYLRPNLKHGGFSVEEDDIICSLYVSIGSRWSVIAAQLPGRTDNDIKNYWNTRLKKKLLGKHRREPRNRGNYNSVKQENDVNRGSGTTDGDSSSLSLLQENGSTTHHQEQHQQQPCWPQNINNMPVLPLQVPLPYKNQGPCFNDQDSLKKLLIKLGGRFSGDSYHPTLDGLNLEFSSHGQQIYQEQVHVGSSAACISATINNNNEVQFAQTGQYPGVDNLVQGQGGNFTPSFEEMVSSSNYPDGLEFLYNEGMIDHKIIDTTTTTTWGETSTPIYHHHDSLASTYQGQGVIQECVLQDFSYPRAQ

SEQ ID NO: 39692 - protein, 130 aa, Glycine max
  Clone ID: 700556264_FLI.pep
AKGFPSLKVLGLDDLDGLKSMTVEEGAMPGLKKLIIQRCDSLKQVPLGIEHLTKLKSIEFFDMPEELITALRPNGGEDYWRVQHVPAVYISYWRDGGWDVYSLETLGERESDSSSGTAKRSLEICTLWKV

SEQ ID NO: 39693 - protein, 270 aa, Glycine max
  Clone ID: 700649811_FLI.pep
QANTMVIKSVLFSFIFPPPPSLVVWGLTVTSFLILANAFLSEIRGKHLNYSKFWNANPSAEKQVKLSSKAGMLLLYTPAFLAGLASFWVFPHQGLRFTILQSAVTLHYFKRVFEVLFIHKYSGGMTLESAIPITLSYFLSAVTMVYSQHLTKGFPEPPINLFYPGIVLFLVGIIGNFYHHYLLSKLRGKGEKEYKIPKGGFFELVICPHYFFEITVFYGIFFISQTLYSFAFAVGTTMYLVGRSYSTRKWYLSKFEDFPKHVKAVIPFVF

SEQ ID NO: 39694 - protein, 249 aa, Glycine max
  Clone ID: 700650723_FLI.pep
RRSFSLDSSIGNFNIEDGLPKLPPSKNQMGQHSPSNSMDGKMSETSTEFGNGEFSAEEVKKIMESDKLAEIASTDPKRAKRILANRQSAARSKERKMRYIAELEHKVQTLQTETTTLSTQFTKLQRDNSDLKSENNECKLRLQAMEQQSLLKDALNETLDAEVRRLRRAVADLAVNPSQVAWLDSLLLTKQMFELQHQQPSQQRHFLLQNHHTQEEIESRSQQIQGNELHPQAQIQSQQIQRNELHPQP

SEQ ID NO: 39695 - protein, 255 aa, Glycine max
  Clone ID: 700650943_FLI.pep
NIKYCSLTKKKNRMAELPSSEASSSSASSRKHSSSEAHLPAPDQKRPKQARDSSSKHPVYRGVRMRAWGKWVSEIREPRKKNRIWLGTFATAEMAARAHDVAALAIKGNSAILNFPELAASLPRPDSNSPRDVQAAAAKAAAMEVNDVPTTPSSSSSSASLSLSQSSSWSSLAVSSSSGDGPSTPEELGEIVELPSLGTSFEIPDPSGELVYLDPWPYSQAWSHGIYDESEGYFIGDSETESMILCGFEGSLWQH

SEQ ID NO: 39696 - protein, 230 aa, Glycine max
  Clone ID: 700651386_FLI.pep
TLKGFMYVHETIRRREMKKRVVTIPIGDVDGSKSKGENYPPSDSWAWRKYGQKPIKGSPYPRGYYRCSSSKGCPARKQVERSRVDPTKLIVTYAYEHNHSLPLPKSNSSAASAAVSDGATSSSPADSAARYPPEEEMKVFATDSDLELAGDAAVLLSHHHHHHFGWFDDVTSTGVLESPICGEVDDVAVPMREEDESLFADLGELPECSAVFRRMNIPATSAIRCGGITG

SEQ ID NO: 39697 - protein, 225 aa, Glycine max
  Clone ID: 700651436_FLI.pep
RKVGAPPELASLLEEIARESYPTDALREIGDDPELDEFMESYCEVLHRYKQELSKPFNEATLFLCSIESQLSNLCKGTLTMPLDNNHSDEAAGTSEDELSWEKVEAVEGHESSGPRPGDQELKEMLLRKYGGYLSSLKKEFLKKRKKGKLPKDARMVLMDWWNTHYRWPYPTEEEKVQLSEMTGLDQKQINNWFINQRKRHWKPSEDMRFAIMDGVSGSGFGGPI

SEQ ID NO: 39698 - protein, 196 aa, Glycine max
  Clone ID: 700651467_FLI.pep
LAMESHCAVCKEAFELGTAVREMPCKHIYHPECILPWLALHNSCPVCRHELPADTPNPNQNQNPSQNVALNEEENVGLTIWRLPGGGFAVGRFSGGRRGAERELPVVYTEMDGGFNNGGGEPRRISWSRGNRGRESGGLTRFFRNLFGCFRGSSTQRSASSRESMRASSSRSSTMDPSLRSRRTWSMDVNSGMRAW

SEQ ID NO: 39699 - protein, 159 aa, Glycine max
  Clone ID: 700651877_FLI.pep
KRVKRILANSNANATCSSEKITDPKRVKRILANRQSAQRSRVRKLQYISELERSVTSLQAEVSVLSPRVAFLDHQRLLLNVDNSALKQRIAALAQDKIFKDAHQEALKREIERLRQVYHQQNIKKMDNAAGSPPSQSPPSPSPKPRCETHTEKEQLINV

SEQ ID NO: 39700 - protein, 203 aa, Glycine max
  Clone ID: 700652444_FLI.pep
QRSYKGRHCKKFYTEEGCPYGDSCTFLHDEQSKNRESVAISLGPGGYGGGGGGGGGVGGGASGGNGGANAAGNGPNSKPSNWKTRICNKWEMTGYCPFGNKCHFAHGATELHRYGGGLMEGENRDAASAVAGDTNKGVPSKASADNVVAAVTLVAHSDVYHIGVPSQRPSSMVIQRPGQRAHQKWKGPDKISRIYGDWIDDIE

SEQ ID NO: 39701 - protein, 760 aa, Glycine max
  Clone ID: 700652889_FLI.pep
ICAVMASANPSPNASPVAVPPALGAILSPPPSSSSPTNTSTPPSPPSSSQPNQTQTQTQTPNSPAPSSPSDPSAPPPSPPQAVPLTPPPSISLSPPPSSTPPPTLPPPSPPDSPPPLPPASPTPPVTTSPPSPPVTTSPPSPPATTSPPPAETPPSLPNLSPPSPPAGSPPPQSPPTTIPPPSRPISPSPPPPANFPRPPTTRTPPEKENPPKTTPSHASPPSVSETPPKPPSSDVPPPSTLPSTPPSDPSGSSPPASLPDPPTNKTVVGGPKVSLPSLPTEKPTARPTNDGTNSMSSNNTPSHSGGLSTGGSVAIGIVVGFIVLSLLVMAVWFAQKKKKKGTGSRGSYAAPSPFTSSHNSGTLFLRPQSPANFLGSGSGSDFVYSPSEPGGVSSSRSWFTYEELIQATNGFSAQNLLGEGGFGCVYKGLLIDGREVAVKQLKIGGGQGEREFRAEVEIISRVHHRHLVSLVGYCISEHQRLLVYDYVPNDTLHYHLHGENRPVLDWPTRVKVAAGAARGIAYLHEDCHPRIIHRDIKSSNILLDLNYEAQVSDFGLAKLALDSNTHVTTRVMGTFGYMAPEYATSGKLTEKSDVYSFGVVLLELITGRKPVDASQPIGDESLVEWARPLLTEALDNEDFEILVDPRLGKNYDRNEMFRMIEAAAACVRHSSVKRPRMSQVVRALDSLDEFTDLNNGMKPGQSSVFDSAQQSAQIRMFRRMAFGSQDSSGFFNESQSSWRSRDHDPTTVFSQNKTGHGNV

SEQ ID NO: 39702 - protein, 219 aa, Glycine max
  Clone ID: 700653418_FLI.pep
QTPKKEKMKAMKRCSSSSSSSYSSASESTPQSNQNKNSNNFCYKIKGPWSAKEDRILTGLVEAHGPRNWASISRHIKGRSGKSCRLRWCNQLSPTVEHRPFSTREDEVILHAHARFGNKWATIARMLPGRTDNAVKNHWNATLKRRRFGADVVVEDDPLTALTLAPPGSGCCGRGEERRGVSPAGFWDAMRDVVAREVRGYVSSSFSDNLASNEGLSKY

SEQ ID NO: 39703 - protein, 302 aa, Glycine max
  Clone ID: 700653501_FLI.pep
HKVPWKLLKRETTAVVKKRVFVCPEPSCLHHDPCHALGDLVGIKKHFRRKHNNHKQWVCERCSKGYAVQSDYKAHLKTCGTRGHSCDCGRVFSRVESFIEHQDACNVGRLGPETQSQAQAVQAAACLSRTASSETNFSTGSPWPQSGTIIIPNPTVTVVEPSSYTIVTAETNNKVHPNLELQLSNTTPTASSQEERVHQEQLRIAKAKKALAEEARKQAKRQIELAELEFTNAKRIRQEALAELDKAYAFKDHAIKHINSIMLQITCRACKHHFHSPTDDQIFSYITQARQVQKHRLKPIIN

SEQ ID NO: 39704 - protein, 770 aa, Glycine max
  Clone ID: 700653509_FLI.pep
TLTRKKKMASHIVGYPRMGPKRELKFALESFWDGKSSAEDLQKVSSDLRASIWKQMADAGIKYIPSNTFSHYDQVLDATATLGAVPPRYGWTGGEIGFDTYFSMARGNATVPAMEMTKWFDTNYHFIVPELGPDVNFTYASHKAVDEYKEAKALGVDTVPVLVGPVTYLLLSKPAKGVEKSFSLLSLLPKVLAVYKEVIADLKAAGASWIQFDEPTLVLDLESHKLQAFTDAYAELAPALSGLNVLVETYFADIPAEAYKTLTSLNGVTAYGFDLVRGTNTLDLIKGGFPSGKYLFAGVVDGRNIWANDLAASLTTLQGLEGIVGKDKLVVSTSSSLLHTAVDLVNETKLDDEIKSWLAFAAQKIVEVNALAKALSGHKDEAFFSGNAAALASRKSSPRVTNEAVQKAAAALKGSDHRRATNVSARLDSQQKKLNLPILPTTTIGSFPQTVELRRVRREFKANKISEEEYVKSIKEEIRKVVELQEELDIDVLVHGEPERNDMVEYFGEQLSGFAFTVNGWVQSYGSRCVKPPIIYGDVSRPKPMTVFWSSLAQSFTKRPMKGMLTGPVTILNWSFVRNDQPRSETTYQIALSIKDEVEDLEKAGITVIQIDEAALREGLPLRKSEQAHYLDWAVHAFRITNVGVQDTTQIHTHMCYSNFNDIIHSIIDMDADVITIENSRSDEKLLSVFREGVKYGAGIGPGVYDIHSPRIPPTEEIADRINKMLAVLEKNILWVNPDCGLKTRKYTEVKPALTNMVAAAKLIRNELAK

SEQ ID NO: 39705 - protein, 289 aa, Glycine max
  Clone ID: 700556331_FLI.pep
SLSVYLEYVSGGSIHKLLQEYGSFKEPVIQNYTRQIVSGLAYLHGRNTVHRDIKGANILVDPNGEIKLADFGMAKHINSSASMLSFKGSPYWMAPEVVMNTNGYSLPVDIWSLGCTIIEMATSKPPWNQYEGVAAIFKIGNSKDMPEIPEHLSNDAKNFIKLCLQRDPLARPTAHKLLDHPFIRDQSATKAANVSITRDAFPCMFDGSRTPPVLESHSNRTSITSLDGDFASKPALAAPRALRSPRDNTRMITSLPVSPSSSPLRRYGPTHQSCFFLSSSSSLHNNGTK

SEQ ID NO: 39706 - protein, 64 aa, Glycine max
  Clone ID: 700654213_FLI.pep
LYYLTFYDITLLIHAREMRRRWRKTLIKMTIITLSGHMIILVRIHAAMHKLCFTDKLIQVLVAA

SEQ ID NO: 39707 - protein, 72 aa, Glycine max
  Clone ID: 700654252_FLI.pep
LSCFGNQLSFPLLFYSEIPLPFNIFGKITNIFFLIFTGMFRKDFDYQDFCLTWYMPFVVLWGCILSENGWIL

SEQ ID NO: 39708 - protein, 169 aa, Glycine max
  Clone ID: 700657203_FLI.pep
PFFHHSSLSTRHADSLLPSLYPNFDSFDQTRNTHLTKTLRNPSMTLGLGGSSVVVPRNFRLLEELERGEKGIGDGTVSYGMDDGDDIYMRSWTGTIIGPHNTVHEGRIYQLKLFCDKDYPEKPPSVRFHSRVNMTCVNHETGVVSFIIFHMLSFYKYLCAVHAGTYKMC

SEQ ID NO: 39709 - protein, 140 aa, Glycine max
  Clone ID: 700657234_FLI.pep
NPRKQRRCWSPDLHRRFVDALQQLGGPQVATPKQIRELMQVVGLTNDEVKSHLQKYRLHFKRPQGSSIGHANSGLCKMAQDKCGDDKSGSPQGPLFLGGSGKGLSSSGRNSMDTEGDEESDCRNWKGGIHHQLQPESDVL

SEQ ID NO: 39710 - protein, 157 aa, Glycine max
  Clone ID: 700657519_FLI.pep
SMAAMREMIFRIAVMQPVHIDPESIKPPKRRNVKISKDPQSVAARHRRERISERIRILQRLVPGGTKMDTASMLDEAIHYVKFLKKQVQTLEQAGANTSPHSNTNSPNNHVVGAAGFPLGMSSNYSNNSSVNYSSLLMKGGCQPCQMFGSTSKQLLS

SEQ ID NO: 39711 - protein, 152 aa, Glycine max
  Clone ID: 700659694_FLI.pep
DMAFNSIDSTIDDSNFLNSGPWAPPPAPPPLPPAQFQRMRTYTKVYKRGAVGRSIDITRYSGYEELKKDLARRFGIEGQLEDRQRIGWKLVYVDHESDVLLVGDDPWEEFVNCVRCIKILSPQEVQQMSLDGDFGNGGLQNQACSSSDGGNT

SEQ ID NO: 39712 - protein, 115 aa, Glycine max
  Clone ID: 700660810_FLI.pep
NAQAKQLPCQHLYHSDCITPWIELNSSCPLCRFRLEEEEEEGGDADADADAVMTEIRREIIARLTELTEEDFYGLRTTLSHIASRHALIEENQNHRAQIGEPRGGGGGGGGDSAC

SEQ ID NO: 39713 - protein, 343 aa, Glycine max
  Clone ID: 700661747_FLI.pep
NHNSNNPYQPGAEQYHMLESAHSWPHSQFNVACHYSQSFGDNNVIFPQGGFGGGYGNNQYPYQFFHGPGDTLMRLGPSATKEARKKRMARQRRFLSHHRHHNGNHQNSGSDPHARLGGGDNCTTGLAAPHHANPTANWMYWQAMTGGAAGPLAPPAEPPAVDRSALQTQNCHQSRVASDRRQGWKPEKNLRFLLQKVLKQSDVGSLGRIVLPKKEAETHLPELEARDGISITMEDIGTSRVWNMRYRYWPNNKSRMYLLENTGDFVRANGLQEGDFIVIYSDVKCGKYMIRGVKVRQQGVKPETKKVGKSQKNQHGTGTNASTTACTAANNGTPSSPKTKAEI

SEQ ID NO: 39714 - protein, 414 aa, Glycine max
  Clone ID: 700663123_FLI.pep
WNMDCSAVVRVRTLHISSPILAAKSPFFYKLFSNGMRESEQRHVTLRINASEEAALMELLNFMYSNTLSITSPPALLDVLMAADKFEVASCMRYCSRLLRNIPMTPESALLYLELPSSVLMADAVQPLTDAAKQYLASRYKDITKFQEEVMGLPLAGIEAILSSDELQVASEDAVYDFVLKWVRTQYPKLEERREVLGTRLARLIRFPYMTCRKLKKVLTCNDFDHDVASKLVLEALFFKAEAPHRQRILAAESASFNRLFVERAYKYRPVKVVEFELPRQQCVVYLDTEAGGVHQFVPIWPSIFTGIPFRWTRVFLSAHCNMDQQSSFHCFGLFLGMQEKGSVSFAVDYEFAARSRPTEEFVSKYKGNYVFTGGKAVGYRNLFAIPWTTFMAEDSLYFINGVLHLRAELTIRH

SEQ ID NO: 39715 - protein, 195 aa, Glycine max
  Clone ID: 700663319_FLI.pep
GESNHGTKASRSDQERRKGIAWTEDEHRLFLLGLDKYGKGDWRSISRNFVVTRTPTQVASHAQKYFIRLNSMNKDRRRSSIHDITSVNNGDISAPQGPITGQTNGSAGNSTAKAAKAATPASTGVPGVGIYAAPTIGQPIGGPLVSAVGTTVNLPAPAHMAYGVRAPVPGAVVPGAPVNMGPVTYPMQHTSVPHR

SEQ ID NO: 39716 - protein, 326 aa, Glycine max
  Clone ID: 700663367_FLI.pep
NADILEATYPAVAKRLHGDWLSDPAIAIVTGFLGKAQKSCAVTTLGRGGSDLTATAIGKALGLPEIQVWKDVDGVLTCDPNIYPKAEPVPYLTFDEAAELAYFGAQVLHPQSMRPARESDIPVRVKNSYNPKAPGTLITKARDMSKAVLTSIVLKRNVTMLDIVSTRMLGQYGFLAKVFSIFEELGISVDVVATSEVSVSLTLDPSKLWSRELIQQELDHVVEELEKIAVVNLLQNRSIISLIGNVQRSSLILEKAFRVLRTLGITVQMISQGASKVNISLVVNDSEAEQCVRALHLAFFESELSELEMDYKNGNGSVHELSLGDT

SEQ ID NO: 39717 - protein, 387 aa, Glycine max
  Clone ID: 700664442_FLI.pep
QVSLKPLDSSRKRKSRSRGDGSKSVAETIAKWKEYNEHLYSGKDDSRTTRKAPAKGSKKGCMKGKGGPQNSQCNYRGVRQRTWGKWVGEIREPNRGSRLWLGTFSSAQEAALAYDEAARAMYGPCARLNFPKITDYPSVKESLKDSSMAASSSCSSAATAASDTTTTTSNQSEVCAVEDVIEKPANVNDKFNDCHKAYVSASPTSRMKQEPKDEAVDHMDTGAGEIQDVGLEGTHDTGQVAENVNKDQMDLSWIDGFDFIDDYLKSFSADELFQVDELLGLIDNNPIDNSVLMQGLDFGQMGFPGDGNPQVDDTPSSFIYQLQNPDAKLLGSLPHMEQTPSGVDYGLDFLKTVEPGDYNGGGEEPPFLNLDDDLNHDSNGMQARKGG

SEQ ID NO: 39718 - protein, 290 aa, Glycine max
  Clone ID: 700664781_FLI.pep
DQSFRVPELFIEVPETATIGSLKRTVMDAVTAVLGGELHIGVFLQGKQVKDDSKTLLQTGISHHNELDALGFTLEPNSSQSLPIVCASHSPRPKADITEPVIRYPSSPAVIHQRIQGNSDMLPEHQVTSLGRHFESDHDSAPSPVNASVDKNMKDSKELVTVPEMDEELAMVPVHQKPKRSEIVQRRIRRPFSVDEVEALVQAVEKLGTGRWRDVKLCAFDNAKHRTYVDLKDKWKTLVHTARISPQQRRGEPVPQELLDRVLVAHAYWSQQQTKSQHKHHPETETVFSF

SEQ ID NO: 39719 - protein, 93 aa, Glycine max
  Clone ID: 700665388_FLI.pep
LRLLHFSMALGAAMITNLDECHNKAFKKEKKKTRNIETKFYGSNSGQGCKWRPFYLYPFPNFKLSWRYLFGSEPNIIIKTNNICNKTILIYFF

SEQ ID NO: 39720 - protein, 251 aa, Glycine max
  Clone ID: 700665732_FLI.pep
LTSTFLFIPKYMDTDATGDPVDKLKAIQNDDVEYQDEDDDFDDEEEEEDDPITLGFVDKPKNEWSLRRQYFPSKTGGVPAWLDPLNIPSGRSSVCDICGDPLQLLLQVYAPTDKETTFHRMLFVFMCPSMKCLLRDQHEQWKRHPEKPSRSVKVFRCQLPRINPFYSPECPQYNESHEPAGSGAALCDWCGTWKGDKLCSSCRQARYCSEKHQVTELLKCIMYPYFFFHKFDFHDIPFLFQLTGYELAHRA

SEQ ID NO: 39721 - protein, 400 aa, Glycine max
  Clone ID: 700666233_FLI.pep
TKPKLKQCCLSEFTLRVPKFEFESKNMFLARPIFRGPSLWALHSSYAYSSASAAAIQAERTIKEGPRNDWSRDQVKSIYDSPILDLLFHGAQVHRHAHNFREVQQCTLLSIKTGGCSEDCSYCPQSSKYDTGVKGQRLMNKEAVLQAAKKAKEAGSTRFCMGAAWRDTLGRKTNFNQILEYVKDIRDMGMEVCCTLGMLEKQQAVELKKAGLTAYNHNLDTSREYYPNIITTRTYDERLQTLEFVRDAGINVCSGGIIGLGEAEEDRVGLLHTLSTLPTHPESVPINALVAVKGTPLEDQKPVEIWEMIRMIATARIIMPKAMVRLSAGRVRFSMPEQALCFLAGANSIFTGEKLLTTPNNDFDADQLMFKVLGLLPKAPSLNEGETNVTEDYKEAAFSS

SEQ ID NO: 39722 - protein, 189 aa, Glycine max
  Clone ID: 700666775_FLI.pep
VNGMDSGPPANDLCSVCHGNFHIPCQANCSHWFCGNCIMLVWQHGSVGCSCKCPLCRRAISLLVPTEESLRQQQDPEVSQILSKIHAYNRFFGGQPTTLYQRLRDLPFLLHRLLREFLHPHRSLPLLIRARVFVVMIASVIYLFSPIDIIPEGILGVVGFLDDLLIVLICFLHVAALYRSVLYLRHGGS

SEQ ID NO: 39723 - protein, 127 aa, Glycine max
  Clone ID: 700672157_FLI.pep
HGSLYLQMETNVSSGIGNPSLKRMVATEDRPSLWNGMSPNFFPNGERAERIGVDPSNGLPNWAWQTHGQVNATPVPTFSAAASSGFSISATFPSAAIFPTSSMNSIPQSLCFTSSSMPTRNASEYYY

SEQ ID NO: 39724 - protein, 149 aa, Glycine max
  Clone ID: 700672319_FLI.pep
ECQKMGRAPCCSKVGLHKGPWTPKEDALLTKYIQAHGEGQWKSLPKKAGLLRCGKSCRLRWMNYLRPDIKRGNIAPEEDDLIIRMHSLLGNRWSLIAGRLPGRTDNEIKNYWNTHLSKKLKIQGTEDTDTHKMLENPQEEAASDGGNNN

SEQ ID NO: 39725 - protein, 513 aa, Glycine max
  Clone ID: 700672974_FLI.pep
IITITVFQISIFKWTTTTNTLFSRLQPYLAKRNPPYDDIMELLWHNGQVVVQSQNQRSLRKLPPVTNSHDASPAGPSMTREIRPLVENFNQHLFMHEGEMASWLHYPIDDDEPALDQSFGADFLYSPPTTANNSSFMQTLGHTSQLTELRPMSANPRPPIPPPRRPEQRTPNFAYFSRHNTRAAEPSVKAAARESTVVDSCDTEAAASRVSETVRSAAEGGAGVAAPSTSAGGGRSTMMYDLTMTSSPGGSSSCDEPVQVAAAEEDRKRKGREAEEWECQSEDVDFESEAKKQVCGSTSTKRSRAAEVHNLSERRRRDRINEKMKALQELIPRCNKSDKASMLDEAISYLKSLQLQVQMMSMGCGMVPVMFPGIQQYMPAMGMGVGMGMGMEMGMNRPVMPFPNMLPGSALPAATAAAAHLGPRFSMPPFHMPHVPAPDSSRMQAANQSDNNMVTSAGPPDPNQSRIPNFTDPYQQYLGPHQMQFQLIQNQAMNQPNVSKPSNNGGPANPENH

SEQ ID NO: 39726 - protein, 192 aa, Glycine max
  Clone ID: 700674289_FLI.pep
DDIRKKHYRGVRQRPWGKWAAEIRDPKKAARVWLGTFDTAEAAAMAYDAAALRFKGNKAKLNFPERVVMPIQPQTNNNNSTSSSAPTTQSSSSLPPPQSLHNNSSLSAEGFPNLEEYARLLSCSDDDDFQRVALGLYQHHNNEDFICGSSQPPPVPFFVSSSSSSSAMTSSYSDFLGQGGSTGFDEGNKRGS

SEQ ID NO: 39727 - protein, 273 aa, Glycine max
  Clone ID: 700675341_FLI.pep
RRCARGRSHDWTECPYAHPGEKARRRDPRKYHYSGTACPDFRKGSCKKGDACEYAHGVFECWLHPARYRTQPCKDGTSCRRRVCFFAHTPEQLRVLPQQSPRSADSYDGSPLRHAIESSCAKTLAPAPFVSSPGSVSPPLESPPMSPMTVSVNEMVASLRNLQLGKVKSLPSSWNVMGPSGFGSPRGPMIRPGFFSLPTTPTQAPTRGGVNYFDKWDQSCEEEPVMERVESGRNIRARMFAKLSKENHLDGSDSGSGQIGDPDVGWVSELVSR

SEQ ID NO: 39728 - protein, 186 aa, Glycine max
  Clone ID: 700675384_FLI.pep
VINFMPRGYEIKEALRAQMEVQSKLHLQVEAEKHLQIRQDAERRYMAMLERACKMLADQFIGATVIDTDSQKFQGIGSKAPRGTLVDPLGFYSMPSTEVAGVNVPEEEIPLSLPPQRADCSTESCLTSHESSGGLALEGSPGEGKRRMLGMDSMAAPLIWSEAKMRTQAINVAQGNLPQGITRYGM

SEQ ID NO: 39729 - protein, 198 aa, Glycine max
  Clone ID: 700676535_FLI.pep
VKEHETVAVNCVLQLHKTLYDGSGGALRDFLGLIRSTNPSVVVVAEQEAEHNENRLEGRVCNSLKYYSALFDSIDESGLPQESAVRVKIEEMYAKEIRNIVACEGRERVERHESFGNWRRMMVEQGGFRCMGVTERELSQSQMLLKMYSCESYSVKKQEKEGATGVTLSWLEQPLYTVSAWGPVDAAAGTSSSFSQPS

SEQ ID NO: 39730 - protein, 172 aa, Glycine max
  Clone ID: 700677642_FLI.pep
EDAMPVSSSKPSTRGRKGSSGASQTTTRGRGRGRGRGRGSSTMKQTTIDGALGFRVSQRSASVAAATAIRSGADDDNLASASSDDANKNDVEEIDDSSENESNLPGQKRAASKGRGRGSTQSSKRGRKSDNSSIHRMLVNNDDDDDDDDTDIRKRLNKSQPRVTKSYGALRR

SEQ ID NO: 39731 - protein, 93 aa, Glycine max
  unsure (1)..(93): unsure at all Xaa locations
  Clone ID: 700677817_FLI.pep
LCVVKLNCLDWIVKVLELAGNAARDNKKNRIIPRHVLLAVRNDEELGKLLAGVTIAHGGVLPXINPVLLPKKTERASKEPKSPSKATKSPKKS

SEQ ID NO: 39732 - protein, 519 aa, Glycine max
  Clone ID: 700677922_FLI.pep
QMAIPSLINQPQRTPSLTFSFLLFLAICTPLDAAHTDFAGSACLKVSPSHFAGSVTEVIAAIRQLASILSRFGSPLANFRLSTAIADCLDLLDLSSDVLSWALSASQNPKGKHNSTGNLSSDLRTWLSAALAHPETCMEGFEGTNSIVKGLVSAGIGQVVSLVEQLLAQVLPAQDQFDAASSKGQFPSWIKPKERKLLQAIAVTPDVTVALDGSGNYAKIMDAVLAAPDYSMKRFVILVKKGVYVENVEIKKKKWNIMILGQGMDATVISGNRSVVDGWTTFRSATFAVSGRGFIARDISFQNTAGPEKHQAVALRSDSDLSVFFRCGIFGYQDSLYTHTMRQFFRDCTISGTVDYIFGDATAVFQNCFLRVKKGLPNQKNTITAHGRKDPNEPTGFSFQFCNITADSDLIPSVGTAQTYLGRPWKSYSRTVFMQSYMSEVIGAEGWLEWNGNFALDTLYYAEYMNTGAGAGVANRVKWPGYHALNDSSQASNFTVSQFIEGNLWLPSTGVTFTAGLTV

SEQ ID NO: 39733 - protein, 174 aa, Glycine max
  Clone ID: 700677948_FLI.pep
EMSDAPPSPTHESGGEQSPRGSSSGAREQDRYLPIANISRIMKKALPPNGKIAKDAKDTMQECVSEFISFITSEASEKCQKEKRKTINGDDLLWAMATLGFEDYIEPLKVYLARYREAEGDTKGSARSGDGSATPDQVGLAGQNSQLVHQGSLNYIGLQVQPQHLVMPSMQSHE

SEQ ID NO: 39734 - protein, 281 aa, Glycine max
  Clone ID: 700678561_FLI.pep
QDKAFENALAIHPEDASDRWEKIAADVPGKTLEEIKHHYELLVEDVSQIESGYVPLPSYNSSPEGSTSHASEEGAGKKGGHSWNSNNESNHGTKASRSDQERRKGIAWTEDEHRLFLLGLEKYGKGDWRSISRNFVVTRTPTQVASHAQKYFIRLNSMNKDRRRSSIHDITSVNNGDVSAPQGPITGQTNGSADNSAGKSTKPAPPAPTAALGVGIYAGPTIGQPIGGPLVSAVGTPVMNLPPPAHMAYGLGAPVPGAVVPGAPMNLGPVPYPMPHTSARR

SEQ ID NO: 39735 - protein, 451 aa, Glycine max
  Clone ID: 700678824_FLI.pep
MLRNGCGVGGNLSGRVKVRAEDVVEAVTLAASNKAFEVVYYPRASTPEFCVKASSVGAAMRIQWCSGMRFKMAFETEDATRISWFMGTIASVQVVDPICWPNSPWRLLQVTWDEPDLLQNVKRVSPWLVELVSNIPLINFTPFSPPRKKLRPQHPDFPLDVQFPIPMLSGNQHGPNSPLCGFSDNAPAGIQGARHAQFGKSLSDLHLNNNKLQLGMLPTNIHQLGGVYTGISSGNMMTKHDKSKESLSCFLTMGKSSKSLEKSDDVKKHQFLLFGQPILTEQQISSCSRDVLSRGKRSLGDEKDKAKCVLDDSQSTLSQQFSPGKASSAEFFWQLGLDTGHCKVFLESEDVGRTLDLSQFGSYEELYRRLGNMFGIERSEILNHVLYYDAAGAVKQTGEEPFSDFMKTAKRLTILTDSGSKNIKRAFITGTRNGEHGLDPSNKTGPLSIFA

SEQ ID NO: 39736 - protein, 350 aa, Glycine max
  Clone ID: 700679824_FLI.pep
AKNHTKHNRGGTTITKGMRTNVGDIVQVEGGHIVRSTGRKDRHSKVYTSKGPRDRRVRLSAHTAIEFYDVQDRLGYDRPSKAVDWLIKKAKTSIDKLAELPPWHPPTNHEEEEQNDAAGSSGVIAIEQQQQQQQQQQQQQQQQQQQQQHQQQQSESCGYNFQLQRQLGAFISTHVDTDHINFQTNNNNSSEDLGLSLHCFQDHPGLIQWQSQQEGANQTPPSNEHQIQQTPFAGSTPVGFENHYQRSVTWNNEATTTDHVNRLGFLFNSQPYASAYAQSGGTLQSSFSFPMTSSSELHRPQPVNQPSSIFGSRFVSDGLAGFCIPDRIQGVEENHGVASNRPSSSPSSIH

SEQ ID NO: 39737 - protein, 530 aa, Glycine max
  Clone ID: 700681408_FLI.pep
SVNDGAMKVRSMKLKEAHTAKSGGAAFCSVLWDQKAKHLITASSSDVAICIHDSLFPSLAPKTLRHHRDGVTALALSPNSTCLASGSVDHSVKLYKYPGGEFERNITRFTLPIRSLAFNKSGSMLAAAGDDEGIKLINTFDGTIARVLKGHKGSITGLAFDPNGEYLASLDSTGTVILWELQSGKIIHNLKGIAPDTGLDVSTMNVLCWSPDGETLAVPGLKNDVVMYDRDTAEKVLSLRGDHIQPICFLCWSPNGKYIASSGLDRQVLIWDVDRKQDIDRQKFDERVCCMAWKPTGNALAVIDIMGKYGIWDNVIPSSMKSPTEDIPVKSKSNGVVYFDEEDPENSASENSSDVGGNSNQESEPPSRKRSRKQSLSEENSGEDGGEEIVSYPKVDTNKKRNRPSKENLDSVNMGFRGTMVTSKAKMQEPFQPGSTPVQPGKRRFLCYNMLGCITSIEHDGYSHIEIDFHDTGSTPRVPSMTDHFGFTMAALNESGSIFANPCKGENNMSTLMYRPFSSWANNSEVRLCV

SEQ ID NO: 39738 - protein, 256 aa, Glycine max
  Clone ID: 700681890_FLI.pep
PKLNVSDPHGRIQMQQHVQDPGYLLQQQFEQHQQLQSQQPQQQFEQQHHQHQQTLPQQQQQFIHGTHFIHHNPAIPAYYPVYPSQQHPQHPQVYYVTARQAQAYNLPVQQANMGESAGNIASSRPQTPPNPSTLVQQPATYNPIRNAPMPKTEMNAYRAATAGTPQLVQVPTSQHQQQYVTYSQIHHPSQSMAPNSAAPANYAFDYADPAHAQIYYSQPMAPTMPSQYQTMMMQEGSAQHPSDSVKQQQIRTSQPL

SEQ ID NO: 39739 - protein, 177 aa, Glycine max
  Clone ID: 700683262_FLI.pep
RYIVFVLVLFMVSLNLNPNPPQTFHFFDPFNMEDQNKKVRKPYTITKSRENWTDQEHDKFLEALHLFDRDWKKIEAFVGSKTVIQIRSHAQKYFMKVQKNGTSEHVPPPRPKRKAAHPYPQKASKNALTISQVARPLQSSSALSESSHIYRPDSSSVVRTPVRQCGHCHLGVIMLHH

SEQ ID NO: 39740 - protein, 302 aa, Glycine max
  Clone ID: 700683408_FLI.pep
KGKRKKKAQPLLHHPISVPFLSESQFQQLKKKMVDNESLSEFLASAVDAAQKAGEIIRKGFYQTKNVEHKGQVDLVTETDKACEELIFNNLKQLYPTHKFIGEETTAAYGTTELTDEPTWIVDPLDGTTNFVHGFPFVCVSIGLTIGKTPTIGVVYNPIINELFTGIRGKGAFLNGNPIKVSSQTELISSLLATEAGTKRDQETVDASTNRIKSLLFKVRSLRMSGSCALNLCGIACGRLDVFFELGFGGPWDVAGGAVIVREAGGVVFDPSGADFDITSQRVAASNSFLKDALVDTLRQMV

SEQ ID NO: 39741 - protein, 450 aa, Glycine max
  Clone ID: 700683426_FLI.pep
KCDLSAWQKVYYQQVTDVGRVGLDNGSGKSKSLQNLTMQLRKCCNHPYLFVGDYDIHKHKEEIFRASGKFELLDRLLPKLRRAGHRVLLFSQMTRLMDILEIYLRLNDFKFLRLDGSTKTEERGSLLRKFNAPDSAYFMFLLSTRAGGLGLNLQTADTVIIFDSDWNPQMDQQAEDRAHRIGQKKEVRVFVLVSVGSIEEVILERAKQKMGIDAKVIQAGLFNTTSTAQDRREMLQEIMRRGTSSLGTDVPSEREINRLAARSDEEFWLFEKMDEERRQKENYRSRLMEEHELPDWVYSPLNKDDKVKIFDSGSVTGKRKRNEVVYADTLSDLQWMKAVENGQDISKLSVKGKRRDHLPVDNHAQASDDMGTEERLFRSEDTFDVTPASKRLKPEEINSQKHENEDVSVGGLNEHIFSWNTRRKKRSGYLGQGSFSDSRGQNSNGRANWN

SEQ ID NO: 39742 - protein, 224 aa, Glycine max
  Clone ID: 700683611_FLI.pep
CRDRDNKESEKLKREEEKKMEESSTTCVLCEKRAMMLCDSDQAKLCWECDEKVHSANFLVAKHSRVLLCRLCHSPTPWKASGMKLTPTVSFCNRCVAERNARWNRLVNNENEHQQQQQQQQQSDFVVDDGREYGSDHVFDDDDGDYSDDSGEEEEEDEDDEEENENQVVPMSSGSATSPPKVACLALKRLRNNSFLSILHMMRQRALHLRCLVLHCLVVMNHPL

SEQ ID NO: 39743 - protein, 249 aa, Glycine max
  Clone ID: 700683746_FLI.pep
LSLKIMGRGRVQLKQIENKISRQVTFSKRRTGLRKKANEISVLCDAQVALIVFNAKGKLFEYSSESSMENVLERYERHTHIGKLVGDGDESQGNWSLQCFKLTGKVEVLERNLRNFVGEDLDPLNLRELQSLEHQLETAIKRIRTRKNQVMNESISDLQKKARQLQEQNGILTKKIKEKGKEVVERPHCGPETLGLTCPPELQRQQRVFPSLTLCETLQAGHLEEVVEARTVPTASTHIPPWMLHPFTR

SEQ ID NO: 39744 - protein, 333 aa, Glycine max
  Clone ID: 700683783_FLI.pep
IGINGFGRIGRLVARVALQRDDVELVAVNDPFITTDYMTYMFKYDSVHGHWKHHDVTVKDEKTLLFGDKPVTIFGHRNPEEIPWGSTGADIIVESTGVFTDKDKAAAHLKGGAKKVIISAPSKDAPMFVVGVNEHEYKPELDIISNASCTTNCLAPLAKVINDRFGIVEGLMTTVHSITATQKTVDGPSAKDWRGGRAASFNIIPSSTGAAKAVGKVLPALNGKLTGMAFRVPTVDVSVVDLTVRLEKEASYDEIKNAIKEESEGKLKGILGYTEDDVVSTDFIGDSRSSIFDAKAGIALNKNFVKLVSWYDNEWGYSSRVIDLLVFVAKKSL

SEQ ID NO: 39745 - protein, 446 aa, Glycine max
  Clone ID: 700686073_FLI.pep
SLVGNHSICTCLCNQKTSSMTNEMKEASALGARTARACESCLKVRARWYCAADDAFLCHGCDNMVHSANQLASRHERVKLQTASSKVNYSVTPKVAWHSGFTRKARTPRHNNNRHSSLKQQQQKKPLHEERGEEEVFFNNTISLLPLVPELGSEEPLLNDETEEQLLCRVPVFDAELCSIYNEVKDEVVAAGEEALDLENFSSEFLPSDTDLAEFTADVKSFLGNGADEDSPDDDEHVKESELLILDCKEEEGDEEMDECIDGVLIGAKDAMVKVKDEEELDADDDTACHLDSILDMNGEAFNWNIVESESPAQAQEDEVSKVGTKKDIFLRLNYEEVITAWASQGSPWTNGTPPKFFNSDDCWLDFLGSNGGNVQCCYGAVGSLRVHADGGREARVSRYREKRRTRLFAKKIRYEVRKLNAEKRPRMKGRFVKRTPFVGATALPA

SEQ ID NO: 39746 - protein, 300 aa, Glycine max
  Clone ID: 700686353_FLI.pep
LHSFILIHLFIHSLSLMAEDGNNNDVPLHKFKDSNPNPEEFDAKGYSLSGKIMLSAIILLFFVVVLMLCLHIYARWYLRRARRRQLRRQRELRRTQLVFYNDDATPAAVSRGLDAAILATLPVFTFDPEKTGPECAVCLSEFEPGETGRVLPKCNHSFHIECIDMWFHSHDTCPLCRAPVERAPEPEVVVITVPDPVSETGSGENENRTGSSSSSSSVGLSKPKPSLVGVTIEVPPRDENFQNELQPSCDSSSSFRSPMSRMLSFTRMLGREKKGNVSPSSCGGGDCSSAAERGEREETQ

SEQ ID NO: 39747 - protein, 105 aa, Glycine max
  Clone ID: 700686436_FLI.pep
LKEEAKKGLSLGNKPKMHECSICGMEFSLGQALGGHMRKHRGATSENNNEAFSSSIKQAISKVPVLKRSNSKRVMCLEMDLNLTPLENDLKLLFGNKAPRVDLSL

SEQ ID NO: 39748 - protein, 294 aa, Glycine max
  Clone ID: 700725110_FLI.pep
LYDLQDRLGLNQPSKVVDWLLNAAKHEIDELPPLPIPPGNFTLGYPSLVSCNEVSTSREGSGQNTLLWKPKPGEIMVSDHDKANWMNRREGDDDDDNNHNNSNGDKQGSNNNCHGGALVLPNNLLPTRPNHPSFLGLMNTMPSLGYQWEPNSSAADVNVQWQNHGFFNQTDVHSIDVVPFPSTLALSTGNSTSTTTTSQILVCPPPPGATTQPYFPSSHFATMEMNARQINHYQMLSSSSHQNLLANSLNHPSSQQLMSQSGKAPFSLRIRPKLFHSPNSSESHSQKDQDFPSK

SEQ ID NO: 39749 - protein, 292 aa, Glycine max
  Clone ID: 700726391_FLI.pep
PPVKLHQGCLGHALSKIERPFVCAVDDCQASYRRKDHLTRHLLQHEGKIFKCPVENCNSEFSLQSNMKRHTEEIHDDSSTTTSSDKSHKQHMCPEIGCGKVFRYASQLQKHEDSHVNLESVDMVCLEPGCLKHFTNVQCLQAHVKSSHQYMTCDICGTKQLKKNIKRHLRSHEAEGSSSETFQCEFKGCSCTFSRKSNLDKHKKAVHFNVKPFACGFTDCGMRFAYKHVRDNHEKTAKHVFTLGDFEEADEEFRSRPRGGRKRTCPTVEMLIRKRVTPPSQLEHWLFMQDSE

SEQ ID NO: 39750 - protein, 284 aa, Glycine max
  Clone ID: 700726505_FLI.pep
GMERMRFDGRRWSGFRSSTSNLGMERMRGRMPIQQPSHPMKGDVVTNLDFIRKRKISSDFNMMMDQKIYTCEHPQCPYSEVRLGFHDRSARDNHQLNCAYRNSSADYGGGPNFHATEDKPVIFPQSFVQPNTTTQSASLVAPSFDLTGLGVPEDGQKMISDLMTIYDTNVVGNKNLSSSNCVAVENHNLSQASLQQQESYFPGQGMVLEGNFFAREEGQFDRFKATMNMNTHTPFDTNHSNNNNIHLMFNSPCDLSSFDFKEDIQGGVGMDPLHKQQEVSIWYQ

SEQ ID NO: 39751 - protein, 244 aa, Glycine max
  Clone ID: 700727763_FLI.pep
HSQSMDGSTTIKPELLVSGSEDMSAADSKKAISAAKLAELALIDPKRAKRIWANRQSAARSKERKMRYIAELERKVQTLQTEATSLSAQLTLLQRDTNGLNSENSELKLRLQTMEQQVHLQDALNDALKEEIQHLKILTGQVMAPNGGPMMKLASFGGGQQFYPNNHVMHTLLAAQQFQQLQIHPQKQQQQQHQHQFQQFQQQHQHQHQQHQQSSDLKMRETSPTPCPKDNTSSDVNPSGAKDC

SEQ ID NO: 39752 - protein, 150 aa, Glycine max
  Clone ID: 700727949_FLI.pep
QFFALTKKDTFSLTMARTKQTARKSTGGKAPRKQLATKAARKSAPATGGVKKPHRFRPGTVALREIRKYQKSTELLIRKLPFQRLVREIAQDFKTDLRFQSSAVSALQEAAEAYLVGLFEDTNLCAIHAKRVTIMPKDIQLARRIRGERA

SEQ ID NO: 39753 - protein, 161 aa, Glycine max
  Clone ID: 700728433_FLI.pep
NQSWYQEVSKLKAKYESLQRTQRHLLGEDLGPLNIKELQNIEKQLEGALAQARQRKTQIMIEQMEELRRRERHLGDMNKQLRLKLEAEGFNLKATESLLSFTSAAGNSGFHFQQPPQTNPIDYQQPEPFLQIGYHQYVQSEASNVPKSMACETNFMQGWIL

SEQ ID NO: 39754 - protein, 143 aa, Glycine max
  Clone ID: 700728637_FLI.pep
QRPKYFEMARTKQTARKSTGGKAPRKQLATKAARKSAPTTGGVKKPHRYRPGTVALREIRKYQKSTELLIRKLPFQRLVREIAQDFKTDLRFQSHAVLALQEAAEAYLVGLFEDTNLCAIHAKRVTIMPKDIQLARRIRGERA

SEQ ID NO: 39755 - protein, 294 aa, Glycine max; identical to SEQ ID NO: 39748
  Clone ID: 700729312_FLI.pep

SEQ ID NO: 39756 - protein, 92 aa, Glycine max
  Clone ID: 700730858_FLI.pep
DFVISYQIWFRKLCVGSSGRNSSSFKDVLLGYTEINLHGKNTKIHMLVTSPMCQYQTIICILCVTFVWLYFAQSGNCFADIEEHNSKQEREQ

SEQ ID NO: 39757 - protein, 217 aa, Glycine max
  Clone ID: 700730986_FLI.pep
FRVQAHGRPEIKSKEIFFSEMDPFLDFDYSNSFQNNNSAGNDSVVPVQKPSLAPPLINNHHHHQSETCFDVDFCRSKLSSFNYPSNSLSQSVSSSSLDVGVVPDGNTVSDMSYSFGRNSSDSSGIVVVSGNSVGQGATQLCGMDREARVLRYREKRKNRKFEKTIRYASRKAYAETRPRIKGRFAKRTEIDSDVERLYSPGPAVLMLDTPYGVVPSF

SEQ ID NO: 39758 - protein, 164 aa, Glycine max
  Clone ID: 700731193_FLI.pep
KKKKKSVSAEKKSGGRARKNVYRGIRQRPWGKWAAEIRDPHKGVRVWLGTFPTAEEAARAYDDAAKRIRGDKAKLNFPATAPPPSKKQRCLSPDTTTEQSSSSQSTTGSTGSPPSAAFHGGGDELDLKQLERFLGLDNMGAEWDNMDDLWMLDDVVVPNRHLIY

SEQ ID NO: 39759 - protein, 290 aa, Glycine max
  Clone ID: 700731265_FLI.pep
SWSISVFEQVKWIRVLYADFTAFIRDQEKLIFAEKAFDYVEGFVIINRTGLLNNWSSSFNPQDPVQASEFKSDGRTLFCLELAKYYNLEETLLVNQEVEKHLSRLNYIPSTLFLTEVTYVDFLDRVHTSEVKLRSKGLWDVPHPWLNLFIPKTKIHHFAEVVFGNIVKETSNGPVLIYPVNKSKWDNRTSVVIPEEDIFYLVAFLASAVPSSNGPDGLEHILSRNKKILEYCERANLGVKQYLPHYSTQEEWTAHFGSQWEIFKKRKSLYDPLAILAPGQGIFQKSITFS

SEQ ID NO: 39760 - protein, 139 aa, Glycine max
  Clone ID: 700732039_FLI.pep
VCFINEKWKPRENTKMVMMKLKTGIHQENKMLCKHHNMHIYERKERRVKVKSHNEELTAKRRCSRSREREDRRSPSFSPREQKRTYQDGERKELSMHSLKDSSRTKNPDIDRNRVSTNGSSGHHHRHGVSTSGLGGYSP

SEQ ID NO: 39761 - protein, 192 aa, Glycine max
  Clone ID: 700732485_FLI.pep
VDCVEESEGCYNGWHYQSFEWVLEHGGIATDDDYPYRAKEGRCKANKIQDKVTIDGYETLIMSDESTESETEQAFLSAILEQPISVSIDAKDFHLYTGGIYDGENCTSPYGINHFVLLVGYGSADGVDYWIAKNSWGEDWGEDGYIWIQRNTGNLLGVCGMNYFASYPTKEESETLVSARVKGHRRVDHSPL

SEQ ID NO: 39762 - protein, 349 aa, Glycine max
  Clone ID: 700734476_FLI.pep
DLIAVPTGVAWWMYNNEDTPVVAVSIIDTNSLENQLDQMPRRFYLAGNQEQEFLKYQQQQQGGSQSQKGKQQEEENEGSNILSGFAPEFLKEAFGVNMQIVRNLQGENEEEDSGAIVTVKGGLRVTAPAMRKPQQEEDDDDEEEQPQCVETDKGCQRQSKRSRNGIDETICTMRLRQNIGQNSSPDIYNPQAGSITTATSLDFPALWLLKLSAQYGSLRKNAMFVPHYTLNANSIIYALNGRALVQVVNCNGERVFDGELQEGGVLIVPQNFAVAAKSQSDNFEYVSFKTNDRPSIGNLAGANSLLNALPEEVIQHTFNLKSQQARQVKNNNPFSFLVPPQESQRRAVA

SEQ ID NO: 39763 - protein, 315 aa, Glycine max
  Clone ID: 700735472_FLI.pep
LEIFKNNLNYIRDMNANRKSPHSHRLGLNKFADITPQEFSKKYLQAPKDVSQQIKMANKKMKKEQYSCDHPPASWDWRKKGVITQVKYQGGCGSGWAFSATGAIEAAHAIATGDLVSLSEQELVDCVEESEGCYNGWHYQSFEWVLEHGGIATDDDYPYRAKEGRCKANKIQDKVTIDGYETLIMSDESTESETEQAFLSAILEQPISVSIDAKDFHLYTGGIYDGENCTSPYGINHFVLLVGYGSADGVDYWIAKNSWGEDWGEDGYIWIQRNTGNLLGVCGMNYFASYPTKEESETLVSARVKGHRRVDHSPL

SEQ ID NO: 39764 - protein, 423 aa, Glycine max
  Clone ID: 700736402_FLI.pep
NPILLRSFLCTAIIPNFLTRLQGLKSCATMSDDEREEKELDLSSAEVVTKYKTAAEIVNKALKLVISECKPKAKIVDICEKGDSYIREQTGNVYKNVKRKIERGVAFPTCLSINNVVCHFSPLASDEAVLEEGDILKIDMACHIDGFIAVVAHTHVLQEGPVTGRAADVIAAANTAAEVALRLVRPGKKNKDVSDAIQKVAAAYDCKIVEGVLSHQMKQFVIDGNKVVLSLSNPDTRVDEAEFEENEVYAIDIVTSTGDGKPKLLDEKQTTIYKRAVDKSYHLKMKASRFIFSEISQKFPIMPFSARALEEKRARLGLVECVNHELLQPYPVLHEKPGDFVAHIKFTVLLMPNGSDRITTHPLQELQPTKTIDDPDIKAWLALGTKTKKKGGGKKKKGKKGEKADESAEAEPMDSTNEATPQE

SEQ ID NO: 39765 - protein, 387 aa, Glycine max
  Clone ID: 700736874_FLI.pep
IIKFFHQVMGFLVLLLFSLLGLSSSSSISTHRSILDLDLTKFTTQKQVSSLFQLWKSEHGRVYHNHEEEAKRLEIFKNNLNYIRDMNANRKSPHSHRLGLNKFADITPQEFSKKYLQAPKDVSQQIKMANKKMKKEQYSCDHPPASWDWRKKGVITQVKYQGGCGSGWAFSATGAIEAAHAIATGDLVSLSEQELVDCVEESEGCYNGWHYQSFEWVLEHGGIATDDDYPYRAKEGRCKANKIQDKVTIDGYETLIMSDESTESETEQAFLSAILEQPISVSIDAKDFHLYTGGIYDGENCTSPYGINHFVLLVGYGSADGVDYWIAKNSWGEDWGEDGYIWIQRNTGNLLGVCGMNYFASYPTKEESETLVSARVKGHRRVDHSPL

SEQ ID NO: 39766 - protein, 71 aa, Glycine max
  Clone ID: 700737102_FLI.pep
IWLHTIVNDLSFFHHFHFQGTWFFIHTSIFPCAGDFVRANGLQEGDFIVIYSDVKCGKYVRPFLIFHFSFS

SEQ ID NO: 39767 - protein, 205 aa, Glycine max
  Clone ID: 700737217_FLI.pep
SRRQSALHLPFRERSNDFPGPRRPRRPPGRWHPAPPGGIDPGRNPHRTGSCHAALRPLQPGAGSSHGRHRPGRGRVPDVGGLRAHGAVFLLLDPELHPGDPASLGEPRRRREASPRRGGGVRGAEDEGSGAEDQGGWAGYSEQGTGYKGGSCKGCKGGSCKGCKGSCCKGCKGGGKGCKENNSDSNNRNRMMSNSDIRGSINVLL

SEQ ID NO: 39768 - protein, 418 aa, Glycine max
  Clone ID: 700738574_FLI.pep
GKTLLAKAIAGEAGVPFFSISGSEFVEMFVGVGASRVRDLFKKAKENAPCIVFVDEIDAVGRQRGTGIGGGNDEREQTLNQLLTEMDGFEGNTGIIVVAATNRADILDSALLRPGRFDRQVTVDVPDIRGRTEILKVHASNKKFDADVSLEVIAMRTPGFSGADLANLLNEAAILAGRRGKTAISSKEIDDSIDRIVAGMEGTVMTDGKSKSLVAYHEVGHAICGTLTPGHDAVQKVTLVPRGQARGLTWFIPNDDPTLISKQQLFARIVGGLGGRAAEEIIFGEPEVTTGAAGDLQQITSLAKQMVTTFGMSDIGPWSLMEPSAQGGDVIMRMMARNSMSERLAEDIDAAIKRISDEAYEIALEHIRNNREAIDKIVEVLLEKETLSGDEFRAILSEFVEIPAENRVAPSTPVPATV

SEQ ID NO: 39769 - protein, 49 aa, Glycine max
  Clone ID: 700738858_FLI.pep
FLCLTHVDFLSFCGIYAVLVVWGKFILFPSLVLAMDPHRHKLHMNGVET

SEQ ID NO: 39770 - protein, 298 aa, Glycine max
  Clone ID: 700556931_FLI.pep
LLLLPFVLKPYPLSSQNQTMSTSAASLALPTLTLRTRQPLCSPQCFSSSLSLTPNSKPISISAVFLKTTLSSSSPLSLSSRFVPHVSVLEQEEDTFGDGDGPSFSRDLKLFVGNLPFSVDSARLAELFESAGNVEVVEVIYDKTTGRSRGFGFVTMSSVEEAEAAAKQFNGYELDGRSLRVNSGPPPARNESAPRFRGGSSFGSRGGGPSDSENRVHVGNLAWGVDDVALESLFREQGKKVLEARVIYDRESGRSRGFGFVTFGSPDEVKSAIQSLDGVDLNGRAIRVSLADSKPKRF

SEQ ID NO: 39771 - protein, 350 aa, Glycine max
  Clone ID: 700739290_FLI.pep
SNILTYLLNCLIVMADEGGIEKRRYDVFLCFRGEDTRYTFTGNLYAALRQARLRTFFDDGFKSGDQIFDVVLQAIQESRISIVVLSENFASSSWCLEELVKILECRETKKQLVIPIFYRMDPSDVRRQTGCYGESLAQHQYEFRSDSEKVRNWQEALTHVANLPGWRFSRYQYEYEFIEDIVRQAIVAIVPRYSIFLSFSGNDTRSFTGFLNNALCRSRYQTFMNDGDQISQSTNGVIEESRLSIIVFSENYARSSSCLDFLLTILECMKTKNQLVCPIFYKVLPSDLRHQRNSYGEAMTEHENMLGKDSEMVKKWRSALFDVANLKGFYLKTGYEYEFIDKIVEMASKI

SEQ ID NO: 39772 - protein, 226 aa, Glycine max
  Clone ID: 700739430_FLI.pep
AAELPGRTDNEIKNHWHTTLKKRSQQNTLTKEEARASKSKDKVLPNKGVTVTLPATSSQISDNSSLSPASSTSSEFSNITSDPSTAASMQNLVFEDDDEFGFLDSYIDPMNNESFWKELTLDDISFNNVPIVSEDTNGCFQSTSSSNSNTLDSLHKSTSESIVADNDFGGFFDAYAEATVDNFWTQPYVAGMSSHVPTELLAPSVAESEYFTPIYDDLWGQTHLYY

SEQ ID NO: 39773 - protein, 133 aa, Glycine max
  Clone ID: 700742778_FLI.pep
ERRSGTIKISDVSYDTLHAFVNYLYTAEASLDNELACNLLVLGEKYQVKHLKTYCEKYLIAKMNWDKAISNYAFAYQYNCKQLQSVSLAVILDHMDSLTQNECYAELVDTNPRLVVEIYETYIGRLLNTAGAF

SEQ ID NO: 39774 - protein, 97 aa, Glycine max
  Clone ID: 700742807_FLI.pep
IINIHHGLLPSFKGGNPSKQAFEAGVKLIGATSHYVTEELDAGPIIEQMVERVSHRDNLQSFVQKSENLEKQCLSKAIRSYCELRVLPYEEKRTVVF

SEQ ID NO: 39775 - protein, 248 aa, Glycine max
  Clone ID: 700744417_FLI.pep
YLSLTQELSCEMERSSEEEMLITKGPWTEQEDSLLFNYITVHGEGHWNSVARYTGLKRTGKSCRLRWLNYLRPNVRRGNITLQEQLLILDLHSRWGNRWSKIAEHLPGRTDNEIKNYWRTRVVKQAKQLKCDVNSKQFRDTLRFVWMPRMLERIRAQASSSAQAHQSSLISNSNTQAHSGLLSSALHAHAPSLSDSSASYNLMGADAGSCSSHSYYSDIAGNGFGGADLWTDQNICFLQHQLAHHDLF

SEQ ID NO: 39776 - protein, 99 aa, Glycine max
  Clone ID: 700745011_FLI.pep
ISISTSPSPFPFSTVLRRVTSIRMAQIYPNSPAKRSITPTSSVAPTCPRPSITTVKPRSRNRRRPWAIHSGTQGMNYAAEATESSSRRDTRACRASVSP

SEQ ID NO: 39777 - protein, 140 aa, Glycine max
  Clone ID: 700745779_FLI.pep
RWRETVNRWSRIARRLPGRTDNEIKNYWRTHMRKKKAQEKKHASAASPVSSSCQSSLSSNNHVVDSHASKEVGEESCYDTGGYDDGMMMGLIGGEKGYSMDDIWKDIMSEEENNIYNNNLQPVYEGHSEEGCNFSFHHHQ

SEQ ID NO: 39778 - protein, 212 aa, Glycine max
  Clone ID: 700747814_FLI.pep
YKLSIDLELMARGKVQLKRIENPVHRQVTFCKRRAGLLKKAKELSVLCDAEIGLFIFSAHGKLYELATKGTMQGLIERYMKFTRGAQPEAAAPEAHPLLVAKEETNALKQEIQTLQKGISYLFEGGNKTMAIDELQLLEKNLETWIYHIRSMKMNIMLQEIQALKDKEGTLKAANKYLHDKIVENTAISNFAEFATDTSYPLIVQDGGFQLY

SEQ ID NO: 39779 - protein, 426 aa, Glycine max
  Clone ID: 700747979_FLI.pep
GVTNVSSIEELCFIKDLHLRTVDQLGVDGSVIAKHLEELEQLLKGIAMMKELTKRTQDYLVSFGECMSTRIFAAYLNKIGVKARQYDAFEIGFITTDDFTNADILEATYPAVAKRLHGDWLSDPAIAIVTGFLGKAQKSCAVTTLGRGGSDLTATAIGKALGLPEIQVWKDVDGVLTCDPNIYPKAEPVPYLTFDEAAELAYFGAQVLHPQSMRPARESDIPVRVKNSYNPKAPGTLITKARDMSKAVLTSIVLKRNVTMLDIVSTRMLGQYGFLAKVFSIFEELGISVDVVATSEVSVSLTLDPSKLWSRELIQQELDHVVEELEKIAVVNLLQNRSIISLIGNVQRSSLILEKAFRVLRTLGITVQMISQGASKVNISLVVNDSEAEQCVRALHLAFFESELSELEMDYKNGNGSVHELSLGDT

SEQ ID NO: 39780 - protein, 248 aa, Glycine max
  Clone ID: 700748756_FLI.pep
WFRFQVDWTPELHKKFVKAVEQLGIDQAIPSRILEIMKVEGLTRHNVASHLQKYRIHKRQSAPREEDRKWHNQRDAMQRNYYMQRPIMAYPPYHSNHTLSPAPIYPMWGQPGSQTAGVQIWGHPGYHIWHPTESCHWKPYQGVHVDAWGCPLLPAPQAPCFPYNQNIPGLHNPKAVDYRFGMPQSSFEHHPAEEVVDKVVKEAISKPWLPLPLGLKPPSMDSVLAELSKQGISGIPLGNKRSSTPKLR

SEQ ID NO: 39781 - protein, 363 aa, Glycine max
  Clone ID: 700749466_FLI.pep
NKTKMESDLSWERNTLINELIQGMEVARKLKADLKLPYSVDTRDLLLQRILSSYEKALLILRCSNASTSELQGMNQATPTLLPESPLSVHGSPLREDVHGAIKDHHNSKKRKITPKWMDRVRVSCESGLEGPHEDGYNWRKYGQKDILGAKYPRSYYRCTFRSTQGCWATKQVQRSDEDPTMFDITYRGNHTCSQGNNAVLPPKSPEKHEKPAHSHNIDIHHAQASQESLAKFRSILSVNTDNLDNGDMAYAFTFPSTSFGCMKQDNHSLIPLALENDSFLSDLYQTHLLSPTTPESNYFPSPTFQMNEFDGIYNRSHSKSDINEIISTNTSATNSPIPDFNFSLDPVEIDPNFPFNTPGFLC

SEQ ID NO: 39782 - protein, 85 aa, Glycine max
  Clone ID: 700750091_FLI.pep
PFPGADTDSVTVPQWQSYCLLISTLIPCMLNVCDMNLNRILHDQTSSSKKKKDSILREDPLTKRKVQKIQEAKGVCECNSYLIRL

SEQ ID NO: 39783 - protein, 194 aa, Glycine max
  Clone ID: 700750112_FLI.pep
TPSDEEVILASARPKKRAGRRVFKETRHPVYRGVRRRNKNKWVCEMRVPNNNSRIWLGTYPTPEMAARAHDVAALALRGKSACLNFADSRWRLTVPATTNAEEIRRAAGEAAEAFAVADGDDVNIEQQQSVMATNDDEVQEPLQQEEVQDLHDLLLSIANEPLMSPPPCARDGRDWNDVDIFDDDEISLWNFSI

SEQ ID NO: 39784 - protein, 270 aa, Glycine max
  Clone ID: 700750229_FLI.pep
RRTALERNKPTLKSKSESNPLQRHSHPLSVFCLFFLLSHNNIHTPSSSSLHGLTQRLNHTKKNNMCSAEKDGIMLFGVRLSVVDNHPTSFRKSASMTNLSQYESPPPHDPNAGYASDDVVHPSRHTRERKRGVPWTEEEHRLFLLGLQNIGKGDWRGISRNFVKTRTPTQVASHAQKYFLRRHTQNRRRRRSSLFDITTDSVMEPWPEKEEEQVVLPSARSKPVLPVPPSSKMAELDLSGKSLSLKLPVSKPPISNENFGGIPLSVLLEG

SEQ ID NO: 39785 - protein, 419 aa, Glycine max
  Clone ID: 700750279_FLI.pep
VKVGMAKKAVLIGINYPGTKAELRGCINDVWRMHRCLIERYGFSEDDITVLIDTDESYTEPTGKNIRSALTRLVRSAEPGDVLFVHYSGHGTRLPAETGEDDDTGYDECIVPSDMNLITDDDFREFVDGVPRGCRITIVSDSCHSGGLLEEAKEQIGESTKGEEEQSSSGFGFSSFLHRTVEDAIESRGFHIPSALRHNRGRDDDGDEAQNRDIELPDGGYVKNRSLPLSTLIDILKQKTGKDDIDVGKLRPTLFDVFGEDASPKVKKFMNVIFNKLQHGSDESGGGILGLVGGLAQEFLKQKLDDNDEGYAKPALETKVESKHEAYAGPTKRGLPDGGILMSGCQTDQTSADASPAGNAASAYGAFSNAIQAIIEETDGAITNQELVQRAREKLKNSGFTQKPGLYCSDHHVDAPFVC

SEQ ID NO: 39786 - protein, 120 aa, Glycine max
  Clone ID: 700750369_FLI.pep
LISWLLIYLFCDRLFLIGLSKFGKGDWRSISRNVVVTRTPTQVASHAQKYFLRQNSVKKERKRSSIHDITTVDSNSVPVPIDQNWVPPPGGSVQQSLQYPSSNMLDQMGTFGYSNYGFGM

SEQ ID NO: 39787 - protein, 231 aa, Glycine max
  Clone ID: 700753767_FLI.pep
ISMEPPLINDSTFSSANPSLSEIWPSHFPTDHTPSNKRHLSPSTDCGSNKHIKSSGSGSQDQNGALKAGEVDATSVAGNKLPEQTAKPSSSEQPPKQDYIHVRARRGQATDSHSLAERARREKISERMKILQDIVPGCNKVIGKALVLDEIINYIQSLQHQVEFLSMKLEAVNSRLSMSPTIECFPSKEVGTQPFDLAGIIFGSQPARGYAQGSQPGWLHMQIAGGFEKAT

SEQ ID NO: 39788 - protein, 256 aa, Glycine max
  Clone ID: 700754169_FLI.pep
LYPPLCFLTRLQAWLFQTHPCQFLHRRRWEGGRLRSRGLRTPPNRQVTFCKRRNGLLKKAYELSVLCDAEVALIVFSSRGRLYEYANNSVKATIERYKKACSDSSGAGSASEANAQFYQQEADKLRAQISSLQNNNRQMMGESLGPLTAKELKNLETKLEKGISRIRSKKNELLFAEIEYMQKREIDLHNNNQLLRAKIAEGERNHHNLAVLPGGSNYDSLQTSQQQFDSRGSFQVTGLQPNNQYARQDQMSLQLV

SEQ ID NO: 39789 - protein, 181 aa, Glycine max
  Clone ID: 700754722_FLI.pep
LQQDNEALLKQIKELKSRLVQEENNNNTESDVSVKEEMIATLQDSNPLCESAIPGSDSKELSYECFNKSDEVGGGSVFPVDFKDGSSDSDSSAILNEENNNHSPNNNAAISSCGVLQSHGLLSSPSSSSMNNCFQFQKQYQTTTQYVKMEEHNFLSADEACNFFSDEQAPTLQWYCSEEWS

SEQ ID NO: 39790 - protein, 240 aa, Glycine max
  Clone ID: 700755033_FLI.pep
LVVGVCWKSTSLFSSSSSPPLPNQRCAPQHICTKAFNFSASFQMLAKTHNKGDGSKSLAKILAKWKEYNAQIDSSSDADKPVRKVPAKGSKKGCMKGKGGPENSRCNYRGVRQRTWGKWVAEIREPNRGNRLWLGTFPTAIGAALAYDEAARAMYGSCARLNFPNVSVSSFSEESSKDSPVANHCGSSMAVSANESMISPSNSGVGAEDDVDMEPISLSLTVKHENGEGESGISSSPPSP

SEQ ID NO: 39791 - protein, 175 aa, Glycine max
  Clone ID: 700756037_FLI.pep
AETRRSTGTVKWFNAHKGFGFITPQDGTDDLFVHFTSIRSDGYRSLSDGQSVEFLLDYGDDGRTMAVDVTSAVRSRLPGGFRGGGGGRGRGGGRYGGGEGRGRGFGRRGGGPECYNCGRIGHLARDCYHGQGGGGGDDGRNRRRGGGGGGGGGCFNCGEEGHFARECPNVGKGNE

SEQ ID NO: 39792 - protein, 101 aa, Glycine max
  Clone ID: 700756334_FLI.pep
VKKPHRYRPGTVALREIRKYQKSTELLIRKLPFQRLVREIAQDFKTDLRFQSHAVLALQEAAEAYLVGLFEDTNLCAIHAKRVTIMPKDIQLARRIRGERA

SEQ ID NO: 39793 - protein, 254 aa, Glycine max
  Clone ID: 700756889_FLI.pep
MPATCAARIFQLTRELGHKSDGETIRWLLEHAEPAIIAATGTGTVPAIAMSVNGTLKIPTTSPSDQEPGEPPERKKRKRPANSAYVDINGAAVSVSAGLASSIINNNNQNAATTMTTTMAIPQHTAIPLPQGMVPVWAIPSNAVVPAAGAFFVVPQTASFQHQPQFFTIARPISEFVSSMVTPVVQLQPTSINSSTNTNSNASSTAPSSKSPARATVMAPTTTTTTTRQMLRDFSLEIYDKQELQFMSRASSKH

SEQ ID NO: 39794 - protein, 81 aa, Glycine max
  Clone ID: 700757904_FLI.pep
VMTIAFEFAFESHMQEHVTSMARQYVRSIISSVQRVALALSPSHLSSHAGLRSPLGTPEAQTLAHWICNSYRFVKFTVFAY

SEQ ID NO: 39795 - protein, 249 aa, Glycine max
  Clone ID: 700760723_FLI.pep
HSATTQWSWLKVKFRANTNEDDDDATMTTVPPHSVQVHTTTHRYEAGVVPPARFEAPRYEAGIKAPSSIYHSERGPTTSQVLAVVAGLPVGGILLLLAGLTLAGTLTGLVVATPLFIIFSPVLIPATVAIGLAVAGFLTSGVFGLTALSSFSWILNYIRETQPASENLAAAAKHHLAEAAEYVGQKTKEVGQKTKEVGQDIQSKAQDTREAAARDARDAREAAARDARDAKVEARDVKRTTVTATTATA

SEQ ID NO: 39796 - protein, 66 aa, Glycine max
  Clone ID: 700762635_FLI.pep
PEKLPNLRKKLHRIFHLLLLQSITSYKGMPKAYTRVIQKSKPFRSENTSFSACFPFTPKTLLILCS

SEQ ID NO: 39797 - protein, 694 aa, Glycine max
  Clone ID: 700763470_FLI.pep
EGACMVCKGLPGQEERLLCVTCDTPWHVPCLFAPPPTLSATARWLCPDCSILDSDVPPVPAPARNQLVAAMLAVENDASLTQHDKARKRQELLTGKAPADDDDDDEQENKSSLSDILSRSLNCSICIQLPERPVTSPCGHSFCLKCFEKWVRQGKRNCAKCRQIIPAKMTSQPRINSALVFAIRMARQASNSSGSGRGGVRSVNHFLHNQDRPDEPFTTERAQRSGRANAASGKIFVTVPTDHFGPITAENDPLRNQGLLVGESWRDRLECRQWGAHFVPVGGIAGQSDRGAQSVVLSGGYVDDEDHGEWFLYTGSGGKDLSGNKRTNKSHSFDQKFEKYNRALQVSCLQGYPVRVVRSHKEKRSSYAPETGVRYDGIYRIEKCWQIAGLQGFKVCRYLFVRCDNEPAPWTSDDHGDRPRPLPVIRELKKATVIHERTESPSWDFDEEDSRWKWKKPPPPSRQKVQNVEPVEVARAKSNKEVKKFQLKSIKEQLQRGFSCMICKEVMVSPVTTPCAHNFCKSCLEGEFAGQAFVKERSKGGRTLRSQKNVMKCPSCSIDISDYLQNIQVDIDLKSAIESLKAKVEEIGESVESSEDADGLQDDGAGKDEDTDSRNKNSVQELNGLPEGSDVGELEDTTNKEPDPAMKCNGKRKKGDYGNQSPDDKMEKRGKNYKTTEEELHEENDSSSSPLHPQ

SEQ ID NO: 39798 - protein, 576 aa, Glycine max
  Clone ID: 700764284_FLI.pep
FEKVLSASDAGRIGRLVLPKACAEAYFPPISQSEGVPLRMQDVKGNEWTFQFRFWPNNNSRMYVLEGVTPCIQAMQLCAGDTVTFSRIDPGGKLVMGFRKASNSTDTQDASTSAQSNSAKGTISSGTENLPSGSNHANLLHSLTGNVETHLNGHTEHLHLGTGTAGLLKTENNEMTNSSSPQQQISVLEKKRTRNIGPKSKRLLIDNEDAMELKLTWEEAQDLLRPPPSVKPNIVTIEDQVFEEYDEPPVFGKRTIFSACSSGGKEQWAQCDDCSKWRKLPVDALLPPKWTCSENVWDSSRCSCSVPEELSSKELENLLKTNKDFKKRRIAESSKSIQEHEASGLDALASAAVLGENLVDTAESSAGATTKHPRHRPGCSCIVCIQPPSGKGRHKPTCTCNVCMTVKRRFKTLMLRKKKRQSEREADTAQKDQTLLKDEPDTNGAPRDDTSRLEKEVGLNKSQHQVGESSTGQIDLNSHPNREDMQVETTGLNMSSHLEPATNHTVGEFMDKNDLRRSFNNEVQTGQNSSLHTPPQSSGEGQRYFSDGRCFASIVWNQERKDEVHSQPNQSQNNLS

SEQ ID NO: 39799 - protein, 97 aa, Glycine max
  Clone ID: 700764411_FLI.pep
LLPQHMPLLFKHCLVQEHHKAWLSDIGCSHHLIFKHSSLAKLHCLEASSPLHSSAELLKVIKFLCSGHSLQIPPKDHHQQVEHHSHNLHTPISILSL

SEQ ID NO: 39800 - protein, 721 aa, Glycine max
  Clone ID: 700764456_FLI.pep
GLISAQEPCFLIWVCCFCLCWLDMAVENQREDGGCDRFPVGMRVLAVDDDPICLKVLENLLRKCQYHVTTTNQAVEALTMLRENRNKFDLVISDVNMPDIDGFKLLELVGLEMDLPVIMLSAHGDTKLVMKGVTHGACDYLLKPVRIEELKNIWQHVVRRKNFDSRDQNKASNEEKAPNFAGGGSQGLRSENSADQNKRLGKKRKDQSDEEEEGGEENEDDEDPSAQKKARVVWSVELHRKFVAAVNQLGLDKAVPKKILDLMNVEGLTRENVASHLQKYRLYLKKAAQQANMVAALGGSDSYLRIGSIDGYGDFCTSSGSGRITNATLPSYASTGIFSRLNSPAALNMRGISSSALIRPVQSQNINSSLNTLGNIQPSIFPANQSSSLLQGIPTSIELNQSKQRNCTTGISQLSQVDSSGFTVASGFPDHRATVNGPNNSLPCVSNNHIMLQGNPQTHGPGAFSNQSSVRAASLCAESFDVGLCGSSNLLDHNRCNDNWQNAAQLSKFPANSLPLCEAFSNDQLPPTSINDSNSSTHIGNNSPVDFSSRMGISVPLEDTRNELRCQEGLIGNIVQPSSYTPRQRWEEHKLDYNQNMSCPFNSVNSHASSSGVTSSMGHVLNQNNTICSNRVDASSLVGQLNGASPSISRCTEVEKFSSDIRLKPNEAYILEQMKSQDGFMQNTFGTLDDIMGVMVKREQNESTLLDGEMGFDAYPVGSCN

SEQ ID NO: 39801 - protein, 441 aa, Glycine max
  Clone ID: 700785990_FLI.pep
GKKKNYKMGRHSCCYKQKLRKGLWSPEEDEKLLRHITKYGHGCWSSVPKQAGLQRCGKSCRLRWINYLRPDLKRGTFSQEEENLIIELHAVLGNRWSQIAAQLPGRTDNEIKNLWNSCLKKKLRQKGIDPVTHKPLSEVENGEKAAEVSNELNLLKSESSKSDSASYEQRTSISPKAYAPEMDGSCSSKIEINFVTNNNCYNKDLFLDRFMSSSRQESYTTSCQPSDLMGNFPIQMSYATNDQCLPNDSNSSHWFSQTGRSFDMNTEFPFNAAVTSINPTPTTNLFLPNNSFCYKPSLAVPSDNVSIPYGSHYWEASASNNSNSSTELRSSSPLNIFSSWGLADCGTSTTKEAQIHMMENHNTEEAKWDEYLHNPISMLASSVQNQAPESLCNDIKTSMHLVPDTLGAMLPHNHTKQQEQSQTSSFFSKDIQKLRAAFGHM

SEQ ID NO: 39802 - protein, 211 aa, Glycine max
  Clone ID: 700786710_FLI.pep
MSSAARTPGGEEGKHYPAPLAPHEGVVKDSTLFWDTLRRFHFVMGTKFMIPVIGGKELDLHVLYVEVTRRSGYEKVVAEKKWREVGSVFKFAATTTSASFVLRKHYFSLLYHYEQVHFFKARGPIYTPSADAFSGNSPSWRPELAIVEYSPKPMDNSPESRAEDTSCLSGNGTIEGKFDCGYLVSVKLGSEVLRGVLYHPEQLVPHHRFQT

SEQ ID NO: 39803 - protein, 347 aa, Glycine max
  Clone ID: 700786937_FLI.pep
RHTKVDGRGRRIRMPAACAARVFQLTRELGHKSDGETIEWLLQQAEPAVIAATGTGTIPANFTSLNISLRSSGSTMSAPSHYFRGNYFNPSTFSTSAAAAAAAQLRSRAEWDRSMSMVMEDSRRSMLENTSSISAILNFNPMGNVNVIQQAKQELREESGGGGGLESVASDSDGSLGRKRRPEQELSQMGSYLIQSSTGSLPASHASNTAAFWMVAGHGNQAMSGGGSGGGGNNGSSDNNPIWAIPSVGNSGVYRGAMSAPGGIHFMNFASPMNLMPGGQLGSGIVGGGGGGGGNGGAQLLSESNLGMLAALNAYRQIPANGVSEPPGSAGQHHGGDDGRDSTSQHS

SEQ ID NO: 39804 - protein, 118 aa, Glycine max
  Clone ID: 700787104_FLI.pep
EEKRKALQAQKTEARKVDIKEFASMQPLSNKKENDEIFIKLGSDKDKRKDALEKEEKSKKSVNITEFLKPAEGERYYPGGRGRGRGRGSRGGYSGNAYSNAPAPSIEDPGHFPSLGGK

SEQ ID NO: 39805 - protein, 228 aa, Glycine max
  Clone ID: 700787288_FLI.pep
RSQVSNWFINARVRLWKPMIEEMYKQDNCIAGMDSNSSSENVSKVTKSYVKTSNDVGDDSQHCQSPIVADTNHSGGQAKDLRHDQALDTEMMASIGLASPITSIYGAETEHRRNLDDCGLFSNDTVVQSDGATNKRFVSVGPTCQMPESERFKSGSGVSLTLGLQHCEGGNFLPGKTHLSLVSMREDDISKATAASTVGVETTELECIGAGNQQQRLNSPHMLHDFEV

SEQ ID NO: 39806 - protein, 525 aa, Glycine max
  Clone ID: 700787362_FLI.pep
HRHPSTPVTGFCASCLRERLAGIDSSSADSPELRRTKSFSGRTADAPSSSAAPEPRRRSCEVGLPPLGGLLSDPFNVADKNKKPPNRTAEICSGPAGVGTGENEGGNAVRVSGDDDGEGKTMKEFIDLELRDKKNTGRDFRDIAASFRDAASVFSKGLMKWRRKENPKRNRNNDGASAGVGSVEKLGLRTLHETQSEVGEYGFALGRRSCDTDLRLSVDDSRFSFEAPRASWDGYLIGKAFPRVSPMVCVGDRVLLEEEGEESLENGEECCPGGSAQTKHYYSDWHRRRRSFDRSNSRKKPLMGDVDELRVISNAKVSPASTELFYGAKVLITENDLRDANLKTSNSVLSDSVMESASKDDACDAAYGDGQKGLNRFHKWGKWWCKLGIVQRRREDRLGEGEYAGGGDMVNEPIAESWQKLRRVVNGQASESVCEKLIRSHSVCCRDPCRTVGLANGFVGSETKGHVFNGRQKFMLQRNRSVRYSPSNADNGLLRFYLTPLKSYRRSRSGKTSLKSSNPTARSFF

SEQ ID NO: 39807 - protein, 268 aa, Glycine max
  Clone ID: 700787662_FLI.pep
HSAPLIQHSHRNDIHHALALNPLPEVPMNDNDDDFISELTHRMTRFLLPDDDTSDFSSIGSHSMDLENSSRDSKHSPEDSGSSQEASPPATPEERCWKIDMIGTFEKMKPNETGNFNNQFQNSNTGLYSYQSLIREQIRAIELSGVKQEHVAVSPKPKSNPRRKSQAQEANKGNGRRARPPQVPHQGGAGMRALFLDGSGSRGGTGVFLPRGGGATTPSESTKAGGFPPLHDVLVSNRDGMYSLQKPESRKAPASIQNDTILPQEWTY

SEQ ID NO: 39808 - protein, 103 aa, Glycine max
  Clone ID: 700787754_FLI.pep
GIRHARLCHVPLIVEVVCCRLTPLQSNLYKHFIQSKNVKRAITEELKQSKILAYVTALKKLCNHPKVPINAAGLIRYNWCHPFFGKIIIHLMNMIIYSSLLQL

SEQ ID NO: 39809 - protein, 114 aa, Glycine max
  Clone ID: 700787755_FLI.pep
PHLLSIYIHSSSSHLFNLHKYIILQINRLIMEESGENWPSDNSYLDEVNDEFGSEDEEGGSFSGMGETDRKKRKRELAERFLALSATIPGFTKMGEGYKMTVDELVKTLRVAIS

SEQ ID NO: 39810 - protein, 208 aa, Glycine max
  Clone ID: 700788603_FLI.pep
TINCVILLSTGPVDYIMPRNARHLGFCYINDLVLGILELLKYHARVLYIDIDVHHGDGVEEAFYFTDRVMTVSFHKYGDSFFPGTGDAKEIGEREGKFYAINVPLKDGIDDSSFTRLFKTIISKVVETYQPGAIVLQCGADSLAGDRLGCFNLSIDGHAECVSFVKRFNLPLLVTGGGGYTKENVARCWTVETGVLLDTELPNEIPAK

SEQ ID NO: 39811 - protein, 99 aa, Glycine max
  Clone ID: 700788846_FLI.pep
STYNEHSLLHSAPSKQQLFRTRQVAPCLKDKYHLEDIQNPTQKKEKLIKSISSVDSIPQFRGGKKEREKKASSLSAKIIYQVKHNLVMQNNYTTHTRNM

SEQ ID NO: 39812 - protein, 180 aa, Glycine max
  Clone ID: 700789246_FLI.pep
AIESLGRMLTEGIHTDITINASDGSIGAHRAVLAARSPVFRSMFSHNLQEKELSTINISDMSLESCQAFLYYLYGIIKHEEFLTHRLALLQAADKYDISDLRDVCHESLLEDIDTKNVLERLQNASLYQLMKLKMSCIRYLVKFGKIYEIRDDFNTFLRNADRDLISEVFHEVLDAWKGF

SEQ ID NO: 39813 - protein, 262 aa, Glycine max
  Clone ID: 700789403_FLI.pep
DFGIRYGFQWPALIYRLSKQPGGPPKLRITGIELPQPGFRPAERVQETGLRLTRYCDRFNVPFEFNAIAQKWETIKIEDLKIKENELLVANAMFRFQNLLDETVVVNSPRDAVLKLIRKANPAIFLHANVNGSYNAPFFVTRFREALFHYSTLFDVLDTNVACEDPMRLMFEREFFGRQVMNIVACEGCERVERPETYKQWQVRNMRAGFKQLPLDKHLINKLRCKLKDAYHSDFMLLEDDNYMLQGWKGRVVYASSCWVPA

SEQ ID NO: 39814 - protein, 411 aa, Glycine max
  Clone ID: 700789643_FLI.pep
ENANTTLEQISMLASPDGDTMQRIATYFMESLADRILKTWPGIHRALNSTRMTLISDEILVQKLFFELFPFLKVAFVLTNQAIIEAMEGEKVIHIIDLNAAEAAQWIALLRVLSAHPEGPPHLRITGVHQKKEILDEVAHRLTEEAEKLDIPFQFNPVASKLENLDFDKLRVKTGEALAISSILQLHTLLAWDDEAMQRKSPLLLKSSNGIHLQRVLPMGQSTLGDLLEKDMVNGYTPSPDSTSSSPSSLTTSNSMNMESFLNALWGLSPKVMVVTEQDCNHNGPTLMDRLLEALYSYAALFDCLESTVSRTSLERLRVEKMLFGEEIKNIIACEGSKRKERHEKLEKWFQRFDLAGFGNVPLSYFGMVQARRFLQSYGCEGYRMRDENGCVLICWEDRPMYSISAWRSRK

SEQ ID NO: 39815 - protein, 106 aa, Glycine max
  Clone ID: 700790260_FLI.pep
GTVKDREALCLYAASYGNAARFINHRCLDANLVEIPVEVEGPTHHYYHFAFFTSRKVAAQEELTWDYGINFDEHDDQPIELFQCRCSSKFCRNIKRLNRSMRSSSS

SEQ ID NO: 39816 - protein, 152 aa, Glycine max
  Clone ID: 700790495_FLI.pep
GSEMDADGKIKKGAGGRKGGGPKKKPVSRSVKAGLQFPVGRIGRYLKKGRYAQRVGTGAPVYLAAVLEYLAAEVLELAGNAARDNKKNRIIPRHVLLAVRNDEELGKLLAGVTIAHGGVLPNINPVLLPKKSERASKEPKSPSKATKSPKKA

SEQ ID NO: 39817 - protein, 225 aa, Glycine max
  Clone ID: 700790552_FLI.pep
LRALSLSLQQEFIYSFQPISMAKEKKNLSNKNKKPSNADEVHFRGVRKRPWGRYAAEIRDPGKKTRVWLGTFDTAEDAARAYDVAARNFRGPKAKTNFPFLPDNNTNVNLNKKNNNVNVKSDSPSQSSTVESSTPEREFTRRAAPAAMDRFPFLPIQQQILVTHPVAPMRPVYFLDRAHFMTQPFPLRFEPGPVQSDSDSSSVVVDCQPKRELNLDLNLAPPNEY

SEQ ID NO: 39818 - protein, 165 aa, Glycine max
  Clone ID: 700791347_FLI.pep
LMCSISEKAKRKRQSAFRGVRKRSWGRYVSEIRLPGQKTRIWLGSFGSPEMAARAYDSAAFFLKGTSATLNFPDLVHSLPRPLSSSRRDIQSAAAEAALHSPPPKEEQESIFTSTTTSSFHDVMEAPLMSPLRVDSTFGDFSWDQLFDFNDDILIVGSTSATLVP

SEQ ID NO: 39819 - protein, 280 aa, Glycine max
  Clone ID: 700792139_FLI.pep
QNTKHKPFFQPTLFSNSLFLPKSSIQFFTFSQMGMAAAESQFHVLAVDDSIIDRKLIERLLRTSSYQVTTVDSGSKALEFLGLRENDESNPSIPSVCPNNHQPQEVEVNLVITDYCMPGMTGYDLLKKIKESSSLRNIPVVIMSSENVPSRINRCLEEGAEEFFLKPVRLSDLNKLKPHMKKTKFKDQKQETVERFEDSEVQQQQSQQQIIIQNEHHQAPKLQVLQPESESESHPQPTIEQQQQILQQANNNNKRKTMEQGLSPETDRTRPRYSGIATVV

SEQ ID NO: 39820 - protein, 217 aa, Glycine max
  Clone ID: 700792275_FLI.pep
NKKNCFRVETKKQFKNKHMMVKPSSEKPEEHRDSKYYKGVRKRKWGKWVSEIRLPNSRQRIWLGSFDTPEKAARAFDAAMFCLRGRNAKFNFPDNPPDIAGGESMTPSQIQVAAAQFANAGPHEGHSGRPEHSPMQSLSPSVSEGTVLTDSDVTTLNGSLTDLFTPVGSSGYASDYGIFPGVDDFSGGFYVPEMLNFNYGEENGEGFIVDESFLWNF

SEQ ID NO: 39821 - protein, 149 aa, Glycine max
  Clone ID: 700793706_FLI.pep
AKLKARLEVLQKNQRNFMGQDLEGLSIKELQNLEHQLDSALKHIRSRKNQIMHESISELHKKDKVLQEQNNTLAKKIKEKEKALAQHAQMEQRGDEMDLTSSALVPHPLETSNIRESSQIRGEGDNEGTPTPTRANAILPSWMLRPSNE

SEQ ID NO: 39822 - protein, 185 aa, Glycine max
  Clone ID: 700793955_FLI.pep
KKRRKMSGRVSGKVKWFNDQKGFGFITPDDGSEELFVHQSQIKSDGFRSLAEGESVEFAIESESDGRAKAVDVTGPDGASVQGTRRGGDGGRSYGGGRGGGYGGGGRGGGGGACYNCGESGHLARDCSQGGGGDRYGGGGGGGGRYGGGGGGRYGGGGGGGGGGGSCYSCGESGHFARDCPSSAR

SEQ ID NO: 39823 - protein, 392 aa, Glycine max
  Clone ID: 700793982_FLI.pep
GGALWEDVLKRCVSEFRLAPRSWTDYLGLTVGGTLSNAGVSGQAFRYGPQTANVTELEVVSGKGETLVCSESQNSELFFATLGGLGQFGIITRARVPVQQAPDMVRWIRVVYTEFGDFTRDAEWLVTLREGDGFDYVEGFVFVNSDDPCNGWTTVPVGPNQYFDPVRIPSTAGPVLYCLELALHYRNQDHPSAVDMEVDRLLGRLRFVEGLKFSVDVTYMEFLLRVKRVEEDAKANGIWDAPHPWLNMFVSKSNIAEFDREVFKKILKHGVGGPILVYPLLRSKWDSRHSVVVPDSNIFYIIALLRFIPPPPKGPPTELLVEQNHEIIQLCYNRGFDFKLYLPHYQSKENWMRHYGDKWSRFVERKANFDPLAILAPGQKIFSRIPQPLSIT

SEQ ID NO: 39824 - protein, 91 aa, Glycine max
  Clone ID: 700794727_FLI.pep
LFHHPQRDHLQNCWWNKTMRLFSYATTEALISSYISLTTSHRRTGCDTMEISGPDSSRERPILIPWLFLHLDRKFFPESLKPCLSHKYYLD

SEQ ID NO: 39825 - protein, 121 aa, Glycine max
  Clone ID: 700794770_FLI.pep
MLAKVLTEKRLALIKAWEESEKTKAENRAYKKHSAVGLWEDSKKASVEAQLKKIEESMEKKKAEYVEKMKNKIAEIHRLAEEKKAIVEAQKREEFIDLEETASKFRSRGDVPRKFFACFGG

SEQ ID NO: 39826 - protein, 303 aa, Glycine max
  Clone ID: 700559428_FLI.pep
LERNKHQIKIAIMANKYHVRSISLPSRSHPSTIRVEEELSKIKTWEGTFTSTSGSIHTGISLIEDLYICLDDLLNMASTQKVISHHRGEKCVQEVLDGSVRILDICGITRDTMLQIKENVQALHSSLRRRKGDSCVEASVAEYKLFTKKMKKDAIKLITSLKQMDGKFGVSTLLDLDHHFAAVIRVLREVILMNLSLFQFFLSFFTVSSSNSKTSKWLLVTKLMHRGIKPCEDKSENINEFQCVEASLSTLLNEGTINDEKMQVVHERLEALENAIESVENGLESVFRRLIKTRASLLNIISQ

SEQ ID NO: 39827 - protein, 121 aa, Glycine max
  Clone ID: 700796835_FLI.pep
VSELMEVRGDSDTSMVSFSEFLVMFDDPDWGFGIMPTLVKLETGDRNRHGDTVCSVCRYPIIGSRFKEIKSHFSLCNQCYSEGKVPSSFKQDEYRFKEYGSEGEAMKDKCMCFSLQFHNEK

SEQ ID NO: 39828 - protein, 512 aa, Glycine max
  Clone ID: 700797085_FLI.pep
NHVLHTNNNPNTFTYEPTSVLDLCRSPSPEKKLTVPKPEPQHNNQLDLDDHVLPNSDWWESIMKDLTLPEDSPTPLLKTNPSCIPDFPPSSQDPSFDHPTPDFTSLSEIYNQNIPFNYPSNTLEPSFHDLNHSLHPHNNNWDFIEEFIRAADCYDSSHFQLAQAILERLNNRLLRSPMGKPLHRAAFHFKDALQSILSGSNRNGNGSNLLSSMAEIVQTIKTYKAFSGISPIPMFSIFTTNQALLETLNGSSFVHVIDFEIGLGIQYASLMKEIAEKAGPGTAPLLRITAVVPEEYAVESRLVRQNLNQFAQDLGISAQVDFVPLRTFETVSFKAVRFIDGEKIAVLLSPTIFSRLGGNGGSVGAFLADVRRMAPGVVVFVDGEGWTEAAAAASFRRGVVSSLEFYSMMLESLDASVASGGGGEWVSRIEMLLLRPKIFAAVEGARRRTPPWREAFYGAGMRPVQLSQFADYQAECLLAKVQIRGFHVDKRHAELVLCWHERAMVSTSAWRC

SEQ ID NO: 39829 - protein, 366 aa, Zea mays
  Clone ID: 700800659_FLI.pep
TPWGSTSPTSRSLFLGSTVSLLPAISWNVLVMMKSVWFMAIRSAVNWQEKWYWLYESHIAFTLPGLYRVVHGIDVFDPKFNIVSPGADMSVYYPYTETDKRLTAFHPEIEELIYSDVENSEHKFVLKDKKKPIIFSMARLDRVKNMTGLVEMYGKNARLRELANLVIVAGDHGKESKDREEQAEFKKMYSLIDEYKLKGHIRWISAQMNRVRNGELYRYICDTKGAFVQPAFYEAFGLTVIESMTCGLPTIATCHGGPAEIIVDGVSGLHIDPYHSDKAADILVNFFDKCKADPSYWDKISQGGLQRIYEKYTWKLYSERLMTLTGVYGFWKYVSNLERRETRRYIEMFYALKYRSLASQVPLSFD

SEQ ID NO: 39830 - protein, 285 aa, Zea mays
  Clone ID: 700802282_FLI.pep
YFEHSKTHKGKCTSNFLTTMATKILALLALLSLSVSATTAFIIPQCSLAPNAIIPQFLPSVTSMGIEHPIVQAYRLQQALAASVLQQPFAQLQQQSLAHLTIQTIATQLEQQFVPALSQLAAVNPVSYLQQQLLASNPLALANTAAYQQQLQLQQFLPALSQLAMVNPATYLQQQQLLSSSPLAVGNAATYLQQQLLQQIVPALSQLVVANPTAYLQQLLPFNQLDVANSAAYLQQRQQLLNPLAAANPLVAAFLQQQQFLPYNQISLMNLALSRQQPIVGGAIF

SEQ ID NO: 39831 - protein, 475 aa, Glycine max
  Clone ID: 700807591_FLI.pep
IGAGSDEIEISPHSQPLVGASSYINCNNNSTNTSCYSTPLSSSPKVNMNKIPTMVKHLVKEGMPLSLGTSTSLNSTVAEFSADPGFAERAAKLSCFGSRSFNGRTTQLCLNIAELAQRSSPLVENGKKQLPRVSSSPSLKVLGSQMGTQENKNSPLQDLMEVANSQEESAISEQTPNGDTGEKPSPYVNSRKRKGPSKGKAKETSTSTNPPMAAEASDDSNAKRSKPNEGEGNENGQVKAEEESKGGNNSNANDEKQNKSNSKPPEPPKDYIHVRARRGQATDSHSLAERVRREKISERMKLLQDLVPGCNKVTGKALMLDEIINYVQSLQRQVEFLSMKLASVNTRLDFSIESLISKDIFQSNNSLAQPIFPIDSSAPPFYGQQTQPNPAIHNNIPNGTMTHNSVDPLDTGMWIAGFGMHLPHLNGFNEGGFQYPITFSEDDLHTIVQMGFGQTANRKTPIQSQSFNGSNQEPL

SEQ ID NO: 39832 - protein, 200 aa, Glycine max
  Clone ID: 700807675_FLI.pep
VKCSQKTMDDIVGYGFRPTDEELVKFYLKHKLLDDDPCVHFILDVDLCEVEPWDLPLLLADSAVRFNGREWFFFSPVDYKYSNSKRVNRTTKCGFWKPTGKDRGIRSKDTNNVIGTKKTLVYYQGRVSSGVKSNWVIHEYHAVTFHESQRTFVLCRLMKKPGKTTEGGTDALICDEGGPSRSMVSDYENQATTQGIPSVS

SEQ ID NO: 39833 - protein, 214 aa, Glycine max
  Clone ID: 700829506_FLI.pep
NLSHPLLSSFSLTVITIQISIFLSFFCFLCFYFRVLKFVISPVDRFRSRFRYRGKNMAEEHRCQAPRFCANNCGFFGSPATQNMCSKCYRDFQLKEQQSSNAKMVLNQSLVPSPPPAVISQPSSSSSAAVDPSSAVVDDAPRESEEVKAPQQNRCMTCRRRVGLTGFKCRCGMMLCGTHRYPEQHACEFDFKGMGREQIAKANPVVKGEKLDKI

SEQ ID NO: 39834 - protein, 388 aa, Glycine max
  Clone ID: 700830416_FLI.pep
SFAIEMASTSNAIIQCTSSSSSFEYDVFVSFRGEDTRNSFTGFLFEALKKQGIEAFKDDKDIRKGESIAPELIRAIEGSHVFLVVFSKDYASSTWCLRELAHIWNCIRTSSRLLLPIFYDVDPSQVRKQSGDYEKAFSQHQQSSRFQEKEIKTWREVLNHVGNLSGWDIRNKQQHAVIEEIGQQIKTILGCKFSTLPYDNLIGMESHFATLSKLICLGPVNDVPVVGITGMGGIGKSTLGRSLYERISHRFNSCCYIDDVSKLYRLEGTLGVQKQLLSQSLNERNLEICNVCDGTLLAWKRLPNAKALIVLDNVDQDKQLDMFTGGRNDLLRKCLGKGSIVIIISRDQQILKAHGVDVIYQVEPLNDNDALQLFCKKAFKNNYIMSDF

SEQ ID NO: 39835 - protein, 319 aa, Glycine max
  Clone ID: 700830681_FLI.pep
CYKTLSSVAEKNHSFDSARRLILKFQEVSPWTTFGHVASNGALLEALEGEPKLHIIDLSSTLCTQWPTLLEALATRNDETPHLKLTVVAIAGSVMKEVGQRMEKFARLMGVPFEFNVISGLSQITKEGLGVQEDEAIAVNCVGALRRVQVEERENLIRVFKSLGPKVVTVVEEEADFCSSRGDFFKCFEECLKFYTLYFEMLKESFPPTSNERLMLERECSRSIVRVLACCGTGHEFEDDHGEFDCCERRERGIQWCERLRNAFSPSGFSDDVVDDVKALLKRYQSGWSLVVTQGDEHISGIYLTWKEEPVVWASAWKP

SEQ ID NO: 39836 - protein, 261 aa, Glycine max
  Clone ID: 700830806_FLI.pep
KHIWSQHTPLSLPQRLIKMKPKTCELCHQLASLYCPSDSAFLCFHCDAAVHAANFLVARHLRRLLCSKCNRFAAIHISGAISRHLSSTCTSCSLEIPSADSDSLPSSSTCVSSSESCSTNQIKAEKKRRRRRRSFSSSSVTDDASPAAKKRRRNGGSVAEVFEKWSREIGLGLGVNGNRVASNALSVCLGKWRSLPFRVAAATSFWLGLRFCGDRGLATCQNLARLEAISGVPAKLILGAHANLARVFTHRRELQEGWGES

SEQ ID NO: 39837 - protein, 245 aa, Glycine max
  Clone ID: 700830841_FLI.pep
SVGKNLKLKRVWEAGTMGSVCCCLSFDDFEDYVNPNSPVYRNCVCLSCLIQNLLSVYSSIFRRGDAHSIPSSIQGAASITSAASLDNSLSDMYRSPPRPLPYDAEPRYFRSQRDGLVSRREKGSSHSNEETEPLRSDADLDPESLNSGDKWNESACEAGSKEYHSKSSLRLQSTKYSTGVGLVYASSEEEDVCPTCLEEYTKENPKIMTKCSHHFHLGCIYEWMERSDNCPVCGKVMVFDETTFT

SEQ ID NO: 39838 - protein, 192 aa, Glycine max
  Clone ID: 700831164_FLI.pep
ICVSATTCSPPPPCSSHHPHHLLQSVDSSFLPLFFRMEPMDIVGKAKEDASLPKATMTKIIKEMLPPDVRVARDAQDLLIECCVEFINLVSSESNEVCNKEERRTIAPEHVLKALGVLGFGEYIEEVYAAYEQHKLETMQDSLKGAKWSNRAEMTEEEALAEQQRMFAEARARMNGGAIQSKEPEADQSLES

SEQ ID NO: 39839 - protein, 150 aa, Glycine max
  Clone ID: 700831485_FLI.pep
WARLWDNFIFTFIETETQGNDALPIYYMERKNKKVNKISYGTKPSIQHILFIGKSHFTADSEPSSWFLHPCNRSLLQHFGNWGGARDLPLSSSHLPRASHNAFSLPPPFFLRRPWPPCATYLGCPCRRWQGHSQISCSASESNPGLRPLL

SEQ ID NO: 39840 - protein, 237 aa, Glycine max
  Clone ID: 700831735_FLI.pep
RWSQIAARLPGRTDNEIKNFWNSTIKKRLKNMSSTTTTTSTSPNASETSISEPSNKDLNNMGGFISTLHNKHAGFVPMFGSSPSPSMMQTSTVFNNMIERFPMLEQGLINMPASGGYFEGTGSTPCFSQCEVHNNKGSCYLENEVFESVNIGVEGDMFVPPLENVTCKREETTNSSYFDDDINSILNNCNNIGIAENKAHHGVENLFQQELATATGEWDFEELMKDVSSFPFLDFSY

SEQ ID NO: 39841 - protein, 304 aa, Glycine max
  Clone ID: 700831948_FLI.pep
LQDKMGRARISLKHISNERSRKKTFMERRKVLIKKISEFSTLCGVEACLIVYDDGNGDIEPVTCPKDPVLAHSILQNYEFQKNQRPPKKFGIQDFVEDRKNIIEAEISKVHKEITNIKYPTSDPSFINMEEDQLRAFIALVDAKIRTCDHSLKNMHQSEANFMQNMAWGSASSSHPTPMEPLNNNGRVDVTNSIDQVYEAMQLVDAPFSYIPDMVQKSFNCLQNISQSQPILDVEDEMVGFSNRVDVSLDTTNQIADLLDWFDGPIIGWSDLVDWTSQPDESQNEQQGGGDLDGFQTECYNLNF

SEQ ID NO: 39842 - protein, 237 aa, Glycine max
  Clone ID: 700832243_FLI.pep
EAGLIPIPGYSSGTTTTSPFTLDWVNTSPAYDDGFKGITAKRSSSGRPLEQERKKGVPWTEEEHKLFLLGLKKYGKGDWRNISRNYVITRTPTQVASHAQKYFIRQLSGGKDKRRASIHDITTVNLTETTRTSSDESKRSASPQNSAMLSRHQQLNSNAASSGLNFQWSDQPNAGVAMALNPAHEQVFMSPYGLNSYGFKMQGQNLHRSSLHESSYLGPQTPNMVFQMQPSQHYSHA

SEQ ID NO: 39843 - protein, 159 aa, Glycine max
  Clone ID: 700832851_FLI.pep
ASSKVATTTTTTTNSDISSQQVWDGATMEMESQDNMNMSMSLQDLLTENDAVPPSHSHGRGKRKTLVEEPLVVDKVTLQKQRRMIKNRESAARSRERKQAYTVELESLVTHLEEENAILLKQEADRKRQRFNQLMECLIPVEEKRKPKPMLRRVNSSQW

SEQ ID NO: 39844 - protein, 114 aa, Glycine max
  Clone ID: 700833113_FLI.pep
TTHIILSFSASDENRSTHKRSINMMITAIESRFLSETGVLQLLSCPLNKFLVCDCTISLLNYSLYCIAKSSISTGSASCRTCIGRSLVGLTSTHQYPTIRKATFGWSSICLLLT

SEQ ID NO: 39845 - protein, 228 aa, Glycine max
  Clone ID: 700833230_FLI.pep
THGATRVPLSSLYYSHTHNCYLLSPHRAAIPLFPLSTPPMAEPMAVDSNPESGLDFESPFAWGKKRGMGGKKKDVQFYESFSFDGAEYAINDTVCLQSGIGGGEPHIGRLIKIWETRDKSRKVKVQWFFRPAEICKYLVGIEVKPNELFLACGGDGAKGFANVNPLEAIVGKCNVVCISKDVGNPQPSGEAKADYVYYRFFDVVQLKVVDQIDVKVAAGIEVKNVSNK

SEQ ID NO: 39846 - protein, 689 aa, Glycine max
  Clone ID: 700833804_FLI.pep
FFPPFFSNPTNMDDSGSKTKLLNPWMLHFQKLALELKCPLCLSLFKRPVLLPCNHLFCNSCLADCITAGSECAVCKTTYAQTDVRHIPFVENVVAIYRSLDATFCASLFQSRSSGDGRVLEPCQTILNSTSSSLKTGKLPRNLTNLNEVGVGQTFKSKSVVHDKAEELELSCGRGKPNPMQSSLMGLGGREQCGVMEMDVNQVTQSAPDSPPFCDTKGSDNDCSDQDSEHPLPPGRLENSSLNRASTGNGNLKERMGQLRSESSASETEGLARDLKRQKNLDFKPGKDPGAPLPTNASIYLCPIGRICSFCQSSKISEVTGPMLHYANGNLVTGDAAMKPNVVPVHRICIDWAPQVYFDGEVVKNLKAEVARGAKLKCSKCNLKGAALGCYVKSCRRTYHVPCAMDISDCRWDHEDFLLLCPVHSNVKFPCEKIRSKKQATQKHPTLSHLPSHHSNPIEASHDDDEKLVFCGSALSNEEKVLLINYASKVGATVTKFWTSNVTHVIAATDAHGACSRTLKVLMAILNGRWVLKMDWIKACMEEVNPVEEEPYEINLDNQGCQGGPKAGRLRALANEPKLFNGLKFYFSGDYVSTYKEDLEELIEVGGGSVLRSKEELESQRHECKGDSSQLLIVYNLDPPQGCKLGEEVSILWQRLNDAEDLAANTLQVIGHTWILESIAACKLQPFVN

SEQ ID NO: 39847 - protein, 356 aa, Glycine max
  Clone ID: 700559804_FLI.pep
MVCRSCVRSLVVQAGTFANRVRINGFGRSLQAVQSFSHWPIREYKTTTRMMVDTGSMSRAGPLVDTMPEKDDDGRFASGGWKSDDGRLSCGYSSFRGKRVTMEDFYDIKTLKIGGQSICLFGIFDGHGGSRAAEYLKEHLFDNLLKHPKFLTDAKLAISETYQQTDANFLDSEKDTFRDDGSTASTAVLVDNHLYVANVGDSRTIISKAGKANALSEDHKPNRSDERKRIENAGGVVMWAGTWRVGGVLAMSRAFGNRMLKQFVVAEPEIQDQEIDEQIELIILASDGLWDVVQNDDAVSLARTEEEPEAAARKLTEAAFSRGSADNITCIVVQFHHEKAELANPDKAEAASAQHE

SEQ ID NO: 39848 - protein, 216 aa, Glycine max
  Clone ID: 700833923_FLI.pep
SFFMDQETTRRNTMQECHVIAPTTTTATSSYRGVRQRKWGKWVSEIREPGKKSRIWLGSYESPEMAAAAYDVAALHLRGRAARLNFPELVETLPRPTSSKPEDVQVAAQQAAVMFRISPTMSPINNHQGCVNDNNIIKGSVVPVRVGLSPTQIQAINESPLDSPKMWMVQMAEALRFGFDDHSMMMLPSDDDDYALELSGWEEIQHESLWDSPEYM

SEQ ID NO: 39849 - protein, 225 aa, Glycine max
  Clone ID: 700834856_FLI.pep
FYRYLPKMSSADPEHREEEEAPAVGDDEDTGAHVAPIVKLEEVAVTTGEEDEDAILDLKSKLYRFDKDGNQWKERGAGTVKFLKHKASGKVRLLMRQSKTLKICANHLILPTMSVQEHAGNEKSCVWHARDFADGELKDELFCIRFPSIENCKSFMETFQEVAETQKAEDEKESSDAAGLIEKLSVEEKADAEKKDEEKSEDKTVEKESASGKESKAVEEPASSA

SEQ ID NO: 39850 - protein, 210 aa, Glycine max
  Clone ID: 700834896_FLI.pep
IKELILVVITKKGLGSIQAREISGFKEYLGEPIIGLGAPHHNRHNLLIRVEELLHRHLNPLHPLQNMNLPFLFLRVNLHRRLHHPGPTLGVHLHLQYLRHLLPQIPTHPRHLHKLPRPEAKRHRFARSSHIPNSFFSLKKSSGSIMRFMSPTSVNNFQIRSTAWHSLAAFSNAFFSTDSVTLSSSFFTERVQHSAICCVACSVLFSWFPT

SEQ ID NO: 39851 - protein, 233 aa, Glycine max
  Clone ID: 700835016_FLI.pep
LLGFGMGRGKIVIRRIDNSTSRQVTFSKRRNGLLKKAKELAILCDAEVGVMIFSSTGKLYDFASSSMKSVMDRYSKSKEEPCQLGSSASEIKFWQREAAMLRQQLHNLQESHRRKMMGEELSGLTVKELQNLENQLEISLHGVRMKKDQLLMGEIQELNRKGNLIHQENVELYKKVYGTQDDNETNRDSVLTNGLGIGEDLQVPVNLQLSQPQQQQQHYKASSGTTKLGLQLH

SEQ ID NO: 39852 - protein, 185 aa, Glycine max
  Clone ID: 700835346_FLI.pep
ACVCVASVVVLIPLSLSLSPPSLTLHASSSSLTLIPRNQIKISFSESNLRSRRSEMVDPTGKGSEIEVEDSNSNPNAPSSGNSPSSNNEQKKTCADCGTTKTPLWRGGPAGPKSLCNACGIRSRKKKRAILGINKGSNEDGRKGKRTGGALGKEVLLHRSHWKKLGEEEKAAVLLMSLSYGSVYA

SEQ ID NO: 39853 - protein, 122 aa, Glycine max
  Clone ID: 700835610_FLI.pep
AAPEAHPLLVAKEETNALKQEIQTLQKGISYLFEGGNKTMAIDELQLLEKNLETWIYHIRSMKMNIMLQEIQALKDKEGTLKAANKYLHDKIVENTAISNFAEFATDTSYPLIVQDGGFQLY

SEQ ID NO: 39854 - protein, 266 aa, Glycine max
  Clone ID: 700835771_FLI.pep
DPRPYINKREWTRRVESLATAQIQIIAMLCEDEEENPETRGKAPVTDINGFTGQSRSYSEESLLPRLATWQKSKDVAQRILNSVDYEMGRCTYTLGLGEANIAGKKIFLFDAVCRPREIHSLETTPFDDYVGNHENKTLHATQQIAECWTRSVKKLLERVTESVEKKALEKAASECHAVERIWKLLTEVGDMNLMMDPEDFLRLKKELGMMRTAGETVAFCFRSRELVEVARVCRNLREKVPEILEVEVDPKGGPGMMEAAMKVYS

SEQ ID NO: 39855 - protein, 447 aa, Glycine max
  Clone ID: 700836194_FLI.pep
LSRSCSDFRVFLMGLGNDEEEDNNNNNNNNKNNNDKVVDDGDAGGGKSFGSVSCSICLEVVADNGDRSWSKLQCGHQFHLDCIGSAFNIKGAMQCPNCRKIEKGQWLYANGCRSYPEFSMDEWTHDEDLYDLSYSEMSFGVHWCPFGNLARLPSSFEEGEFSSSAYHDVLGQHAIFAEHTAVSSASHPCPYIAYFGPIHPSSSNSGGTVSEASNFNHWNGSSVPSDMPTSYTFPAVDLHYHSWEHHSPPFSTASSRLVAADQPSVSPGSQRPARGGSDVPRSGSFMHPFLVGHRVGSSVASSMIPPYPGSNARTRDRVQALQAYYQPQQPPNSTTMRTPIASGTRRSSSHNGSPQLAPITTSSDQSGGFFLIPSSSSGHNFQEENHHLPNHFHAWERDHLPSLSLSHVDRDSGWRAYHQATSRSDPGTRSSSFRLRHGSDRTPSQNR

SEQ ID NO: 39856 - protein, 183 aa, Glycine max
  Clone ID: 700837816_FLI.pep
EMLDIRPGEALAVNFPLQLHHTADESVHVSNPRDGLLRLVRSLSPKVTTLVEQESNTNTTPFFNRFIETLDYYLAIFESIDVTLPRDSKERINVEQHCLARDIVNIIACEGKERVERHELFGKWKSRLKMAGFQQCPLSSYVNSVIRSLLRCYSEHYTLVEKDGAMLLGWKDRNLISASAWHC

SEQ ID NO: 39857 - protein, 134 aa, Glycine max
  Clone ID: 700838468_FLI.pep
YNWFQNRRARSKRKQQNVAPSANAESEVETEVDSKDKKTKPDEFQSPPSVSAVPADDNLGFQNHGSLQYLNPESNKPDSVFPSDASLRSTRNFNHVPVFDGLLSNSTSDYLTGKMEAPENYDLYQPAGDFNMAG

SEQ ID NO: 39858 - protein, 205 aa, Glycine max; identical to SEQ ID NO: 39767
  Clone ID: 700838943_FLI.pep

SEQ ID NO: 39859 - protein, 512 aa, Glycine max
  Clone ID: 700840104_FLI.pep
PLINQGAWTNEEDKSLLLIVQDIGIRNWFDIATSLGTSRTPFQCLARFQRSLNPSMLNSEWTEEEDSQLCSAVASFGARDWQSVASVLERRTGTQCSNRWKKSLCPEKKGSFTREEDIRITVAVMLFGRKWNQIANYVPGRIQSQCRDRYLNCLDPSLKWGGWTEEEDLRLEAAVVKHGYCWSKIAEEVPPRTDSQCRKRWKVLCPEYVPLLQEARKKQRSIIGCNFVDRESERPAITLNDFLPLPVPAPKSDVGASNLRKKAKSSNVPKKMSKKLAKRARLHTKEVQDTEVYSDDGIKTYGEVSACSNVPKKMRSKRHTKKTRNCPKEVVDIYCSEKVKTCIESSESQSTCIASSGNQDSDNITIACFLRDKSKEMLSRFTKDLSQASFSSRSIDVSNKQNVASDRRVGKPEDANTLTGGDHEEMTLACFLGNKSKKGSQAANGRGACSSTIIIPDDSGLSMSKHVEKETVLHGGVAEPMDIVVEEKDDELLTSFLQNRPTRQRKRPSRFL

SEQ ID NO: 39860 - protein, 45 aa, Glycine max
  Clone ID: 700840875_FLI.pep
NDISYRIVAFSRPKSEGSINNSLYLEGSSMQVFSLWFPQQCSHPH

SEQ ID NO: 39861 - protein, 481 aa, Glycine max
  Clone ID: 700841470_FLI.pep
RHHHRMGMEEESSNNSSIIEGGASLPSTGSDAKKRRVTYFYEPTIGDYYYGQGHPMKPHRIRMAHNLIVHYSLHRRMEINRPFPASPADIRRFHSDDYVDFLSSVSPENLADSAFSRHLKRFNVGEDCPVFDGLFPFCQASAGGSLGAAVKLNRADADIAINWAGGLHHAKKSEASGFCYVNDIVLGILELLKVHRRVLYVDIDVHHGDGVEEAFYTTDRVMTVSFHKFGDFFPGTGHVKDIGVGSGKNYAVNVPLNDGMDDESFRSLFRTIIQKVLEVYQPEAVVLQCGADSLSGDRLGCFNLSVRGHADCLRFLRSFNVPLMVLGGGGYTIRNVARCWCYETAVAVGVEPDNKLPYNEYYEYFGPDYTLYVDPSNMENLNTPKDMEKIRNTLLEQISQLPHAPGVPFQTTPPTLQLPEEAEEDMDRRPKLRKWDGEDYDSDPDEGGKANSKFPNVTAHMRDITDEMEEEKPEVHPSSCC

SEQ ID NO: 39862 - protein, 240 aa, Glycine max
  Clone ID: 700842114_FLI.pep
RRNMCGGAIISDFIGVKRGRNLAAQELWSELDPFSDFLGFDTTNSKNQPPLQKIPDKKVVSSCEKKKKSVVGAEKKKSDSGRARKNVYRGIRQRPWGKWAAEIRDPHKGVRVWLGTFPTAEEAAQAYDDAAIRIRGDKAKLNFPATTISAAAAPPPSKKQRCLSPDIITEESSSSSSHSTTGSTGESGGGNDELDLKQIEWFLGLENELPVSNNIGAEWDNMDDLWMLDDVVVPNRHLIY

SEQ ID NO: 39863 - protein, 146 aa, Glycine max
  Clone ID: 700842735_FLI.pep
LRPCRVWKLEKVTKIRSVWFVWRSLGLVGWQRRCHVSIGFMVIVLRSGWGCMGLALCVGMRCLWRRLIGGRRGRRKVVRGEGVMVVKFGLVFLSIGVVEETKIMIKLILVIQMMMMVLHQVMEMVLLKRVREGFFSFLCFSGRSRF

SEQ ID NO: 39864 - protein, 148 aa, Glycine max
  Clone ID: 700843008_FLI.pep
EAVHKSTRTERMRTLRSTSSTRKVNTASLQEHLPVLYPEVVLSVEVYHNVRKGTKIQELLVLGGQTLTALRDKIFCSTDQVMHKAGQHDPSGYFLIEDVFCPDLRDPSAIDLTRPILDWLRDSKEEAQKKWEYIITGELQKKQKAIMG

SEQ ID NO: 39865 - protein, 215 aa, Glycine max
  Clone ID: 700843580_FLI.pep
SDAVNDEQNKTLLDQAEEDDDEEEGQQKTKKQLKPKKTNQKRQREPRFAFMTKSEVDHLEDGYRWRKYGQKAVKNSPFPRSYYRCTSVSCNVKKRVERSFTDPSVVVTTYEGQHTHPSPVMPRSGVSAGYANNFGSVLPPGNYLSQYQHYHHQQQQQHLVNTLSSLGFPYNDSSSPKNAVFTQERRLCSNHGTNAFLRDHGLLQDVVPSHMLKEE

SEQ ID NO: 39866 - protein, 233 aa, Glycine max
  Clone ID: 700843928_FLI.pep
ATHIGEVVINKCFCTRRNPISISAAAIYLACQLEDKRKTQAEICKVTGLTEVTLRKVYKELLENWDDLLPSNYTPAVPPERAFPTTVIASGRSSTAKVDAVEVISSLDPEKLPDIKHSKPNEGPGMVHHPRGKDEAVGGYHASHSTLNQQSTFWQSQLPSGTHNHQNVLQGMDIDVSQRNHQQPEHMAEDTTNGAANGSSLKSNQLCSPPASSASSVMRQFSAPPSSGPSNVR

SEQ ID NO: 39867 - protein, 860 aa, Glycine max
  Clone ID: 700845087_FLI.pep
VWLKVAKMFPFGQKGQKIKGTMVVMQKNVLDINSITSVGGIVDQGLGFIGSAVDALTFAATKISIQLISATKADGGKGKIGKSTNLRGKITLPTLGAGEQAYDVNFEWDSDFGIPGAFYIKNFMQNEFYLKSLILEDIPNHGTIHFVCNSWVYNSKNYKTDRIFFANNTYLPSETPAPLLKYREEELKNVRGDGTGERKEWDRIYDYDVYNDLGNPDSGDKYARPVLGGSALPYPRRGRTGRGKTRKDPNSEKPSDFVYLPRDEAFGHLKSSDFLAYGIKSVSQDVLPVLTDAFDGNILSLEFDNFAEVHKLYEGGVTLPTNFLSKIAPIPVIKEIFRTDGEQFLKYPPPKVMQVDKSAWMTDEEFARETIAGLNPNVIKIIEEFPLSSKLDTQAYGDHTCIIAKEHLEPNLGGLTVEQAIQNKKLFILDHHDYLIPYLRKINANTTKTYATRTIFFLKDDGTLTPLAIELSKPHPQGEEYGPVSEVYVPASEGVEAYIWLLAKAYVVVNDACYHQIISHWLSTHAIVEPFVIATNRQLSVVHPIYKLLFPHYRDTMNINSLARKALVNADGIIEKTFLWGRYSMEMSAVIYKDWVFTDQALPNDLVKRGVAVKDPSAPHGVRLLIEDYPYASDGLEIWDAIKSWVQEYVSFYYKSDEELQKDPELQAWWKELVEVGHGDLKDKPWWQKMQTREELVEASAILIWIASALHAAVNFGQYPYGGLILNRPTISRRFMPEKGSPEYDALAKNPEKEFLKTITGKKETLIDLTVIEILSRHASDEFYLGQRDGGDYWTSDAGPLEAFKRFGKKLEEIEKKLIEKNKDETLRNRYGPAKMPYTLLYPSSEEGLTFRGIPNSISI

SEQ ID NO: 39868 - protein, 99 aa, Glycine max
  Clone ID: 700845163_FLI.pep
NIMFSLITYLFSCICINEASSRWLEPNFVRLISESHALVPITIPKHPNIPTQRLAEVAHCGAKHELVIIIILLNLEPVVDGILARVSQHTTSGHKPLSS

SEQ ID NO: 39869 - protein, 292 aa, Glycine max
  Clone ID: 700845329_FLI.pep
EKISEVEMLQQRSVPAPFLTKTYQLVEDPGTDEVISWGESGNTFVVWKHADFAKDLLPKYFKHNNFSSFVRQLNTYGFRKIVPDKWEFANEHFKRGQKELLSEIKRRKTVPQSSTHSPDAGKPGAEGNSPSNPGGCDDAGSTSTSSSSSGSKNQGSVETNTTPSHQLSSENEKLKKDNETLSCELARARKQCDELVAFLRDRLMVGPDQIDRIMRQGSCGSENAVGEGGGGGHCLKLFGVWLKGDTLTDKRNNHKRGREDQMGFGGPRLKESKPVVDFSRNRMMMINEKGKG

SEQ ID NO: 39870 - protein, 190 aa, Glycine max
  Clone ID: 700846438_FLI.pep
MIVDDEINAALVRPIPHGAKLHALIDACHSGTVLDLPFLCRMNRSGQYVWEDHRPRSGVWKGSSGGEVICFSGCDDHQTSADTSALSKITSTGAMTFCFIQAIERGHGATYGSILTAMRTSIRNVGGGGGGTGGGDVVTSLLSMLLTGGSLSGVGGLGQEPQLTACEAFDVHRKPFHYDTQYSLFCNLFS

SEQ ID NO: 39871 - protein, 337 aa, Glycine max
  Clone ID: 700847135_FLI.pep
RIFLCDKRLDWKKGKVNPFMSSIRARLRPRPMPLNIFPDMEGLPRIILTEATGSSAEVLLYGGQVVSWKNERKEELLFMSSKANWKQSKANRGGISVCFPQFGNLGSLEQHGSARNRLWSLDRDPSPLPPSDNQSSVDLIIKSTGVDLKNRPCSFEFRLRISLSAGKLILIPRVRNTDNKTLSFTLSISNYLSVSDISEVRVEGLETLDYLDNLLNRSRFTEQADAITFDGQMDRLYLRTPTKIAVIDHEKKRTFVLQKNAMPDAVIWNPGYRKAKALPDLGDADYKFMICVDSAAIETPLMLKPYEEWKGYQELSNVSSSYCSGQLDPSKVLYGFH

SEQ ID NO: 39872 - protein, 137 aa, Glycine max
  Clone ID: 700847859_FLI.pep
LRRLQTHTTNTRKPAFRWLGVRGKTWSESAQTNVKESQKRMFGSDITNINFKRKVDLSMDGQNFKTQNQQENISPRAQLEKKSLKKDAKQTSMSYQFGPFAPAYVHKVGTSENNSVKQVQDWESLAQEHRPQYQNQG

SEQ ID NO: 39873 - protein, 207 aa, Glycine max
  Clone ID: 700848185_FLI.pep
QVQRCADDKAVLITTYEGNHNHPLPPAATAMANTTSAAAAMLLSGSAAPSKEALTNSAGYYSSSSIPYASMATLSASAPFPTITLDLTQNPNNAMQLHRVPAGHGATFPLPLHAAAAGPHLLGHPLFFQQKLPPAALMPLLQRQPSSSMVETVSAAIASDPNFTAALMAAISSIIGVPRSSDDNNNGNGAIPGSPQLPQSCTTFSTN

SEQ ID NO: 39874 - protein, 132 aa, Glycine max
  Clone ID: 700848271_FLI.pep
QVTMIKPLTGQQYSEKVAENCVAIWRSLGIYTDSEAEAIDKFLSVFKDLTFPPGSSILFTVSPNGSLTISFSGDETIPEVTSAVIENKLLSEAVLESMIGKNGVSPAAKQSLASRLSHLFKEPGVCDPQSHK

SEQ ID NO: 39875 - protein, 364 aa, Glycine max
  Clone ID: 700848583_FLI.pep
TSSIIIDFIVPSKQTLQRFVSFHLRRTMSEAPPPPTADASPPPYWCYHCEKRVSVETLANLPDVVRGECKNGFVESMPTPSRSRSPSASSDDPYFGSQFLQVLRLIAQSARDDDASPPPPPSRSPENDFLRIELGGWDNDEENENDDDNGDEEFEEHEEAEDRSGNEDPHGGDDEDLRRRRRELLRLRIRDLATRTRSMRNRILDWAEILMGLEDNSIEFRLQLPESDRYVGNPEDYVDAAEYEALLQTLAESDGGGRRGAPPASKAALEALPTVKIASESEAVACAICKDLLGVGDAAKRLPCGHRYHGDCIVLWLSSRNSCPVCRFELPTDDKEYEEERVVIAASSNSNGASSSGGGGSAIV

SEQ ID NO: 39876 - protein, 387 aa, Glycine max
  Clone ID: 700850709_FLI.pep
IAYYLYSLKNMLFSSTSLTTGLQTGWIPEYQKLRCRVNYHALRFTNPILAMGEKLVHRMRMRSKHYIALHLRFEPDMLAFSGCDYGGGEKEQKELGVIRRRWKTLHKSNPDRARRQGRCPLTPEEVGLMLRALGYGSDIHIYVASGEVYGGKRTLAPLRALFPNFHSKETIATKEELEPFSSFSSRMAALDFIVCDESDVFVTNNNGNMAKILAGRRRYFGHKPTIRPNAKKLYRLFLNRSNSTWEAFASSVRTFQKGFMGEPKEVRPGRGGFHENPSTCICEDSAAAKVDKNSQSRKYRKDNTTKKNVANDEPDVGNVSEWPDMDDDDDDDQNDLAEKGTFNETISDYDALTSRILSWRKLYQISEGALFSVDVPVDLLWLFAPIT

SEQ ID NO: 39877 - protein, 570 aa, Glycine max
  Clone ID: 700853019_FLI.pep
FKFRNNCGICSNSVKTGQGTAIYTAECGHAFHFPCVVSVSHARTNVCPVCDATWNDVPLLQNNAEKQNQPIHHHRSDSVSSYDDDEPLPSPLTCSAQIAPIPEDEENDDVSEFPGFFVDPKPQSSLRQNDGGDSRSVRVKLMPECAVISVSQSHETRALVLRVKAPPVLSPPRWRRPPMDLVTVLDVGNSMSGAKLHMLKRAMRLVISSLGAADRLAVVASAADSKRLLPLRRMTAQGQRAARRVVDRLVCGHGNSVGEEAMNIAAKVLEDRRERNTLAKILLLSDGHDNANNKNQRRFLSHVSSSIRFDCIKVPVLSYGFETKRTGLMHEPLEDDFALYVDRTLSVAVHDLRIQLGFSAPAEIRAVYSCSGGPTALSTSAARLGDLYAEEEKELLVEVRVPTSALGTHHVMTLRCVNINKDPVSQEFVYGAEHVFTVVPPPKSIPICGGRVERLRNVFITSRAVAESRRLAKHNDFSSAHHLLSSARALLAQLGSAEEYVRGLEAELVELQWQKQQQRVEREARWVDESGEVLTPTSAWRAAEKLAKMARMKKSLNKVSDLHGFENARF

SEQ ID NO: 39878 - protein, 409 aa, Glycine max
  Clone ID: 700853408_FLI.pep
VLRCTVLRSLCIRFVDMGAYDQVSLKPLDSSRKRKSRSRGYGTRSVAETIAKWKEYNEHLYSGKDDSRTTPKAPAKGSKKGCMKGKGGPQNSQCNYRGVRQRTWGKWVGEIREPNRGSRLWLGTFSSAQEAALAYDEAARAMYGPCARLNFPGITDYASFKESLKESPMAASSSCSSAETATSDTTTTSNQSEVCAAEDVKENPRLVNVNDKVNDCHKAYEAASPTSRMKQEPKDEAVDHMVPGAGKILDVRPEGTHDAGQVAEDVNKDQMDLPWIDGFDFSDNYLNRFSTDELFQVDELLGLIDNNPIDESALMQSLDFGQMGFPGDGNPQVDDTLSSFIYQLQNPDAKLLGSLPHMEQTPSGFDYGLDFLKTVESGDYNGGGEEPRFLNLDDDLNPDSKGMQARKDD

SEQ ID NO: 39879 - protein, 156 aa, Glycine max
  Clone ID: 700853910_FLI.pep
SLEVEDFKDVKSGYSITFNFNANPYFEDTKLVKTYTFLEEGTTKVTATPIKWKEGKGIPNGVNHEKKGNKRAPTDVSFFSWFSDTEQKDDIDDIHDEVAELIKDDLWPNPLTYFNNEEPDEEEGDEDEADDEGKEDESDDDDDNQEDDDEGEEDAK

SEQ ID NO: 39880 - protein, 151 aa, Glycine max
  Clone ID: 700862801_FLI.pep
SSTRTSTDTLTDIHSVSCFHAMQQARQKCIMHTQSKERRRAVSCVLISEGPGEVHEDILERRHLIIPESGIHVIIRKLAVALPLPLALHLARKLRRHHLLRTARLRRVQPRHRVGSLEVQAIRRRILRLHVFHFVTFNFVDTTRWWRCWLL

SEQ ID NO: 39881 - protein, 378 aa, Glycine max
  Clone ID: 700864991_FLI.pep
SRTTITSFSVPSRFNTDNPQKYPLICASSSMAPPPPVEHNGDSAATASASASAESQRSIPTPFLTKTYQLVDDQSIDDVISWNDDGSTFIVWNPTVFARDLLPKFFKHNNFSSFVRQLNTYGFRKVVPDRWEFSNDYFRRGEKRLLCEIQRRKISSPAPSPTAPTTVTVPMPLTAIPIISPSNSGEEQVISSNSSPLRAPAELLDENERLRKENVQLTKELAEMRSLCNNIYSLMSSYGNKNGNSNGSYQTDGGAGGAQGSRESGMTAVKPLDLMPVKRSSGEDAADTVPKEINLIPNPKLFGVAIGAKRAREGGGGSGSGRDCGGGGGGGEEDTLLRLHHVGSADVKSEPLDCQNHRENQETPWLSPCHRTNQRVCN

SEQ ID NO: 39882 - protein, 210 aa, Glycine max
  Clone ID: 700865957_FLI.pep
VGDLNPTNLDDLLLASADPSVLSQLQSGLQMRQSMNNHLRASYPSNVPSSPVRKPSSFGFDSSAAVATAMMNSRSAAFAKRSQSFIDRGAAATHHHLGGMSSPSNPSCRVSSTLSGWSSPTGKLDWGVNGDELNKLRKSASFGFRNSGVTASSSSSPIAQPEFGTEQDVSWVHSLVKDVPSERSEKQQYDHLSKEMLLSPWVEAQYDLLQ

SEQ ID NO: 39883 - protein, 863 aa, Glycine max
  Clone ID: 700866989_FLI.pep
SESVWLKVAKMFPFGQKGQKIKGTMVVMQKNVLDINSITSVGGIVDQGLGFIGSAVDALTFAATKISIQLISATKADGGKGKIGKSTNLRGKITLPTLGAGEQAYDVNFEWDSDFGIPGAFYIKNFMQNEFYLKSLILEDIPNHGTIHFVCNSWVYNSKNYKTDRIFFANNTYLPSETPAPLLKYREEELKNVRGDGTGERKEWDRIYDYDVYNDLGNPDSGDKYARPVLGGSALPYPRRGRTGRGKTRKDPNSEKPSDFVYLPRDEAFGHLKSSDFLAYGIKSVSQDVLPVLTDAFDGNILSLEFDNFAEVHKLYEGGVTLPTNFLSKIAPIPVIKEIFRTDGEQFLKYPPPKVMQVDKSAWMTDEEFARETIAGLNPNVIKIIEEFPLSSKLDTQAYGDHTCIIAKEHLEPNLGGLTVEQAIQNKKLFILDHHDYLIPYLRKINANTTKTYATRTIFFLKDDGTLTPLAIELSKPHPQGEEYGPVSEVYVPASEGVEAYIWLLAKAYVVVNDACYHQIISHWLSTHAIVEPFVIATNRQLSVVHPIYKLLFPHYRDTMNINSLARKALVNADGIIEKTFLWGRYSMEMSAVIYKDWVFTDQALPNDLVKRGVAVKDPSAPHGVRLLIEDYPYASDGLEIWDAIKSWVQEYVSFYYKSDEELQKDPELQAWWKELVEVGHGDLKDKPWWQKMQTREELVEASAILIWIASALHAAVNFGQYPYGGLILNRPTISRRFMPEKGSPEYDALAKNPEKEFLKTITGKKETLIDLTVIEILSRHASDEFYLGQRDGGDYWTSDAGPLEAFKRFGKKLEEIEKKLIEKNKDETLRNRYGPAKMPYTLLYPSSEEGLTFRGIPNSISI

SEQ ID NO: 39884 - protein, 180 aa, Glycine max
  Clone ID: 700560163_FLI.pep
DAELEREEPCEASDEEKRSAVNAMDNIFSVLTHYSEATGRLVCQKRCSIPDVGLLSTSLIISLGRIKQSFVLTNPRLSDMPIVYASDAFLKLTGYAKNEVLGRNCRFLGGTDTDTSTLHLIRESIKTEQPCTVRILNYRKDKSSFWNFLHISPVRDASGKSIVVPDYNFTCEDSVFCLPI

SEQ ID NO: 39885 - protein, 245 aa, Glycine max
  Clone ID: 700867665_FLI.pep
KLLGNRIINPCDPNMGIDDPVSKYARGDGLEVVGKRLALMSEKFGIPVEFHGVPVFAPNVTREMLDIRPGEALAVNFPLQLHHTADESVHVSNPRDGLLRLVRSLSPKVTTLVEQESNTNTTPFFNRFIETLDYYLAIFESIDVTLPRDSKERINVEQHCLARDIVNIIACEGKERVERHELFGKWKSRLTMAGFRQCPLSSYVNSVIRSLLMCYSEHYTLVEKDGAMLLGWKDRNLISASAWHC

SEQ ID NO: 39886 - protein, 928 aa, Glycine max
  Clone ID: 700867833_FLI.pep
SEIINFTSKLLSESQVKVQRNTLKMPALILDEKEKMISKFVSSNGLVEDPLAIEKERTMINPWTPEEREVFLEKFAAFGKDFRKIASFFDHKTTADCVEFYYKNHKSDCFEKIKKQDGDKLGKSYSAKTDLIASGNKKLRAGSSLLGGYGKVKTYRGEDFIEKSSSFDILGDERETAAAADVLAGICGSLSSEAMSSCITSSVDPVEGNRDRKFLKVNPLCKLPMTPDVTQDVDDETCSDESCGEMDPTDWTDDEKTAFLRAVSSFGKDFAKIARCVGTRSQEQCKVFFSKGRKCLGLDLMRPIPENVGSPVNDDANGGESDTDDACVVETGSVVETDKSGTKTDEDLHLYGTNTYHDESHPVEARNLSAELNESKEINWTEVDLEDANVTSGACQINIDSKQGCDGSEVFLCGSNKSGSVGERADIIMSDSTEVENDKANKLGGAATELISAPNTREPCQSNSIAEDRMVVSEVSSGGLGNELERHRVSSTLCVDDRDNKHEADSGVIVDMKSSVHDLSTMINSSISSLGNSCSGLSFSSENKHVPLGNPRVSALSMDNLHALLQNTVAVDVQCEKTASQDQMSSTCDIRGGRDMHCQNSISNGDHQHITGNLSDHVDAVSILQGYPLQVPVKKEMDSDMNCTSSATELPLLPQKIEHDDDHIKAFQSSDSDKTFRNGDVKLFGKILTNPSTTQKPNVGAKGSEENGTHHPKLSSKSSNPKITGHHSADGNLKILKFDHNDYVGLENVPMRSYGYWDGNRIQTGLSTLPDSAILLAKYPAAFSNYLTSSAKLEQPSLQTYSKNNERLLNGASTFTTRDINGSNALIDYQMFRRDGPKVQPFMVDVKHCQDVFSEMQRRNGFEAISSLQQQSRGMNGVGRPGILVGGSCSGVSDPVAAIKMHYSNSDKYGGQTGSIAREDESWGGKGD

SEQ ID NO: 39887 - protein, 385 aa, Glycine max
  Clone ID: 700868056_FLI.pep
HHPSLFFLVHGATFSMAKKSQLRTQKNNVTTNDDNNLNVTNTVTTKVKRTRRSVPRDSPPQRSSIYRGVTRHRWTGRYEAHLWDKHCWNESQNKKGRQVYLGAYDNEEAAAHAYDLAALKYWGQDTILNFPLSNYLNELKEMEGQSREEYIGSLRRKSSGFSRGISKYRGVARHHHNGRWEARIGKVFGNKYLYLGTYATQEEAATAYDLAAIEYRGLNAVTNFDLSRYIKWLKPNNNTNNVIDDQISINLTNINNNNNCTNSFTPSPDQEQEASFFHNKDSLNNTIVEEVTLVPHQPRPASATSALELLLQSSKFKEMMEMTSVANLSSTQMESELPQCTFPDHIQTYFEYEDSNRYEEGDDLMFKFNEFSSIVPFYQCDEFES

SEQ ID NO: 39888 - protein, 712 aa, Glycine max
  Clone ID: 700868572_FLI.pep
FSISFSITQRSLLLQPKYLFQCLLYSKRIWDIMCSDSKSKLSSPTLVVMENSNIQKQNLDGLYNSVLLELSASDDYEAFKREVEEKGLDVNEAGFWYGRRIGSKKMGSETRTPLMIASLFGSAKVLNYILLQKGGGVDVNRVCGSDRATALHCAVAGGSESSLEIVKLLLDAGADAECLDASGNKPVNLIAPAFDSLSKSRRKALEMFLRGGGERDELMSQEMELQMFSVPEKKEGSDNKKEYPVDISLPDINNGVYGTDEFRMYNFKVKPCSRAYSHDWTECPFVHPGENARRRDPRKYPYSCVPCPEFRKGTCQKGDSCEYAHGVFESWLHPAQYRTRLCKDETGCARKVCFFAHKPEELPPVYASTGSAMPSPKSYSASGLDMTAMSPLALSSTSLPMPTVSTPPMSPLAAASSPKSGSMWQNKINLTPPSLQLPGSRLKAALSARDLEMEMELLGLESPARQQQQQQQQLIEEIARISSPSFRSKEFNRIVDLNPTNLDDLLASADPSVFSQLHGLSVQPSTPTQSGLQMRQNMNHLRASYPSNIPSSPVRKPSAFGFDSSAAVATAVMNSRSAAFAKRSQSFIDRGAATHHLGLSSASNSSCRVSSTLSDWSSPTGKLDWGVNGDKLNKLRKSTSFGFRNSGVTASPIAQPEFGAEPDVSWVHSLVKDVPSERSEIFGAEKQQYDLSKEMLPPWMEQLYIEQEQMVA

SEQ ID NO: 39889 - protein, 867 aa, Glycine max
  Clone ID: 700868630_FLI.pep
INQSSESVWLKVAKMFPFGQKGQKIKGTMVVMQKNVLDINSITSVGGIVDQGLGFIGSAVDALTFAATKISIQLISATKADGGKGKIGKSTNLRGKITLPTLGAGEQAYDVNFEWDSDFGIPGAFYIKNFMQNEFYLKSLILEDIPNHGTIHFVCNSWVYNSKNYKTDRIFFANNTYLPSETPAPLLKYREEELKNVRGDGTGERKEWDRIYDYDVYNDLGNPDSGDKYARPVLGGSALPYPRRGRTGRGKTRKDPNSEKPSDFVYLPRDEAFGHLKSSDFLAYGIKSVSQDVLPVLTDAFDGNILSLEFDNFAEVHKLYEGGVTLPTNFLSKIAPIPVIKEIFRTDGEQFLKYPPPKVMQVDKSAWMTDEEFARETIAGLNPNVIKIIEEFPLSSKLDTQAYGDHTCIIAKEHLEPNLGGLTVEQAIQNKKLFILDHHDYLIPYLRKINANTTKTYATRTIFFLKDDGTLTPLAIELSKPHPQGEEYGPVSEVYVPASEGVEAYIWLLAKAYVVVNDACYHQIISHWLSTHAIVEPFVIATNRQLSVVHPIYKLLFPHYRDTMNINSLARKALVNADGIIEKTFLWGRYSMEMSAVIYKDWVFTDQALPNDLVKRGVAVKDPSAPHGVRLLIEDYPYASDGLEIWDAIKSWVQEYVSFYYKSDEELQKDPELQAWWKELVEVGHGDLKDKPWWQKMQTREELVEASAILIWIASALHAAVNFGQYPYGGLILNRPTISRRFMPEKGSPEYDALAKNPEKEFLKTITGKKETLIDLTVIEILSRHASDEFYLGQRDGGDYWTSDAGPLEAFKRFGKKLEEIEKKLIEKNKDETLRNRYGPAKMPYTLLYPSSEEGLTFRGIPNSISI

SEQ ID NO: 39890 - protein, 137 aa, Glycine max
  Clone ID: 700868689_FLI.pep
CNSVRDTVKCKFPFIEKRTETASKELEKKASSLRNLERKFYSSYSMVGISLPDSAPDNGQVLDARDPLAEKKLELATCQRRVEDEMLRHSKAVEVTRAMTLNNLQTGLPGVFQALTSFSSLFTEALESVCTRSYAIK

SEQ ID NO: 39891 - protein, 783 aa, Glycine max
  Clone ID: 700869601_FLI.pep
KFYLKMNSDNQQQSEEPGNAQKSLEHSADIAQPQSPNQTTAGTSTLTAEDTEKPKCAVCGEENAKMHYGVLACLGCKGFFRRALKKLNEYECLRNNNCIIDKQERNSCRSCRLQKCLDVGMDPAAVRPDRDFTGKQQLARRFSHSKGSSNHKSSQPMGKCSGERKGGGRDEETAGNWAHRLPVEMRTMVMTLQNIEAKVVHGDTAKDAAEIYPLRVNTIREIIEEPTKLRGRRTEMRYEPYRMAKNEEFSVIVYRRLIAAIDWVELLAERMGGLSIEDRIALVKSCFGPLTLFKCSARTAVVTSNENLLCLCNFAYVPREINKAYNDAYHLENGLVDRLLNELVAPFRKIHLAEEEIVCVSAIIVLNPMARDLSENAAEKVFQLRNRVYTTLYQIIKECRPNCNTNATFGNLLLYLPIITSLANAMSDNLRFAQTFSAHGGSPLLTSLFGCFPVEPFVDSEMALVKAVEGKCIAEKRVQTEEEKKIKAKEKKETVLQKQKRRKSDAGTQTEWKSQLNQITRKRRLCPLASVEESNEFHLLKAPCSYTLTEMFDDRINNCGVDEIEEEEEDNMEKNYGNNATLPFGTENRRLIRTTSYQQMHLQQGIDEQQEFRRPSATWTNAPSQNQSQSHGQQQTQNWPQPQQQQCWPTNSASTSKGIPAILPPTTQIQGLFLNEPSSSSQQQYFQGARQYGDSQWTVPPSSSMQMQSNFTPIYLPYSSSISPHFASNIPTQIHYSQSAAQYFPQQFAPSFYPPEPQSQQQFTYLTVNPQQQFFNDNNTNNN

SEQ ID NO: 39892 - protein, 285 aa, Glycine max
  Clone ID: 700870005_FLI.pep
NMVDLDWQTKMVHSNMPPKSPKLSLPDNNIPIPLRQNDITAASSPICAAYDNYLRLPELRALWASNDFPNWANEPILKPTLHALEITFRLLATVLSDPRPYINKREWTRRVESLATAQIQIIAMLCEDEEENPETRGTTPPVSDINGFIAQSRSYSEESLLPRLATWHKSKDVARRILDSVEYQMMRCTYTLGLGEANLAGKKIFLYDAVCRPSEIHSLETTPFDYVGNCENKTAARDAADRGVLDARGEEAAGESGGVGGEKNVGEGGEGVSRGGADLEVVNGG

SEQ ID NO: 39893 - protein, 561 aa, Glycine max
  Clone ID: 700870127_FLI.pep
VAENVEVIIIEDPYDILRTRTMRVDALSTMSSLKLLYLGYWNVGFEINFSGTLAKLSNELGYLSWEKYPFECLPPSFEPDKLVELRLPYSNIKQLWEGTKPLPNNLRHLNLSGSKNLIKMPYIGDALYLESLDLEGCIQLEEIGLSVVLSRKLTSLNLRNCKSLIKLPRFGEDLILKNLDLEGCKKLRHIDPSIGLLKKLEYLNLKNCKNLVSLPNSILGLNSLQYLILSGCSKLYNTELFYELRDAEQLKKIDIDGAPIHFQSTSSYSRQHQKSVSCLMPSSPIFPCMSKLDLSFCNLVEIPDAIGIMSCLERLDLSGNNFATLPNLKKLSKLVCLKLQHCKQLKSLPELPSRIGFVTKALYYVPRKAGLYIFNCPELVDRERCTDMGFSWMMQLCQYQVKYKIESVSPGSEIRRWLNNEHEGNCVSLDASPVMHDHNWIGVAFCAIFVVPHETLSAMSFSETEYPFHLFGDIRVDLYGDLDLELVLDKSDHMWLFFVNRHDIIADFHLKDKYLGRLVSRYDGVLKESYAEVKKYGYRWLYKGDIEQRKHKFGEIEENVS

SEQ ID NO: 39894 - protein, 629 aa, Glycine max
  Clone ID: 700870331_FLI.pep
VKLHAEEGSDEVYCQVVLVPESEQVQQKLREGEFDADGEEEDAEAVMKSTTPHMFCKTLTASDTSTHGGFSVPRRAAEDCFPPLDYSQQRPSQELVAKDLHGQEWRFRHIYRGQPRRHLLTTGWSAFVNKKKLVSGDAVLFLRGEDGELRLGIRRAAQLKSGSTFSALSGQQGSPTSLMDVVNALSARCAFSIHYNPRVSSSEFIIPIHRFVKSLDYSYSAGMRFRMRFETEDAAERRFTGLIVGIADVDPVRWPGSRWRCLMVRWDDLEATRHNRVSPWEIEPSGSASTANNLMSAGLKRTKIGLPSAKLDFPVSNAIGTSDFGESLRFQKVLQGQEMLGVNTTYDSFNAQSHQLSDLRRCYPGSNYPRIAATGNSIGISQVSSNVSNNGIGFSESFRFQKVLQGQEILPSQPYGRALSVDEACGNGRFGLFDGFQAMRSRNGWSSHVSNNSSHLHPPVPSGQVSSPSSVFMFQQAVNPVLNSDYNNQIGQVMGDKVHQRVSYASEVKGGKFVSTPYEPLLRGLSQEGTNSFGLSNFHNQLDSSRSHDSVSVLRASQELVPSCKSRCRVFGFSLTEGAPVASKEATDSSAVACAGPSFTRHVEDDFHPGHSLRSKAVASYCTKGVLQY

SEQ ID NO: 39895 - protein, 416 aa, Glycine max
  Clone ID: 700870423_FLI.pep
SGKKCREKFENLYKYYKKTKEGKAGRQDGKHYRFFRQLEALYGENSNQASVPETNFGSGSLRFHTSSHNNNPSQTNQEMFQSQKHCDSLSLTNSTDLDTSSSDDNDQNSTGRELNKDNDSMEKRRKRVSGRSWKVKIKDFIDSQMRKLVEKQEEWLDKLTKTLEQKEKERVLREEEWRRQESVRLEREHKFWAKERAWIEARDAALMEALHKLTRNEIMKSTHSHEGLMVTGIQIHSENQNEDGSEILNSTAARGAESWPESEIARLQQLRAEMETRYMQSGFSEEVMWEEIATKMACFGYERSALVFKEKWESISSNYARSAKDGSKKRKEDSRSCFYFDNSDQSSLYNQGGAYCDINDQRHETGRLQTNDGSSPSNSNVGNAVAGDNCFPFLMTEGGNLWENYSLKVNKACQNQ

SEQ ID NO: 39896 - protein, 90 aa, Glycine max
  Clone ID: 700870726_FLI.pep
FLLPLLALVMRVMTPTRLQFSVDMLQFLLRRTFVFSNLSKSMTLWNAFELRKAAKANCPGGNKSGASVSIILSTSNLAVSCKVYMHQEKV

SEQ ID NO: 39897 - protein, 201 aa, Glycine max
  Clone ID: 700870883_FLI.pep
EDKERMAFAGTTQKCMACDKTVYLVDKLTADNRVFHKACFRCHHCKGTLKLSNYNSFEGVLYCKPHFDQLFKRTGSLDKSFEGTPKIAKPEKNLEEKPAAAKVSSMFGGTRDKCAGCQKTVYPTEKVTVNGTPYHKSCFKCCHGGCVISPSNYIAHEGKLYCKHHHVQLIKEKGNLSQLEGDNEKSATNGKINGEEVATET

SEQ ID NO: 39898 - protein, 408 aa, Glycine max
  Clone ID: 700871314_FLI.pep
LVMEKLLEKLRCRTLTVTNGSEAIRYAMGEVKFDVIMMEFRLPQVNGADVARMIRDTKNANTHTPIVAVTGYLKELQAPHYFDALIEKPPTVAKLTDTLSRLCQWKAPPPGWTPNQVYPSMMPSGLRQESSRQEDSPTTSNSSGYPPVPSASYRGSSREDSISSSFFGDNDSRAGEDMSVRVHNADDWRERDIARAMSGLGISDDAANADHKGAIPNRIGAPDLPHGESAPAVLEEATIRRQRSAEQVGAKRRILETRKHESAESGDDEDDELGHAPVRTRSPKTRPKSTSKLGIEMMRTNSRGSVISVEDVGQADSALPSSPPPMITEDPAAEEHESNLDAPTVAPVLLTPPVMFPEEPGDDVADFVIETPKSHKDATSPDPDPTPKAKSARTPDSEPTGLDSATDT

SEQ ID NO: 39899 - protein, 182 aa, Glycine max
  unsure (1)..(182): unsure at all Xaa locations
  Clone ID: 700872990_FLI.pep
IFGNVAIAARYSQRVHGLKRVFIIDFDVHHGNGTNDAFYDDPDVFFLSFHQDGSYPGTGKFDEVGSGDGEGTTLNLPLPGGSGDTAIRTVFDEVIVPCAQRFKPDIILVSAGYDGHVLDPLANLQYTTGTYYMLASSIKQLAKDLCGGRCVFFLEGGYNLKSLSYSVADTFRALLGDRSLAX

SEQ ID NO: 39900 - protein, 163 aa, Glycine max
  Clone ID: 700873131_FLI.pep
MLLSSVHSLIVILLLATAFLVIILIIHLRYRLLRFFFIPTSRTFRLFLVISSHVLLVLHFPFLRLCHIRCFFSIRHRLPFCSSSFAHSRHCFVVGMFLVEHLPEFLHENEESTWRPLWLVRIFRCLPLSGGFPSLGGGALLIHSKFGIGSLRFGLGLSSFHDG

SEQ ID NO: 39901 - protein, 412 aa, Glycine max
  Clone ID: 700873188_FLI.pep
SSPIKKNLFPFSLESSSSPTLNCFYPKPQVTFHSFTFTHSMKGVTVKVEETMAYANAASTSPTTSSNLSPQPMEGLHEVGPPPFLTKTFDVVEDPSTNDIVSWSRSRNSFVVWDSHKFSTTILPRYFKHNNFSSFVRQLNTYGFRKIDPDKWEFANEGFLAGQRQLLKTIKRRRHVTVTQTQSHEGGSGACVELGEFGLEGEMERLRRDRTVLMAEIVRLRQQQHNSREQLLSMETRLQATEKKHQQMMNFLAKALNNQAFIQQFLQRNAQNKELQGARRKRRLTATPSVENLQQDHFALSIEEGSATIESQMESFFSAACNDPLESNSELKDPILSSVPVASGSNLGEVSDSVWEDLLNQDLVAGDPEEEVVIGDFSQVDVPVEDLIADADEWSEDLQNLVDHMGYLGSKP

SEQ ID NO: 39902 - protein, 120 aa, Glycine max
  Clone ID: 700874291_FLI.pep
VQRSVEDPSVLVTTYEGEHNHGQQHQTAEISINSSSKSETPRPAVSPSAMNIRSSAAAGPIVTLDLVKSKVVDINAQKSSLQQFLVHQMATSLTRDPNFTAALASAISGRILDDTSVGKR

SEQ ID NO: 39903 - protein, 344 aa, Glycine max
  Clone ID: 700874479_FLI.pep
YYSIEQKMGVPERDPLAQLSLPPGFRFYPTDEELLVQYLCRKVAGHHFSLPIIAEVDLYKFDPWVLPGKAVFGEKEWYFFSPRDRKYPNGSRPNRVAGSGYWKATGTDKIITTEGRKVGIKKALVFYIGKAPKGSKTNWIMHEYRLLDSSRKHNLGTAKLDDWVLCRIYKKNSSSQKVEANFLAMECSNGSSPSSSSHVDDMLGSLPEINDRCFTLPRVNSLRTMHQQDEKFGSPNMGSGFFSDWVNSTDLDSISEFESGCQTQRMVNYDCNDFFVPSLPPLGHVDYMVDAPLEEEVQSGVRTRRVDGPGHFQPNPDTRLLPGSGDPFGFGFIMGQQVGFGVRE

SEQ ID NO: 39904 - protein, 100 aa, Glycine max
  Clone ID: 700875511_FLI.pep
EYSCISSLFYGSHFTLHTSSPPCLLHIRYHLRAELSLAILGVKNLVASYRPCPQKCFGGVYNSNVLSTICVLNSNYVHPYRLVSCLIPWSIVNLPDGLIG

SEQ ID NO: 39905 - protein, 308 aa, Glycine max
  Clone ID: 700561286_FLI.pep
CLLGGFLADSFLGRYKTIGIFASIQTLGTATLAISTKLPGLRPPPCHANSDSCKQANGFQMGILYLSLYLIALGTGGLKSSVSGFGSDQFDEKDEKEKSQMAYFFNRFFFFISFGTLAAVTVLVYLQDEVSRSLAYGICSVSMIIAIIVFLSGTKRYRYKRSLGSPIVHIFQVIAASIKKRKMQLPYNVGSLYEDTPEASRIEHTEQFRFLEKAAIVAEDDFETNLCGSGPNPWKLCSLTRVEEVKMMVRLLPVWATTIIFWTIYAQLITFSVEQASTMERNIGSFQIPAGSVTVFFCGCNTNHSGCL

SEQ ID NO: 39906 - protein, 245 aa, Glycine max
  Clone ID: 700875787_FLI.pep
GMSVISLVSLANAGFSEIRGKHLNYSKFWNANPSAEKQVKLSSKAGMLLLYTPAFLAGLASFWIFPHQGLRSTLLQSAVTLHFFKRVFEVVFIHKYSGAMLLDSAIPITLSYFLSTATMIYAQHLTQGLPEPPIDLLYPGIVLFVVGIIGNFYHHYLLSNLRGKGEKEYKIPKGGMFELVICPHYLFEIIEFYGFSFISQTLYAFSFTVGTTLYLLGRSYSTRKWYLSKFEDFPEHVKAIIPFVF

SEQ ID NO: 39907 - protein, 323 aa, Glycine max
  Clone ID: 700876305_FLI.pep
YHIGFIKDSLMLAQMDMEELVSCNNNDATNIAKGKRTKRRLRPLSPCAVVAATTITTTTTAITAITTVMTSSCSSASAGGGGSSSSTTFEEEEEDMANCLILLAQGRVGRDPPHHHKDLCGDVKTEKGSTKVDHLYVYECKTCSRTFPSFQALGGHRASHKKPKMEEKKLLSPPLLLPPLPASSSSLFNFEEAKQSHMKNIISPSVSLQLGCGINKVGLNFHGNKSKIHECSICGSEFTSGQALGGHMRRHRASNNNNNIVQTTTTTTTTSNGAVDVKPRNVLELDLNLPAPEDDLRDSKFQFPANPNSMMLSAAPALVGCHY

SEQ ID NO: 39908 - protein, 316 aa, Glycine max
  Clone ID: 700876642_FLI.pep
LIRIMRNLSSKRLMCLLRRLSNVLVNYLTLSPREAPDDDGDQLKNKKSFRRKSVSPLDVSKEEEETLKSEQHPKSETPTGCITNGSEYYRILVDFNALTGDSHRDKWLERLLQRIQYMCDSNDSKERDKGLGNANSDEINNESKHRSSESATDCQDKVQKSSKSFNWPDVAVSAMVALEKASHDALSSDSMKYNQKLRQLAFNFQKNAVLARRLLSGELEPSKILNMTPNELKEGLVAEEKTKEPDETQHLQMTDARCSKCMDCKVGLREIIQAGNNERYQLECVSCGHSWYASRDEVSMPTIDASDPKGNIGTAP

SEQ ID NO: 39909 - protein, 124 aa, Glycine max
  Clone ID: 700876682_FLI.pep
LKQVIHPIHDQTFYLTMEHKKKLKEEYGIEPWTFTQKLGDAVFIPAGCPHQVRNLKSCIKVALDFVSPENVGECFRLTEEFRTLPINHRSTEDKLEVKKMTIYAMQEVITKLEKARSRQTIVPK

SEQ ID NO: 39910 - protein, 207 aa, Glycine max
  Clone ID: 700888137_FLI.pep
LVLVRLEDKERMAFAGTTQKCMACDKTVYLVDKLTADNRVFHKACFRCHHCKGTLKLSNYNSFEGVLYCKPHFDQLFKRTGSLDKSFEGTPKIAKPEKNLEEKPAAAKVSSMFGGTREKCAGCQKTVYPTEKVTVNGTPYHKSCFKCCHGGCVISPSNYIAHEGKLYCKHHHVQLIKEKGNLTQLEGDNEKSATNGKINGEEVSAET

SEQ ID NO: 39911 - protein, 202 aa, Glycine max
  Clone ID: 700888167_FLI.pep
GRSGKSCRLRWFNQLDPRINRSPFTEEEEERLLASHRIHGNRWAVIARHFPGRTDNAVKNHWHVMMARIRRERSKNYSPKQPLFPPNLQVDLETNFETIPSFVDKYYEKYSHPCVALTHSSFQFPTKNFYFQDPSSAGSTVPRDNCESVEFYDFLQVNTDSNKSEVTDNARRDEEEVSQDAVGMKNKDNGVPFIDFLSTGGC

SEQ ID NO: 39912 - protein, 180 aa, Glycine max
  Clone ID: 700888633_FLI.pep
LNLYDVKATRIEDQLKFCLDQLQKLAEDKLQSSVTLENTQRRLSNVRRQSQQVTDMVVEMQSKIGSNRVTRMELQVELEKERFAKKRVEENLEVARRKFTCLKEQNEGFLVTEKLQQELEEYREIIKCSICQDRAKEVVITKCYHLFCYSCIQKVAGSRHRKCPQCGTSFGANDVKSVYL

SEQ ID NO: 39913 - protein, 61 aa, Glycine max
  Clone ID: 700888893_FLI.pep
KYKGSVCILKTNTWRKFRIVIEGKSTTSNSFIQQLESKDTQNRETNKICVYIVWMSPVEFY

SEQ ID NO: 39914 - protein, 271 aa, Glycine max
  Clone ID: 700888972_FLI.pep
GIGLIEKKLKNRIQWKGLDVSRPGEADDSFASLQAEVENLTMKERQLDEQIREMQERLRDLSEDENNDKLLFVTEEDIKNLPCFQNETLIAIKAPHGTTLEVPDPDEAVDYLQRRYRIVLRSTMGPIDLYLVSQFEEKFEEINGADVAPKLPSSPDVTKQQSTVVPEDRGKHIEVQGQAAPGPSSDFTPSQDFVSGIMKIVPSDVASEADYWLLSDADVSITDMWRTEPGVEWNELEPLQEDYCMTDENTTTPSHPSNVGEVSSASKPTGG

SEQ ID NO: 39915 - protein, 105 aa, Glycine max
  Clone ID: 700888996_FLI.pep
DDQSVLVATYEGEHNHTHPSQMEVTTGSNRSVSCSASLSSSAPTVTLDWTKSKSSSESKNVNPKTESPEVPQVLVEQMATSLTKDPNFRAALVAAISGKMLHNNN

SEQ ID NO: 39916 - protein, 255 aa, Glycine max
  Clone ID: 700889116_FLI.pep
ESGHGGSEKREGMKRSAGGEIAPTTRHYRSVSMDSFIGKLNFGDESPKLPPSPGQRGGLMSPAGGIDGNSAAFSLEFGNGEFSGPELKKIMANEKLAEIALTDPKRAKRILANRQSAARSKERKMRYISELEHKVQTLQTEATTLSAQLTLLQRDSAGLTNQNSELKFRLQSMEQQAKLRDALNEALTAEVQRLKIATAELSSDSHGSSCLIPQHSVNPLMFQQQPPFASQQNIHLQQQQHRQNGNANSNSDLKQ

SEQ ID NO: 39917 - protein, 111 aa, Glycine max
  Clone ID: 700889362_FLI.pep
QLKYNNNNKDKNKTNLQGSHCPYFLVLPTTLSKNYIYIFFKKVLHFQIYYYFFIGPSFSFSTLTRTPTPPPRLGSPASQPEPRACAPPRTSLSALQDRLVRAPRASSLGTL

SEQ ID NO: 39918 - protein, 83 aa, Glycine max
  Clone ID: 700889918_FLI.pep
NLCKTRDKIHYQKKIKQISTQHLIFLIYFPPLMFFFSFSFLLIYIKGLKGGGQDPCLRAWIRPYPFLFFVLKDVRNIMLILCL

SEQ ID NO: 39919 - protein, 358 aa, Glycine max
  Clone ID: 700890204_FLI.pep
GKAYGPPEEDEKLFNYITRFGVGCWSSVPKLAGLQRCGKSCRLRWINYLRPDLKRGMFSQQEEDLIISLHEVLGNRWAQIAAQLPGRTDNEIKNFWNSCLKKKLLKQGIDPSTHKPLTEAHVKEEKKIIETSPMQTPLSQGPSVPLIFPSSQGSSLLISDSSYYDGGLTEASREIFMTKPALDPLSYYDFPMGVAQSGFNLPVSQYQTSLKASDQNPFGPNSSYVFSSMPSLTNSDHGNVSVTEFSDNNSASKISSLFMNDQVKESSSNSSNLSTIYHGGGCHISSMMENAGFSWEGDNKFDPLFQFQVNATKSEDFKTSSWEEGQLHTQNSIDFTSFPLTSLSEDLTGANFDVFQHI

SEQ ID NO: 39920 - protein, 259 aa, Glycine max
  Clone ID: 700890686_FLI.pep
VDPDKWEFANEMFLRGQRILLKNIRRRKANHHQSHQHAMQQGVEEPFVEVGQFELDGEIDRLRRDRQVLMVELVKLRQQQQSTKSHLQEMEGRIKMTEQKQKQMMNFLARAMQNPNFVQQLAQQKEWRKELEEVFSNKKRRPIDQGPNVVEVADDDDELLGCAEECSDFVKLEPQEYYSDDKVLEFEVPDLDLALNLDEENIESQKRIMEEEHVQLENSRERYIDEVFWQDLLNEGIEDQGVLGVEDVDVLAKQLGYLA

SEQ ID NO: 39921 - protein, 236 aa, Glycine max
  Clone ID: 700891158_FLI.pep
VVSTDENQHQGRMCSLQDIGGHFMKVPIIVFQVLLCMHLEGTPACAVHIPLPVIFSPLFLLQGAGVMLSASKLGEKLVLLLRSGAGGGIYFRFSSRAHDCLGFLHHGSRLLGWWSIDEGSREEQARLYHEGAIGYNTFCGYPPEIVKKMPKKELAEEVWRLQAALGEQTEITKFSQQEYERLQNEKVLCRVCFEGEINVVLLPCRHRVLCSTCSEKCKKCPICRDSIAERLPVYDV

SEQ ID NO: 39922 - protein, 267 aa, Glycine max
  Clone ID: 700891278_FLI.pep
ETSEYLKNDCLVMHCTVGVVKTRFEGSKQGVIVPQSDMGRDFKDLLESEVGCDILFKVKSESFKAHKLILAARSPVFRAQFFGLVGDPTLEEVVVEDIEPFIFKAMLLFVYSDKLPGIYEVMDSMPLCSYTVMVQHLLAAADLYNLDRLKLLCESKLCEEINTDNVATTLALAEQHHCPQLKAICLKYIANPANLGAVMQSEAFVHLKESCPSMLLELLETFASVDDNSGQTLSRKRSGSSIYGQDLADGAAAESVNPNGRRVRRRT

SEQ ID NO: 39923 - protein, 210 aa, Glycine max
  Clone ID: 700892909_FLI.pep
EASTSQLHAPIFHYPLMRGNLHNTMHHHHPQQQQGGSPTSSTGEVEAIKAKIIAHPQYSNLLEAYMDCQKIGATPEVVARMVAAKQEFEARQRSSVGSRETSKDPELDQFMEAYYDMLVKYREELTRPIQEAMDFMRRIETQLNMLCNGPVRILSDDKCEGAGSSEEDQDNSGGETELPEIDPRAEDRELKNHLLRKYSGYLSSLKQELS

SEQ ID NO: 39924 - protein, 172 aa, Glycine max
  Clone ID: 700893391_FLI.pep
PILEKAIGTEIEWHPGKCLTQKILKKKPSKGSKNAKPITKTEKCESFFNFFNPPQVPEDDDDIDDDAVEELENLMEHDYDIGSTIRDKIIPHAVSWFTGEAAQSDFEDIDEDDYEDEEGDDDDDEDEDEDEDEEDEEEKKGKSKSKSKLQSGGRAIPGKDQPMERPPECKQQ

SEQ ID NO: 39925 - protein, 259 aa, Glycine max
  Clone ID: 700894234_FLI.pep
KKLRPEVEIKGVSCQSKKENSGSDGTVVDQGKGGSPVASSHATTTTTTSSAQTHRKARRCWSPDLHRRFVNALQMLGGSQVATPKQIRELMKVDGLTNDEVKSHLQKYRLHTRRPSPSPQAVGAAPQLVVLGGIWVPPEYATAAHTATPTLYGAHPTSHAPPPHYCAATPMPQDFYTTAPPQPLLPPPPPHHNALHHLHMYKAAPHGQGSPESDVPSNGERSESIEDGKSESSSWKGENEGERKGISKGSNGSEITLKF

SEQ ID NO: 39926 - protein, 346 aa, Glycine max
  Clone ID: 700894372_FLI.pep
KCEASGFCYVNDIVLAILELLKQHERVLYVDIDIHHGDGVEEAFYTTDRVMTVSFHKFGDYFPGTGDVRDIGYGKGKYYSLNVPLDDGIDDESYHFLFKPIIGKVMEVFRPGAVVLQCGADSLSGDRLGCFNLSIRGHAECVKYMRSFNVPLLLLGGGGYTIRNVARCWCYETGVALGIEVDDKMPQHGYYEYFGPDYTLLLPQVTWENKNSRHLLEEIRSKLLENLYKLQHAPSVQFQERPPDSDLGEADEDHDDGDEPWDPDSDMDVDVERELVSSKVKKEIAEPQPNDLEDQRSGEHLRDSDTAVAETCMKALDISSQKADEDNVKVEQNTVNDLAKETDLKG

SEQ ID NO: 39927 - protein, 237 aa, Glycine max
  Clone ID: 700894426_FLI.pep
IGAPPEVVARMAAAKQEFEARQRSSVGSRETSKDPELDQFMEAYYDMLVKYREELTRPIQEAMDFMRRIETQLNMLCNGPVRIFSDDKCEGAGSSEEDQDNSGGETELPEIDPRAEDRELKNHLLKKYSGYLSSLKQELSKKKKKGKLPKDARQKLLNWWELHYKWPYPSESEKVALAESTGLDQKQINNWFINQRKRHWKPSEDMQFMVMDGLHPQSATLYMDGHYMADGHYRLGP

SEQ ID NO: 39928 - protein, 173 aa, Glycine max
  Clone ID: 700895196_FLI.pep
FTSSQAQYQTAKFEEKPNCPNTLLNKLKREESPDAAKKNSPEPAFKRQRIETPSPLPTFKVRKEKLGDRITALQQLVSPFGKTDTASVLHEAIEYIKFLHDQVSVLSTPYMKNNGAPIQHQQDCDNLKDSEGAKQDLRSRGLCLVPISSTFPVANETSVDFWTSTFGGALIGR

SEQ ID NO: 39929 - protein, 195 aa, Glycine max
  Clone ID: 700895496_FLI.pep
EREKKRTKNQEASKRSCEMNKCELCKVPARIFCESDQASLCWDCDAKVHSANFLVARHARTLLCRTCRSPTPWKASGASLASAVSVCDRCAASEEPEESEAGNDDEPDTEDDDNDDEDGDNQVVPWSSSPPPPPPSSSSGSEWSECKNDDASISASEQETTTCSLKRQREDDDDASSDRDPRVLRRVGRLNGGCV

SEQ ID NO: 39930 - protein, 139 aa, Glycine max
  Clone ID: 700895518_FLI.pep
NLSMLSKYLAPIYTHLKWVLDFVLYYPFYMLYDSHPPINLGTELSTFHYEFSSGSEEHVDCAVCLSKFGEGDEVIRVMRCEHVFHKGCLDRWVGFENATCPLCRGSLTPKRPITNSGAEVVLFQFCSVQKCNDETWWLR

SEQ ID NO: 39931 - protein, 395 aa, Glycine max
  Clone ID: 700895650_FLI.pep
KCVCLVVFILQLFSNGMRESEQRHVALRINASEEAALMELLNFMYSNTLSITSPPALLDVLMAADKFEVASCMRYCSRLLRNIPMTPESALLYLELPSTVLMADAVQPLTVAAKQYLASRYKDITKFQEEVMGLPLAGIEAILSSDELQVASEDAVYDFVLKWVRTQYPKLEERREVLGTRLARLIRFPYMTCRKLKKVLTCNDFDHDVASKLVLEALFFKAEAPHRQRILAAESASFNRLFVERAYKYRPVKVVEFELPRQQCVVYLDLKREECANLFPSGRVYSQAFHLGGQGFFLSAHCNMDQQSSFHCFGLFLGMQEKGSVSFAVDYEFAARSRPTEEFVSKYKGNYVFTGGKAVGYRNLFAIPWTTFMAEDSLYFINGALHLRAELTIRH

SEQ ID NO: 39932 - protein, 437 aa, Glycine max
  Clone ID: 700896124_FLI.pep
AFLREEDSQLLRNGLSPNAKGKVRPEAVIEAATLAANMQPFEVVYYPRASAPEFCVKANLVRAALQVRWCPGMRFKMPFETEDSSRISWFMGTISSVNFADPRWPNSPWRLLQVTWDEPELLQNVKRVSPWLVEIVSNMPTIHLSHYSTQQKKPRFPQHPDFSFDGQISLPAFPSNFLGPSNPFGCLAESTPAGIQGARHANYGISLSNLHFNKLQSGLFQAGFPPLDHTASPVLRVSSNNAATMQKVGTGDNVSCLLSMSTATQPSKKVDDVKAPQLVLFGQTILTEQQISLNTSAKTDPTRNNSFDGNADKMCKFSDGFGYALHPQGSSLERLQWYKDQQKETMASLETGHCKVFMESEDIGRTMDLTMLGSYDELYRKLADMFGIEKSVVLSHMLYRDTTGAVKHIGDEAFSEFTKTARRLTILMDSNSDGRGI

SEQ ID NO: 39933 - protein, 208 aa, Glycine max
  Clone ID: 700896269_FLI.pep
HSIPSHFSLTPKTKKANRFRFLSMAAEPKESPSNNPGLHTTPDEATKGYIMQQTMFRIKDPKVSLDFYSRVLGMSLLKRLDFPEMKFSLYFMGYENTAEAPSNPIDKVVWTFSQKATIELTHNWGTESDPEFKGYHNGNSEPRGFGHIGVTVDDTYKACERFQNLGVEFVKKPEDGKMKGIAFIKDPDGYWIEIFDRKTIGNVTQTAA

SEQ ID NO: 39934 - protein, 119 aa, Glycine max
  Clone ID: 700896352_FLI.pep
ANLRNDRRQPFRGASTTTSSTQQDEDAALARMLQRQIDEQRSPGTTRTRFARLRARRGGVSTSQHEDAALALRMRREEFMQTYRGSSQSSRLPSSLLAREKLRAMVSRAMNRREDLRQG

SEQ ID NO: 39935 - protein, 82 aa, Glycine max
  Clone ID: 700896666_FLI.pep
NCSVFLLLRESFVVSKILYIERGADYATFISISPQRIIRSKNPWYCMHKGESLISRDYLFAVQCQKTKSYALNHDIYIYTIE

SEQ ID NO: 39936 - protein, 240 aa, Glycine max
  Clone ID: 700896705_FLI.pep
ERYSNTMVRAPYFDKNGIKKGAWSEEEDKRLMAYVERHGHPNWRQLPKFAGLQRCGKSCRLRWMNYLRPNLKRGNYTQKEEQIIKDLHKKHGNKWSLIAENLPGRTDNEIKNYWHSNLKKFLKGNENTPCDDDDELKSTECKEFERSMNKAHSADSHHILESSVSISSETSYTEGNSPSFSSSHTTESSTLSKEEDSVVSWQTMDVLSSNFWTEPFISENALNQDYFPISSYGTEPFFLW

SEQ ID NO: 39937 - protein, 240 aa, Glycine max
  Clone ID: 700897812_FLI.pep
GPKFPTKHNIRMAMYWLAQGCQPGDSLVFHYSGHGSQQRNYSGDEADGYDETLCPLDFETQGMIVDDEINAALVRPIPHGAKLHALIDACHSGTVLDLPFLCRMNRSGQYVWEDHRPRSGVWKGSSGGEVICFSGCDDHQTSADTSALSKITSTGAMTFCFIQAIERGHGATYGSILTAMRTSIRNVGGGGGGTGGGDVVTSLLSMLLTGGSLSGVGGLGQEPQLTACEAFDVHRKPFSL

SEQ ID NO: 39938 - protein, 196 aa, Glycine max
  Clone ID: 700898293_FLI.pep
TALFLWLSLRVDEPKCYLDYIYVPALNKTLNSNSTHNKNTTILFALKLTNGNKDKGIQYDDVLLSFRVFESVNLTRPLGNATVQRFYQGHQKKATKHGNFSGGGGNLTAAVAGRMWYRVDYATAVKYKILFWYTKRHRLWGGANVEIGDSGMKVYRKAVRLGGKNPVVIESGASKLSGRYRALLLSLLLPFCGLWV

SEQ ID NO: 39939 - protein, 238 aa, Glycine max
  Clone ID: 700898749_FLI.pep
VSGKWPAKQRKIAILVDQVNLLQRKFSYCNPRFVARHDVKFAFKLARDAIESQSTRLAESGSRSLNETCVICLEETDVGQIFSVDGCQHRYCFSCMKQHVEVKLLHGMVPKCPHQGCKYELLVDSCQKFLTQKLTETMQQRKLEASIPVAEKIYCPYPTCSALMSKTEVLEYSKDITGQSEQSEPKICLKCRGLFCFNCKVPWHSGMTCNTYKRMNPIPPAEDLKLKFLHQGAYGNSV

SEQ ID NO: 39940 - protein, 94 aa, Glycine max
  Clone ID: 700899371_FLI.pep
QNTIRSHQQSIFTNTERTNSSTLTTNPSCQLNILGHNSHTLGVNGTQVSVLKEPNKVCLSSLLQCKHSMALETQISLEILGNFTNQPLERKLPD

SEQ ID NO: 39941 - protein, 124 aa, Glycine max
  Clone ID: 700899387_FLI.pep
ESFFNFFNPPEVPEDDDDIDEDAVEELQNLMERDYDIGSTIRDKIIPHAVSWFTGEAAQSDFEDIDEVDYDDEEGDEDEDEDEDEEEEEEEEEEKKGKSRSKSGGRVKPGKDQPTERPPECKQQ

SEQ ID NO: 39942 - protein, 260 aa, Glycine max
  Clone ID: 700899428_FLI.pep
FTKSNHNKHFSYFLSHPITDSQAQTLQMALEALQSPRTATPSFSPFEETNLSYLETPWTKGKRSKRSRMEQQLQHSSCTEEEYLALCLIMLAHGGAGGVPAAKPAVSDNNSAPLPAAKLSYKCSVCNKAFSSYQALGGHKASHRKLGGEHHSTSSAVTTSSASNGGARTHECSICQKTFPTGQALGGHKRCHYEGGNSAVTASEGVGSTHTGSHRDFDLNLPAFPDFSTRFFVDDEVTSPHPSKKSRLNLTIPKIEIPQY

SEQ ID NO: 39943 - protein, 260 aa, Glycine max
  Clone ID: 700900662_FLI.pep
FLARACVRRQTMENIGEDQYGYLPETDLFFPNEDLGSWAIMDGEAVSWYYDSSSPDGTGASSSVASKNIVSERNRRKKLNDRLLALRAVVPNITKMDKASIIKDAIEYIQHLHEQEKRIQAEILDLESRNKFKNPTYEFDQDLPILLRSKKKKTEHLFDSLSSRNSPSIEIIELRVTYMREKTFVVNLTCSKRTDTMVKLCEVFESLKLKVIAANITSFSGTLLKKTAFIEADEKEEDFLKIKIQTAISALNDPQSPMSI

SEQ ID NO: 39944 - protein, 205 aa, Glycine max
  Clone ID: 700903463_FLI.pep
RNTKDRKKIKRRRRGEERKVVLRDMGRGKIEIKRIENSSNRQVTYSKRKNGILKKAKEISVLCDAQVSLIIFGVSGKMHEYISPSTTLIDVLDRYQRASGKTLWDAKHENLSNEIDRIKKENDSMQIELRHLKGEDITSLNYKELMALEDALENGLSGVREKKMEVHRMFKRNDKILEEQNKELNFLLQQHLALEGVGNMHGQWI

SEQ ID NO: 39945 - protein, 337 aa, Glycine max
  Clone ID: 700904208_FLI.pep
YKMGRQPCCDKVGLKKGPWTAEEDKKLISFILTNGQCCWRAVPKLAGLLRCGKSCRLRWTNYLRPDLKRGLLSEYEEKMVIDLHAQLGNRWSKIASHLPGRTDNEIKNHWNTHIKKKLKKMGIDPATHKPLPNANEQNQNQTRQDQQLHHQPVELEEPNQQPLQVDFDPKVDPNKEPEKPETSLESSTITEEAKEEDQIITPLFDTMELMNGFCTDEVPIIEPHEILMPCAPSSSSTTSSSSSSNSTNFLEDLQLPDFEWSCNYNDNNTITNNNNNEDKDDDNNNNSSMALWDDDIIGNRYWLINEDDDSDENQVFDASLTQFSKMFMESESWGYGF

SEQ ID NO: 39946 - protein, 184 aa, Glycine max
  Clone ID: 700904284_FLI.pep
RQTKTHSNPSLLSLGLFRWRFHAFRFLHDALGLLHGLYGSLLRRLSGDLLRRGLSGLGLGLGGRSFGLGFGNSLLLRCSSFGLGSGLGGGLSRSFGGLLGSSSGFNRSRLSRCELERVFDLNELASSNRLLEMNENKLLVGWRQLLVLAFDEFGYRVLARTGSLLQTRIASAIIYKTMKLIKHN

SEQ ID NO: 39947 - protein, 113 aa, Glycine max
  Clone ID: 700904559_FLI.pep
FPSLYMIYCHINYLGLVDNGNGKQLDAVYLGAYDDEEAAARAYDLAALKYWGQDTILNFPLSNYEEKLKEMEGQSKEEYIGSLRRKSSGFSRGVSKYRGVARYLNPALFTAKC

SEQ ID NO: 39948 - protein, 498 aa, Glycine max
  Clone ID: 700904885_FLI.pep
VMGKQGPCYHCGVTSTPLWRNGPPEKPVLCNACGSRWRTKGTLANYTPLHARAENIDYEDQKVSRVKSISLNKNTEVKLVKRKQNYGNAASGGFVPDYSQGYRKVVDEDTSNRSSSGSAVSNSESCAQFGGPDASDLTGPAQSVVWDAMVPSKKRTCAGRPKPSSVEKLTRDLCTILHEQQSYFSASSEEDLLFESDTPMVSVEIGHGSILIRHPSSIARDEESEASSLSVDNKQCLMNEAYSFSSTIPIYSDRSSMNFSSHGVEKIKNSAGQIMQQEKLERDKSQLEKLQVHGNHDSPLCSIDLNDVVNYEEFMRNLTNEQQQQLLKYLPVVDTAKFPDSLRNMFNSFQFKENLIYFQQLLGEGVFNISLLGAKPEEWKTLERLALSNLSKSKWVEHYNFLKKCENKSGKSIGLGSTAMESSNVTTGKRMREHDSRNQNIPELKTTMRSPKRVIIKPPSCEVKEVVEESSSFSPKSLFALPPWCWWLAHAGFFQLCW

SEQ ID NO: 39949 - protein, 355 aa, Glycine max
  Clone ID: 700904893_FLI.pep
SLAETEPDQAAESLSRLRKSVSQHGNPTQRVGFYFWQALSRREEKGHNSTWDEELTLSYKALNDACPYSKFAHLTANQAILEATQTASNIHIVDFGIVQGIQWAALLQAFATRPSGKPNKIRISGIPALSLGSSPGPSLSATAHRLSDFAKLLDLNFHFTPILTPIHQLDRNSFCIDDTNEALAVNFMLQLYNLLDEPPTAVDTALRLAKSLNPKIVTLGEYEASVTRFGFVNRFKTAFKYFSAVFESLEPNLAADSPERFQVESLLLGRRIAAVIGGPGSVRRESMEDKEQWRVLMERAGFESVSLSHYAISQAKILLWNYSYSSLFSLVESTPPGFLSLAWKDVPLLTVSSWR

SEQ ID NO: 39950 - protein, 267 aa, Glycine max
  Clone ID: 700904909_FLI.pep
LSINEWKLIDGSRHTEACHVCCQKLLVQRMSRYLRLQLPLIDAQLSQSHHLLRSYVSHNTLSLSPHHRQELDNFLAQYLIVLCTFKEQLQQHVRVHAVEAVMACRDIENTLQALTGVSLGEGTGATMSDDEDDLQMDFSLDQSSAEGHDMMGFGLPTESERSLMERVRQELKIELKQGFKSRIEDVREEILRKRRAGKLPGDTTSVLKNWWQQHAKWPYPTEDDKAKLVEETGLQLKQINNWFINQRKRNWHSNSQSVTSLKSKRKR

SEQ ID NO: 39951 - protein, 167 aa, Glycine max
  Clone ID: 700904960_FLI.pep
VKATIERYKKASSDSSGAGSASEANAQFYQQEADKLRQQISNLQNNNRQMMGDSLGSLTAKDLKNLETKLEKGISRIRSKKNELLFAEIEYMQKREIDLHNNNQLLRAKIAESERNHHNMAVLPGGSNYDSMQSSQQQFDSRGYFQVTGLQPNNQYARQDQMSLQLV

SEQ ID NO: 39952 - protein, 187 aa, Glycine max
  Clone ID: 700905693_FLI.pep
LSAMDFYFGNSPPYPNNYAHNSLNMALSSPEIALSDYLMLDDYVDHQDSRSSQSTESSEKATFNDATHGFSTGATSKNNNINCKNGINENKGGVGPRIAFRTKSELEIMDDGYKWRKYGKKSVKSSPNLRNYYKCSSGGCSVKKRVERDRDDYSYVITTYEGVHNHESPFTTYYSPISFVHSDTTFK

SEQ ID NO: 39953 - protein, 233 aa, Glycine max
  Clone ID: 700906103_FLI.pep
EKRNILEPAGALALAGAEAYCKHHGVQGKDIVVITSGANMNFDKLRVVTELANVGRKQEAVLATVLPEEPGSFKQFCELVGQMNITEFKYRYNSNEKAVVLYSVGIHTVSELRAMQERMESSQLKTYNLTESDLVKDHLRYLMGGRSNIQNEVLCRFTFPERPGALMKFLDPFSPRWNISLFHYRGEGETGANVLVGIQVPKSEMDEFHDRANKLGYDYKVVNNDDDFQLLMH

SEQ ID NO: 39954 - protein, 352 aa, Glycine max
  Clone ID: 700906279_FLI.pep
LTDGTGRNRRRRRRSFDEGLLGLDDGGGGGRDRVKGPWSPEEDAILSRLVGKFGARNWSLIARGISGRSGKSCRLRWCNQLDPAVKRKPFTDEEDRMIVAAHAIHGNKWAAIARLLPGRTDNAIKNHWNSTLRRRGVGHDTIKLESVSFMEDVSLEKAKASSEDTLSCGDVSLKSSEGRDVSSMEIMDDKSDDKAQTEGQIHHEVKDLPTLFRPVARVSAFNVYHSFDGTQPSTSIKRPVPMQGAVLQSSKPDMEFCRMLEGICGDQSVPHQCGHGCCAAPDGRKSESSLLGPEFVEFSEPPSFPNFELAAIATDISNLAWLKSGLESSSAKMMGNTSGRVVSNGSQVHIGH

SEQ ID NO: 39955 - protein, 278 aa, Glycine max
  Clone ID: 700906315_FLI.pep
FLPHGGLLEEAKEQIGESTKGEEEQSSSGFGFSSFLHRTVEDAIESRGFHIPSALRHNRGRDDDGDEAQNRDIELPDGGYVKNRSLPLSTLIDILKQKTGKDDIDVGKLRPTLFDVFGEDASPKVKKFMNVIFNKLQHGSDESGGGILGLVGGLAQEFLKQKLDDNDEGYAKPALETKVESKHEAYAGPTKRGLPDGGILMSGCQTDQTSADASPAGNAASAYGAFSNAIQAIIEETDGAITNQELVQRAREKLKNSGFTQKPGLYCSDHHVDAPFVC

SEQ ID NO: 39956 - protein, 202 aa, Glycine max
  Clone ID: 700906508_FLI.pep
CHGHSSRWQWMVMASTTAAAATMLLSGSMSSADGVMNPNLLARAILPCSTSMATLSASAPFPTVTLDLTHNPNPLQFQRPGAPFQVPFLQAQPQNFGSGATPIAQALYNQSKFSGLQLSQDVGSSQLAPQAPRPPLQPSQHPSLADTVSAAASAITSDPNFTAVLAAAISSIIGGAHNSNNNNNNNSNNNTSRTTISSFSGN

SEQ ID NO: 39957 - protein, 335 aa, Glycine max
  Clone ID: 700907315_FLI.pep
TSLSISKISKRSQLIRFPSLFLSLTILQTFPSAFKISKFMGLRDIGASLPPGFRFYPSDEELVLHYLYKKITNEEVLKGTLMEIDLHTCEPWQLPEVAKLNANEWYFFSFRDRKYATGFRTNRATTSGYWKATGKDRTVFDPATREVVGMRKTLVFYRNRAPNGIKTGWIMHEFRLETPHLPPKEDWVLCRVFHKGKADNSAKLIMYESTVPSLTLASSSPTNQNTTPSIGYNQFLAPFSSSMATHHHNHNHHIPNQSQNNNNNSLMGLLQFSRETNTNNSSTVTQISPKCDDNNGYGFLWDMDLEENSFNDGVASNLDGMRFFELDNNNSVVLL

SEQ ID NO: 39958 - protein, 82 aa, Glycine max
  Clone ID: 700907520_FLI.pep
DDQVEFITGIHDGVSTDDKSKWECVRKGLCCICCESNIDSLLYRCGHMCTCSKCANDLLQSRRKCPMCQAPVVEVIRAYSIQ

SEQ ID NO: 39959 - protein, 233 aa, Glycine max
  Clone ID: 700907574_FLI.pep
YDRLSKTCLNLAISRIKLLQNKRDMQLKQMCKEISQFLQAGQEAIARIRVEHIIREQNTWAAYEILELFCEFVLARVPIIENQRECPTELREAIASIIFAAPRCSDVPDLLHIKNLFTTKYGKEFVSAVSELRPDSGVNRTIIEKLSVSAPSGEVKLKVLREIAEEYNIAWDSSKTEAEFRKNHEDLLGGAKQVSAGATLSHTPSRNGSNNPSPCITEPSIKPVQDKQEYKHL

SEQ ID NO: 39960 - protein, 311 aa, Glycine max
  Clone ID: 700907943_FLI.pep
QDGSASHFFHRAINAYNTGTRKRRKILGQDFGDVRWHKTGRTKPVVFNGIQKGCKKIMVLYVSNVRGGRAEKTNWVMHQYHLGTEEDEKDGEYIISKVFYQQQQVKLGDKDDKDVPEATEINESTIVKVDPVTPKFVTPETPCNERWCADLDLGQETHNSPQLPQMDCLDEIQADYQDLANESSMVETQHNEGMDDKEKNTEEGQKWWDSESQNLLDSQQLVEALSLCDDLLQSQSPSRDGKHEDHKNQPGLSVYAQLGPENLKKDIEECQNLALDKANIENDTPSEFRLSQLEFGSQDSFISWGYGKAVN

SEQ ID NO: 39961 - protein, 501 aa, Glycine max
  Clone ID: 700908176_FLI.pep
SEPLIPRSDCAPHLVLTMERYGRASEGSQSDPSPEWTVAADADAGLEESSWQLGLPGAESYPMRPDEADCIYYLRTGFCGYGTRCRFNHPRDRAAVIGAAPRTGGEFPERVGQPVCQYYMRTGSCKFGASCKYHHPRQVPGTATPVPLNYYGYPLRVGQKECSYYVKTGQCKFGATCKFHHPQPAGVQVLAPSPVPPVSPLPVPVPSPMYPTVHPPSGPSQQQYGVLVARPPMLPGSVVQGPYGPMVVSPTMVPFSGWSPYQAPATNPLLPSSTTSNVGSTQLYGITQLPSSAATYTGPYQPSGSSIGPSGASQKEHPFPERPDQPECHHYMKTGDCKFGPLCRYHHPPDKSAPKANVTLSPVGLPLRPGAPPCTHYTQRGVCKFGSACKFDHPMGSLSYSPSASSLADMPVAPYPVGSSIGTLALSSLSSELRPELGAGSNKESVASRMSSMSTSTGSVGLTLSSVGPISHSSTQPSAQSSSSPETTSATTSSTVSHTSS

SEQ ID NO: 39962 - protein, 98 aa, Glycine max
  Clone ID: 700908337_FLI.pep
QLEDPKTQRSGWQLVFVDRENDVLLLGDDPWQEFVNNVWYIKILSPLEVQQMGKGLSPSTSAPGNKLSTPANSCDNYVSQQELRSSRNGMASMGSFHY

SEQ ID NO: 39963 - protein, 182 aa, Glycine max
  Clone ID: 700908343_FLI.pep
SCQSMAMKPSTSTSGSGKKIRKPYTITKSRESWSEEEHDKFLEALQLFDRDWKKIEDFVGSKSVIQIRSHAQKYFLKVQKSGTVAHVPPPRPKRKASHPYPQKASKNVLLPMPASMVYVSSTSTLPPGYVTWDENSLLMNSGSNKSVPCKDELANLLGNEGTHTSFSSYICWFNCLFDMKSL

SEQ ID NO: 39964 - protein, 361 aa, Glycine max
  Clone ID: 700908442_FLI.pep
LIFLQRKEKEAIIKEGTTEIEMEGTRAKEGTLPPGFRFHPTDEELVTCYLVNKISDSNFTGRAITDVDLNKCEPWELPGKAKMGEKEWYFFSLRDRKYPTGVRTNRATNTGYWKTTGKDKEIFNSETSELIGMKKTLVFYKGRAPRGEKSNWVMHEYRIHSKSSYRTNRQDEWVVCRVFKKSGGAKKYHSSNHARTVNPYSLEIGPSIMPPPMMQLGDPSAHFLYGRNYMNSAELAELARVLRGGGSTSSVNLPIQSQLSYPTSSSAGGGGFIISGLNLNLGGGATATTQPILRPMQPSPPVHTMAQVLDVNSSMMTTSSLGAENNVGYGTEVSNNMNSHGNRYMGMDHHCMDLDNYWPSY

SEQ ID NO: 39965 - protein, 349 aa, Glycine max
  Clone ID: 700909321_FLI.pep
TLTQLLRLKTNTLLEAMQIKREDNIQILKNFLQHFKQVKDLSIKDLMVENVEEEDPNMAVNLLTVASTGNAAFLEELLRAGLDPDIGDSKGKTPLHIAASNGHEGCVKVLLKHACNMHIKDMNGNTALWDAIASKHYSIFRILFQLSALSDPNIAGDLMCTAAKRNELTVMTDLLRQGLNVDSKDHRDTTAIQIAMAENHVDMVQLLVMNGADVSDVHNHEFCSSTLNEMLQKREIGHLINVTEVMLSEVVLKGRHQEQEHNGGRSNSGLKFPRVSIYRGHPVVRREKCSMEAGKLIRLPDSIEELKTIAGEKFGFDAKDAMVTNEEGAEIDSVDVIRDNDKLFFCWIS

SEQ ID NO: 39966 - protein, 357 aa, Glycine max
  Clone ID: 700909695_FLI.pep
SALPSHVCIWFAELREWRFNETTNNEFSTAFNYLQQSGNPNPPLQLQQPQAIQQSVSSNNILQPQAQVMAENLSQHLLQKSHNNREDQTQQQQQQRHTYQDTVLLQSDQLHQRQHSGLPSPSYSKPDFLDSSMKFPASVSPGQNILGSLCPEGSGNLLNLSRSGQSMLTEQLPQQSWAPKFTPLQVNAFGNSMQHVQYSGKDTAMVPPHCNSDTQNPILFGVNIDSSGLLLPTTVPRYTTASADSDASAMPLGESGFQSPLYPCGQDSSELVQSAGQVDPQNQTRTFVKVYKSGSVGRSLDISRFSSYHELREELAQMFGIEGKLEDPLRSGWQLVFVDRENDVLLLGDDPVGIICQ

SEQ ID NO: 39967 - protein, 207 aa, Glycine max
  Clone ID: 700909815_FLI.pep
ERESKTDGGDRSVSHLHRLLTPLFSSVHFFSRPNTKSHHNRVPATMSDAPASPCGGGGGGSHESGEHSPRSNFREQDRFLPIANISRIMKKALPPNGKIAKDAKETVQECVSEFISFVTSEASDKCQREKRKTINGDDLLWAMTTLGFEEYIDPLKVYLAAYREIEGDSKGSAKGGDASAKRDVYQSPNGQVAHQGSFSQGVNYTNS

SEQ ID NO: 39968 - protein, 398 aa, Glycine max
  Clone ID: 700561635_FLI.pep
DEMTRIIWRMIKDKLIFPYLDLNIKYFDLGLQNRDATDDRVTVESAEATLKYNVAVKCATITPDETRVKEFGLKSMWRSPNGTIRNILNGTVFREPIICCNIPRIVSGWKKPICIGRHAFGDQYRATDAIITGPGKLKLVFVPEDGDAPMELDVYNFKGPGVALAMYNVDESIRAFAESSMSLAFAKKWPLYLSTKNTILKKYDGRFKDIFQEVYEERWRQKFEEHSIWYEHRLIDDMVAYALKSEGGYVWACKNYDGDVQSDLLAQGFGSLGLMTSVLLSSDGKTLEAEAAHGTVTRHFRFHQKGQETSTNSIASIFAWTRGLEHRAKLDNNEKLRDFTQNLEAACVETVESGKMTKDLAILIHGPKVSREFYLNTEEFIDAVAHNLQKKLREPAVV

SEQ ID NO: 39969 - protein, 236 aa, Zea mays
  Clone ID: 700930118_FLI.pep
VQGQKYDPDGEYVRTWIPELARMPTEWIHSPWAAPNSILQVAGVELGFNYPKPIVELHMARECLDDAISTMWQLDTAAKLAELDGEVVDDNLNNIRNFDIPKVVLNKKLSPSTSSMEHRVLSTNGKDEKSQPTEVKALYKQIIRDDMMNDSNMDDTCSTANLKVTRKRSSNDSAFNVPSCSSSLVMESRIHHNEPSSVLYSGYFQKTADRDGTSKVEDNDSEDSGTSISRPSKKAA

SEQ ID NO: 39970 - protein, 279 aa, Glycine max
  Clone ID: 700941157_FLI.pep
GLGGVSSERLVSLITQEERVHQHPLPSLTSLACLFVWERKSASITRTGSCKFGANCRFNHPDPTTVGGGDSPSGYGNGSSISLQGVSQSSISSWSSTRPLNESAPFVPVILSPNPGVSPQSSEWNGYQAPVYLSERSLHPPSTYVMNNPAMESNVYMHHQKQMLVEEFPERPGEPECSYFLKTGDCKFKSNCKFHHPKNRIARLPLCNLSDKGLPLRPDQNVCTYYRRYGICKFGPACKFDHPAPSTMAGHDQQSTYINSAGVDVAENGGAEDGNQQSV

SEQ ID NO: 39971 - protein, 134 aa, Glycine max
  Clone ID: 700942511_FLI.pep
KNRGYDDEYVFDTSRIYDTFKWNYEPSLLEEISSNVSSEDYDIPSPLIISSKKFGNVARYMNHSCSPNVFWQPVLYAENNQSFLHIAFFALRHIPPMTELTYDYGCSGHADGSSAPKGRKKCSCGSSKCRGSFG

SEQ ID NO: 39972 - protein, 41 aa, Glycine max
  Clone ID: 700942546_FLI.pep
NRNLRFCQVYCLSEAHKTSLFVNVIHLNCIVFLYVPVLCIK

SEQ ID NO: 39973 - protein, 100 aa, Glycine max
  Clone ID: 700942632_FLI.pep
KKTAKVSGIVSSNRFLCLSSQQSSSSKPMCKVCDTTFAASTQMCPDFKFWLCTISWLLKSIAIPEDQSSELYYSVGAIAVGNHPYYAYCRVASNRSWSLT

SEQ ID NO: 39974 - protein, 144 aa, Glycine max
  Clone ID: 700942684_FLI.pep
LNPPSSKPRPLPSLHVTPSLLSSLDPNGVVRCAVCKDQITPHAEAKQLPCKHLYHSDCITPWLELHASCPLCRFRLEEEEEEGGDGVMTKIRREIIARLTVLTEEDFYGLRTTLNHIASRHALIQENENRGAQIGETQGGDSAC

SEQ ID NO: 39975 - protein, 153 aa, Glycine max
  Clone ID: 700942776_FLI.pep
LPRGDQITSALSKAIQESRIAITVLSQNYASSSFCLDELVTILHCKRKGLLVIPVFYKIDPSDVRHQKGSYGEAMAKHQKSFKAKKLQKWRMALQQVADLSGYHFKDGDSYEYKFIGSIVEEVSRKINRAYLHAVDYPFGQWSQVMENQINMG

SEQ ID NO: 39976 - protein, 400 aa, Glycine max
  Clone ID: 700942855_FLI.pep
PICAAYDNYLRLPELRALWASNDFPNWANEPILKPTLHALEITFRLLATVLSDPRPYINKREWTRRVESLATAQIQIIAMLCEDEEENPETRGTTPPVSDINGFIAQSRSYSEESLLPRLATWHKSKDVARRILDSVEYQMMRCTYTLGLGEANLAGKKIFLYDAVCRPSEIHSLETTPFDYVGNCENKTLHATQQIAECWTRAVRKLLERVVESVERKTLEKAARECHAVERIWKLLTEVEDVHVMMDPEDFLRLKKELGMMRNCGEMVAFCFRSRELVEVARMCRDLRQKVPEILEVEVDPTGGPGMMEAAMKVYSEKEKRNGFEKVHVLQGMQAIEVAMKRFFYAYKQVVAVMMGSSEADNGFTQIFLEPTYFPSLDAAKTFLAYYWENNNQNGVPC

SEQ ID NO: 39977 - protein, 358 aa, Glycine max
  Clone ID: 700943363_FLI.pep
GENSGGLCPMTMMPLVTSHHATNPSNPSNNTNNNENTNCLFIPNCSNSSGTPSIMLHNNNTDDDNNKTSTNTGLGYYFMESDHHHRNNNNNGSSSSSSSSAVKAKIMAHPHYHRLLAAYVNCQKVGAPPEVVARLEEACASAVTMAGDAAAAAGSSCIGEDPALDQFMEAYCEMLTKYEQELSKPLKEAMLFLQRIECQFKNLTISSTDFACNEGAERNGSSEEDVDLHNMIDPQAEDRELKGQLLRKYSGYLGSLKQEFMKKRKKGKLPKEARQQLLEWWSRHYKWPYPSESQKLALAESTGLDQKQINNWFINQRKRHWKPSEDMQFVVMDPSHPHYYMDNVLGNPFPMDLSHPML

SEQ ID NO: 39978 - protein, 571 aa, Glycine max
  Clone ID: 700943793_FLI.pep
LLKKTSARQISKTASPVEHFRQVLQKGSDVSIKELDTLLSLLAEKKRKMEQEEAERNMQILLDFLHCLRKQKVDELKEVQTDLHFIKEDINAVEKHRMELYRARDRYSVKLQMLDGSGGRKSWHSSMDKNSSGLLSSPLNLRGGLSSGSHTKKNDGKSHISSHGHGIQRRNVITGSDSQYINQSGLALVRKKRVHTQFNDLQECYLQKRRHAADRSHSQQERDISLISREGYTAGLEDFQSVLTTFTRYSRLRVIAELRHGDIFHSANIVSSIEFDRDDDLFATAGVSRRIKVFDFSAVVNEPTDAHCPVVEMSTRSKLSCLSWNKFAKNQIASSDYEGIVTVWDVTTRKSLMEYEEHEKRAWSVDFSRTDPSMLVSGSDDCKVKIWCTNQEASVLNIDMKANICCVKYNPGSGNYIAVGSADHHIHYYDLRNISRPVHVFSGHRKAVSYVKFLSNDELASASTDSTLRLWDVKENLPVRTFKGHANEKNFVGLTVSSEYIACGSETNEVFVYHKEISRPLTSHRFGSPDMDDAEDEAGSYFISAVCWKSDRPTILTANSQGTIKVLVLAA

SEQ ID NO: 39979 - protein, 106 aa, Glycine max
  Clone ID: 700943844_FLI.pep
KRENAGEEVLLRLLRQAIPRHTSRSETTRSGHSTPPSQSSLGFCRYGDSCKYLHPVPNNNVQQPPIVTTPSPSPGSVVGVSFGNLPPSLQPPPDGVYLHLPFLDWG

SEQ ID NO: 39980 - protein, 239 aa, Glycine max
  Clone ID: 700943933_FLI.pep
LALASAHVIGALSFPRTNRQAKKESAPINGGSCKFGANCKFNHPDPTAVGGGGGNPPSGYGNGGSISLQGVSQTSVPSWSSPRTLNEASPFVPMMLSPTQGVSTQSSDWNGYQASVYLPERSIHPPSTFVMNNPAIDTNVYMHHQKQMPVDEFPERPGEPECSFFLKTGDCKFKSNCKFHHPKNRVTRLPPCNLSDKGLPLRPDQSVCSHYSRYGICKFGPACKFDHPDKLAARDDSWT

SEQ ID NO: 39981 - protein, 158 aa, Glycine max
  Clone ID: 700943934_FLI.pep
MQLSVHSLIVILFLATAFLIIIFIIHLRYRLLRFFFIPTSRTFRLFLVIGSHVLLVLHFPFLRLCHIRCFFSIRHGLPFCSSSFAHSRHCFVFRMFFVEYLPELLHENEESTWRPLWLVRVFRCLPLAGGFPSLGGGSLLIHSKFGIGSLRFGLGLSS

SEQ ID NO: 39982 - protein, 75 aa, Glycine max
  Clone ID: 700944035_FLI.pep
VTQPYYCLASILIHKFVYSFPYPIQARIFILCCQSSFHVSKFLHPLREVGNYMLLSKGFLFGLRPLHIIRKICLA

SEQ ID NO: 39983 - protein, 228 aa, Glycine max
  Clone ID: 700944139_FLI.pep
ALRNGSDFPYVSRDGGRLIEAKDVVFECGPKCGCGPGCVNRTSQRGLRYRLEVFRTAKKGWAVRSWDFIPSGAPVCEYTGILARAEDMDSVLENNYIFEIDCLQTIKGLGGRERRSQDGEIPANLLDKYHDQCSESVPEFCIDAGSTGNIARFINHCCEPNLFVQCVLSTHDDLRLARIMLFAADNIPPLQELTYDYGYVLDSVLDSDGKIKQMPCYCGASVCRKRLF

SEQ ID NO: 39984 - protein, 105 aa, Glycine max
  Clone ID: 700944140_FLI.pep
ASFPKKRKSGAWRTASTFSTARAWTVGSITIRRRVRCAEVRWCHIRSSKNTTSDYGRLLEFRSFITKTITRLPSEFFFFFFHLYNYIYLFLLWWGDLTASVAKCI

SEQ ID NO: 39985 - protein, 209 aa, Glycine max
  Clone ID: 700944436_FLI.pep
SFSAAKLTNSLVHLDLKARKMSFIGTQQKCEACDKTVYPVDQLSADGTAYHKACFKCSHCKGTLKLSNYSSMEGVLYCKPHYEQLFKETGSFKKNFQSPAKQAVKTTPELTRSPSKAASMFSGTQEKCATCGKTAYPLEKVTVEGQAYHKSCFKCSHGSCPITPSNYAALEGVLYCKHHFSQLFKEKGSYNHLIKSASIKREANSVPQA

SEQ ID NO: 39986 - protein, 669 aa, Glycine max
  Clone ID: 700944554_FLI.pep
APAMPRASRSTRRRAKFRRAEDNQKCAFDLLATVAGKLLQERENPTMSSDTSLEKDQCGFVKECQDANKPSKSEISDEGSCDNSGFSRLSSQTNKKNCGLKEFTHLAIDGDVGIASIVTSSSCLERFIAEKMVDSNSHFKVENVTSKVNLDFSDYPKDSDFKLDGDTSKGKDELHKFEKVPIGSGIDMCNFEDPLDVNPPALISLGGNAKLSGYNDRIPCSLLSKSRDNVPVVSRDDDENSSGCTHPINTETKSFRPKTCIGKRMASNFQKVAEKTKNYALSNNDGDWKRTYLSKRNCNKHQSSQMNIPFKKRKLFNYRSVANSNGLIRRGGIYYSPENCMNQDGCDSPPGMHKDPGMSSLEACQHQTLRSIGSHVNLRIKSFRVPELFIEVPETATIGSLKRTVMDAVTAVLGGELHIGVFLQGKQVKDDSKTLLQTGISHHNELDALGFTLEPNSSQSLPIVCASHSPRPKADITEPVIRYPSSPAVIHQRIQGNSDMLPEHQVTSLGRHFESDHDSAPSPVNASVDKNMKDSKELVTVPEMDEELAMVPVHQKPKRSEIVQRRIRRPFSVDEVEALVQAVEKLGTGRWRDVKLCAFDNAKHRTYVDLKDKWKTLVHTARISPQQRRGEPVPQELLDRVLVAHAYWSQQQTKSQHKHHPETETVFSF

SEQ ID NO: 39987 - protein, 269 aa, Glycine max
  Clone ID: 700945029_FLI.pep
FFHLIMAATTRSRASIYDVFLNFRGEDTRYGFTGNLYRALSDKGIRTFFDEEKLHSGEEITPALLKAIKDSRIAITVLSEDFASSSFCLDELTSIVHCAQYNGMMIIPVFYKVYPSDVRHQKGTYGEALAKHKIRFPEKFQNWEMALRQVADLSGFHFKYRDEYEYKFIERIVASVSEKINPARIHVADLPVEQESKVQDTHQEQEYREAFKVFDKDQNGYISASELRQVLIKLGQNTTVGEVEEMIATADFDGDGQISYDEFVKTMKI

SEQ ID NO: 39988 - protein, 130 aa, Glycine max
  Clone ID: 700945078_FLI.pep
VNEQWIQVQHLEQALHITKMRTLKAQRLTSVTRCTFMKFINVLLDDLRALHSYVFGERTIVSSLISQTLDQLKRCSSLTKKYHHQLQGFIKDLMERNELTASIANDELVFFLASALITFPLMSAWMLLSS

SEQ ID NO: 39989 - protein, 144 aa, Glycine max
  Clone ID: 700945089_FLI.pep
TATYYRHVRDPSSDGFAEIMMLQGSLLMGGQLNSHDHFKDWRLDVDNMSYEQLLELGERIGHVNTGLKEDEMGRNIRKTRLQFWDDTSKHQVDKECSICQEEYEAGNELGRLNCEHIYHFQCIKQWAAQKNFCPVCKQQVAARH

SEQ ID NO: 39990 - protein, 244 aa, Glycine max
  Clone ID: 700945149_FLI.pep
RLLAAYVNCQKVGAPPEVVARLEEACASAATMAGGDAAAGSSCIGEDPALDQFMEAYCEMLTKYEQELSKPLKEAMLFLQRIECQFKNLTISSSDFASNEGGDRNGSSEEDVDLHNMIDPQAEDRDLKGQLLRKYSGYLGSLKQEFMKKRKKGKLPKEARQQLLEWWNRHYKWPYPSESQKLALAESTGLDQKQINNWFINQRKRHWKPSEDMQFVVMDPSHPHYYMDNVLGNPFPMDLSHPML

SEQ ID NO: 39991 - protein, 150 aa, Glycine max
  Clone ID: 700945176_FLI.pep
LGEKNITLTSWREGASMIRHRLRQKKVLLILDDVDKHKQLRAMVGRSGWFGAGSRVIITTRDKHLLKYHGVERTYEVEVLNHNTALQLLTWNAFKREKIDPSYEDVESALEHYKRSPGNEIILEILKVSFDALGEEQKNALKRKIRNFEL

SEQ ID NO: 39992 - protein, 178 aa, Glycine max
  Clone ID: 700945181_FLI.pep
NLLNLLIVSSFAELIFSYLLYVTGQRVLYVDIDVHHGDGVEEAFYTTDRVMTVSFHKFGDFFPGTGHVKDIGVGSGKNYAVNVPLNDGMDDESFRSLFRTIIQKVMEVYQPEAVVLQCGADSLSGDRLGCFNLSVRGHADCLRFLRSFNVPLMVLGGGGYTIRNVARCWCYEVCFFLF

SEQ ID NO: 39993 - protein, 81 aa, Glycine max
  Clone ID: 700945323_FLI.pep
IVDEHSPIQNRWIWKWRLKLEGKFGAKASSVQGNALKIVAKPEFQAKLKFRQRAKDSSLAKQELVAEEEFCCVHLRSVYFG

SEQ ID NO: 39994 - protein, 283 aa, Glycine max
  Clone ID: 700945325_FLI.pep
RKYSAKDNDDLCIVCWDGGNLLLCDGCPRAFHKECAALSSIPRGDWYCQFCQNMFQREKFVAHNANAVAAGRVEGVDPIEQIANRCIRIVKDIEADLSSCALCRGVDFSRSGFGPRTIILCDQCEKEYHVGCLRDHKMAYLKELPEGNWLCCNDCTRIHSTLENLLVKGAERLPESLLGVIKKKQEEKGLEPIIDVRWRLLNGKIASPETRPLLLEAVSIFHECFNPIVDAASGRDLIPAMVYGRNVRGQEFGGMYCALLIVNSSVVSAGMLRIFGSDVAELP

SEQ ID NO: 39995 - protein, 93 aa, Glycine max
  Clone ID: 700945368_FLI.pep
KGKLPKDARQKLLNWWELHYKWPYPSESEKVALAESTGLDQKQINNWFINQRKRHWKPSEDMQFMVMDGLHPQSATLYMDGHYMADGHYRLGP

SEQ ID NO: 39996 - protein, 171 aa, Glycine max
  Clone ID: 700945486_FLI.pep
THSNRNRKKIMSEAEELPRSIVRRVVKDKLSRCSEDGEISVSKDALLAFSESGRIFIHYLSATANDICKESKRQIINVEDVFKALEETEFPEFLRPLKASLEEFRKKNAGKKAAVSKGKDDEPRKKRKLEGESPDKGEGSDKAELSDKGEDPDKGESDKGESGDETNDLKE

SEQ ID NO: 39997 - protein, 229 aa, Glycine max
  Clone ID: 700945759_FLI.pep
SDGKTFYCLEMAKYFNPGEAEAMNQSVAYLLSKLSYIPSTLFLSEVSYVEFLDRVHVSEKKLRAQGLWEVPHPWLNLLIPRSEIHNFAEEVFGNILKDTNNGPILIYPVNQTRWNSKTSLITPEEDIFYLVAFLSLALPNSTGADSLEHILAQNKRVIDFYTGAKMRVKQYLPITAHRKNGKSILGHDGRHSWKEKGPMTTSTASPGHKIFQRLSPLRVSFLVCCKVVN

SEQ ID NO: 39998 - protein, 403 aa, Glycine max
  Clone ID: 700946025_FLI.pep
IYALSYFVCRFVYVELLEIRKDVQCPICLGIIKKTRTVMECLHRFCRECIDKSMRLGNNECPACRTHCASRRSLRDDPNYDALIAALYPDIEKYEQEELEFREEEKNRNKQIQASIAKVVQRQSEALVKRRKDTPGAFVTRPQRNQRNIHSRRQTQAIEGSEDNEEENDNNEKDSSSADERSTEHRQRRRKRWARVRPSQPSSSMASPDGGCNDSDMDISKENRGISRQVSKHGKLTWGRGGFRSNTRHGSGGGSNNKSSRSSRLSKFVDHLRNLDENTDEFDVHLMLVSLDQLSTPSLQQPYLCCRPTLSVKHLYEHVARQTPLPVEGIEIVAVKGCCSTNCDKSADENSALAYDELSKLVIDPHKDELEILQGHETLAGLRSKCISKMGHLIIAYKQKEVS

SEQ ID NO: 39999 - protein, 476 aa, Glycine max
  Clone ID: 700946118_FLI.pep
NTAPRSNGYASTSLNIEAPPHQTDVSGTSHDHFLPSSSAGMFYAVPENYVHQPSNSNYDRQAFSAADGGFIDLTMGNGRGPHKRKSPGIPPVCERGSTSRYSNATNAADRPTSSELQPEKPNMDSLYMPWDHVNMTPTFRGRGLSIRGEGPLRNVRSRSALDLESNLARTHLSNTHPHNSYSTGLPIDHSNMVDLSTQTSGTLTRDWSPMSICPPHGRVSSSDANAFNHEASHFLIGSSSSNAPVDVGGFHNEFGTSRNPTAPQSFHNNLTQTARGVHSNYSQRSTPTFRASSSLRLGRVAPSDDGLHMVSESYSSRQPRPLTTVGWQNNNRNGRSRIPSDRYRSLDDEGFMIVDRTSLYGPRNMLDRHRDMRMDIDNMSYEELLALGERIGHVSTGLSEDLISKYLTETIYCSSEQSQEEACAICLEEYKNMDDVGTLKACGHDYHVGCIRKWLSMKKVCPICKASALPEDKKGK

SEQ ID NO: 40000 - protein, 368 aa, Glycine max
  Clone ID: 700946334_FLI.pep
VNRKKKPTMGRPPCCDKVGIKKGPWTPEEDIILVSYIQEHGPGNWRSVPTNTGLSRCSKSCRLRWTNYLRPGIKRGNFTPHEEGMIIHLQALLGNKWAAIASYLPQRTDNDIKNYWNTHLKKKLKKFQAALDPHSASDSTASGQFLPKSFSDRRSTLDISSNNNNNHGSSIRLSHHQSQSSSTTTYASSTENISRLLEGWMRSSPKQLNKGSIISQYDEDHQLQGINDDDDNNNNNFVSTTKLVNLHHLHQHKIRNKDHEQEGGGVDNNMVSHHEEFDSILSFENQNNAAWDKSTCDSMPEKSSEASAAADHHHHHHHDIAAAHERNNVRQKSENSSGAPPLSFLEKWLLDENVGHQVEEMMELSPMF

SEQ ID NO: 40001 - protein, 499 aa, Glycine max
  Clone ID: 700946369_FLI.pep
EVSRKLAELGYQRSAKKCKEKFENVYKYNKRTKENKSGKSHGKAYKFFDQLQALENQFTVSYPPKPQPTSTLTTTNTLTSDHGNKVISYVTPFPSTNPTLIPPSPQTNTNTTTTTTTTSTTDPRDSSPPQTNNNNNSVPHSLPNMNAPFLTTTTSTSSSTASDEDLEERYRRKRKWKDYFRRLTRKVLLKQEEMQKKFLEAMDQRERERVAQQDNWRMQEMARINREHEILVQERSTASAKDAAVIALLQKMYGQQNPTQHVEVEPPQQQKQTMPQSQPPILMPNNNFEVKKMNNGHSATSTTTTTTSPVSSSSSSRWPKAEVHDLIRLRTSLEIKYQENGPKAPLWEDISIAMQRLGYNRSAKRCKEKWENINKYFKKVRESSKERREDSKTCPYFHELEALYKEKGKSQNPFGMFQNMTPNETMMMEPLMVQPEQQWRPPPQSLEEGIGKDNASEEYNQEKEEEVEENGGDDDDNIEEDGDSVEDAGPNPCEIATNN

SEQ ID NO: 40002 - protein, 247 aa, Glycine max
  Clone ID: 700951736_FLI.pep
QLTNSNNIMVQSKKFRGVRQRHWGSWVSEIRHPLLKRRVWLGTFETAEEAARAYDQAAILMSGRNAKTNFPITQTPEGDPKSTTSEDTPSTTSKDLEEILHAKLRKCGKVPSPSMTCLRLDPENSHIGVWQKRAGRRSDSNWVMTVQLGKKSVNVNNNDTHHQADSSSSSSLSSSLPSSEHHHIESPSLAVTGNLHHQEVVRGEIDEEERIALQMIEELLNDRNCPSPSFNNNIQERDGADHDHFFL

SEQ ID NO: 40003 - protein, 420 aa, Glycine max
  Clone ID: 700951746_FLI.pep
LIVLSQNGGSNRGGFNIVSSSAKSSIHLDGLFNIISYDLVPKLQNMLMTCNFKVVIADESHFLKNAQAKRTTASLPVIKKAQYALLLSGTPALSRPIELFKQLEALYPDVYRNVHEYGNRYCKGGFFGVYQGASNHEELHNLIKATVMIRRLKKDVLSQLPVKRRQQVFLDLAGKDMKQINALFRELEMVKAKIKAAKSQEEAESLKFAQKNLINKIYTDSAEAKIPSVLDYVGTVIEAGCKFLIFAHHQPMIDSIHEFLLKKKVGCIRIDGSTPAASRQQLVTDFQEKDSIKAAVLSIKAGGVGLTLTAASTVIFSELSWTPGDLIQAEDRAHRIGQVSSVNIYYLLANDTVDDIIWDVVQNKLENLGQMLDGHENALEVSASLPVNSPSKQKTLDQFVRRCDNTDGLEYEPNPKRPRN

SEQ ID NO: 40004 - protein, 83 aa, Glycine max
  Clone ID: 700951826_FLI.pep
KRNSNQNKSRHKTRQQRRKQLILLSDLSTCIKCLLILGLLVPERLAYVWRFDTWLPNTLAYIISPKIPNVLSIEPLVLIIGEV

SEQ ID NO: 40005 - protein, 154 aa, Glycine max
  Clone ID: 700952013_FLI.pep
MLLSSVHSLIVILLLATAFLVIILIIHLRYRLLRFFFIPTSRTFRLFLVISSHVLLVLHFPFLRLCHIRCFFSIRHRLPFCSSSFAHSRHCFVVGMFLVEHLPEFLHENEESTWRPLWLVRIFRCLPLSGGFPSLGGGALLIHSKFGIGSLRFG

SEQ ID NO: 40006 - protein, 349 aa, Glycine max
  Clone ID: 700952301_FLI.pep
SEEEDSERGGSRTLDKKTNKIFGFAVAHDDSDHPPVTHQFFPVEDSELPVSAAAAGSGGGGGGSSFPRAHWVGVKFCQSETPGAGKAVKVSEPMKKSRRGPRSRSSQYRGVTFYRRTGRWESHIWDCGKQVYLGGFDTAHAAARAYDRAAIKFRGVEADINFNIEDYEEDLKQMTNLTKEEFVHVLRRQSTGFPRGSSKYRGVTLHKCGRWEARMGQFLGKKYVYLGLFDTEIEAARAYDKAAIKCNGKEAVTNFDPSIYDSELNSESSGGVAADHNLDLSLGNSSSKHNNSQTSGNHFANSATDQHMPPESNWRNGGSKPKLVNILPKPCGRSNIEAYGHGESETLRL

SEQ ID NO: 40007 - protein, 292 aa, Glycine max
  Clone ID: 700952549_FLI.pep
PPVKLHQGCLGHALFKIERPFVCAVDDCQASYRRKDHLTRHLLQHEGKIFKCPVENCNSEFSLQSNMKRHTEEIHDDSSTTTSSDKSHKQHMCPEIGCGKVFRYASQLQKHEDSHVNLESVDMVCLEPGCLKHFTNVQCLQAHVKSSHQYMTCDICGTKQLKKNIKRHLRSHEAEGSSSETFQCEFKGCSCTFSRKSNLDKHKKAVHLNVKPFACGFPDCGMRFAYKHVRDNHEKTAKHVFTLGDFEEADEEFRSRPRGGRKRTCPTVEVLIRKRVTPPSQLEHWLFMQDSE

SEQ ID NO: 40008 - protein, 347 aa, Glycine max
  Clone ID: 700952682_FLI.pep
FFFHFCNIYVRFGNTLLSLSFLLFLPLLGLLITTTVVTILFLAVKNLEISSFTMDWCQNQNGSFKSTDALCIAAEADEEELDFTKVDKPRPIERCKSCEVRSLSELSKVSENSSYSIDHLDKAASLQPKSGMNTPGSLVLDPQSHPIVSEGWEALMRSLVYFRGQRVGTIAAMDSSDEKINYDQVFVRDFVPSALAFLMKGEPEIVRNFILKTLRLQSWEKMIDKFHLAEGVMPASFKVLHDPVRNHETLIADFGESAIGRVAPIDSGFWWIILLRAYTKSTGDNSLAELPECQKGMRLILNLCLSEGFDTFPTLLCADGCCMIDRRMVSLLDSMITATSYFTSPRE

SEQ ID NO: 40009 - protein, 171 aa, Glycine max
  Clone ID: 700953878_FLI.pep
ALAELLPSLKEGGHRALIFSQWTSMLDILEWTLDVIGLTYKRLDGSTQVAERQTIVDTFNNDTSIFACLLSTRAGGQGLNLTGADTVVIHDMDFNPQIDRQAEDRCHRIGQTKPVTIYRLVTKGTVDENVYEIAKRKLVLDAAVLESMEEINEGDMPEKTMGEILSAILLS

SEQ ID NO: 40010 - protein, 344 aa, Glycine max
  Clone ID: 700954109_FLI.pep
NTCFLTVAHQRGLGSGSGKFFAAEQGGDEEAEESTEVGSVPSHVVSASAASAQTNQWVPRGSGFPMMSRFMHAPSPVLSSSHPHLGVGHKREREDDTGAGASGGVAIAAASSQTQTQEIESAGGDRRRRYRGVRQRPWGKWAAEIRDPHKAARVWLGTFDTAEAAARAYDEAALRFRGNRAKLNFPENVVPVPPPPPVPDLPASAVAGSDSISGSGSVVAGFSPTLMQGAPFQGSSAFLRDYWGYSQLLRSTGDFHGLDQWFFDSQMAAFQSSSSSLLPSPPPPSFSPSSASYPLFSSSQQMGIFRPPGEQGHGGEDGGSGSEFSELPPSTWSDTSGYPPPPPG

SEQ ID NO: 40011 - protein, 307 aa, Glycine max
  Clone ID: 700954809_FLI.pep
ELPAMASFGAEEWYFFSPRERKYPNGARPNRAATSGYWKATGTDKPICSGTQKVGVKKSLVFYGGKPPKGVKTDWIMHEYRVAENKPNNRPPGCDLGHKKNSLRLDDWVLCRIYKKGNTQRSHERDDSMDDMIGEVPPSINVGHMNARFHLSKMSTSYSGALLENDRNTLEGVVIGNGNVNGINTNSINAISSSSSHHQFASSNSKAELLPFAPSNNNTSNSASKRTLSSLYWNVDDDNDDDDHKHFNLDSNGNVSVLRTEENNNNTNGTSGSFATLLNQLPQTPSLPQIDGLLRTPYQIQGTNWYG

SEQ ID NO: 40012 - protein, 344 aa, Glycine max
  Clone ID: 700955317_FLI.pep
ANSNMHIQAEHSLTQAPAAASNTTQQLMPPLTSDSWAAMTESIDHSHSEQRLQSSLLNVDKPADDGYNWRKYGQKQVKGSEFPRSYYKCTNPNCPVKKKVERSLEGHVTAIIYKGEHNHQCPHPNKCSKDTMTSNENSNMQGNVDSTYQGTSTNSMSKMDPESSQATADRLSGTSDSEEVADHETEVDEKNVEPEPKRRKAEVSQSDPPSSHRTVTEPRIIVQTTSEVDLLDDGYRWRKYGQKVVKGNPYPRSYYKCTTQGCNVRKHVERASTDPKAVITTYEGKHNHDVPAAKTNSHTMASNTASQLKSHNTNPEKHNFGSRGMGGNEQQPVARLQLKEEQIT

SEQ ID NO: 40013 - protein, 336 aa, Glycine max
  Clone ID: 700955837_FLI.pep
ELIISNCSDPYISYFLCNNLKNPTKTPTMSTIAKRDLSSNEEESELRRGPWTLEEDSLLIHYIARHGEGRWNMLAKSAGLKRTGKSCRLRWLNYLKPDIKRGNLTPQEQLLILELHSKWGNRWSKIAQHLPGRTDNEIKNYWRTRIQKQARQLNIESGSKRFIDAVKCFWMPRLLQKMEQSNSPSPHHSSMTNMMNLGNSGEASMSSMSSSFNINPSMSSSSSPPQREFIMDDANHFNTMSNPINPSPDSFQFSQLLEISEHPKSPSNVFENNVCSYPIQDNCYVDTNNYGMEGINMDPLSAMDTYDFPQFDFQTAGNGWMLDSMGDSTLWNMEAM

SEQ ID NO: 40014 - protein, 318 aa, Glycine max
  Clone ID: 700955906_FLI.pep
ENTKRLCSGCKVVCTIACFACDKYDLTLCARCYVRGNYRVGVNSSDFRRVEISEETKTDWNEKETTNLLEAITHYSDDWKRVSQHVPGRTEKECVAHFLKLPFVDQFQHYQQHPAVNGTDDSCNPLKRVTNADAESELDTVASAEPNKRMRLTPLADASNPIMAQAAFLSALAGSEVAQAAAQAALTTLSEVYKATKINYRSFPRNTLLQDAGIMSNGGNTSDSFQGSRLHANIQLEKEELDVEKAISEIIEVQMKNIQDKLVQFEDLDLLMEKEGQQLEQMKNMFFLDQLTLLFHKSSAPKTGECQEGNNVKTNHGY

SEQ ID NO: 40015 - protein, 228 aa, Glycine max
  Clone ID: 700956458_FLI.pep
RWQGPSSYAPLILPQGVVSVPGWSAYSGQMGSISTSDSPQQAMRNGQTYGTSRQGELAGSQGAYSQFRSGTVPVGFYTLQRENIFPERPGQPECQFYMKTGDCKFGAVCRFHHPQERLVPAPNCVLSPIGLPLRPGEPLCVFYSRYGICKFGPSCKFDHPMEIFSHNISASPSADAPSRHLLGSSSGTAALNLSSEGLVESSSAKPRRLSLSETRQIPSGDDDIDDDG

SEQ ID NO: 40016 - protein, 198 aa, Glycine max
  Clone ID: 700956625_FLI.pep
ENMAFAGTTQKCMACDKTVYLVDKLTADNRVYHKACFRCHHCKGTLKLSNYNSFEGVLYCRPHFDQLFKRTGSLDKSFEGTPKIAKPEKTGEEKPAATKVSSMFGGTRDKCAGCQKTVYPTEKVTVNGTPYHKSCFKCTHGGCVISPSNYIAHEGKLYCKHHHIQLIKEKGNLSQLEGDHEKSTEEEKINGEVVAAET

SEQ ID NO: 40017 - protein, 367 aa, Glycine max
  Clone ID: 700956765_FLI.pep
NALDNSSLNSEAKQKAIAMSGEARSCDYCGHSTALLYCRADSAKLCFSCDREVHSTNQLFSKHTRTLLCDACDHSPATILCSTDTSVLCQNCDWEKHNPALSDSLHERRPLEGFTGCPSVSELLSIVGFSDLSKKSLLSSPQGSGADGIFGGEIEGLSDLFVWDSPSFVTLDDLISSSPSSHSFQAMEVPPLPKNRKAACGQHKEEILSQLRELAKSEPLDLEPYVSSGNLSSGFEREPEADIFPSHEWHRESSEPMYQVVPPDPLMRTYTEEIPFKHSTSAVGETQTYGDNGGKPSISLKSETLSTTPKAAACELTSQERDSALLRYKQKKKTRRFDKHIRYESRKVRAESRVRVKGRFAKMEHEH

SEQ ID NO: 40018 - protein, 81 aa, Glycine max
  Clone ID: 700957441_FLI.pep
LQTMDFKSLLMDIHYSRWLYIGNLAYFIKSDHILLLMSNTQYNVSYIAIYILHDINFNYRRIRPPIVCVPPVHEYHPCILW

SEQ ID NO: 40019 - protein, 221 aa, Glycine max
  Clone ID: 700957658_FLI.pep
PLFPTQPSLYHTHKSMDKKQQCKTSQDPEVRKGPWTMEEDLILMNYIANHGEGVWNSLAKAAGLKRNGKSCRLRWLNYLRPDVRRGNITPEEQLLIMELHAKWGNRWSKIAKHLPGRTDNEIKNYWRTRIQKHIKQAENFQQQSSNNSEINDHQASTSHVSTMAEPMEMYSPPCYQGMLEPFSTQFPTINPDQSSCCTNDNNNINYWSMEDSWSMQLLNGD

SEQ ID NO: 40020 - protein, 115 aa, Glycine max
  Clone ID: 700957937_FLI.pep
FQLKLYIFYAEQNRINFISYRTNLNQNITPIQKNRYFFAAIESNNTKNFLASKTIEGPSLPLKSINNIHSSNRLPPSVLSVGHSIANHVLQEYLQNSSGFLVDQTTDPLHATSSR

SEQ ID NO: 40021 - protein, 265 aa, Glycine max
  Clone ID: 700958281_FLI.pep
LFLKPKSCDITNRTLFVYFLCGFSIRANFCDTQMDFALNPCPLRSSTFVNFVERVKQLGTLAFSAVIGNIFSAILTFCFALVGTLLGALTGALIGQETESGFIRGAAVGAISGAVFSIEVFESSLVLWQSDESGIGCVLYLIDVIASLLSGRLVRERIGPAMLSAVQSQMGAVEASFDEVQNIFDTGGSKGLSGDLVEKIPKIKITTDNNFDASGDRVSCSVCLQDFMLGETVRSLPHCHHMFHLPCIDKWLFRHGSCPLCRRDL

SEQ ID NO: 40022 - protein, 608 aa, Glycine max
  Clone ID: 700958579_FLI.pep
ENHIARRPISKRREEKKKKEFHNNHKLLEMKNGLDTTHEKKKRKLAILSVSSLLLVAMVVAAAVGIREGADVVEEGGDSIVKSQRNVQVICESAEYKETCHKSLAKASETSDLKELIITAFNATAEEIAKQIKNSTLYHELATDDMNKQAMDICKEVLGYAVDDMHQSVRKLEEFELNKLNDYAYDLKVWIAGTLAHQQTCLDGFENTTNEAGKTMARVLNTSLELSNNALDIVNGVSNLFKGLNLSSFSNNNNRKLLSEVDGFPTWVSEGQRRLLQAADAKADVVVAQDGSGQVKTIHEALKLVPKKNKKPFVIYVKAGVYQEYIMINKHLTHVTMIGDGPTKTRITGSKNYVDGIKTYNTATFGVNAANFMAMNIGFENTAGAEKHQAVALRVTADKAVFYNCNMDGFQDTLYTQSQRQFYRDCTVTGTIDFVFGDAVAVFQNCKFIVRKPMENQQCMVTAGGRTKIDSPSALVFQSCIFTGEPDVFALSPKIAYLGRPWRVYAKVVIMDSQIDDIFVPEGYMPWMGSAFKDTSTYYEFNNRGFGANTQGRITWPGFKVITPIEATDYYPGKFFEIANSTERDSWIVGSGVPYSLGPIIALPLPTA

SEQ ID NO: 40023 - protein, 203 aa, Glycine max
  Clone ID: 700959152_FLI.pep
NMSHFGRKLSRSSTVRRRFHHRVSLLQRCLLRVLHRILLCSGSKATNATYSMLPPALPSPPPPVSSDGELGREEMDLSSSAVFQTHDLDSDLVSLKISLLGDCQIGKTSFLAKYVGDEKEQQGNQREGLNQMDKTLVVEGARISYCIWEVQGDGKSEDQLPMACMDSVAILIMFDLTSRCTLNRYLLCCVTFKFKINSSFFKS

SEQ ID NO: 40024 - protein, 194 aa, Glycine max
  Clone ID: 700959213_FLI.pep
ANPAVSKRTSSGPAVGWPPIRSFRKNIASGSTSKLPSGSHQQHQNVVPYKVASQKPTDKSGKGLFVKINMDGVPIGRKVDINAYDSYEKLSSAVDELFRGLLAEMKLSHIGSSQCCSGQRDSCAGGIQNKEQEEKSNKGLLVGSGEYTLVYEDNEGDRMLVGDVPWHMFVSTVKRLRVLKSSDLPAFTLGSKQD

SEQ ID NO: 40025 - protein, 275 aa, Glycine max
  Clone ID: 700959857_FLI.pep
RGPTMVANTLHAAAIALTESDDWDWFINLSASDYPLVTQDDLLHAFSHLPRDLNFIDHTSDIGWKDHQRARPIIIDPGLYMTKKQDVFWITQRRSRPTAFKLFTGSAWMVLSRSFIDYCIWGWDNLPRTVLMYYTNFISSPEGYFHTVVCNAQEFKNTTVNSDLHFISWDNPPRQHPHYLSLDDMKRMVDSNAPFARKFHGDDPVLDKIDTELLSRGPGMVVPGGWCIGSRENGSDPCSVVGNTTVLRPGPGSERLETLINSLLSDENFRPKQCV

SEQ ID NO: 40026 - protein, 319 aa, Glycine max
  Clone ID: 700959859_FLI.pep
DLIRKEYDMKCKFLRNLESKGEKTSRIDKMRAVVKDLHSRIRIAILRIDSISKRIEELRDKELTPQLEELIDGLSRMWEVMFECHKLQFQTMSTVYNNSHAGIAATHSELRRQITSYLESELHYLSSSFIKWIGAQKFYLEAINGWLHKCVSLKQKPGKKKRPQRPLLRMYGPPIYATCEIWLEKLGELPVQDVVDSMKSLAGEIAQFLPRQEKNQGKGANHSHLTTWSANNIRSESSDNLLRDGTLEDWDSGFDQFRASFLGFLAQLNNFAGSSIMMYTDLRQAIQIAKKNYHHRSNSQAQDGQWNSLSQDDNSMSQS

SEQ ID NO: 40027 - protein, 211 aa, Glycine max
  Clone ID: 700960315_FLI.pep
HAHKVMDKKPCNSSSHDPEVRKGPWTMEEDLILINYIANHGEGVWNSLAKASGLKRTGKSCRLRWLNYLRPDVRRGNITPEEQLLIIELHAKWGNRWSKIAKHLPGRTDNEIKNFWRTRIQKHIKQAETSQQHGNSENNDHQASTSTSKVSTMAHPNETFSPPSYQGTFEPFQPQFPTITDQSSCCTTTNDNNNYWSIEDIWSSMQLLNGD

SEQ ID NO: 40028 - protein, 120 aa, Glycine max
  Clone ID: 700960331_FLI.pep
GPFIKAFWGLVRRSCSAQCAWRMLRLGVKQRRCHVSTSSMVIALSHGSNFMVLVQFAGFRCHLRIQLLKPMWELEMGTIRTVSWSELEKRDQEMEGGTGFLCCNHLTIFFLILDQYFVGF

SEQ ID NO: 40029 - protein, 207 aa, Glycine max
  Clone ID: 700960664_FLI.pep
VMDKKPCNSSSHDPEVRKGPWTMEEDLILINYIANHGEGVWNSLAKASGLKRTGKSCRLRWLNYLRPDVRRGNITPEEQLLIIELHAKWGNRWSKIAKHLPGRTDNEIKNFWRTRIQKHIKQAETSQQHGNSENNDHQASTSTSKVSTMAHPNETFSPPSYQGTFEPFQPQFPTITDQSSCCTTTNDNNNYWSIEDIWSSMQLLNGD

SEQ ID NO: 40030 - protein, 502 aa, Glycine max
  Clone ID: 700960825_FLI.pep
DLQGYEWRFKHIFRGQPRRHLLTTGWSNFVTSKRLVAGDTFVFLRGNNGELRVGVRRIAPVQSSMPSSVISSQSMHLGVLATASHAVATQTLFVVYYKPRASQFIVSVNKYLEAINQKCNVGMRFKTRFEGDESPENYKRFSGTIVGVEDISPHWVNSNWRSLKVQWDEPASFPRPDRVLPWEIEPILASVPTTSSQTAAIKNKRPRQASELADLGDTALASPTFWDAGLTQSDMAKLSVMAEIKRSDSSSHMWHHNSKSSNNGISMNQTEAIWLSSPSQLYHDTTDDSKSISAWPISKPHSERLNNDHFLDQVDKEINKVEAATSYRLFGIDLIDHARNNSLSAENASGITSECKIDVNHVSDISKASKEWNQEQLQLSPKETQSKQVCSRSCTKVQMQGVAVGRAVDLTTLDGYDQLVDELEKMFDIKGQLQLRNKWEIVFTDDEGDMMLVGDDPWLEFCKMVRRIFIYSSQDVHKLSSGSKLPISSMEEIVTSLDTTET

SEQ ID NO: 40031 - protein, 254 aa, Glycine max
  Clone ID: 700961249_FLI.pep
KLMEVGLKKENMGFEETELRLGLPGNGGTEEVLIRKRGFSETETGHEDESATTVDLMLNLSSKEAATTAAAAADPTDKHKTLPKEKTLLPADPAKPPAKTQVVGWPPVRSFRKNMLAVQKSVGEESEKNSSPNASFVKVSMDGAPYLRKVDLKMYKSYRELSDSLGKMFSSFTFGNCESQGMKDFMNESKLNDLLNSSDYVPTYEDKDGDWMLVGDVPWEMFVESCKRLRIMKGKEAIGLGLAPRAMAKCKNRS

SEQ ID NO: 40032 - protein, 533 aa, Glycine max
  Clone ID: 700562167_FLI.pep
EEFKGRKVILGVDDMDIFKGISLKLLAVEQLLQQNQDLKGKVVLVQIVNPARSSGKDVQEAKKETNLIAQRINDTFGSNNYQPVILIDRPVPRFEKSAYYAVAECCIVNAVRDGMNLVPYKYIVCRQGTALMDKALTRKSDSPRTSMLVVSEFIGCSPSLSGAIRVNPWNIDAVADALYSAVTMNDSEKQLRHEKHYRYISSHDVAYWARSFVQDLERACKDHYTKRCWGMGLGLGFRVVSLSPGFRKLSVDHIVSAYKRTGRRAIFLDYDGTIVPKSSINKTPSPEVISVLNDMCNDPKNTVFIVSGRGRDSLSKWFTSCKMIGLAAEHGYFLRWSKDSEWETSPLSPDLDWKKIVEPVMQLYTEATDGSNIETKESALVWHHQYADPDFGSCQAKELLNHLESVLANEPAVVTRGRHIVEVKPQGLNKGWVAEKVLSNMVNDGNPPDFVMCVGDDISDEDMFESILRTVSCPSLPVVPEIFACTVGQKPSKAKYYLDDPADVMKLLQGLGASSKPKPRHLAQFQVSFESTV

SEQ ID NO: 40033 - protein, 183 aa, Glycine max
  Clone ID: 700962291_FLI.pep
MVNDTLVRQAAMVFKCILLMYYKNSRGRNYRKQGQMLTLVEYLLLLYRALLPTPVWYRFFLNKEYGSLFSSLMTGLYLTFKLTSVVEKVQSFFAAVKALSRKEMHYGAYATSEQVNAAGDLCAICQEKMHAPILLRCKHIFCEDCVSEWFERERTCPLCRALVKPADLRSFGDGSTSLFFQLF

SEQ ID NO: 40034 - protein, 334 aa, Glycine max
  Clone ID: 700962293_FLI.pep
KRLMGTCVIPMPQMELSSNDDEVGKASTDCSCEDQGSMRCVRQHIAEEREKHIKTFGVEKFTELGFTNMGEQVAENWSAEDEQLFHEVVFNNPVSLDKNFWNYLSIAFPSRTKKEIVSYYFNVFMLQRRAEQNRNDLLSIDSDNDEWQGSEGNDIATREEDEDSVAESPVCHDETCMADCHNNDLQAYNEYAADETCAANETVDFTNKNIDDDSQYDPIEMHHSSGSPLIQPQDQPIWQDSCDGKVKEDSCTSSDVGVASQETKVNTENGDHWCGNYNGVNNGYSQGYVLEHCDAKVWDSGFVSCSKNKIDFVPTCNMIEEVFGDGRRQDIRRA

SEQ ID NO: 40035 - protein, 408 aa, Glycine max
  Clone ID: 700962417_FLI.pep
LLTPCPSFFFLLLLCHCSKAHTSGSNPFHEGSDSLAIMGKKKKRVSSKVWCYYCDREFDDEKILVQHQKAKHFKCHVCHKKLSTAGGMAIHVLQVHKESVTKVPNAKPGRESTDIEIYGMQGIPPDILAAHYGEEEDDVPSKAAKVDIPPTQLVGGMIPPPLGTGYPPRPTLPTMPPMYNPAVPVPPNAWMVPPRPQPWFSQPPAVSVPPAAPYTQQPLFPVQNVRPPLPATAPALQTQITPPGLPTSAPVPVSQPLFPVVGNNHTTTQSSTFSAPPLPSSVPSVTSVMSANVPVDTHLSSNSSVTSSYQAIGIPGGAASNSHSYASGPNTGGPSIGPPPVIANKAPATQPATNEVYLVWDDEAMSMEERRMSLPKYQVHDESSQMSSIDAAIDKRILESRLAGRMAF

SEQ ID NO: 40036 - protein, 342 aa, Glycine max
  Clone ID: 700963048_FLI.pep
ILFKRKMSSGATHWCYACRQPIVLDGRDPVCPYCDGGFVQELDELRGIAPNHNHTFSSQSGDFHQMPDIFDAIHAFMGQRGSDQRFGLMDAVDNFMRHRMAGRNSNFDVRGRSGSLPVPEQSWGVYSSGPYLIFHGQVPGFTLSAGSPRGGPRRVDFGDYFMGPGLEELIEQLTMNDQRGPAPAARSSIDAMPTIKITQAHLRSDSHCPVCKEKFELGTEAREMPCNHIYHSDCIVPWLVQHNSCPVCRVELPPQGQASSRGTRSWGGRNASNSSSSGSNDSSRGRENSHQNHGRRNPFSFLWPFRSSNSNNNHYSETGGSSSSTTPDQNNGTSYSGWPFDR

SEQ ID NO: 40037 - protein, 621 aa, Glycine max
  Clone ID: 700963253_FLI.pep
TTAAASVSHCAKNVAGERLDDGFLCCGSCGRVLEDYFFAEEPSFVKNAAGQSKLSGNYVRTVQSEYSESRQRTLDRAYDEIKYLSFGLGVNDEHMAEQALTFYKIALERNFTRGRKSEQVHAACLYIAFRHNNKPYLLIDFSNYLRTDVYVLGAVFLQLCQVLRLGEHPIVQKPVDPSLFIHRYTKNLLKRGSKAVSDTALAIVASMKRDWMQTGRKPSGLCGAALYISALAHGIKCSKPDILKIVHVCEATLTKRLVEFEDTESSSLTVEELNTMAKEHEKNSMIMPGGGLKGCISKDLLCEHKEDSGVTHFALGLCEACYKDFDKLSGGLGGGLDPPAFQRAERERFKKTLPEESVDEACALANASNDQFKSHKEDLHAYVPERANVEHEATKDGKYDDSHREDESETLSDIDDEEVDLYIHDEEGKHIKKLLWETANREYLEEQAAKEAAAAANKKAFEANFENCSEDLLAARELAASSAEAVAKSRKEMRQKRAYEAKNTRPAQSAAEAFGQMSNKKRNLQGLKSKVNFELLNELFDEMENTDDLKKPKKVRFDLPLDNDDNIPSKVEDKNEDEMGLADEFDDEGDMGEMYQNTENMADKYFPEDGDFGYDDYDDYY

SEQ ID NO: 40038 - protein, 90 aa, Glycine max
  Clone ID: 700963673_FLI.pep
HDSCLTTCCQLEEINSRNHYRQSWEAGDQSMPYGGGGPENSHSQGFFQPLECNPTLHIGPDYRYNAVASDQITATTQPQQVSGFIPGWML

SEQ ID NO: 40039 - protein, 282 aa, Glycine max
  Clone ID: 700963825_FLI.pep
YFFCVRDRKYPTGQRTNRATGVGYWKATGKDREIYKAKALIGMKKTLVFYKGRAPSGEKTSWVMHEYRLEDEHSVHNPPKKAMNDWAICRIFQKSNGGKKMPISGLVRFSNFAKDMPSLMDSSPYNDSESKPVLGESSQPTCFSDPNQSEDQRTQDENIADSYETLMLASSYSSNPSDISPASWTFSKSAPTVSHQSLQVGNSHSSDYFMLHQEQSMLGMLIENHGASAGQRTQKAQDSKGSDADMSSVMYNNYEMFQRSFGNQEYSSPSVGHVYSSGLWGF

SEQ ID NO: 40040 - protein, 185 aa, Glycine max
  Clone ID: 700963839_FLI.pep
LGSYSTAEAAARAYDAALLCLKGSSANLNFPSSSSSSQHYIIPQDTAMMSPKSIQRVAAAAANNFLDNNAIAINNATTPPSPPLASTSSSFVSSPSMSSSSPLDQIDDDVSLLTPFGAYTTTTATTICDETNESMAMMESWYDLEGLQSPKYVDQMLSGAFFDIDSTQLLDDLYEESDIRLWSFC

SEQ ID NO: 40041 - protein, 286 aa, Glycine max
  Clone ID: 700964040_FLI.pep
KNPKEIQSSSSPNQRLEISDYTLSSFVFSFLSFLRQHHLSLSCSLFRVFVMGLGNDEEEDNNNNDKVVDDGDVGGGKSFGSVSCSICLEVVADNGDRSWSKLQCGHQFHLDCIGSAFNIKGAMQCPNCRKIEKGQWLYANGCRSYPEFSMDEWTHDEDLYDLSYSEMSFGVHWCPFGNLARLPSSFEEGEFSSSAYHDVLGHMPYLLNIQLCHLPAILARILLTLDQYIHPPPILVELYQKLQTSTIGMARLCPVTCQLPTHFLLLIFIIAVGNTTPLLSLQQVVV

SEQ ID NO: 40042 - protein, 246 aa, Glycine max
  Clone ID: 700964776_FLI.pep
PFVSPKHPHGHTPAGTKGGVHNKKKTMRKPCCDKENINKGAWSKQEDQKLIDYIQVHGEGCWRSIPKAAGLHRCGKSCRMRWLNYLRPGIKRGIFAEDEEDLIIKLHALLGNRWSLIAGRLPGRTDNEVKNYWNSHIRRKLIKMGIDPNSHKPHQSFPRPHVSSADHQGASTSESINNNKVPFFNSRGSAATDHHKISFTKEETSIISSPPLNLDLTISLPSPVEENKNSDHESAKTCDVDIDLNC

SEQ ID NO: 40043 - protein, 230 aa, Glycine max
  Clone ID: 700964981_FLI.pep
GHNLIVHYGLHRRMQVNRPFPAAEADIGRFHADDYVDFLSTVSPQILSENSHSHYRQLKRFNVGEDCPVFDGLFDFCRASAGGSIGAAVRLNREDADVAINWAGGLHHAKKAEASGFCYVNDIVLGILELLKVHRRVLYIDIDVHHGDGVEEAFYTTDRVMTVSFHKFGDFFPGTGHIKDIGVGAGKNYSLNVPLNDGLDDETFPWSVSPHHSKSHGCLSTGCSCSSMWS

SEQ ID NO: 40044 - protein, 245 aa, Glycine max
  Clone ID: 700965132_FLI.pep
EFSPKIPRARAMVSPENSNWLFDYPLIDDDVIPVGDSSFAVSASTFSWPPPPANVSVEIDASLGDSDGLKNPALKKRTKSDSSTASSSKACREKLRRDRLNDKFVELGSILEPGRPPKTDKASILIDAARMVTQLRDEALKLKDSNTSLQEKIKELKAEKNELRDEKQRLKAEKEKLEVQVKSMNAQPAFLPPPPAIPAAFAPQGQAPGNKLVPFISYPGVAMWQFMPPAAVDTSQDHVLRPPVA

SEQ ID NO: 40045 - protein, 415 aa, Glycine max
  Clone ID: 700966722_FLI.pep
HTIHPLSLLFFCSLVSCSCFLESVRSNQHNKMDAISCLDESTTTESLSISQAKPSSTIMSSEKASPSPPPPNRLCRVGSGASAVVDSDGGGGGGSTEVESRKLPSSKYKGVVPQPNGRWGSQIYEKHQRVWLGTFNEEDEAARAYDVAVQRFRGKDAVTNFKPLSGTDDDDGESEFLNSHSKSEIVDMLRKHTYNDELEQSKRSRGFVRRRGSAAGAGNGNSISGACVMKAREQLFQKAVTPSDVGKLNRLVIPKQHAEKHFPLQSAANGVSATATAAKGVLLNFEDVGGKVWRFRYSYWNSSQSYVLTKGWSRFVKEKNLKAGDTVCFQRSTGPDRQLYIDWKTRNVVNEVALFGPVVEPIQMVRLFGVNILKLPGSDSIANNNNASGCCNGKRREMELFSLECSKKPKIIGAL

SEQ ID NO: 40046 - protein, 240 aa, Glycine max
  Clone ID: 700966927_FLI.pep
FLPSFLPTMVMEESNPLDNEVQPTTSSSSFTITTPSTSSSSSIEEATNTTTKEKKKKRAISNIEGKHPTYRGVRMRQWGKWVSEIREPRKKSRIWLGTFPTPDMAARAHDVAALTIKGSSAYLNFPELAAKLPRPASTSPKDIQAAAAKASALDFGHQSHEAESELSQAVSSSIQTQSSSSSSNSSLKGVDDTFLDLPDLSLDLSHGADEFHYSSAWLVAGAEHIELGFRLEEPFLWESY

SEQ ID NO: 40047 - protein, 866 aa, Glycine max
  Clone ID: 700966936_FLI.pep
NQSSESVWLKVAKMFPFGQKGQKIKGTMVVMQKNVLDINSITSVGGIVDQGLGFIGSAVDALTFAATKISIQLISATKADGGKGKIGKSTNLRGKITLPTLGAGEQAYDVNFEWDSDFGIPGAFYIKNFMQNEFYLKSLILEDIPNHGTIHFVCNSWVYNSKNYKTDRIFFANNTYLPSETPAPLLKYREEELKNVRGDGTGERKEWDRIYDYDVYNDLGNPDSGDKYARPVLGGSALPYPRRGRTGRGKTRKDPNSEKPSDFVYLPRDEAFGHLKSSDFLAYGIKSVSQDVLPVLTDAFDGNILSLEFDNFAEVHKLYEGGVTLPTNFLSKIAPIPVIKEIFRTDGEQFLKYPPPKVMQVDKSAWMTDEEFARETIAGLNPNVIKIIEEFPLSSKLDTQAYGDHTCIIAKEHLEPNLGGLTVEQAIQNKKLFILDHHDYLIPYLRKINANTTKTYATRTIFFLKDDGTLTPLAIELSKPHPQGEEYGPVSEVYVPASEGVEAYIWLLAKAYVVVNDACYHQIISHWLSTHAIVEPFVIATNRQLSVVHPIYKLLFPHYRDTMNINSLARKALVNADGIIEKTFLWGRYSMEMSAVIYKDWVFTDQALPNDLVKRGVAVKDPSAPHGVRLLIEDYPYASDGLEIWDAIKSWVQEYVSFYYKSDEELQKDPELQAWWKELVEVGHGDLKDKPWWQKMQTREELVEASAILIWIASALHAAVNFGQYPYGGLILNRPTISRRFMPEKGSPEYDALAKNPEKEFLKTITGKKETLIDLTVIEILSRHASDEFYLGQRDGGDYWTSDAGPLEAFKRFGKKLEEIEKKLIEKNKDETLRNRYGPAKMPYTLLYPSSEEGLTFRGIPNSISI

SEQ ID NO: 40048 - protein, 294 aa, Glycine max
  Clone ID: 700967304_FLI.pep
FEMKIQCNVCEAAEAKVLCCADEAALCWECDEKVHAANKLASKHQRVPLSLSASHMPKCDICQEMVGYFFCLEDRALLCRNCDVSIHTANACVSDHQRFLLTGVRVGLEATERGASSSSVKSQSGEKMSDAKSSSISRNVSSLPQPSNANEVLPLQMQGVEEFPPSNFSGYTSGNVSQWPIEEFLGLNELSQYYNYMDGSSKADSGKLGDSDSSVLRSGEEDMDDDGFLGRVPDSSWTVPQIPSPPTASGLYWPKVPQYTSDSAMSVPDICFSHVRQPHHAQHNSNVSKRRRQL

SEQ ID NO: 40049 - protein, 210 aa, Glycine max
  Clone ID: 700967818_FLI.pep
APSNTYLPFDFLEIRAYDKAAIKCNGREAVTNFEPSTYEGELKSAAINEGGSQNLDLNLGIATPGPPKENWGQLQFPSFPYNTHGGRSSMMETNVSSGIGNPSLKRMVATEDRPSLWNGMSPNFFPNGERAERIGVDPSNGLPNWAWQTHGQVNATPVPTFFAAASSGFSISATFPWGAIFPTSSMNSIPQSLCFTSSSMPTRNASEYYY

SEQ ID NO: 40050 - protein, 491 aa, Glycine max
  Clone ID: 700968235_FLI.pep
RFRHIYRGQPKRHLLTSGWSLFVNAKKLVAGDSCIFVRGESGELRVGIRRAAENLSNISQSSSLISGHSMQLGILTNASNAVGNRTMFLVYYRPWTNPFEFIVHLQTYLKSTLQDYPIGTRVQMQHEVEESLRRLAGTIIGNEDIDSIRWPGSAWRRLKVQWDAIVEDKMHPERVCPWWIEPLESAKEKKQVPALPTKKKGHALLNQRSLPGISGFGKNDVHQNSAGPSSQTRRADGDLQGQDYSGLSPPQPLQRAPSTDIIRPSKVPIRGSRFGKENRNQHPFLKQDPLHKSLGRSMSLTHEDLSITSSNLTSIGSESLGMPSTESRGENDAPFGQPGSSSTFKLFGVNLIDSSPEIPSVNFVDLNKTSSLPSSPPMGVAPGKTCKKCRCVNNRSCTKVLKLGNALGRAVDLARFNGYTELIAELDSMFDFQGTLISGGSGWHVTCLDDEGDMMQLGDYPWQDFLGVVQKMIICPKEGTDNLKPGSSANP

SEQ ID NO: 40051 - protein, 705 aa, Glycine max
  Clone ID: 700968464_FLI.pep
KNTLYEVKEVLELLDIENFQQKLKGVGSPIKCPFGVPENPGFTVGLNPLLSKLKMEVLRDGMSTHLLTGLGGSGKTTLATKLCRDEEVKGKFKENILFFTFSQTPKLKNIIERLFEHCGYHVPEFISDEDAIKRLEILLRKIEGSPLLLVLDDVWPGSEALIEKFQFQMSDYKIVVTSRVAFPKYGTPYVLKPLAHEDAMTLFRHHALLEKSSSHIPDKEIVQKVVRYCKGLPLAVKVIGRSLSHRPIEMWQKMVEELSQGHSILDSNIELLTCFQKLLHVLEDNPNNKECFMDLGLFPEDQRIPLPVLIDIWAVLYGFDDDGIEAMDIINKLDSMNLVNVLVARKNSSDSDNYYYNNHYVILHDLLRELAIYQNNLEPIEKRKRLINDINESEEKQQGMIARLLSKFADAVLTRHSNRSPAGTLSISADETNTSYQSHIQPSLAEVLVLNLQTKKYSFPEYIEKMSELKVLIMTNYGFHPCELDNFKLLSSVSNLRRIRLERISVPHLGALKNLGKLSLYMCSNISQAFENGTITVLDSFPKLSDLNIDYCKDMVKLPTGICDIVSLKKLSITNCHKLSSLPQEIGQLLNLELLNISSCTDLEEIPDSIVKLSKLRLLDLSNCISLSSLPEDIGDLCNLRNLNMTSCARCELPYSVTNLENLKVVVCDEETAASWEAFEAMLPNLKLEVPRVEVNLNWLHSISS

SEQ ID NO: 40052 - protein, 333 aa, Glycine max
  Clone ID: 700970311_FLI.pep
NRAKRECVKSETKNRTTMATLKVPQPLPPVADDCEQLRKAFSGWGTNEELIVSILAHRNAAQRKLIRETYAQTYGEDLLKALDKELTSDFERLVHLWTLDSAERDAFLANEATKKWTSSNQVLVEIACTRSSEQLFAARKAYHVLYKKSLEEDVAHHTTGDFRKLILPLVSSYRYEGDEVNLTLQKLSKNCCMRRFQTRLIMMTTSSGFWPQGAEHRLMLLLNPLQRCIWTRYQQGLKADPKDEFLSLLRATVKCLIRPEKYFEKVVRLAINKRGTDEGALTRVVATRAEVDLKNIADEYQRRSSVPLERAIVKDTTGDYEKMLVALLGHDDA

SEQ ID NO: 40053 - protein, 294 aa, Glycine max
  Clone ID: 700975602_FLI.pep
RSLKISLGRGAWNSNHPSSIKRSLIALSYGDLYTDWAAMTRLPHINCAGKWESLSNLQRHAQQFHGLFGFFMRRHFLTMKAYNKGGELNVPITPHAEPINIENQCVQGSASSGRARRDAAARAMQGWHSQRLLSNGEFSDPIIKDRNSLSTQKREKQLKNINLLKRKKSSDTVNAVKVAHSQPSRPQSDTYVVDIGPPADWVKVNVQKTKDCFEVYALVPGLLREEVRVQSDPAGRLVISGEPENSDNPWGVTPFKKVVSLPSRIDTQQTSAVVTLHGQLFVRVPFESNQNREG

SEQ ID NO: 40054 - protein, 158 aa, Glycine max
  Clone ID: 700976961_FLI.pep
FGSARPSFRALTTERNPHISLSMARTKQTARKSTGGKAPRKQLATKAARKSAPATGGVKKPHRFRPGTVALREIRKYQKSTELLIRKLPFQRLVREIAQDFKTDLRFQSSAVSALQEAAEAYLVGLFEDTNLCAIHAKRVTIMPKDIQLARRIRGERA

SEQ ID NO: 40055 - protein, 191 aa, Glycine max
  Clone ID: 700977108_FLI.pep
DCCLRWSKIAARLPGRTDNEIKNHWNTHIKKKLLKIGIDPVTHEPLKKQAAASSQDSSSSPAEHLPQPGNNLDDQVKETEGILLNSEENSSSSQAENSSGDDSLLLDSICSDDSLLNSMWLDETPLVEALWDTTPNLENTSNNMGLLPSWEDNCAWLLDCQDFGIHDFGFTCFNEIESHALQTIGMKEEGH

SEQ ID NO: 40056 - protein, 342 aa, Glycine max
  Clone ID: 700977406_FLI.pep
YPFLRTMRAGKGSQEEDEYEEEEFGSSKKQGTSSAPNTNKADGKAIDKASAIRSKHSVTEQRRRSKINERFQILRDLIPHSDQKRDTASFLLEVIEYVQYLQEKVQKYEGSYQGWGQEPSKLMPWRNSHWRVQSFAGQPTAVKNGLGPVSPFPGKFDESNVSISPTMLNGSQNTIDPDQSRDIVNKTAERQPDLVSKGIPLPLAMHANMSVPVRSDGVLAHPLQGTVSNAQSTECPTTSEPQNQQDELSVEGGTISISSAYSQGLLNNLTQALQSAGLDLSQASISVQINLGKRANKGLNCGTSSLKHHDNPSSNNQTIAHFRDAGSGEDSDQAQKRMKTYK

SEQ ID NO: 40057 - protein, 261 aa, Glycine max
  Clone ID: 700977467_FLI.pep
SSMASTKERENFVYTAKLAEQAERYEEMVEAMKNVAKLNVELTVEERNLLSVGYKNVVGARRASWRILSSIEQKEEAKGNDVSVKRIKEYRQKVESELSNICSDIMTVIDEHLIPSSSAGEPSVFFYKMKGDYYRYLAEFKSGDERKEAADHSMKAYQSASTTAEAELPPTHPIRLGLALNFSVFYYEILNSPERACHLAKQAFDEAISELDTLSEESYKDSTLIMQLLRDNLTLWTSDIPEEGAEEQKVDSARAAGGDNA

SEQ ID NO: 40058 - protein, 351 aa, Glycine max
  Clone ID: 700977518_FLI.pep
ITSDSIELYPLNAMVVCKCRKATKLYCFVHKVPVCGECICFPEHQICVVRTYSEWVIDGEYDWPPKCCQCQSVLEEGDGSQTTRLGCLHVIHTNCLVSHIKSFPPHTAPAGYVCPSCSTTIWPPKSVKDSGSRLHSKLKEAIMQSGMEKNVFGNHPVSVTESRSPPPAFASDPLIIRENHGNSDSVDGYSPATGSELPKLSVTDIVEIDGANPAGNFMKNSSPVGPGATTRKGPVHVERQNSEISYYADDEDANRKKYTKRGPFHHKFLRALLPFWSTALPTLPVTAPPRKDASNAAAETSEGRTRHQRSSRMDPRKILLLIAIMACMATMGILYYRLAQRGPGDELLNDE

SEQ ID NO: 40059 - protein, 60 aa, Glycine max
  Clone ID: 700977983_FLI.pep
SRPRSGLCFPVNWPSTPFLRVPRPSPSSPAHEPTIIWILFLVAHTNLFYVSGDLCLDFDQ

SEQ ID NO: 40060 - protein, 156 aa, Glycine max
  Clone ID: 700978144_FLI.pep
SMRIRSVLCVWMILKLVLKPKRCLVNIGFIVGVSFPGWSFIVLVQFAGFSCHWMSLSKTLICQGIAEAKGRMKVLNMTMMKKEMAKGEMQVGVEDSHFHGLSMDYFLHQTLHPLKVPMPTEMIINQMKTEYFCISVVLFMCCLAYVQFSTNERIQC

SEQ ID NO: 40061 - protein, 292 aa, Glycine max
  Clone ID: 700978152_FLI.pep
HRVCVRWIRVLYSNFARFCKDQEYLISLHGKAARERFDYVEGFVIVDEGLINNWRSSFFAASNPVKITSLNADGGVLYCLEITKNYDQGNADSVDEEIQALLKKLNFIPTSVFTTDLPYVDFLDRVHKAELKLKSKGLWDVPHPWLNLFVPKSRIEDFDKGVFKGILGNKTSGPILIYPMNKNKWDHRSSVVTPEEDVFYLVAFLRSALDTETLEYLTNQNRQILRFCHDSEIKVKQYLPHYTTQQEWMDHFGDKWTQFNARKMQFDPRRILGTGQQIFQFHPSLTPNKDDM

SEQ ID NO: 40062 - protein, 311 aa, Glycine max
  Clone ID: 700979543_FLI.pep
RPRSQIRLFDPDDVYQVLKYNKGNEAIRSIVVNLLRMKQLRLNPQVFTKMNKLHFLNFYSVWSSSTFLQDPWGLYLSQGLESLPNELRYLRWTHYPLESLPSKFSAENLVELHLSYSRVKKLWLKVPDLVNLKVLKLHSSAHVKELPDLSTATNLEIIGLRFCVGLTRVHPSVFSLKKLEKLDLGGCTSLTSLRSNIHMQSLRYLSLHGCLELKDFSVISKNLVKLNLELTSIKQLPLSIGSQSMLKMLRLAYTYIETLPTSIKHLTRLRHLDLRYCAGLRTLPELPPSLETLDVRECVSLETVMFPSIPQ

SEQ ID NO: 40063 - protein, 438 aa, Glycine max
  Clone ID: 700979737_FLI.pep
GKELDDHFLKASGCIKEIAVLIDINGGDTLLRQNSGHLDRKRGNSAKVFSVLSWSRYSKSPPSTKDGAEFSGHSEPCKPGAHCATVKKLYVAEKKLFKALKEEGIVALEFDRKSTLLCKQEDENLDIVKIDKTRSSVEKLESDLISLRQCISETTSSILEMIDEELLPQLVALTAGLTQMWRTMHESHKAQALISQHLSNLSDNHNTILNSGYHHQATIQFETEVSYLYNSIGKLVKFQQFETEVSYWYNSFGKLVKFQREYVRTLYEWIKLAESLKDGNECSNHSSILAICDQWERGLNKLPDKETSEAIKSLMSCLRFITGQQIEEDNILERLQKLERKFQKCLNSMAEMQQRIDGGMADTSPKHPIHLKKTETEALKKQVESAKANYLDSVQYSRAMTLDHLQKTLPPLFQSLMEFSSESAQAIEAINAPGKPVE

SEQ ID NO: 40064 - protein, 115 aa, Glycine max
  Clone ID: 700979909_FLI.pep
LARRLNLRPRQVEVWFQNRRARTKLKQTEVDCEFLKKCCETLKDENRRLKKELQELKALKLAQPLYMPMPAATLTMCPSCDRLGGVNDNGSNKSPFSMAPKPHFYNPFANPSAAC

SEQ ID NO: 40065 - protein, 483 aa, Glycine max
  Clone ID: 700980490_FLI.pep
NTDHYCWQRPEDMTTDRHAYKVDPSNPGSDLAGETAAAMAAASIVFRRSNPAYAGELLRHAYQLFDFADKYRGKYDSSITVAQKYYRSISGYNDELLWAAAWLYQASNNQYYLDYLGRNGDSMGGTGWSMTEFGWDVKYAGVQTLVAKFLMQGKSGHHAPVFERYQQKAETFMCSCLGKSSRNVQKTPGGLIFRQRWNNMQFVTSASFLATVYSDYLASSGRNLRCSSGNVPPAELLSLAKSQVDYLLGDNPRATSYMVGYGSNFPQRVHHRGSSIVSIKVNPSFVSCRGGYATWFSSKRSDPNLLTGALVGGPDAYDDFADERDNYEQTEPATYNNAPLIGILARLGGGHGGYNQLLPVVVPAPKPAVTKPQPTPSPKTTPSPASWSGPISIEQKRTTSWVANGKTYYRYSTVVTNKSNKSLNSLNLSISKLYGPIWGVTKSGDSYTFPSWLSSLSAGKSLEFVYIHSASPADVSVANYVLA

SEQ ID NO: 40066 - protein, 289 aa, Glycine max
  Clone ID: 700981026_FLI.pep
TTQFHFIFPFHFTFPQFSFSTMAAATQLHLPPGFRFHPTDEELVVHYLCRKCASQEIAVPIIAEIDLYKYDPWDLPGMALYGEKEWYFFTPRDRKYPNGSRPNRSAGTGYWKATGADKPVGKPKPVGIKKALVFYAGKAPKGVKTNWIMHEYRLADVDRSVRKKNSLRLDDWVLCRIYNKKGAIEKQQPAPPPPSGVHKIECYEMEDVKPEYTAADCLYFEASDSVPRLHTTESSCSEQVVSAEFASEVQSERKRQGNSEFSYNYMDATLGNNQMSPLQDIFMYLSRPF

SEQ ID NO: 40067 - protein, 342 aa, Glycine max
  Clone ID: 700981106_FLI.pep
LEFSDRTGMSDLDPYKWPKSKWRCLMVRWDEDIEISHQDRVSPWEIDPSSSLPPLSIQSSRRLKKLRPGLQAATPSHLTTGGSGFMDSEESVRSSKVLQGQENTGFMSLYYGCDKVTKQPEFEIRSPSHPNLASTGVRKISAAEFMRVHPSSFAGFSETNMFPRVLQGQEICPFRSLTGKADLNFGSWGKPNVSYSNNNLHQATKPSFHSLGPEVIQTAYFPYGDIHNAGQGSSILCSKPTNFQRENIPFNTPSTQSGIMRNEVGRSDITIPNEQKLQDNISGTASLGANMRIPKDDNFKGQVKACKLFGISLSGETTAQNLQNSAKRSCTKVSDDSNRVIL

SEQ ID NO: 40068 - protein, 178 aa, Glycine max
  Clone ID: 700981286_FLI.pep
KFVPNFFLQNGMTPLHLAVWYSLRAEEFLTVKTLLEYNADCSAKDDVMNLISCFFSCYFNIFGEIVIDAQDYELQEGMTPLNHLSQGPGTEKLRELLLWHLEEQRKQRAIEACSETKAKMDELEKQLSNIVGLNDLKVQLRKWAKGMLLDEKRRSLGLHVGRRRPPHMAFLGNPGTGF

SEQ ID NO: 40069 - protein, 223 aa, Glycine max
  Clone ID: 700981385_FLI.pep
GMINCDGVFGLVIEGVPWTEEEHRLFLLGLHKVGKGDWRGISRNFVKTRTPTQVASHAQKYFLRRHNQNRRRRRSSLFDITTDTVMESSTIMEEEQVPQETMAAPIPAAYPPFPGAGFPMSLSPVVLPVSGERLTKPIRPTPIVPVPPSSKMANLNLKGKASRTNLIEPLPLSLNLPSPTPRSQDQSPANSGHSSPSSSSAAAFQAMSAAKFGGGGDSIISVA

SEQ ID NO: 40070 - protein, 247 aa, Glycine max
  Clone ID: 700982933_FLI.pep
IHGQVTCRPNGSGTALIVQAARAHCDFTKLVERSRRRGASFHFPIAPTNEGHDPDNPNHHHQAVQISHLNRDLVLATIVIVFVLAFASDSDLLLLVRPRTLSYIVSVQSKPQTASEPLLPPRSPSRTPRHRRRHRHAGRHQPMKHVSRAKAPAAPSRPAPARSSQRLWRILTAGGCSSPEVVGDTVLTAGAATATVTVLAVTAAGAAAAGGTGSNFRRCMSRRRALSPRRKQSLANSQRSGTTFRNP

SEQ ID NO: 40071 - protein, 293 aa, Glycine max
  Clone ID: 700982935_FLI.pep
VGMIREQELMENSNNNNNNNNATTTTPTNSSNSNTNANTNTNTTEEEVSRDNGEDQNQNLGSHEGSEPGSSGRRPRGRPAGSKNKPKPPIVITKESPNALRSHVLEIASGSDVAESIAAFANRRHRGVSVLSGSGIVANVTLRQPAAPAGVITLHGRFEILSLSGAFLPSPSPSGATGLTVYLAGGQGQVVGGNVAGSLVASGPVMVIAATFANATYERLPLEDDQGEEEMQVQQQQQQQQQQQQQQQQQQSQGLGEQVSMPMYNLPPNLLHNGQNMPHDVFWGAPPRPPPSF

SEQ ID NO: 40072 - protein, 254 aa, Glycine max
  Clone ID: 700984075_FLI.pep
QTMGKYDKYDVEKHRDANVSGDDAFARLYASVDADIVALLQKAESASKEKGKASAVAINAEIRRTKARLLEEVPKLQRLAVKKVKGLSSQEFAARNDLVLALPDRIQAIPDGAPPVPKQTGGWAASASRPEIKFDSDGRFDDEYFQQSEQSSQFRQEYEMRRMKQDQGLDVIAEGLDTLKNMAHDMNEELDRQVPLMDEIDTKVDKASSDLKNTNVRLKDTVNQLRSSRNFCIDIVLLIIILGIAAYLYNVLKK

SEQ ID NO: 40073 - protein, 630 aa, Glycine max
  Clone ID: 700984182_FLI.pep
AGIDATKYGHSPVHKALVLKDHGELRRILAGLPRLRSTAEIRTEAVSILEEEKADAIAAVIDRRDVPNRDTPLHLAVKFGDEVATELLMVAGADWSLQNEQGWSALQEAICSREEGIAKIIIKHYQPLAWAKWCRRLPRLVGTMRRMRDFYMEITFHFESSVIPFISRIAPSDTYKIWKRGANLRADMTLAGFDGFRIQRSDQSILFLGDGSEDGKVPPGSLCMISHKEKEVLNALDDAGFPANDEEVQQEVVAMSKTNIFRPGIDVTQAVLLPQLTWRRQEKTEMVGPWKAKVYDMHNVVVSIKSRGVPGAMTDDELFSSCNENETESEELNDILTEDERRQLEDALRLDSTDLNNESDEVIIGHRHSCYEHREIPIEEGNYNKSGENKLEKKGWFGGWRKKDSKPEAPKKIAPPRSSLCIEEKVSDLLGDSPSRNQSKPGRHSVEIAVKGDESRRRKDAKASSANSDSRSRHKDGNRENEYKKGLRPILWLSPNFPLKTEELLPLLDIVANKVKAIRRLRELLTTKLPMGTFPVKVAIPVVPTIRVLVTFTKFEELEPVDEFATPPSSPSAAEQESPAVPHFSASSWFQWIKAPYRSSTSAPGSSSRIENIEDPFAIPSDYTWVTAEA

SEQ ID NO: 40074 - protein, 363 aa, Glycine max
  Clone ID: 700984573_FLI.pep
ETEIRADHIGVSSTLSDFMPAMKKNPELTCIGSVFNMLGKELGEPVDFELPDSFNKSKPMQYTYIKRNIYLTKKVKRSRFDDDGIFCSCTPSPGSTSVCGRDCHCGMLLSSCSSGCKCGSSCLNKPFQNRPVKKMKLVKTEKCGSGIVADEDIKLGEFVIEYVGEVIDDKTCEERLWNMKHSGETNFYLCEINRDMVIDATYKGNKSRYINHSCCPNTEMQKWIIDGETRIGIFATRDIQKGEHLTYDYQFVQFGADQDCHCGAAECRRKLGVRPTKSKLSSDAALKLVAYQVYQNGGLQIGSSRVVDQPKCLHNCIGEVIRIKHLENERFGIIKRFDKYSRKHSIMFEDGCVEIYDMSKRGL

SEQ ID NO: 40075 - protein, 199 aa, Glycine max
  Clone ID: 700985727_FLI.pep
LLLLNHIFWCIFSFSLTQFIMAEIEYHAKSNTNTQPLKLFGINISKSPEDQTHEAGSNSEPFSSRKYECQYCCREFANSQALGGHQNAHKKERQLLKRAQMQAARGFVSSQIHNTIISSFSPQSQPPLSWLCTPHGGAYHSGAAFVASGRRIYVAAAGASITDGHGHRHPLPQFGGFNGGEGSGGGRERGLGLDLHLSL

SEQ ID NO: 40076 - protein, 493 aa, Glycine max
  Clone ID: 700986140_FLI.pep
CSLRAKRRWCLSGTPIQNTIDDLYSYFRFLKYDPYAVYKSFYNTIKVPISKSTIQGYKKLQAVLRAIMLRRTKGTLLDGKPIINLPPKTIELSKVDFSIEERAFYTKLESDSRLQFKAYAAAGTVSQNYANILLMLLRLRQACDHPLLVKDFDSDPVGKDSVEMAKNLPRDMLINLFNCLEATFAICLVCNDPPEEPVITMCGHVFCYQCVSEYLTGDDNMYPSVNCKELIGDDLVFSKATLRSCISDDGGSLSSANSHLCDYSLVQQRDYTSSKIKAVLEVLQSNCKLKISSSDLLNSSGGCRDSPSSDNLYVEDCDSDVRVTKHTIKYSESTTEGPIKAIVFSQWTSMLDLVETSLRQFSIQYRRLDGRMTLGARDKAVKDFNTEPEIAVMLMSLKAGNLGLNMVAACHVILLDLWWNPTTEDQAIDRAHRIGQTRPVTVTRITIKDTVEDRILALQEDKRKMVASAFGEDHAGGTGTRLTVDDLKYLFMV

SEQ ID NO: 40077 - protein, 74 aa, Glycine max
  Clone ID: 700987162_FLI.pep
MYVSAYFHVKFVKVTQKLVILTLISSEWHPNTLSNTNQIPEKQINFQSCNMSLQQTSLPDEVASSPHRPIPVRG

SEQ ID NO: 40078 - protein, 35 aa, Glycine max
  Clone ID: 700987493_FLI.pep
PQLSFHLILLEIRAALRNFKTRMHFEFVLYVAWQS

SEQ ID NO: 40079 - protein, 380 aa, Glycine max
  Clone ID: 700563096_FLI.pep
QSNISGETQNSHIIEDGNLVISIQVLRKVTNDFASENELGRGGFGTVYKGELEDGTKIAVKRMEHGVISSKALEEFQAEIAVLSKVRHRHLVSLLGYSIDGNERLLVYEYMSLGALSQHLFHWKSLKLEPLSWSQRLAIALDVARGMEYLHSLARQTFIHRDLKSSNILLGDDFRAKISDFGLVKHAPDSEKSVATKLAGTFGYLAPEYAVMGKITTKVDVFSYGVVLMELLTGLVALDESRPEESRYLAEWFWRIKSSKEKLMAAIDPVLEASEETFESITIVAELAGHCTAREAHHRPDMGHAVNVLAALVEKWKPVDDELDCYSGIDYTRPLPQMLKIWKEAESGEFSYASCLENSRSSIAARPSGFADSFTSADAR

SEQ ID NO: 40080 - protein, 196 aa, Glycine max
  Clone ID: 700564722_FLI.pep
VVGTNFFHEICNAGSSQVIAQYYQLIRLGYEGYKMVMENCNDNMAVLKEGLEKTGRFEIISKDIGVPLVAFTLKDHTHFNEFQISDMLRRYGWIVPAYTMPPDAQHVTVLRVVIREDFSRTLAERLVIDVTKVVHELDLLPARVISTNTIMVTGEAGEENDEKVLFAKKSEIETQREITKAWKKFVMDRKKMNGVC

SEQ ID NO: 40081 - protein, 61 aa, Glycine max
  Clone ID: 700988939_FLI.pep
HPALSLCVCCSLTLLQLLSQLGTANDDGADFGLVTTSLAPVLAFLHGSWCQSNSFLSFHDT

SEQ ID NO: 40082 - protein, 76 aa, Glycine max
  Clone ID: 700989818_FLI.pep
KTLRIVPLSVEPQLLAYKLGRNFYAQAIVLYTENDSCGHTSISPAHHLIHTPPDKHCTFCLVDALMHHLNWVRESV

SEQ ID NO: 40083 - protein, 850 aa, Glycine max
  Clone ID: 700990773_FLI.pep
VFAQHAFQDDYPKLNEQLKEIGIKIVEKCQGLPLALETVGCLLHTKPSVSQWVGVLEYKIWELPIEDSKIIPALLLSYYHLPSYLKRCFAYCALFPKDHEFYKESLIQLWVAENFVQCSQQSNSQEEIGEQYFNDLLSRSFFQRSSREKCFVMHDLLNDLAKYVCGDICFRLEVDKPDSISKVRHFSFVPQYDQYFDVHGSLYHAKMLRTFMPMPAPASRIFTWGCTGLVDELFSKFKFLRILSLFHCDLKEMPDSVGNLKHLRSLDLCYTDIKKLPDSTCFLCNLQVLKLNCCHRLEELPSNLHKLTNLRCLEFMYTKVRKMPMHFGKLKNLQVLSSFYVGMGSDNCSIQQLGELNLHGRLSIEELQNIVNPLDALAADLKNKTHLLDLELKWNEHQNLDDSIKERQVLENLQPSRHLEKLSIGNYGGTQFPSWLLDNSLCNVVWLSLKNCKYCLCLPPLGLLPLLKELLIGGLDGIVSINADFYGSSSCSFTSLESLEFYDMKEWEEWECKGVTGSFPRLQRLSIMRCPKLKGHLPEQLCHLNYLKISGCKQLVPSALSAPDIHQLYLGDCGELQIDHPTTLKELTIEGQNVEAALLEQIGRNYSCSNNNIPMHSCYDFLLSLDINGGCDSLTTFPLDMFPILRDLGIRECPNLQRISQGQAHNHLKFLGITNCPQLESLPEGMHVLLPSLLSLLVIDCPKVEMFPEGGLPSNLEKICLYCGSYKLISLLKSALGANHSLFSLDIGGVDVECLPEEGVLPHSLVTLQIRYCPDLKRLDYKGLCHLSSLKSLLLKDCPRLQCLPEEGLPKSISALWIWGDCPLLKQRCREPEGEDWPKIAHIQHVSFLD

SEQ ID NO: 40084 - protein, 568 aa, Glycine max
  Clone ID: 700991608_FLI.pep
RVHVCRIKEMDENESLELFSWHAFRQAHPREDLIKLSMDIVAYCGGLPLALEVLGSYLCERTKEEWESVLAKLRKIPNDQVQEKLRISYDDLDCEEKNIFLDICFFFIGKDRVNVTEILKGCDLHAEIGITILVERSLIKLEKNYKIKMHNLLRDMGREIVRQSSLEEPEKRSRLWVHQEVLDLLLEHTGTKAIEGLALKLQRTSGLHFNTKAFEKMKKLRLLQLDHVQLVGDYEYLNKNLRWLCLQGFPLQHIPENLYQENLISIELKYSNIRLVWKEPQLLQRLKILNLSHSRNLMHTPDFSKLPNLAKLNLKDCPRLSEVHQSIGDLNNLLVINLMDCTSLSNLPRRIYQLKSLQTLIFSGCSKIDMLEEDIVQMESLTTLIAKDTAVKEMPQSIVRLKNIVYISLCGLEGLARDVFPSLIWSWMSPTANLRSCTHSFGSMSTSLTSMDIHHNNLGDMLPMLVRLSKLRSILVQCDSKFQLTQKLSKVMDDLCQVKFTELERTSYESQISENAMESYLIGMGRYDQVINMLSKSISEVLSYSIFVYLSFIIHLVIKRTCYNIYFS

SEQ ID NO: 40085 - protein, 296 aa, Glycine max
  Clone ID: 700991711_FLI.pep
KLSFQFTKLTMVDLDWQTKMVHSNIMPPMSPKLSLPDHNIPIPTLQLPLRQNDITAASSPICAAYDNYLRLPELRALWASKDFPNWANEPILKPALHALEITFRLLATVFSDPRPYINKREWTRRVESLATAQIQIIAMLCEDEEENPETRGKAPVTDINGFTGQSRSYSEESLLPRLATWQKSKDVAQRILNSVDYEMGRCTYTLGLGEANIAGKKIFLFDAVCRPREIHSLETTPFDDYVGNHENKTLHATQQIAECWTRSVKKLLERVTESVEKKALEKAASSAMRWSGSGSC

SEQ ID NO: 40086 - protein, 151 aa, Glycine max
  Clone ID: 700991734_FLI.pep
TLSFFSFSPILAMPKAKSDAKAADSRLKRKGAGAGRKQSKKAAKDPNKPKRPPSAFFVFMSEFREQFKKEHPNNKSVAVVGKAGGEKWKSLSDAEKAPFVATAEKKKQEYEKTISAYNKQLEGKNSEEDESDKSKSEVNDDEEDEEEDDDE

SEQ ID NO: 40087 - protein, 96 aa, Glycine max
  Clone ID: 700992681_FLI.pep
ENVLNRLMSHQFGWVFNTPVDVVKLNIPDYFTVIKHPMDLGTVKKRITSGEYSNPMDFAADVRLTFENAMFYNPAGNDVHTWQRPLVNFLKQGGRP

SEQ ID NO: 40088 - protein, 171 aa, Glycine max
  Clone ID: 700992940_FLI.pep
AFAMHEQRFVGNMNKVQTWRLVLGEVANISGWDCLTTRVESELVEKIAMDILQKLDSITSGGLERRIATYKQMAQQKLEKSLKTSNMRDMEDLITTLLQLGELKLEKAMRTDDSSVWDDLMATYERVLQLKQDKWMRTFNTKDMEDLVATRQHVMQIQREQSNRKIGFRGI

SEQ ID NO: 40089 - protein, 295 aa, Glycine max
  Clone ID: 700993015_FLI.pep
QGKNNAIQHNALTLPLIPDRRGWSFCHTPSIFSKSKHQKNHFLFLIFEINVQAKMKGKTCELCDQQASLYCPSDSAFLCSDCDAAVHAANFLVARHLRRLLCSKCNRFAGFHISSGAISRHLSSTCSSCSPENPSADYSDSLPSSSTCVSSSESCSTKQIKAEKKRSWSGSSVTDDASPAAKKRQRSGGSEEVFEKWSREIGLGLGLGVNGNRVASNALSVCLGKWRWLPFRVAAATSFWLGLRFCGDRGLASCQNLARLEAISGVPVKLILAAHGDLARVFTHRRELQEGWGES

SEQ ID NO: 40090 - protein, 437 aa, Glycine max
  Clone ID: 700993053_FLI.pep
SSTLSLQKMPSKDKIAYFYDGDVGSVYFGAKHPMKPHRLCMTHHLVLSYDLHKKMEIYRPHKAYPVELAQFHSADYVEFLNRITPDTQHLFLKELTKYNLGEDCPVFDNLFEFCQIYAGGTIDAARRLNNQLCDIAINWAGGLHHAKKCEASGFCYINDLVLGILELLKYHARVLYIDIDVHHGDGVEEAFYFTDRVMTVSFHKYGDLFFPGTGDAKEIGEREGKFYAINVPLKDGIDDSSFTRLFKTIISKVLETYQPGAIVLQCGADSLAGDRLGCFNLSIDGHAECVSFVKRFNLPLLVTGGGGYTKENVARCWTVETGVLLDTELPNEIPENDYIKYFAPEFSLKIPNGQIENLNSKSYLSTIKMQVLENLRCIQHAPSVQMQEVPPDFYIPEFDEDEQNPDERLDQHTQDKHIQRDDEYYDGDNDNDQMDVS

SEQ ID NO: 40091 - protein, 108 aa, Glycine max
  Clone ID: 700994709_FLI.pep
SAPTTGGVKKPHRYRPGTVALREIRKYQKSTELLIRKLPFQRLVREIAQDFKTDLRFQSHAVLALQEAAEAYLVGLFEDTNLCAIHAKRVTIMPKDIQLARRIRGERA

SEQ ID NO: 40092 - protein, 337 aa, Glycine max
  Clone ID: 700995187_FLI.pep
KFARYSKFEECGRLRNRDLLSSANVMCALSFDRDEDHIAAGGVSKKIKIFDLNAIASDSVDIQYPVIEMSNKSKLSCVCWNTYIKNHLASTDYDGAVQMWDADTGQPLSQYMEHQKRAWSVHFSLSDPKMFASGSDDCSVKLWSISERNSLGTIWKPANICCVQFSAYSTNLLFFGSADYKVYGYDLRHTRIPWCTLAGHGKAVSYVKFIDSEAVVSASTDNSLKLWDLNKTSSSGLSSDACAMTFKGHSNEKNFVGLSVLDGYIACGSESNEVYCYHKSLPVPIATHKFESIDHISGHLNSGDNNGQFVSSVCWRKKSNMLVAANSVGIVKLLQMV

SEQ ID NO: 40093 - protein, 340 aa, Glycine max
  Clone ID: 700996069_FLI.pep
YKFQNVTRFISPSEEELRSYIDPYEYVMCSECHQGGDDGLMLLCDICDSPAHTYCVGLGREVPEGNWYCDGCRPVALGSSSSQVQEGVADPRVSVQSHPIRPPPALHVRESIDLNLISSPRAAFNQGFGHLPSSRFSGRSVEGASPVSGGAPTLSERRWIHRQIQQLLSIDRMASSPGRTNGVSATSSTSNLYSSQIDQSRGTATLHARTQDVGTSYHTFFDERLCNNSSPLMQNGALWPGLMGTTPVPDCELAHQFSRSNIVPDSGLSPAIREESNFHIAKEQLQSMVKSHLKNLSQNIDLGKYCFSSTSYRFCFFYHFFFHSSYGEGGIFATFGTQNT

SEQ ID NO: 40094 - protein, 118 aa, Glycine max
  Clone ID: 700996332_FLI.pep
AFKYFSAVFESLEPNLAADSPERFQVESLLLGRRIAAVIGGPGSVRRESMEDKEQWRVLMERAGFESVSLSHYAISQAKILLWNYSYSSLFSLVESTPPGFLSLAWKDVPLLTVSSWR

SEQ ID NO: 40095 - protein, 484 aa, Glycine max
  Clone ID: 700997772_FLI.pep
VQYNTAMAASVSTIGAVNRAPLSLNSSEAGDSVPSSAFFGTSLKKVTASRVPNVKISSGSFKIVAAEKEIDEQQQTNKDRWKGLAYDISDDQQDITRGKGMVDSLFQAPQETGTHYAVMSSFEYLSTGLKQYNLDNNMDGFYIAPAFMDKLVVHITKNFMTLPNIKVPLILGIWGGKGQGKSFQCELVFAKMGINPIMMSAGELESGNAGEPAKLIRQRYREAADIISKGKMCCLFINDLDAGAGRLGGTTQYTVNNQMVNATLMNIADNPTNVQLPGMYNKQENPRVPIIVTGNDFSTLYAPLIRDGRMEKFYWAPTRDDRVGVCKGIFRTDNVPEDEIVKLVDTFPGQSIDFFGALRARVYDDEVRKWISGVGVDLIGKKLVNSKEGPPTFDQPKMTLSKLLEYGNMLVQEQENVKRVQLADKYLNEAALGDANQDAIKRGTFYGKAAQQVKIPVPEGCTDPNASNFDPTARSDDGTCLYTP

SEQ ID NO: 40096 - protein, 284 aa, Glycine max
  Clone ID: 700999014_FLI.pep
GNLRSVMRVLYNQLTYLLLGLRGNPCIHIPVNQLILSEDPPYQMNRNISIYKLVGCREDTPSPTSVLSTVGSEAFGSQFSEQTNRCLSPNSCTTDIHSVSLSPVEKENDCMTSKESEEEEKASPASRPLSTVSNPKMCMKPEFSSKEIEDATDMPQTTSIKLFGRTVSMVGNQKSLKIDDDGKPITVKSDEVDDVENEKLGQSGESKQVDTQLSLGVVSGNWPITPDADGANVTSIEPPKENQCFSESAPDAFFPQWSLSQGLPPFYLRPCNQVLIPCLLGPPL

SEQ ID NO: 40097 - protein, 232 aa, Glycine max
  Clone ID: 700999148_FLI.pep
AFSCVAIDPELFLNYQYLLLLSLDEKQQHIQQNMTTKGTTHSEPNNTECCMCGDLGFSDQLFQCKACQFRSQHRYCSNLYPKPESLGTCNWCLSQREDTKERSTNSSNSSSSIRNNDDESRIKRIRNGNSYNSAQNIGPVKKGVKGSVLHLQIHKPIKKPKSPESSRSPSASNSPPKSSPVLVSTRKRIVTNGTLEERLRRTRSEDITRSGATKQVFRNKVRRYKLLDEVSS

SEQ ID NO: 40098 - protein, 177 aa, Glycine max
  Clone ID: 700999496_FLI.pep
KNEEKNPPLTPLGTDDSNNYNSSANHSNITVRVCSDCHTTKTPLWRSGPKGPKTLCNACGIRQRKARRAIAVAATANGMNPVEAEKSQVKKGNKLHSKGMKSKTKGAPHMKKKRKLGAKYRKRFGAFEDLTVRLSKNLALQKVFPPDEKEAAILLMALSYGLLHGFPTDRYVNYLDL

SEQ ID NO: 40099 - protein, 391 aa, Glycine max
  Clone ID: 700999647_FLI.pep
GSICGCWFSPGPEGPSSFADVGNPVMALATFLAHLVGSDAAVASAHSSIKSMTRNSPGTELAARCCFLLEDPPDSKKEPTSSERDSKSEGDQDEVNVNQDKSTLEDKDLPTDHNNKKIESNALEDKGKPASADDGASEIPISSKEQAVVNNECGLDKCHDLNNAKLPNDQAPGTLHNSGGSTSKAEIPSSSDKAQEETLIEEPCPSVKDRHVSDSLPSETSKDAEMVSDAIPSTKSKPQNPESTNPAHESLETTDSVMDVDGVSNSLPLEKIDSQPLITSKSSQCNGTEKDVEVMSPSNPVRSNSSAENGPNTGAGKDNADNGAKVEDDGTKTKQDSSFEKVKRAAVSTLAAAAVKAKLLANQEEDQIRQLTSLLIEKQLHKLETKLAFFQ

SEQ ID NO: 40100 - protein, 123 aa, Glycine max
  Clone ID: 701000394_FLI.pep
CLSQHPNHILPIIEVQFHCTHELILAILGSMSLVPYNSSPQKPLQVSLQEMTGTSKTEVLLCFSKDVLSMPLLPQIKVIIFVSFTSIQGREKKEIWPNNATATTLTVPQTVSGLGVVQEGKER

SEQ ID NO: 40101 - protein, 327 aa, Glycine max
  Clone ID: 701001508_FLI.pep
CLNFPSFSLFLSPSHALGLTRTNSDPPPSHTQPAPPPDPTMSRASSAADSAASGEIILFGVRVVVDSMRKSVSMSNLSQYEHPQDGSNNKDALAAGYASADDAAPQNSGRLRERERKRGVPWTEEEHKLFLVGLQKVGKGDWRGISKNYVKTRTPTQVASHAQKYFLRRSNLNRRRRRSSLFDITTDTVSAIPMEGEQVQNQDTLSHSQQQSPLFPAETSKINGFPMMPVYQFGFGSSGVISVQGGNGNPMEELTLGQGNVEKHNVPNKVSTVSDIITPSSSSSAVDPPTLSLGLSFSSDQRQTSSRHSALHAIQCFSNGESIISVA

SEQ ID NO: 40102 - protein, 194 aa, Glycine max
  Clone ID: 701001570_FLI.pep
YSKFIHFYFIFLKKQSAYSLTRPTMGFPVGYPELLVPKMFLHALSLLAWLRSLVFALFRLLRISDLLDTDSAASDLPPPPPPREPTLSALLIREFLPVAAFRDLAAADGDPPPSGCAVCLSEFSSEEEIRCMANCKHIFHRWCVDRWVDHDQKTCPLCRTPFVPHHKLEEYNQRLWAASGVSQFYYQDDYTASL

SEQ ID NO: 40103 - protein, 339 aa, Glycine max
  Clone ID: 701002071_FLI.pep
GGQEKKSAEDNSRKERTPYISCAVEMISKTECRVHHRLDATVDAILAGKPPLFEIRQWDDSDNELPKYAPLPEENLGETSDLTNNNITSSDNEPSEDDKDHPRTWSTKWSTSGPVMTRSSPMQVYTYKILEADLLQVAKVMGLEDVIDVTDDIGTAEAILASSSEIRQNPWIRGVAKFHHVPVFVIKSNTMAQMVKAVRMILGLESFGPTPKKPLNECLDIEIEDDEPKRKPSLEEIDALEEVRLAIEYIVIPGGEAVELLPRRSEIIARQLELVQSYQLAAEKSGTDQNPRLQILPLRLNTKKASKSTVARKKTSPTSMSTGDSGNGTSVTRLPILPE

SEQ ID NO: 40104 - protein, 310 aa, Glycine max
  Clone ID: 701002166_FLI.pep
FQIQPRDTMSSSGTIWSYEEEKAFENAIAMHWIEESSKEQWEKIASAVPSKSMEDVKQHYQVLVEDVSAIEAGHISFPNYAASEEITSSNKDFHGSSKATSSDKRSNCNYGRGFSGLGHDSTTHSSGKGGLSRSSEQERRKGIPWTEEEHRLFLLGLEKFGKGDWRSISRNFVISRTPTQVASHAQKYFIRLNSMNRDRRRSSIHDITSVNNGDVANNQAPITGQHSSTIPSNTMGVGQSLKHRVQGHIPPGLGMYGTPVGHPVAAPPGHMASAVGTPVMLPPGPHPHAHPHPPYVLPLAYPMAPPTMHQ

SEQ ID NO: 40105 - protein, 295 aa, Glycine max
  Clone ID: 701002466_FLI.pep
ELPHQMDSVALDGQITEIVYKGTHNHPKPQAAKRNSLSASSLAIPHSNHGGINELPHQMDSVATPENSSISMEDDDFDHTKSGGDEFDNDEPDAKRWRIEGENEGMPAIESRTVREPRVVFQTTSDIDILDDGYRWRKYGQKVVKGNPNPRSYYKCTFPGCPVRKHVERASQDLRAVITTYEGKHNHDVPAARGSGNNSMNRSLPITNTTNNTSAATSLYTNNNSLQSLRPPAAPERTSSHFNPNMQQSSSGSFGFSGFGNPLMGSYTNQQSDNVFITRAKEEPGDDSFLDSFLC

SEQ ID NO: 40106 - protein, 101 aa, Glycine max
  Clone ID: 701002482_FLI.pep
NTSAEMAAIEKFLQLSDSVPCKIRAKRGCATHPRSIAERVRRTKISERMRKLQDLVPNMDKQTNTADMLDLAVEYIKDLQNQVEALSDNRAKCTCLHKKQQ

SEQ ID NO: 40107 - protein, 383 aa, Glycine max
  Clone ID: 701002748_FLI.pep
LIHRSSMESELKDLNSKPPNGNGNSVRDDRPLLKPEPPVSADSIADMEKKFAAYVRRDVYGTMGRGELPPKEKLLLGFALVTLLPIRVVLAVTILLFYYLICRVCTLFSAPTGEEEQEDYAHMSGWRRTIIVSCGRALSRLMLFIFGFYWIPESNSASQEDKSRQPEELRRPGVIISNHVSYLDILYHMSSSFPSFVAKRSVAKLPLVGLISKCLGCVYVQRESRSSDFKGVSAVVTDRIREAHQNESAPLMMLFPEGTTTNGEFLLPFKTGGFLAKAPVLPVILRYHYQRFSPAWDSISGVRHVIFLLCQFVNYMEVIRLPVYHPSQQEMDDPKLYANNVRRLMATEGNLILSDIGLAEKRIYHAALNGNNSLPSVLHQKDE

SEQ ID NO: 40108 - protein, 224 aa, Glycine max
  Clone ID: 701009432_FLI.pep
LHRVCFNSMAKPKAPRRTLESYSVKHISKTIRAGDCILMRPSDPSKPSYVARIERIEADARGANVKIHVRWYYRPEESIGGRRQFHGSKEVFLSDHFDVQSADTIEAKCTVHSFKSYTKLDAVGNDDFFCRFEYNSSTGAFNPDRVAVYCKCEMPYNPDDLMVQCEGCTDWFHPACIDMTVEEAKRLDHFFCESCSAEGQKKLQNSHSASRHSDTKVDTKRRRR

SEQ ID NO: 40109 - protein, 282 aa, Glycine max
  Clone ID: 701009713_FLI.pep
KDAPAYELLSEDEDWGPGKRKRREKESDAVDSLMTLHESENRHPNNEHNMTSKDSSSIKIKRHCFRIPRDAVERLRQVFAENELPPRSIREGLSKELGLDTEKVSKWFKNARYLALKNRKHQAEGVADQLQSITSTKNRLQKQENVDPLKSKTPKITRTHSQKDVKNVNGRKKMKSSNKKRQPEIPPPPGENGKKDFMEISDDVSLKKLLKKRKKRLINFTFGGDSQLAELEFERLSELKTKVDSMKQKLTAIQNYRVKGSPYSNEPSIVYVPTAVLREKVE

SEQ ID NO: 40110 - protein, 297 aa, Glycine max
  Clone ID: 701009968_FLI.pep
ERDEHSPRNNHVYGKEFQSMLEGLDEEGCVEEAGHHSEKKRRLNVDQVKALEKNFEVENKLEPDRKVKLAQELGLQPRQVAVWFQNRRARWKTKQLERDYGVLKANYGSLKLNFDTLQQDNEALLKQIKELKSRLVQEENNNNTESDVSVKEEMIATLQDSNPLCESAIPGSDSKELSYECFNKSDEVGGGSVFPVDFKDGSSDSDSSAILNEENNNHSPNNNAAISSCGVLQSHGLLSSPSSSSMNNCFQFQKQYQTTTQYVKMEEHNFLSADEACNFFSDEQAPTLQWYCSEEWS

SEQ ID NO: 40111 - protein, 75 aa, Glycine max
  Clone ID: 701010688_FLI.pep
GYGRLFLQVLSIFLVINFSICDWGCYMLLFPLNPFKRNLREICLKRSLWTREIKGIDLFIQGFFFFFFFLSHTKI

SEQ ID NO: 40112 - protein, 249 aa, Glycine max
  Clone ID: 701011736_FLI.pep
MVSRSLRPMISEGVAKEYQNIKHAVLSTPFTMDKHLAPNPQMELVGHSVVLTSPYSDAQHGQILTTYGQQVMINPQLYGMYHARMPLPPEMEEEPVYVNAKQYHGILRRRQSRAKAELEKKVIKNRKPYLHESRHLHAMRRARGNGGRFLNKKKLENYNSDATSDIGQNTGANPSTNSPNTQHLFTNNENLGSSNASQATVQDMHRVESFNIGYHNGNGLAELYHSQANGKKEGNCFGKERDPNNGAFK

SEQ ID NO: 40113 - protein, 385 aa, Glycine max
  Clone ID: 701012510_FLI.pep
NKLQHLRGVQRARKRFVGVRQRPSGRWVAEIKDTIQKIRVWLGTFDTAEEAARAYDEAACLLRGTNTRTNFWPCSQSSTSPALSSKITNLLLQRLKERNNNNTCSSSSSSSTSLLINHQQMHQQVGAYGEGSTQFSIDQFTDFLNDPEDYSTSNNDFINNSAQIDYITSSFESCLTEKDGGTKIDMQYKSRNVTPQTSSNDSNSGVEDSEEEGSDLGVQSTNLDVHDFKFLDNIAPPSYYSPFEMAEEMEEEPVEPENENYGDEPSMLRAVMKRMTYERKFSASLYAFNGIPECLKLKLESGNMKGRGLADQLTSLQMACSKNILEKNKEEKEYIGTMDRRQEEEHQQTSPDMDSSSVDGELLLWNSLDLPPICFVNLLENGSFN

SEQ ID NO: 40114 - protein, 120 aa, Glycine max
  Clone ID: 701013026_FLI.pep
FEVVTGMAKKQGKEKSSVSNHSSTKSKSNSKRGSESKYTKAMQSKDEDDEGVGVEEEDEDEHGETLCGACGESYAADEFWICCDICEKWFHGKCVKITPARAEHIKQYKCPSCSNKRARP

SEQ ID NO: 40115 - protein, 386 aa, Glycine max
  Clone ID: 701013076_FLI.pep
QELVNFYLKHKLLGDDPRVHVIPVIDLCDVEPWNVPVILASSSAIRFGDPDWFFFSPVDFKYLKSKRFNRTTKCGFWKATGKDRDIRTGDTDNTVIGTKKTLVYYQGRVSCGVKSNWVIHEYHAVTFHENQRTFVLCCLMKKPGKTTEGGTDPLICDEGEPSRSMVSDYENQPTAEGIASEGTFTGIEAIFQATPWAENCFSPIQQSPTLIEQEGASFPNYAFNNAYFRNEDNIMQTPFETTKEDEFLNLILADESIVINEENKHDFVNSSTQSESLKRVSCESSDTDAEVISKLDDNIVDISTACNDYPNSDEYYSSKRFKSSHDAVHGGICFLLSNLEANQEKNESMFQDSFWGTETSSCDSTLDKPLEINYIDISSSPFTPWR

SEQ ID NO: 40116 - protein, 342 aa, Glycine max
  Clone ID: 701013157_FLI.pep
LPSKYFHHQVDDHKVLMGSNGGSSNNNKVMEKPGQNQLVQQQQHPETLKCPRCDSSNTKFCYYNNYSLSQPRHFCKACKRYWTRGGTLRNVPVGGGCRRNKRVKRPITSPCSAAIDTASNSSNSSSAPTAAASLQPQIDTASTSNHINPLFYGLPSSSSDVNLPLFSRFGSRISSSGFDLQLNNALGLGFSSGVLSNEASDNNGYRSGFGSNNMLLSSYTSTTTTTPAMSSLLLQQKFISGGLKNDADSSNTFQHGLSLTSLEQLQIASDHSSEAGMVALKDVKVELGQNNNRLEWNGGAFQSQIQHVGLYDPLLYWNNSATALGVWNDQAANIGSSVTSLI

SEQ ID NO: 40117 - protein, 396 aa, Glycine max
  Clone ID: 701013183_FLI.pep
RAVLGKYAPGSTSPSCSSGHDQENRSSLDFYTGIFGLDKSRIMDTVNQAMEELIKMATVGEPLWLRSFETGREILNYDEYVREFAVENSSSGKPRRSIEASRDTAVVFVDLPRLVQSFLDVNQWKEMFPCLISKAATVDVICNGEGPGRNGAVQLMFAELQMLTPMVPTREVYFVRFCKQLSAEQWAIVDVSIDKVEDNIDASLVKCRKRPSGCIIEDKSNGHCKVIWVEHLECQKSAVHSMYRTIVNSGLAFGARHWIATLQLQCERLVFFMATNVPMKDSTGVATLAGRKSILKLAQRMTWSFCHAIGASSFHTWTKFTSKTGEDIRISSRKNLNDPGEPLGLILCAVCSVWLPVSPNVLFDFLRDETRRTEVPLSCLLSFSILLSILVNNLNG

SEQ ID NO: 40118 - protein, 215 aa, Glycine max
  Clone ID: 701013306_FLI.pep
QMVKPKSVEKPAEEQQQRSVSSYRGVRKRKWGKYVSEISLPNSRQRIWLGSYDSAEKAARAFDAAMFCLRGSGAKFNFPSDPPNIAGGGNMTSSQIQIAAARFANSEPRNERSDQPVESLTSDEETASFPVISDTDTSSPPLSDVTFQNDAELVTGSFPDMFSDFGSGDFVPDFSDFPSFDDFSRDFFLHELPGFNFGEENLDGLIIQDSFLWNF

SEQ ID NO: 40119 - protein, 249 aa, Glycine max
  Clone ID: 701013533_FLI.pep
AKSNLVKKPKTHPLTIQSQMGSISISSTKLCCGNNSSEKAAQISIPSDPIPIGGNTQPSTTSTNTNSGLESTESKLLSSMLGSSTISLSSEDSGVSESEDCVTGSNLTMEAAAVAAAWMSRGAHVTGLGSRSAISGKLRIADSPLMVRAATSWARAAISGVANVPSQIRDFLRGSRISDTHLPQLRFRTPWYTGCLLQSLGLLLCFWAWAFGPECCEGENVEEEEEEEEEEEVVVSEEVVACCVIVICK

SEQ ID NO: 40120 - protein, 195 aa, Glycine max
  Clone ID: 701013785_FLI.pep
VDKHILARQTGLSRSQVSNWFINARVRLWKPMVEEMYLEEEKEHQNDVASSEGGGINILGDQKPTQARLVRIDSECMSSIVNNPDDKNDTKSGKTIQNDNQMDAFGSVELDFWSYTHQYSSGHSGGVSLTLGLQQHGESGVSLAFPPAATQSSMFYPRDQIEDCQTVQYSLVDGKGQNMPYRNLMGTHLLHDHLV

SEQ ID NO: 40121 - protein, 192 aa, Glycine max
  Clone ID: 701014573_FLI.pep
FLQADDVADLEWVSHFVDDSLPELSILYPIHCSKKTRVWAEPESRLSPAQTVSKVPRKSRTEKPRKPNTRVWSSFTVFAGSVGFGELVTKKQKKKVEAQSGGAQSLRRCSHCQVQKTPQWRIGPLGPKTLCNACGVRFKSGRLFPEYRPACSPTFCGHIHSNNHRRVLEMRWKKQIAESVTGSDRKQLIPNY

SEQ ID NO: 40122 - protein, 218 aa, Glycine max
  Clone ID: 701036984_FLI.pep
YKKLLEHQAQEEMMAMNPSVLQRKPQQITLLSILQSSASSFRDSNNISYYHPHGSFSYSSSSLVSGNNSSANADSLFQAQESFMDPKCQFKDSSIFVSGGEATAMATATSCSSSDGSCNNQISHVMEPAEFGDASFVGGANNHIYSGEEDDNNTQKLMMFSNAGGSVSGWTGKQNGLLWEQNPLDYGLEEIKQLISTNNSCNNFLFDDKKTQERVTYY

SEQ ID NO: 40123 - protein, 375 aa, Glycine max
  Clone ID: 701037185_FLI.pep
NEPNNKYDVFLCLVGPDTRYTFAGNLYNALRRNRINTFFTEDNHHDELLLMNGDQISPFALRAIKESNLLIVVLSPNYASSPRNLDEFVAIVRCIKRKKQLLLPVFYKVERGEIMDAIFSGPDQQALCVFEERFGDYKERVNEWKDALLEVYGWTAMEYQNGSGYEYEFIREIVDIAKRRQRRRYDVFLSFRGRDTRHSFTGFLYKAFCREGFYVFMDDEGLEGGNQISPTIMGAIERSRLSIVVFSENYGYSTWCLDELSKIIECVKTRNQMVWPIFYNVEKSDVCNQTKSYGDAMTAQEKRFGKDSGKVHKGGLLCLKSPTWKESISGKISTNMNLSKGLWKRPLIYQVLAPMTATRKSQECQNARIGRLGAV

SEQ ID NO: 40124 - protein, 114 aa, Glycine max
  Clone ID: 701037510_FLI.pep
LTSFLGHIHQCCPKGCGVGRQMILSCCSRLGNICGYNLLGEICLCHVQANLKSQKKKKVEKFAALNLRLTFKVVNLVMNEILGPHAHGTSQQRCVKPYACDDVEKLSRSSLGSV

SEQ ID NO: 40125 - protein, 454 aa, Glycine max
  Clone ID: 701038558_FLI.pep
IIERGRRRRSNRRLNKPNRSSIRVQVRRRKAMSSGSSSSHSSEKEKEKQRVSRTSLILWHAHQNDAAAVRKLLQEDPSLVKARDYDNRTPLHVASLHGWIDVATCLIEFGADVNAQDRWKNTPLADAEGAKKSNVIELLQSHGGLSFGQNGSHFEPKPVAPPLPNKCDWEVEPTELDFSNSVRIGKGSFGEILKAHWRGTPVAVKRILPSLSEDRLVIQDFRHEVNLLVKLRHPNIVQFLGAVTDRKPLMLITEYLRGGDLHQYLKEKGALSPATAISFSMDIVRGMAYLHNEPNVIIHRDLKPRNVLLVNSSADHLKVGDFGLSKLITVQSSHDVYKMTGETGSYRYMAPEVFKHRRYDKKVDVYSFAMILYEMLEGEPPFASREPYEGAKYAAEGHRPHFRAKGYTPELQELTEQCWAHDMSQRPSFIEILKRLEKIKENLPTEHHWHLFTS

SEQ ID NO: 40126 - protein, 65 aa, Glycine max
  Clone ID: 701038718_FLI.pep
ITLYNPGGVEHHYIIGTIEKPAAYHFHAPFPQLQLLKLFLLGGHLPLARPGTNILILYFSLFFFL

SEQ ID NO: 40127 - protein, 163 aa, Glycine max
  Clone ID: 701038753_FLI.pep
DVKSETGSTSLKVLPPWMIKSGMVLTKEQRGEVKEEMKMDGTSISTSAQYLDDKKSTVDHDDKRNIQDEYIKAYYAALLKQQHELEAASKQELSNTLTANDPSSSASNRQVGMKSKLEEDDDGTEWEEAPVAGTGNENYKVDLNVQADDAPADDDEDVDWEEG

SEQ ID NO: 40128 - protein, 137 aa, Glycine max
  Clone ID: 701038893_FLI.pep
LLESWFFDSGECKPAALVSFIFLLFKNLRSCGLQVWLYNIGLGSLVYSVEKICDESGEDPNCSRSVTGNSIADHLVYYGVDMGSDEPSSCRIVMDSYVQNTNIKDSRGNLILSRDPATPLIKLSGEGDNQENPINVD

SEQ ID NO: 40129 - protein, 137 aa, Glycine max
  Clone ID: 701040550_FLI.pep
QNSESSEHLVGLSDDVGAGFISGHSTQPATSSELNVDRSVDLPPQDEIGNLGVSKVIRADQKRFFFDLGSNNRGHFLRISEVAGSDRSSIILPLSGLKQFHEIVGHFVEITKDRIEGMAVANVRTIDPPSKMNANLG

SEQ ID NO: 40130 - protein, 252 aa, Glycine max
  Clone ID: 701040606_FLI.pep
RKVHGQSKRILFSSITSLSTAKVTGTLSLATQACKALIIFIILILASFLLTLITFSITGLKRTGKSCRLRWLNYLRPNVRRGNITLQEQLLILDLHSRWGNRWSKIAEHLPGRTDNEIKNYWRTRVVKQAKQLKCDVNSKQFRDTLRFVWMPRMLERIRAQASSSAQAHQSSLISNSNTQAHSGLLSSALHAHAPSLSDSSASYNLMGADAGSCSSHSYYSDIAGNGFGGADLWTDQNICFLQHQLAHHDLF

SEQ ID NO: 40131 - protein, 170 aa, Glycine max
  Clone ID: 701040632_FLI.pep
IHKEIERQRRQEMATFYASLRSLLPLEFIKGKRSISDHMNEAVNYIKHMQKHIKELGAKRDELKKLSNHSNNMENNHEGLHTSCNFTVHEKNGIIGIEITSVFREEKPKISKLLQFLTEEGLEVVSFFSTEVNGRLLHSVQCEVNHSNSVDPSELRKKVSKAFSTFRCSD

SEQ ID NO: 40132 - protein, 187 aa, Glycine max
  Clone ID: 701040918_FLI.pep
ASANNNNASASLGVHRRRRRKKSEIKRRDPAHPKPNRSGYNFFFAEQHARLKLLHHGKDREISRMIGELWNKLKESEKTVYQEKAMKDKERYRVEMEDYREKLKMGPVISDAVPLQQRLPEPDTDMLDEAEGDSPQTPEESSSGGSDYEDYNKTAERGFDMDALPVIGMGAETSYLGSEEKLSKGGL

SEQ ID NO: 40133 - protein, 367 aa, Glycine max
  Clone ID: 701041472_FLI.pep
EFEFVDNKMGSSTNGGVPPGFRFHPTDEELLHYYLKKKVSFQKFDMDVIREVDLNKMEPWDLQERCRIGSTPQNEWYFFSHKDRKYPTGSRTNRATNAGFWKATGRDKCIRNSFKKIGMRKTLVFYKGRAPHGQKTDWIMHEYRLEDGNDPQGSANEDGWVVCRVFKKKNLFKIENEGGSTHKPDHQINNSSNTNARSYRENHYLLHQQQNPRNSSGLELDKPELALHYPPPHLQNPPYSLFQSQPLLQTQKPMVYDYSYTSDTPIMAKQLMTNPRDCESGSDGLRYQVSESGMEVGSCEPNQEMGTGRGEGINEWGVLDRLVTSHLAGNEDSSKGVRFEEANPQSVHQINQLSLRGEMDFWAYGKQ

SEQ ID NO: 40134 - protein, 130 aa, Glycine max
  Clone ID: 701041506_FLI.pep
FVLCSQGVLQVQYRERVPGEETRGACFGRSDDVDCNVRGGAPTLDSDRDAGEHFRGSGFGIRVNVSVELKKGELLGGFFFVVGKKKEVNRKIELRWWLQCKSDLIERKYYCAVIILLQGILIFSHKSLLT

SEQ ID NO: 40135 - protein, 402 aa, Glycine max
  Clone ID: 701041663_FLI.pep
CGICGDGGDLICCDGCPSTFHQSCLDIQMLPPGEWHCPNCTCKFCGIASGTSDKDDASVNILQTCILCEKKYHNSCTKEMNTLPNKINSSSLSFCGKECKELSEHLKKYLGTKHELEAGFSWCLIHRLDEDSEAACRGLTQRVECNSKLAIALTVMDECFLPVIDRRSGINLIRNVLYNSGSNFSRLSYSGFYTAILERGDEIIAAASIRFHGTKIAEMPFIGTRHIYRRQGMCRRLFSAIELALCSLKVEKLVIPAIAELTHTWTTVFGFTYLDESLRQEMKSLNMMVFPGIDMLQKLLVEQGNREGSEKMENGNNDFIKTKMGNRSDMGFSTPQGPRGSDDVSSNPANETNDECSDASQELYNQVLVDGIICSQSHSEEMMSDPISDKCDSPSRTSHSEL

SEQ ID NO: 40136 - protein, 300 aa, Glycine max
  Clone ID: 701041969_FLI.pep
LRWLNYLRPNIRHGGFSEEEDNIICSLYVSIGSRWSVIAAQLPGRTDNDIKNYWNTRLKKKLLGKHRKELQARNKGNGGILKQENSSSLLLQQNSAQQLHPCWPQIPVLPLSSPYTNQSPSFNDQDSIRKLLIKLGGRFSDDYQPILDGLNLQFPHGSNSLSSTQQIQEEQVHVGSSALGCMNSIGHNQVQFGQSNEYCAELVQGQGSFITTAIGEMVSSNDYSRRLLGGSLEFFYGEEMITDNKIMGACASSSCGQSTNWGETSSSLMYPSLVASNYEGVRQEMPRECAFQELSYPGAQ

SEQ ID NO: 40137 - protein, 378 aa, Glycine max
  Clone ID: 701042317_FLI.pep
RREVKTHYHHHHIIVMYSMDSSSSGSQFSQHPQLPPGFRFHPTDEELVVQYLKKKADSVPLPVSIIAEVDLYKFDPWELPSKATFGDQEWYFFSPRDRKYPNGTRPNRAATSGYWKATGTDKPILASHGHHNKVGVKKSLVFYGGKPPKGVKTNWIMHEYRLADSSSNSSSKPPSSASDHAHSGKKNSLRLDDWVLCRIYKKSNSTHLPRLPLMEQNKEISREISMLPMMSTLSMANDNNTPQDSKTASSRSTSYGPLGVENDDNFFDGIFGVDHQSMQQDVSDHSQQVSSKGNFPMKRELSSQFWNGTGSSSSSRQFHYDLNYAGNSTTVEEDNSFVSLLSHLPQNTTTFHPNALLGPVGNGVLRQQFQLPSMNWNT

SEQ ID NO: 40138 - protein, 247 aa, Glycine max
  Clone ID: 701042328_FLI.pep
VHEDTLKYMNDFELYDFVADSNFDQFINLIRGENEDANCDHFGSDLINDCFVNNQQQPLSSPANPFDQNNNNNNNDAVNVYDPSSTFSSFSCFDGELKGEGEEENDGEHSSGTTTTTTKNADGKLKLKTDRSKTLISERRRRGRMKEKLYALRSLVPNITKMDKASIIGDAVSYVHDLQAQARKLKAEVAGLEASLLVSENYQGSINNPKNVQVMARNISHPNCKKIMQVEHVSSGGKRVLSKNSVQ

SEQ ID NO: 40139 - protein, 302 aa, Glycine max
  Clone ID: 701042666_FLI.pep
ESRSYSEASLLPRLATWYKSKDVAQRILLSVECQMRRCSYTLGLGEPNLAGKPSLLYDLVCKPNEIHALKTTPYDERVENHENHALHATHQIAESWIHASRKVLERIADAVLSRTFEKAAEDCYAVERIWKLLAEVEDLHLMMDPDDFLRLKNQLSVKSSGGETASFCFRSKELVELTKMCRDLRHKVPEILEVEVDPKGGPRIQEAAMKLYVSKSAFEKVHLLQAMQAIEAAMKRFFYAYKQVLAVVMGSSEANGNRVGLSCDSADSLTQIFLEPTYFPSLDAAKTFLGYLWDNNDNNKWI

SEQ ID NO: 40140 - protein, 201 aa, Glycine max
  Clone ID: 701043082_FLI.pep
SGAMSESEKQRVTGKVKWFDDQKGFGFITTDDSGEEFFVHQSSIRSDGFRSLALGESVEFLIDSDPEGRTKAVDVTGPDESPVQGTRGGGGGGRGSYGGGGGRGGYGGGGRGGRGGYGGGGGGYGGGGYGGGGGYGGGGGGGGGGGCYKCGETGHIARDCSPRWGWRWKVRRWWGWRRKLLQLWGVRAFCQGLPFQCSLIQ

SEQ ID NO: 40141 - protein, 673 aa, Glycine max
  Clone ID: 701043122_FLI.pep
KVAMATRNLEKMASIDAQLRQLAPAKVSEDDKLIEYDALLLDRFLDILQDLHGEDLKETVQEVYELSAEYEGKHDPKKLEELGNLITSLDAGDSILVAKSFSHMLNLANLAEEVQISRRRRNKLKKGDFADENNATTESDIEETLKKLVFDLKKSPQEVFDALKNQTVDLVLTAHPTQSIRRSLLQKHGRIRNCLSQLYAKDITPDDKQELDEALQREIQAAFRTDEIRRTPPTPQDEMRAGMSYFHETIWNGVPRFLRRVDTALNNIGIKERVPYNAPLIQFSSWMGGDRDGNPRVTPEVTRDVCLLARMMAANLYYSQIEDLMFELSMWRCNDELRVRAEQLHRSSKKDEVAKHYIEFWKKVPPNEPYRVVLGEVRDRLYQTRERSRHLPSNGYSDIPEEATFTNVEEFLESLELCYRSLCACGDRAIADGSLLDFMRQVSTFGLSLVRLDIRQESDRHTDVLDAITKHLEIGSYQEWSEEKRQEWLLSELSGKRPLFGPDLPQTEEIRDVLDTFHVIAELPPDNFGAYIISMATAPSDVLAVELLQRECHIKHPLRVVPLFEKLADLEAAPAALARLFSIDWYRNRINGKQEVMIGYSDSGKDAGRFSAAWQLYKAQEELINVAKKFGVKLTMFHGRGGTVGRGGGPTHLAYSVSTSRHNPWITSCDSPR

SEQ ID NO: 40142 - protein, 364 aa, Glycine max
  Clone ID: 701043180_FLI.pep
SDIRAANELLKQIRQHSSPIGDASQRLAHYFANGLEARLVGDGTSTQGMYTFLSSKNNTFSELLKAYQVFSSSSPFKKFAYLFENTMIMKAAASAETVHIIDFGILHGFQWPMLIRLLSNREGGPPKLRITGIEFPQPGFRPTEKIEETGRHLANYCKRYNVPFEYNAISSRNWETIQLEALKIASNELVAVYCHQRFENLLDECTIEVNSPRNAVLHLIRKINPDIFTHSITNGSYNAPFFTTRFREALFHYSAISDKNDTVISRENERRLMVERELYGREIMNVIACEGSDRIERPETYKRWQVRNMKAGFKQLPLNEELMAKFRSKLKEYHRDFVLDENNNWMLQGWKGRILFASSCWVPA

SEQ ID NO: 40143 - protein, 248 aa, Glycine max
  Clone ID: 700565035_FLI.pep
EIEIVDKLISVPYVEMTLKLMERFGVSVEHSGNWDRFLVHGGQKYKSPGNAFVEGDASSASYLLAGAAITGGTITVNGCGTSSLQGDVKFAEVLEKMGAKVTWSENSVTVSGPPRDFSGRKVLRGIDVNMNKMPDVAMTLAVVALFANGPTAIRDVASWRVKETERMIAICTELRKLGATVEEGPDYCVITPPEKLNVTAIDTYDDHRMAMAFSLAACGDVPVTIKDPGCTRKTFPDYFEVLERLTKH

SEQ ID NO: 40144 - protein, 278 aa, Glycine max
  Clone ID: 701044385_FLI.pep
EIEKMGRKANCDNQYAMNRGPWSAEEDKILMNYVQVHGEGKWRELSKRAGLKRCGKSCRLRWLNYLKPDIKRGNISSDEEDLIIRLHKLLGNRWSLIAGRLPGRTDNEIKNYWNTYLRKKAEHKHDKIPSHNDNIPIKLRIESPGCSKNSFGNVLDPTKSPHPMRCTKVMMPVNDSVNTTNLITTSWDNHNPSSASMQLDDYNHCLTGVLQEFDISDLLMSYEDDFRFNGYACVEIPQHIFEDETCRLDDSLGEEAWYENWKNDPYFPQDQDMGFSSF

SEQ ID NO: 40145 - protein, 409 aa, Glycine max
  Clone ID: 701044439_FLI.pep
AEMFPSMIARAINLDVISNGMGGTRNGALQVMHAEVQLLSPLVPVRQVRFIRFCKQHAEGVWAVVDVSIEIGHDAANAQPVMSCRRLPSGCIVQDMPNGYSKVTWLEHWEYDENVVHQLYRPLLSSGVGFGAHRWIATLQRQCECLAILMSSSISSDDHTALSQAGRRSMLKLAQRMTSNFCSGVCASSARKWDSLHIGTLGDDMKVMTRKNVDDPGEPPGIVLSAATSVWVPVSRQRLFDFLRDERLRSEWDILSNGGPMQEMVHIAKGQGHGNCVSLLRANAVNANDSSMLILQETWMDASCSVVVYAPVDVQSLNVVMSGGDSAYVALLPSGFAILPDGHCNDNGCNGTLQKGGGGNDGGGSLLTVGFQILVNSLPTAKLTVESVDTVNNLISCTIQKIKASLRVA

SEQ ID NO: 40146 - protein, 109 aa, Glycine max
  Clone ID: 701044503_FLI.pep
AKLRNAQAKTKPQDRAIKHTAACSSSPSIFHLCFCFCFCFFNSPFLQHALLFRYLIPQALHRVLGPAGPPLQSGVLVVLQSAQHFLFTFNSSEDDDHSFRSIITNIIFT

SEQ ID NO: 40147 - protein, 167 aa, Glycine max
  Clone ID: 701044845_FLI.pep
RMDEKGARSSNTLLSCEDEMDLRRGPWTVDEDLTLINYIATHGEGRWNTLALSAGLKRTGKSCRLRWLNYLRPDVRRGNITLEEQLLILELHSRWGNRWSKIAQYLPGRTDNEIKNYWRTRVQKHAKQLKCDVNSKQFKDTMRYLWMPRLVERIQAAATAPVTTTVT

SEQ ID NO: 40148 - protein, 260 aa, Glycine max
  Clone ID: 701044954_FLI.pep
RELDCSYSVGMRFRMRFETEDAADRRFTGLIAGISDVDPVRWPGSKWRCLLVRWDDIEAARHNRVSPWEIEPSGSASNSSNLMAAGLKRNRIEMTSAKLEFPNPNGIQTSDFGESLRFRKVLQGQEILGVNTPPFDGINAQSPWLYELGRCYPGSNCSGIPPTGNNIRVPHPASDFSCNGIGFSESFRFQKVLQGQEILPSQPYGRALSIEEARANGRYGFYDGCQLLNSRKGWSAQSMTMLHICMHLLHLRKCHLHHLC

SEQ ID NO: 40149 - protein, 47 aa, Glycine max
  Clone ID: 701045076_FLI.pep
TSVRGCPARKHVERAVDDSNMLVVTYEGEHNHSQIASEVANVILESS

SEQ ID NO: 40150 - protein, 198 aa, Glycine max
  Clone ID: 701045693_FLI.pep
KLAPTMAPRDSRATAFAGPGPGPSPAHKEIRYRGVRKRPWGRYAAEIRDPGKKTRVWLGTFDTAEEAARAYDTAAREFRGAKAKTNFPTPSELILNNNIRSPSQSSTLDSSSPPSPPPPLDLTLTPLSVAVTVFPVARPVLFFDAFARADAMIAVSRREMCGFERPAADFRRNDSDSDYNRRVLLDLDLNVPPLPEVA

SEQ ID NO: 40151 - protein, 865 aa, Glycine max
  Clone ID: 701045907_FLI.pep
QSSESVWLKVAKMFPFGQKGQKIKGTMVVMQKNVLDINSITSVGGIVDQGLGFIGSAVDALTFAATKISIQLISATKADGGKGKIGKSTNLRGKITLPTLGAGEQAYDVNFEWDSDFGIPGAFYIKNFMQNEFYLKSLILEDIPNHGTIHFVCNSWVYNSKNYKTDRIFFANNTYLPSETPAPLLKYREEELKNVRGDGTGERKEWDRIYDYDVYNDLGNPDSGDKYARPVLGGSALPYPRRGRTGRGKTRKDPNSEKPSDFVYLPRDEAFGHLKSSDFLAYGIKSVSQDVLPVLTDAFDGNILSLEFDNFAEVHKLYEGGVTLPTNFLSKIAPIPVIKEIFRTDGEQFLKYPPPKVMQVDKSAWMTDEEFARETIAGLNPNVIKIIEEFPLSSKLDTQAYGDHTCIIAKEHLEPNLGGLTVEQAIQNKKLFILDHHDYLIPYLRKINANTTKTYATRTIFFLKDDGTLTPLAIELSKPHPQGEEYGPVSEVYVPASEGVEAYIWLLAKAYVVVNDACYHQIISHWLSTHAIVEPFVIATNRQLSVVHPIYKLLFPHYRDTMNINSLARKALVNADGIIEKTFLWGRYSMEMSAVIYKDWVFTDQALPNDLVKRGVAVKDPSAPHGVRLLIEDYPYASDGLEIWDAIKSWVQEYVSFYYKSDEELQKDPELQAWWKELVEVGHGDLKDKPWWQKMQTREELVEASAILIWIASALHAAVNFGQYPYGGLILNRPTISRRFMPEKGSPEYDALAKNPEKEFLKTITGKKETLIDLTVIEILSRHASDEFYLGQRDGGDYWTSDAGPLEAFKRFGKKLEEIEKKLIEKNKDETLRNRYGPAKMPYTLLYPSSEEGLTFRGIPNSISI

SEQ ID NO: 40152 - protein, 279 aa, Glycine max
  Clone ID: 701046215_FLI.pep
ERQSFTDEIEKLKHDKEQLLVELQKYQHEWQAYEIQMHSSKDRLEKLEQNQQKMVSSVSHVLQKPVISVNILPLTETMDRKRRLPRSGHFYDEASVEDAMETSQMLPRENADNTTVLTLNVERLDQLESSMAFWEAIVHDIGDTFVQIQSNMDFDESTSCADSPSISCAQLDVEVRPKSPGIDMNSEPTTAAVPEPVASKEQPAGTTVAATGVNDVFWEQFLTEDPGASETQEVQSERKEYDGRKNEGKPSDLNKFWWNKWNANNLPEQMGHVGQAEKT

SEQ ID NO: 40153 - protein, 236 aa, Glycine max
  Clone ID: 701046270_FLI.pep
HTEKERERERERSIADMGRAPCCDKANVKKGPWSPEEDAKLKSYIEQHGTGGNWIALPQKIGLKRCGKSCRLRWLNYLRPNIKHGGFSEEEDNIICSLYVSIGSRWSIIAAQLPGRTDNDIKNYWNTRLKKKLLGKQRKEQQAQARRVSNNQQKQDVKRETENLIVASEVMINQVPYWSSSEFSSVPMPVTNASSFQHYGLNNQTSLRSMMVNKLEGITFSQRSSSAATATIHQWM

SEQ ID NO: 40154 - protein, 56 aa, Glycine max
  Clone ID: 701046730_FLI.pep
PYLLICNLVCVHLMFQEKAPFVATAEKKKQEYEKTILAYNKKLVNTFYPILLTLIL

SEQ ID NO: 40155 - protein, 131 aa, Glycine max
  Clone ID: 701046755_FLI.pep
YYKCVAPGCPVRKHVERASHDMKAVITTYEGKHIHDVPLGRGNSSYSMNRNSLNNTSNNTNTSNVTAPAPIRPSALTNYSNSASFTNSLHDTKQPTSAGQEPFPMDLLLSPGSIGFSANDSFLQSFLSKNF

SEQ ID NO: 40156 - protein, 303 aa, Glycine max
  Clone ID: 701046813_FLI.pep
LFFLLSYVNSSLSMMALDMIDVVPRTRMEEENIAIQEAASAGLKSMEHLIRLLSPSSSLHNNLNNLNLNHLDCSEITGFTVSKFKQVINLLNRTGHARFRRSPPQAQAQAQTNPQPQPQIQQQGFSLDFVKPTILNSKPINKDETLTLSTTSSSFMSSVTNDASVSDGKIGPFLPPSAAKPPLSSAHRKKCRDAAAALSAKPSCHCSKKRKSRVKRTIRVPAISSKIADIPPDEYSWRKYGQKPIKGSPYPRGYYKCSTVRGCPARKHVERAQDDPKMLIVTYEGEHRHVLPLTSAAGVSFGH

SEQ ID NO: 40157 - protein, 311 aa, Glycine max
  Clone ID: 701046954_FLI.pep
NFSYGLLLSFVFYSFEIWIFFQGIGVVKQPMEGSKPPPPPPPPMLERRARPQKDQALNCPRCNSTNTKFCYYNNYSLSQPRYFCKTCRRYWTEGGSLRNVPVGGGSRKNKRSTPPAPPSAPAPTKKLSDLATPNFPQSASQDPKIQQGQDLNLAYPPAEDYSTVSKFIEVPYSTELDKGTTGLHQNPTSSSTTTSASSQLSAMELLKTGIAAASSRGLNSFMPMYNSTHGFPLQDFKPPHGLNFSLEGFENGYGGLQGIQEGPTGGARILFPTVEDLKQQVPSTNEFDQQNRSQEGSAHGYWNGMLGGGSW

SEQ ID NO: 40158 - protein, 154 aa, Glycine max
  Clone ID: 701047813_FLI.pep
KKKRRKMSGRVSGKVKWFNDQKGFGFISPDDGSDDLFVHQSQIKSDGFRSLAEGESVEFAIESESDGRAKAVDVTGPDGASVQGTRRGGDGGRSYGGGRGGGGGGYGGGGGYGGGGGYGGGGGYGGGGRGGGGGSCYSCGESGHFARDCPSSAR

SEQ ID NO: 40159 - protein, 92 aa, Glycine max
  Clone ID: 701050009_FLI.pep
NDQFVLDAYRKGDKLKFANHSPDPNCYAKVIMVAGDHRVGIFAKERICAGEELFYDYRYEPDRAPAWARKPEASGSKKEDGAPSSGRAKKLA

SEQ ID NO: 40160 - protein, 166 aa, Glycine max
  Clone ID: 701050091_FLI.pep
DLQSCGACSKLLTDRSAWGSQKFIASSDLSVVAVLVCGHVYHAECLETITPEADSYDPACPICMVGEKYMSKLSKKGLWTESETKTKNYKISRNRVVDSYVDGGNDVFDRLKDIVSKMEPSSSSTRSSFGKPFLRRHFSLGSKWSRSLLENDSARKKGFWARCRRD

SEQ ID NO: 40161 - protein, 342 aa, Glycine max
  Clone ID: 701050111_FLI.pep
VYEERERRSTALHSSEIGGGEILYALDFVDLIHGQHIDCGGSTMDPGSGGNSLGNNSNLASKQRLRWTHELHERFVDAVAQLGGPDRATPKGVLRVMGVQGLTIYHVKSHLQKYRLAKYLPDSSSDEGKKADKKETGDMLSNLDGSSGMQITEALKLQMEVQKRLHEQLEVQRQLQLRIEAQGKYLKKIIEEQQRLSGVLSETPGSGVAAVAPGDACQEPDNKTDPSTPDPEKAAKDRAPAKSLSIESFSSHLEPMTPDSGCHVGSPAESPKGERSAKKQRVIMDGVYSKPEMVLPHQILESSMSLYQQPNTVFLGQDQFDPSLGISTRSGEELDKVGGGNL

SEQ ID NO: 40162 - protein, 149 aa, Glycine max
  Clone ID: 701050604_FLI.pep
RKPTLSFPSSPTNGSPKAEKKPAEKSPQRRLRRRRTQAEKKISKEGGSEKKKKRTKKSVETYKIYIFKVLKQVHPDIGISSKAMGIMNSFINDIFEKLAQESSRLARYNKKPTITSREIQTAVRLVLPGELAKHAVSEGTKAVTKFTSS

SEQ ID NO: 40163 - protein, 489 aa, Glycine max
  Clone ID: 701051187_FLI.pep
KSASVQTVVCFPYQKGVIEIGTTELVTEDPSLIQHVKACFLEISKPTCSDKSSSVLDKPHDDKYPTCTKGDQRVLEAMALENPCSLEENIKFDHDPINELQDGNNEDSNMDSPDGCQHHFPMDGSMIEGINGVPSQVHFVNEALVIGAPDSLSSCDCMSEASENQGNDSKNVDQTQLMELQYCHKPKRSSMDVGADEDLCYIRTLCAILGNSSTFKPNPYAGNSNCKSSFAKWKKGRVSERKRPKLHQSMLKKTLFNVPFMHRSYSSLKSQKENGRMKWTSKLENANDGFMEKTFSDKKRENKNFHVVKPMVPSSISEVEKISILGDTIKYLKKLETRVEELESYMEVTDPEARIRRKCPDVPEQMSDNYGTRKICMGMKPWVNKRKACGIDEIDTELERIVSEESKVLDVKVNVKEQEVLIEMKCPYREYILYDIMDTINNLHLDAQTVESSTSDGVLTLTLKSKFRGAATAPTRMIKEALWKVSGNT

SEQ ID NO: 40164 - protein, 117 aa, Glycine max
  Clone ID: 701051411_FLI.pep
RSSSETFQCEFKGCSCTFSRKSNLDKHKKAVHFNVKPFACGFTDCGMRFAYKHVRDNHEKTAKHVFTLGDFEEADEEFRSRPRGGRKRTCPTVEMLIRKRVTPPSQLEHWLFMQDSE

SEQ ID NO: 40165 - protein, 154 aa, Glycine max; identical to SEQ ID NO: 40158
  Clone ID: 701051832_FLI.pep

SEQ ID NO: 40166 - protein, 253 aa, Glycine max
  Clone ID: 701051882_FLI.pep
LRHARRPQRNLRASPQRRIQSELILGTIARKANKNGDSGHDYLEDRVSFSEDKLMDSESKAVMMAWENPLMEAHAKAVCSGGGHVLNIGFGMGLVDSAIQRYAPASHTIVEAHPEVYERMLRSGWGQKENVKIVFGRWQDVLPQLETYDGIFFDTYGEYYEDLREFHQHLPALLKTGGIYSFFNGLCGSNAFFHVVYCHLVSLELENLGYSTQLIPLPVKDCLGEQVWEGVKQRYWQLDTYYLPVCQAIENPE

SEQ ID NO: 40167 - protein, 144 aa, Glycine max
  Clone ID: 701051886_FLI.pep
IYPGHDINIYIQVNQINILKFLIATTQRQTRRAKELSTTKLMRNPNPLPKSLTTETIEGPALPLESVNNVHSSDGLAASVLSIGDSVANDVLEEDLENTASFFIDETTDTLHATTSRQTPNRGLRDSLNVIPQNLTVPFRSSLS

SEQ ID NO: 40168 - protein, 105 aa, Glycine max
  Clone ID: 701051914_FLI.pep
ENVGAEDYYCRFEYKAATGAFTPDRVAVYCKCEMPYNPDDLMVQCEGCKDWYHPACVGMTIEEAKKLEHFVCSECSSDDDMKKPHATFSVSPGSDVKVEPKRRKR

SEQ ID NO: 40169 - protein, 137 aa, Glycine max
  Clone ID: 701051953_FLI.pep
AMARTKQTARKSTGGKAPRKQLATKAARKSAPATGGVKKPHRFRPGTVALREIRKYQKSTELLIRKLPFQRLVREIAQDFKTDLRFQSSAVSALQEAAEAYLVGLFEDTNLCAIHAKRVTIMPKDIQLARRIRGERA

SEQ ID NO: 40170 - protein, 423 aa, Glycine max; identical to SEQ ID NO: 39764
  Clone ID: 701052074_FLI.pep

SEQ ID NO: 40171 - protein, 107 aa, Glycine max
  Clone ID: 701052313_FLI.pep
SFRAHSQILQYARFTLLILLRQATNQNSQAGFGAVPQGQYAPTFAGGQPRPTGMAPQPLPLGGGDMPGFAGDDEETKRLRTERAGGWSGDISRKRALEEAFGSIWVC

SEQ ID NO: 40172 - protein, 196 aa, Glycine max
  Clone ID: 701052317_FLI.pep
QVQITMGRSPCCNKNGLKKGPWTPEEDDLIIRMHSLLGNRWSLIAGRLPGRTDNEIKNYWNTHLSKKLKIQGTEDTDTHKMLENPQEEAASDGGNNNKKKKKKKNGGKKNKQKNKGKENDEPPKTQVYLPKPIRVKAMYLQRTDSNTFTFDSNSASGSTSQEKEESPVTKESNVVSEVGNVGEEVMVLASSVRTMT

SEQ ID NO: 40173 - protein, 302 aa, Glycine max
  Clone ID: 701052693_FLI.pep
IIFSSPKFNSIIPSLVPIMDELEETLLTQIDWESFLDDIPELNVDDFLQDDNAVPVVTDNHSSPNDDPVLSEIENMLMTQAENDAVVLPETPSSEAGYYKLFEEILVEEPKEGPVSPPSKIESEEGSDKDKTDDAASDEPMSKKLKRQLRNRDAAVRSRERKKLYVKNLEMKSRYLEGECRRLGHLLQCCYAENNALRLCLQLRGIYGASMTMQESAVLLLEPLLLGSLLWCMGIICHLSLPLMLWVAAVLPRENIEQKGLRRVTQKGSESKISECFQMQSFLKSRKSRASRTKMKFNFIVF

SEQ ID NO: 40174 - protein, 235 aa, Glycine max
  Clone ID: 701053807_FLI.pep
GFSRGASVYRGVTRHHQHGRWQARIGRVAGNKDLYLGTFSTQEEAAEAYDIAAIKFRGTSAVTNFDISRYDVKRICSSSTLIAGDLAKRSPKESPAPVPASDFNSCGSSPMPLVSQPPPLAITDGEHSDELSNMMWNANNSDEQAQNESGGAEFNNNVTESSSSQQVSPSSNKDALNPQSPNEFGVSGADYGHGYFTLDGPKYDDGNNENDHMSTNRLGNLGLVNQVPMFALWNE

SEQ ID NO: 40175 - protein, 245 aa, Glycine max
  Clone ID: 701054134_FLI.pep
EPLGSSVYLRQRDILQKFYQESRGNGSYNVPTSSLSNSLTNPCKKKLYRGVRQRHWGKWVAEIRLPQNRMRVWLGTYDTAEAAAYAYDRAAYKLRGEYARLNFPNLKDPTKLGFGDSARLNALKSSVDAKIQAICQKVKRERAKKNAAKKLHNSTDPKRGQSEKPSSSSSPSPSPSPSIFNDNWANQLFSPAVSEDGFWKGENSHSPASVLTECQTEETELLFEGCSLARLPSFDPELIWEVLTV

SEQ ID NO: 40176 - protein, 210 aa, Glycine max
  Clone ID: 701054452_FLI.pep
AKCESFNASSGRTGGSIGEDPALDQFMEAYCEMLIKYEQELTKPFKEAMLFFSRIECQLKALAVSSDFGQSETSSQNEVDVHENNLDSQAEDRELKVQLLRKYSGYLGSLKKEFLKKKKNGKLPKEARQQLLDWWNRHYKWPYPSESQKQALAESTGLDLKQINNWFINQRKRHWKPSEDMQFAVMDATNYYMENVMCKPFPMDGMPMLL

SEQ ID NO: 40177 - protein, 266 aa, Glycine max
  Clone ID: 701054633_FLI.pep
WRTEIFSLSQHNLSLAIQNETTFVPPPSTARSVSMRDMGTEMTPIASQEPSRTGTPVRATTPMRSPNSSRPSTPPRASPASTLTDLHSDNLNLNMNELSEKELQMKTRREIMVLGTQLGKMNIAAWASKEEEDKDASTSLKTKAELPKSVVEARAAAWEEAEKAKYMARFRREEMKIQAWENHQKAKTEAKMRKIEVEVERIQGKAQDKLTNKLAAARHKAEEKRAAAEANRNHQAAKTEEQAEYIRRTGHVPSSYLSFSCCNWCS

SEQ ID NO: 40178 - protein, 120 aa, Glycine max
  Clone ID: 701054924_FLI.pep
QMGMAAESQFHVLAVDDSLIDRKLIERLLRTSSYEVTTVDSGSKALEFLGLCENDESNPSTPYVCPNNHQEVEVNLVITDYCMPGMTGYDLLKKIKESSSLRNIPVVIMSSENVPSRINR

SEQ ID NO: 40179 - protein, 381 aa, Glycine max
  Clone ID: 701055086_FLI.pep
IFTNLLHYMASSDPISSRHYTYNRKQKSLGLLCTNFLSLYNRDTVHLIGLDDAATRLGVERRRIYDIVNVLESIGVLSRKAKNQYTWRGFAAIPLTLQDLKEEGLKENSNSLRGPGNHDKVSDDEDDEETQSNPAATGSQSDKLNPNSTLPKPLKNENRREKSLALLTQNFVKLFVCSNVELISLDEAAKLLLGDAHNTSVMRTKVRRLYDIANVLSSMNLIEKTHTMDTRKPAFRWLGSEGKTWDETLHKSNLNDSRKRAFGSDITNISFERNKVELFTSGDLNPNPKKPRMENGSGLGEADENNLKQGIKQASKSYEFGPFAPACVPKVGASQNNNMKQVHDWGSLATAHSPQYQNEASPSLLQQGHCTVKASSCASFV

SEQ ID NO: 40180 - protein, 713 aa, Glycine max
  Clone ID: 701055386_FLI.pep
QSSESVWLKVAKMFPFGQKGQKIKGTMVVMQKNVLDINSITSVGGIVDQGLGFIGSAVDALTFAATKISIQLISATKADGGKGKIGKSTNLRGKITLPTLGAGEQAYDVNFEWDSDFGIPGAFYIKNFMQNEFYLKSLILEDIPNHGTIHFVCNSWVYNSKNYKTDRIFFANNTYLPSETPAPLLKYREEELKNVRGDGTGERKEWDRIYDYDVYNDLGNPDSGDKYARPVLGGSALPYPRRGRTGRGKTRKDPNSEKPSDFVYLPRDEAFGHLKSSDFLAYGIKSVSQDVLPVLTDAFDGNILSLEFDNFAEVHKLYEGGVTLPTNFLSKIAPIPVIKEIFRTDGEQFLKYPPPKVMQVDKSAWMTDEEFARETIAGLNPNVIKIIEEFPLSSKLDTQAYGDHTCIIAKEHLEPNLGGLTVEQAIQNKKLFILDHHDYLIPYLRKINANTTKTYATRTIFFLKDDGTLTPLAIELSKPHPQGEEYGPVSEVYVPASEGVEAYIWLLAKAYVVVNDACYHQIISHWLSTHAIVEPFVIATNRQLSVVHPIYKLLFPHYRDTMNINSLARKALVNAGLILNRPTISRRFMPEKGSPEYDALAKNPEKEFLKTITGKKETLIDLTVIEILSRHASDEFYLGQRDGGDYWTSDAGPLEAFKRFGKKLEEIEKKLIEKNKDETLRNRYGPAKMPYTLLYPSSEEGLTFRGIPNSISI

SEQ ID NO: 40181 - protein, 253 aa, Glycine max
  Clone ID: 701056241_FLI.pep
EKDEEVEDLSFDGSGLNYDSDDLTESNYNNVSEGNTGKNGGVSSNANSTVITGLDQKGKKKGMPAKNLMAERRRRKKLNDRLYMLRSVVPKISKMDRASILGDAIEYLKELLQRINDLHNELESTPVGSSLTPVSSFHPLTPTPPTLPSRIKEELCPSSLPSPNGQPARVEVRLREGRAVNIHMFCARKPSLLLSTMRALDNLGLDIQQAVISCFNGFAMDIFRAEQCKEGQDVHPEQIKAVLLDSAGYNGMM

SEQ ID NO: 40182 - protein, 137 aa, Glycine max
  Clone ID: 701056674_FLI.pep
KQKARVTERQRRQRIADNLKALHELLPNPAEGSQAYVLDDIIDYVKYLQLQIKEQSGSRLLQADSTAIPLVFHEGYGHYINQKMLNEPLEEIMGKLVEDDSAAAVQLLESKGLFLLPMALVDELSEAVQMFGGSALV

SEQ ID NO: 40183 - protein, 73 aa, Glycine max
  Clone ID: 701058294_FLI.pep
STLQVFNGVQLWRVELNCNFTTLVSQGGIKISKEISSGCCSLSLYTIGFFFIFIFFFLVLFKAKWNIVNPLHH

SEQ ID NO: 40184 - protein, 274 aa, Glycine max
  Clone ID: 701058303_FLI.pep
RSSATCATNTRPPSSAQPTKPPSATAATTVSTMPTNSPPNTNASLFSALLINNTLSAIFARREEPSRSVSKTERFSAKSVTCQFTLPTNTPLSTIGSFSLVLNSQLLPCFVHHKLPLIQTQPLLFLTFHIKLLHFIFSTTTTTNNNNNKVAVEGTGSTSASSISEYLIETLPGWQVEDFLDSYFVPFGFCKNDEVLPRLDADVEGHMGSFSTENMGIWVPQAPPPLVCSSQMDRVIVQSETNIKGSSISRLKDDTFTVPQISPPSNSKRARFLW

SEQ ID NO: 40185 - protein, 190 aa, Glycine max
  Clone ID: 701059308_FLI.pep
TMRVSTEKLETEPESKKIKRIRGGGGGDSSNKHPLYRGVRMRNWGKWVSEIREPRKKSRIWLGTFPTPEMAARAHDVAALSIKGSAAILNFPHFANSLPRPASLAPRDVQAAAAKAAHMDPSSLSSLVSAMDLSSASDELSQIIELPSLESTDDGSVVLEKEFVFVDSLDAWMYQPPFGFDTEQDTGFEV

SEQ ID NO: 40186 - protein, 184 aa, Glycine max
  Clone ID: 701059336_FLI.pep
TSFLSGATMAETRRSTGTVKWFNAHKGFGFITPQDGTDDLFVHFTSIRSDGYRSLSDGQSVEFLLDYGDDGRTMAVDVTSAVRSRLPGGFRGGGGGRGRGGGRYGGGEGRGRGFGRRGGGPECYNCGRIGHLARDCYHGQGGGGGDDGRNRRRGGGGGGGGGCFNCGEEGHFARECPNVGKGNE

SEQ ID NO: 40187 - protein, 283 aa, Glycine max
  Clone ID: 701059838_FLI.pep
ETLLSAFLPLLSFPKLMEGSVLERLDFGKMGYGCKHYRRRCRIRAPCCNELYFCRHCHNEATSMLSNPFDRHELVRQDVQHVVCSVCDTEQPVAQVCTNCGVRMGEYFCNICKFFDDDTGKKQFHCDDCGICRLGGRENYSHCSKCGCCYSNTLRDNHLCVENSMRHHCPICYEYLFDSLKDIAVMKCGHTMHSECYLEMLKRDKYCCPICSKSVMDMSRAWKRIDEEIEATVMPDDYRYRKVWILCNDCNDTTEVYFHILGQKCGHCSSYNTRAIAPPVLSQ

SEQ ID NO: 40188 - protein, 132 aa, Glycine max
  Clone ID: 701059890_FLI.pep
EAANMMKKIGLLEAAKRKFLGEGLGACSIEELQWIEQQLERSLSNVRTRKIQVFKEQIEQLKEKEKVLLDENVKLTENGRLSEKHGINLQTETKKQNVNQPQYNAGSPSSDVETELIIGLPDTRTRRIVHQV

SEQ ID NO: 40189 - protein, 242 aa, Glycine max
  Clone ID: 701060018_FLI.pep
NVNQPRHFCKNCQRYWTAGGVMRNVPVGAGRRKNKNFTSQYRQITVPEAALLSSQPDLPNGVSHPSLNCNATLLAFGSDTPLCESMTSVLNLAEKAVNNSTTNGFNGSEELEIPFAYVAGEKVNDDSNKSSDMSTKPMEGETTNRSQEQVIENCHPFPPHAPYFPGAPWPFPWNPALWNSPVPSPPAFFPQGFTMPLYPAAAYWGLTIPGAWSIPWLAQPSLPNSTVSNSGPDPIARTIAMS

SEQ ID NO: 40190 - protein, 452 aa, Glycine max
  Clone ID: 701060269_FLI.pep
LSSVAPPLSLRCWRTIRGKRLEGEPKKTIQKMENNAFRDQIMEDNEHEEMPDSFVCCVCLDLLYKPIVLSCGHMCCFWCVYNSMSCLRESQCPVCRNQYYHFPTVCQLLHFLLLKIYTAAYKRRESQTLEEEKKSGFYSPQFDPDTCESQAKFGHSGIPSSSSILNLTSNSCNVGTSECLEQSGSTANEGDEGTIFSNREPDIIGTPAKGKKLPQEELSLQQKLSVADVTCTMCKQLLFHPVVLNCGHVYCQICVINIDDEMLRCKVCQSPHPRGLPKVCLELDHFLEEQFPEEYGQRRDAIELQQIKVKPDTPSSCSLDGGKKPENTDWWSDPDSKVHIGVGCDFCGMFPIIGDRYRCIDCKEKMGFDLCGDCYASRSKLPGRFNQQHTSEHKFKLVQPNIIHNIMLRLATAQLGEGSIDLESIGNIEVTSDGAALFGDGEDNHNDSEAAN

SEQ ID NO: 40191 - protein, 67 aa, Glycine max
  Clone ID: 701060413_FLI.pep
LDAGWRCSMEHVCILLQEAENNQRIRSKGVGLFVTNKTCKSKSNQNSHMRSSKTNTLCVVQANTWCL

SEQ ID NO: 40192 - protein, 218 aa, Glycine max
  Clone ID: 701060463_FLI.pep
NTHFLKRTRIHFLSPNMARPQQRYRGVRQRHWGSWVSEIRHPILKTRIWLGTFETAEDAARAYDEAARLMCGARARTNFPFNPNVSHSSSSSSKLLSATLTAKLHRCYMASLQVTRQALASESQRTPPSVQNATTSTTTPISNNFSVKSEQTHAVLPHKRPEEEQESEANRGVKRVKAVENVPLQFKPLEEDHIEQMIEELLDYGSIELCSVISPQAL

SEQ ID NO: 40193 - protein, 129 aa, Glycine max
  Clone ID: 701060532_FLI.pep
IFSLWALSPLRLGGLNFTTDDVGNVLAISGLAILVFQLTLYRLVQKACGPVALVRIAGVLSIPLLQCYPLMTMLSGFTLDIVINIASILKNVLIEAIATSLFILQNKAVVNLWFLSSDFIYFQKLRFFL

SEQ ID NO: 40194 - protein, 153 aa, Glycine max
  Clone ID: 701060534_FLI.pep
DAVLRLIKNANPDIFVHGIVNGSYDVPFFVSRFREALFHYTALFDMLDTNVARQDPMRLMFEKELFGREIVNIIACEGFERVERPQTYKQWQLRNMRNGFRLLPLDHRIIGKLKDRLRDDAHNNNFLLEVDGDWVLQGWKGRILYASSCWVPA

SEQ ID NO: 40195 - protein, 186 aa, Glycine max
  Clone ID: 701060607_FLI.pep
DSSNRTRSYLQAMEERLRGTEIKQQQMMAFLARALKNPTFIQQLLQQKEKRKELEEAMSKKRRRPIERGPNHGVVGEESSSVKVESLVFGDEYGFGVSELEVLAMEMQGYGKGRREQEEEPDEALDQSQERLEKELDEGFWEELFSEGFEGELDTNPTNSQAQDEEEEDHVNVLANRFGYLGSSPK

SEQ ID NO: 40196 - protein, 159 aa, Glycine max
  Clone ID: 701060684_FLI.pep
LIQFFSPIIKNRPSPFPLHQPMAPPKAEKKPAEKKPAEKAPAEKKPKAEKKISKEGGSEKKKKRTKKSVETYKIYIFKVLKQVHPDIGISSKAMGIMNSFINDIFEKLAQESSRLARYNKKPTITSREIQTAVRLVLPGELAKHAVSEGTKAVTKFTSS

SEQ ID NO: 40197 - protein, 338 aa, Glycine max
  Clone ID: 701061002_FLI.pep
GIYYSPENCMNQDGCDSPPGMHKDPGMSSLEACQHQTLRSIGSHVNLRIKSFRVPELFIEVPETATIGSLKRTVMDAVTAVLGGELHIGVFLQGKQVKDDSKTLLQTGISHHNELDALGFTLEPNSSQSLPIVCASHSPRPKADITEPVIRYPSSPAVIHQRIQGNSDMLPEHQVTSLGRHFESDHDSAPSPVNASVDKNMKDSKELVTVPEMDEELAMVPVHQKPKRSEIVQRRIRRPFSVDEVEALVQAVEKLGTGRWRDVKLCAFDNAKHRTYVDLKDKWKTLVHTARISPQQRRGEPVPQELLDRVLVAHAYWSQQQTKSQHKHHPETETVFSF

SEQ ID NO: 40198 - protein, 288 aa, Glycine max
  Clone ID: 701061832_FLI.pep
IGKKKKMSQQQRSTPAPFLTKTYLLVDDPATDDVVSWSEGGNTFVVWKHADFAKDLLPKYFKHNNFSSFVRQLNTYGFRKTVPDKWEFANEYFKRGQTDLLAEIRRRKVVSPVTGKSTGGGVNISASHSGGDDMGSTSTGSMEAATAAGADISGENEKLKKDNEKLSGELALAKKQCEELVAFLRDSLNVSPDVIERIIRQGTCVSSNNDAVRFDAIINNDLDDDENAVGECEPQQPPPKGDNGESLKLFGVWLKGQNGKENSIGKCRKRGRQDYPIAATAKELKTLV

SEQ ID NO: 40199 - protein, 244 aa, Glycine max
  Clone ID: 701063373_FLI.pep
VRDDSKTLLQTGISHDNHLDALGFALEPNCSQNRSSACATTDSLCVPGADMHQPLIGYPSSRAVIHQRIQGFSNMLAEHQATSLGNLVESDHDSAPSPINTSGEKNLTDSKELITVPEMGMEALAVLPVHQKSKRTEIAPRRIRRPFSVAEVEALVQAVEKLGTGRWRDVKLHAFDNAKHRTYVDLKDKWKTLVHTARISPQQRRGEPVPQELLDRVLTAHAYWSQQQTKQQLKHHSTKPCLLL

SEQ ID NO: 40200 - protein, 130 aa, Glycine max
  Clone ID: 701063748_FLI.pep
CRSYYRCTSQKCGVKKRVERSFQDPTIVITTYEGQHNHHCPATLRGSAASMLSSPSFFGSSYMASSLPQDFLAQLVPSYSQINDHQSPMFHQNLSHNLHPQPQQQHQFQLSHDHGLLQDLLPSFPGKHEP

SEQ ID NO: 40201 - protein, 108 aa, Glycine max
  Clone ID: 701064513_FLI.pep
QGLLVKLRAMFSGTQEKCATCGKTAYPLEKVTVEGQAYHKSCFKCSHGGCPITPSNYAALEGILYCKHHFSQLFKEKGSYNHLTKSASVKRAAAATAAATTAASVPES

SEQ ID NO: 40202 - protein, 223 aa, Glycine max
  Clone ID: 701065109_FLI.pep
LNTRPKRRRAKSRKNKEEIENQRMTHIAVERNRRKQMNEYLSVLRSLMPDSYIQRGDQASIIGGAINFVKELEQRMHFLGAQKEGEGKSEAGGATNMPFSEFFTFPQYSTSGGGGCSDNSAAVGEDVGEVKCGIADIEVTMVESHANLKIRSKKRPKQLLKLVSGLHTMRLTILHLNVTTTGEVVLYSLSVKVEDDCKLGSVDDIAAAVYQMLDKIQQEAMLN

SEQ ID NO: 40203 - protein, 100 aa, Glycine max
  Clone ID: 701065557_FLI.pep
PDELSYEELLALSEVVGTESRGLSTDTIACLPSVNYKTGSDQHGSHDSCVICRVDYEDGESLTVLSCKHLYHPECINNWLKINKVCPVCSTEVSASGSNL

SEQ ID NO: 40204 - protein, 223 aa, Glycine max
  Clone ID: 701066326_FLI.pep
KSCRLRWINYLRPDLKRGGFTEMEEDQIIQLHSCLGNRWSKIASHFPGRTDNEIKNHWNTKIKKRLKLLGLDPLTLKPSEQKEKSVDDKKNIELQPNTSKGSEQGVENKSLDMHSTREVPKTEGKIEENKVTWDDTTGFFNNYEMLCSQLDLGSWMSQETKTSTSSYCSSSFSLDDSSNLSVGESSYLQENSLQQWVDGLDSILSWDSFNPLEKDFLFLDNRQ

SEQ ID NO: 40205 - protein, 179 aa, Glycine max
  Clone ID: 700566031_FLI.pep
MSNSQQNEIDLTGDGEERSNSLLANTRCSFCFPCCFGSRCHSVSVGFAWWERVRATSSWSETSPHSEAQPATGSSSGSWWSGGVRAFMKVREWSELAAGPRWKTFIRRFSRSRSGWARHAAGKYQYDPLSYSLNFDEGHNGYFDGDGYDGLRNFSARYAAPPPFKPVSSDSIQDAAVLG

SEQ ID NO: 40206 - protein, 154 aa, Glycine max
  Clone ID: 701067133_FLI.pep
ILGFRNGRWRKDQEGRRSRKGGGQEKKPVSRSVKAGLQFPVGRIGRYLKKGRYAQRVGTGAPVYLAAVLEYLAAEVLELAGNAARDNKKNRIIPRHVLLAVRNDEELGKLLAGVTIAHGGVLPNINPVLLPKKTERASKEPKSPSKATKSPKKA

SEQ ID NO: 40207 - protein, 110 aa, Glycine max
  Clone ID: 701067440_FLI.pep
AKQAVKTTPELTRSPSKAASMFSGTQEKCATCGKTAYPLEKVTVEGQAYHKSCFKCSHGSCPITPSNYAALEGVLYCKHHFSQLFKEKGSYNHLIKSASIKREANSVPQA

SEQ ID NO: 40208 - protein, 241 aa, Glycine max
  Clone ID: 701068223_FLI.pep
SLPKTAGLLRCGKSCRLRWMNYLRPDIKRGNITPEEDDLIIRMHSLLGNRWSLIAGRLPGRTDNEIKNYWNTHLSKKLRNQGTDPNTHDKLTEAPEKKKGRKKNKQKSTENNKGSEKTLVYLPKPIRVKALSSCIPRTDSTLTLDSNSATTASTSQEKVQSPEAETKEVNMVWGVSDNIGDNGGIGIFFGEDHDLVNSASYMECYSDDHDTLEKLYEEYLQLLNVEEKPDELDSFAQSLLV

SEQ ID NO: 40209 - protein, 107 aa, Glycine max
  Clone ID: 701068244_FLI.pep
LGINLATADTVIIFDSDWNPQNDLQAMSRAHRIGQQEVVNIYRFVTSKSVEEDILERAKKKMVLDHLVIQKLNAEGRLEKKEAKKGGSYFDKNELSAILRFGAEELF

SEQ ID NO: 40210 - protein, 156 aa, Glycine max
  Clone ID: 701068964_FLI.pep
CIYLQLSNYNSFEGVLYCKPHFDQLFKRTGSLDKSFEGTPKIAKPEKNLEEKPAAAKVSSMFGGSREKCAGCQKTVYPTEKVTVNGTPYHKSCFKCCHGGCVISPSNYIAHEGKLYCKHHHVQLIKEKGNLTQLEGDNEKSATNGKINGEEVSAET

SEQ ID NO: 40211 - protein, 238 aa, Glycine max
  Clone ID: 701070177_FLI.pep
KLTLQMALEALQSPTTATPSFSPFEETSLSYLETPWTKGKRSKRSRTEQQLQHPSCTEEEYLALCLIMLARGGAGSVSTAKPAVSDNNSAPLSAAKLSYKCSVCNKAFSSYQALGGHKASHRKLAGENHPTSSAVTTSSASNGGGRTHECSICHKTFSTGQALGGHKRCHYEGGNSAVTASEGVGSTHTGSHRDFDLNLPAFPDFSARFFVDDEVTSPHPSKKSRFNLTIPKIEIPQY

SEQ ID NO: 40212 - protein, 160 aa, Glycine max
  Clone ID: 701097023_FLI.pep
LSLSLSEMGEESQGIKLFGALITLKGGEVKKGEKGSEYERVEKRAEKIIPCPRCKSMETKFCYFNNYNVNQPRHFCKSCQRYWTAGGALRNVAVGAGRRKAKSPCHGAGDFMDGRAYETSEDENRFEMNQGHVAMPNTHFRQIFQAKRQRITSGAQHQGQ

SEQ ID NO: 40213 - protein, 210 aa, Glycine max
  Clone ID: 701097128_FLI.pep
ALLSDQFFLGLRITNSSKKLTLMAPRDINRSNVVVAGGSNPTRKEIRYRGVRKRPWGRYAAEIRDPGKKTRVWLGTFDTAEEAARAYDAAAREFRGAKAKTNFPTHAELTHAAARSPSQSSTLDSSSPPTPPLDLTLAAPLAAGGALVFPVARPVVFFDAFERAEVRASFDLPVAAFSDSDSSTVMDYERGSRRRVLDLDLNVPPPPEVA

SEQ ID NO: 40214 - protein, 371 aa, Glycine max
  Clone ID: 701097615_FLI.pep
EMERMFPPKKPSTMNSHDRPMCVQGDSGLVLTTDPKPRLRWTVELHERFVDAVTQLGGPDKATPKTIMRVMGVKGLTLYHLKSHLQKFRLGKQPHKDFNDHSIKDASALELQRNTASSSAMIGRNMNEMQIEVQRRLHEQLEVQKHLQLRIEAQGKYMQSILEKAYQTLAGENMASAATNLKSAIVPHHQGIPDMGVVMKEFGSPLGFSSFQDLENIYGGNQIDLQQNMEKPSLDHGFMPINESLCLGKKRSNNPYSGSGKNPLIWSDDLRLQDLGGPASSCLGPQDDPFKGDQIQIAPPGSLDRGASTDIDPMSEIYDSKPVLQSEEKKFDASSMKLERPSPRRAPLQPERMSPMISTGTMAQGRGSPFG

SEQ ID NO: 40215 - protein, 184 aa, Glycine max
  Clone ID: 701097644_FLI.pep
FILIIIIIFFHTFVRFCRRRRRRLFSRSLPTNSSAAASLDDPCLDPSVIKSLPTFTFSAATHRSLQDCAVCLSEFADGDEGRVLPNCKHAFHAHCIDTWFGSHSKCPLCRTPVLPATGSADTEPGSVSEAGEGCSSSSLPPPIGCPRKPLDINIIIEIPEVERGSDSVTGDQGFRWSLKRFCNV

SEQ ID NO: 40216 - protein, 108 aa, Glycine max
  Clone ID: 701097689_FLI.pep
INLIITDYCMPGMTGYDLLRKIKESKSLKNIPVVIMSSENVPSRINRCLEEGAEEFFLKPVQQADVNKLKPHLMKSRAKEEQDQPFNNKRKDMEEIHSPNKTRIKCSS

SEQ ID NO: 40217 - protein, 185 aa, Glycine max
  Clone ID: 701099318_FLI.pep
FKRPKHSTEPKVSKVLTRTDASDTGLYVRDGYQWRKYGQKVTRDNPSPRAYFKCSYAPSCPVKKKVQRSVEDPSVLVTTYEGEHNHGQQHQTAEISINSSSKSETPRPAVSPSAMNIRSSAAAGPIVTLDLVKSKVVDINAQKSSLQQFLVHQMATSLTRDPNFTAALASAISGRILDDTSVGKR

SEQ ID NO: 40218 - protein, 311 aa, Glycine max
  Clone ID: 701099536_FLI.pep
ADLSRNNSSESRSYSEASLLPRLATWYKSKDVAQRILLSVECQMRRCSYTLGLGEPNLAGKPSLLYDLVCKPNEIHALKTTPYDERVENHENHALHATHQIAESWIHASRKVLERIADAVLSRTFEKAAEDCYAVERIWKLLAEVEDLHLMMDPDDFLRLKNQLSVKSSGGETASFCFRSKELVELTKMCRDLRHKVPEILEVEVDPKGGPRIQEAAMKLYVSKSAFEKVHLLQAMQAIEAAMKRFFYAYKQVLAVVMGSSEANGNRVGLSCDSADSLTQIFLEPTYFPSLDAAKTFLGYLWDNNDNNKWI

SEQ ID NO: 40219 - protein, 123 aa, Glycine max
  Clone ID: 701100333_FLI.pep
KSHVEPSKPKAQEVPAKIPSQQVPSFTSSWAVDDLLELTDFESPDKVQKQSLEFGELEWLADVGLFGEQFPHEALAAAEVPQLPMTSSVGSHKAPKSLLSYKKPRIEVLDEDDDEHFTVPDLG

SEQ ID NO: 40220 - protein, 360 aa, Glycine max
  Clone ID: 701100427_FLI.pep
HWYFSYICGAPSSVFGKLNFFNSRGYQNLLVGFINLMEENLPPGFRFHPTDEELITCYLTRKVSDSSFTSKAIAVVDLNKCEPWDLPGKASMGKKEWYFFSLRDRKYPTGLRTNRATESGYWKTTGKDKEIFRAGVLVGMKKTLVFYRGRAPRGEKSNWVMHEYRLENKHHFGPSKDEWVVCRVFQKSLQVKRPQQTPSSQPESPCDTASMVNEFGDVELPNLINNIANSSGGLTNNISGQTCFNADLINSVNTNMNLAMNWPVASEVIQVPTLPSLPWPSGLLNPSISVNSLLLKALQLRSYQQREAATDHLIASYVPQGVSHVGTDLSSNLTASSSKVLECMPQQQQLEQPFNLDSIW

SEQ ID NO: 40221 - protein, 219 aa, Glycine max
  Clone ID: 701100860_FLI.pep
ESFRSLFRSIIQKVMEVYQPEAVVLQCGADSLSGDRLGCFNLSVRGHADCLRFLRSFNVPLMVLGGGGYTIRNVARCWCYETAVAVGVEPDNKLPYNEYYEYFGPDYTLYVDPSNMENLNTSKDLEKLRNTLLEQISRLPHAPSVPFQTTPPTLQLPEEAEENMDRRPKLRKWDGEDYDSDPEEGGKDNSKFSNITAHMRDIADEMEEEKPEEHPSSCS

SEQ ID NO: 40222 - protein, 204 aa, Glycine max
  Clone ID: 701101450_FLI.pep
ERFESKGKITLMAPRDSRATALIGPGPSLSPAHKEIRYRGVRKRPWGRYAAEIRDPGKKTRVWLGTFDTAEEAARAYDTAAREFRGAKAKTNFPTPSELILNNNNINARSPSQTSTLDSSSPPPPPPLDLTLTPLSSAVFPVARPVLFFDAFARADTMVAVSRRETCGFERPAADFRRGDSDSDYNRRILLDLDLNVPPLPEVA

SEQ ID NO: 40223 - protein, 271 aa, Glycine max
  Clone ID: 701102007_FLI.pep
ISIVVLSENFASSSWCLEELVKILECRETKKQLVIPIFYRMDPSDVRRQTGCYGESLAQHQYEFRSDSEKVRNWQEALTHVANLPGWRFSRYQYEYEFIEDIVRQAIVAIVPRYSIFLSFSGNDTRSFTGFLNNALCRSRYQTFMNDGDQISQSTNGVIEESRLSIIVFSENYARSSSCLDFLLTILECMKTKNQLVCPIFYKVLPSDLRHQRNSYGEAMTEHENMLGKDSEMVKKWRSALFDVANLKGFYLKTGYEYEFIDKIVEMASKI

SEQ ID NO: 40224 - protein, 110 aa, Glycine max
  Clone ID: 701102158_FLI.pep
EVFGLRRRRRRLFRRRGSTTAACGSGRGGSSRRRSATRRRTEQGFGWGRLRRRRTRRWRTTAPPTGWGRCKSKWGVKWQSVHVASSYWLAEVDSKTGVVFIKYNKYNTLL

SEQ ID NO: 40225 - protein, 368 aa, Glycine max
  Clone ID: 701103039_FLI.pep
EITFRFLSIVLSDPRPYSNHREWTRRIESLITHQIEIIAILCEDEEQNSDTRGTAPTADLSRNNSSESRSYSEASLLPRLATWYKSKDVAQRILLSVECQMRRCSYTLGLGEPNLAGKPSLLYDLVCKPNEIHALKTTPYDERVENHENHALHATHQIAESWIHASRKELERIADAVLSRTFREAAEDCYAVERIWKLLAEVEDLHLMMDPDDFLRLKNQLSVKSSGGETASFCFRSKELVELTKMCRDLRHKVPEILEVEVDPKGGPRIQEAAMKLYVSKSAFEKVHLLQAMQAIEAAMKRFFYAYKQVLAVVMGSSEANGNRVGLSCDSADSLTQIFLEPTYFPSLDAAKTFLGYLWDNNDNNKWI

SEQ ID NO: 40226 - protein, 131 aa, Glycine max
  Clone ID: 701103732_FLI.pep
SCCTGAMAFDVEYARWLEEHNRQTNELRAAINSHAGDIELRTIVDNFMTQFDDIFRLKGIAAKADVFHILSGMWKTPAERCFMWIGGFRSSELLPREKFLLSMFCKCFFWFENCFTNIWLNIDCIPCFPTI

SEQ ID NO: 40227 - protein, 364 aa, Glycine max
  Clone ID: 701104659_FLI.pep
TDTMVRLLIMAVYYIGDEAGSEGTDKKKSSGLMQKKGKWKSVSRAMMEKGFYVSPQQCEDKFNDLNKRYKRVNDILGKGTSCRVVENQSLLDSMDLSPKMKEEVKKLLNSKHLFFREMCAYHNSCGHGNNNAPQQGESGGEVSQPQAQPHHHQQQQQQPQQRCFHSSEVGNLGGSGVEGLRMLKVGNGEEGDDDSEDDDDSEDDSDEDEDDSGEGGSRGHVGHGHEDIEDENDGRSMRKRARKVGGVSMSPQLMQQLSAEVSGVFQDVGKSAWDKKQWMRSRIMQLEEQQISYHTQAFELEKQRLKWARFSSKKEREMETAKLENERRRLENERMVLLIRQKEFELMSLQHQQQQQHQQQHSST

SEQ ID NO: 40228 - protein, 411 aa, Glycine max
  Clone ID: 701105014_FLI.pep
NPYNLINITKMDAISCMDESTTTESLSISLSPTSSSEKAKPSSMITSSEKVSLSPPPSNRLCRVGSGASAVVDPDGGGSGAEVESRKLPSSKYKGVVPQPNGRWGAQIYEKHQRVWLGTFNEEDEAARAYDIAAQRFRGKDAVTNFKPLAGADDDDGESEFLNSHSKPEIVDMLRKHTYNDELEQSKRSRGVVRRRGSAAAGTANSISGACFTKAREQLFEKAVTPSDVGKLNRLVIPKQHAEKHFPLQSSNGVSATTIAAVTATPTAAKGVLLNFEDVGGKVWRFRYSYWNSSQSYVLTKGWSRFVKEKNLKAGDTVCFHRSTGPDKQLYIDWKTRNVVNNEVALFGPVGPVVEPIQMVRLFGVNILKLPGSDTIVGNNNNASGCCNGKRREMELFSLECSKKPKIIGAL

SEQ ID NO: 40229 - protein, 516 aa, Glycine max
  Clone ID: 701105054_FLI.pep
RKLAELGYNRNAKKCKEKFENVYKYHKRTKEGRSGKSEGKTYRFFDQLQALENNPAIHGKQSPTPPKPPPQTTALSATPVSIVVTTTTTTPSSIIMPLPLPPVSNNNNNTTVPSTTSLPMPQSILNITPPSTLNITIPSFPPSNPTTYFPTQTPNPTSNNNNNPPSTITPPSFPNFPADLLSNSSSSSTSSEETPTTEARGRKRKRKWKDFFERLMKEVIEKQEELQRRFLEAIEKREQERVVREEAWRMQEMQRINREREILAQERSIAAAKDAAVMTFLQKIAEHQQQETINLEPALNNNSITVVPQQPVPQATPTSTPTPQQAQTTTVPEAPQVQPLVPQLQQQQQIVVSNVEINKADNNGENLMMEASSSRWPKVEVQALINLRTSLETKYQESGPKGPLWEEISALMRKMGYNRNAKRCKEKWENINKYFKKVKESNKKRPEDSKTCPYFHQLEALYREKNKGEGQMKPESMMAPLMVQPEQQWPPQTTLVVPPEVTMGDTQNDPHGPAVP

SEQ ID NO: 40230 - protein, 287 aa, Glycine max
  Clone ID: 701105438_FLI.pep
IFRSQPALIKEVVQNIKYILGPNFQNLPNGNLVGMESSLEELEKCLRLESVNGVRVVGISGMGGIGKTTLARALYEKISDQYDFHCFVNDVNKIYQHSGSLGIQKQLLSQCLNDENLEICNVSKGTYMVSTMLRSKQGLIVLDNVNKDEQLCMFTGGRETLLHECFGEGSRIIIISRNEHILRTYGVNHAYQVRPLNQDKAVKLFCINAFHCNYIMSDYEWLKRDVLSHAQGHPLAIKVIGKSLFGRNVSQWRGTLVRLSDNKSKDIMDVLRISYDDLEEKDKEIFL

SEQ ID NO: 40231 - protein, 396 aa, Glycine max
  Clone ID: 701105705_FLI.pep
WIEHFIVKINEGQSKRIRCMEHKCNSICDDAVVRTLLSREHPHMAEKYERFLLESYIEDNKRVKWCPSTPHCGNAIRVEDDELCEVECSCGVQFCFSCLSEAHSPCSCLMWELWAKKCRDESETVNWITVHTKPCPKCHKPVEKNGGCNLVSCICGQAFCWLCGGATGREHTWSSIAGHSCGRYKEQEKTAERAKRDLYRYMHYHNRYKAHTDSFKIESKLKETIQGKIAISEEKDSTLRDYSWVNNGLSRLFRSRRVLSYSYAFAFYMFGDELFKDEMTDAQREIKQNLFEDQQQQLEANVEKLSKILEEPFETFSDDKVVEIRMQILNLSTIIDKLCQKMYECIENDLLGSLNLGIHSIAPYKSKGIERASELSVGWNNKVNNTGKCLLWVLFE

SEQ ID NO: 40232 - protein, 65 aa, Glycine max
  Clone ID: 701106089_FLI.pep
TENPCIWGKFLAYLKSYVAMGLGQGIPYKFLHNFVPLIMGLLLSLNLTLHAVSCEHGQELLLLFI

SEQ ID NO: 40233 - protein, 312 aa, Glycine max
  Clone ID: 701106549_FLI.pep
LFRYIFLAWAVKMSRTCSQCGNNGHNSRTCTDGGAAGSPRENGIMLFGVRVMTEANSSFRKSASMNNLSQYDAEFNAADAGYASDDVVHASGRTRERKRGVPWTEEEHRLFLLGLHKVGKGDWRGISRNFVKTRTPTQVASHAQKYFLRRHNQNRRRRRSSLFDITTDTVMESSTIMEEEQVPPETVAAPLPAAYPPSHYGAFAGAGFPIAPVVLPVSGERLTKPIRPTPILPVPPSSKMANLNLKEKASPTNLIEPLPLSLNLPSPTPRSQDQSSASSGHSSPSSSSSAAAFQAMSAAKFGSGGDSIISVA

SEQ ID NO: 40234 - protein, 173 aa, Glycine max
  Clone ID: 701106694_FLI.pep
EGASFPNYAFNNAYFRNEDNIMQTPFETTKEDEFLNLILADESIVINEENKHDFVNSSTQSESLKRVYCVSSDTDAEVISKLDDNIVDISTACNDYPNSDEYYSSKRFKSSHDAVHGGICFLPSNLEANQEKNESMFQDSFWGAETSSCDSTLDKPLEINYIDISSSPFTPWR

SEQ ID NO: 40235 - protein, 252 aa, Glycine max
  Clone ID: 701107524_FLI.pep
VLEVLEDFPSVQMPFEWLVQLVPPLKPRAFSISSSQSAHPNQVHLTVNVVSWTTPYKRKKKGLCSSWLAALDPCDVGIHVPTWFHKGLLPTPSPSLPLILVGPGTGCAPFRGFIEERAVQSRTNSTAPIIFFFGCWNEDGDFLYRDFWLSHSQNKGVLSEAKGGGFYVAFSRDQPQKVYVQHKMREQSQRIWNLLAEGAAVYIAGSSTKMPADVTSAFEEIVSYENEVSAEDAVRWIRALEKCGKFHIEAWS

SEQ ID NO: 40236 - protein, 472 aa, Glycine max
  Clone ID: 701108585_FLI.pep
WISDCLYARYEVDTDAFLSVLALQPIPNMDSVPTIVEVSSSKTCELLKSISALKVEPVENVASKLFVQCSRQKGLIKIYRHLLNYRKNVFNLCSLPNLEGMTYRQIRHRFQEAVVCGLYRSGKIYFHPNDGEILQQTDKVLFIGSLRDTNTKKPEVILDGKEGNHEIHNEEILEKDLEHAIELSKVRLANIVKRPNRSGSKGSDGNLGPKECILLLGWRPEAVEMIQEYDNYLGPESVLEVLSDTPLDDRINKASNINGHNKLKNVRVSHRIGNPMDYDTLKETILNIQNSLKNEDVPMSIAVISDRDWLLGDPAKADKLSAYSLLLAENICNKLGVKVQNLVAEIVDSKLGKQISRIKPSVTYIAAEEIMSLVTAQVAENSELNEVWKDVLNAEGDEIYVKDIALYMKEGENPSFSELSERAYLRREVAIGYVKNKKNVINPVPKSEPLSLEMTDSLIVISELEGEQPVVL

SEQ ID NO: 40237 - protein, 263 aa, Glycine max
  Clone ID: 701109042_FLI.pep
KMIIHLQALLGNRWAAIAAYLPQRTDNDIKNYWNTYLKKKLNKKLEAGSDQGSLLGGGHNNIGFSSVSQPMSRGQWERRLQTDIHMAKKALSEALSPNKASSSSSTLLAESNSNLSNENSTFYNSNTNKPTTTQSMCYASSADNIARLLKGWMKNTPKSASCAASAVTQNSCSSSEGITTTKGSTTSTSTVELSETFESLFGYESFDNYSSNSEFSPSLSPEATLFQDEGKPDITTGLIDMPFSLLEKWLLDVDAGSQEKLGF

SEQ ID NO: 40238 - protein, 198 aa, Glycine max
  Clone ID: 701109138_FLI.pep
KKKLARVSARRRMGKKKVEIKRIENKSTRQITFSKRRNGLMKKARELSILCDAKVALLIFSSTGKLYELCNGDSLAEVVQQYWDHLGASGTDTKSQELCFEIADIWSGSAFSQMIKRHFGVSELEHLSVSDLMELEKLTHAALSRIRSAKMRLMMESVVNLKKKIEALEKTNDVNNVVTRSIDCDQTDGVTHNLFPGL

SEQ ID NO: 40239 - protein, 169 aa, Glycine max
  Clone ID: 701109691_FLI.pep
RDLSLFFETKVQTLSSLGSISKSTTMSSTEAAATEKKGGRGKPKTSKSVSRSSKAGLQFPVGRVARYLKAGRYAQRVGSGSPVYLSAVLEYLAAEVLELAGNAARDNKKTRIVPRHIQLAVRNDEELSKLMGSVTIANGGVLPNIHQNLLPKKVAGKGKTEIGSASQEF

SEQ ID NO: 40240 - protein, 312 aa, Glycine max
  Clone ID: 701110007_FLI.pep
SIWSDFSSTRMLQNAFRMSLRGMKFFYWVKDSVCPLLQVVSSMPSCRLIKESLQRRISMNFDYYISASTDFVLLDETTLINIIKHPDLTVTSEEKVLNAILMFGMNAKQLFGWEVVDQLMENSKPELLFGERLQLIYDLLPFVRFPLLQYSLLEKLQHSSIGRHIPVFQNLVNEAINFVKCGLAESENEENVRFQHRRSSYRELQYICDGDDHGVLYFAGTSYGEHPWVNPLLAEPRKITITASSPHSRYTDPKVLVSRTYQGTCFAGPRLENGQNCSWWMVDLGQDHQVRNMPIVCVSKYFILVLAFDHAL

SEQ ID NO: 40241 - protein, 333 aa, Glycine max
  Clone ID: 701110131_FLI.pep
FLLPESTRWMDAEERFVRRSWRLARIGGIFQVVDHGVDQQLVAEMTRLAKEFFALPPDEKLRFDMSGAKKGGFIVSSHLQGESVQDWREIVTYFSYPKRERDYSRWPDTPEGWRSVTEEYSDKVMGLACKLMEVLSEAMGLEKEGLSKACVDMDQKVVVNYYPKCPQPDLTLGLKRHTDPGTITLLLQDQVGGLQATRDNGKTWITVQPVEAAFVVNLGDHAHYLSNGRFKNADHQAVVNSNHSRLSIATFQNPAPNATVYPLKIREGEKPVMEEPITFAEMYRRKMSKDIEIARMKKLAKEKHLQDLENEKHLQELDQKAKLEAKPLKEILA

SEQ ID NO: 40242 - protein, 164 aa, Glycine max
  Clone ID: 701117521_FLI.pep
RYRGKNMAEEHRCQAPRFCANNCGFFGSPATQNMCSKCYRDFQLKEQQSSNAKMVLNQSLVPSPPPAVISQPSSSSSAAVDPSSAVVDDAPRESEEVKAPQQNRCMTCRRRVGLTGFKCRCGMMLCGTHRYPEQHACEFDFKGMGREQIAKANPVVKGEKLDKI

SEQ ID NO: 40243 - protein, 72 aa, Glycine max
  Clone ID: 701117609_FLI.pep
RNSQGRGNSCKTPCNWNLSKEGLWMLLNFYSFFCCCAFVPDVIAIMKFLSIIFSCLFFKCCLCVYEMERGTL

SEQ ID NO: 40244 - protein, 589 aa, Glycine max
  Clone ID: 701118832_FLI.pep
TLLSNNMDNGCFSSSPRHDAFPAGLRVLVVDDDLTWLRILEKMLKKCLYEVTTCCLATEALKKLRERKEAYDIVISDVNMPDMDGFKLLEQVGLEMDLPVIMMSVDGETSRVMKGVQHGACDYLLKPIRMKELRNIWQHVFRKRMHEARDFESHEGFDFEGIHLMRNGSDHSDDGNLFAVEETTSIKKRKDADNKHDDKEFGDHFPTKKARVVWSVDLHQKFVKAVNQIGFDKVGPKKILDLMNVPWLTRENVASHLQKYRLYLSRLQKENDQKSSSSGIKHSDSPSKDLGSFSFLNTANKQQNDIATDSFSYSDGTLLIQMDATSYEGDLKGIVSEPTTEKRRASTSEIPDPKVQKSSQKSLNKPFTSVESSEANHAVFDCTIPTEYSWSEFPKGPLKEEQKTPVQLEDSLCQLPLHGTQHHIQIDQSQSIASINSNPSITEEEVAAKLETKPLYAGYESDYVNPVSSIGSAVEAFRSQSKSLMVSDQSSEPTFTSNLSLKTQGFNLDCISDLDFYQRNLLLGGEVASAPLDEDLNFFLLQSECYNMNFGLQNIDMSEYYDPRLTAEVPSHFYDSADYSSVDQSLFIA

SEQ ID NO: 40245 - protein, 214 aa, Glycine max
  Clone ID: 701119142_FLI.pep
QMVKSKSVEKPAEEQQRGGVSAYRGVRKRKWGKYVSEIRLPNSRQRIWLGSYDSAEKAARAFDAAMFCLRGSGANFNFPSDRPNIAGGRNMTPSQIQIAAARFANSEPRKECSGKPVESLTSIEETTSFPVNSDTDTSSPLSVVTIQNDTEVATGSFPGIFSGFGSGNFVPEFSDFPSFDDFGHDFFVHELPGFDYGEENLDGLIIQDSFLWNF

SEQ ID NO: 40246 - protein, 189 aa, Glycine max
  Clone ID: 701119350_FLI.pep
RSRSQAINQLLDFRTRLAKIPKDHYSKGGKLFQKINLFNLPLVPLRDKGGIPFLFGTRVSQPGPYRPIYYWMTLPKKVLSAFLYSLQLGFQTTLTFLNLVNFSYHPEFESVNGNSFVMFTTGCLMLVCKVTSSSIAPAEMLAMSMPMSISTLGDAAKVQFPCNDVSVFMPDTDSSFTREGLLKAISSLS

SEQ ID NO: 40247 - protein, 346 aa, Glycine max
  Clone ID: 701120037_FLI.pep
DTFGQRTSQYRGVTRHRWTGRYEAHLWDNSCKKEGQGRKGRQVYLGGYDMEEKAARAYDMAALKYWGPSSHINFPLENYQNELEEMKNMTRQEYVAHLRRKSSGFSRGASMYRGVTRHHQHGRWQARIGRVAGNKDLYLGTFSTQEEAAEAYDIAAIKFRGVNAVTNFDITRYDVEKIMESNNLLSSEQAKRKREMDDGTRSEATVNQKPSTYDHTQETILMQKRCKNQSEWKMVQFPCPQQLDQNQRIESCRTQPFSTDLDNMFRHQVEERSNMGTHLSNPSSLVTSLSSSREESPDKTSMPMLFGMPSTVSKLLANVDSWDLSSNLRTALSMPQMPIFAAWTDA

SEQ ID NO: 40248 - protein, 247 aa, Glycine max
  Clone ID: 701120968_FLI.pep
CCRRKRRVNMKIQCDVCERAPATVICCADEAALCAKCDVEVHAANKLASKHQRLLLQCLSSKLPRCDICQDKPAFIFCVEDRALFCQDCDEPIHSAGSLSANHQRFLATGIRVASSSNCTKDNEKSHLEPPTRNAQQVSAKIPPQQVPSFTSSWAVDDLLELTAFESPEKESLQFGELEWLTDVGIFGEQFAQEALAAAEVPQLPVTHNSSSVASYRTSKSYMSHKKPRIEVLNDDDDEYFTVPDLG

SEQ ID NO: 40249 - protein, 267 aa, Glycine max
  Clone ID: 701122936_FLI.pep
GGITALHMAALNGHVESVQLLLDLGASVSEVTVEDGTTIDLIGSGSTPLHYAACGGNQQCCQLLIAKGANLTAENANGWTPLMVARSWHRDWLEDILKTPPADPLQVLPSPYISLPLMSIVRIARECGWRTNDLAPCLDPCAVCLERKCTVAVEGCDHEFCTQCALYLCSTNSTSTTTTGPPGSIACPLCRHGIVSFVKLPEQDHYTREMQRTSNLSLTFCTCSSEVLGDSSDMTTPFCKPTSRDPKILPLQDHFAPLAAKGSPHSE

SEQ ID NO: 40250 - protein, 317 aa, Glycine max
  Clone ID: 701122944_FLI.pep
GPWSPEEDVILSRLVSKFGARNWSLIARGISGRSGKSCRLRWCNQLDPAVKRKPFTDEEDQMIVAAHAIHGNKWAAIARLLPGRTDNAIKNHWNSTLRRRGVGHDTIKLESGSFMEDVSLEKAKASSEDTLSCGDVSLKSSEGRDVSSMEIMDDKSDGKAQTEGQLHHEVKDPPTLFRPVARVSAFNVYHSFDGTQPSTSIPRSVSMQGPVLQSSKPDMEFYRALEGIFGDQSVPHQCGHGCCAAPNGRKSESSLLGPEFIEFSEPPSFPNFELAAIATDISNLAWLKSGLESSSVKIMGNTSGRVVSNGSQVHIGH

SEQ ID NO: 40251 - protein, 169 aa, Glycine max
  Clone ID: 701125040_FLI.pep
ESGGHTGNASGSNELSGCREQDRFLPIANVSRIMKKALPANAKISKEAKETVQECVSEFISFITGEASDKCQKEKRKTINGDDLLWAMTTLGFEDYVDPLKIYLHKYREMEGEKTAMMGRPHERDEGYGHGHGHATPMMTMMMGHQPQHQHQHQGHVYGSGSASSARTR

SEQ ID NO: 40252 - protein, 120 aa, Glycine max
  Clone ID: 701125331_FLI.pep
GRSTEGVVMGVPQPPPPSQHLYPQEIQLKLYQAFIFSIPILFSIILVLLFYLFYLKRRASSLSSPPLHILPSTTNSQTTYPYPSQPCRLDLTVQFLDKLPRILFHEDLRTGDSVWLPSTC

SEQ ID NO: 40253 - protein, 338 aa, Glycine max
  Clone ID: 701127164_FLI.pep
KKNKGIKFKFLDLIRSLLLIVLLMKRLGSSDTLGALMTICPPTDEHSPRNNHVYGKEFQSMLEGLDEEGCVEEAGHHSEKKRRLNVDQVKALEKNFEVENKLEPDRKVKLAQELGLQPRQVAVWFQNRRARWKTKQLERDYGVLKANYGSLKLNFDTLQQDNEALLKQIKELKSRLVQEENNNNTESDVSVKEEMIATLQDSNPLCESAIPGSDSKELSYECFNKSDEVGGGSVFPVDFKDGSSDSDSSAILNEENNNHSPNNNAAISSCGVLQSHGLLSSPSSSSMNNCFQFQKQYQTTTQYVKMEEHNFLSADEACNFFSDEQAPTLQWYCSEEWS

SEQ ID NO: 40254 - protein, 149 aa, Glycine max
  Clone ID: 701128502_FLI.pep
IPHGAKLHALIDACHSGTVLDLPFLCRMNRSGQYVWEDHRPRSGVWKGSSGGDIICFSGCDDHQTSADTSALSKITSTGAMTFCFIQAIEGGHGATYGSILTAMRTAIRNVGSGGGGSAIGGGDVVTSLLSMLLTGGSLSGVGGLRQVI

SEQ ID NO: 40255 - protein, 304 aa, Glycine max
  Clone ID: 701128657_FLI.pep
MLHNNNTDDDNNKTSTNTGLGYYFMESDHHHRNNNNNGSSSSSSSSAVKAKIMAHPHYHRLLAAYVNCQKVGAPPEVVARLEEACASAVTMAGDAAAAAGSSCIGEDPALDQFMEAYCEMLTKYEQELSKPLKEAMLFLQRIECQFKNLTISSTDFACNEGAERNGSSEEDVDLHNMIDPQAEDRELKGQLLRKYSGYLGSLKQEFMKKRKKGKLPKEARQQLLEWWSRHYKWPYPSESQKLALAESTGLDQKQINNWFINQRKRHWKPSEDMQFVVMDPSHPHYYMDNVLGNPFPMDLSHPML

SEQ ID NO: 40256 - protein, 324 aa, Glycine max
  Clone ID: 701129370_FLI.pep
VCRWVEDWEDNKIIICNRCQIAVHQECYGAKNVQDFTSWVCRVCETPDVERECCLCPVKGGALKPTDVEMLWVHVTCAWFRPQVVFQNHEAMEPAMGILKIPPNSFVKTCVICKQSHGSCISCCKCSTYFHVMCASRAGYTMELHSMEKNGTQVTRKLIYCAIHRVPNPDSVLVVHTPLGIFSPRTSLQNQKGCFRGSRLILSKNIELNESSTTENDLVEPLSAARCRVYRRSPNKRADVPIIHLLGGPSLHSLGAITQLNIFKDADESKVFTSFKERLHHLWETEKFRVCFGKSGIHGWGLFARRDIQEGEMVVEYTWCARKA

SEQ ID NO: 40257 - protein, 163 aa, Glycine max; identical to SEQ ID NO: 39900
  Clone ID: 701129793_FLI.pep

SEQ ID NO: 40258 - protein, 274 aa, Glycine max
  Clone ID: 701130443_FLI.pep
SLRCGTLECTSPVDFKYLKSKRFNRTTKCGFWKATGKDRDIRTGDTDNTVIGTKKTLVYYQGRVSCGVKSNWVIHEYHAVTFHENQRTFVLCCLMKKPGKTTEGGTDPLICDEGEPSRSMISDYENQPTAEGIASEGTFTGIEAIFQATPWAENCFSPIQQSLTLIEQEGASFPNYAFNNAYFRNEDNIMQTPFETTKEDEFLNLILADESIVINEENKHDFVNSSTQSESLKRVYCESSDTDAEVISKLVKIYQVQIILGRVSPFVSEVALDL

SEQ ID NO: 40259 - protein, 102 aa, Glycine max
  Clone ID: 701131931_FLI.pep
LMSLYLPFGSVSLDLHPTCSRNLVSRKCFAAHCSANFCSLLSASLLSPANCSLYSASILSNAAVCSSLRALIFASISSIFSLLRPAFSDSNCSSTLLNRHAA

SEQ ID NO: 40260 - protein, 352 aa, Glycine max
  Clone ID: 701132039_FLI.pep
AKLGYASDLAGSQELAEGSRATQALLTNYAQTPGQGMTPLRTPQRTPAGKGDAIMMEAENLARLRESQTPLLGGENPELHPSDFSGVTPKKKEIQTPNPMLTPSATPGAAGLTPRIGMTPTRDGFSFSMTPKGTPLRDELHINEDMNMHDSTKLELQRQADMRRSLRSGLGSLPQPKNEYQIVMPPVLEDAEEPEEKIEEDMSDRIAREKAEEEARQQALLRKRSKVLQRELPRPPTASLELIRNSLMRTDGDKSSFVPPTSIEQADEMIRRELLTLLEHDNGKYPLDDKVIKEKKKGAKRAVNGSAVPVIEDFQEDEMKEADKLIKEEALYLCAAMGHEDEPLDEFRERPP

SEQ ID NO: 40261 - protein, 186 aa, Glycine max
  Clone ID: 701132964_FLI.pep
ITEDETTLTASKEQQSEMMNGDKDNHGSEDDNSKEWLNLSIGGTTTLLSTAVPPATAKVFSCNFCMRKFFSSQALGGHQNAHKRERGAARRYQSQRSMAIMGFSMNTLTMCRSLGVQPHSLVHKPCRDGIMVAPSFHDAYARIGMAWTPFWTEDQADMVWPGSFRLVPKQPQSPQEPLKLDLDLRL

SEQ ID NO: 40262 - protein, 308 aa, Glycine max
  Clone ID: 701134208_FLI.pep
EHQQSHGDQNIIQQLKISGIRHRLASNDMAFFPANFMLQTPHQDDHQPPPSLNSIITSCAPQEYHGGGASFLGKRSMSFSGIELGEEANAEEDSDDGSQAGEKKRRLNMEQVKTLEKSFELGNKLEPERKMQLARALGLQPRQIAIWFQNRRARWKTKQLEKDYDLLKRQYEAIKADNDALQFQNQKLQTEILALKSREPTESINLNKETEGSSSNRSENSSEIKLDISRTPAIDSPLSTQQNNNNRTLFPSSARPTGVAQLFQTTPRPEIQCQKIDHMVKEESLSNMFCAIDDQSGLWPWLEQQHFN

SEQ ID NO: 40263 - protein, 530 aa, Glycine max
  Clone ID: 701134613_FLI.pep
PVSLVGISEIRTLVKLSNELGYLRWEKYPFECLPPSFEPDKLVELILPKSNIKQLWEGTKPLPNLRRLDLSGSKNLIKMPYIGDALYLESLDLEGCIQLEEIGLSIVLSPKLTSLNLRNCKSLIKLPQFGEDLILEKLLLGGCQKLRHIDPSIGLLKKLRRLNLKNCKNLVSLPNSILGLNSLEDLNLSGCSKLYNTELLYELRDAEQSKKIDIDGAPIHFQSTSSYSREHKKSVSCLMPSSPIFPCMRELDLSFCNLVEIPDAIGIMCCLQRLDLSGNNFATLPNLKKLSKLVCLKLQHCKQLKSLPELPSRIYNFDRLRQAGLYIFNCPELVDRERCTDMAFSWTMQSCQVLYIYPFCHVSGGVSPGSEIPRWFNNEHEGNCVSLDACPVMHDHNWIGVAFCAIFVVPHETLSAMCFSETERIYPDFGDILVDFYGDVDLELVLDKSDHMCLFLVKRMDFIYHFHLKHKYLGRLVLECDDEWKESYAEVKKYGYRWLYEEDIEGPSNPLARKSKFGGNEEKVSRREKR

SEQ ID NO: 40264 - protein, 142 aa, Glycine max
  Clone ID: 701136208_FLI.pep
LALSLCRWREKEGRGLWPENHGSEQDKDKDKKRPVSRSSRAGIQFPVGRIHRQLKQRVQANGRVGATAAVYLASILEYLTAEVLELAGNASKDLKVKRITPRHLQLAIRGDEELDTLIKGTIAGGGVIPHIHKSLINKAAKE

SEQ ID NO: 40265 - protein, 81 aa, Glycine max
  Clone ID: 701136703_FLI.pep
GGILEMHICQRENFIKHHDLLDSNKIDTLSLPKKMSMSFIFSCIFCQCSIRLHVDFFFLFQLTRIRAYPVPIYYIIILLAM

SEQ ID NO: 40266 - protein, 219 aa, Glycine max
  Clone ID: 700566262_FLI.pep
RIALGTARGLVYLHEQCDPKIIHRDVKAANILLDEDFEAVVGDFGLAKLLDHRDSHVTTAVRGTVGHIAPEYLSTGQSSEKTDVFGFGILLLELITGHKALDFGRAANQKGVMLDWVKKLHQDGRLSQMVDKDLKGNFDLIELEEMVQVALLCTQFNPSHRPKMSEVLKMLEGDGLAERWEASQRIETPRFRSCEPQRYSDLIEESSLIVEAMELSGPR

SEQ ID NO: 40267 - protein, 217 aa, Glycine max
  Clone ID: 701136723_FLI.pep
SIATRCFGAPIAAVTEQQKLPSFAYDSKIYERHDARTNKALARTFRDNQFLPNKSGIRSDASGQFSQSHLHDPIEGFVRNPPFAHGNEHLPRIHATKGHSSRVRLLSQQDKQLIPYQSPSRDDDAAPQRELYPNIANAGKNSHSTGHQIVGPENLHALPSVQVLHNNATWIEKKRKSDDAHDVEAHEMKIRKELEKQDNLRRKSEERTRKEMERQDR

SEQ ID NO: 40268 - protein, 181 aa, Glycine max
  Clone ID: 701138541_FLI.pep
MENNPSSSRVDRKFIERNRRNQMKALFRKLNSLVPHQRSKEAIPLPDQLEEATNYIKKLQINLEKMKDKKNMLLGNERPNERMNNDGRRVGLKSPRIEIQQMGSALEVVLITGLDSQFMFGETIRVLHEEGVDVVNASYKVIEDAVFHSIHCQDKEETANGAARISERLKNFIHDSSYNAF

SEQ ID NO: 40269 - protein, 319 aa, Glycine max
  Clone ID: 701138849_FLI.pep
ERIMGRTPCCDKKGLKKGPWTAEEDEILSSYIKKNGGHGSWRSLPRMAGLLRCGKSCRLRWTNYLRPDIKRGPFTLEEEKLVIQLHGILGNRWAAIASQLPGRTDNEIKNLWNTHLKKRLKSMGLDPKTHEPLASSTYPFHKAPASVSTRHMAQWESARLEAEARLSNESSRFSHNTTNNSNSDNNKTTDSDYFLRIWNSEVGEAFRNVHHHKADDDNNNNKITTNTPTSSCHSPLSTGSSSNKCESIATNADLASNAPEIITPSSIVKQEFEWGTRGSDSSSSNDMEDSSDTALQLLLDFPINNDMSFLEGNSFVCPL

SEQ ID NO: 40270 - protein, 197 aa, Glycine max
  Clone ID: 701139603_FLI.pep
AAEAYDIAAIKFRGFNAVTNFDITRYDVERIMESNNLLSSEQAKRKREMDDGTRSEATVNQKPCTTQETVLMQKRCRSQSEWKMVQYPSSQQLDQNPQRIECSRTESLSTALDNMFHHQVEESSNMGTHLSNPSSLVTSLSSSREESPDKTSLPMLFGMPSTVSKLLADVDSLDLSSNLRPSLSIPQMPIFAAWTDA

SEQ ID NO: 40271 - protein, 384 aa, Glycine max
  Clone ID: 701140084_FLI.pep
GTTTTTNFPISHYEKELEEMKHMTRQEYVASLRRKSSGFSRGASIYRGVTRHHQHGRWQARIGRVAGNKDLYLGTFSTQEEAAEAYDVAAIKFRGLSAVTNFDMSRYDVKSILESTTLPIGGAAKRLKDMEQVELSVDNGHRADQVDHSIIMSSHLTQGINNNYAGGGTATHHNWHNAHAFHQPQPCTTMHYPYGQRINWCKQEQQDNSDAPHSLSYSDIHQLQLGNNGTHNFFHTNSGLHPMLSMDSASIDNSSSSNSVVYDGYGGGGGYNVMPMGTTTAVVASDGDQNPRSNHGFGDNEIKALGYESVYGSATDSYHAHARNLYYLTQQQSSSVDTVKASAYDQGSACNTWVPTAIPTHAPRSTTSMALCHGATTPFSLLHE

SEQ ID NO: 40272 - protein, 176 aa, Glycine max
  Clone ID: 701141953_FLI.pep
TDKINLGEDCPVFDNLFEFCQIYAGGTIDAARRLNNQLCDIAINWAGGLHHAKKCEASGFCYINDLVLGILELLKYHARVLYIDIDVHHGDGVEEAFYFTDRVMTVSFHKYGDSFFPGTGDAKEIGEREGKFYAINVPLKDGIDDSSFTRLFKTIISKVVETYQPGAIVLQCGADS

SEQ ID NO: 40273 - protein, 496 aa, Glycine max
  Clone ID: 701142095_FLI.pep
FALKLILQIVRRCMGSPLVLKVTAGSLCGQPFEMWEKKKDRLQNQSKMEFSQTDLFCHLQRSLDALEDEFHIHEKVCFMDLGLFPEDQRIPVPALIDMWAELYELNNDGSNAMAIIHDLTTRNLINFIVTRKVSKDEDKYYNNHFVILHDLLRELAIRQSTEKPFEQDRLIIDITGNDFPEWWVGENQQGTIGQMFPCFSRMIRQKQLKVAARILCISTDETFNSDWRDMKPYNTEVLILNLHSSQYSLPCFTKKMKKLKVLIVTNYGFHRSEIKKFELLGSLSNLKRIRLEKVSVPSLCELKNLQKLSLRMCNTRQAFENCSIQISNAMPYLEEMSIDYCNDLITLPDGLCEISPLKKLSITNCHKLSALPQGIGKLENLEVLRLCSCSDLLEMPNSFEGLNKLSCLDISDCVSLTKLPDDIGELKKLKKLYMKGSKLGELPYSVHKFEQFKHEINVICDEETVTLWENFRAFPNLKIEIFREDIDLNWLHGVHS

SEQ ID NO: 40274 - protein, 328 aa, Glycine max
  Clone ID: 701142168_FLI.pep
PFDVFLCFNEAETRHSFTGTLYHALQSARFKTYMENGKLRRGDKIATAILTAMEASRISIVVFSPYFASSTCCLDQLVHIHRCMNTKNQLILPIFYDVDQSDVRDQLNTFGQAMLQHQHRFGKSSDKVLQWSSVLSHVANLTAFCFSSTGDQYEYQFVEEIVDWVTKTVPRNDVFLSFCGRDTRYSFTGFLYNALSRSGFKTYMNDDGDQISQSTIGKSRLSIIVFSKNYAHSSSCLDELLAILECMKMKNQLVWPIFYKVEPRDIRRQRNSYGEAMTEHENMLGKDSEKVQKWRSALFEAANLKGWTFETGYEYEVIEEIVERAIKI

SEQ ID NO: 40275 - protein, 419 aa, Glycine max
  Clone ID: 701143257_FLI.pep
ELSMTVDPSNTTAVHTAALQGHTEIVKLLLEAGSNLATIARSNGKTALHSAARNGHLEVVKALLGKEPVVATRTDKKGQTALHMAVKGQSLEVVEELIKADPSTINMVDNKGNTALHIATRKGRAQIIKLLLGQTETNGLVVNKSGETALDTAEKTGNSEIKDILLEHGVRSAKAIKAQPGTATARELKQTVSDIKHEVHYQLEHTRQTRRGVQGIAKRINKMHAEGLNNAINSTTVVAVLIATVAFAAIFTVPGQFADDPKVLPAGMTIGEANIAPQAAFLIFFVFDSIALFISLAVVVVQTSVVIIESKAKKQMMAIINKLMWLACVLISVAFLALSFVVVGKDQKWLAIGVTIIGTTIMATTLGTMSYWVIRHRIEASNLRSIRKSSMESRSRSFSVSVMSDSELLNNERKILYAI

SEQ ID NO: 40276 - protein, 276 aa, Glycine max
  Clone ID: 701144971_FLI.pep
VAKKERKKISRAETSIFNCILPLFPHQLIQVANMAFPDPSMSASPQRKMGRGKIEIKRIENTTNRQVTFCKRRNGLLKKAYELSVLCDAEVALIVFSSRGRLYEYANNSVKATIERYKKASSDSSGAGSASEANAQFYQQEADKLRQQISNLQNNNRQMMGDSLGSLTAKDLKNLETKLEKGISRIRSKKNELLFAEIEYMQKREIDLHNNNQLLRAKIAESERNHHNMAVLPGGSNYDSMQSSQQQFDSRGYFQVTGLQPNNQYARQDQMSLQLV

SEQ ID NO: 40277 - protein, 278 aa, Glycine max
  Clone ID: 701145669_FLI.pep
SSEYQNQFNFELVMKIHCDVCNKHQASFFCTADEAALCDGCDHRVHHANKLASKHQRFSLTHPSAKHFPLCDVCQERRAFVFCQQDRAILCKECDVPIHSANDLTKNHSRFLLTGIKFSASATPYDYSSPPPPPPPPPKRNPVLDSPSTPSPPKPGGNSLTNEEEPGFTGSSISEYLINSIPGMKFEDFLDSHSLPFACSKNSDDMLSLFGEGNMVSFSPGGFWVPQAPPSSVQMDRQSGYRETREGSIRSSFGDDNFIVPQMSPPSNVSNKRSRLLW

SEQ ID NO: 40278 - protein, 156 aa, Glycine max
  Clone ID: 701146294_FLI.pep
LGKEIKNESSYLYWAYKNNIPVFCPGLTDGSLGDMLYFHSFRNPGLIVDIVQDIRAMNGEAVHASPRKTGMIILGGGLPKHHICNANMMRNGADYAVFINTAQEYDGSDSGARPDEAVSWGKIRDSAQTVKVHCDATIAFPLLVAETFASRVKPPH

SEQ ID NO: 40279 - protein, 97 aa, Glycine max
  Clone ID: 701146987_FLI.pep
IPPNSILFCNLLMAPLFPSLGFNSFSHDEQMVKLWPWRVECTVVLIQAFVHAALATPSSALDSHRSVSHNISSGTRNPPLFASAWSLLFCSETKLQP

SEQ ID NO: 40280 - protein, 158 aa, Glycine max; identical to SEQ ID NO: 36952
  Clone ID: 701147142_FLI.pep

SEQ ID NO: 40281 - protein, 188 aa, Glycine max
  Clone ID: 701149088_FLI.pep
RMLSNRESARRSRRRKQAHLTELETQVSQLRSENSSLLKRFTDVSQKYNNAAVDNRVLKADVETLRTKVKMAEETVKRITGLNPMLHAITEMSSMAMPSFDESPSETSADAAVSVQEDPNHHRCQPTSNNGLGGISSIETVQQNVAAVVGGNKTGRTTSLHRVASLEHLQKRIRGGADSRGPPSNGEQ

SEQ ID NO: 40282 - protein, 411 aa, Glycine max
  Clone ID: 701150047_FLI.pep
SPRHLKRLQRLLSMTGEYSPRNILGGRWREYHGSNDWKGMLDPLDENLRREVVRYGEFVQAAYQAFHSDPAMSTEEPPHPQHVALPDRSYRMTKSLYATSSIGLPKWVDEVAPDLGWMTQRSSWVGYVAVCEDRREIARMGRRDIIISLRGTSTCMEWAENLRAHMVEMGDEEGKAKVECGFMSLYKTKGAQVASLAESVVEEVRRLIDLYRGEELSISVIGHSLGATLALLVADEISTCCPKVPPVAVFSFGGPRVGNKAFGDRLTAKNVTVLRIVNSQDVITRVPGIFVSEELEQKIRNVGGGVLEENTPLAYSHVGTELRVQTKMSPYLKPDADMACCHDLEAYLHLVDGFLASNCPFRSNAKRSLARLMQDQSANVKKLYTSKAKSLTVNLSRQGSMSMSSCLSSPS

SEQ ID NO: 40283 - protein, 224 aa, Glycine max
  Clone ID: 701150112_FLI.pep
GHYSLQASVGKTFAFSLGNCNIGQLARKWCCFCVSAMGRQPCCDKLGVKKGPWTAEEDKKLINFILTNGQCCWRAVPKLAGLKRCGKSCRLRWTNYLRPDLKRGLLTEAEEQLVIDLHARLGNRWSKIAARLPGRTDNEIKNHWNAHIKKKLLKIGIDPVTHEPLKKQAAASSQDSSSSPAEHLPQPGNNLDDQVKETEGILLNSEEIQVHHKLKILLGMIHFC

SEQ ID NO: 40284 - protein, 237 aa, Glycine max
  Clone ID: 701150368_FLI.pep
VVKMGKAPCCEKHGVRRGAWTPEEDQALVDYIQKHGHGSWRSLPKHAGLLRCGKSCRLRWINYLRPGIKRGPFTSEEESTIVQLHGMLGNRWASIASQLPGRTDNEIKNFWNTHLKKRLLRSCHSQRAKQLCVIPDQSIVKSESPSTRHMVQWESVRVETEARLSLESTMLNSWPTSKTCPDHFLTTLAFRGWKIFRMIQGKGRRSSESKPYLTTFIFIKIGVLFRCVIAGENQHWN
